United States Patent Application Publication US 2007/0054278 A1 - sequence listing, part 142

SEQ ID NO: 479345 - DNA, 201 bp, Homo sapiens
agtagagacagcatgagttgaagcctgctactcagaatccactgcaactaagagtgtgtgtgtgtgtgtgtgtgtgtgtgtgtgtgtgtgtgtatgtatgwgtgtatgtgtgtgttttctgcagttccagtcacagatctgcctgccacacagtggagccctctcttggactctgaatgcatagcccagcaaagccaagca

SEQ ID NO: 479346 - DNA, 201 bp, Homo sapiens
tacttttaataataaatattttacgtaacccggtattccaaaatatcatctcaacatgtaatcaaaattttaaaatactgatgagatattgtatattctatttttttttttttttttttttttttggtgctgtgcttttgaagcccagtgtgttttatgtattacagcacatcttggtttggacagaccacatagtggcca

SEQ ID NO: 479347 - DNA, 201 bp, Homo sapiens
cttagataccagtcctttgttagaaattcgagttttaagaatattttctccaagtatgcagtttgcctgttcaccatttttttttttttttttttgagacrgggtctagctcggtcacccaggctggcctgcagtggtgcaatctcagctcactgcaacctcaacctcctggattcaagcaattctcatgcctcagcctcc

SEQ ID NO: 479348 - DNA, 201 bp, Homo sapiens
ggcctccagaattgtgagacaatacatttctgctgtttcagacacccactttggggcgctttgttaaaaaaaaaaaattagccaggcacggtggtgcatgmctgtaatgccagctgtttgggtggccgaggcatgagaatcgcttgagcctgggaggcagaggttgcaataagttgagactcactataatccaggcatgtg

SEQ ID NO: 479349 - DNA, 201 bp, Homo sapiens
agtgataggtagctgggggcttatgttatgatcagctctacttttgtgtttgaaactttccacgataaaagtgtttacaaataaaaatgaatgccaagcayggtggctcatgcctgtaatcccagtgctttgggaggccgaggcgggtggatcacctgaggtcaggagttcgagaccagcctggccatggttcacacggtg

SEQ ID NO: 479350 - DNA, 201 bp, Homo sapiens
caaagcagtcagtggtacatgtgatcaatttgttttttgtatttctgggctacaaaatgtctcttaagtttcatcattggacctatcgagaaaggagaaawcaattgagttgtggagataaaagaaaattacacacacccatgcatgaccaggcaacagagtcccatgcctggggctaggctgggtggctggctgtgccat

SEQ ID NO: 479351 - DNA, 201 bp, Homo sapiens
gtcccagatgctaacaagggaccagcctccaaatgtcatggccactcacctagctctccaccatagatggaaaagtccttctccaagatgacccacttttsaatcctctgtgcattgttcatggcttcctggttcacagcattgatgccttgctggatggccttgtagaccagggggtcttgctgcttcacaatctcagtc

SEQ ID NO: 479352 - DNA, 201 bp, Homo sapiens
agatgctaacaagggaccagcctccaaatgtcatggccactcacctagctctccaccatagatggaaaagtccttctccaagatgacccacttttcaatcytctgtgcattgttcatggcttcctggttcacagcattgatgccttgctggatggccttgtagaccagggggtcttgctgcttcacaatctcagtcacggt

SEQ ID NO: 479353 - DNA, 201 bp, Homo sapiens
tcagggatggtcatcggggtctcatggcctggtccgtgtttggatagcctcagaaggacttctccatctcgacaggtggtccacagcctgggagtaactgsaaatagtcaccagagttgggtggcaaatgtttttatttatttaataactttggacggggggcggttggtgtctttttggacctaaggtgctgagagttga

SEQ ID NO: 479354 - DNA, 201 bp, Homo sapiens
ccgcccacctcagcctcccaaagtgctgggattacaggcatgagccaccacgcccggcccctgcgagatttttatactctgttcatgccaaagaaagcggratggggtctctctatgacacttctagccaatccaatgaaaaagttacttgcaacatccattttgctaatcataaccacgcctctggcatgcattggagag

SEQ ID NO: 479355 - DNA, 201 bp, Homo sapiens
tttatatgcattatatgtttcacaattttaaaaggccatgtagggttcagatgtggtgactcacacctgtaatcccagcactttgggaggctgagtcgggyggatcgcttgaggccaggagttcgagaccagcctggctggcatggtgaaaccccatctctactaaaaatacaaaaattagctgggcatggtggcgcgtgc

SEQ ID NO: 479356 - DNA, 201 bp, Homo sapiens
gcctcagcctcccgagtagctgggattacaggcatgcaccaccacgcctcgctaattttatatttttagtagagatggagtttctccatgttggtcaggckggtctcgaactcccgacttcaggtgatccgcccgccttggcctcccaaagtgctgggattacaggcatgagccaccgcgcctggcctattattatttttt

SEQ ID NO: 479357 - DNA, 201 bp, Homo sapiens
agacagcatgagttgaagcctgctactcagaatccactgcaactaagagtgtgtgtgtgtgtgtgtgtgtgtgtgtgtgtgtgtgtgtatgtatgtgtgtrtgtgtgtgttttctgcagttccagtcacagatctgcctgccacacagtggagccctctcttggactctgaatgcatagcccagcaaagccaagcaactga

SEQ ID NO: 479358 - DNA, 201 bp, Homo sapiens
catgtgacctcaagtggtccaatcataatgaagatgaagactttacctgggaattctgagacacagactgtgtatgtgaatgagtcaagatgtagctctargagctgctgaaccatctcaggactatgtgagaaagcaaggctggagcggagccaagaaatagagaaaggaaaatagagcctgggcacattctttgagccc

SEQ ID NO: 479359 - DNA, 201 bp, Homo sapiens
attttgctaatcataaccacgcctctggcatgcattggagagaaaagatggcagaagcccgtatagcagctggacaggagttttccagagagaagaagaarcagacattcaaggagcctggggcaggcaacagcttgggatgtctgagggatacaaaaagtccaggatggccagagtggggacccaagagagtatgatagg

SEQ ID NO: 479360 - DNA, 201 bp, Homo sapiens
gaagaccacaaacaacatcttatcaattcagatcagactttgctgccaaaaactcctgttttttggagctttttagatttgggaatactgacttataaacacacacacacacacacacacacacacacacacacactctttactttcagtaccaagtacatctttgtcttgggttgttcagtgttcaatctacataaccat

SEQ ID NO: 479361 - DNA, 201 bp, Homo sapiens
aagaccacaaacaacatcttatcaattcagatcagactttgctgccaaaaactcctgttttttggagctttttagatttgggaatactgacttataaacacacacacacacacacacacacacacacacacacactctttactttcagtaccaagtacatctttgtcttgggttgttcagtgttcaatctacataaccata

SEQ ID NO: 479362 - DNA, 201 bp, Homo sapiens
agaccacaaacaacatcttatcaattcagatcagactttgctgccaaaaactcctgttttttggagctttttagatttgggaatactgacttataaacacacacacacacacacacacacacacacacacacactctttactttcagtaccaagtacatctttgtcttgggttgttcagtgttcaatctacataaccatac

SEQ ID NO: 479363 - DNA, 201 bp, Homo sapiens
gaccacaaacaacatcttatcaattcagatcagactttgctgccaaaaactcctgttttttggagctttttagatttgggaatactgacttataaacacacacacacacacacacacacacacacacacacactctttactttcagtaccaagtacatctttgtcttgggttgttcagtgttcaatctacataaccataca

SEQ ID NO: 479364 - DNA, 201 bp, Homo sapiens
gttagtctcgatgatgagatataactaatgttaatatttatttctagtcaccaccctcaatttttttctctctcttttctcttttcttttccttccttccttcttttcttttcttttttcttttccttcttttcttttttcttttccttttcttttcttttcttttctttacttttattttccagacagggtctcactctg

SEQ ID NO: 479365 - DNA, 201 bp, Homo sapiens
ttagtctcgatgatgagatataactaatgttaatatttatttctagtcaccaccctcaatttttttctctctcttttctcttttcttttccttccttccttcttttcttttcttttttcttttccttcttttcttttttcttttccttttcttttcttttcttttctttacttttattttccagacagggtctcactctgt

SEQ ID NO: 479366 - DNA, 201 bp, Homo sapiens
ctcactgcaacctctgcgtcccgggttcaagtgattctcctgcctcagccctccaagtagctgggattacaggcatgtgccactacgcctggctaattttktggggttttttttagtagagatagagtttctacatgctggtcaggctggtctcaaactcccgacctcaggtgttccactcccaaagtgttggaattacag

SEQ ID NO: 479367 - DNA, 201 bp, Homo sapiens
gtcgttgctgttgttattattaatcttgagtcgaacaaacgagttcagatctcagggtctttatccaaccacagcatgattctggggaagacacttaaccyctattggtcccagattatcgtcaccatcattattacttgggatcatgatggcacctacctcaaagggctaccatgagcagtcaatgatatcatataggta

SEQ ID NO: 479368 - DNA, 201 bp, Homo sapiens
tagtctcgatgatgagatataactaatgttaatatttatttctagtcaccaccctcaatttttttctctctcttttctcttttcttttccttccttccttcttttcttttcttttttcttttccttcttttcttttttcttttccttttcttttcttttcttttctttacttttattttccagacagggtctcactctgtt

SEQ ID NO: 479369 - DNA, 201 bp, Homo sapiens
tttggggttccagtcattccaggtgtgcagaaaccatgctccacagcactgcaaagcaaaaaagcagggagtttaacaggattggcaaaggggctgtaggkatgaggccaactcttccatccactggtcatgtctgcctagaatcctaggatccattggtcatgcctgtcctgggcctgggaggagaggagagtggccggc

SEQ ID NO: 479370 - DNA, 201 bp, Homo sapiens
agatgtggacaatacatccaaagtataaaagcttgatttccctcatatgtaaagaaccctgaggaattaatcagaaaaagaccaaaacccaatgggaaagygggcaaaggacatgaatagataattatctgaaactgaaaaatgacttttaaaaagaagtaaacatgctcaaactcagtcctatgagaaatacaacagaaa

SEQ ID NO: 479371 - DNA, 201 bp, Homo sapiens
aaaatatgatgcagttttcacctttcaggttaagtaagatcaaaaaagctgacaatattgtctattatgaaaatgtgggaaaacaggtgctctcattcatygtggtaaaaatcaatgccacctctttcgaaaacacttatcagtaatcagacttaagatcacatggggtttggtttggttttgtcgcctaggctggagtgc

SEQ ID NO: 479372 - DNA, 201 bp, Homo sapiens
ctccactggggcacctgctttcacctcatgtgccatcttgtcttaagagtcaagaacagtgggagctctcagccaacctccaagacacccaattaaccaamtcatccatgaacccaaggtctatcccccacagaggatgcatggtcgctggttcatacggaaaccttgcagggttgctctgaaatgtacatgcatccactt

SEQ ID NO: 479373 - DNA, 201 bp, Homo sapiens
gtccttctccaagatgacccacttttcaatcctctgtgcattgttcatggcttcctggttcacagcattgatgccttgctggatggccttgtagaccaggsggtcttgctgcttcacaatctcagtcacggtggatgcctggctgcccagaccccgacagaagttgatggcctcgaagttcagcttgtccagaggttctcc

SEQ ID NO: 479374 - DNA, 201 bp, Homo sapiens
ctggttcacagcattgatgccttgctggatggccttgtagaccagggggtcttgctgcttcacaatctcagtcacggtggatgcctggctgcccagacccygacagaagttgatggcctcgaagttcagcttgtccagaggttctccgctcatctgattcatctcacactgcccccagacacctctgtcaccacccatgct

SEQ ID NO: 479375 - DNA, 201 bp, Homo sapiens
cttgctggatggccttgtagaccagggggtcttgctgcttcacaatctcagtcacggtggatgcctggctgcccagaccccgacagaagttgatggcctcraagttcagcttgtccagaggttctccgctcatctgattcatctcacactgcccccagacacctctgtcaccacccatgctccttgaccagcacccctccc

SEQ ID NO: 479376 - DNA, 201 bp, Homo sapiens
cttgaccagcacccctccccaggcccacagaccaagaagtgggtcttgaacccacagatgcatcctcttgaccctggggtggggccagggaacccaagacyggctgcagagacttcccccaatgacagcaaacccatgttaccttcagcgtcagcaacatgctcagaaacttcagtttatctcctactaacatggcgttac

SEQ ID NO: 479377 - DNA, 201 bp, Homo sapiens
tgcatgaaagaacacactgtctggtgcttgctttaaaactacccacgaggagtggggtgacacagaaatgaccaaggctgactttaagttggagccgagtsataggtagctgggggcttatgttatgatcagctctacttttgtgtttgaaactttccacgataaaagtgtttacaaataaaaatgaatgccaagcatggt

SEQ ID NO: 479378 - DNA, 201 bp, Homo sapiens
caggcacccgccaccacatctggctaatttttgtatttttagtagagatggggtttcaccatgtagcccaggctggtctcgaactcctgacgtcaagtgayccacctgcctcggcctcccaaagtgccgggattacaggcatgagccaccgcgcctggctccatctgattttttgatgcatttccaagtgagccaaagcta

SEQ ID NO: 479379 - DNA, 201 bp, Homo sapiens
actgagaaagaagagaacagggtttcctctggagacagttgttggtttgttgtgtgtttctcactaccacccagtaacgggcaagtgagagaaagtccaasagaccctcttggagaattgggtgtgtaaccttgcgtttgttcaactgaacctggtctactggggaggtggtagatggcaatggtagagtaggcagctgtg

SEQ ID NO: 479380 - DNA, 201 bp, Homo sapiens
tgcagttacagtagtgaataagacagaaaacccctgacctcaaggagctgatgttcctgataaacaaatgagcatataatatgacagtgtcaaaattttctaaggaagaaaaaaagtagccaaatgggaattaggtagtaatggggtggtttattgtttgctatttcaaacatggaagttagggagggcttcactgaggaa

SEQ ID NO: 479381 - DNA, 201 bp, Homo sapiens
gaaactaggagtcagaaataattcagatattgctttattcacttaatgctggacctgctagaaccaggacagaaatccacagcagccaggtgggtgtagargggaaggttgtgtatgtggcattttccagttatggaaaactcaaattaagccagcattcccagctggaagaaggaccccacccacccaccagcacccacc

SEQ ID NO: 479382 - DNA, 201 bp, Homo sapiens
gaacacactgtctggtgcttgctttaaaactacccacgaggagtggggtgacacagaaatgaccaaggctgactttaagttggagccgagtgataggtagytgggggcttatgttatgatcagctctacttttgtgtttgaaactttccacgataaaagtgtttacaaataaaaatgaatgccaagcatggtggctcatgc

SEQ ID NO: 479383 - DNA, 201 bp, Homo sapiens
aaaattcctgtttgcatctcacactggacaagcccaggggtcccaggcccagggtagcggctccttaaccctcaccatgaaccaagccaatgaccttaccyggctaggatggcaccaacagcagtgataaaccactctgcagagttaaaccccaggataccaactccgtggaaacgctccaaacccagctgggaaggaaaa

SEQ ID NO: 479384 - DNA, 201 bp, Homo sapiens
caagccaatgaccttacccggctaggatggcaccaacagcagtgataaaccactctgcagagttaaaccccaggataccaactccgtggaaacgctccaarcccagctgggaaggaaaaagcaaacagaaaaacaaaacataaacacagagatgttatatcattaggatatgtgacgacagaatcaaaggtagtcacatgg

SEQ ID NO: 479385 - DNA, 201 bp, Homo sapiens
gctaggatggcaccaacagcagtgataaaccactctgcagagttaaaccccaggataccaactccgtggaaacgctccaaacccagctgggaaggaaaaarcaaacagaaaaacaaaacataaacacagagatgttatatcattaggatatgtgacgacagaatcaaaggtagtcacatggaggccaggcgcagtggctca

SEQ ID NO: 479386 - DNA, 201 bp, Homo sapiens
agtctcgatgatgagatataactaatgttaatatttatttctagtcaccaccctcaatttttttctctctcttttctcttttcttttccttccttccttcttttcttttcttttttcttttccttcttttcttttttcttttccttttcttttcttttcttttctttacttttattttccagacagggtctcactctgttg

SEQ ID NO: 479387 - DNA, 201 bp, Homo sapiens
gtctcgatgatgagatataactaatgttaatatttatttctagtcaccaccctcaatttttttctctctcttttctcttttcttttccttccttccttcttttcttttcttttttcttttccttcttttcttttttcttttccttttcttttcttttcttttctttacttttattttccagacagggtctcactctgttgc

SEQ ID NO: 479388 - DNA, 201 bp, Homo sapiens
cctttcaggttaagtaagatcaaaaaagctgacaatattgtctattatgaaaatgtgggaaaacaggtgctctcattcatcgtggtaaaaatcaatgccayctctttcgaaaacacttatcagtaatcagacttaagatcacatggggtttggtttggttttgtcgcctaggctggagtgcagtgacacaatctcggctca

SEQ ID NO: 479389 - DNA, 201 bp, Homo sapiens
caccctcaatttttttctctctcttttctcttttcttttccttccttccttcttttcttttcttttttcttttccttcttttcttttttcttttccttttcttttcttttcttttctttacttttattttccagacagggtctcactctgttgcccaggctggagtgcagtggtatgatcataattcactgcagtctcaac

SEQ ID NO: 479390 - DNA, 201 bp, Homo sapiens
tacaaaaaaaattagccaggcatggtggcagacacctgtagttccaactacttgggaggtcgagtcaggagaatcccttgaacctgggaggtgaaggttgyagtgagccaagatagcaccattggactccagcctgggtgacagagcaaaactgtatctcaaaaaaaaaaaaataagtttaattttaaaaataagtaaagt

SEQ ID NO: 479391 - DNA, 201 bp, Homo sapiens
catctcacactgcccccagacacctctgtcaccacccatgctccttgaccagcacccctccccaggcccacagaccaagaagtgggtcttgaacccacagrtgcatcctcttgaccctggggtggggccagggaacccaagaccggctgcagagacttcccccaatgacagcaaacccatgttaccttcagcgtcagcaac

SEQ ID NO: 479392 - DNA, 201 bp, Homo sapiens
tgaggatgattagacagcaaaaaaagaaaagttaaactttaaattaaggccaccgtgacctattcaccctccacttcccatctcagaatctaaacatggtygccctcgagaggcctgcttgccctccacagacagtgccactgcagatgacaggcactcaccaccacccaacccaaaccagagaatttgcaacagaggagg

SEQ ID NO: 479393 - DNA, 201 bp, Homo sapiens
cccgccccccgccatttcccatctcccttcctcccatccataacatccttccacagctcccttccccgctctgaggagagtcgatactaacagctaccctmtccctgccctgggagacctggggtgggcagggaacccctccctgagaacctcagacccactcttccattgcatcctgtaggacccagtggaacctgacag

SEQ ID NO: 479394 - DNA, 201 bp, Homo sapiens
ggtagaacagggacttaccagcttcccaaagggatctactcaccattgccaaactcttcatttccacattttgtgtaggtgtcagggaaccccaaactggygttgctttggggtctctaaaggagattggctgacaccaccatttcccccagatccagattctctgagggaggttgtttcttgagagtagatccagagtgt

SEQ ID NO: 479395 - DNA, 201 bp, Homo sapiens
gctggctgagcatggtggctcacgtctataatcccaggacttttggaggctgaggcagaaggatcacatgagccctggagtttgagactggcctgggcatcatagtgagacccccatctctacaaaaagttaaaaaaaaattagtagccagatgtggtggcatgcacctgtggtcctagctacttgggaggctgaggtggg

SEQ ID NO: 479396 - DNA, 201 bp, Homo sapiens
gaggcaggagaattgcttgaaccccggaggcagaggttacagtgagccgaggtcctgctacagcactccaccctgggggacgaagcgagactcttgtctcrgaacaaaaaaaaaaaacagaaaaagaagggaacagacaaaagtccctgtcttagtggtggagcttatattctagctggagagacaaacaaacataataaa

SEQ ID NO: 479397 - DNA, 201 bp, Homo sapiens
acactttgtagcttttcttaacacaaaagcaccccttctctcctaacttgggctctgaatactttcccaacaggaagtctgatctgttgccagacttcttrgttagatggctcatacatttatctagagaagcacactcttgcttgctgtcaaactttagaacaccatggaaggtctaagggcatcctgtgccagggaaac

SEQ ID NO: 479398 - DNA, 201 bp, Homo sapiens
tgaggcccccagcccgccgacccggaaccacaacgccggcccggtgacagctcaaacccaccctctggcccttttctcccggttcctctccaaacctggtycaggcaccacgcccccttctcactgactagtgatcgccccttttgatgtccaggcctgcctttttggtgacctctgaccctgggcctagtgggattgatc

SEQ ID NO: 479399 - DNA, 201 bp, Homo sapiens
ttttatttacattttatatttttgtacatattgttagggtcattttttttttctttgagacggagtctagctctgtcgccaggctcaagtgcagtggtgcsatcttggctcaccgcaagctccacctcctgggttcaagtgattctcctgcctcagcctcctgagtagctgggattacaggcgcccgccaccacacccagc

SEQ ID NO: 479400 - DNA, 201 bp, Homo sapiens
agtgttccacattcccctcaaattcccttttggtgtgctggcattgccatggtgctgctcctgcaagttctcaggaggaactgtggtgtcagggagcagargtttggggttggggtatagtggctgggaggaggggtgcaaagtatgtctcctaacgcttaccctgcctatgtcccctccactgccagctccagcaaggaa

SEQ ID NO: 479401 - DNA, 201 bp, Homo sapiens
ctttcccaacaggaagtctgatctgttgccagacttcttggttagatggctcatacatttatctagagaagcacactcttgcttgctgtcaaactttagamcaccatggaaggtctaagggcatcctgtgccagggaaactttttaaggaattttatctatgggataaaccccatattccctctagtgtctactggtggct

SEQ ID NO: 479402 - DNA, 201 bp, Homo sapiens
aaaattagctgggtgtgatggcaggtgcctgtaatcccagctgtttgggagtctgaggcaggagaatcactagaaccgggaggcggaggttgcagtgagcygctgaaattgtaccactgcactcctgcctgggcgacagagcaagactccttcttaaaaaaaaaaaaaaaaaaaaatagcgccaggtgtggtatctcattc

SEQ ID NO: 479403 - DNA, 201 bp, Homo sapiens
ccagaggaacccagggtcctcgttggcccggctgggaccattccactgccccagaataccagggggccatgacagcacccactgacagtaagagctcactycccttggctgcccttctcctgcatctcccaggcccccagagtctccccttcgatctttctccctagctctgtgtttggcctactccttctggctttcctc

SEQ ID NO: 479404 - DNA, 201 bp, Homo sapiens
caaggatgcagagtaaccgccatgttgtttatattctcaaagacagttcagcccgaccgtgagtgccacatgctcttccatcccatacttaattccttccytcctcagcccttcccccatctttgactatctcttgcagatagataccactagcctgttcattattttccccgtcctacagggctggaaaaggagccatta

SEQ ID NO: 479405 - DNA, 201 bp, Homo sapiens
tcctgaactcatggcctcaagtgatgtgcccacctcagcctcccaaaagtgctgggattacaggtgtgagccaccgcacacaacccttatgcctaattttyttttgagacagagtcgctctgtcacccaggctggagtgcagtggcacgatctcagctcactgcaagctccgcctcccaggttcacggcattctcctgcct

SEQ ID NO: 479406 - DNA, 201 bp, Homo sapiens
tcctagtacttagggaggccgaggtgggtggatcacttgagcccaggagttcgagactagcctaggcaacatggtgaaaccccatctctacaaaaaacacwaaaattagccaggtgtagtggcacgcacctgtggtcccagctacttgggggtctgaggcaggaggattgcttaagcccaggaggtcgaagctgcagtgag

SEQ ID NO: 479407 - DNA, 201 bp, Homo sapiens
cccaccccttggaaccctgctgaattttttatttatttatttatcctttgagacggagtctcattctcttgcccaggctggagtgcagtggcacgatctcrgctcactgcaacctccgcctcctgggttcaagcgactctcctgcctcagcctcccaagtagctaggattacaggtgcacactgccatgcctggctaattt

SEQ ID NO: 479408 - DNA, 201 bp, Homo sapiens
catcctggcctccagcatgtcttcccctgactttccccaccccttggaaccctgctgaattttttatttatttatttatcctttgagacggagtctcattstcttgcccaggctggagtgcagtggcacgatctcagctcactgcaacctccgcctcctgggttcaagcgactctcctgcctcagcctcccaagtagctag

SEQ ID NO: 479409 - DNA, 201 bp, Homo sapiens
caggcttctggcttcctgttggcatgctttccccatacttcctcctaccctgagtctccttttccctgcagaaggagcgagtggaaccgcaccaactggcrattgaccgaccctcacagaagctgctgaaattcctgaataagcactacaatctggagaccacagtcccacaggttagaggtttcagagaatagatcccca

SEQ ID NO: 479410 - DNA, 201 bp, Homo sapiens
gcctcccaaattgttgggattacaggcgtgatccaccacgcctggcccccgagttttttttttttttttgagacggagtctctctctgtcgcccaggctgragtgcagtgttgccatctcggctcactgcaagctctcctcttgagtaaactcttaatggctacactattttcctggctaaaacactgcagctggaatcag

SEQ ID NO: 479411 - DNA, 201 bp, Homo sapiens
tcctgattaaccaagggctttgtccatctcatccagaggaacccagggtcctcgttggcccggctgggaccattccactgccccagaataccagggggccrtgacagcacccactgacagtaagagctcacttcccttggctgcccttctcctgcatctcccaggcccccagagtctccccttcgatctttctccctagct

SEQ ID NO: 479412 - DNA, 201 bp, Homo sapiens
tccactgccagctccagcaaggaagctgccacccaagagagcagagggagacatcaagccatactcctctagtgaccgagaatgtaagaggggcaagggtsgggtgtctgggcctggggtaccttaacacaagggaagagaatgctcaggggacccagggaaaggattcgttctctctaaagactcagatttcttgggctg

SEQ ID NO: 479413 - DNA, 201 bp, Homo sapiens
gtggggagaactgttgaagtgatgtcattgaatgggcggcgggggcgttgagatttggttgacaagttagccttggataggaacatggacagttaatccaytgtaacatgatttgatagatgtgattacagaggaggcataaggacatggatttgagtgctatcttgggctgggggttgggtaaagaaagatgacatgtct

SEQ ID NO: 479414 - DNA, 201 bp, Homo sapiens
ttgaaggcttctttgcccatcaacatcgtaagtttttgcattttgttggtcacgtagtcggggtgagggaaaggaaagagctggactcttggtcctgccgrcccctcactgaggggccccgccgcttccttcctcacagggccccctgctccctctctgagggcaactcgacactctcgtgctgctgcagtcgatcccacg

SEQ ID NO: 479415 - DNA, 201 bp, Homo sapiens
gctttaactgagatggtaggtagaccagctttgggggaaatactaggagtacatttttaatatgttaattggagatgtctgtgatatgtccaggtttgagyagacagttggatacttccctggagatcagggaggaggtttggggaggagagttttcagcatacatctggtatctaaagccaacagacaggatgcgatcac

SEQ ID NO: 479416 - DNA, 201 bp, Homo sapiens
gcttgtgtgccaagagtccatcgcagcaggcagggagtgggcatttcctttatttctctccctttctcttcacctctgacttctctgtttttctctccccygccccccgccatttcccatctcccttcctcccatccataacatccttccacagctcccttccccgctctgaggagagtcgatactaacagctaccctctc

SEQ ID NO: 479417 - DNA, 201 bp, Homo sapiens
agagagcatcccagacagaaggtaccaccagtgtatggccgtgaggtgggagtgtgcctgaaagagcaaattggctgtgtccagagcagcatgagtcagcrgaggagtatggtaggagatgagaccagagaggtaatgcggaggaggggccttataggctactgcaaagactggcttttattttaagtaaaaaataagatc

SEQ ID NO: 479418 - DNA, 201 bp, Homo sapiens
gcaggggaattgcttgaatcagggaggtagaggttgcagtgagctgagattgtgccactgcactgcactctagcctggtgacagagtaagaccccatatcaaaaaaaaaaaaaaaatggaaacggcaataagggagccagagtagaagcaagtagactaattaggcagcaacaatcctggcgaaaaatggtggtggctcag

SEQ ID NO: 479419 - DNA, 201 bp, Homo sapiens
tcattattttccccgtcctacagggctggaaaaggagccattattggtttcatcaaagttggatacaagaagctctttgtactggtgagtgttattggatrctaggagttcgtataccttggtttctgagaacaaaagtgctggaggttagggggcagcagagatgccggggttcctaaaacatttttattgtttctctct

SEQ ID NO: 479420 - DNA, 201 bp, Homo sapiens
tggcacgatctcagctcactgcaagctctgcctcccgggttcacgccattctgctgcctcagcctcccgagtagctgggactacaggcgcccgccaccacrtccggctaatttttttgtatttttagtagagatggggtttcaccatgttagccaggatggtctcgatctcctgacctcatgatccgcccgcctcggcctc

SEQ ID NO: 479421 - DNA, 201 bp, Homo sapiens
cccgccaccacgtccggctaatttttttgtatttttagtagagatggggtttcaccatgttagccaggatggtctcgatctcctgacctcatgatccgccygcctcggcctcccaaagtgctgggattacaggcgtgagccaccgcacctgacctttactgtaccttttctgtgttgaggtatgtttagatacatcagctg

SEQ ID NO: 479422 - DNA, 201 bp, Homo sapiens
cactcagagtttataacatttccaaccagataatgaaattgatatggagaaaccaaacctcagaggcactaaaatgctgtccagattccccatcccatatacacacacacacacacacacacacacacaaacacacttactgacagtctgagccccactccttcctcttcctcaccacctccaccttaccaacttctgaca

SEQ ID NO: 479423 - DNA, 201 bp, Homo sapiens
gacagagtgagactccgtctcaaaaaagaaaaaaaaaaaaaagaaagactcagatttctctttttttctaccaaaacctttgctgtcatgactctcttccktttttcttctttttctgtcttgctcttcattctccctgtccccagttctgaaggtagctgtggagcctccttggcccctaaacagggcccctcgccgcgc

SEQ ID NO: 479424 - DNA, 201 bp, Homo sapiens
cgtgaggtgggagtgtgcctgaaagagcaaattggctgtgtccagagcagcatgagtcagcggaggagtatggtaggagatgagaccagagaggtaatgcrgaggaggggccttataggctactgcaaagactggcttttattttaagtaaaaaataagatcaggccaggggtggcgactcacacctgtaatcccagcact

SEQ ID NO: 479425 - DNA, 201 bp, Homo sapiens
actcagagtttataacatttccaaccagataatgaaattgatatggagaaaccaaacctcagaggcactaaaatgctgtccagattccccatcccatatacacacacacacacacacacacacacacaaacacacttactgacagtctgagccccactccttcctcttcctcaccacctccaccttaccaacttctgacag

SEQ ID NO: 479426 - DNA, 201 bp, Homo sapiens
agtgtgcctgaaagagcaaattggctgtgtccagagcagcatgagtcagcggaggagtatggtaggagatgagaccagagaggtaatgcggaggaggggcmttataggctactgcaaagactggcttttattttaagtaaaaaataagatcaggccaggggtggcgactcacacctgtaatcccagcactttgggaggccg

SEQ ID NO: 479427 - DNA, 201 bp, Homo sapiens
tgggaggccgaggtaggtggatcacctgaggtctctactgaaaataccaaaattagctgggtgtgatggcaggtgcctgtaatcccagctgtttgggagtytgaggcaggagaatcactagaaccgggaggcggaggttgcagtgagccgctgaaattgtaccactgcactcctgcctgggcgacagagcaagactccttc

SEQ ID NO: 479428 - DNA, 201 bp, Homo sapiens
caccatgcccagcaaatttttgtgtttttagtagagacggagtttcaccatgttggccaggctggtctcgaactcctgacctcaggtgatccatccgcctyggcctcccaaagtgctgggattacaggcgggagccaccatgcctggccagaacaaatgcctttttaaaccttttaagaacatttttaaaatgtctttttc

SEQ ID NO: 479429 - DNA, 201 bp, Homo sapiens
tgggcactccctgttgttggttttccttttgcagcacactgggcagtctccctataaaacaaaaaccccaccttctgtgccttctgctttagagcagagcyccccctcccatttcctcagtcttccctgcaaaatctgtccaccggggaaggcagcaggaaccctgggcagcgggtgttctgggaaggctagtgacagcag

SEQ ID NO: 479430 - DNA, 201 bp, Homo sapiens
aaatgcttttttttttttgagacagagtctcgctctgacgcccaggctggagtgcagtggcgcgatctcggctcactgcaaactttgcctcccaggttcargtgattctcctacctcagcctcccgagtagctgggattacaccaccatgcccagcaaatttttgtgtttttagtagagacggagtttcaccatgttggcc

SEQ ID NO: 479431 - DNA, 201 bp, Homo sapiens
tcactgcaaactttgcctcccaggttcaagtgattctcctacctcagcctcccgagtagctgggattacaccaccatgcccagcaaatttttgtgtttttrgtagagacggagtttcaccatgttggccaggctggtctcgaactcctgacctcaggtgatccatccgccttggcctcccaaagtgctgggattacaggcg

SEQ ID NO: 479432 - DNA, 201 bp, Homo sapiens
ataggccatgtgacccactaggggccgcttacccctggccgtccgctggctgaactgaacgcattccctctctccgcaactctcccgtgaggctgcacccrtgtgggtagcactggaagcggcactgtttgcattgtacataggaaggaaggaagttcttccagcctcaccagcacctggcagcgagtcagagcctgtgag

SEQ ID NO: 479433 - DNA, 201 bp, Homo sapiens
tgacctcaggtgatccatccgccttggcctcccaaagtgctgggattacaggcgggagccaccatgcctggccagaacaaatgcctttttaaaccttttargaacatttttaaaatgtctttttctatgtcaaatgtaacgtttatttttttaaacaataaaattgatttgccaaaatccgggctttaattctttatttgg

SEQ ID NO: 479434 - DNA, 201 bp, Homo sapiens
ttaaaaaaaaaaaactgcctggcagcatctcagtgtcagagtgagcacggcacaggaaaggcccgtggtgacgagggtgaggtggccacagtgaccggacracaaatgagactctgcaaatgagactccagagggtgaagatctgcggtctccagacatcataggccatgtgacccactaggggccgcttacccctggccg

SEQ ID NO: 479435 - DNA, 201 bp, Homo sapiens
cacagtgaccggacgacaaatgagactctgcaaatgagactccagagggtgaagatctgcggtctccagacatcataggccatgtgacccactaggggccrcttacccctggccgtccgctggctgaactgaacgcattccctctctccgcaactctcccgtgaggctgcacccgtgtgggtagcactggaagcggcactg

SEQ ID NO: 479436 - DNA, 201 bp, Homo sapiens
tctgccctcgggggctccaagcattgtaactcagtcatgggagctgcctctttggaagtgcagatttattcctgtaataatcctgcctgcttttacctctygtccactgaccagcaagtgtgagtcccggtgtcagtcggcacagtccagtgtccatctgcatttgctcatgcagagggggtgagttgggcactccctgtt

SEQ ID NO: 479437 - DNA, 201 bp, Homo sapiens
ggcaggctgtttgcctcttcctggtctggaagcccttgggtcctatggtggcggcagctcccacagtccaggttccctggtggggaccaatgattccatcygcatggaagcccacgtgtgcacttaggggcccataaatggcagaagggcccctcctttgggagaccttgtcagtcagcatctctagggcaaccgtgattg

SEQ ID NO: 479438 - DNA, 201 bp, Homo sapiens
agcaaatttttgtgtttttagtagagacggagtttcaccatgttggccaggctggtctcgaactcctgacctcaggtgatccatccgccttggcctcccaragtgctgggattacaggcgggagccaccatgcctggccagaacaaatgcctttttaaaccttttaagaacatttttaaaatgtctttttctatgtcaaat

SEQ ID NO: 479439 - DNA, 201 bp, Homo sapiens
gtgcttttttccagagaggggaaccccactggtttttgtggaaacaatggaaacttacagatgcctgcctgggatgatgaggcacattcagaacaaatgcttttttttttttgagacagagtctcgctctgacgcccaggctggagtgcagtggcgcgatctcggctcactgcaaactttgcctcccaggttcaagtgatt

SEQ ID NO: 479440 - DNA, 201 bp, Homo sapiens
actcagtcatgggagctgcctctttggaagtgcagatttattcctgtaataatcctgcctgcttttacctctcgtccactgaccagcaagtgtgagtcccrgtgtcagtcggcacagtccagtgtccatctgcatttgctcatgcagagggggtgagttgggcactccctgttgttggttttccttttgcagcacactggg

SEQ ID NO: 479441 - DNA, 201 bp, Homo sapiens
tgtttctctgcagacaatgctttagccctactcttgggcccccaagttagcagagtaatcaaagcttcctaccgtttggcctactattccagactagtccytcgaggggttcccttccaaaatatgcagggctcaggctcccaattccgggcctgtctgctttgcttgtgtttctcctgtccctgttctcccggagggccc

SEQ ID NO: 479442 - DNA, 201 bp, Homo sapiens
ggctcaggctcccaattccgggcctgtctgctttgcttgtgtttctcctgtccctgttctcccggagggcccaggtggaactcacgacagggagggagackcttcccaaaaacctgcagggctatttcccagaatttggttttcaagtacaaaactttttgtcctgtaagatatatgcagcctcacagaagcagcctctgc

SEQ ID NO: 479443 - DNA, 201 bp, Homo sapiens
ccacagtgaccggacgacaaatgagactctgcaaatgagactccagagggtgaagatctgcggtctccagacatcataggccatgtgacccactaggggcygcttacccctggccgtccgctggctgaactgaacgcattccctctctccgcaactctcccgtgaggctgcacccgtgtgggtagcactggaagcggcact

SEQ ID NO: 479444 - DNA, 201 bp, Homo sapiens
aacatggaacaactaagctatatagtaaatattacactactgcagctgagtatcttatgcccttaacagataattacagccatcaactgagaagattcttyaatgagttgaaaaactgcttaccgtttagtctgactgaaaaaaagattatgcaaaatcatatgtacttaagacttttcttccatgaacacacatttctac

SEQ ID NO: 479445 - DNA, 201 bp, Homo sapiens
ttttttatggtaaaaagtatgtgcgtatatatacgtgtgtgtgtgtatatgtataaatacatgtgtgtatgaatcattaaaaactttacctatcaacaacrtaatgctttacaactaatggttctaggtgtgggccccagaacaacagcatcaacttcacctggaaacttcttaaaaatgtaaatactcaggccccaccac

SEQ ID NO: 479446 - DNA, 201 bp, Homo sapiens
taaatactggagctcagcgtccaccgaggacaggccctgctaagtctcccgctccttaggttgggaccctgaagaacaaactgcaaattgccctgacaggkaatgacagccagctttaatcatctcattttttaagcaaattctaattaattttgatttgcattttctaacttgcaatagaaatgtaagattatccacaag

SEQ ID NO: 479447 - DNA, 201 bp, Homo sapiens
ttaacattaaactatgaaaaacgtaagaactatgacttggtggctagtaaaagaccggtggtgtcagcaagagaaaggttaaaaatttactatttttcagwcttgtgtttattttgtatatgtaaatatttggctgggttacctaacattccacttccaaaactgatcatgaggttttatgacaaaagaagtactttttat

SEQ ID NO: 479448 - DNA, 201 bp, Homo sapiens
ttttcttccaattacagaagagaaaaagaagaggttcacaagctgagctagaactcacagactcacagagctcacagggagataaatactggagctcagcrtccaccgaggacaggccctgctaagtctcccgctccttaggttgggaccctgaagaacaaactgcaaattgccctgacagggaatgacagccagctttaa

SEQ ID NO: 479449 - DNA, 201 bp, Homo sapiens
ctttccaagttagtatacataaacctattcacaatctttttaatgactctgtggtagtttattttatggatatgctttaacaaattccacccagtatctgtttttttttttctatataaacaatgctgaaacaaatgattatttaacatttaaaaataaaaccagtattcaaatgtttgtactttattaggtttctacaga

SEQ ID NO: 479450 - DNA, 201 bp, Homo sapiens
gatttactttacaatagtttctttactgtcactcccctgtttctcaaccagttatacagaaagatgaatagccagggtgatagtctacttagcagaggggraaaaaaaaaaaaaaagatctgtggccagtccacagacctgtttaagtacaagatattacatcagcactatttcctaaaactcttctacatgagtcctacc

SEQ ID NO: 479451 - DNA, 201 bp, Homo sapiens
tcacactcttctaggctctgtgagcacaatgtgtctcatattctcttctgctgtcaccagatttactttacaatagtttctttactgtcactcccctgttyctcaaccagttatacagaaagatgaatagccagggtgatagtctacttagcagaggggaaaaaaaaaaaaaaaagatctgtggccagtccacagacctgt

SEQ ID NO: 479452 - DNA, 201 bp, Homo sapiens
gaatatcctgataacattgatggcaatattgatgaatgtattttgatactgtaaaatcaaatgtatcaacatttagaagatctcggtgaaccactattttytaaatgaccaatgcatgatgttataatatcatacaagggtaaaagatccaaagttcaagaaagaccaagttttgatagagcatcaaaaaagaagcctagg

SEQ ID NO: 479453 - DNA, 201 bp, Homo sapiens
aaacacaaaagccactgtttaccagggtctgctgagctaagatttaagatatttcaacctgatctaaaagattacagcaaaaatggatcaccactcaacattttttttttttttttttttggagatggagtctagccctgttacccaggctggagtgcagtggcgcaatctcagttcactgcaacctccgcctccctgctc

SEQ ID NO: 479454 - DNA, 201 bp, Homo sapiens
aaaagccatctgaaaatgctttttaaaaagttttttttttcctagataactcttgagtaaaagaagaaattgatcctcatgcccctaagtatgtgccccaragaaatgctggcacaggggtaccatgaaatacaagcaagaatgatcacagcagcattcgctgttcctaacactggaaacaacccacatgtctgtatccag

SEQ ID NO: 479455 - DNA, 201 bp, Homo sapiens
aagccatctgaaaatgctttttaaaaagttttttttttcctagataactcttgagtaaaagaagaaattgatcctcatgcccctaagtatgtgccccagaraaatgctggcacaggggtaccatgaaatacaagcaagaatgatcacagcagcattcgctgttcctaacactggaaacaacccacatgtctgtatccagtc

SEQ ID NO: 479456 - DNA, 201 bp, Homo sapiens
aggaattcataaattatatccctatacagaatcgtgggcacaatcatgaaaaaccaggcagctctctatgcattaagtccatgtgatattcagtgaaaaasacaagctgcagatgtcttacagaaggaaaagtgaggggccaggtgcagtggctcacccctgtaatcccagcactctgggaggccgaggtgggcagatcac

SEQ ID NO: 479457 - DNA, 201 bp, Homo sapiens
gaatggggttaccggcagaccagaactcacctccactagacaatgacagtaaatggaaaatagttaattaatggagcaaagccaacaaaggtggaggttasggggatattgacagcaagaaggcaaatttatctcacagcgccctgaagaggctctagactcagacactaggtaccccagaaagtgggacagataggcaag

SEQ ID NO: 479458 - DNA, 201 bp, Homo sapiens
catattctctgaccatattgatgcactaaaaataactgaaaagccatctgaaaatgctttttaaaaagttttttttttcctagataactcttgagtaaaaraagaaattgatcctcatgcccctaagtatgtgccccagagaaatgctggcacaggggtaccatgaaatacaagcaagaatgatcacagcagcattcgctg

SEQ ID NO: 479459 - DNA, 201 bp, Homo sapiens
cataggctcaactgatcctcctgccttagcctcttgagtagctgggactacaggcaggtgccaccatacccacctaattttttattttttgtaaagatggsgtctcaatatgttgcccaggctggtcttaactcttgggctcaagtgatcctcccacctcagcctcccaaagcactcagattatacgtgtgagccaccaca

SEQ ID NO: 479460 - DNA, 201 bp, Homo sapiens
ctaagtatactgttgtgctgtttcagcacaccaaggaaaagacaaactcctaaaagcttccagagagaaagccatacataaatgactgaaactcagaatgscatgaggcttcaccaccacgactggttagaagacaacagcatagactttgaaattctaaggtaaaattatcttcaacctagaaatatataatcaaccaaa

SEQ ID NO: 479461 - DNA, 201 bp, Homo sapiens
ttcagaagctagagctcagaaaatgtactcctccatgctttcttagggttttacctgagaatatagtcaggcaaaatgagaaagggtcagccaagaaagayggcatgggatccaagaaacaatggatctactgtaggagagcagatgagaaaaacctcaagatggcatctgcacagccaacccaaagaacaacctgccaag

SEQ ID NO: 479462 - DNA, 201 bp, Homo sapiens
gaagcaaagaataagctttcccaaagtggacaacggagcaaatgaaaatgaggaaggttgaacggtaaattacgatccaacaaaaatcttcatgcttaaamggaaaccaagctccagtgtggatttgatatccacccaatacactctattgcgtgctaagtgcataatgaagatgaggcagagcaatccggacacagacct

SEQ ID NO: 479463 - DNA, 201 bp, Homo sapiens
aaaccaagctccagtgtggatttgatatccacccaatacactctattgcgtgctaagtgcataatgaagatgaggcagagcaatccggacacagacctagmcactctggcctctggcacggaaggggctccaggagtgctggggagagaggcagcagggtagtggagtcataccaagcaacaagaaagacagggtagtaca

SEQ ID NO: 479464 - DNA, 201 bp, Homo sapiens
acgaatttcaattttcctcccttcccccacacaccaaaaaagcatttgagggatgggaggaagaaactgagatcacagggaaaatagtaagagacattcaraaggacaggtcttagaaaattactagtttgcggggggcgggggtcagagaacagtagtatataaaagaacgctaagacagttcccaggtttgggtatggg

SEQ ID NO: 479465 - DNA, 201 bp, Homo sapiens
tgaatatactaacaaccaccaaattgtacacttcgaagcgttttatcatatataaactgtatcacaataaagctgttaatttaaaaaatgtttggctatgkcaagaaataaagaagtagggtcataactagaagatatgggatatgaaatacatagaacaaaactgctcaataatctatctagaatcacacaatgcttaag

SEQ ID NO: 479466 - DNA, 201 bp, Homo sapiens
aggttcacaagctgagctagaactcacagactcacagagctcacagggagataaatactggagctcagcgtccaccgaggacaggccctgctaagtctccsgctccttaggttgggaccctgaagaacaaactgcaaattgccctgacagggaatgacagccagctttaatcatctcattttttaagcaaattctaattaa

SEQ ID NO: 479467 - DNA, 201 bp, Homo sapiens
ctacagagataaaaattagatgagaggttgccaggatcaatggtgggggaaacgggtacagggagtgactgctaatcagtacggggtttctttttgaagtyatgaaaatgttctgaaattaggtagtagtaatgactgcacaactctgtgaatatactaacaaccaccaaattgtacacttcgaagcgttttatcatatat

SEQ ID NO: 479468 - DNA, 201 bp, Homo sapiens
tacagcaaacactatcctaagcttagcctcttcagatatttgatttaaaaatcactgtaaaaaacaccagtcacaaaaagccacattttatatgattctayttatatgaaatgtccaagataggcaaatctacagagataaaaattagatgagaggttgccaggatcaatggtgggggaaacgggtacagggagtgactgc

SEQ ID NO: 479469 - DNA, 201 bp, Homo sapiens
tctatagtacacagaaacacagtaaaagaagtgacttacttaagctcctaactactaaataaaagctaaacttctcacttcctcctagattcacagctccmacatttttaaaatttagtatcttgctgttgggggtaggcactttttggcaataatgaatagaaatttaattaaccaatcaaaaacaaagtcccactaaaa

SEQ ID NO: 479470 - DNA, 201 bp, Homo sapiens
ggcaatcacattcttcctaggcctctcaagaaatactccaaccccagaaaaggcccttctttgtggtatcaggagccatggtccagaaacacaaatccaayagaaattcagccatttacctcccagatcgtcccctccctgaagttctacctagagcaggaaaaaataatgaaaacactacctatagtcacaaatcctcca

SEQ ID NO: 479471 - DNA, 201 bp, Homo sapiens
gctgaggcagaaggattgattgagcccagaaggtcgagtctccactgagctgtgatcacgctactgcactccagcctgggtgacagaacaaggccctgtcycaaaaataaaaagaatgtctatgatgaagcagtgaaaattttactacatctgaatccttgaatatgtctttttaatatttcaagtgatgaaacgggaagt

SEQ ID NO: 479472 - DNA, 201 bp, Homo sapiens
cctaccatgaccagttgtgaaaaccagaaatggctccagatatttccaaatgtcccacgggaggcaaaaatctcctccagttgaaaattactgtgtaaacyagatctacaccctagatcttaggaaaaaagatgtaaagctttccaagtcacccctgcatacccttgatactgaaataagagcctaaaaggaaacaaagta

SEQ ID NO: 479473 - DNA, 201 bp, Homo sapiens
cactctggcctctggcacggaaggggctccaggagtgctggggagagaggcagcagggtagtggagtcataccaagcaacaagaaagacagggtagtacaytctccacgaatttcaattttcctcccttcccccacacaccaaaaaagcatttgagggatgggaggaagaaactgagatcacagggaaaatagtaagagac

SEQ ID NO: 479474 - DNA, 201 bp, Homo sapiens
tgaggcaggagaatggcttgaacccgggaggcataggttgcagtgagccaagattgcgccactgcactccagcctgggcaacagagtgagactctgtctcaaaaaaaaaaactaaaacacaatagttatgtcatttctccccaatcagtaaaggcttcgttaaagatattttaacattaaactatgaaaaacgtaagaact

SEQ ID NO: 479475 - DNA, 201 bp, Homo sapiens
tctattctttatttttttatcatttacccttttaaacaaatgttagagtcattttgtcaacttccaaaaataaatctgctgggatttgtactgaaattcattatatatatatatatatatatatacacacacacacacacacacacacgtatatacacatatacacatacatgtataaacacacacatatatatatacatt

SEQ ID NO: 479476 - DNA, 201 bp, Homo sapiens
tattctttatttttttatcatttacccttttaaacaaatgttagagtcattttgtcaacttccaaaaataaatctgctgggatttgtactgaaattcattatatatatatatatatatatatacacacacacacacacacacacacgtatatacacatatacacatacatgtataaacacacacatatatatatacatttt

SEQ ID NO: 479477 - DNA, 201 bp, Homo sapiens
acctatagtcacaaatcctccagtttcctggccaatatttcatattcccgtaaagatacctctcaaagaggaagtgacaagggaggggcacacagggggcyacagggacggataaaaaaaaaaaaggttctatttcttaagtttggtgttaggcataaggacatataatttaattttttaaaaagaaagataccttccttt

SEQ ID NO: 479478 - DNA, 201 bp, Homo sapiens
atttacccttttaaacaaatgttagagtcattttgtcaacttccaaaaataaatctgctgggatttgtactgaaattcattatatatatatatatatatayatacacacacacacacacacacacacgtatatacacatatacacatacatgtataaacacacacatatatatatacatttttttttgagacggggtctca

SEQ ID NO: 479479 - DNA, 201 bp, Homo sapiens
gaagtgacaagggaggggcacacagggggctacagggacggataaaaaaaaaaaaggttctatttcttaagtttggtgttaggcataaggacatataattyaattttttaaaaagaaagataccttccttttttgtgtgttttgttttttgtttttggcctgggtgctttattcgttcccccatatgaattagtaaaaatg

SEQ ID NO: 479480 - DNA, 201 bp, Homo sapiens
ttacccttttaaacaaatgttagagtcattttgtcaacttccaaaaataaatctgctgggatttgtactgaaattcattatatatatatatatatatatayacacacacacacacacacacacacgtatatacacatatacacatacatgtataaacacacacatatatatatacatttttttttgagacggggtctcact

SEQ ID NO: 479481 - DNA, 201 bp, Homo sapiens
tgctcatccaggaacacagaatgcaaatctttccttccactcagcaaaattgtcatgttcttgataaaagtcgtgcacatctaagttgattcttaggtatwtaatttttgttgaaatacttaaaaaaatactttatcactataccttcaatgtgattatagctaaaattgtggaaagctattgacttttatgtaacagagc

SEQ ID NO: 479482 - DNA, 201 bp, Homo sapiens
cacgtcttaacggagaatatgtctacgagattcctgaaccatagggtatgagtatcttctactttaccaaattgttttccaaagcacttgtacaaatataygcaccccactggaagtatatggggtcctgtaactattttcttaccttaaaagagaagttaagcaaaatatattctatgccttctttttcttttaagatct

SEQ ID NO: 479483 - DNA, 201 bp, Homo sapiens
attacaagcatgcgccaccatgcccagttaatttttatatgtttagcagagacagggtttcaccatgttggccaggctgatctcgaactcctggcctcaaktgatccgcccgcctcggcttcctaaagtgctgagattacaggcgtgagccaccacacctggccagtaaatgttttttaaaatgatgtaaaactatataga

SEQ ID NO: 479484 - DNA, 201 bp, Homo sapiens
accatgcccagttaatttttatatgtttagcagagacagggtttcaccatgttggccaggctgatctcgaactcctggcctcaattgatccgcccgcctcrgcttcctaaagtgctgagattacaggcgtgagccaccacacctggccagtaaatgttttttaaaatgatgtaaaactatatagaccatgacctcaactat

SEQ ID NO: 479485 - DNA, 201 bp, Homo sapiens
tcccgagtagctgggataacaagcacatgccaccacgccaagctaattttttgtatttttattagagacggggtttcaccatgctggccaggctggtcttraactcctgatctcgtgatcagcccacctcagcctcccaaagtgctgggattacaggcgtgagccactaagccaggcccatatcttttttaaaacacaatt

SEQ ID NO: 479486 - DNA, 201 bp, Homo sapiens
cacttattgagtactgcattttcttcttcaaattcttcagcacacattgggaatacaccatctggaccatttttactgttttagtttttaggtttcttttyccttaggctaaagaaactgcaactacacttaggatctcattattaggttagtatttgtctagtaaacttcagcataagccaagaaacatacatgtcttca

SEQ ID NO: 479487 - DNA, 201 bp, Homo sapiens
caatgtggaatactttatacagagtcagatatttgttgaacaaataacagacagcaagtattcaagggacactctccatgcacatccctttaaaccctttytaggttaaaaaaaaaaaaaacaaccagatattattcagggatatacttgaggggcagggagcaggacacataatacaaggagcagcaataagaagcaaag

SEQ ID NO: 479488 - DNA, 201 bp, Homo sapiens
ctggttgaccagaatggtcagtttttgtatctttccaaatgtaggacacagctatcttcagggatttcatcatttttttaaaactgatgcacaaacttctkgaaggttcagagataacagcagttgtaattcttctgaaggccagttatgggacacattactttcatagtttgctgttcaataaatgtggggtggagaacg

SEQ ID NO: 479489 - DNA, 201 bp, Homo sapiens
cagagtactatggacttgacccaacaaggtatttatgattaagaaaaacaaacagtgacatttccttagaacagagaaaaaaaggagatgggggagaaaayagaagagatgtaagtaagagaacagttaagggacattgaagatatagagatctaacattcatccagaggatgaaggggaataaaaagaaacaaaagagac

SEQ ID NO: 479490 - DNA, 201 bp, Homo sapiens
aattgggaagatactgcatccacaaaataaaaaacagattactatgcaagcacaattctagaaagtaaaaataagatcccctccacccccaaaaaaccacytgtagaagggccagagtactatggacttgacccaacaaggtatttatgattaagaaaaacaaacagtgacatttccttagaacagagaaaaaaaggagat

SEQ ID NO: 479491 - DNA, 201 bp, Homo sapiens
acaaaatctgcatgtgcaaaatagcaaaatattaagaggccactgaaatactaacatagcctaatttctcctgtaacgaaaaactttaaaatgaaaaacamtacaaaaaagaatagaaagaatttcagttacgctgaaataagcacagaaaaagaaagaccagaagaacttacattgaaatgttaatttcagttaatctta

SEQ ID NO: 479492 - DNA, 201 bp, Homo sapiens
gtgcaaaaaaatattatctatagtacacagaaacacagtaaaagaagtgacttacttaagctcctaactactaaataaaagctaaacttctcacttcctcmtagattcacagctccaacatttttaaaatttagtatcttgctgttgggggtaggcactttttggcaataatgaatagaaatttaattaaccaatcaaaaa

SEQ ID NO: 479493 - DNA, 201 bp, Homo sapiens
tgctctgtatcaccaggaaaaatagaggtcaccataggttccagctccttgggaataaatgtccaaaagagaccataatactctaaatctaatctagtaarggagttcagagtttgcagtcactctaaaggaaaatagtcacatgtatataattttctcaagaactcaaaaaaagtttaggaaagcatattaaacttacat

SEQ ID NO: 479494 - DNA, 201 bp, Homo sapiens
accatcgcttttatatttgtagaacataatatcattgccaaagagctttcctctatatgctctcttgcagtgcaaaaaaatattatctatagtacacagamacacagtaaaagaagtgacttacttaagctcctaactactaaataaaagctaaacttctcacttcctcctagattcacagctccaacatttttaaaattt

SEQ ID NO: 479495 - DNA, 201 bp, Homo sapiens
tccttgggaataaatgtccaaaagagaccataatactctaaatctaatctagtaagggagttcagagtttgcagtcactctaaaggaaaatagtcacatgwatataattttctcaagaactcaaaaaaagtttaggaaagcatattaaacttacattattagccaaagggttcaaggagaaaagtttgccatggtcagaac

SEQ ID NO: 479496 - DNA, 201 bp, Homo sapiens
ctgttataaagcattttcaaaataaagtgttattcagccacaaatgacaccatcgcttttatatttgtagaacataatatcattgccaaagagctttcctmtatatgctctcttgcagtgcaaaaaaatattatctatagtacacagaaacacagtaaaagaagtgacttacttaagctcctaactactaaataaaagcta

SEQ ID NO: 479497 - DNA, 201 bp, Homo sapiens
ggtggtgtcagcaagagaaaggttaaaaatttactatttttcagtcttgtgtttattttgtatatgtaaatatttggctgggttacctaacattccacttycaaaactgatcatgaggttttatgacaaaagaagtactttttatagcaattttactgcctgatccaaaaacagtctacggaagctttaaaggtaacaaaa

SEQ ID NO: 479498 - DNA, 201 bp, Homo sapiens
tattagccaaagggttcaaggagaaaagtttgccatggtcagaactatgaaaacttaaatcactaaaaaaacctgtatttgtctacaactgtcctatatawacaggtctaatttgaatcccacctccccccaacttttttttttttttttttttttttaagagaccgggtgcctcattctgttgcccaggctggaatatag

SEQ ID NO: 479499 - DNA, 201 bp, Homo sapiens
ggagaccgatacatagaaaaaggaaaaagacagtcaaagactcatcctccagattggagttttatttaaaccatggtttctcaacctcagcaatattgacrtattgggccagacaattctttgtggagggttctcctgtgtgttgtaggatgtttagtgacatcccctctacctaagaaatgccaacagcacccctaccat

SEQ ID NO: 479500 - DNA, 201 bp, Homo sapiens
tttttgtaagtacaaaggaagtattgctttttccatcaaaatatctcatatatccacagattttaaaccattacatctcatccagatccatattaaatcaygcctgtaatcccagcactttggaaggccaagggaagtgtaccatgaggtcaggagttcaaaaccagcctggccaagatggtgaaaccccatctctactaa

SEQ ID NO: 479501 - DNA, 201 bp, Homo sapiens
aaatatgcacacaagtaaggatgagaaaataacatgcaaacatgacaacagttgttagggatacaggactatgggtaatttaaaaattctaatgttatcaygctaatgtaatccctctgaaattctagtcaattttttctaatggttcttagaacataatactttcagatttgtatgatatcagtaattaagaacttagcc

SEQ ID NO: 479502 - DNA, 201 bp, Homo sapiens
tgagataggaagatcatgtgggcccaggagtttgaggctgcagtgagctatgatcatgctactgtactccagcctgggtgacagagcaagactctatctcaaaaaaaaaaaaaaaaaaaaaggaaaagaaaacaaagaatttgaatacccctagaccaatatctttattcacatcattctgctcccttctttcccgtacta

SEQ ID NO: 479503 - DNA, 201 bp, Homo sapiens
atcagtaattaagaacttagccctaaatattccaaagaataggggcagaagaatcagtttccttaaatggcgttcacgtgttctttacatctgaacatgtwacagccatgagtttttcccctgacaatgacactgaccttaccctatccatgctatgaagatctgtatggttttatggttcaaattgtttttacccattct

SEQ ID NO: 479504 - DNA, 201 bp, Homo sapiens
tgacaacaaaagatacttaaaatgcatacacatggttccctgctaatcattttacaaataaacaaccaagtagctaacctagagcccacaaaagcagagtraaaattctaacacttgttgaaataaaaatgttcatatacccatgataaaaagaaaatgcttaagtattcaaacacaagcagcaaattacagctactgaga

SEQ ID NO: 479505 - DNA, 201 bp, Homo sapiens
gcggacatagtggcacatgcctataatcccagctactcggggggctggggcagagaactgcttaaacccgggaggcagaggttgcagtgagccaagattgygccaccacacgccagcctgggccactgcactccagcctgggcaacagagcaagattctgtctcaaaaaaaaaaaaaaatcattaacattttttctagatt

SEQ ID NO: 479506 - DNA, 201 bp, Homo sapiens
taattttgatttgcattttctaacttgcaatagaaatgtaagattatccacaagataccaacttaatgacacaagataccaacttaacaacagttattatratctactttcaaataaagtagctcacctttcatctatatttaacagacataatgaaaggtatagaggttgatgtaagcttggtaaagtacaatttcattt

SEQ ID NO: 479507 - DNA, 201 bp, Homo sapiens
gtatgatatcagtaattaagaacttagccctaaatattccaaagaataggggcagaagaatcagtttccttaaatggcgttcacgtgttctttacatctgaacatgtaacagccatgagtttttcccctgacaatgacactgaccttaccctatccatgctatgaagatctgtatggttttatggttcaaattgtttttac

SEQ ID NO: 479508 - DNA, 201 bp, Homo sapiens
atgatatcagtaattaagaacttagccctaaatattccaaagaataggggcagaagaatcagtttccttaaatggcgttcacgtgttctttacatctgaacatgtaacagccatgagtttttcccctgacaatgacactgaccttaccctatccatgctatgaagatctgtatggttttatggttcaaattgtttttaccc

SEQ ID NO: 479509 - DNA, 201 bp, Homo sapiens
tatctctgcacttttgacaaattcttagcagttaacttacaaggcagttaagatttttgttcaaatacaatacagctagaatagcgctatatactcaaatrtttatgaagcatttattgagtggaagataaaaagcacaaagcataattataaaatattctcccctgccaccataaaaagaaaaatttaaaggcttacaga

SEQ ID NO: 479510 - DNA, 201 bp, Homo sapiens
tcacaaatcctccagtttcctggccaatatttcatattcccgtaaagatacctctcaaagaggaagtgacaagggaggggcacacagggggctacagggayggataaaaaaaaaaaaggttctatttcttaagtttggtgttaggcataaggacatataatttaattttttaaaaagaaagataccttccttttttgtgtg

SEQ ID NO: 479511 - DNA, 201 bp, Homo sapiens
tacccactgactcaaccaaagggagttaaaaacaagacttggttttagccatgtttgaaaaggagcccgaagccaccaccttgacgcctattataaccaasagaatattctgcagtttggaccaatatcctacatcaatttcacgacgaatagcttcacgatacacttttatggagaaacttaatacttcaattcctttac

SEQ ID NO: 479512 - DNA, 201 bp, Homo sapiens
agccggagctgcgccgccccgccccgccccgccccggtcccgggagcaggccggctgagggcggccatggaccccacaagggcttgggccgccgcggactyccccctcggggctaggagacggggaccgagatgggccagaagcccccaagccagcccctggcgagaagccggaaagacgcgccctccgcctcctcccacc

SEQ ID NO: 479513 - DNA, 201 bp, Homo sapiens
ccggggagccggagcctctccggggcaggctcccctttgtcccgggactcgaagcgccccctctccgtcctcgccctgccccgcggggccgcggccgggcrcctcaccgtgatgttgcagtggagcgtgagtggcggcggcagcgagtgcgggctgccctgctgcggcaccaggaactggcagtgcagctcgtccagcttc

SEQ ID NO: 479514 - DNA, 201 bp, Homo sapiens
cccaaaccctgggacctttcaaagtgaaagattaatctaaaagtgaaagaaaatctaaaagaaaaactctccaaaaatttaaattcaggcgaaggttcatrggattaaatttttttgtgtgtattctatttctgaaacatagaaatctatcttccactctttaactctcctactgggctaaaagagtattgtatataatgt

SEQ ID NO: 479515 - DNA, 201 bp, Homo sapiens
aaatgtccaaaagagaccataatactctaaatctaatctagtaagggagttcagagtttgcagtcactctaaaggaaaatagtcacatgtatataattttytcaagaactcaaaaaaagtttaggaaagcatattaaacttacattattagccaaagggttcaaggagaaaagtttgccatggtcagaactatgaaaactt

SEQ ID NO: 479516 - DNA, 201 bp, Homo sapiens
accttgacgcctattataaccaagagaatattctgcagtttggaccaatatcctacatcaatttcacgacgaatagcttcacgatacacttttatggagamacttaatacttcaattcctttaccaagccttgggtttctaatgagatttccgcttaatgagtgagtttttaaaagtgtcttttcggctttgtgacatacg

SEQ ID NO: 479517 - DNA, 201 bp, Homo sapiens
agtcttctcttcatatatctgttcctttcaaggacaggtataaaaatggggatgagggagcataaataaccaccaggaatttgaccctatattataaattrgtcagataaacgaaaacaatgattcttctggaatgaaagtaccacttaggtgcttaacatgacagttctgatatttccaaatgctcttccatgaattcaa

SEQ ID NO: 479518 - DNA, 201 bp, Homo sapiens
attctcctgcctcagcctcccgagtagctgggataacaagcacatgccaccacgccaagctaattttttgtatttttattagagacggggtttcaccatgytggccaggctggtcttgaactcctgatctcgtgatcagcccacctcagcctcccaaagtgctgggattacaggcgtgagccactaagccaggcccatatc

SEQ ID NO: 479519 - DNA, 201 bp, Homo sapiens
gtgtgtatgaatcattaaaaactttacctatcaacaacataatgctttacaactaatggttctaggtgtgggccccagaacaacagcatcaacttcacctggaaacttcttaaaaatgtaaatactcaggccccaccacagacctactgaatcagaaaccctgggactagctctccaaatgtttctggtgcacactatatt

SEQ ID NO: 479520 - DNA, 201 bp, Homo sapiens
ttcatgcttaaacggaaaccaagctccagtgtggatttgatatccacccaatacactctattgcgtgctaagtgcataatgaagatgaggcagagcaatcyggacacagacctagacactctggcctctggcacggaaggggctccaggagtgctggggagagaggcagcagggtagtggagtcataccaagcaacaagaa

SEQ ID NO: 479521 - DNA, 201 bp, Homo sapiens
gtaaagattaaatgaaacctgtaacacttgatatttagtaggctcttaagtgtctgtataaaaaataacaataattcactaggaaaactgcaaagaataactgtaaatttccatgtttaagtccagattgttttctaagcatatttgctttcaacaagtaagcaaggtaaatcatgtgcacaagtatggtgttcattgttt

SEQ ID NO: 479522 - DNA, 201 bp, Homo sapiens
cggaggctgcagtgagccaagatcgcaccattgcactccatcctgggcgacaggcgagactccaactcagaaaaaaaaaaaaagactggccaggtgatcayagatgtttataaaatatcagctggccgtagtgacatgtgcctgtaatcccagctacttggaaggctgagaggcaggagaatcacttgaacccgggaggca

SEQ ID NO: 479523 - DNA, 201 bp, Homo sapiens
taccctaacctgtatgtaatcacctctttgttcttggacagttttcctctttgggcagttttactgctcacgtatgaatccataaataagtgtttctcagwtttcttttcatttttgcccccctaagaagcctttttagaagttttcttcctagttttacccccctgctccatggaattttaacaccatagataaatcgta

SEQ ID NO: 479524 - DNA, 201 bp, Homo sapiens
atagtaattctaaggcctgtgagaatgaagttgtctgtgaagctaccataaacattactgtaagtggacaaatttcaaacaagttcatcaccactaccatycccaccataaaactgtcttaatggagggaaacacaactcaagattaaccaaaccaacctctttacctgtcactgctcaagaaaaagatttttttgtctta

SEQ ID NO: 479525 - DNA, 201 bp, Homo sapiens
aagcaatcaaatataaagcaaaacagaaaaaaatgttaaaacataatctaatttaaaataagaaaacattttacttatatggctatatgcataagatcaayggcttatttaaaataaaatctcccaaactaccgattccttaaaatagctccctttttaactttggaaagcctgaatcatttacataaattcaattgcctt

SEQ ID NO: 479526 - DNA, 201 bp, Homo sapiens
cctcatgcctgtaatcccagcactttgggaggccaaggtgggaggatcacttgagcccaggaattcaagaccagccagggcaacatagtgagatctcgtcyctataaaaaaaaattttttttaactgaaaaaaatttctttttaagtagtcacttaaacttaccctcctgagagaacaggtaacaccactcgaacaaatgg

SEQ ID NO: 479527 - DNA, 201 bp, Homo sapiens
gactccttaccctaacctgtatgtaatcacctctttgttcttggacagttttcctctttgggcagttttactgctcacgtatgaatccataaataagtgtktctcagttttcttttcatttttgcccccctaagaagcctttttagaagttttcttcctagttttacccccctgctccatggaattttaacaccatagata

SEQ ID NO: 479528 - DNA, 201 bp, Homo sapiens
cagggaaaaagagatccctaatttgtaatctaaattaaggttatacatgtgggaaataaaagagagaccaggtagtaaatagaatttgaaggaaaaaaaamaaacaaactagtctttaattcctacaagattataatcattaatcatgcttttatatcatattatctcttaacatttaatttctatatgtaatgttcatga

SEQ ID NO: 479529 - DNA, 201 bp, Homo sapiens
gtttataactagaaaaaaagttagaaaaagaattttatctcaggtcctcaggaggctgagataggaagatcatgtgggcccaggagtttgaggctgcagtkagctatgatcatgctactgtactccagcctgggtgacagagcaagactctatctcaaaaaaaaaaaaaaaaaaaaaggaaaagaaaacaaagaatttgaa

SEQ ID NO: 479530 - DNA, 201 bp, Homo sapiens
tctctaaaatatgaagcatacctatttcacacggtggctatgaagactaaatgtgaagatatgtgaagtataaagtacttggcatagtatccatcatgcaraagtgttcagtaacttatagttgttttgactataactcaaactggaatcgatcacaagacataaagtacagtcatcattaattcaaatgacaaactttgt

SEQ ID NO: 479531 - DNA, 201 bp, Homo sapiens
ccagttaaccaaaggcatctttgtgtcaactaaccaaattactttgcagacaaggcatctaaaaacttttactgtagaccactaacattaataattgttayagtgacaatatttaataataaaataagggaaagaagtccttttcatctcccccatcctggagaatccaagcaagtgtctctccccacttgctttgcccaa

SEQ ID NO: 479532 - DNA, 201 bp, Homo sapiens
tttcaaagtgaaagattaatctaaaagtgaaagaaaatctaaaagaaaaactctccaaaaatttaaattcaggcgaaggttcatgggattaaatttttttktgtgtattctatttctgaaacatagaaatctatcttccactctttaactctcctactgggctaaaagagtattgtatataatgtgcactcactgatttaa

SEQ ID NO: 479533 - DNA, 201 bp, Homo sapiens
tgttctcactcaaactctgcccatgactccatacttcattgagctcccttctccctgtgtgcacctttcagccctgatcttccatcctacatgttttcctyacaattctcacaaatgcctttagcctgtatttcctcctataccttcaacctcagtcatgttcccatccacgaaatttctttttctgagtattaatcagca

SEQ ID NO: 479534 - DNA, 201 bp, Homo sapiens
gagtattaatcagcacatcccaaacagaattcaacattatctttctcaaacaatatcctcagcacactattccctgcttaaggccttcctatcaataattrtggggaaaagcaagacagatcagcctgttactgtgtctgtgtagaaagaagtagacataggagactccattttgttctgtactaagaaaaattcttctgc

SEQ ID NO: 479535 - DNA, 201 bp, Homo sapiens
aaggcccttacaaatgaggcttcacacaatggactagcttgctctcctgcccttctgccttctaccatgtgaggatgcaacaagaaggtcctcagacaccmaatgttggtatcttgatcttggacttcccagccttcagaacagtgagaaaataaatgtctgttctttataaattacccagtctccagtattctgttaaaa

SEQ ID NO: 479536 - DNA, 201 bp, Homo sapiens
ttatattccaaatcaaactattctgggtatctaaagactatatacctagcctaaaactcccaaagagtttggttgcatcaacgattgaaagagcattttcsaaatgccaatttcaaagcctacccagagaatctgtttttcaaaagctctctgaggtgattctcacatgcatctgggtctgtcaccatcagcccagttact

SEQ ID NO: 479537 - DNA, 201 bp, Homo sapiens
tgatggcctctatgagtgtcaaaaccagacagaaaagacagagagtgtttttagtataactcaatgcagcagcaaaatcttagactccacctcttcctttwagctcaggagctggaaagctcaccagccagcacctccccatcctcatgccataggaagagcacaggtctgcaaaccaggagggggaggccacagtagaaa

SEQ ID NO: 479538 - DNA, 201 bp, Homo sapiens
gagtcagatatttgttgaacaaataacagacagcaagtattcaagggacactctccatgcacatccctttaaaccctttctaggttaaaaaaaaaaaaaacaaccagatattattcagggatatacttgaggggcagggagcaggacacataatacaaggagcagcaataagaagcaaagacagcagtaacaccaatagtg

SEQ ID NO: 479539 - DNA, 201 bp, Homo sapiens
agctgaaaggtcacaggccatattctctgaccatattgatgcactaaaaataactgaaaagccatctgaaaatgctttttaaaaagttttttttttcctarataactcttgagtaaaagaagaaattgatcctcatgcccctaagtatgtgccccagagaaatgctggcacaggggtaccatgaaatacaagcaagaatga

SEQ ID NO: 479540 - DNA, 201 bp, Homo sapiens
attctctgaccatattgatgcactaaaaataactgaaaagccatctgaaaatgctttttaaaaagttttttttttcctagataactcttgagtaaaagaaraaattgatcctcatgcccctaagtatgtgccccagagaaatgctggcacaggggtaccatgaaatacaagcaagaatgatcacagcagcattcgctgttc

SEQ ID NO: 479541 - DNA, 201 bp, Homo sapiens
ttacctatttttgaactgtatataaagggaattgtacaaaataggttttggagtccagtctcttttacaactgtgttcaagatccacccatcttgtcccayatagctgtaaaccactttataaacaccacaattctccattttattggaatgaacacttgggttttctatttggtgctattataaacgatgctgctctgaa

SEQ ID NO: 479542 - DNA, 201 bp, Homo sapiens
ggtaacaaaagaaaactgtacacaattctaaacaactatttcacacccaacctgggatttccactcactgtgatagtatatttgtgatcaactttgtaacmacctgtcaaaaggaaacctctaacatctgctcacgaaggaatccttcagcatttcctgctctgcagcagaaaacacatgggaatcactcagaactccaga

SEQ ID NO: 479543 - DNA, 201 bp, Homo sapiens
ttgactcaaatgaggaacaagaaacaaaatgtaactatcctatagggagagagaaaaagcccccacattccattcaagaggctcccaccttttatatcctrtattttatttaaaatctagactctgggtaaagcagatttaaaagctttacaaaatcataactattaccaaataagccatcttctaaatctcctattaaga

SEQ ID NO: 479544 - DNA, 201 bp, Homo sapiens
aaatgaacctaagtttatctaaatagacccttcttaaagtactacctcagaattcaattcagtaattcagatgctgcccgaaacaccaaaaagtgacttcyttaaaaatatagcaagttggatttaccaacaaggtcacattccctcctgccccaactcccatctttgtgttatgctttatctcaagttccatttttctta

SEQ ID NO: 479545 - DNA, 201 bp, Homo sapiens
taaactgcaagtattacctctaggagtaattagccagttccataggtccatgagattttcccatgattatccctaaaagtaccaattaggatcacaggcaygtggggaccattctctaatcgtaacattctctaaaccctcaatcacaatttacatttgaaaacattagcttttttatggtaaaaagtatgtgcgtatata

SEQ ID NO: 479546 - DNA, 201 bp, Homo sapiens
ttcccaccacctccccattcctaacccctgcaaccactaatctattctccatttctctaattttgtcctttccaaattgttgttatatcaagtaacattayataaaatgtaaaaaaattacatacatactgtatgtaatcttttaggattggttttattcactaggcatattcgtataggaagggagaaatatatatatat

SEQ ID NO: 479547 - DNA, 201 bp, Homo sapiens
ctcgacaaaaccgccatcgtcatcatggcccgttctcaatgagctgttgggtacacctcccagacggggtggtggccgggcagaggggatcctcacttctyagacggggcggctgccgggcggaggggctcctcacttagacggggcggccgggcagaggcgctcctcacatcccagacggggcggcggggcagaggcgct

SEQ ID NO: 479548 - DNA, 201 bp, Homo sapiens
ttggaaggccttccttgatttcagttagattagattctaacctaataggttctcagagcaccatttacctgtcattcacatcacttatcacaagttaacasttatttgtgtgattacatgactgcaagcaagctctatgagggttgggattattttcgcttttgctccccatcatatgcacattgcctagcataatgactg

SEQ ID NO: 479549 - DNA, 201 bp, Homo sapiens
aggtagacagataaatgtaatctttttaggtgcactgggggaaatagagcttcttccaaagtgaagcttactaatacttcggtagaatgaaagtagactcygaggccagagagattaggtttgagtttatattttgctacatactagtctgtgaccataggcaagtcctcaaatgcccatctcacagtattgagtggaaat

SEQ ID NO: 479550 - DNA, 201 bp, Homo sapiens
tccagagtacaacatctttatttacttttaagtgtgtggcattgtgactggaaattttatcctaaaccaggaaaatctgttagggtaacattaggacaaattttttttttttttttttttttttgagacggagtcttgctctgtcccccaggctggagtgcagtggcgcaatattggctcaccgcaagctccacctcccag

SEQ ID NO: 479551 - DNA, 201 bp, Homo sapiens
aactaggaagaaatcattcctgagaaatccaaaagaaaaaaaaaaaaagaggaattgtagctagtatcttctagcctattctttttgccacttttctttctttttttttttttttttgagacagagtgtttcactcttttgcccaggatgcagtgcagtggtgctatctcggctcactgcaacctccgcctcccaggttca

SEQ ID NO: 479552 - DNA, 201 bp, Homo sapiens
tttttttcttggaatcatgaaggaaaagagttactgagagaaaggcctgaagacttaaatgtaatatatgaggacaattaaacagttttatttgggaatgrccatttgcctcactaaggaggctctagctcttccatgccttgaaaaccccaaaaatgaagaaaaaatggtatttctggctaggttagggacttagaagtg

SEQ ID NO: 479553 - DNA, 201 bp, Homo sapiens
atttttatattttagtagagatggggtttcaccatgttggccatgatggtctctatatcctgacctcgtgatccacctgcctctgcctcccaaagtgctgrgattacaagcgtgagccaccaccaatttattttatttcattttttaaataatagagataaggtgtcactatgttgcccaggctggtcttgaactccaggg

SEQ ID NO: 479554 - DNA, 201 bp, Homo sapiens
tccacctgcctctgcctcccaaagtgctgggattacaagcgtgagccaccaccaatttattttatttcattttttaaataatagagataaggtgtcactaygttgcccaggctggtcttgaactccagggctcaagcagtctacccaccttggcctcccaaaatgctgggagtacaggcgtgagccaccacgcccagcctg

SEQ ID NO: 479555 - DNA, 201 bp, Homo sapiens
gggactacaggcatgctaccacacatgactaatttgttatattttttgtagaggggggttttaccatgttgcccaggctggtcacgaactcctaagctcargcaatcctcctgcctcggcctcccaaagtgttgggattacaggcatgagccactgtgcccagtctggtttggatttttgtaatggaatcttttaaagcta

SEQ ID NO: 479556 - DNA, 201 bp, Homo sapiens
agacagggtcttgttctgttgcccaggctgaagtgcagtggcttgatcctagctcgctgcagcctgaaactcctggtcccaagtggtcctccttcctcagmctctatagtggctggaactacaagcatgtaccaccatgcctggcacatttttttttttttctaaagagatgggggtattgctttcttgcctaggctggtc

SEQ ID NO: 479557 - DNA, 201 bp, Homo sapiens
tgagcagagatcgcactattgcacttcagcctgggcaacaaaagcgaactctgtctcaaaaaaaaaaaagtatatgtatatatatacacacatatataaacacacacacatctatctatctatctatctatctatctatctatctatctatctatctattctataccctaaagtgtgaaaatcttactgcattcatgtttt

SEQ ID NO: 479558 - DNA, 201 bp, Homo sapiens
tcgcactattgcacttcagcctgggcaacaaaagcgaactctgtctcaaaaaaaaaaaagtatatgtatatatatacacacatatataaacacacacacatctatctatctatctatctatctatctatctatctatctatctatctattctataccctaaagtgtgaaaatcttactgcattcatgttttatgtgccttc

SEQ ID NO: 479559 - DNA, 201 bp, Homo sapiens
cgcactattgcacttcagcctgggcaacaaaagcgaactctgtctcaaaaaaaaaaaagtatatgtatatatatacacacatatataaacacacacacatctatctatctatctatctatctatctatctatctatctatctatctattctataccctaaagtgtgaaaatcttactgcattcatgttttatgtgccttca

SEQ ID NO: 479560 - DNA, 201 bp, Homo sapiens
cttgaggagctcatggagaaatagaaagtatctagatctggatagcctattcaataattgtgccacacattttctttgtttctttttatttaagagacagrgtctcacttttgctcgggctgaagtgcagttgcatcatcataactcacagcagcctcaactcctgggctcaaatgatcctcctgcctctgtctcccaagg

SEQ ID NO: 479561 - DNA, 201 bp, Homo sapiens
attattatatgagagaaagaatttattataaagttgaaattccttctaatccgcatccttagttctccccactcatcataagcagctactagtataaatatgatatttctttctagttgattttgtttatactgttatatatgcataagcactcatgaacaatatagagtattattttatatgtgtgacctttgtaatttc

SEQ ID NO: 479562 - DNA, 201 bp, Homo sapiens
ttcctgggttcaagcgattctcctgccttagcctcccgagtagcagggattacaggcacatgccaccatgcccggctaatctttgtatttttagtagagayggggtttcaccatgttggccaggctggtctcaaactcctgacatcaagtgatctgcccgcctcagcttccagaagtgctgggattacaggcgtgagccac

SEQ ID NO: 479563 - DNA, 201 bp, Homo sapiens
ttattatatgagagaaagaatttattataaagttgaaattccttctaatccgcatccttagttctccccactcatcataagcagctactagtataaatatgatatttctttctagttgattttgtttatactgttatatatgcataagcactcatgaacaatatagagtattattttatatgtgtgacctttgtaatttct

SEQ ID NO: 479564 - DNA, 201 bp, Homo sapiens
ttgagcctgggacgttgaggctgcagtgagccaaaattgtgccactggactccagcttggaatacagagcgagaccctgtctcaaaaaaaaaaaaaaaaarttaataatacttttagtgacttttattgtaggtgctcatttagctcttatactatgtctccactttcattttgactactcttccaataattatatgtaac

SEQ ID NO: 479565 - DNA, 201 bp, Homo sapiens
ggctcaagcaattctcctgcctcagcctcctgagtagctgggattacaggcgtgtgccaccacacccggttaattttgtatttttagtagagatggggttwcactgtgttggccaggctggtctcaaactcctgacctcgggtgattcgtcctccttggcttcccaaagtgctaggattacaggcgtgagccaccatgcct

SEQ ID NO: 479566 - DNA, 201 bp, Homo sapiens
caggcgtgagccaccatgcctggcctaatttgtgtatttttagtagagatggggttttgccatgttggccaggctgatctcgaactcctgacctcaagtgwtctgcccacctcagccctgcaaagtgctgggattacaggcatgagccactatgcccagcctcccttgcagtcttgaatcaaggaaatatgttggagcagg

SEQ ID NO: 479567 - DNA, 201 bp, Homo sapiens
acatgtaggtttgtgtatctgtcaccataatcaagatacagagttctgtcaccacaaggctcccctcgttgcccttcattatttttattttacacttgatsttagccaaaagactgagaagcgatcaatatttttatttttatttacttatttttttaagacagagtcttgctctgtcacccaagctggagtgctgtggtg

SEQ ID NO: 479568 - DNA, 201 bp, Homo sapiens
tgtcatagcagcactattctcttttttgtttttttgtgtttttttttttgagacagagtcccattctgtcgaccaggctggagtgcaatggtgtgatctcwgccctctacaacctccgcctcccaggttcaagagattctcttgcctcagactcccaagtagctgggactaaaggcatgcgctaccacacccagctaattt

SEQ ID NO: 479569 - DNA, 201 bp, Homo sapiens
ttttaccatgttggccaggatggtcttgatttctcgacctcgtgatccgcctgccttggcctgccaaagtgctgggattacaggtgtgagcgactgcgccyggtcaatttttgtatttttagtacagatgaggttttggcatgttggccaggctggtcttgaactcctgacctctggtgatccacccaccttggcctccca

SEQ ID NO: 479570 - DNA, 201 bp, Homo sapiens
aggaacaaatcttacccttgaggccaggcacggtggctcatgcctgtaattccagcactttgggaggctgaggcaggtggatttcttgagcccaggagttsgagatcagcctgggctacatggtgaaaccccatctctactaaaaaatgcaaaaattagccaggcatggtgacgtgtgcatgtagtctcagctacttggaa

SEQ ID NO: 479571 - DNA, 201 bp, Homo sapiens
ttgaaatggctgagatgactgacattgtctaattgtatacttctgaccagcttcatccctttaagggagtaatggagctgtgggtcaaggagacattcagraagagtcctactttcttgagtatgtgactcagactcaggattaattcagttacccagggtacagggttgggtctcagcctcaggaagaatgcaggggcca

SEQ ID NO: 479572 - DNA, 201 bp, Homo sapiens
agtagagacagggtttcattcactatgttggccaggctggtctcgaacccctgacctcatgatctgcccaccttggcttcccaaagtgctgggtttacagrggcgagccactgtgcccagccaaaaaatgaaaatttatcttaacagatggatatgtgatgagttcatatcacctcttggtcatttacattttccacttct

SEQ ID NO: 479573 - DNA, 201 bp, Homo sapiens
ggaggctgaggcaggagaatggcgtgaaccctggtggcagagcttgcagtgagccaagatcgcgcccctgcactccagcctgggtgacagagcaagactcygtctcaaaaaaaaaaaaaaaaaaatttccccttgtctctaaaggaaaaaacaaaaacaaaaattaaaacaaaaaagcaataccaccatctgtcttctctt

SEQ ID NO: 479574 - DNA, 201 bp, Homo sapiens
cgctcgcgctctctctctatatgtaaatatatagattttatatatatatatatatatatgggattgataaactttttcttaaagggtaagatagtaaatatttcggtattgtgaggtttacagtctttgttacaagtactcaacgctgtcaaaatatacttagtgagtacagaaataaatgagcttgactatgttccaata

SEQ ID NO: 479575 - DNA, 201 bp, Homo sapiens
tgcgggccgaaagcaaaaaaaaaaaaattatttacttagctttggggacttaacactctcatggaatttccacctatggggctatttttccattctgtttyctgacatttagttgtttttaaattttaattgatagaaattgtatatatttatggtatacaatataatattttaaaatatgtatggattgcagagacacta

SEQ ID NO: 479576 - DNA, 201 bp, Homo sapiens
cgctcgcgctctctctctatatgtaaatatatagattttatatatatatatatatatatgggattgataaactttttcttaaagggtaagatagtaaataattcggtattgtgaggtttacagtctttgttacaagtactcaacgctgtcaaaatatacttagtgagtacagaaataaatgagcttgactatgttccaata

SEQ ID NO: 479577 - DNA, 201 bp, Homo sapiens
gtagtagaaatttttatctgcagctggagttttttggtggtataccccatttctctccccttctctccctctctctctttttactaatgtgctcctcatctctgtctgagacctcatcaaaatggattttaccacccatatttctaccagttttctgatcagtatcacttaggtaatctctaagaagactgaggctttctc

SEQ ID NO: 479578 - DNA, 201 bp, Homo sapiens
tagtagaaatttttatctgcagctggagttttttggtggtataccccatttctctccccttctctccctctctctctttttactaatgtgctcctcatctctgtctgagacctcatcaaaatggattttaccacccatatttctaccagttttctgatcagtatcacttaggtaatctctaagaagactgaggctttctct

SEQ ID NO: 479579 - DNA, 201 bp, Homo sapiens
agtagaaatttttatctgcagctggagttttttggtggtataccccatttctctccccttctctccctctctctctttttactaatgtgctcctcatctctgtctgagacctcatcaaaatggattttaccacccatatttctaccagttttctgatcagtatcacttaggtaatctctaagaagactgaggctttctcta

SEQ ID NO: 479580 - DNA, 201 bp, Homo sapiens
tcattcattcattgataaccaccttatctctgagatttggtggttacatggtgctgtcctggatatacagtattttcatattaatacattttgctgtgctkcctttttaggaaactcgaaggaaggaaggcattgtaaagctgaaacctcatgaggaacctcttcgttctgagatcctcagtggaaaattcaccatcttag

SEQ ID NO: 479581 - DNA, 201 bp, Homo sapiens
ggtctgaaattcctgagctcaagctatccttccgcttcagcctcccaaaatgctaagattataggcatgaaccactgtgcccagcccatatgtttctttctttttttttttttgagacagagtgagactctgtcgcccaggctggagtgcagtggtgcgatctcagctcactgcaacctccgcctcctggcttcaagcaat

SEQ ID NO: 479582 - DNA, 201 bp, Homo sapiens
ccttttctctttttactttttcttataattgtagattcacctgcagttgtaagaaataatggagacagattacatgtaccctttctacagttatcccatgrtaacatcttccaaaactatagtgtaatatcacagccagaatgttaatatagatacaatccaccaatctgatttagacttccccagttttacttcattttt

SEQ ID NO: 479583 - DNA, 201 bp, Homo sapiens
agcccaaagtgctgggattacaggtgtgagccatctcaccctgccaagactcttaactagaactctcactagattaaaattctgtataattatagctgttyagggtattttggttttgcatggatatcccagtgatgattgataggataatagagtagttttcgaaagtacttatgtttctgttaatagttttatttttat

SEQ ID NO: 479584 - DNA, 201 bp, Homo sapiens
tcccatgtctacttctttctacacagacacagcaacagtctgatttctctatcttttccccacatttcccccttttctactcgacaaaaccgccatcgtcrtcatggcccgttctcaatgagctgttgggtacacctcccagacggggtggtggccgggcagaggggatcctcacttctcagacggggcggctgccgggcg

SEQ ID NO: 479585 - DNA, 201 bp, Homo sapiens
gatcctcagtggaaaattcaccatcttagtgagtgtttagggacctatcttgtagggccttattacttccttttttaactggtgtcctgtttggactttgtttttttttttttttttttaattttattattattatactttaagttttagggtacatgtgcacaacgtgcaggtttgttacatatgtatacatgtgccttg

SEQ ID NO: 479586 - DNA, 201 bp, Homo sapiens
ggtgacacagcaagacctgtctcaaaaaaaaccccacaaaaaagcccacacaaaacaaacaacaacaacaaaaaaacattcagggagaagcccagaagtawaaagttaagcaaaaaccatccttaataaaaagaggtgcataagcataaagaaccagctcaggtcatcactctcttcctgctaaggtaattggtattgtta

SEQ ID NO: 479587 - DNA, 201 bp, Homo sapiens
gagccatgatcacgccactgcattccagcctgggtgacacagcaagacctgtctcaaaaaaaaccccacaaaaaagcccacacaaaacaaacaacaacaayaaaaaaacattcagggagaagcccagaagtataaagttaagcaaaaaccatccttaataaaaagaggtgcataagcataaagaaccagctcaggtcatca

SEQ ID NO: 479588 - DNA, 201 bp, Homo sapiens
cacagccatcctttgatctgtctgtagttgaagagcaaagagaatgtgttttttttttcttaccacagaaatatggtccagggagtcctgggagaatcagrcaaaggatgatattaacactcttccctttggacagcaattggtgaagtcagggaattattgttagcatctgttttctacatgtatcaaacccttatccag

SEQ ID NO: 479589 - DNA, 201 bp, Homo sapiens
gcgtggtggttcatgcctgtaatcccagcactttgggaggccgaggcaggcggatcacaaggtcaggagttccaaaccagcctggccaatatggtgaaacmccgtctctactaaaaatacaaaaattagctaggtgtggtggtgggtgcctgtagtcccaactattcgggaggctgaggcaggagaattgcttgaacctgg

SEQ ID NO: 479590 - DNA, 201 bp, Homo sapiens
ggaggctgaggtaggagaatcgcttgaacgcggcaggcagaggtttcagtgagctgagatcacgccactgcactccagcctgggcgacagagtgatactcrgtctcaaaaaaaacaaaactaaacttttaatttaaccaaatgtgctctttctatactatctcttgtttcatttaatggtatctgtgaatacctttccata

SEQ ID NO: 479591 - DNA, 201 bp, Homo sapiens
ggtgatcctctcacctcagtctcctgagtagctgggactacaggcatgtgctactacacctggctagtttttgtattttttgtagggacagggttttgcartgttgcccaggttggtctcaaacttctgggctcaagtgatctgcctgcctcatcctcccaaagtgctgggattacaggcgtgcgccactgcaccccacct

SEQ ID NO: 479592 - DNA, 201 bp, Homo sapiens
gttacgttttttttttcttgagatggagtcttgctgtcgcccaggccggagttcaatggtgcgatcttggtttaatgcaattaatgcaacctccgcctccygggttcaaacaattctcctaactcaggctcccgagtagctgggattacaggcacctgccatcgtgcccagctaattttcatatttttagtagagacgggg

SEQ ID NO: 479593 - DNA, 201 bp, Homo sapiens
gtagaaatttttatctgcagctggagttttttggtggtataccccatttctctccccttctctccctctctctctttttactaatgtgctcctcatctctgtctgagacctcatcaaaatggattttaccacccatatttctaccagttttctgatcagtatcacttaggtaatctctaagaagactgaggctttctctat

SEQ ID NO: 479594 - DNA, 201 bp, Homo sapiens
tactaaaaatacaaaaaaattagctgggcgtggtggcgggagcctgtagtcccagctactcaggaggctgaagcaggagaatggcgtgaacccaggaggtrgagcttgcagtgagtcgagatcacgctactgcactccagcctgggcaacagagcgagactccgtctcaaaaaaaaaagagataagctctcattacatttc

SEQ ID NO: 479595 - DNA, 201 bp, Homo sapiens
aataccattacattgagggtctggggttgggattacacatttgaagttatgggggacacaaatgatcagtctatagcaatggctcacaacatagtgttccrggtttgttcttcctgctattccaattttcccccaagtgtatactttatctctgggtcattttcagttttgtttttttttttttttttgagttggagtctc

SEQ ID NO: 479596 - DNA, 201 bp, Homo sapiens
tctcttgcttcagccaccctagtagctgggattacaggcgcccgccaccacacccagctaagtttttgtatttttagtagagatggggtttcactacattrgctaggctggtctcgaactcctgacctcaggcaattcacccacctcagcctcccaaagtgctgggattacaggcgtgagccaccgcgcctggctccttaa

SEQ ID NO: 479597 - DNA, 201 bp, Homo sapiens
tttgctcttgttgcccaggctggaatgcaatggcgtgatcttggctcattgcaacctctgcctcccgggttcgagcaattctcttgcttcagccaccctaktagctgggattacaggcgcccgccaccacacccagctaagtttttgtatttttagtagagatggggtttcactacattggctaggctggtctcgaactcc

SEQ ID NO: 479598 - DNA, 201 bp, Homo sapiens
gaggcaggagaatggcatgaacctgggaggcggagcttgcagtaagccgagatcgcaccagtgcactccagcctgggcaacagagcaaagactccgtctcaaaaaaaaaaaaaaaaaaaacaccacatatgcattacttcacatatttaccttgttttgtggtgaaaacacttaaaatatgctgtccgcaattttcaagta

SEQ ID NO: 479599 - DNA, 201 bp, Homo sapiens
agattcaaaccattgtcctggagttaaaatattttctaagctgtgactcatcttttggctcattctttctttcactaggaaataaactgagttttaatttygagaatttcaattatcccttctgaagactgtgttgctgattaaagttgctgggacttgtttttctggtaaccagcagagctacaaattactttgtactca

SEQ ID NO: 479600 - DNA, 201 bp, Homo sapiens
cattgcacctggccttttttttttttttttgagatagagtctcactcagtcacccaggctggactgcagtggtatgatcttggccctctgcagccttggcmtcctaggctcaagcactcctcccacctcagccccccgagtagctgggaccacaggcatgtgccaccatgcatggctaatttttaaatttttttgtagaga

SEQ ID NO: 479601 - DNA, 201 bp, Homo sapiens
caacctaccatgttaaactggcatttaaggtcaggctcggtgactcacacctataatcccagcactttgggaggctgaggcgggaggattgcttgagcccrggagtttgagaccagcctgggcaatgtggcaaaaccctttctctacaaaaaatttaaaaattagctgggcgtggtggtgtgcatctgggactgagcccag

SEQ ID NO: 479602 - DNA, 201 bp, Homo sapiens
ctcactgtaacttccgtctcccaggttcaagcaattctcctgcctcagcctcccgaatagctaggattacgggcatgtgccaccacgcctggctaatatcttttttttttttttttttggagatggtgtcttgctctgtcacccaggtgggagtacaatggctcgatctcagttcaccgcaacccttgcctcctgggttca

SEQ ID NO: 479603 - DNA, 201 bp, Homo sapiens
ttttaattattatatgagagaaagaatttattataaagttgaaattccttctaatccgcatccttagttctccccactcatcataagcagctactagtatraatatgatatttctttctagttgattttgtttatactgttatatatgcataagcactcatgaacaatatagagtattattttatatgtgtgacctttgta

SEQ ID NO: 479604 - DNA, 201 bp, Homo sapiens
tcactgtaacttccgtctcccaggttcaagcaattctcctgcctcagcctcccgaatagctaggattacgggcatgtgccaccacgcctggctaatatcttttttttttttttttttggagatggtgtcttgctctgtcacccaggtgggagtacaatggctcgatctcagttcaccgcaacccttgcctcctgggttcaa

SEQ ID NO: 479605 - DNA, 201 bp, Homo sapiens
ggcgcccgccacctcgcccggctaattttttgtatttttagtagagaaggggtttcaccgtgttagccaggatgggctcgatctcctgacctcgtgatccgcctgcctcggcctcccaaagtgctgggattacaggcgtgagccaccgcgcctggccggaagattttaatgaaaggaatatttttgaaattttggtctaca

SEQ ID NO: 479606 - DNA, 201 bp, Homo sapiens
atacaaaattagccgggcgtggtggcacatgcctgtaatcccagctacttgggaggctgaggcaggagaatcgcttgaacccaggaggcggaggttgcagmgagcagagattgcgctcaaaaagaaaaaaaaaaagaggatcggccaggcgtggtggttcatgcctgtaatcccagcactttgggaggccgaggcaggcgg

SEQ ID NO: 479607 - DNA, 201 bp, Homo sapiens
ctgtcagcctggatgtgatggctgaagttctgatgattaagactctgagagggtatgtagcagtgcttcccaaacctacctacgactcacctggggatctygttgacatgcagattcatgtttcttacactctcccatacgatgctggtgtgattggtccacggactatactgaatagcagggatgtggaaagatgagcag

SEQ ID NO: 479608 - DNA, 201 bp, Homo sapiens
ggccaggctagtctcgaactcctgacctcaggtgatccgccaccttggcctcctaaagtgctggaattacaggcatgagtcactgcgcctggcctaggcctttttttttttttttttttcttttttgagacagagtctcactttgtcatccaggctggagtgcagtggtgccatctcagctcactgcagtctcaacctcct

SEQ ID NO: 479609 - DNA, 201 bp, Homo sapiens
cactgcagcttctgtctcccaagcttaggtgatcctcctacctcagcttcctgaatagccgggactacaggtttgtacctccatgcccagctaattttttwaatttttagtagagacaaggtcttgctatgttgcccaggctggtcttgaactcctgagctcaagtgatcctcccaccttggccctcccaaagagttagga

SEQ ID NO: 479610 - DNA, 201 bp, Homo sapiens
ttcttgtgcctcagcctcccaagtacctgagactacaggcatgtgccaccacacctggctaatttttgtatttttcatagagatggggttttaccatgttkccaggctgatctcaaactcttgagctcaggcaacctgcctgccatggcctcccaaagtgctgggattataggcatgagccactgcacccggccaagataa

SEQ ID NO: 479611 - DNA, 201 bp, Homo sapiens
ctaggcaacacagtgagatcctgtctctacaaaacatagaacaaattagctgggcatggtggcacaagcctgtgaggtcaaggcagcagtaagtttgatcrtgccactgcactccaacctgggcaacagagtgagatcctgtctcaaaaaaaattctggatcttacagtataggaattctgccttttccaaacaattaacc

SEQ ID NO: 479612 - DNA, 201 bp, Homo sapiens
gtatggtcagcatgacccagtgcccttatctaaatcttttatgggaccatatctagtttgccggtgactctcttaaagttcagcactcagaactgaagacrgcctaggtgctttttgacttactgtggggttatgtcccaatagacccatcgtaagttgaaaatatcataagttgaaaatgcatttaatacacctaaccta

SEQ ID NO: 479613 - DNA, 201 bp, Homo sapiens
tctttaatagaaaaaaattacggggcctatgtgtgatggattttacgcagtgcattttcagcatctgttgagaaggttatatacttttttttcctttcctrttaacataaaaattgctttgatagatctcctgatgttaaaccaagtctttacattcctcggagaagcctgtaatgtgagagctatctttactgtgaagct

SEQ ID NO: 479614 - DNA, 201 bp, Homo sapiens
tatattaagcactttttgtagtcgaagcactggttcctgataattaaaaattaagtgagacagtctaccctcaaggagctcatggtcttgatagggaacayagagatacacataggaggactttggctctgcaggaacgcagaggagcatatggcctcaggcagtcaggaaagacttcacagaagaggtgagctgtgctgg

SEQ ID NO: 479615 - DNA, 201 bp, Homo sapiens
gctctgttgcccaggctggagtgcagtggtgcaatctcgattcactgcaacctctgcctcttgggctcaggcaattctcctgcctcagcctcccaagtagttgggattacaggcatgtgccaccatacccagctaattttgtatttttagtagaaatggggcttcaccatattggccaggctggtctcaaactgctgacct

SEQ ID NO: 479616 - DNA, 201 bp, Homo sapiens
gctctgttgcccaggctggagtgcagtggtgcaatctcgattcactgcaacctctgcctcttgggctcaggcaattctcctgcctcagcctcccaagtagytgggattacaggcatgtgccaccatacccagctaattttgtatttttagtagaaatggggcttcaccatattggccaggctggtctcaaactgctgacct

SEQ ID NO: 479617 - DNA, 201 bp, Homo sapiens
agtagagacggggtttcgccatgttggccaggctgttgtcatgatgtcgaactcctgatctcaagtgattccacctgcctccgcctcccaaagtgctgggrttacaggcatgagccaccgcgcctggccataaatttattttaaattattttattttgtatatcctattatagatgtctgacgttaagatattggcaggga

SEQ ID NO: 479618 - DNA, 201 bp, Homo sapiens
tttctttttttttttttttttttttgagacggagtctcgcactgtcgcccaggctagagtgcagtggcacgatctcggctcactgcaagctccgcctcccrggttcacgccgttctcctgcctcagcctccagagtagttgggactacggcgcccaccaccacgcccggctaatttttttgtattttaagtagagacgggg

SEQ ID NO: 479619 - DNA, 201 bp, Homo sapiens
gaggagagatgccagcttgtgtttagtaaatatgctattggcaaatgcctccagcaggaaagtgagagtggcacactcctcgttgaagcatccccatctarggctagcagttcgtgaaacagctgtcatcctttacccctgtgtagagctccctaactcatttttttggccctgaaatgaagattaccaacaaacttatta

SEQ ID NO: 479620 - DNA, 201 bp, Homo sapiens
gatcatctgagccctgggaggtcgaggctacagtgcgccatgattgtgccactgcactacagcatgggcaacagagtaaaatgctgtcttaaaaatatatytattctggtggctcacgcgtgtagtcccagcactttgggagtccaagggggtggatctcctgaggtcgggagtttgagaccagcctggccaacatggtga

SEQ ID NO: 479621 - DNA, 201 bp, Homo sapiens
agctactcgagaggctgaggcaggagaatcacttgaacttgggcggaggttgcagtgagcagagatcgcactattgcacttcagcctgggcaacaaaagcraactctgtctcaaaaaaaaaaaagtatatgtatatatatacacacatatataaacacacacacatctatctatctatctatctatctatctatctatcta

SEQ ID NO: 479622 - DNA, 201 bp, Homo sapiens
gtgagcagagatcgcactattgcacttcagcctgggcaacaaaagcgaactctgtctcaaaaaaaaaaaagtatatgtatatatatacacacatatataaacacacacacatctatctatctatctatctatctatctatctatctatctatctatctattctataccctaaagtgtgaaaatcttactgcattcatgttt

SEQ ID NO: 479623 - DNA, 201 bp, Homo sapiens
aggtctgaaatattttcttagagatgggcttccagtctactgaattacaattcagtgaccatttatttttaagggctgtgctagggattgttgggcgtaaygagtggaacaacaagttcttgtcctttaggagagaatcagatggctatacagagtttattaaggccacaagaaaaatccacagaaagatttatggggctt

SEQ ID NO: 479624 - DNA, 201 bp, Homo sapiens
tcaagcagtcttccagcctcggcctcccaaagtgctaggattacagacatgagccactgtgtccatccagcattaggttgttttttttttgttttgttttkttttttttttttgagacaaggtctcactctgtcacccagactggagtgcagtggcatgatcatggcttgctgaagccttgacctccctggcccaaggaat

SEQ ID NO: 479625 - DNA, 201 bp, Homo sapiens
attctgagtcataaaagtgggatgggctgggtgccatgactcacgcctgtaatcccagcactttgggaatctgaggcatacttatgtgtataaggtgtgtrtgaaacatacataaatttaggccaggcatggtggcttacaccagtaatctcagcactttgggaggctgaggcggacggatcacgaggtcaggagatcaag

SEQ ID NO: 479626 - DNA, 201 bp, Homo sapiens
attccaataatacgaggacctaaaataggcaaattcatagagacagaaagtagaaccaaggttactagggactagggggagaagggaatagggagatgttrtttaatgggtacagggtttttgtttgtgatgatgaaatagttctgaaaatgaatagtggtgatggctgcattgtgaacatacttaacgccaataattgta

SEQ ID NO: 479627 - DNA, 201 bp, Homo sapiens
ccgccttgtgggttcaagccattctgtgccttagtctcccaagtagatggaattacaggtgtgtgccaccacacccaactaatttgtgtgtgtatatatakgtgtgtgtgtgtgtgtgtgtgtgtgtatgtatgtttgtttatttatttatttatttattttgagacagagtctcactctcggccaggctagagtgcagtg

SEQ ID NO: 479628 - DNA, 201 bp, Homo sapiens
aattattatatgagagaaagaatttattataaagttgaaattccttctaatccgcatccttagttctccccactcatcataagcagctactagtataaatatgatatttctttctagttgattttgtttatactgttatatatgcataagcactcatgaacaatatagagtattattttatatgtgtgacctttgtaattt

SEQ ID NO: 479629 - DNA, 201 bp, Homo sapiens
gtggcacgatctcagctcacagcaagctccatctcccgggtttatgccattctcctgcctcagcctcccgtgtagctgggactacaggcgcctgccaccaygcccagctatttttttgtattttttttttaatttatttttttattgataattcttgggtgtttctcacagagggggatttggcagggtcatgggacaata

SEQ ID NO: 479630 - DNA, 201 bp, Homo sapiens
cctcgtgatctgccctcggcctcccaaagtgctgggattacaggcataagccaacacgcccagccattttttttttctttgaaacagagtcttgctctgtyacccaggctggagtgcaatggcacaatcttggctcactgcaacctccacatcctgggttcaagcaattttcctgccttagcctcctgagtagctgggatt

SEQ ID NO: 479631 - DNA, 201 bp, Homo sapiens
agcaagctccatctcccgggtttatgccattctcctgcctcagcctcccgtgtagctgggactacaggcgcctgccaccatgcccagctatttttttgtattttttttttaatttatttttttattgataattcttgggtgtttctcacagagggggatttggcagggtcatgggacaatagtggagggaaggtcagcaga

SEQ ID NO: 479632 - DNA, 201 bp, Homo sapiens
agatggttttgttagtttttgacctggcaattccatttctaggaatttagtataaaaatataaagaagaggaaatgcagctgaagtaggaaatggtgattmcttaggtgtcactcttcctcaggagtccccttgaggctgtctaatcccttcctgtggggctggggcagcagtcagaagactgccaacagatggcatcttt

SEQ ID NO: 479633 - DNA, 201 bp, Homo sapiens
atggtctttgctcactgcaacctctgcctcctgggttcaagcgattctcctgcctcagcctcccgagtagctgggactacgggtgcgtgccactgcacccrgctaattttttgtagttttggtacagatggggtttcaccgttttagccaggatggtctcaatctcctgacctcgtgatccacccgcctcggcctctgaga

SEQ ID NO: 479634 - DNA, 201 bp, Homo sapiens
agcaagattccgtctcaaaatcaataaaataaataaacttaatcctccatattttgctgatgttactttgtcaccctccatacccccaccccagaagtaamgtaaatcacagatctcatatcatatcctttatatagatactaatccagaattttgaaagatagtcccactgggcacagtggctcacgcctgtaatcccat

SEQ ID NO: 479635 - DNA, 201 bp, Homo sapiens
ccaccacgcccagctaattttttgtattgttagtagaaatgggatttcactatgttggctaggctggtctcgaactcctgaccttgtgatctgcccacctyggcctcccaaagtgctgggattgcaggcgtgagccaccgcccccatgctataaagccagttttatttgcctgacttgattgccctgcaacattcagtcag

SEQ ID NO: 479636 - DNA, 201 bp, Homo sapiens
tttggcatctccatttcctgcaaggttattcccctccctgccagtgtcagcattttcctttttccctttgggtacctcctctctctcctttgcaggggactttttttttttttttttttttcctgagaccgagtttcactcttgttgcccaggctggtgtgcaatggcatgatctcgactcaccgcaacctccgcctcctg

SEQ ID NO: 479637 - DNA, 201 bp, Homo sapiens
tgactgcttgattatggggagctactcagccctagctgggagagagagatgatacagtatatgtaccatattacctttctaaaatccaaacaatgctgatractctaacggggatctctccctctaccatagactaatatgtttagtggcccactcaaggtctccactcgatgtctcctcttggataactaagagacattg

SEQ ID NO: 479638 - DNA, 201 bp, Homo sapiens
accaccatgcctggctaatttttatgatttttgtagagatgaggtgttgctgtgttgctcaggctggtcctaaactcttggcccaaagctatcctcccccmgccagcctcccaaagagctgggattacaagtctgagccactgcgtctggccaatgtataatttttgactcccctaaaacttaaatacaaatagcctattg

SEQ ID NO: 479639 - DNA, 201 bp, Homo sapiens
agtgatccacccaccttggcctcccaaagtgctgggattataggcatgagccaccacgcccagccacaaatttccccagtttttaaaaactaatggcaggrcagctgggcaatatatgacctcgtctctgcaaaaaatttagaaattagccaggcatggtggctcacacctgtagtcccagctacttgggaggctgaggat

SEQ ID NO: 479640 - DNA, 201 bp, Homo sapiens
tgtcttagtctgttctcttctgggttattagaatcagttctgatcagaactttcctgactgtatccagaggaacataactgtgcaagttctcttgtcttgracttctgtgtttctattagcattgtgaacgttttgcaaagtcctatagcaaagaaacaagaactctttttttcaaggaatacttatacctgaaagatatt

SEQ ID NO: 479641 - DNA, 201 bp, Homo sapiens
gttggttagagttctctcatttgtttcaaattattaatcagcagtggtttcagtgatgaaaccattgaatacagacaaaaataaaattcagagaaaaccaytcgttgaatctcacatgtttgtatctttcttttgcagaagaaacccaaactgctcaatctgaaggattcttctatggcagatgccagcaaacatggtggt

SEQ ID NO: 479642 - DNA, 201 bp, Homo sapiens
ttggctttctgcaacctccgccttctgggctcaaacgatcttcccacctcagcctcccaagtagctgagactctaggcacacgtcaccacacctgcctaattttttttttttttttgtagagaaggggtttttgccatgttgcccaggctagtctcaaactcctgagctcaagcaatccacctgcctcccaaagtgctggg

SEQ ID NO: 479643 - DNA, 201 bp, Homo sapiens
acgcccggctaatttttgttatgttttttagtagagacggtgttttaccatgttggccaggctggtccagaactcctgacctcaggtaatccacctgcctsggcctcccaaagtgctgggattacaggcatgagccactacaccgagtctggaatctttactatatttgacaacctaagaattatgtgaacattaaagcaa

SEQ ID NO: 479644 - DNA, 201 bp, Homo sapiens
ctgcaacctccgccttctgggctcaaacgatcttcccacctcagcctcccaagtagctgagactctaggcacacgtcaccacacctgcctaattttttttwtttttttgtagagaaggggtttttgccatgttgcccaggctagtctcaaactcctgagctcaagcaatccacctgcctcccaaagtgctgggattatagg

SEQ ID NO: 479645 - DNA, 201 bp, Homo sapiens
cctgaccccagcttcctgcacaacttgtctatctcttaccttgtctgccatgggtaagcacacagtgtggaacattgcgtcttccataggtgttggtaagtttttttttttttccttaaatagagacagggtgtcactgttttgcccaggctggtcttgaacttctggtctcaagtgatcctcctgtcttggcctcttaaa

SEQ ID NO: 479646 - DNA, 201 bp, Homo sapiens
tgtagactttatgcatttatttttgagacagagtttcgctgtgtctcaaaccatgcctggctgattttttgtatttttagtagagatgggatttcaccatkttggccaggctggtctcgaacctgacctcaagtgatccaccctcctcagcctcccaaagtactgggattacaggcgtgagccaccacgcccagatgtaga

SEQ ID NO: 479647 - DNA, 201 bp, Homo sapiens
aaaattgatgtgggctgtgtgaagactggcaaataccttaaagttcttagtgatgattccagctttctccttcttatagacgtactatatgggcattattsgtcctgtcagctgggtggctgatttgagtttttcagaactgtctcccttcttgggggctaagagcttcctggagaagaggttgagcttggagtcttaact

SEQ ID NO: 479648 - DNA, 201 bp, Homo sapiens
gctggagtgtagtggcacgatctcagctcactgcagtctccgcctcccgggctcaagtgatactcctgccttagcctccctagtagctgggattacaggckccgcccaccacgcccagctaattttttgtattgttagtagaaatgggatttcactatgttggctaggctggtctcgaactcctgaccttgtgatctgccc

SEQ ID NO: 479649 - DNA, 201 bp, Homo sapiens
aatgtaggccgggcatggtggcttacacctgtaatcccagcactttgggaggccgaggtgggtggatcacctgaggtcaggagttcaagaccagcctgacmaatgtgatgaaaccatgcctctactaaaaatacaaaatgagccaggcatggtggcgcatgcctgtaataatcccagctactcaggaggctgaggcaggag

SEQ ID NO: 479650 - DNA, 201 bp, Homo sapiens
gccaggctggtctcgaacctgacctcaagtgatccaccctcctcagcctcccaaagtactgggattacaggcgtgagccaccacgcccagatgtagatatwatttagatatttaattgacaagagatggtgttggatcaaatgtgggggtaagcaaaagaaggacatcaaggatggtgcctgattagttttggggtttttt

SEQ ID NO: 479651 - DNA, 201 bp, Homo sapiens
attcgtcctgtcagctgggtggctgatttgagtttttcagaactgtctcccttcttgggggctaagagcttcctggagaagaggttgagcttggagtcttaactccttcaggtgctgaacattggcccacagggacatggtgtactaatgccaccctcttgtggatgctggtcacccttaactcttctaagctgaagcccc

SEQ ID NO: 479652 - DNA, 201 bp, Homo sapiens
taattctgaggttggttttcgaaacaatagttacaattatttactgtatctggttatgattttgaatcagtaataaatactatctccacccaccccccgcttttttttttttttttaatggaaacaggtttcatccagaaaaccccaaaacagtgactttttttttttttttttccaacccagggtctcactctattgccc

SEQ ID NO: 479653 - DNA, 201 bp, Homo sapiens
gcctcccacagtgctaggattacaggtgtgaaccaccgcgcccagttttattataacacatggccaggtgacttttaggacctgtaggtgttttttttgtrtgtgtgtatttgggatcttcctctgtcgctcaggctggagtgcagtggtgcaatcttgcttaatctaacctccacctcctggcctcaaatgatccttcct

SEQ ID NO: 479654 - DNA, 201 bp, Homo sapiens
gattttgaatcagtaataaatactatctccacccaccccccgcttttttttttttttttaatggaaacaggtttcatccagaaaaccccaaaacagtgactttttttttttttttttccaacccagggtctcactctattgcccaggctggagtgcagtggtgtgatcagctcactgtagccttgacctcctacctcagcc

SEQ ID NO: 479655 - DNA, 201 bp, Homo sapiens
gctcactgggtcctacccaggatacattagaatcagctggattgctggtttaaaatgcacattggtaaaccaaggaaatgtgggttttgggggttttgggttttttttttttttttttttggagacagggtttggctctgtcatctaggctggggtgcggtggtgcgatcttggctcactgcagcctccacctcctggctc

SEQ ID NO: 479656 - DNA, 201 bp, Homo sapiens
gttgtgaagatgaacgctttgaggtacaagcttgtttggcatttgaagttgggggaaatgggagatgctcagtgagactatcagtacctgtctctgagggktattaagatggaagagccaaaggctcacattcttctatggtaagtgcttgttgtggtactttccatgctttatgcattggtcaaatgtatatattagtac

SEQ ID NO: 479657 - DNA, 201 bp, Homo sapiens
ttctgagttctttattatctctcctttgcaatgagctgtcatttctttaatgttttggttgctactaagaatttccaatacttgaaatttttttcccttcwtttttttttgagatggagtcttgctctgtcgcccaggctggagtgcagtggtgtgatctcagctcactacaacctctgcctcccgggttcaagcaattat

SEQ ID NO: 479658 - DNA, 201 bp, Homo sapiens
gtattgttacccttagcaagtatcttgccatggttagcaaaccagctctgagaactggcatttttctttcatgtttctggtattgattgctttgttgttttttgtttgtttgtttgtttgttttgttttgtttttttgagacggagtctcgctctgtctcccaggctggagtgcagtggcgcaatctcggctcactgcaag

SEQ ID NO: 479659 - DNA, 201 bp, Homo sapiens
gaatgtcagcagcagtgatatttggtacatatttagcaggttatctttacagttgcttgtgtttttctctcccaacaagattgtagacttcaggagattcrgggccttaatagtaaatccctgttgaagtgagctaagaaactttatcagcagagtctaagggtctccccaagtgcttccttaaatctgtagcttctaaat

SEQ ID NO: 479660 - DNA, 201 bp, Homo sapiens
tattgttacccttagcaagtatcttgccatggttagcaaaccagctctgagaactggcatttttctttcatgtttctggtattgattgctttgttgttttttgtttgtttgtttgtttgttttgttttgtttttttgagacggagtctcgctctgtctcccaggctggagtgcagtggcgcaatctcggctcactgcaagc

SEQ ID NO: 479661 - DNA, 201 bp, Homo sapiens
tctacctgtttatgacttctcataaccttagcacctcagaaacttagcagtattgctggctaacagaatttttaatccgtgttccaatacctactaacaaycatgtctttatagaaagggacttttttgatcttgaaatttatgaattcggggcattgtaatcatagaatttactagagtgcccaatgcattaggagctgt

SEQ ID NO: 479662 - DNA, 201 bp, Homo sapiens
attgttacccttagcaagtatcttgccatggttagcaaaccagctctgagaactggcatttttctttcatgtttctggtattgattgctttgttgttttttgtttgtttgtttgtttgttttgttttgtttttttgagacggagtctcgctctgtctcccaggctggagtgcagtggcgcaatctcggctcactgcaagct

SEQ ID NO: 479663 - DNA, 201 bp, Homo sapiens
attacaggcatgagtcaccatgcccagcctgaaaatttattttttttccaaaggaataaactcattttagctattaccacttgtacatcgaaacaatgttrtggagttttactgatcttatttttcctgtatattgaaatgttttggtatttcatcatcctaggaattatttcatcattactcatcaattctcaaatatgc

SEQ ID NO: 479664 - DNA, 201 bp, Homo sapiens
ttgttacccttagcaagtatcttgccatggttagcaaaccagctctgagaactggcatttttctttcatgtttctggtattgattgctttgttgttttttgtttgtttgtttgtttgttttgttttgtttttttgagacggagtctcgctctgtctcccaggctggagtgcagtggcgcaatctcggctcactgcaagctc

SEQ ID NO: 479665 - DNA, 201 bp, Homo sapiens
ccggctaattttttttgtatttttagtggagatgggtttcaccatgttgaccaggctggtcttgaactcctgacctcaagtgacccacccgtcttggcctyccaaagtgctgggattacaagtgtgagccactgcgcctgtcccaggagctttattttgaagtaattaggaagggaagagtggagtgaataaatgaggtgg

SEQ ID NO: 479666 - DNA, 201 bp, Homo sapiens
agaccgagtctcgctctgtcgcccaagctggagtgcagtggcacgatctcggctcactgcaacctctgcctcccgggttcaagcgattctcctgtctcgcyctcccgagtagctgggactacaggcgcatgccaccataccgggctgatttttttttttttttagtggagacggggtttcaccgtgttagccaggatggtc

SEQ ID NO: 479667 - DNA, 201 bp, Homo sapiens
tgaggtgggaggattacttgagcccaggaggttggggatgcggtgagccgtgatagccctgctgcactccagcctggtggacataatggtatgctattgcaaaaaaaaaaaaaagggttctgggactgcctatctgacaggattgttgcgaggaggacatcagctgatagcagtcatacatggaagacttggctgttgtcg

SEQ ID NO: 479668 - DNA, 201 bp, Homo sapiens
cctcccaaagtgctgggattgcaggcgtgagccaccgcccccatgctataaagccagttttatttgcctgacttgattgccctgcaacattcagtcaggattttttttttttttttttgagacagagttttgctcctttttgcctaggctggagtgcaatagtgcagtgtcggctcactgcagcctctacctcccgggttc

SEQ ID NO: 479669 - DNA, 201 bp, Homo sapiens
gtgcaggctggattgcagtggcacgatcttggctcactgcaagctccgcctcctgggttcacgctattctcctgcctcagcctcccgagtagctgggactrtaggtgcccgccaacacgcctggttaattttttgtatttttagtagagacggggtttcaccatgctagccaggatggtctcgatctcctgacctcgtgat

SEQ ID NO: 479670 - DNA, 201 bp, Homo sapiens
agctaatatttgtgtttttagtagagacagggtttctccatgttggtcaggttggtctcgaactcccaaactcaggtgatccacccgcctcggcctcccaragtgctgggattataagcgtaagccactgcatccggcctagcctgctgttttcacttaatatgtcttagagttcattctttgtacttgtggataaaccct

SEQ ID NO: 479671 - DNA, 201 bp, Homo sapiens
ccttccaaagtgctgggattacgggtgtgagccactgtgaccagcctatgaagtttttgttttttaaacccagtgctgccctatcataacatttctataattttttttttttttttttttttgagacagagtctcagtctgttgcccaggctggagtgcagtggtgggacctcccctcatgcaacctctgcctcctggatt

SEQ ID NO: 479672 - DNA, 201 bp, Homo sapiens
tctgttactctgttttgtagaagtgaagaaatttggtttttgcccttttttattatgaaagtaatgtatcactttggtttttttattttttattttattcwtttatttatttatttatttatttattttgagatggagtttcgctcttatcacccaggctggagtgcagtggtgcgatctcggcccactgcaacctctgcc

SEQ ID NO: 479673 - DNA, 201 bp, Homo sapiens
ggaaggcttactgataaacaacatattttgtatgttgtatgtattatatatactgcattctttttttctttcttttttttttttttaatgaaaatagacayggggtctccttacgttgcccagggctggtctcaaactcaagggttcaaacaacccacccatttcagcctcctaaagtgctgggattacaggcgtgagcca

SEQ ID NO: 479674 - DNA, 201 bp, Homo sapiens
gattacaggtgtgagccaccatgccttgccttaaggagtcttctgaaaataagttaatttctaagagtaatgggttttttgtttttgtttttgtttttttgttttttttttattttttttctgggacagtctcactccattgctgaggctggggtacaatggtgtgatctgggctcactgtaacctccacctcccgggttc

SEQ ID NO: 479675 - DNA, 201 bp, Homo sapiens
atttttgagcaggacttctgtttaaccagtggggtttatggctcattcttaatatgtagaaatagtttatggaaaggagactggaactcaaaaggtgataygagacatggagaacaggcaggacagggataaagatgtagaactcaggaaaaggaaagtaagtgagggttcaggacgctgtcatgtgctttatgtaatttt

SEQ ID NO: 479676 - DNA, 201 bp, Homo sapiens
attacaggtgtgagccaccatgccttgccttaaggagtcttctgaaaataagttaatttctaagagtaatgggttttttgtttttgtttttgtttttttgttttttttttattttttttctgggacagtctcactccattgctgaggctggggtacaatggtgtgatctgggctcactgtaacctccacctcccgggttca

SEQ ID NO: 479677 - DNA, 201 bp, Homo sapiens
aggctcatctcaaactcctggcctcaagcaatcctcccaccacggcctcccaaagtgctaggattacaaatgtgagctgctacacccagcatcccacccgtttttttttgtttgttttgttttttgagacggagagccttgttctgtcaaccaggctggaatgcggtggcgcgatctcagctcactgcaccctccgcaccc

SEQ ID NO: 479678 - DNA, 201 bp, Homo sapiens
taaattaggtacttgagctgtgagccaaaagctttttcatgaagcatttcttctgggctcttaaggaaatagccaacctgaggagtgtatcttcttcttcttttttttttttttttatgtgttgctgatgtaggaagcccagatatggccctagctttctatctgttgaggagctaatgacactgaaaaataattctgaaa

SEQ ID NO: 479679 - DNA, 201 bp, Homo sapiens
tatctaagacttgagcccacatctttcctttgctcctttagaagaaaattaggctttgtatttgaagggctcttttttggttctgcttcatttaataaaawtttttttttctgttttgcagtcccatgagcgtgtaagcaagcgtctacatcagagattccaggcctgggtagataaatggaccaaggagcatgtgccccg

SEQ ID NO: 479680 - DNA, 201 bp, Homo sapiens
atctaagacttgagcccacatctttcctttgctcctttagaagaaaattaggctttgtatttgaagggctcttttttggttctgcttcatttaataaaatwttttttttctgttttgcagtcccatgagcgtgtaagcaagcgtctacatcagagattccaggcctgggtagataaatggaccaaggagcatgtgccccgt

SEQ ID NO: 479681 - DNA, 201 bp, Homo sapiens
ggctgtgtctgcctttcctcatctgtactttatgcttcattgaaatagctttatgagcaagtgacccatgtgaggaatgctcttgtgcaggctgggagagyaggttcctctctcagcaggggagccaacagctctttgaaggactggcttccctaggatattttcctctctgaaagtggcccagcagtaccataaagaagt

SEQ ID NO: 479682 - DNA, 201 bp, Homo sapiens
tttattttttattttattcatttatttatttatttatttatttattttgagatggagtttcgctcttatcacccaggctggagtgcagtggtgcgatctcrgcccactgcaacctctgcctcccgggctcaagtgattctcctgcctcagcctcccgagtagctgggattacgtgcacctgctgccatgcctggctaattt

SEQ ID NO: 479683 - DNA, 201 bp, Homo sapiens
tgcctgcctcagcctcccaaagtgctgggattacaggtgtgagccactgcatccggccaataaagtattgacttcatttttggttacagaggttaatctcmgatgagttaagcatcagttttaaaccaacagaacccaagaccaaaccactgaaagtcatgaacgtatataagaaatagctaaaaagacattttactctac

SEQ ID NO: 479684 - DNA, 201 bp, Homo sapiens
tgatggaaattatggccactagacttttttatccctattggtaaattttccttaactaaattttttccagtgttttgtctcaatcagggaagtagcactgstagtgatttaggctacttggtttctgaattggtttagatacccttatattctggcatggttcactgttgtaagagtgtaactcatctgaacaatgtagat

SEQ ID NO: 479685 - DNA, 201 bp, Homo sapiens
tcagctcactgcaacctccacctcctgggttcaagtgattcttctgccttagcctcccgagtagctgggattacaggcacccaccaccatgcctggctaatttttttttttttttttttttttgagacagtgtctcgctctgtcgcccaggctggagtacagtagcgcgatctcagctcactgcaatctccccttcccagg

SEQ ID NO: 479686 - DNA, 201 bp, Homo sapiens
ttcgcgcctgtagtctcagttatttgggaggctgaggcaggagaattgcttgaaccgggaggtggagattgcagtaagctgagatcgtgccactgctctcyggcctggcagcagagcgagacaccgtctcaaaaaaaattttttaaatgtcatttaatttatctccccaggctggacatggtggctcacatctgtaatccc

SEQ ID NO: 479687 - DNA, 201 bp, Homo sapiens
gaggattgtaagataaaatgttaaacacacttagaaaagatagcggcagggtgtgttcatgaaatccttttgtcttgttgaagtctttggcccttagtgcrtgctgaatattttatgcttgtttgaaatatttagtttattacttctccaaactaaacctttgttcattttgttcttccttttcgctatggatggaaaaga

SEQ ID NO: 479688 - DNA, 201 bp, Homo sapiens
ggcctcgaaccccgtgaacggcttctcgttggagtagtcggagcggaaggtaatgtccaggctggagcccagcgagtagaaagtgtccttgccaggggccygctccgtgtctgtgctctcctgcccgcacagcgtggccagcaccttggcccccgagctcagctgtggggtcaggtgtcacagggagtgaaggcaagaccc

SEQ ID NO: 479689 - DNA, 201 bp, Homo sapiens
gtagtcggagcggaaggtaatgtccaggctggagcccagcgagtagaaagtgtccttgccaggggcccgctccgtgtctgtgctctcctgcccgcacagcrtggccagcaccttggcccccgagctcagctgtggggtcaggtgtcacagggagtgaaggcaagacccaggcctgatctccctcctggccaagcctggccc

SEQ ID NO: 479690 - DNA, 201 bp, Homo sapiens
cacgatctcagctcactgcaccctcctgcctcagcctcccgagtagttgggattacaggcgcacgccaccaagctgggccatttttttttttttttttttwtttttagtagagaccttgtgatctgcccgcctcagcctcccagagtgctgagattacaggtgtgagccaccagcgcttggcctgtttcctattttagaag

SEQ ID NO: 479691 - DNA, 201 bp, Homo sapiens
ggtcttatccttctctctgcctcttatcaatgatgttctaaatctaagaaaaggaagcatgaagtttaagaagtgtgccaaggaaatacctaatttcagcrttttgaagtagtgtgctgttagtagtcgatctgtctgtgtgttccttttattataacttggtattgcaacaaagtccatcaaatttggtcagtatgcaag

SEQ ID NO: 479692 - DNA, 201 bp, Homo sapiens
ctgtgctctcctgcccgcacagcgtggccagcaccttggcccccgagctcagctgtggggtcaggtgtcacagggagtgaaggcaagacccaggcctgatstccctcctggccaagcctggcccctgctcccaggtgtccctgaaccctggctactccttggggaccccccgaccctgagaaaccccagccctcccgtcct

SEQ ID NO: 479693 - DNA, 201 bp, Homo sapiens
cagccataggggttcatgtcataggctttgagatttttcaacaaacaaaattcgtgttgtgtgtgtgtgtgtgtgtgagaaagagagagagagagagagargtttatgggcacaagttatagtgaggaaggatggcgccctggtcacagtggaagtgacaggtgatcttgctaacccaccatggaggccaccatgagttga

SEQ ID NO: 479694 - DNA, 201 bp, Homo sapiens
cgcttgttgctcgctctctcttctttgcagcattttctagctgtagatcaggaacagatgtgggggaggaacagggaggcacatgggaacagggaactccrccggcctcagcaatagctgggacccagctgcctaagtggtaagaagaacagtcagtggtggggagaggagctgtggctggaacttcgggaccaacactca

SEQ ID NO: 479695 - DNA, 201 bp, Homo sapiens
ttagacaagtttggaagaccacgagtctaaatttatggaaactggggattgtagatcattttaaaagagaaaacaatgtatttaaaaaatatctgaataarctttgccaagttgatgataaatttcaggaatcactaagaatgttttgtacataaatcattgttgtaaatagattcttctgaagtgcttcagtgtttggat

SEQ ID NO: 479696 - DNA, 201 bp, Homo sapiens
gcactccagcctgggcaacaagagcgaaactcttgtctcaggaaaaaaaaaaaaaaaaaattccacttgtcaattttttatagcagagactgccatttttrggcagtgactgttctttgtccttcgatgtctgttcttcccaaattctatagtagaaccctgggcttttagctggacacacggatgactgaaataatgata

SEQ ID NO: 479697 - DNA, 201 bp, Homo sapiens
gctgaagcaggagaattgcttgaacccaggaggcagaggtttcagtgagtcgagattgtgccactgcactccagcctgggcgacagaatgagaccccgtcaaaaaaaaaaaaaaaagtggctggtcacggtggctcacgcctgtaatcccaacactttgggaggccaaggcaggtggatcacttgaagtcaggagttcaag

SEQ ID NO: 479698 - DNA, 201 bp, Homo sapiens
tgcaaagtggaaaccttttagatgtgtaacttgaatatgtatcaagatctcaagtgcttaatgataaggtgttgacttgttaaattaaaccatttggaatmcattgtgtgtttgtagtagtcatttactagatctgttttcagatttttgcaaattgacattaaagtcactttagctataatatttcacttagcggatggg

SEQ ID NO: 479699 - DNA, 201 bp, Homo sapiens
ggaggttgcagtgagccgagattgtgccgtgccattgcactccagcctgggcaacaagagcgaaactcttgtctcaggaaaaaaaaaaaaaaaaaattccrcttgtcaattttttatagcagagactgccatttttgggcagtgactgttctttgtccttcgatgtctgttcttcccaaattctatagtagaaccctgggc

SEQ ID NO: 479700 - DNA, 201 bp, Homo sapiens
tcctctgtgggtcaggctcctccaggccagaccctgaatgggggtggttcaagattactctgggctcagcctctggggacctggactcgagcgaggccttrcccctctccgggcctcagtgccccatcttcaaaacagggggtgaggccaaggagcctgtggccccatggaggaggctcccacagacctggggttcatgag

SEQ ID NO: 479701 - DNA, 201 bp, Homo sapiens
gtggtgggggccatgctgcaggaagtagggggtgcagctgggctgagggggaggatctgggacaagatgaggggcccaggagccagaccttgagaaagtcrtagggacacagggtttcagggtgtgtctccacatcgaaggactccacaaagtccagaatgacactgaacccctcctccaggctgatgctgtaagtgcaac

SEQ ID NO: 479702 - DNA, 201 bp, Homo sapiens
gggcagaaactggaggaaggaaatggctgtgtgaaacgctgccgggaacggaatctagagccacggggcagaagcgctcagatggggggttgctggtgccktgtcagcgtctttgccaggacaccagggcagccgacacactggcttcagaggcttccttcccaggtaaaagcatgtacagctgtaggcatctctgcatat

SEQ ID NO: 479703 - DNA, 201 bp, Homo sapiens
tcagtgtgacataacccgtggggggaaaagaggagagaaggcagaagccccacctgattccccatttccaaaaatagcaagctaactcagggacaggaacrgggctgggggacctctcggttttgcctaacaaaagagctctgctgccacacagaggaagccagtcgcccatgtcatcagagcagacgcttcctaaaggga

SEQ ID NO: 479704 - DNA, 201 bp, Homo sapiens
agactaaataacttgtccaaggggcatggtcagtaaatgacagaagcagactcaaggctgggcttccgcaagtctgctgtgtttctttatgacaccccackgacctatggcgttacaacacatggaggtgacactgggcataacacacaggacgtgcagttgttcagtgtgacataacccgtggggggaaaagaggagaga

SEQ ID NO: 479705 - DNA, 201 bp, Homo sapiens
aggtactgtcatcaccctctctttagagatgagcaaacagactccgggagactaaataacttgtccaaggggcatggtcagtaaatgacagaagcagactcaaggctgggcttccgcaagtctgctgtgtttctttatgacaccccactgacctatggcgttacaacacatggaggtgacactgggcataacacacaggac

SEQ ID NO: 479706 - DNA, 201 bp, Homo sapiens
cattcaatccctctgtaaccctgggaaaaaggtactgtcatcaccctctctttagagatgagcaaacagactccgggagactaaataacttgtccaagggrcatggtcagtaaatgacagaagcagactcaaggctgggcttccgcaagtctgctgtgtttctttatgacaccccactgacctatggcgttacaacacatg

SEQ ID NO: 479707 - DNA, 201 bp, Homo sapiens
cactgggccatccatcatctcattcaatccctctgtaaccctgggaaaaaggtactgtcatcaccctctctttagagatgagcaaacagactccgggagastaaataacttgtccaaggggcatggtcagtaaatgacagaagcagactcaaggctgggcttccgcaagtctgctgtgtttctttatgacaccccactgac

SEQ ID NO: 479708 - DNA, 201 bp, Homo sapiens
catcgtggacaaacctgctcaaaccagctactttggctgccagcaactccagctttccagctgctcaggacaaaaccttcatccaaggttcccttcccttytctcacatgccacatccacctcatcatcaaatgctgtcagctttgctatgggacagatcaaggctctgacagcttctcaccacctcctctgctcccacgc

SEQ ID NO: 479709 - DNA, 201 bp, Homo sapiens
aagtgtttgtggggcgctgtacagaggacatgactgaggatgagctgcgggagttcttctctcagtacggggatgtgatggatgtcttcatccccaagccrttcagggcctttgcctttgttacatttgcagatgatcaggtatttttctccttaacgatatgtcccggccgggcgtggtggctcatgcttacaatcccag

SEQ ID NO: 479710 - DNA, 201 bp, Homo sapiens
cggggggtgcagtcagggtccagcgccgctcctggtcattggcatactcccctggaaagccgggggatgccaggcgcccgaacacaggttcaggccacttygggcccaagggggtggccaccgagccacacagaaggcccaggagggtcagcagcctatgggcagggcaggggcggtgagggcccaggcctgtgctcccac

SEQ ID NO: 479711 - DNA, 201 bp, Homo sapiens
aattttttatagcagagactgccatttttgggcagtgactgttctttgtccttcgatgtctgttcttcccaaattctatagtagaaccctgggcttttagytggacacacggatgactgaaataatgatatttcctagtaccccttgctgtggtcttgtgactaagttctgaccaatgggaagttgaaatgggcagtatcc

SEQ ID NO: 479712 - DNA, 201 bp, Homo sapiens
tcttgaactcctgccctcaggtgatccacctgccttagcctcccaaagtgctgggattacaggtgtgagccaccgtgcccagcctcaggctggctaatttyttaaaccctgtcagaaggacctggtgccaccaattcccgattcccttgcaggcttagaagtcgcttttggctgggctcggtggcttatacctgtaatccc

SEQ ID NO: 479713 - DNA, 201 bp, Homo sapiens
aagacagagttacccccacagccagctgcgcagactgagatgttgcaggacccctcttggctcaccctcggctgcatagaaggcctcgaaccccgtgaacrgcttctcgttggagtagtcggagcggaaggtaatgtccaggctggagcccagcgagtagaaagtgtccttgccaggggcccgctccgtgtctgtgctctc

SEQ ID NO: 479714 - DNA, 201 bp, Homo sapiens
cccagtttccaggggcgtgtgggcttcgctacaggaatccagtgtctcagtgtatgagaggtgtccggctggtagaaggaattctgcatgccccagatgcyggctggggaaatctggtgtatgttgtcaactatccaaaaggtttgttaccatttggtttttgtaatcatgctgaagtgtgttcaggtgtgtgtctcatcc

SEQ ID NO: 479715 - DNA, 201 bp, Homo sapiens
cagatcataagctctgaagctgaggatggtggccgtagatgacaggcctggatgcagccaggtgccttgtggatcagcttgcttttaggtggtgaaggacygaccatagacagtggccctggcattccaggacactgcatgggggaaagtggagggccaggtccatcccatcccctctataagctggacaaagctgctcca

SEQ ID NO: 479716 - DNA, 201 bp, Homo sapiens
acctcgtgatccgcctgcctcagcctcccaaagtgctgggattgcaggcgtgagccaccgcacccggccggctctggatttttctagaagtcaccataacmcccggagcacactcacctgcccacagacagctgaagatggttgcctgaacaggatggcaacctgccagagctgtggcggcaacaaaataaaagtcaggaa

SEQ ID NO: 479717 - DNA, 201 bp, Homo sapiens
cagagctcaggctcaggtgctctgcccaccttcagctacacgtgagctgatcctccccagccctgcctgctcctcttctgtgaacctaaatgctcagtggyctgtggacctgagggcgtttaacaggatcgtcaccatcaccatcgtggacaaacctgctcaaaccagctactttggctgccagcaactccagctttccag

SEQ ID NO: 479718 - DNA, 201 bp, Homo sapiens
tcagtactgtctgcccttgggaagaaatgaggtgaggaaaaagatatgcaaaggaatggactcctggatgggcctgtcttctcagcagaggaggaggtcaraaacaggcgccaccagcgtgctaaaatcctccaggagcagttcttaccttgccagacggggtctgtttatttggatcaaactgagaagaaactttggatt

SEQ ID NO: 479719 - DNA, 201 bp, Homo sapiens
attctagcagcacaggagtgactttagatcccctgagagaggatgtttctgtgtctctgaaggcaaggccgccaggatgcgctgcaagaggaacaggagcrccccaaagcagccctgcccccgcgcctgtggaagctacagccacgctgtttccctggcaccagcaccaacacccacgaggggtgaatgcaggcttgtgct

SEQ ID NO: 479720 - DNA, 201 bp, Homo sapiens
ggaaatcactacccttaccttcacctcgtcatttttcagggataaccaatgcatatacgaatccagacaagcatttttctggaagtcagaactctgacatrgtttgggtattatcattataaggaaacagttattctgacatgaatgttgttcattcatatctcttttctctttaggaaaagtaaaagatgtctgaatata

SEQ ID NO: 479721 - DNA, 201 bp, Homo sapiens
gttttccgagtggcgtgagggacctggctgtgggaggttctctgagtcatcctggttgaagacccctggacactcgctccccagctactccccacggaccrcaccacgcagggcaggtgctttctcactgggctccctgggccacaccgccgtccaccacatacctgtctgactttccagttggaaaggacatgcttttgt

SEQ ID NO: 479722 - DNA, 201 bp, Homo sapiens
ttttttttggatcttgttctgttgccccggcttcagtgcagtgctgcaatcatagctcactgcagcctctacttcctgtgttcaagcaatcctcccacctyagcctcccaagtagctgggattacaggcgagcaccaccacacctggctaattttttatttttggtagggatggggtttctccatgttggtcaggctggtc

SEQ ID NO: 479723 - DNA, 201 bp, Homo sapiens
cacctattttccctgaggtgaccccaggacacacggtaactagagagccaggaacaaggggaatctgagtcctggggtgcagtgcctggctctgtgatgtrtggcacagagcaaatcacctcccgcccttgttttccgagtggcgtgagggacctggctgtgggaggttctctgagtcatcctggttgaagacccctggac

SEQ ID NO: 479724 - DNA, 201 bp, Homo sapiens
aaaaccaaaccaagccaaaccactcttcaacaacaaggataacccacatgtgcttactttttcctcattcctaataggctggtccaggaaaatttcacaamtatttacacctattttccctgaggtgaccccaggacacacggtaactagagagccaggaacaaggggaatctgagtcctggggtgcagtgcctggctctg

SEQ ID NO: 479725 - DNA, 201 bp, Homo sapiens
gaggcgcagcttgcagtgagcagagatcgtgccactgcactccagcctgggcgacagaccgagactccatctcaaagaagaaaaaaaaaaaaaaaccttakccgggcatgatggcaggcacctgtaatcccagctactcgggaggctgaggtgagagacttgcttgaacccaggaggtggaggttgcagtgagctgagatt

SEQ ID NO: 479726 - DNA, 201 bp, Homo sapiens
ccgggaggcgcagcttgcagtgagcagagatcgtgccactgcactccagcctgggcgacagaccgagactccatctcaaagaagaaaaaaaaaaaaaaacmttagccgggcatgatggcaggcacctgtaatcccagctactcgggaggctgaggtgagagacttgcttgaacccaggaggtggaggttgcagtgagctga

SEQ ID NO: 479727 - DNA, 201 bp, Homo sapiens
gctcctggtcattggcatactcccctggaaagccgggggatgccaggcgcccgaacacaggttcaggccacttcgggcccaagggggtggccaccgagccrcacagaaggcccaggagggtcagcagcctatgggcagggcaggggcggtgagggcccaggcctgtgctcccaccccacaccctgcagggaggctgtgggc

SEQ ID NO: 479728 - DNA, 201 bp, Homo sapiens
agataggattgatgttattccccatgccacactgggcctgtttgtggcccaaagatttctgggacgctgggggacccaggttgtgtcctcatcaaggctgyttctgtttcagcagatcatcctgggctgcatcgcacccacccagtcgtggggctcaggcttgcccccatccctggtgcatgcctcttcgcggcggccagg

SEQ ID NO: 479729 - DNA, 201 bp, Homo sapiens
agcagcctatgggcagggcaggggcggtgagggcccaggcctgtgctcccaccccacaccctgcagggaggctgtgggcgcccacctacctcatggtgtgyccgtccagctggcctggcctggtctgcagccctacgctggtctcacctttgatctgtttgtccagtgacctgcccctgcccccagcctccctgactctgg

SEQ ID NO: 479730 - DNA, 201 bp, Homo sapiens
ggccaacatggtgaaaccccatctctactaaaaatacaaaaattagccgggtgtagtgacatgtgctggtagtgcctcccagctcctgggggtagctgacrtgggagaatcgcttgaacccaggagacagaggttgcagtgatctgagattgtaccactgtactccagcctgggcaacagaatgagacccttctcagaaaa

SEQ ID NO: 479731 - DNA, 201 bp, Homo sapiens
aaaatctggttccttgttggatttgaacagattatgtggctcgtcggggcgaaccgagggtttttatttacttggaaagaatcatcacagcccgcgaattmacaagctggatttagccattttcccttagattctgcgccatgagcctataggctgttgaatacgagagaagtgcttttctaaacgagtttctaaatttac

SEQ ID NO: 479732 - DNA, 201 bp, Homo sapiens
gggggaggtcagctcctatacagccacacttttttcaatcttcagcttttcaggcctaggtcctggttttattttagctttcagagcttctctgtaggctygaatttccaggaggcagcccgagtccctggggagagggtcatcgtggctctcgtcggtgccttccacctctggacaggcaaccggtgggagaggacgccg

SEQ ID NO: 479733 - DNA, 201 bp, Homo sapiens
cccaagtagctaggacagatgcatgccactacgcccagctaatgtggcttttttgtggttttttttgatagaggtggggtctccctgtgttgtctaggctkccaggctagtcttgaactattggcctcacacagtcctcccaccttggcctcccaaagcgctaggattacaggcatgagccaccatgcccagcctatgtct

SEQ ID NO: 479734 - DNA, 201 bp, Homo sapiens
ctggggtgagaggattgcttgagcctgagaggtcaaggctgtggtgagctgtgatcgtgccactgcactccagcctgggtgacaaagtgagaccctgtccaaaaaaaaaaaaaaaaaagccagaggactgtggtgacaagtttgagaaagcaggtgtgatcagacttgcaagtgtgtctgtgtatctgtctagctggtggc

SEQ ID NO: 479735 - DNA, 201 bp, Homo sapiens
aagattatgcatgctttttaagggcttttgaaatgtattgccagtctgtggcctgccaccctccctgaacatgcctggtcttgcttaaaatgtattgccaratagtccttgggaagtttatgttgtctttaacaatgtgaaatagtactactattcacgttccttttgtctgacaatttgataagtgaataattgtatccc

SEQ ID NO: 479736 - DNA, 201 bp, Homo sapiens
gcccaggcagcctccctcacctgagcaggtgcgcttgttacggtgcaggacgtagcctgcgcggcaggagcagtagaaaccgcccaggtggttgtggcagyggtggtcgcaggtgggcgcctctcccggggccacctggcactcgtcaatgtctgggggagaggcagggccaggcaggccgtcaggagggaaagaggcggg

SEQ ID NO: 479737 - DNA, 201 bp, Homo sapiens
cttctgttactgatatgtaagtgtggcaatgtgaactgaagctgatgggctgagaacatggactgagcttgtggtgtgctttgcaggaggacttgaagcaragttcaccagtgagctcaggtgtctcaaagaagggtggaagttctaatgtctgttagctacccataagaatgctgtttgctgcagttctgtgtcctgtgc

SEQ ID NO: 479738 - DNA, 201 bp, Homo sapiens
gatgaggtccaggtgcagccactggcactcgcctgggggcccctaagcatcagcatccggcagggcctgccctgccccaccccgccccgccccagtgctcyaggcctgtggctcaccctggcagcagaggacaccatcttccttgagggctgtcttcatgagctggtaataggactccttgaagagactttcggcggggcc

SEQ ID NO: 479739 - DNA, 201 bp, Homo sapiens
cgggtgtggtggtgggcacctgtagtcccagctacttgggaggctgaggcaggagaatggcgtgaacccgggaggcggagcttgcagtgagccaagctcgygccactgcactccagcctgggtgacagagcaagactccgtctcaaaaaaaaaaatcttaccaaggtggtggttcagcccccgaacagggaagagagtagt

SEQ ID NO: 479740 - DNA, 201 bp, Homo sapiens
gaacctccagggaaaacaagaagctgtgtaggagataaaatgttatcataaggccagatgcggtggctcacacctggaatcccagcactttggtggtttgttttttttttttttttttgagatggagttttgctcgttgcccaggctggagtgcaatagcgcgatctcggctcactgcaacctccgcctcctgggttccag

SEQ ID NO: 479741 - DNA, 201 bp, Homo sapiens
cggcccggggctggaggggccgaggcaccccgcaggctccaaggtccgaggtcctgggtggcatcagtggtggcgcctgggctcagctcacatcattcagkgcctggagggacatgaggccagtcaggagggcgctctgggtccctgggtcccaccacccagccccgcaggccacccaccttgcgggcaaactcgggcagc

SEQ ID NO: 479742 - DNA, 201 bp, Homo sapiens
cccaggcaagaacatctgctttgagaaagggctgtgaccgtctttgtttaaactataaactaaatttctcccaacgttagttcagcctacgcccaggaatraaggacagcttggaggctagaagcaagatggagttggctaagttaggtctctttcactgtctcagtcataatttggcaaaggcagtttcacaacttccgc

SEQ ID NO: 479743 - DNA, 201 bp, Homo sapiens
ccgcctaggggtcccagggatgaggagcgatggtgacacgtggcgaggaacggcaggcgggccgccgggtggaggccggggtgggacccggggtctcctckggctctgacgtgtcctgagggctgacacgtggagcggggcgcagactccgactcccccacccaagaggccagcccgcagtcccagccccagcccagggag

SEQ ID NO: 479744 - DNA, 201 bp, Homo sapiens
attttgtgctttcctgatttattagcccatctcaggattaaaataaaatgaagttctaaagaaattatcagagactgggtcacaaatttatataaaagttyagtgagtgctgcattattaagaatagtaccaaaaatgaaaacctaagcgtttaacaatgggggttggcgaaaataaattttagattgagaaaagtgtcat

SEQ ID NO: 479745 - DNA, 201 bp, Homo sapiens
agcagacggactctcacagcccaagcagccataggggttcatgtcataggctttgagatttttcaacaaacaaaattcgtgttgtgtgtgtgtgtgtgtgwgagaaagagagagagagagagagaggtttatgggcacaagttatagtgaggaaggatggcgccctggtcacagtggaagtgacaggtgatcttgctaacc

SEQ ID NO: 479746 - DNA, 201 bp, Homo sapiens
ctcctttccatcaattaccagtctcttgtataaatgtatccattaccaggctcacagactgggagtgatttttctcctttggagctcgtccagaatccatyagcctcacacacatatttacctgcaaatcattggaaaagcaaaaatgtttaactgcatgtataagatggttgtcatttgcttgaatacccccttgaaaaa

SEQ ID NO: 479747 - DNA, 201 bp, Homo sapiens
tagccaaaaatgttggttaaagtttattttcagaccatgggggctcaagttccaagtattgcccacccccaactttgaagaatttgcataccatcattcaytttcattgtgtagaaggtctcttcacagctgtactgaatcacagctttgtaggtggtcactccaggacctgtgatgtactccactcggccactgggtaga

SEQ ID NO: 479748 - DNA, 201 bp, Homo sapiens
aggcagaggttgcagtgagccgagattgtcaccgcactccagcctgggtgacagagtgagactccgacacacacacacacacacacacacacacacacacwctctctctctctctctcacacactttgggaggcccaggtgggcagatcacctgaggtcaggagttcgagatcagcctggccaacatggtgaaaccccatc

SEQ ID NO: 479749 - DNA, 201 bp, Homo sapiens
gccactgggtagataatcaggagggccacagtcaacaactaagaaagaagcatgggagggaggaatccattgatcatttcagtgctaactttccaaaggtytggagaagcacctttgggaggctgaggcgggcaaatcccttgagctcaggagtttgagaccagcctgggcaacatggcaagaccccctctctacgaaagg

SEQ ID NO: 479750 - DNA, 201 bp, Homo sapiens
ttttgatagaggtggggtctccctgtgttgtctaggctgccaggctagtcttgaactattggcctcacacagtcctcccaccttggcctcccaaagcgctrggattacaggcatgagccaccatgcccagcctatgtcttttgaaaatcgactgaaatatcactgctgctgttaataaaactaaaagctgtattgggggtt

SEQ ID NO: 479751 - DNA, 201 bp, Homo sapiens
gcggtggctcacgcctgtaaccccagcactgtgggaggccgaggcgggcggatcacaaggtcaggagatcgagaccatcctggctaacatggtgaaacccygtctctactaaaaaatacaaaaaattagccgggcatcatggcgggcgcctgtggtcccagctactcgagaggctgaggcaggagaatggcgtgaacccgg

SEQ ID NO: 479752 - DNA, 201 bp, Homo sapiens
tagaggtggggtctccctgtgttgtctaggctgccaggctagtcttgaactattggcctcacacagtcctcccaccttggcctcccaaagcgctaggattrcaggcatgagccaccatgcccagcctatgtcttttgaaaatcgactgaaatatcactgctgctgttaataaaactaaaagctgtattgggggtttaaatg

SEQ ID NO: 479753 - DNA, 201 bp, Homo sapiens
taatcccgacactcctggagaccaaggcgggtggatcacttgaggtgaggagttcaagaccagcctggccagcatggtgaaaccctgtctctactaaaaawatacaaaaaattagcctggcatggtggcgtgcacctgtaatcccagctcctcaggaggttgaggcaggagaattgcttgaacctgtgaggcgggggttgc

SEQ ID NO: 479754 - DNA, 201 bp, Homo sapiens
ttaacacttgtctcccctcatacacaaaagtacaatatgaagccttcatttaatctctgcagttcatctcatttcaaatgtttatggaagaagcacttcaytgaaagtagtgctgtaaatattctgccataggaatactgtctacatgctttctcattcaagaattcgtcatcacgcatcacaggccgcgtctttgacggt

SEQ ID NO: 479755 - DNA, 201 bp, Homo sapiens
gcctgtaatcccaactccttgggaggctgaggcaggacaactgcttgaatccaggaggtggaggttgcagtgagccgagattgtgccgtgccattgcactycagcctgggcaacaagagcgaaactcttgtctcaggaaaaaaaaaaaaaaaaaattccacttgtcaattttttatagcagagactgccatttttgggcag

SEQ ID NO: 479756 - DNA, 201 bp, Homo sapiens
cccacgggcctcatctttttctaccctcggaaacgctttcgtgccggtgtcccctttcctggaagttccttccagggctgccctaggattccgaggccgcrtcagtgtcggcccccacccctccgcgggacgcccctggcctcgctagcactttctctgacaaccatgcaggcagcatctgggaagagcccggagcacacc

SEQ ID NO: 479757 - DNA, 201 bp, Homo sapiens
ctactccggaggctgaggcagaagaactacttgagcccaggaggtggaggttgcagtgagccgagatcgcaccatcacactccagcctgggcaacaagagsgaaactctgtctcaaaaaaaaaaaaaaaaaaaaaatcagctcagttttagtaagagctcgccacgcaggtgccctcaccacctgccaggccctctgccat

SEQ ID NO: 479758 - DNA, 201 bp, Homo sapiens
ggtaaccagccccgccaccccttcctgtatttgccctggagtacctggatgggacctgacttacacctgtgagtgtccccaatttttctgagaatgctccsgggcagccccaccctgatctcacccaccccactgccctggggggctgtcaccagtggccttgtgaagggcttggtaaaaggacagctaagtcagcttccc

SEQ ID NO: 479759 - DNA, 201 bp, Homo sapiens
ttttgtgctttcctgatttattagcccatctcaggattaaaataaaatgaagttctaaagaaattatcagagactgggtcacaaatttatataaaagtttagtgagtgctgcattattaagaatagtaccaaaaatgaaaacctaagcgtttaacaatgggggttggcgaaaataaattttagattgagaaaagtgtcata

SEQ ID NO: 479760 - DNA, 201 bp, Homo sapiens
tttgtgctttcctgatttattagcccatctcaggattaaaataaaatgaagttctaaagaaattatcagagactgggtcacaaatttatataaaagtttagtgagtgctgcattattaagaatagtaccaaaaatgaaaacctaagcgtttaacaatgggggttggcgaaaataaattttagattgagaaaagtgtcataa

SEQ ID NO: 479761 - DNA, 201 bp, Homo sapiens
ttgtgctttcctgatttattagcccatctcaggattaaaataaaatgaagttctaaagaaattatcagagactgggtcacaaatttatataaaagtttagtgagtgctgcattattaagaatagtaccaaaaatgaaaacctaagcgtttaacaatgggggttggcgaaaataaattttagattgagaaaagtgtcataac

SEQ ID NO: 479762 - DNA, 201 bp, Homo sapiens
tcagagcagaggggaggctgaagaggacacagggtcctcagtgtcccaatgccagatccccactctccttggtcaccagcttgtgaatctgggcagtcgcytggctcctgcctactgtcctgagccatgtttcagagggcaggtaacaaatgagaagggaaaagtacagctctagttcggggggtgggaggccgctctatc

SEQ ID NO: 479763 - DNA, 201 bp, Homo sapiens
actaaaaaatacaaaaaattagccgggcatcatggcgggcgcctgtggtcccagctactcgagaggctgaggcaggagaatggcgtgaacccgggaggcgsagcttgcagtgagcagagatcgtgccactgcactccagcctgggcgacagaccgagactccatctcaaagaagaaaaaaaaaaaaaaaccttagccgggc

SEQ ID NO: 479764 - DNA, 201 bp, Homo sapiens
cgggcatcatggcgggcgcctgtggtcccagctactcgagaggctgaggcaggagaatggcgtgaacccgggaggcgcagcttgcagtgagcagagatcgygccactgcactccagcctgggcgacagaccgagactccatctcaaagaagaaaaaaaaaaaaaaaccttagccgggcatgatggcaggcacctgtaatcc

SEQ ID NO: 479765 - DNA, 201 bp, Homo sapiens
cagacggactctcacagcccaagcagccataggggttcatgtcataggctttgagatttttcaacaaacaaaattcgtgttgtgtgtgtgtgtgtgtgtgwgaaagagagagagagagagagaggtttatgggcacaagttatagtgaggaaggatggcgccctggtcacagtggaagtgacaggtgatcttgctaaccca

SEQ ID NO: 479766 - DNA, 201 bp, Homo sapiens
ggtgcagtggctcatgcctataattccagtgctttgggcggcctaggtgggaggactgctttaggcagtctgagaccagcctgggcaacatagcaagaccmctatctctacaaaaaaaaagaaacaaatgtagctgggcatggtggtgcgtgcttgtagtcctagctacttgggaggctgaggtgggaggatcacttgaac

SEQ ID NO: 479767 - DNA, 201 bp, Homo sapiens
cttgggaagtttatgttgtctttaacaatgtgaaatagtactactattcacgttccttttgtctgacaatttgataagtgaataattgtatcccaccattytgtagtattggtttttaacatggaaattttagtcaatacctgggctgaagtatcagtgtttccaacctacctacccaaaaaaaggattcaaggttattcc

SEQ ID NO: 479768 - DNA, 201 bp, Homo sapiens
ggcagtttacagaaatgccaacagccagtatgaaaagagactggctttttaaggtaatgaaatgtaatttgagcagtgacattacactgggtgggcaaagrtgactgtcactctcgtggtttatgtccccttgagtcaatgggtaaggctggaattaaactggcaagtggagaaatgacagcagcctcacctggagtctgt

SEQ ID NO: 479769 - DNA, 201 bp, Homo sapiens
catcatgagtataaccttcatgtataaaaacagcttcagaccaggcttgtgtataatgaggtgatagtcttttcagggtgcccattcgaatgtccagggcrgatgcatcatgtttttgctcatagacggcatgagcagctgttaggacccagttgtcatataaaagtgcacctgctgctgtggttccacctaatatcagga

SEQ ID NO: 479770 - DNA, 201 bp, Homo sapiens
ctttgtaaaaatgtcaatcgtgtttttcttaaattatgaccgccttgaagtatatatttgatgtcaaccaaaaattatattacatgaattggtgggtgacyacctatacaggcaagtgaggctattttaaaacatcacagttcaaacacctgataaaaccttttggtatttcttagctcctcagaaaatgagattagtgaa

SEQ ID NO: 479771 - DNA, 201 bp, Homo sapiens
ccttggacctccatagagcacctgaagaggtgggggtcaccgagggtgacgggaacgtggtgggggccatgctgcaggaagtagggggtgcagctgggctragggggaggatctgggacaagatgaggggcccaggagccagaccttgagaaagtcgtagggacacagggtttcagggtgtgtctccacatcgaaggactc

SEQ ID NO: 479772 - DNA, 201 bp, Homo sapiens
tcaatattaacctccttgtttttactgttaagactaacttggtttaagttttaagccactgcatccagttgaaaccattcaaattgttttctaaggaactrtgatttgggaatggagtgtgtgagtatgtgcacttttagagtaaacttgtatcatcctttctaggtcaagaaagatcttaagactggtcattcaaagggg

SEQ ID NO: 479773 - DNA, 201 bp, Homo sapiens
tgtttttttaaatcattctacagagggggaggttgcagtgagccgagattgcgccactgcactccaacctggcaagagagcgagattccgtctcaaaaaawaataataataattctactcaactattatctttggagccaattctggttaaaaaaaaaagtactattaaaaggcagattgcattgatgtttaaaaactaga

SEQ ID NO: 479774 - DNA, 201 bp, Homo sapiens
ttgcataccatcattcactttcattgtgtagaaggtctcttcacagctgtactgaatcacagctttgtaggtggtcactccaggacctgtgatgtactccrctcggccactgggtagataatcaggagggccacagtcaacaactaagaaagaagcatgggagggaggaatccattgatcatttcagtgctaactttccaa

SEQ ID NO: 479775 - DNA, 201 bp, Homo sapiens
gcctcgaggggctgcgggactcgggcttggtgtggagggcaagagcgctgcgacgtgcggactggagagtcagcctttgggctggagacacgggagcgggyggctacagtggtttacgttgttgcacggggcgagtagaacgtatccttctttgcgtccaaaatctggttccttgttggatttgaacagattatgtggctc

SEQ ID NO: 479776 - DNA, 201 bp, Homo sapiens
aagtgcacctgctgctgtggttccacctaatatcaggacttgccaaggaaaatcaccaggttttgccttttgccctccatatatacgccctcctgttgtgygggctgatagtccacaaactggagaaagaagcagataggtagagagcctttgtaaaaatgtcaatcgtgtttttcttaaattatgaccgccttgaagtat

SEQ ID NO: 479777 - DNA, 201 bp, Homo sapiens
cgggaagcggagcttgcagtgagccgagattgcgccactgcagtccgcagtccggcctgggcgacagagcgagactccgtctcaaaaaaaaaaaaaaaaamaaaaaaaacaaaaaaaaaagaaactaaagaagtctgtggtccgaggagctgtggaaaagagcctgcacaagaagtttgcaaggtgggaaaagtgtctctc

SEQ ID NO: 479778 - DNA, 201 bp, Homo sapiens
acctgcccctgcccccagcctccctgactctgggattctgggaatcgactccatgactccagcctgctcagagttccaggcaggcaggacaggctgctctkggagccaggagtcggacctaggtaacaacagcctggaaacaaatcctggctctgcccctcacccctcccttttttttggatcttgttctgttgccccggc

SEQ ID NO: 479779 - DNA, 201 bp, Homo sapiens
tgtgctttcctgatttattagcccatctcaggattaaaataaaatgaagttctaaagaaattatcagagactgggtcacaaatttatataaaagtttagtsagtgctgcattattaagaatagtaccaaaaatgaaaacctaagcgtttaacaatgggggttggcgaaaataaattttagattgagaaaagtgtcataaca

SEQ ID NO: 479780 - DNA, 201 bp, Homo sapiens
ttctagttggaagaatgtgatatttgttgtgttggtagtttacctaatgcccttacctaattagattatgataaataggtttgtcattttgcaagttacatgttttaaacatttatcaatgaagtcatcctttagacttgtaatcgccacattgtttcattattcagtttcctctgtaaagggatcttgagttgttttaat

SEQ ID NO: 479781 - DNA, 201 bp, Homo sapiens
agagtttcaccgtgttgccctggctggccttgaactcctgacctcaaatgatcagccagcctcggcctcccaaagtgctggaattacaggcgtgagctgcygcgcccggccagtccctgcgtcacttgaggcgatgctgtcctcagatccctggctcagagttggcactcagcccatgtgaatggaggtcacggctgtttt

SEQ ID NO: 479782 - DNA, 201 bp, Homo sapiens
gggctggttggatgttctcagatggtttacaaaatggtgcaaatcttaatcatgcagaacagaggaagaatggtttgctcaggggccccagagaactcggyggcccaccagagttggctgagctgagcagcatcttgagaaggcagacctgtttttcctgccctcgggcaagtcccctgacctcagggtcggcttaattat

SEQ ID NO: 479783 - DNA, 201 bp, Homo sapiens
ctagttggaagaatgtgatatttgttgtgttggtagtttacctaatgcccttacctaattagattatgataaataggtttgtcattttgcaagttacatgttttaaacatttatcaatgaagtcatcctttagacttgtaatcgccacattgtttcattattcagtttcctctgtaaagggatcttgagttgttttaattt

SEQ ID NO: 479784 - DNA, 201 bp, Homo sapiens
cagcgctcccgctggcagggccccactttgtcagctgtaaatggggccctcggcccctgcgtcgtttttgttttttgttttttgagacggagtctagctcygtcgcccaggctggagtgtagtggtgcaatctctgttcactgcagcctccacctcgcaggttcaagcaattctcctgcctcagcctccctagtagctggg

SEQ ID NO: 479785 - DNA, 201 bp, Homo sapiens
tagttggaagaatgtgatatttgttgtgttggtagtttacctaatgcccttacctaattagattatgataaataggtttgtcattttgcaagttacatgttttaaacatttatcaatgaagtcatcctttagacttgtaatcgccacattgtttcattattcagtttcctctgtaaagggatcttgagttgttttaatttt

SEQ ID NO: 479786 - DNA, 201 bp, Homo sapiens
atcagagaggcaaggagagacaccgagagggagaaaccgagtcgggggaggcagggtcagcgccagcaggtggggctgcccacgtcccagagcactggccygtcccacagtgcagggaaccagggaaccaggtcccaaggaacgagggctagatacccccgactctcccgtggctacatgaggggttcccagagcccaggt

SEQ ID NO: 479787 - DNA, 201 bp, Homo sapiens
gccggtgtcccctttcctggaagttccttccagggctgccctaggattccgaggccgcatcagtgtcggcccccacccctccgcgggacgcccctggcctygctagcactttctctgacaaccatgcaggcagcatctgggaagagcccggagcacacctggggccgcccctcgtccggcactgttccaggggacactggg

SEQ ID NO: 479788 - DNA, 201 bp, Homo sapiens
accagaaaagactggcacgcaatttttcttgacaaactgggtcttgctctttgaagggtgggtgggaatgtgctgtttttatgagaatgtcaaagaacttmtcagaatcacattaagcatgctaattaccaaatattaaatgctaattgttccacacgcagttcgaatgccaaggaaggaagatgaaactagtataagcta

SEQ ID NO: 479789 - DNA, 201 bp, Homo sapiens
agttggaagaatgtgatatttgttgtgttggtagtttacctaatgcccttacctaattagattatgataaataggtttgtcattttgcaagttacatgttttaaacatttatcaatgaagtcatcctttagacttgtaatcgccacattgtttcattattcagtttcctctgtaaagggatcttgagttgttttaattttt

SEQ ID NO: 479790 - DNA, 201 bp, Homo sapiens
ctgctctggaagagagatcagagaggcaaggagagacaccgagagggagaaaccgagtcgggggaggcagggtcagcgccagcaggtggggctgcccacgycccagagcactggcctgtcccacagtgcagggaaccagggaaccaggtcccaaggaacgagggctagatacccccgactctcccgtggctacatgagggg

SEQ ID NO: 479791 - DNA, 201 bp, Homo sapiens
tcgcccatgtcatcagagcagacgcttcctaaagggaggaaggaggctgcgaacaacagttcacgttctggctctggggaacatctcaagagggtctaggsgaggtgtgctctcattcttactcataatgctggtaaaaacaagccagataagtaagatagagtgttttaaaattaaagctgtcacctttaagagccttaa

SEQ ID NO: 479792 - DNA, 201 bp, Homo sapiens
gaggaggctcccacagacctggggttcatgaggctgtgaggagggtaggcagagaggagcgcaccccgccgcctcccgaccctcccaccccagagacacgyggcagcaggtggggtggggccaggtttattattgggtccatggtgggtgaatgggagttggggcacagccatctcagcccaacccggagctgaggccagc

SEQ ID NO: 479793 - DNA, 201 bp, Homo sapiens
gagtagttttagggagaactattattattcttgtttcaagttaaactctaaattcctccgccggtcagctgggcctacacccaggaatgagcagggtcagsttggaggtcaggagcaggatggggtcggttatgtcataattttgcaagggtggtttcaataggaagacataaggtccaagagatgccattcactaaggga

SEQ ID NO: 479794 - DNA, 201 bp, Homo sapiens
gatgtgtgcttttgttaggcatcactgtgcccaagtatttcatgttcattgtaaagaggaaaaatacagatttctctataatgtcaccacttatttctaattgccacttttcatcttgtggaaatgccatgttttgattcagtcttctgaatttgaacattattcaggttatttccaattgctgggaatatccttactgct

SEQ ID NO: 479795 - DNA, 201 bp, Homo sapiens
aatgggggtggttcaagattactctgggctcagcctctggggacctggactcgagcgaggccttacccctctccgggcctcagtgccccatcttcaaaacrgggggtgaggccaaggagcctgtggccccatggaggaggctcccacagacctggggttcatgaggctgtgaggagggtaggcagagaggagcgcaccccg

SEQ ID NO: 479796 - DNA, 201 bp, Homo sapiens
tggggggcatttgagttgtgaggcctctaggaagtgaggagccccaacattgcctgccttcttccacgtggctgtgccctatggggcagtgggaatcaccyctggatttgcgggggaccagattacccctcaatgaatatctcccagggtgtctcctctgtgggtcaggctcctccaggccagaccctgaatgggggtggt

SEQ ID NO: 479797 - DNA, 201 bp, Homo sapiens
agtcaacaactaagaaagaagcatgggagggaggaatccattgatcatttcagtgctaactttccaaaggtctggagaagcacctttgggaggctgaggcrggcaaatcccttgagctcaggagtttgagaccagcctgggcaacatggcaagaccccctctctacgaaaggttaaaaagccgagcatggtggcacgtgcc

SEQ ID NO: 479798 - DNA, 201 bp, Homo sapiens
ttcaaggcaacagtgatcatgactgagtctggtgctctccttcctcgctggaacagctgatgctgctgccacgggcggggtgttgggctgggctctatccytcaaggaaggcttggtccccatcccataccaccaccccacccccagctgcagtggggggcatttgagttgtgaggcctctaggaagtgaggagccccaac

SEQ ID NO: 479799 - DNA, 201 bp, Homo sapiens
agcaatagaagcagcaacagtagcagcagagggagttccgggcggttatggggcctgtagtcaccacacgaccgtactgctgcacgcgggcattggccggwcccaagatccatctttctgacaaactgcagtaaaggatttcaggggcaagtgaccctaaagaagaattcagaatatattaatttccttgtttatatcata

SEQ ID NO: 479800 - DNA, 201 bp, Homo sapiens
gagggggtttctcttgctttgaggctttagctgaaacaggcagcactcgggatggagcgcacaggccctcactcacacccccagggagcgtggtggtgtcytgagccagagtcgcaaccccagggtaggggctagagcactgagttccaccaggctctgccagggcggggggcgggggtggatggacacacaggaaggagg

SEQ ID NO: 479801 - DNA, 201 bp, Homo sapiens
ctgacaaactgcagtaaaggatttcaggggcaagtgaccctaaagaagaattcagaatatattaatttccttgtttatatcataaaatcactccccaaagmtgtgctctcacagcagttcctattctagtgttttacgaggtgctcctgaagggggtggcagcacacatgactagtatctgcgtgtgctggggttgggggg

SEQ ID NO: 479802 - DNA, 201 bp, Homo sapiens
cagtctcgcaaaagatggagaagctgtctttcaggatgtatttggcttgcacaggtgaaacgtggccattaggtggcgccatcggataagggcaaggctgygctgcgcagaggaaaccaggcttgttggttttcatgtggtctacagcagccaagactgaatcgagccatctgaagttcttagtttataaagaatacttaa

SEQ ID NO: 479803 - DNA, 201 bp, Homo sapiens
ttcattgtgtagaaggtctcttcacagctgtactgaatcacagctttgtaggtggtcactccaggacctgtgatgtactccactcggccactgggtagatmatcaggagggccacagtcaacaactaagaaagaagcatgggagggaggaatccattgatcatttcagtgctaactttccaaaggtctggagaagcacctt

SEQ ID NO: 479804 - DNA, 201 bp, Homo sapiens
caggccctcactcacacccccagggagcgtggtggtgtcctgagccagagtcgcaaccccagggtaggggctagagcactgagttccaccaggctctgccrgggcggggggcgggggtggatggacacacaggaaggaggaagaagggacactctccttggtccctgggaattcgggaaaagagaggagcatctcctcgag

SEQ ID NO: 479805 - DNA, 201 bp, Homo sapiens
cactgcttacccatggggtctgaggagtcagtgatgatcacgtcgaaggcatcctgattctgtttcatgaactcaaaaccgtcacccacatgtagggtcascttcgagctagagtagccaatggccatgcctggcaggaacttcttggagacttggatgacatcctggaggggatgggagggaccagtctgggccaagggg

SEQ ID NO: 479806 - DNA, 201 bp, Homo sapiens
cctgggaggtggaggttgcagtgagtcaagattgtgcctctgcactccagcctgggtgacaaagcgagactccatctcaaaaaaaaaaaaaaaaaaaaaaragtctcttttagaacaggtgacaagtccacttacttcatagattttggttgatggatcgaacttcgctgcctgagagacgggagcacggtgtcccagtga

SEQ ID NO: 479807 - DNA, 201 bp, Homo sapiens
agcagcacaggagtgactttagatcccctgagagaggatgtttctgtgtctctgaaggcaaggccgccaggatgcgctgcaagaggaacaggagcaccccmaagcagccctgcccccgcgcctgtggaagctacagccacgctgtttccctggcaccagcaccaacacccacgaggggtgaatgcaggcttgtgctggccc

SEQ ID NO: 479808 - DNA, 201 bp, Homo sapiens
gagaagcagaaaagtgtttgtggggcgctgtacagaggacatgactgaggatgagctgcgggagttcttctctcagtacggggatgtgatggatgtcttcmtccccaagccattcagggcctttgcctttgttacatttgcagatgatcaggtatttttctccttaacgatatgtcccggccgggcgtggtggctcatgct

SEQ ID NO: 479809 - DNA, 201 bp, Homo sapiens
tatagtgaggaaggatggcgccctggtcacagtggaagtgacaggtgatcttgctaacccaccatggaggccaccatgagttgagctcccatggaggaggyggtaatgaggctgcaggcgactgtccacattgccacggcctctctggactactccaacaattcctggctagcaccatgccttgtgcaggactcacttggc

SEQ ID NO: 479810 - DNA, 201 bp, Homo sapiens
agtgaggaaggatggcgccctggtcacagtggaagtgacaggtgatcttgctaacccaccatggaggccaccatgagttgagctcccatggaggaggtggyaatgaggctgcaggcgactgtccacattgccacggcctctctggactactccaacaattcctggctagcaccatgccttgtgcaggactcacttggcccc

SEQ ID NO: 479811 - DNA, 201 bp, Homo sapiens
tgcccattttaatcaccagctttccaaactagctttaaaacaaagggctcgcttatgtaaatttaaagttaagtataaagaaagaaagaaaaaagggcggrattcagaatcacattttccatagccatcctttttgtcctctgaaaacttatttcttggctttttatcatttaaagatagacaaaagaaatcatgctgaca

SEQ ID NO: 479812 - DNA, 201 bp, Homo sapiens
gttgcccattttaatcaccagctttccaaactagctttaaaacaaagggctcgcttatgtaaatttaaagttaagtataaagaaagaaagaaaaaagggcrggattcagaatcacattttccatagccatcctttttgtcctctgaaaacttatttcttggctttttatcatttaaagatagacaaaagaaatcatgctga

SEQ ID NO: 479813 - DNA, 201 bp, Homo sapiens
gaaaacctaagcgtttaacaatgggggttggcgaaaataaattttagattgagaaaagtgtcataacacaaactttcaaggtgacaaatgatagaaacctraacccaagatatattttaaaaatatatctatatacacatagcgaaagcttataaggaaatacagcaaaatgttaatctcagctgggtgtggtggctcatg

SEQ ID NO: 479814 - DNA, 201 bp, Homo sapiens
agttgcccattttaatcaccagctttccaaactagctttaaaacaaagggctcgcttatgtaaatttaaagttaagtataaagaaagaaagaaaaaagggmgggattcagaatcacattttccatagccatcctttttgtcctctgaaaacttatttcttggctttttatcatttaaagatagacaaaagaaatcatgctg

SEQ ID NO: 479815 - DNA, 201 bp, Homo sapiens
caacagaaaagttgcccgttttattttattttatatatttttttgagacagagtcttgctctgtcacccaggctggagtgcagtggtgtgatttcggctcrccgcaacctgcgcctcccaggctcaagtgattctcctgcctcagccacccgagtagctgggattacaggcgcccgccacctaataatttttgtattttta

SEQ ID NO: 479816 - DNA, 201 bp, Homo sapiens
ccagaaggagccctacactctacagctccttgacactccaggagagagggcagctctgcgcttccagccaagatctgagacccacttgctcacctgtgctygtgtagtggatcttccagcctgtgtggtctcctgattcatctgtgacaaaggtgatggtcaccgtgttgctttttgtttcaatcctgtggggcaatgtct

SEQ ID NO: 479817 - DNA, 201 bp, Homo sapiens
taaaggatttcaggggcaagtgaccctaaagaagaattcagaatatattaatttccttgtttatatcataaaatcactccccaaagctgtgctctcacagyagttcctattctagtgttttacgaggtgctcctgaagggggtggcagcacacatgactagtatctgcgtgtgctggggttggggggatgcctggcacatg

SEQ ID NO: 479818 - DNA, 201 bp, Homo sapiens
ggggcccaggcagcctccctcacctgagcaggtgcgcttgttacggtgcaggacgtagcctgcgcggcaggagcagtagaaaccgcccaggtggttgtggyagtggtggtcgcaggtgggcgcctctcccggggccacctggcactcgtcaatgtctgggggagaggcagggccaggcaggccgtcaggagggaaagaggc

SEQ ID NO: 479819 - DNA, 201 bp, Homo sapiens
tgagcctggctgctgagaggggaagcagggctgagaaggggagctggaggcagcagggcctagaagcacccagtgtccagggcccaggccctccgcacccstgggcagagcagcaatggccctgaggagccccgggtatcccaggagagggtgcgttggggcccaggcagcctccctcacctgagcaggtgcgcttgttac

SEQ ID NO: 479820 - DNA, 201 bp, Homo sapiens
tgctccgaaggctgctagagtcgagaatgccatctgtagccccttcaaagcagacggactctcacagcccaagcagccataggggttcatgtcataggctktgagatttttcaacaaacaaaattcgtgttgtgtgtgtgtgtgtgtgtgagaaagagagagagagagagagaggtttatgggcacaagttatagtgagga

SEQ ID NO: 479821 - DNA, 201 bp, Homo sapiens
attaaaaaaaaaaaaaaaaaaaaaaggaaaggcagggggcaggggttaagaattcgagtgatagcctgggcaatatagtgagaccccgtctccaccaaaarcaataacaaaaaatagctgggaatggtggtgtgtgcctgtggtctagctacttgggtggttgaggagggaggatcgtttgagcccaagagtttgaggctg

SEQ ID NO: 479822 - DNA, 201 bp, Homo sapiens
cactgcactccagcctgtgcaacagaggtagacactacttcaaaaaaaaaaaaaaaaagagttccagagtgctctggggtttcattctctagaatgcaacrtttttgtaggacacagcaggacacacaacaagcttcagcactgtaacctcaataccttttctactactacagttgagtggtctggcatatttaccataaa

SEQ ID NO: 479823 - DNA, 201 bp, Homo sapiens
actgagttgcaaggaagtgagtgttacctgtttgctcagctgccttcttcttgacagcttctttagagtctttttgtacttgtacctgggccagcttccarcggttgctgatctataatgaaagcaaatataacaaaaaaaaccctccaaagtcagccacctaagtctgtcttacttttcatgaggtgacgaagggcaggt

SEQ ID NO: 479824 - DNA, 201 bp, Homo sapiens
tctagttggaagaatgtgatatttgttgtgttggtagtttacctaatgcccttacctaattagattatgataaataggtttgtcattttgcaagttacatgttttaaacatttatcaatgaagtcatcctttagacttgtaatcgccacattgtttcattattcagtttcctctgtaaagggatcttgagttgttttaatt

SEQ ID NO: 479825 - DNA, 201 bp, Homo sapiens
caaacaaataacattggcttatttggaacatcatcatctttgccaagagattgcttatttattaattttctcaaatccaaacacagtcatgtatcacatgkcaaagttgatcagtcagcagcagaccacgtgtacagcagtggtcccataggattataacactgtttttactgtaccctttctatgtttagatacacaaat

SEQ ID NO: 479826 - DNA, 201 bp, Homo sapiens
agattcttctgaagtgcttcagtgtttggatttgatcattgtccttttggtgttacatcattcattcagcaaatctgagttcattttttcccttaaatgarcaaacagttggagtagccaaatcttgaattagtgcagttccaattacaatttcgaggttctggtcttatccttctctctgcctcttatcaatgatgttct

SEQ ID NO: 479827 - DNA, 201 bp, Homo sapiens
agcagcggcctagcgggtgagtcgcggagccttctcactgaggacgccgtaggtgcctcggcttctgcattggggcggcccgaggcagacgcagcggcttyggaccctgccccgggaagtcagccgtgagaccgggcctagtcctgcccgagcgggctcgcgcgggagcgtcgttaggtcctggcacggggaggccggtgg

SEQ ID NO: 479828 - DNA, 201 bp, Homo sapiens
aatggctcacacctgtaatcccagcactttgggaggctgaggcaagcagatcacctgaggtccgaagttcaagaccaccctagccaacatggtgaaacccygtctctactaaaaattcaaaaattagccaggcgtggtggttcgcgcctgtagtctcagttatttgggaggctgaggcaggagaattgcttgaaccgggag

SEQ ID NO: 479829 - DNA, 201 bp, Homo sapiens
tgggcgcctccctcctgcggcggttcctccgaccctcaaacagctgcaggggtgtcacgggctgcagaggggcatctgggtcatccttggctggaagctcrtcgtactcatagtcctcatagtcctcgtttgcttccactgcacagggaagcattgtgaggagggctgggatggccacccggctccctgcgccagcccctg

SEQ ID NO: 479830 - DNA, 201 bp, Homo sapiens
gttaccttcctactcagagaactctcaaagctgctccgcaaggtctctggtgacttcacttcccagagggtgaccttgccccagtcttcactgctccaggscctcagcagagtcttgcatcatggacgtgttctctgtgaaactgtccctaagctaagggttagcttctggaccacccttggttctgacctggtcatttct

SEQ ID NO: 479831 - DNA, 201 bp, Homo sapiens
ttgcattaggattgtggcaggacctgtaagttctccaaggcactctgcctgcccccaaacccactcgccctcctcgcggcctcatctttgtcatggatacmactgggtcctcctttatttgccacaacctaactgcaggttctgtcatcctgcctgaccccccgactcaggtcccaggcctgacccctcctcgtgcccacg

SEQ ID NO: 479832 - DNA, 201 bp, Homo sapiens
gcttctgaggggcaaggcctaggtggcgaggcatggggaggacaagagactgaggggaccagatgactcactgtccctcgaggtcataggtggccccatcyagacccatgatcaaatattctttcccaggttccaagcgaaggcggcaggaggctcgaaccaggaagttgcgcatctgattagcagcggccttgacatcct

SEQ ID NO: 479833 - DNA, 201 bp, Homo sapiens
agcctttaatatgccctggtcccaggctgtgttcatgaaagcggacacagcagtgcttccagcttcatggttcccaggttcaggttcctcccagcggaggkgggagggcagccctcacacctggcacccctgagtgccatactcctggaggaagtcgttgagctgggcacaggctgcccgctggcgggtgctccggcacag

SEQ ID NO: 479834 - DNA, 201 bp, Homo sapiens
gccaaaagcctttaatatgccctggtcccaggctgtgttcatgaaagcggacacagcagtgcttccagcttcatggttcccaggttcaggttcctcccagyggaggtgggagggcagccctcacacctggcacccctgagtgccatactcctggaggaagtcgttgagctgggcacaggctgcccgctggcgggtgctccg

SEQ ID NO: 479835 - DNA, 201 bp, Homo sapiens
accttctccaggtcagcacgcagggcgtggaatccactcaggagggtgacgtccgcgatggccatgccagacagccccaccttgccgttccgcctgtggaracgtgtgagctgtcgtccaggttctgcctgcgcgggctccagaagcccagccccagcctgggtcctgccctccctcccctggcccagggcagctcccggc

SEQ ID NO: 479836 - DNA, 201 bp, Homo sapiens
ccggggttgtagtagtcgtacagggttgcgctggccggctgcaccagccccaccggcacttcctgcacagcctcaaagcccacgcactcccgggaggtggrgacctggccaagcgtggggaggagagatgagggacccactccctgggccctgcagccccctgtactgggtttccttggcctgtttttgtttgcttcctat

SEQ ID NO: 479837 - DNA, 201 bp, Homo sapiens
ctgaagtgcaggacttgggtgatcttggtctcaaagaggcggaaagcagctctgctgtcttctcggagaaccttaacctggaagcctaagagggggtgagragaagggggaaaggtgagttactttgaggctgagagggtaggaagttggtgtcagagcaaacaggctgcgtgcatgacctgtaagaggagcaggctacac

SEQ ID NO: 479838 - DNA, 201 bp, Homo sapiens
gctgcagggggcaaaggggcagtcagcagggctcgggaggatggcaggtggaaacggagagcacaggcatctggcttctgaggggcaaggcctaggtggcraggcatggggaggacaagagactgaggggaccagatgactcactgtccctcgaggtcataggtggccccatccagacccatgatcaaatattctttccca

SEQ ID NO: 479839 - DNA, 201 bp, Homo sapiens
tattctttcccaggttccaagcgaaggcggcaggaggctcgaaccaggaagttgcgcatctgattagcagcggccttgacatccttggctgcggggatgaygtgcgcaaaagtggtcagaggggaagagaaggtgcagggtgagcccaggctggggactctgtgtagatcctctcattccaccttcgccacccccatggag

SEQ ID NO: 479840 - DNA, 201 bp, Homo sapiens
ttccagcttcatggttcccaggttcaggttcctcccagcggaggtgggagggcagccctcacacctggcacccctgagtgccatactcctggaggaagtcrttgagctgggcacaggctgcccgctggcgggtgctccggcacaggcgttcagagggcatctcctcgatccagctattcgagtccagcaggtactgggggc

SEQ ID NO: 479841 - DNA, 201 bp, Homo sapiens
agttactttgaggctgagagggtaggaagttggtgtcagagcaaacaggctgcgtgcatgacctgtaagaggagcaggctacacccagagagaccaaaacrgccggtccccgagggagggtcaggccagggcctcggtgggaagactgaccgtactccacacgggggtagtagcaggcaaacttcatcctgtagccatcct

SEQ ID NO: 479842 - DNA, 201 bp, Homo sapiens
ccctcaaacagctgcaggggtgtcacgggctgcagaggggcatctgggtcatccttggctggaagctcatcgtactcatagtcctcatagtcctcgtttgsttccactgcacagggaagcattgtgaggagggctgggatggccacccggctccctgcgccagcccctgcctggccccaaggcctcccaacccccacactc

SEQ ID NO: 479843 - DNA, 201 bp, Homo sapiens
ctggcgggtgctccggcacaggcgttcagagggcatctcctcgatccagctattcgagtccagcaggtactgggggctgcagggggcaaaggggcagtcarcagggctcgggaggatggcaggtggaaacggagagcacaggcatctggcttctgaggggcaaggcctaggtggcgaggcatggggaggacaagagactga

SEQ ID NO: 479844 - DNA, 201 bp, Homo sapiens
ctgcccgctggcgggtgctccggcacaggcgttcagagggcatctcctcgatccagctattcgagtccagcaggtactgggggctgcagggggcaaagggrcagtcagcagggctcgggaggatggcaggtggaaacggagagcacaggcatctggcttctgaggggcaaggcctaggtggcgaggcatggggaggacaag

SEQ ID NO: 479845 - DNA, 201 bp, Homo sapiens
acgtttgcaagccttctggaaacaagacatctaaacaaaagtgtaaaacaccgcgccaggaatacttcctctctactttcccccacctgcatcattctacwctccaggcgaaatgagttgtattgtgtttaggctctgcaaagtgtctgtactgttttctgcagggaacaggagcctatgtgaagcctgaaggcctctgtt

SEQ ID NO: 479846 - DNA, 201 bp, Homo sapiens
acataaaagtgagatcatggagtatttgtcttgctgtgcctggtttatttcaattggcatcatgttctccagcttcaactgtgttgcaaaaaataacagawtctcctccctttttaagctaaatagtattgtgtgtgtgtatatatgtatatatatatatatacacacacacacacaccatatttttcttattcatctatt

SEQ ID NO: 479847 - DNA, 201 bp, Homo sapiens
aacaatattaattcttccagtccataaacttggcatatctatttatgtcttctttattttctttcattaatgttttatagttttcagtgtacagatctttyacctccttggataaatttatttctaagtgttttgtaagctattgtaaatgaaactgttttcttaaattttttcaggtagttcattgttagtgtatggaaa

SEQ ID NO: 479848 - DNA, 201 bp, Homo sapiens
gagcaagactgtgtctgaaaaaagatatgttgtcaaaaaacatgattttcacttcttccttttatattttgatgccttttactcctttctctctctctctttcttttctttctttctttctttttttttttttttttttttttttttgcctcattgctctggccaggacttcaccagtattatatgttgaaaagaaatgag

SEQ ID NO: 479849 - DNA, 201 bp, Homo sapiens
agcaagactgtgtctgaaaaaagatatgttgtcaaaaaacatgattttcacttcttccttttatattttgatgccttttactcctttctctctctctctttcttttctttctttctttctttttttttttttttttttttttttttgcctcattgctctggccaggacttcaccagtattatatgttgaaaagaaatgaga

SEQ ID NO: 479850 - DNA, 201 bp, Homo sapiens
gaaatatccctggttctctaagtctctataaagttcttccttgttccccctacatcattatattcaccctgcctctttacctctgtttccttgtctattttctctcttattggattgttagagaataacggaggaggatggagagaaacaaaagagatataacaagtatggtatagggatcatgtctccacatatggcctt

SEQ ID NO: 479851 - DNA, 201 bp, Homo sapiens
aaatatccctggttctctaagtctctataaagttcttccttgttccccctacatcattatattcaccctgcctctttacctctgtttccttgtctattttctctcttattggattgttagagaataacggaggaggatggagagaaacaaaagagatataacaagtatggtatagggatcatgtctccacatatggccttg

SEQ ID NO: 479852 - DNA, 201 bp, Homo sapiens
accttaattaacacacttgattacaccttccccttctcagcattaactccagtaggtctttagccatgccagggtgactaaacccccaaccaaaaaacaaaaaaaaaaaacaaaaaaacaacaaccatgttttccaaatagcaatagcaattgtgccttatgttatgatcatacccaagagcttaggaagactacattctg

SEQ ID NO: 479853 - DNA, 201 bp, Homo sapiens
ttcccttccccttgccaaaagcacaaggtgacttttctccagtattcactgtgaggacctgatagagaccctggagataataaaacataaaaaggtacacstctaccctctacccccttccatgactaagtcttcctggattttttaactgttagatttttccacactgagcctccagcaatttgtcaattagagcttatg

SEQ ID NO: 479854 - DNA, 201 bp, Homo sapiens
cctccctctattcctacttaagagtttcttttaaaaaatcatgagtaggtgttggattttgtaaaaatgctgtttttgtatctattattattatatatttyttcttttttagcctattgatgtgttagattatattaattgatttttgaatgttgaacaagaattgcatacctgggataaattccacttgattgtggtgta

SEQ ID NO: 479855 - DNA, 201 bp, Homo sapiens
acacacttgattacaccttccccttctcagcattaactccagtaggtctttagccatgccagggtgactaaacccccaaccaaaaaacaaaaaaaaaaaamaaaaaaacaacaaccatgttttccaaatagcaatagcaattgtgccttatgttatgatcatacccaagagcttaggaagactacattctgtagtggctat

SEQ ID NO: 479856 - DNA, 201 bp, Homo sapiens
aggctgttgtgattttgatatggattgcattaaatctatagattgctttgagaagtaatgataccttaataatataatgttgtctttcaatgtatgaatayggcatgtcttttcatttatttagttcttttaaaatttctttcagtgatgttttttagttttcatttaccagctttgcaactttttggttaaattcattcc

SEQ ID NO: 479857 - DNA, 201 bp, Homo sapiens
gcagcttctcaggagttgtactgcttcctgtttgtttctgttggtttcctaatagacattacccattgaactgaaagaaccagcctagtcatctcctagcaaaaaaaaaataataataataataataataataatcacccacaattggctcattttctttggggctgtttctggaaagattccattgccttacagcatcac

SEQ ID NO: 479858 - DNA, 201 bp, Homo sapiens
aggcaaaactaatagaaaaataaagttaattagaggttaccaggggttgggagaagggaaaatgaggagttatggcttcatggttagacagtttttgtttkaggtgataaaaaaaagtttgggaatagtagtggtggttgcatatgttgtgaaggtaattaatgctgctgaattgtacactttaaaatgtttaaaatgata

SEQ ID NO: 479859 - DNA, 201 bp, Homo sapiens
aggagttgtactgcttcctgtttgtttctgttggtttcctaatagacattacccattgaactgaaagaaccagcctagtcatctcctagcaaaaaaaaaataataataataataataataataatcacccacaattggctcattttctttggggctgtttctggaaagattccattgccttacagcatcactctgcacagg

SEQ ID NO: 479860 - DNA, 201 bp, Homo sapiens
ccttcatgagaaagaaactcagagtgagggggtgtggcctccttgttgaggtcagttcattttaccccaaatatgtgaagtgggataatttgggaagcaaragtgaaagggacagatatgctctgggccttaccaggcgacagcacttttggtccattggaaggatggggtctggaagcccctggagcctcagattccaac

SEQ ID NO: 479861 - DNA, 201 bp, Homo sapiens
tgctggtaaaataatactcctgcacacacaaatgcaacaggaaaagtctggtggtgccgtcaagcagcctctctcaaactcccatcataatgtgccaacarccgggagggggaggtgtcactgcaatggagctgtcgacagttgctaaaacagccacacaccttgtgagacttgagtcactgttctattaggttggtgcaa

SEQ ID NO: 479862 - DNA, 201 bp, Homo sapiens
ctttcccgtgctattttcatgatagtgaataagtctcatgagatcttatgggtttatcaggggtttgcacttttgcttcttcctcattttctcttgccgcygccatgtaagaagtgcttttcacctcctgccatgattctgaggcctccccagccatgtggaactgtaactccaattaaacctctttttcttcccagtctc

SEQ ID NO: 479863 - DNA, 201 bp, Homo sapiens
tgtcagcactcgcttctggggccagtcacagcaggggcaccagctaggactgggactggggcagatgtagggatcaagaccaccttctcgaaagcggtaaygcttgatctgagactcaatgagcaaatagaaataaaaaagccccgataaaacaatattaaaaatcatctggaagaacacacaagggaaataatattgaag

SEQ ID NO: 479864 - DNA, 201 bp, Homo sapiens
atgatggccttaaaaaaaagagaatgaaaggaaaggaggagaacggaggaagaagaggaaagacaggaaacatccatcacacttgtttgtcaggtcttatktggaacagagtgtgccaaggcagtcactccctggaggagagaggcaagctgcaagaaggccatggggacaatgtgcagagcaatgaagcctcctgcccat

SEQ ID NO: 479865 - DNA, 201 bp, Homo sapiens
cattcactgacaagcaatgcatgggtaagatatttctttatggccctctattgtcatcctattaatctagacattaaacttataagtatcatcttgtcttratttatttttctaatctatacttttctcaatgatgtgtttcctaattgacatttccaaattacgagccttggggttcttttaatcattttggtttttaag

SEQ ID NO: 479866 - DNA, 201 bp, Homo sapiens
gcctttaattattgtatttcagtgtaaaacataatcagaggttaaaacagttttatgaaggcagataacattatggcatatattaatgtatagaggatgcrcatccatttatttccaactgcagatataatggggtacctgactgggactagatcaaatgattttggctttattcttggttgcttcccagttttggcaagt

SEQ ID NO: 479867 - DNA, 201 bp, Homo sapiens
taactttattttctccatatgattttctaaaatcttggtggagacaagcagtgggtgaggaagaaagatggctaaagttgcaggcactttttcagtttctytggaggcagaggtctgaatttcacctgtgatgtcaagcaatttctttgtctaagccttttggtaatgccaaagtaaagcagcaatcccttctggaacaga

SEQ ID NO: 479868 - DNA, 201 bp, Homo sapiens
cctgactcaggaggagttagtgaaaacatttagatgttcatatgtaaatacaataaaagctgaatctcaaaagtaggaataatgttgatctaaaaagaaawgtttacctggcgaaagacaacacaagggatatttattgagagtctaatatgcgccaagttttgttccggtttctagcaaccaacaagacaacttctcatt

SEQ ID NO: 479869 - DNA, 201 bp, Homo sapiens
aggcagttttgtttcttccttcccaatctgtacaatttttatttccttttcttgtcttattgcattagttaggacttttgaatatgatcttgaaaagcagyggtgaggaggaatatccctgccttgttcctgacctcagtgagaagctcattaagtgtgatggcagctgtaggttttttggtagatattctgtaccaagtc

SEQ ID NO: 479870 - DNA, 201 bp, Homo sapiens
aattttgtccaggattttttctacatctattgagatgatcatatcatgtttgtccttcattctgttaatgtgatatagcacattttttgacttgtgtatgwtgaaccattcttgcatcccagggataaatcccacttgatcatggtgaatgctccttttaatgtgctattgaattcagtttgctggtattttgttgaggat

SEQ ID NO: 479871 - DNA, 201 bp, Homo sapiens
gcaacctccgcctcctgggttcaagcgattctcctgcctcagcctccttaatagctgggattacaggcatgtgccaccacgcccagctaatttttgttgttgttgttttgttttgagacgaagtctcgctctgtcgcccaggctggagtgcagtggcgcaatctcggctcgctgcaagctcggcctcccgggttcacgcca

SEQ ID NO: 479872 - DNA, 201 bp, Homo sapiens
caggaaagcatcacacctatctttgtacgaccaagatgtcttgccctcagtaatcagtcccttccctagataagattatatacaacatgcaggtaagaggsccgagccaccacctcctgctacattcaacaaccaccacagggggatcaaagaattacacttttaatctagtcataaactttaataacacaaatggaggac

SEQ ID NO: 479873 - DNA, 201 bp, Homo sapiens
gttgaagatattaatggagacaagaattaatgtgttttattacataaaaaatttattcgacaaaatgtaataaacacgaagagtaatagagaaaaattacrtgacaaaaaactgattaaaatatgctctctaaatgcattaaagttgataaatattcataaaatcaacacccatattcctttatagagtagtttaaagtga

SEQ ID NO: 479874 - DNA, 201 bp, Homo sapiens
aaggctgttcgtttctttcttgtttctccaaagccagggctaagaaaactgacaccattaaatttttctgaggtacaatttgaaaatgcataaaaagaacrgttacaccattcctatattttaactccataattaaatttgggagaaaatgtatcaagaaaataaacccaggcagagcacctgtaatcccagcactttggg

SEQ ID NO: 479875 - DNA, 201 bp, Homo sapiens
tgaaagtagaatgttgaaatcttcagctaatactgtattgtggtctatctttttagcgctaaaagtatctgctttatatatctgagtggtccaatgttggsagcatatatatttataattgttatatcttcttgctgaattgacccctttatttatataataaccttttttgtctcttttatagtttttgtcttgaaatct

SEQ ID NO: 479876 - DNA, 201 bp, Homo sapiens
ttctccatgttggaaactgaaaggacagggctgggtggagagtgcgcgtatgtggggggtgaggacatgataggggaggttagagctggcgaagatgatgktataaagggttcctcttccagatctctgccagattgctcagaagccgcgttctttcctcatagagccagggagtgaatttctcaaggcgtcaccaagccc

SEQ ID NO: 479877 - DNA, 201 bp, Homo sapiens
atcgccctgggccgcgacggggccatcacacggcacctgcagcacacgctgcgcacccgcagccgcgcctcgttgctcatgatcgcgctcacccgggtgcygtcggcgctcatcgccctcgcgccgctgctctttggccggggcgaggtgtgcgacgctcggctccagcgctgccaggtgagccgggaaccctcctatgcc

SEQ ID NO: 479878 - DNA, 201 bp, Homo sapiens
agaggatctacgggggctgcaggcatacgtgccaaaggtgggctgctgcccgcaggagggatcaggataggacgacctggacccctcttccagcctccccyggcaggcagtaccccctccacgcccgcacctgcccggtccacgccgaactcactgaggactcgtgtgccccctgccctggagctgcgatcccaagcgcca

SEQ ID NO: 479879 - DNA, 201 bp, Homo sapiens
cggcaggcagtaccccctccacgcccgcacctgcccggtccacgccgaactcactgaggactcgtgtgccccctgccctggagctgcgatcccaagcgccrtggaggccgctagcctttcagtggccaccgccggcgttgcccttgccctgggacccgagaccagcagcaggacccgggaccccaagcccgagagggatac

SEQ ID NO: 479880 - DNA, 201 bp, Homo sapiens
tgttggtttcctaatagacattacccattgaactgaaagaaccagcctagtcatctcctagcaaaaaaaaaataataataataataataataataatcacmcacaattggctcattttctttggggctgtttctggaaagattccattgccttacagcatcactctgcacaggctatgccaggctcaggctgaaaatctgt

SEQ ID NO: 479881 - DNA, 201 bp, Homo sapiens
caacctccgcctcctgggttcaagcgattctcctgcctcagcctccttaatagctgggattacaggcatgtgccaccacgcccagctaatttttgttgttgttgttttgttttgagacgaagtctcgctctgtcgcccaggctggagtgcagtggcgcaatctcggctcgctgcaagctcggcctcccgggttcacgccag

SEQ ID NO: 479882 - DNA, 201 bp, Homo sapiens
aacctccgcctcctgggttcaagcgattctcctgcctcagcctccttaatagctgggattacaggcatgtgccaccacgcccagctaatttttgttgttgttgttttgttttgagacgaagtctcgctctgtcgcccaggctggagtgcagtggcgcaatctcggctcgctgcaagctcggcctcccgggttcacgccagt

SEQ ID NO: 479883 - DNA, 201 bp, Homo sapiens
tgaggtcgtggggaccatcattctctctccttgacgaatcttcggatattattttaacctacagtttcagtgaccttttcacctaacattgtttgatgggytatggtataaatgcattttgaatgaagttggaggagaggttctggacaagactggaataacctcccattgctttaatcatacagtattatagtttgtcta

SEQ ID NO: 479884 - DNA, 201 bp, Homo sapiens
ttgttgttgttttgttttgagacgaagtctcgctctgtcgcccaggctggagtgcagtggcgcaatctcggctcgctgcaagctcggcctcccgggttcaygccagtctcctgcctcagcctcccgagtagctgggactacaggcgcctgccaccacgcccggctaatgtttttttgtatttttagtagagacggggtttc

SEQ ID NO: 479885 - DNA, 201 bp, Homo sapiens
ccaacacaatgctcaaagtaaatgctcagtgaagcattttggatttcatattttcagatttgggtttgcccaaccggtgtaatacaaatattccaaaatcaaaaaaaaaaaaaaaaaaatctaaagtctgaaacactcctggtcccaagcattttgaatacaggatactcaacctgtatgacactttcctattggaccctc

SEQ ID NO: 479886 - DNA, 201 bp, Homo sapiens
ttcaactgatgttgaaattgtcaaatgctttttctacatgcaagtacaacttgttttattttatttttttattttttttggagacagagtctcgctctgtyacccaggctggagtgcagtggtgcgatctcagctcactgcaacctctgcctcctgggttcaagcaattctcctgcttcagcctcccgagtagctgggact

SEQ ID NO: 479887 - DNA, 201 bp, Homo sapiens
gccatggaggccgctagcctttcagtggccaccgccggcgttgcccttgccctgggacccgagaccagcagcaggacccgggaccccaagcccgagagggrtactcggttcgaccccgagcggcgccgtcctgccgggccgagggccgcccttctctgtcttcacggtcctggtggtgacgctgctagtgctgctgatcgc

SEQ ID NO: 479888 - DNA, 201 bp, Homo sapiens
gcaatccgcctgcctcagcctcccaaagtgctaggattacaggagtgagccaccgtgcctggctgcaagtacaactttttaaagaattagaaacaataccyggaggttgtcttgtcccttctcctatttcatgctcaagccatgcaggaaagggaatcaagttttattttctactgtgattaaccgtaattagcccttctt

SEQ ID NO: 479889 - DNA, 201 bp, Homo sapiens
acttgtgcattgttaatgtacaagaaaatgttcaattttttttgtattaactcttatcctgcaaccctgctataatcacttattataatagttcaaagggtttttttttttttttggttgattctttcagattttccacatagataatcatgtgacgcgtgagaaaaaggcagttttgtttcttccttcccaatctgtaca

SEQ ID NO: 479890 - DNA, 201 bp, Homo sapiens
cggggaaatgaggcttccatgctaacaagttcaaggctgctggctcttgtccccatgggctagataccctccaactgaggacagttctgataccaactgcrtcctagtcgcacaccagatctgcaaccctattcacaccctttggtcacaagttatagcgactgtgcatggctcagggcaaaccatttgccttcatgagaa

SEQ ID NO: 479891 - DNA, 201 bp, Homo sapiens
agtcttgggtatttcttcatagtggtgtaaaaatgaactaatacagtaagttggtactgaggtagtggggtgctgctattaaagatatctgaaaatgtggyagcaactttggaactgggtaatgggcagaggctggaagagtttggagggctcagaaggagacaggaaaatgtgggaaagtttgaaacttcctagagactt

SEQ ID NO: 479892 - DNA, 201 bp, Homo sapiens
catcttttatcacgatggacctgttgagtgtagatttcttttgtccattgaattgtgccttctttatcctacctcatcatgattcttgtaggtcaggttcrctaggacacagacactgagacggggattggtatgcagggaatgtaggaagatttgggccaagggggaagctgaggcatgacagtttcgacaaaagtcaca

SEQ ID NO: 479893 - DNA, 201 bp, Homo sapiens
gtaggtcaggttcgctaggacacagacactgagacggggattggtatgcagggaatgtaggaagatttgggccaagggggaagctgaggcatgacagtttygacaaaagtcacagctaaccccactgggaagttgtgaagctgatcagacccttctgagcctcaagttggggctggggcctgggcctttatatgctgtgtt

SEQ ID NO: 479894 - DNA, 201 bp, Homo sapiens
ggcaggcatttgcacctgctgggctccagagctccccttctttcttcactcggtgacagcaaaccaagacttgggtcacatcatttctgggtaagtatgcrgagatgctgaaagaacagtgggagcaaaaagaacaagaatcttgaacgtcttctgttttctctatgacccttagaaacccaaagaaaatttcacagtagg

SEQ ID NO: 479895 - DNA, 201 bp, Homo sapiens
tccacggctgtgctgccccgccggcctcgggaacgtggcggccatcgccctgggccgcgacggggccatcacacggcacctgcagcacacgctgcgcaccygcagccgcgcctcgttgctcatgatcgcgctcacccgggtgccgtcggcgctcatcgccctcgcgccgctgctctttggccggggcgaggtgtgcgacgc

SEQ ID NO: 479896 - DNA, 201 bp, Homo sapiens
aatattcttgtgaagagcaaatgaaattctatcatatgtggagtcccttaagtagtaaaccataaataatagctaccgcattacttttgttatttttctayttctctttaataagaaaagtattattttatttctcttattgctattcctcataatcataggtagattatttattgcttgtgtagaaaattatcccacagt

SEQ ID NO: 479897 - DNA, 201 bp, Homo sapiens
gccttttggccaggatctaataggtgctcagcatccttctcactctggaagcctcaactttctcttttgagggtatcaggtgtttcaagtaacatgctccyggtcctatagattaacaggatttattgccctttgcaaatacaatacatgggtgagggaagaggtgcatatgagagcaaaaagagacaaggaaagtttttt

SEQ ID NO: 479898 - DNA, 201 bp, Homo sapiens
tctctaacatacagtattcttctaagtcatgtctaagggccttgaatcacaggatgctgagattgtagatggggtagtgttcaggagcatgctgcttctaygggtcacagcaagccctcactcaaacttctgggtaatgttcctgagtccacgtttgcaagccttctggaaacaagacatctaaacaaaagtgtaaaacac

SEQ ID NO: 479899 - DNA, 201 bp, Homo sapiens
tgttttcattactccatgccatctccagggacttgacttctgaggcctgcccctctgctcatgggtgtctctgcttgagaggaatgaggcagtcacagccsagtcaaggtgggtcccacgaagcaggatctcaaaactactcaggtgaactctccttttcaggagagctgaacacaattgagcacaaaagccttgcctgct

SEQ ID NO: 479900 - DNA, 201 bp, Homo sapiens
aagggttttttttttttttcctatctctctctcttttctttgctattgcttgtttgatttctgtgtgcaatttgatgctgggacctagttatccatcaggygtagtagtcatactacttagaaccagaattcttttagggacccatagaaatattttaattttaatttcttttaaaattagaggaaaaatgaatataacac

SEQ ID NO: 479901 - DNA, 201 bp, Homo sapiens
tttgcttccaagatggagcactcacatgcctgttgacaagaggcttcagatccttgagaaaaggacatctccaaagggctgcttgggtggtaccacatgakagctgactttccccagagcaagccgtccaagagagtgaagcaaggaggaaattgcagtgccttttatgacttagtctcagaagtcacatatgattatttt

SEQ ID NO: 479902 - DNA, 201 bp, Homo sapiens
ttttttatgttacaaacaatccaggccaggtgtggtggctcacgcctgtaatcccagcactttgggaggccgaggtggccggatcacgaggtcaagagatkgagaccatcctggtcaacatggtaaaaccccatctctactaaaaatacaaaaattagctgggtgtggtgatgggcgcctatagttccagctacttgggag

SEQ ID NO: 479903 - DNA, 201 bp, Homo sapiens
tttagcctattgatgtgttagattatattaattgatttttgaatgttgaacaagaattgcatacctgggataaattccacttgattgtggtgtataattctttttttttgtacattgttagattaatttgctaatatttgttgagaatttttgtatccatgttcatgagatattgatctgtagttttcttgtctttgtctg

SEQ ID NO: 479904 - DNA, 201 bp, Homo sapiens
tcaaaaaaaaaaatacaattatactattttagttatttttaaatgtacaataaattatgtttgactatattcaccctattgtactatcaaatactagatcrtattcattctatctaactgtatttttgtacccatgaacccttccctcttaccccctcccactacccttcctagcttctggtaactatcattcaactctct

SEQ ID NO: 479905 - DNA, 201 bp, Homo sapiens
tattttaaaattttcctcaatttttttctttgacccatgtgtcatttcaaagtgttttttaagtctccaagtatttgagaattttttattctttttgtggaaaaaaaaaaacagaccttgcatgctttctcttcttttaaatttgttaaaatgtgttttatggccaaatgtggtctgtcttggtgaatgttctaggtgagc

SEQ ID NO: 479906 - DNA, 201 bp, Homo sapiens
tctgaccgctggtatgggcaattctcctgtggttaggctagggttggtctaaatgcttcctctgtaggcatcagctgagttctgcctggcattgctttctkctgtgaccagacagcactgagttttaatgcaaagtcccacaatcactgcactttccctccaacaagcacacagattctctctccacaccacatagccaca

SEQ ID NO: 479907 - DNA, 201 bp, Homo sapiens
atgcctttagaccattgatgtttggagtgattactgacataaataaatatttaccatatttgttactgtttcctatttgttgtcctttttctttgttcctrtttttctcttgcactctttttctgccccttgtaggtttcttgtttgtttgtttatgttgctatgttgcccaggctgttctcaaactcctgagcctgaagc

SEQ ID NO: 479908 - DNA, 201 bp, Homo sapiens
agcccctctcatcacaggcctggaagcctagaaggaaaaaatggtttcatgggctggacccaggtccccactgctctttgcaacctcaagacatggtgccytgcatcccagctgcttcagcttcagccatggctaaaaagggcaaaggtacagctcaggccattgcttggaaggtgcaagccccaacccttggcagcttcc

SEQ ID NO: 479909 - DNA, 201 bp, Homo sapiens
aaatgctgagagactttgtcaccaccaggcctgccctaaaagagctcctgaaggaagcactaaacatggaaagaaacaactggtaccagccactgcaaaawcatgccaaattgtaaagaccattgaggctaggaagaaactgcatcaactaacgagcaaaataaccagctaacatctaaatgacaggatcaaattcacaca

SEQ ID NO: 479910 - DNA, 201 bp, Homo sapiens
ctcaacttgacctcccaaagtgctgggattacaggcatgtgccaccgttcccagcctatccttttctgtctgattgaagaactccctttagcatttcttayaggacaggtctggtgttgaaatctctcagcttctgtgtggtaaagtttttatttcttcttcatgtttgaaggatattttgctggatatgctattctagga

SEQ ID NO: 479911 - DNA, 201 bp, Homo sapiens
gaaacccatctcacgtgcagagacacacataggctcaaaatagaaggatggaggaagatctacaaagcaaagggaaaacaaaaaaaggcaggggttgcaamcctagtctctgataaacgagactttaaaccaacaaagatcaaaagagacaaagaaggccattacataatggtaaagggatcaattcaacaagaagagcta

SEQ ID NO: 479912 - DNA, 201 bp, Homo sapiens
ggtctggtgttgaaatctctcagcttctgtgtggtaaagtttttatttcttcttcatgtttgaaggatattttgctggatatgctattctaggataaaagytattttccttcagcacaataaatatgtcatgccactgtctcctggactgtaagttttacactgaaacgtctgctgccaaatgtattggagctcccttgta

SEQ ID NO: 479913 - DNA, 201 bp, Homo sapiens
ggaacgtggcggccatcgccctgggccgcgacggggccatcacacggcacctgcagcacacgctgcgcacccgcagccgcgcctcgttgctcatgatcgckctcacccgggtgccgtcggcgctcatcgccctcgcgccgctgctctttggccggggcgaggtgtgcgacgctcggctccagcgctgccaggtgagccggg

SEQ ID NO: 479914 - DNA, 201 bp, Homo sapiens
atcattcactgacaagcaatgcatgggtaagatatttctttatggccctctattgtcatcctattaatctagacattaaacttataagtatcatcttgtcttgatttatttttctaatctatacttttctcaatgatgtgtttcctaattgacatttccaaattacgagccttggggttcttttaatcattttggttttta

SEQ ID NO: 479915 - DNA, 201 bp, Homo sapiens
tcattcactgacaagcaatgcatgggtaagatatttctttatggccctctattgtcatcctattaatctagacattaaacttataagtatcatcttgtcttgatttatttttctaatctatacttttctcaatgatgtgtttcctaattgacatttccaaattacgagccttggggttcttttaatcattttggtttttaa

SEQ ID NO: 479916 - DNA, 201 bp, Homo sapiens
ctcaagaattctgctagattctttttaattatttcaatctctttgttaaatttatctgatgagattccaaattctttctttgtgttaccttgatttcattragtttcctcaaaagagctattttgaatcatctatctgaaagatcacatatctgtctctccagggttggtccctggggccttatttaattgatttggtgaa

SEQ ID NO: 479917 - DNA, 201 bp, Homo sapiens
aagcaagagcaaacacaatcaaaagctagcagaaggcaagaaataactaaaatcagagcagaactgatggaaatagagacacaaaagacccttcaaaaaaktaatgaatccaggagctggttttttgaaaggatcaacaaaattgatagaccactagcaagactaataaagaagaaaagagagaagaatcaaatagacgta

SEQ ID NO: 479918 - DNA, 201 bp, Homo sapiens
attcactgacaagcaatgcatgggtaagatatttctttatggccctctattgtcatcctattaatctagacattaaacttataagtatcatcttgtcttgwtttatttttctaatctatacttttctcaatgatgtgtttcctaattgacatttccaaattacgagccttggggttcttttaatcattttggtttttaagc

SEQ ID NO: 479919 - DNA, 201 bp, Homo sapiens
aactcattttatgaggccagcatcatcctgatagcaaagctgggcagagacacaaccaaaaaagagaattttagaccaatatccttgatgaacattgatgyaaaaatcctcaataaaatactggcaaactaaatccagcagcacatcaataagcttatccaccatgatcaagtgggtttcatccctgggatgcaaggctgg

SEQ ID NO: 479920 - DNA, 201 bp, Homo sapiens
tttggcaagtacgcaattatgaataaatatgctacaaacaacgatgtgcaggattttttgtgtatataactttattttctccatatgattttctaaaatcytggtggagacaagcagtgggtgaggaagaaagatggctaaagttgcaggcactttttcagtttctctggaggcagaggtctgaatttcacctgtgatgtc

SEQ ID NO: 479921 - DNA, 201 bp, Homo sapiens
ttcactgacaagcaatgcatgggtaagatatttctttatggccctctattgtcatcctattaatctagacattaaacttataagtatcatcttgtcttgatttatttttctaatctatacttttctcaatgatgtgtttcctaattgacatttccaaattacgagccttggggttcttttaatcattttggtttttaagca

SEQ ID NO: 479922 - DNA, 201 bp, Homo sapiens
actcattttatgaggccagcatcatcctgatagcaaagctgggcagagacacaaccaaaaaagagaattttagaccaatatccttgatgaacattgatgcraaaatcctcaataaaatactggcaaactaaatccagcagcacatcaataagcttatccaccatgatcaagtgggtttcatccctgggatgcaaggctggt

SEQ ID NO: 479923 - DNA, 201 bp, Homo sapiens
catccagggagtaaagaacaaagaagctgctaaacatcctaccacatacttgatagcacccaccccacccccaacaaagaattattcagcccaaaatctcsatagtgcttaggttgagaatccctgactcaggaggagttagtgaaaacatttagatgttcatatgtaaatacaataaaagctgaatctcaaaagtaggaa

SEQ ID NO: 479924 - DNA, 201 bp, Homo sapiens
tcgcaagaacaaaaaaccaaacactgcatattctcactcataggtgggaattgaacaatgagaacacatggacacatgaaggggaacatcacactctgggractgttgtggggtgggggaaaggatagcatgaggagatacacctaatgctaaatgacgagttaatgggtgcagcacaccagcatggcatatgtatacata

SEQ ID NO: 479925 - DNA, 201 bp, Homo sapiens
atctcaaaagtaggaataatgttgatctaaaaagaaaagtttacctggcgaaagacaacacaagggatatttattgagagtctaatatgcgccaagttttrttccggtttctagcaaccaacaagacaacttctcattctcatagaattgatgttctggttgggagggaagacctctaaaatatcatatatatttcagatc

SEQ ID NO: 479926 - DNA, 201 bp, Homo sapiens
tcttccagagtgcccatgtgaaaacagagcaaccaaactgaaaagccatggacaacaaaagtcggtgacaaagtgtcaccttgaatcctgaaatacaagtragtggaattgctggtcgtaattctacgattagcttattaagaaactgccagctttgcacagcagctgcaccattatttattacatttcatgagagctgca

SEQ ID NO: 479927 - DNA, 201 bp, Homo sapiens
ttaagcctaatccaggccttgggtgaggtggaagtggggtgcatggcagggaaagctgagagacacttggtgcccagccatatcctcggggagcctgccagggaaagctgagagacgcttggtgcccagccatatcctcggggaacctgccagggaaagctgagagacgcttggtgcccagccatatcctcggggagcctg

SEQ ID NO: 479928 - DNA, 201 bp, Homo sapiens
taagcctaatccaggccttgggtgaggtggaagtggggtgcatggcagggaaagctgagagacacttggtgcccagccatatcctcggggagcctgccagggaaagctgagagacgcttggtgcccagccatatcctcggggaacctgccagggaaagctgagagacgcttggtgcccagccatatcctcggggagcctgc

SEQ ID NO: 479929 - DNA, 201 bp, Homo sapiens
aagcctaatccaggccttgggtgaggtggaagtggggtgcatggcagggaaagctgagagacacttggtgcccagccatatcctcggggagcctgccagggaaagctgagagacgcttggtgcccagccatatcctcggggaacctgccagggaaagctgagagacgcttggtgcccagccatatcctcggggagcctgcc

SEQ ID NO: 479930 - DNA, 201 bp, Homo sapiens
gtgaggtgaaggctgtttgtggaagctttcccagcagccgagaaggggagtgatacggtttgcctgtgtctccacccaaatctcaacttgaattgtatttyccagaaagggacccagggggaggtaattgaattatgggggccagtctttcccgtgctattttcatgatagtgaataagtctcatgagatcttatgggttt

SEQ ID NO: 479931 - DNA, 201 bp, Homo sapiens
aactctgaggaggaggcgtggtaaagactctctcctaccacccataggaaatcaaattccagcaaagacaaagatcagtacaggagaagaaagcctgggcrgagaaaacgagggaaccctgacggaacctgggcaactggaaagtattactccttcgaaattctgaagttcatttacagctgccagtcagcacaccaggga

SEQ ID NO: 479932 - DNA, 201 bp, Homo sapiens
aactgatccttaacactgctttgatagtgggctggagataagcccattgcttatctggagaaatgatttccacccacttttattctaaagcaaatccgcarcactgaggaggctgggaccaacatcaagcccagatccgtttccacacatagagcaaaactcttcattttggttgagtaccaacaatagtagtttataaca

SEQ ID NO: 479933 - DNA, 201 bp, Homo sapiens
gagcctgtgccacgtgtggatctccttccacggctgtgctgccccgccggcctcgggaacgtggcggccatcgccctgggccgcgacggggccatcacacsgcacctgcagcacacgctgcgcacccgcagccgcgcctcgttgctcatgatcgcgctcacccgggtgccgtcggcgctcatcgccctcgcgccgctgctc

SEQ ID NO: 479934 - DNA, 201 bp, Homo sapiens
atgtttaagagaggaaatgcctgctagagacatctgaattatctagatcaatggttctcaactgggttgattctgctcccaggagataactggtggggtcrgtggtggctactggcatccagggagtaaagaacaaagaagctgctaaacatcctaccacatacttgatagcacccaccccacccccaacaaagaattatt

SEQ ID NO: 479935 - DNA, 201 bp, Homo sapiens
ccggcgttgcccttgccctgggacccgagaccagcagcaggacccgggaccccaagcccgagagggatactcggttcgaccccgagcggcgccgtcctgcsgggccgagggccgcccttctctgtcttcacggtcctggtggtgacgctgctagtgctgctgatcgccgccactttcctgtggaacctgctggttccggtc

SEQ ID NO: 479936 - DNA, 201 bp, Homo sapiens
gctataatcacttattataatagttcaaagggtttttttttttttttggttgattctttcagattttccacatagataatcatgtgacgcgtgagaaaaakgcagttttgtttcttccttcccaatctgtacaatttttatttccttttcttgtcttattgcattagttaggacttttgaatatgatcttgaaaagcagtg

SEQ ID NO: 479937 - DNA, 201 bp, Homo sapiens
gaggcaggagaatcgcttgaacccagggggcagagattgcagtgagccaagatctcgccattgcgctccagcttgggcaataagagtgaaactctgtctcaaaaaaaaaaaaaaaagcaaaaagcaaatcaaaacaattaaaatacatcattatacaccaattgaacattgtttttaatgataaaaaatttgctttagcaa

SEQ ID NO: 479938 - DNA, 201 bp, Homo sapiens
actctttgggaggccgaggcaggcagatcacgaggtcaggagatcgagaccatcctggcgaacactgtgaaaccccgtctctactaaaaatacaaaaaatyagccgggcgtggtggcaggtgcctgtagtcccagctaatcaggaggctgaggcaggagaatggcgtgaccccggcaggtggagcttgcagtgagctgaga

SEQ ID NO: 479939 - DNA, 201 bp, Homo sapiens
ggccgaggcaggcagatcacgaggtcaggagatcgagaccatcctggcgaacactgtgaaaccccgtctctactaaaaatacaaaaaattagccgggcgtsgtggcaggtgcctgtagtcccagctaatcaggaggctgaggcaggagaatggcgtgaccccggcaggtggagcttgcagtgagctgagatcgcgccactg

SEQ ID NO: 479940 - DNA, 201 bp, Homo sapiens
tgaggcaggagaatggcgtgaccccggcaggtggagcttgcagtgagctgagatcgcgccactgcactccagcctgggtgacagagcgagactccatctcaaaaaaaaaaaaaaatgtatgtggatagggacaaaagatgagagtaaaagcatgtgatgcatctggctagtgcaatatgaatgttttaacatttctaatat

SEQ ID NO: 479941 - DNA, 201 bp, Homo sapiens
tatcattgtttatatgtatgtaccacattttctttatccttcatctatgaatggccacttaggttgtttccaaatcttggctattgtgactagcactgcartaaacatgggagtgcagatatctcttctatatactgatttcctctcttttagatacacagctggcagtgagattgctgagtgatatggcagctctatttt

SEQ ID NO: 479942 - DNA, 201 bp, Homo sapiens
gaggcaggagaatggcgtgaccccggcaggtggagcttgcagtgagctgagatcgcgccactgcactccagcctgggtgacagagcgagactccatctcaaaaaaaaaaaaaaatgtatgtggatagggacaaaagatgagagtaaaagcatgtgatgcatctggctagtgcaatatgaatgttttaacatttctaatatt

SEQ ID NO: 479943 - DNA, 201 bp, Homo sapiens
agcacattttagtacacctgtttgctatttgtctttttttgagaagtgtctattcaaatcttttactcactttttaatcaaattatttgattttttcatakagaattatttgaatcccttatatattctggttattgaatcccttatatattctggttattaatcccttgacagatggatggttcacaaatattttcttcc

SEQ ID NO: 479944 - DNA, 201 bp, Homo sapiens
tgccccttgctcccgcccacccccgcccactgcaggtgcagctcgtctcccgacgccgctgggtgggggaggggcaactctccaagcacaacccgcgctckgtccctcggccgcgctgattcccaaccccctggcggccggtggcacccgggaccgctaagagaggtggtaggagggactggcgagccgagcggagctaga

SEQ ID NO: 479945 - DNA, 201 bp, Homo sapiens
attaatcccttgacagatggatggttcacaaatattttcttccattctatgggttgtctctttgttgattgtttcctttgctgtgcagaatctttttaacytgatgtgatcctacttgtccatttttgctttggttgcctgtacttgtggggtattactcaagaaacctttgccaaatccagtgttctaaagagcttcccc

SEQ ID NO: 479946 - DNA, 201 bp, Homo sapiens
ttacttgttatcttcaatttctttcatcagccttttatagtttttattctagagatcttttacttctttaattcctaggtatttaatttatatgtaactaytgtaagtggaattactttttaaatttgttttttcagattatttgccattgaaatatagaaatgctactgatttttgtatgctgattttgtatcttgcaac

SEQ ID NO: 479947 - DNA, 201 bp, Homo sapiens
gatctacgaggcggccaagtttcgtttcggccgccgccggagagctgtgctgccgttgccggccaccatgcaggtgaggggtgggctgaggaacgttgctwtggggaagcggttgctagagaaggaggcggcttcgcgaatgggagagtgggcggaagcttgtactaatggagcgcgcgcccagagatcacctggggcgca

SEQ ID NO: 479948 - DNA, 201 bp, Homo sapiens
gacgcacgatatggccggaggggcttgtaggttcagcccgtctcagtagcgatgagggcacatcttgttacctgcactatctgttgttttccccctcaagkgcccctgtccatgtgagtcctggagccgccggcttccttgtcccaactagacctagaggggatgcagtggactgggaattcgtctttcagaaattcctgt

SEQ ID NO: 479949 - DNA, 201 bp, Homo sapiens
ctttcttttctctttttttttttttttttttttgagttggagtcttgttctatcacccaagctggagtgcagtatcttggctttttgcaacttccccttcytgggtttaagtgatcctcccacttcagtcttccaagtagctagtgtgtaacggatcttggagcccccaaatcaccaggctaaagggaaaagtcaagctgg

SEQ ID NO: 479950 - DNA, 201 bp, Homo sapiens
caggcggatcacgaggtcaagaaatcgagaccatcctggccaacatggtgaaaccccatctctactaaaaatacaaaaattagctgggtgtggtggcacaygcctgtagtcccagctactctggaggctgaggcaggagaattgcttgaacccaggaggtggaggttacggtgatgcgagatcgtgccactgcattccagc

SEQ ID NO: 479951 - DNA, 201 bp, Homo sapiens
ctggagtgcagtatcttggctttttgcaacttccccttcctgggtttaagtgatcctcccacttcagtcttccaagtagctagtgtgtaacggatcttggrgcccccaaatcaccaggctaaagggaaaagtcaagctgggaactgcttagggcaaacctgcctcccattctattcaaagtcacccctctgctcactgaga

SEQ ID NO: 479952 - DNA, 201 bp, Homo sapiens
cagtgttgtaatctaagttttcagtcactacagccatatctgaattagggggcaatgcaattccagtaacgctgtggctcttgtaggcttgtagaggtatyaccttggtggtcttggttaagatctggaagaattctctgaattaccaggaaaagcctcttattctcttccctttctttcaaacaaacaaaattgctctgt

SEQ ID NO: 479953 - DNA, 201 bp, Homo sapiens
aagcagtttctcctgaaactgtaacctgtgctgcctagggtttgctgaggggtgacacaaaccaaacagtcccttggctgccctggttagtgtctcactakgttacttgcccccaaagtccactggctccaagtccagcaaagcaccaggacttgcccaggaattatagtccttgtggccaagattgccttttaagtttat

SEQ ID NO: 479954 - DNA, 201 bp, Homo sapiens
ctcttccagatctctgccagattgctcagaagccgcgttctttcctcatagagccagggagtgaatttctcaaggcgtcaccaagccctcgccgggcagcmgtgctggaagcaaagcggcggcaggatggggctgggcttaggagctttctgttttatataccccaatacctgggtttcccatttcgggtataggtagaat

SEQ ID NO: 479955 - DNA, 201 bp, Homo sapiens
gattacgtgagatgaagaatgtaaagcacctggcatagtggctggcacacactgggtggcagactggctggagaaagaaggggttcaacaggatattgccyggcagtccataaggaggaggaagataatgctggaaatgtaatgagatgagcaaaattgcagtcggcagatcttctctcaccgtatttattattctgtctg

SEQ ID NO: 479956 - DNA, 201 bp, Homo sapiens
aactatgatggccttaaaaaaaagagaatgaaaggaaaggaggagaacggaggaagaagaggaaagacaggaaacatccatcacacttgtttgtcaggtcwtatttggaacagagtgtgccaaggcagtcactccctggaggagagaggcaagctgcaagaaggccatggggacaatgtgcagagcaatgaagcctcctgc

SEQ ID NO: 479957 - DNA, 201 bp, Homo sapiens
gccttctccacccgcggcgccttccacctgccgcttggcgtggtgccgtttgtctaccggaagatctacgaggcggccaagtttcgtttcggccgccgccrgagagctgtgctgccgttgccggccaccatgcaggtgaggggtgggctgaggaacgttgctttggggaagcggttgctagagaaggaggcggcttcgcga

SEQ ID NO: 479958 - DNA, 201 bp, Homo sapiens
gctgcaggcatacgtgccaaaggtgggctgctgcccgcaggagggatcaggataggacgacctggacccctcttccagcctcccccggcaggcagtacccmctccacgcccgcacctgcccggtccacgccgaactcactgaggactcgtgtgccccctgccctggagctgcgatcccaagcgccatggaggccgctagcc

SEQ ID NO: 479959 - DNA, 201 bp, Homo sapiens
ccccatgggttacgattacttcctactgccctgtgcccttcactgtttagaaaagaagaaacattatttctttggcttttaaaatgtgacattaaaagggttttttttttttttcctatctctctctcttttctttgctattgcttgtttgatttctgtgtgcaatttgatgctgggacctagttatccatcaggcgtagt

SEQ ID NO: 479960 - DNA, 201 bp, Homo sapiens
gacttagtctcagaagtcacatatgattattttctattcattagcagtgagtcactaagtccagctcacactcaagaaaagaggaattaggcttcatcttygggagaagtatttcccaaaacatattgaatgtagtgttcaaaattactcgattgacttactgatcttatgtaccaggcaatgtcctctgaggtttcaaag

SEQ ID NO: 479961 - DNA, 201 bp, Homo sapiens
tttgtttgaacaatgacacactgccataaaggttatgtgcagtaggccccaagtgacccaaaatctgtacagagccatttatgtttatatatttattttamattgacaaataataattgtatatacttatgggatacaatctaatttttaaaaattttgtatttttaatttttgtgggtatacagtagatttatattttta

SEQ ID NO: 479962 - DNA, 201 bp, Homo sapiens
acagagccatttatgtttatatatttattttaaattgacaaataataattgtatatacttatgggatacaatctaatttttaaaaattttgtatttttaawttttgtgggtatacagtagatttatatttttatagggcacatgagatattttgatacaggcatgcaatgtataataatcacatcaaggtaaatgggctat

SEQ ID NO: 479963 - DNA, 201 bp, Homo sapiens
aattgcttgaacctgggaaggcagaggttgcagtgagctgagattgtgccactgcactccagcctggcaacagagtgagactctgtctcaaaaaaaaaaatacaattatactattttagttatttttaaatgtacaataaattatgtttgactatattcaccctattgtactatcaaatactagatcgtattcattctatc

SEQ ID NO: 479964 - DNA, 201 bp, Homo sapiens
cttttgtccacttttaatcaggttatttgttttcttgctgttgagtttttcaaattccttatatattttaaatattagccccatattagatatatggtttkcaaatatttcctctcattctgtgagttgtctcttcacactgttgtttcttttgctgtgtagaagctttttggtttgatgtaatctcacttgtctactttt

SEQ ID NO: 479965 - DNA, 201 bp, Homo sapiens
tatcttattgtagttttgatttgcatttctctgatgagcagtgatgttgagcacattttagtacacctgtttgctatttgtctttttttgagaagtgtctrttcaaatcttttactcactttttaatcaaattatttgattttttcatatagaattatttgaatcccttatatattctggttattgaatcccttatatatt

SEQ ID NO: 479966 - DNA, 201 bp, Homo sapiens
gatatatggttttcaaatatttcctctcattctgtgagttgtctcttcacactgttgtttcttttgctgtgtagaagctttttggtttgatgtaatctcayttgtctacttttgcttttgttgcctgtgctttaaggatcatatcccaaaaatcattatctaacccaatgtcaaggagcttttcccctatgttttcttcta

SEQ ID NO: 479967 - DNA, 201 bp, Homo sapiens
ctttgttgattgtttcctttgctgtgcagaatctttttaacttgatgtgatcctacttgtccatttttgctttggttgcctgtacttgtggggtattactyaagaaacctttgccaaatccagtgttctaaagagcttccccaatattttcttgtaggagtttcatagtttgaggtcttagatttaagtctttaatccatg

SEQ ID NO: 479968 - DNA, 201 bp, Homo sapiens
attttttaaaaattaattaacacttgttttgtggcctaacatattgtttatccatgataatgatccatgtactgaggagaaaaatgtatattctgcaaccrttaggtgaaatgttctgtaaatatctattaggtccattaggtctatagcacaggttaagtccaaagttggtttgttgattttctgtctggataatttgtc

SEQ ID NO: 479969 - DNA, 201 bp, Homo sapiens
actttcatggggcctatagcccctttgttttggccaatttctcccatttggaatgggtgtatttacccaatgcctgtatttccattgtatgtgggaagtarctaacttgcttttgattttacaggtccataggcagaaggatcttgccttgtctcagatgagactttgaacttggacttttgggttaatgcttaaattagt

SEQ ID NO: 479970 - DNA, 201 bp, Homo sapiens
aatggtgcgatctcagctcactgcaacttccacctcctggattcaatcgattctcctgcctcagcctcctgagtagctgggatttggcatgtgccacctcrcccggctaattttctgtatctttagtagagacgtggtttcaccatattggccaggctggtctcaaactcctgacctcctgatcctcccacctcggtttcc

SEQ ID NO: 479971 - DNA, 201 bp, Homo sapiens
tatgtgggaagtaactaacttgcttttgattttacaggtccataggcagaaggatcttgccttgtctcagatgagactttgaacttggacttttgggttartgcttaaattagttaagattttggaggactgttgggaaggcatgattgtgttttaaaatgtgaggacatgagatttgggaggggccagttatggaaggat

SEQ ID NO: 479972 - DNA, 201 bp, Homo sapiens
tagtttcttttgctgtgcagaagctctttagtttaatgagatcccatttgtcaattttggcttttgttgccattgcttttggtgttttagacatgaagtcyttgcccatgcctatgtcctgaatggtattgcctaggttttcttctagggtttttatggttttaggtctaacatgtaagtctttaatccatcttgaattaa

SEQ ID NO: 479973 - DNA, 201 bp, Homo sapiens
ccttgttccccctacatcattatattcaccctgcctctttacctctgtttccttgtctattttctctcttattggattgttagagaataacggaggaggakggagagaaacaaaagagatataacaagtatggtatagggatcatgtctccacatatggccttgcaaaaagctatttcttctatctgtgtagtttttggag

SEQ ID NO: 479974 - DNA, 201 bp, Homo sapiens
cctctttacctctgtttccttgtctattttctctcttattggattgttagagaataacggaggaggatggagagaaacaaaagagatataacaagtatggyatagggatcatgtctccacatatggccttgcaaaaagctatttcttctatctgtgtagtttttggagaacattggacttctcagtggaaaaatgagacct

SEQ ID NO: 479975 - DNA, 201 bp, Homo sapiens
tgctgtccaggagccaaggtcgggaactggggatctgaagagtctgcttggtgctctaccctacttcggccaacctggtatctcagctgcaatacaaaagytcctttactctttcctctccttttctcaagcagaaggagtctctcctcatagctgccacagctgggaatgtgctgggtcacacctgaagccaacacatcc

SEQ ID NO: 479976 - DNA, 201 bp, Homo sapiens
ctaagcatcctgatgcccaaggcaaagcggggaaatgaggcttccatgctaacaagttcaaggctgctggctcttgtccccatgggctagataccctccarctgaggacagttctgataccaactgcgtcctagtcgcacaccagatctgcaaccctattcacaccctttggtcacaagttatagcgactgtgcatggctc

SEQ ID NO: 479977 - DNA, 201 bp, Homo sapiens
aatgtacttaaccttaattaacacacttgattacaccttccccttctcagcattaactccagtaggtctttagccatgccagggtgactaaacccccaacmaaaaaacaaaaaaaaaaaacaaaaaaacaacaaccatgttttccaaatagcaatagcaattgtgccttatgttatgatcatacccaagagcttaggaaga

SEQ ID NO: 479978 - DNA, 201 bp, Homo sapiens
agtctcatccaaggcctatggcttgtactgcctgggtattactcctgattattcatggcccaagggctctttagtcagcaggtgatgaatcctgccaggaytgggttcttcccttcaaggcagaagtcctcttctggcccagatgtgtcaagaaatgtcgtccaggagctaggatctggaatggtggcctcaggactctgc

SEQ ID NO: 479979 - DNA, 201 bp, Homo sapiens
ggtaagttccacaaatgattaaggaactatcctcctcctttccaatatttttctatttcttcttcctaagacatttatctgacaacattagaggattgaakgtttgtaggtttttttctgtggcagctggcattttttagaggggtgggaagagatgggtgccatgaagttgacctttactgagggcctactctgtaccac

SEQ ID NO: 479980 - DNA, 201 bp, Homo sapiens
gatatctaacatttaaaaaattctttttttagaatttcaatttctttgctttacattattcttctattcttacatgttgtctcctttttattttaaagccrttattaatcatagttttaaaaaaattccttgtctgagcaaatgctgagagactttgtcaccaccaggcctgccctaaaagagctcctgaaggaagcacta

SEQ ID NO: 479981 - DNA, 201 bp, Homo sapiens
gccgccgccggagagctgtgctgccgttgccggccaccatgcaggtgaggggtgggctgaggaacgttgctttggggaagcggttgctagagaaggaggcrgcttcgcgaatgggagagtgggcggaagcttgtactaatggagcgcgcgcccagagatcacctggggcgcacgaggacaagtttgccatcagttcttctg

SEQ ID NO: 479982 - DNA, 201 bp, Homo sapiens
cgtggcggccatcgccctgggccgcgacggggccatcacacggcacctgcagcacacgctgcgcacccgcagccgcgcctcgttgctcatgatcgcgctcrcccgggtgccgtcggcgctcatcgccctcgcgccgctgctctttggccggggcgaggtgtgcgacgctcggctccagcgctgccaggtgagccgggaacc

SEQ ID NO: 479983 - DNA, 201 bp, Homo sapiens
gtgtgcgacgctcggctccagcgctgccaggtgagccgggaaccctcctatgccgccttctccacccgcggcgccttccacctgccgcttggcgtggtgcmgtttgtctaccggaagatctacgaggcggccaagtttcgtttcggccgccgccggagagctgtgctgccgttgccggccaccatgcaggtgaggggtggg

SEQ ID NO: 479984 - DNA, 201 bp, Homo sapiens
actagtggcagcgctggcgatgccaccgagcctggcgagtgagctgtcgaccgggcgacgtcggctgctgggccggagcctgtgccacgtgtggatctccytcgacgccggagcctgtgccacgtgtggatctccttccacggctgtgctgccccgccggcctcgggaacgtggcggccatcgccctgggccgcgacgggg

SEQ ID NO: 479985 - DNA, 201 bp, Homo sapiens
ccaatttctcagaaggctgaggtgggaggatcacttgaacccaggaggaggaggtttcagtcagtagagattgaactactatactctagcctggatgacaragtaagaccttgtcaaaaaaaaaaaaaaaaaaaaaaaaaaaaaagaaggataatcaagacaatgagctaacacagaagccatagtggactttcttcaata

SEQ ID NO: 479986 - DNA, 201 bp, Homo sapiens
tagtttaatgagatcccatttgtcaattttggcttttgttgccattgcttttggtgttttagacatgaagtctttgcccatgcctatgtcctgaatggtawtgcctaggttttcttctagggtttttatggttttaggtctaacatgtaagtctttaatccatcttgaattaatttttgtataaggtgtaaggaagggatc

SEQ ID NO: 479987 - DNA, 201 bp, Homo sapiens
tcttgaattaatttttgtataaggtgtaaggaagggatccagtttcaactttctacatatggctagccagttttcccagcaccatttattaaatagggaawcctttccccatttcttgtttttgtcaggtttctcaaagatcagatggttgtagatatgtggcattatttctgagggctccgttctgttccattgatctat

SEQ ID NO: 479988 - DNA, 201 bp, Homo sapiens
agaagcagcagagccaaggttctcaagaaagacagcaaaggtctggcagatgttgtaactatgccttcttcccatgtgcatggcagacattgccaattggycatggcttggctccccactgagcaggaacttggtctcagaatcctttccaggacagcaccctaggcagctactgttgattatttaaaattgatgcaagac

SEQ ID NO: 479989 - DNA, 201 bp, Homo sapiens
cttcctggtttagtcttgggagggtgtatgtgtcgaggaatttatccatttcttctagattttctagtttatttgcatagaggtgtttgtagtattctctkatggtagtttgatggtagtttttatttctgtgggatcagtggtgatgtcccctttatcatttttaattgcgtctatttgattcttctctcttttcttctt

SEQ ID NO: 479990 - DNA, 201 bp, Homo sapiens
cccaaggcagcactttctggagtcaggcagaatgtacaggagccttggagcaagtgaattccctgctctgtgcctcagtttcctcatccgtagaatggaargaatgaaaacacaaggattaggtgtacagtcaggccaagtcagatcttagaaacaagacctaacgacactattatcaggaacatcaggaaaaggggaaga

SEQ ID NO: 479991 - DNA, 201 bp, Homo sapiens
agattctgtccaggagccagggcctagagtcggaaaccttagaaatctacctggtgctttattctactgcagtcaagcttgcacccaagccacaagaccaygttcttcccactcttccctcccctttccacaagaagaggagtctctctccatggctaacaccactttaggcctgtggcgagtactgcctagctaccatta

SEQ ID NO: 479992 - DNA, 201 bp, Homo sapiens
atgtgtcccagagattctggtatgttgtgtctttgttctcgttggtttcaaagaacatctttatttctgccgtcatttcgttatgtacccagtagtcattyaggagcagtttgttcagtttccatgtagttgagtggttttgagtgagtttcttagtcctgagttttagtttgaatgcactgtggtctgagagacagtttg

SEQ ID NO: 479993 - DNA, 201 bp, Homo sapiens
tctgtctaatgttgacaatggggtgttaaagtctcccattattattgtgtgggagtctaagtctctttgtaggtcactcaggacttgctttatgaatctgkgtgctcctgtattgggtgcatatatatttaggatagttagctcttcttgttgaattgatccctttaccattatgtaatggccttctttgtctcttttgat

SEQ ID NO: 479994 - DNA, 201 bp, Homo sapiens
aagcttaactggaaagttctcagtgtcttctcctcagatgtggtaggacttgagtcgctgttaggattaatgtggtccactgacaccaactttgtaaagcrtcttgctatagtcagtgtgtgacccttgtggtcacaacacaaagtggtaagttccacaaatgattaaggaactatcctcctcctttccaatatttttcta

SEQ ID NO: 479995 - DNA, 201 bp, Homo sapiens
tatatatttaggatagttagctcttcttgttgaattgatccctttaccattatgtaatggccttctttgtctcttttgatctttgttggtttaaagtctcrtttatcagagactaggattgcaacccctgcctttttttgttttccatttttttggtagatcttcctccatccttttattttgagcctatatgtgtctctg

SEQ ID NO: 479996 - DNA, 201 bp, Homo sapiens
gactttgctacacagtgtgagcctcagctatggatcggttcccctttcactcaaagtccgacaggagtgatttggatggttctgatggatttgcatcacaraagagaactcctagattagggaatctgaatcccttttgcctagtgttggacagtaaacaagccttccttctgttcttattttttgtattattatattacg

SEQ ID NO: 479997 - DNA, 201 bp, Homo sapiens
gaagagaactcctagattagggaatctgaatcccttttgcctagtgttggacagtaaacaagccttccttctgttcttattttttgtattattatattacrcatttcttacattataaaagaagcctgcatcttttataatgggttgcaagcaagtttaccctctcttccactggcagatagtgtctctatcttccagagc

SEQ ID NO: 479998 - DNA, 201 bp, Homo sapiens
ttgcacccaagccacaagaccatgttcttcccactcttccctcccctttccacaagaagaggagtctctctccatggctaacaccactttaggcctgtggygagtactgcctagctaccattaatattcactaaggcccaagggctcttcagcttgtggtcaatgctgccacgcctgtgactctcccttcagggcagtggg

SEQ ID NO: 479999 - DNA, 201 bp, Homo sapiens
ggacaaaagatgagagtaaaagcatgtgatgcatctggctagtgcaatatgaatgttttaacatttctaatattctttgctcttataatgttttcaataawatggagagatattgtaaaaatatttcaaaggctagtcttccttttcttctaacaaattctcttcatcaggtcaattttctcaaaatcttctcaattccag

SEQ ID NO: 480000 - DNA, 201 bp, Homo sapiens
gcaagcaagtttaccctctcttccactggcagatagtgtctctatcttccagagctgtttgctgtacaaacgtccttgaaaaactggtttataacaaaggytgccagaatctttgctagcaaaatgtgcaggaatgcaagaaactcgcaagagaattatctctcctaaacatttctttattcaatagatgtttattgagta

SEQ ID NO: 480001 - DNA, 201 bp, Homo sapiens
cttgtggtcaatgctgccacgcctgtgactctcccttcagggcagtgggctctcctctgacccaggacaggtctagaaatgctgtccaggagccaaggtcrggaactggggatctgaagagtctgcttggtgctctaccctacttcggccaacctggtatctcagctgcaatacaaaagctcctttactctttcctctcct

SEQ ID NO: 480002 - DNA, 201 bp, Homo sapiens
agtgagctgagatcgcgccactgcactccagcctgggtgacagagcgagactccatctcaaaaaaaaaaaaaaatgtatgtggatagggacaaaagatgasagtaaaagcatgtgatgcatctggctagtgcaatatgaatgttttaacatttctaatattctttgctcttataatgttttcaataaaatggagagatatt

SEQ ID NO: 480003 - DNA, 201 bp, Homo sapiens
cttgtttatagagttccctctctccagcctctgtattcagagcacttctccttgcacaacaggactagaaagtgccaggtagtactggttgtgtggattcmacaattcatattctcaccttcctgatgagcagattctaaatccagggtcagaggcctcttgaccatgagtgatcatcagacacgtgtgcagagggggcat

SEQ ID NO: 480004 - DNA, 201 bp, Homo sapiens
cacagtaactgaagcatgcccatagaatgaccctatatggcagatgcacatgaatgtgtttcgagctagagaatccagcagtggccaacctgcagattcaytccttgtctctgaggaacaacaactgagcccccgtcccatcccatcctgtgggacctgggccatacaggggattcaggccctgagttttgggttacacga

SEQ ID NO: 480005 - DNA, 201 bp, Homo sapiens
aaatggctggaaaagtgcctattactgagcttagtgggagaaaaataacaaaatcactttccacttcctttcatgctctgatgatgttttttctctcccaraaagggattgctaagtattcacggggtgatttcaggatgccacgttttgtcattcagactttctctggtgacttgatgagagtctacaaagatgtggacg

SEQ ID NO: 480006 - DNA, 201 bp, Homo sapiens
tttcttcatacagatcttctacatattttgttagatttatgcctatttcatttttcagatactagtgtaaatggcatcatttttacttgtgcattgttaaygtacaagaaaatgttcaattttttttgtattaactcttatcctgcaaccctgctataatcacttattataatagttcaaagggtttttttttttttttgg

SEQ ID NO: 480007 - DNA, 201 bp, Homo sapiens
ctcgtgcacagtaagagcttcatttggtggcaaatgtgagcgtttgacaggtggaattaggtggctgcagccatgaaggttcgaaggcagaatgtgaggtrggggagccaagcacatcactacatgcaggtaagtctttgggtcctgtgggctgcaagtgatgacactgctatgtctaaatttatttagtctcagccagct

SEQ ID NO: 480008 - DNA, 201 bp, Homo sapiens
caagtatattaatgctgttttcaaggttactgtactgagtatggggtggcaacaacaacagtgtgcgtttggataacctaattcatcataaattaaaagcytgttagatgtcataaactgcagaggacacagaagaatacgcccagatccttcttgggatggatacagattagagaaggtaggcataaacagttgcaatat

SEQ ID NO: 480009 - DNA, 201 bp, Homo sapiens
tctagctgtaacctttttgaggggcaagattgagtctgttctattagtggtcctagtcccagcctcaagcccgctccatgtgtacggaataggtgaatgcmtatgccaggcagtagtgctgggcccaatcaggcattcccaattcattggcaggacatccttagctggggagaggactttcatcacccagcatcatagctg

SEQ ID NO: 480010 - DNA, 201 bp, Homo sapiens
tcggacgaactagtggcagcgctggcgatgccaccgagcctggcgagtgagctgtcgaccgggcgacgtcggctgctgggccggagcctgtgccacgtgtrgatctccttcgacgccggagcctgtgccacgtgtggatctccttccacggctgtgctgccccgccggcctcgggaacgtggcggccatcgccctgggccg

SEQ ID NO: 480011 - DNA, 201 bp, Homo sapiens
ctatctctctctcttttctttgctattgcttgtttgatttctgtgtgcaatttgatgctgggacctagttatccatcaggcgtagtagtcatactacttaraaccagaattcttttagggacccatagaaatattttaattttaatttcttttaaaattagaggaaaaatgaatataacactaatgaatatattataatga

SEQ ID NO: 480012 - DNA, 201 bp, Homo sapiens
tactcggttcgaccccgagcggcgccgtcctgccgggccgagggccgcccttctctgtcttcacggtcctggtggtgacgctgctagtgctgctgatcgcygccactttcctgtggaacctgctggttccggtcaccatcccgcgggtccgtgccttccaccgcgtgccgcataacttggtggcctcgacggccgtctcgg

SEQ ID NO: 480013 - DNA, 201 bp, Homo sapiens
gaattctggagagcagacttgggctttggaaagcggtccagtcctgcagcaccttcctaaggtagctgtcaagtatattaatgctgttttcaaggttactrtactgagtatggggtggcaacaacaacagtgtgcgtttggataacctaattcatcataaattaaaagcctgttagatgtcataaactgcagaggacacag

SEQ ID NO: 480014 - DNA, 201 bp, Homo sapiens
tgtgtttcgagctagagaatccagcagtggccaacctgcagattcattccttgtctctgaggaacaacaactgagcccccgtcccatcccatcctgtgggwcctgggccatacaggggattcaggccctgagttttgggttacacgaaggtttccaggtggaggttgttaagaggagggtgttcagtgaaaatgcaatata

SEQ ID NO: 480015 - DNA, 201 bp, Homo sapiens; identical to SEQ ID NO: 239826

SEQ ID NO: 480016 - DNA, 201 bp, Homo sapiens
gccggctacgcttgtcagagcagcagctggtgattttggacttgcctttgctggcaggggagcgctatcgagggttcattttatccagcttgaggaaagaraggtcggagtgtaggggaagagtgggacaaacacgcgacccagtcatgccgagagcatgcgctgagggggacgtggagcgaggagtggggctccaggctg

SEQ ID NO: 480017 - DNA, 201 bp, Homo sapiens
ctcaggagttgtactgcttcctgtttgtttctgttggtttcctaatagacattacccattgaactgaaagaaccagcctagtcatctcctagcaaaaaaawaataataataataataataataataatcacccacaattggctcattttctttggggctgtttctggaaagattccattgccttacagcatcactctgcac

SEQ ID NO: 480018 - DNA, 201 bp, Homo sapiens
gaagacttctatttggccatctttgctctgcctctgaatgaacaatgtaatgttttgggatatacatacatacatacatacacacacacatacacaagcayatattatggatatcaagaaaattaacatatttatcgcttcacatgtttttttttttgtagtgacaaaatttaaaatatattgttttagcaatttttaaat

SEQ ID NO: 480019 - DNA, 201 bp, Homo sapiens
gtaatgttttgggatatacatacatacatacatacacacacacatacacaagcacatattatggatatcaagaaaattaacatatttatcgcttcacatgtttttttttttgtagtgacaaaatttaaaatatattgttttagcaatttttaaatattcatcacattattattaactatagtcactttgctgtgcaataga

SEQ ID NO: 480020 - DNA, 201 bp, Homo sapiens
tgttctccagcttcaactgtgttgcaaaaaataacagaatctcctccctttttaagctaaatagtattgtgtgtgtgtatatatgtatatatatatatatmcacacacacacacaccatatttttcttattcatctattgatggacacttaggctgatttaatagcttggctattgtgaataactctgcaatgaacatggg

SEQ ID NO: 480021 - DNA, 201 bp, Homo sapiens
aacccaatgtcaaggagcttttcccctatgttttcttctagtagtcttatagtttcaggtctttcatttaagtcattaatatattttgagttgatttttgygtaagaggtaagataagggcccaattttgttcttttttatgtggatatctagtttttattaaaaaatacctagttttagtttcattttatatctactatt

SEQ ID NO: 480022 - DNA, 201 bp, Homo sapiens
tgcaatattcatgtttacaggctgtctctctagctgtaacctttttgaggggcaagattgagtctgttctattagtggtcctagtcccagcctcaagcccrctccatgtgtacggaataggtgaatgcatatgccaggcagtagtgctgggcccaatcaggcattcccaattcattggcaggacatccttagctggggaga

SEQ ID NO: 480023 - DNA, 201 bp, Homo sapiens
agtttccctcatgttctcatgatagtgagtgagttctcataagatctgatggctttataagtgtctggcattttccctgctggcacttctctctcctgctkccaagtgaagaagaaggtgtttacttcaccttctgccatgattgtaagtttcctgaggcctccctggccatgcagaactgtgagtcaactaaacctcctt

SEQ ID NO: 480024 - DNA, 201 bp, Homo sapiens
aacctctagcaaccactgactctttattgtctcagttgttttgccttttccagaatgtcatacaattggaataatacagtatatacccttttcagatttgyttttctttttactgagtaatatgtagctttctcattgcctttccatggcttgatagctcttttctgtttgtcactgaataatatttcactgtctggatgt

SEQ ID NO: 480025 - DNA, 201 bp, Homo sapiens
taagtgtctggcattttccctgctggcacttctctctcctgctgccaagtgaagaagaaggtgtttacttcaccttctgccatgattgtaagtttcctgaggcctccctggccatgcagaactgtgagtcaactaaacctccttgctttataaattaccgagtcttgggtatttcttcatagtggtgtaaaaatgaactaa

SEQ ID NO: 480026 - DNA, 201 bp, Homo sapiens
gtggttctttgatttatttcattagagtcttacagttttcttcatacagatcttctacatattttgttagatttatgcctatttcatttttcagatactartgtaaatggcatcatttttacttgtgcattgttaatgtacaagaaaatgttcaattttttttgtattaactcttatcctgcaaccctgctataatcactt

SEQ ID NO: 480027 - DNA, 201 bp, Homo sapiens
ggaaaattctaactggatgatcacttttctgtggagggaaaaacacattttttgttttaaggggctagccagcatcaaacctttttttgagatggagtctygctctgtcacccaggctagagtgcaatggcactatctccgctcactgcaacctccgcctcctgggttcaagcgattctcctgcctcagcctccttaatag

SEQ ID NO: 480028 - DNA, 201 bp, Homo sapiens
gcaaagcataaaaatttggaaaatttgcagcccgatgatgtgatagaaatgaaaaaccattttcaggggagaaattcaagcctgttgcagaaatttgcatragtaaagaggagctgactcttaatcaccaacacaatggggataatgtctccagggcatgtcagagacctttatggcagcccctctcatcacaggcctgga

SEQ ID NO: 480029 - DNA, 201 bp, Homo sapiens
ttgctgcaggggcggcgcccttatggagaacctcagtagggcagtgcaaaaaggaaatgtggggctggaacccctacacagagtccccactggggcacagyctaatggagctctgagaagagtgctgctgtccttcagaccccagaatggtagattcaccaatagcttgcactgtgaaccaggaaaagctgcagacactca

SEQ ID NO: 480030 - DNA, 201 bp, Homo sapiens
atcatgtgacgcgtgagaaaaaggcagttttgtttcttccttcccaatctgtacaatttttatttccttttcttgtcttattgcattagttaggacttttsaatatgatcttgaaaagcagtggtgaggaggaatatccctgccttgttcctgacctcagtgagaagctcattaagtgtgatggcagctgtaggttttttg

SEQ ID NO: 480031 - DNA, 201 bp, Homo sapiens
aaggatacaataaccgctaaggtctggtttctctctccctctttttgtcaaaatgtccaggttgcttgccaccattcttgtcctccctgcctggagcctcytgcccctcggcacagggaaaattggacattttgagcaaggccaggactttgaaacatctagggcaaggatgcgtcgaaaaaagaacaagtggcaaactca

SEQ ID NO: 480032 - DNA, 201 bp, Homo sapiens
tacctcttgcatcagtgtgacccagatatgagacatggagtcaaaggagatcattttggaactttaaagtttaatgacttccctattggattttggacttkcatggggcctatagcccctttgttttggccaatttctcccatttggaatgggtgtatttacccaatgcctgtatttccattgtatgtgggaagtaactaa

SEQ ID NO: 480033 - DNA, 201 bp, Homo sapiens
tcctacttaagagtttcttttaaaaaatcatgagtaggtgttggattttgtaaaaatgctgtttttgtatctattattattatatattttttcttttttascctattgatgtgttagattatattaattgatttttgaatgttgaacaagaattgcatacctgggataaattccacttgattgtggtgtataattcttttt

SEQ ID NO: 480034 - DNA, 201 bp, Homo sapiens
gcccctcggcacagggaaaattggacattttgagcaaggccaggactttgaaacatctagggcaaggatgcgtcgaaaaaagaacaagtggcaaactcacyacctcgggacaggtcatggggaagctgctctggaggtttgggaggcaggcaaaagcaggatgcttggcatcgctgagagcctctagaggagtgtccacag

SEQ ID NO: 480035 - DNA, 201 bp, Homo sapiens
agatttgggaggggccagttatggaaggatatagtttggctgtgtccccacccaaatctcatcttgaattgtaatccccacatgttgtgggagagagtcartgggaggtaattgaatcatgggggcagtttccactatgctgttctcaggataatgagttctcatgagatctgatggttttataagtgtctgacatttccc

SEQ ID NO: 480036 - DNA, 201 bp, Homo sapiens
gttgtaggttgtgtagtactatagatgtcaattatatcatgtgattgatggtgttgttgagttcaactatgtcttgttgagttcatctatgtctttactgmttttctacctgctctatttgtccatttatcatagagaagtgttgaagtctccaactataataatgaagtcatctgttccttcttgcagttctatcagttt

SEQ ID NO: 480037 - DNA, 201 bp, Homo sapiens; identical to SEQ ID NO: 239844

SEQ ID NO: 480038 - DNA, 201 bp, Homo sapiens
tggcctccatccctggtaacagacggttaccagggcggctttgggtgaggacattgaaaaaggtcagactccctgggagcagcgccctggactccattctsatcacaggtatatttgtgtggctactaagagtaagagcctgggggtgcaggagtgattccagccccctcctacaaagtcatgtgagagggatctgaagaa

SEQ ID NO: 480039 - DNA, 201 bp, Homo sapiens
tatttttatacatcttttttctatttgtgttttggtttcaaaagtttctaatgttatatcctcaagctcagaggttccttcctcatctgtgcccagtctartaaggaacctatgaaaggcaaacttcatttcttttggtgttttgatatctaacatttaaaaaattctttttttagaatttcaatttctttgctttacatt

SEQ ID NO: 480040 - DNA, 201 bp, Homo sapiens
cacacttaacaacatctggagacatttttaattgtcctgaccgagaggacaatgctactggcatctagtggacagaggccagggatactgctgaacatccygcagtgcacaggacgcctgcaacacagattatccagccccaaacgtcaatagtgccggagttatggaaccctaatgaagacaattcttgaaggcatagac

SEQ ID NO: 480041 - DNA, 201 bp, Homo sapiens
gtgatggctcattcctgtaatcccagcactttgtgaggccgaggcaggtggattgcttgagctcaggagttcaagaccaacctgggcaacatggcaaaacyccatctctaccaaaaatacaaaaaattagccgggcgtggtggctcacacctgtagtcccaatttctcagaaggctgaggtgggaggatcacttgaaccca

SEQ ID NO: 480042 - DNA, 201 bp, Homo sapiens
attccagcctgatgacagagcgagactccgactcaaaaaagaaaaaagaaatcactgttttcattactccatgccatctccagggacttgacttctgaggyctgcccctctgctcatgggtgtctctgcttgagaggaatgaggcagtcacagcccagtcaaggtgggtcccacgaagcaggatctcaaaactactcaggt

SEQ ID NO: 480043 - DNA, 201 bp, Homo sapiens
actgtctttgccataaggccctcattttacagatgagaaaactgcaagagaaaactatggtaaggcaccacaaacctagttcatccaaaaccacgcagttmctgggtagagagtctgaaggttgtaccagatctaagaatcactatttttggccaggtgcggtggctcatgcctgtaatcccagcactttgagaggcggag

SEQ ID NO: 480044 - DNA, 201 bp, Homo sapiens
agtctcgctctgtcgcccaggctggagtgcagtggtgcgattttggctcactgcaagctctgcctcctgggttcacgccaatctcctgcctcagcctccckagtagctgggactacaggcgcccgccaccatgcccagctaattttttgtgtttttagtagagacggggtttcaccgtgttagccaggatggtcttgatct

SEQ ID NO: 480045 - DNA, 201 bp, Homo sapiens
cccaagccaccctgaaggggtgtgtgcacaaggagctctcaggagaagcccccaaggtggcctgttggaaggctctgatgggaacatttccttccaccttsaagaaagaagcaatgggaccctgaagaatgcagcccagagagatccaaagggtcagaagctctggggcaaatctggtaaacttcctgggggtgccacaga

SEQ ID NO: 480046 - DNA, 201 bp, Homo sapiens
aacaaaaattagtcaggccctggtggcctgtgcctgtagtcctggctactcaagtggctgaggcacaagaatcacttgaacccgggaggaggaggttccartgagccaagattgtgcccctgtactccagcctgggtaacagagtgagaccctgtctcaaaaaaaaaaaaaaaaaaaaaggccaagcatagtgactcacac

SEQ ID NO: 480047 - DNA, 201 bp, Homo sapiens
aaggagctctcaggagaagcccccaaggtggcctgttggaaggctctgatgggaacatttccttccaccttcaagaaagaagcaatgggaccctgaagaawgcagcccagagagatccaaagggtcagaagctctggggcaaatctggtaaacttcctgggggtgccacagactcatctccaccttgccctgtggtctggc

SEQ ID NO: 480048 - DNA, 201 bp, Homo sapiens
tggatggatcatctgagctcaggagttcaaaaacaacctgggcaacatggtgaaaccccatctctactaaaaatgcaaaaagttagccgggcgtggtggcrcgtgcctgtaatcctaactactcgggaggctgaagcaggagagttgcttgaacccaggagccggaagttgcagtaagcagagatcgcaccactgcactca

SEQ ID NO: 480049 - DNA, 201 bp, Homo sapiens
tttagtatatgtgctgccaaagcgatgactgaagtccccaggctttgaggagggagcaacaggcatcctgctttctgggattcgaagttggagagaacccytagacttacatgaccctctctttccacttcacacccactagagtgaatgaaatgttaaaaataaacactgctgttcccttccaccctaaagaagagaggc

SEQ ID NO: 480050 - DNA, 201 bp, Homo sapiens
aacctggctttggtggcctggtgcccagcatggtgttgtgcccgtgtgtggatgcttaaatacatctttgaaatttgaataaatagtaaacattgttatayatgagtcatgtttttctctttaaaagccacatcatatccatttgctcattggactacttcaaaagagaagctctaaggacatccaaagatcctaagtgaa

SEQ ID NO: 480051 - DNA, 201 bp, Homo sapiens
gggtcaagccaggacacagggccaaaggtcggtcagcactgacacgctgagcccaggcgtttgctttccagatgagacctgcaccgctggaccagcaatgyagcagaggcagcaggaagagggagatggagccaaagggtttctggacaggcggttgctggcagatctataaatcgatgccccacaatgggctgtcactga

SEQ ID NO: 480052 - DNA, 201 bp, Homo sapiens
ggtcagaagctctggggcaaatctggtaaacttcctgggggtgccacagactcatctccaccttgccctgtggtctggccccgccttctggtggagcctgsccccgccttctggtggagcctgccccgtccccaccctgacacttgacctgtggctgacagtgggccacctctgctccactcaggctccgtggccggagag

SEQ ID NO: 480053 - DNA, 201 bp, Homo sapiens
caggagaatagcttgagcctgggaagcagaggttgcattgagctgagatcacgccaccgcactccagcctgggcaacagagcaagactctgtctcaaaaamaaaaacaaaaaacaaaaaacaaaacaaaaccagaaaagtctaccatctgtttgtgagggaactagttaaatgttcgtggaaacaggttacttcctggagg

SEQ ID NO: 480054 - DNA, 201 bp, Homo sapiens
gttctgagatgtttacaatgcggcaaatgacttcaggttttcttctgtgcacaaaatgtgcagcccatcctgagacacgctccacgcttcccctacctgckcagttcaaggtcctaaagctgaactttctcactgtgccagagagaagccagccctttgcactggcgaacaatgattaacccgcctctccctccacctgtt

SEQ ID NO: 480055 - DNA, 201 bp, Homo sapiens
ggcaacaagaggaaaacgctgtctcaaaaaaaaaaaaaaaaaaagcataggctagaaattggaccacaaaataatatagaatttgacatgtgggtgaagaygggtgttttgggggctgcaaatcagtcatgttctcctcaatctgcgtaagcagaggcaatgcggtatagtggtttacagtgtggcttctggaactaggtt

SEQ ID NO: 480056 - DNA, 201 bp, Homo sapiens
gtttctttccctccttctttagtcggtctcaattattccaaagaatccttgagttgaagcaaggagggacagcggtttgggcttagctcaagtcacacttsccttctctcctcaaatagcccttctttgcctctgggatacagaccaggaccaaggggaaagaaagccttttaaaaatagtcctggccacacttttgcagg

SEQ ID NO: 480057 - DNA, 201 bp, Homo sapiens
cttcccataaaggttctggtgactcatttgattttggaagaaggcaggccctgggatggcaggaggaaggtatctagtggggagttctgagatgtttacartgcggcaaatgacttcaggttttcttctgtgcacaaaatgtgcagcccatcctgagacacgctccacgcttcccctacctgctcagttcaaggtcctaaa

SEQ ID NO: 480058 - DNA, 201 bp, Homo sapiens
ataataagtactttttttgttcgtttgagacagggtctcgctctgttgcccagcaggagtgcagtggcacgatcacgactcactgtacctcccgggttcargtgatcctcccacttcagcctcccgagtagctgcaattacaggtgccagccacctcactgggctatttttttttttttttttgaaatagggtctctttct

SEQ ID NO: 480059 - DNA, 201 bp, Homo sapiens
atttaatattttattaagtagcatctatgaggtattgaagtgactgtgtaaggaaaccacggtagctcacatctataatccccatactttgggaggccgakgcaggaggattccttgagcccaggagttcaagaccagcatggacactccagtaagaccctgtttctaccaaagaaattttgttaagttagccgggtgtgg

SEQ ID NO: 480060 - DNA, 201 bp, Homo sapiens
gcctcagcctccggagtagctgggactacaggcgcccaccaccacacctggctaattttttgtatttttagtagagacggggtttcaccatgttagccagratggtctcaatctcctgacctcatgatccgcccgccttggcctcccaaagtgctgggattacaggcgtgagccaccgtgtctggcccatgtaatttttca

SEQ ID NO: 480061 - DNA, 201 bp, Homo sapiens
taatttaaattttgtatggaatgcttcacgaatttcacgacttgtgcagggcccacactaatcttccctgtaccactgcaattttagtatatgtgctgccraagcgatgactgaagtccccaggctttgaggagggagcaacaggcatcctgctttctgggattcgaagttggagagaacccctagacttacatgaccctc

SEQ ID NO: 480062 - DNA, 201 bp, Homo sapiens
agaactctgccatggaggttcacaaactgaactctagttccttgaccacgtgtgtcctcccctcactccccacactgaacctggctttggtggcctggtgmccagcatggtgttgtgcccgtgtgtggatgcttaaatacatctttgaaatttgaataaatagtaaacattgttatacatgagtcatgtttttctctttaa

SEQ ID NO: 480063 - DNA, 201 bp, Homo sapiens
aaggtggggctgggagtgaacccagatctttgcagaattacacctcacggccttccctgggccgtggctctttttccactgcctggtaggcctgtttgaaraattaaacaaggtatcagactcatctgaatattgtaagaaaaaaaaaaagaatgaaacaaggtaatgcttgagaaacccttggcacctgatccatattaa

SEQ ID NO: 480064 - DNA, 201 bp, Homo sapiens
ttgaaccttggaagatcctcaaagagtgagcactcttgtgctcttctaatcataattaattccttaacaaatcagagtaaggaccactgacatatagaacmctcaagccaaagaaccatcacagaatttagtaactttagttctgtgaacatgaaaagatttcttttttggtttccaaaggagattatttatttttccaca

SEQ ID NO: 480065 - DNA, 201 bp, Homo sapiens
cgaatcagtcaatgggatttgtatgtgcttttccttcctacattttcattcctactgccccaacctagtagccctaagttgtggcttggtgggtttggcaytgagcctcaagacactcactacattctttctggatgtttgctcacaggctccctgaggagcagaacctgtggagctggggagtgcgggtggtttctattc

SEQ ID NO: 480066 - DNA, 201 bp, Homo sapiens
tctgtttcatggtggatttctaagcaacatatatacatgtttttaagacaaccttttgttggcagtgtttttcctgaacaccatatgcaccctaggaaacrtgtttttcctttaatcttgttcacatatcagaaaaggacatgaaatgctcatactggcatacaagtttctataagtagttattttttgagctacttatac

SEQ ID NO: 480067 - DNA, 201 bp, Homo sapiens
catctctactaaaaatacaaaaattagctggcatggtggtgggcacctgtaatcttagctacttaggaggcagaggcaggagaatcacttgaaccgaggasgcggaggttgcagtgagccgagattgtgccattgtactccagcctaggggactacactaaaactccatctcaaaaagaaaaaataaacaaaattctgtag

SEQ ID NO: 480068 - DNA, 201 bp, Homo sapiens
ggtagatcacctgaggtcaggagtttgagaccagcctggccaacatggtgaaaccccatctctactaaaaatacaaaaattagctggcatggtggtgggcrcctgtaatcttagctacttaggaggcagaggcaggagaatcacttgaaccgaggaggcggaggttgcagtgagccgagattgtgccattgtactccagcc

SEQ ID NO: 480069 - DNA, 201 bp, Homo sapiens
ccgaagaggttgggacacagctaccttgtctaaaattctgtaggcttggccgggcgtggtggcttatgcctgtaatgccagcatattggaaggctgaggcrggtagatcacctgaggtcaggagtttgagaccagcctggccaacatggtgaaaccccatctctactaaaaatacaaaaattagctggcatggtggtgggc

SEQ ID NO: 480070 - DNA, 201 bp, Homo sapiens
ctggatcatttcaggtcaggagttcgagaccagcctggccaacatggtgaaaccccgtctctactaaaaatacaaaaaattagccaggcgtgtggtgcacrcctgtaatcccagctactccggaggctgaggcaggagaattgcttgaatccgggaggcggaggttgcagtgagccgagatcgcgccactgcactctagcc

SEQ ID NO: 480071 - DNA, 201 bp, Homo sapiens
ggttagcaagatcacctgtcacttccactgtgaccagggcgccatccttcctcactataacttgtgcccataaacctctctctctctctctctctttctcwcacacacacacacacacaacacgaattttgtttgttgaaaaatctcaaagcctatgacatgaacccctatggctgcttgggctgtgagagtccgtctgct

SEQ ID NO: 480072 - DNA, 201 bp, Homo sapiens
tggagtgcagtgatgcgatctcgactcactgcaagctctgcctcccgggttcacaacactctcctgcctcagcctcccaagtagctgggactacaggcgcycgccaccacacctggctaatttttttgtatttttagtagagacggggtttcaccgtgttagccaggatggtctcgatctcctgaccttgtgatccgcccg

SEQ ID NO: 480073 - DNA, 201 bp, Homo sapiens
gctactcgggaggctgaggcaggagaatcgcttgaaccctggaggcagaggttgcagtgagcccaattcagaactgtaaagagttgcagtgaggcaagatygcgccactgcactccagcctgggtgacagagtgatactccatgttaaataaataaaatgttaggtagttaactctgctaacctcaaaaggaaaaatgctt

SEQ ID NO: 480074 - DNA, 201 bp, Homo sapiens
ctgtggtatgaagagctataaaatgtgaaaattgaagcaatggattttgattagggaaatattacttggtatatttttagtttagcctttaaaaaatgtaytgacttttgtactgaaaaaatatattgacttttgtacaaatcttttttaattaaatgggacgtgaacacttagagccaagattcttttttttttttgaga

SEQ ID NO: 480075 - DNA, 201 bp, Homo sapiens
atatgaggctgggccgggcacagtggttcctgcctgtaatcccagtgaggtgggaggacggcttcagcccaggagttcgagaccaggttggtaagatgcartctaaaaaaaataagccaggcgctggtggcgcacacctgtaatcccagcacttcgggaggccaaagcaggtggatcacttgaggtcaggagttcaagacc

SEQ ID NO: 480076 - DNA, 201 bp, Homo sapiens
caaaacggtagtgtccagctggaaccgtaaggtgagggcttttcagattaactagagctcttgatgtcagcttcataacagagattttgctcattctaacrtgcatttctgttctaatttattagagaactggccactgtctcctttagtttgttctcataaacatacacaaactaattacaccctcttcttctctttctg

SEQ ID NO: 480077 - DNA, 201 bp, Homo sapiens
ccgggttcacgccattctcctgcctcagcctctcgagtagctgggaccacaggcgcccgccatgatgcccggctaattttttgtattttttagtagagacrgggtttcaccatgttagccaggatggtctcgatctcctgaccttgtgatccgcccgcctcggcctcccacagtgctggggttacaggcgtgagccaccgc

SEQ ID NO: 480078 - DNA, 201 bp, Homo sapiens
tcaactcatggtggcctccatggtgggttagcaagatcacctgtcacttccactgtgaccagggcgccatccttcctcactataacttgtgcccataaacytctctctctctctctctctttctcacacacacacacacacacaacacgaattttgtttgttgaaaaatctcaaagcctatgacatgaacccctatggctg

SEQ ID NO: 480079 - DNA, 201 bp, Homo sapiens
tgagtgttggtcccgaagttccagccacagctcctctccccaccactgactgttcttcttaccacttaggcagctgggtcccagctattgctgaggccggyggagttccctgttcccatgtgcctccctgttcctcccccacatctgttcctgatctacagctagaaaatgctgcaaagaagagagagcgagcaacaagcg

SEQ ID NO: 480080 - DNA, 201 bp, Homo sapiens
gcccggctaaggtttttttttttttttcttctttgagatggagtctcggtctgtcgcccaggctggagtgcagtggcacgatctctgctcactgcaagctscgcctcccgggttcacgccattctcctgcctcagcctctcgagtagctgggaccacaggcgcccgccatgatgcccggctaattttttgtattttttagt

SEQ ID NO: 480081 - DNA, 201 bp, Homo sapiens
ggattacaggtgcctgccatcatgcccggctaaggtttttttttttttttcttctttgagatggagtctcggtctgtcgcccaggctggagtgcagtggcrcgatctctgctcactgcaagctgcgcctcccgggttcacgccattctcctgcctcagcctctcgagtagctgggaccacaggcgcccgccatgatgcccg

SEQ ID NO: 480082 - DNA, 201 bp, Homo sapiens
tcccttcgtttttttccttagtctgaagttgcagccggagtgaagaagagcggaccgctgcccagtgctgaggtagagtgtcggatctgttttctcccccrggagggaaaacgtcaagtcacagccagtgcaagtacacctctgacagaggcctgtgctgacagctggcagaaagctactgccggcttgcacgttttacat

SEQ ID NO: 480083 - DNA, 201 bp, Homo sapiens
tgggttagcaagatcacctgtcacttccactgtgaccagggcgccatccttcctcactataacttgtgcccataaacctctctctctctctctctctttcwcacacacacacacacacacaacacgaattttgtttgttgaaaaatctcaaagcctatgacatgaacccctatggctgcttgggctgtgagagtccgtctg

SEQ ID NO: 480084 - DNA, 201 bp, Homo sapiens
ggacttgaggtgcttgggcaactttcctcaattcccttcgtttttttccttagtctgaagttgcagccggagtgaagaagagcggaccgctgcccagtgcygaggtagagtgtcggatctgttttctcccccaggagggaaaacgtcaagtcacagccagtgcaagtacacctctgacagaggcctgtgctgacagctggc

SEQ ID NO: 480085 - DNA, 201 bp, Homo sapiens
gttcaagtgatcctcccacctcagcctcccaagtagctaggactacaagcacgcaccaccatgcccagctacatttgtttctttttttttgtagagatagkggtcttgctatgttgcccaggctggtctcagactgcctaaagcagtcctcccacctaggccgcccaaagcactggaattataggcatgagccactgcacc

SEQ ID NO: 480086 - DNA, 201 bp, Homo sapiens
aagctctcgcgagacgagccgtgcaggctgaaaaaatggcgccacccagtacccgggagcccagggtcctgtcggcgaccagcgcaaccaaatccgacggrgagatggtgctgccaggcttcccggacgccgacagctttgtgaaggtgagttcgcggggcctcgggggtaccaggagtcgcccgcggccgccggaagccg

SEQ ID NO: 480087 - DNA, 201 bp, Homo sapiens
ccgaggagatgctcagctacgcccgggatgacacccattacctgctatatatctatgacaaaatgaggctggagatgtgggagcgcggcaacgggcagccsgtgcagctgcaggtggtgtggcaacggagcagggacatctgcctcaaggtacacctcagccgcagtcacacagaccgcgacacttgggctctgtgtctgg

SEQ ID NO: 480088 - DNA, 201 bp, Homo sapiens
ataattaagccgaccctgaggtcaggggacttgcccgagggcaggaaaaacaggtctgccttctcaagatgctgctcagctcagccaactctggtgggccrccgagttctctggggcccctgagcaaaccattcttcctctgttctgcatgattaagatttgcaccattttgtaaaccatctgagaacatccaaccagccc

SEQ ID NO: 480089 - DNA, 201 bp, Homo sapiens
tgggtccgtggtggcagtcaccaaggcatctgggggcctaccacagtttggcgatgagtatgatttttaccgaagttttcctggcttccaagcattttgcraaacacagggagacaggttgcttcagtggtaagtactgtactttgttttcttgtgttagtgaaaagaaatgaaaacaaagaagtagataaatttttcctg

SEQ ID NO: 480090 - DNA, 201 bp, Homo sapiens
ttaaggctcttaaaggtgacagctttaattttaaaacactctatcttacttatctggcttgtttttaccagcattatgagtaagaatgagagcacacctcscctagaccctcttgagatgttccccagagccagaacgtgaactgttgttcgcagcctccttcctccctttaggaagcgtctgctctgatgacatgggcga

SEQ ID NO: 480091 - DNA, 201 bp, Homo sapiens
acctggcgcatgcgtggtgcgcacgcgtcccgtctcctcggccgacaagctctcgcgagacgagccgtgcaggctgaaaaaatggcgccacccagtaccckggagcccagggtcctgtcggcgaccagcgcaaccaaatccgacggagagatggtgctgccaggcttcccggacgccgacagctttgtgaaggtgagttcg

SEQ ID NO: 480092 - DNA, 201 bp, Homo sapiens
gtcccaaaaacatggttttttttgtttgtttgtgacaaggtctcactctgttgcccaggctggaatgcagtggttcgatctcggctcactgtaacctccayctcccgggctcaagcctcagcctcccgagtagctgggattacaggcatgtgccaccacgcccgactaatttttgtatttttagtatagacagagtttcac

SEQ ID NO: 480093 - DNA, 201 bp, Homo sapiens
cccgaagaggttgggacacagctaccttgtctaaaattctgtaggcttggccgggcgtggtggcttatgcctgtaatgccagcatattggaaggctgaggygggtagatcacctgaggtcaggagtttgagaccagcctggccaacatggtgaaaccccatctctactaaaaatacaaaaattagctggcatggtggtggg

SEQ ID NO: 480094 - DNA, 201 bp, Homo sapiens
atatgcagagatgcctacagctgtacatgcttttacctgggaaggaagcctctgaagccagtgtgtcggctgccctggtgtcctggcaaagacgctgacamggcaccagcaaccccccatctgagcgcttctgccccgtggctctagattccgttcccggcagcgtttcacacagccatttccttcctccagtttctgccc

SEQ ID NO: 480095 - DNA, 201 bp, Homo sapiens
tccctttaggaagcgtctgctctgatgacatgggcgactggcttcctctgtgtggcagcagagctcttttgttaggcaaaaccgagaggtcccccagcccygttcctgtccctgagttagcttgctatttttggaaatggggaatcaggtggggcttctgccttctctcctcttttccccccacgggttatgtcacactga

SEQ ID NO: 480096 - DNA, 201 bp, Homo sapiens
tctctcctcttttccccccacgggttatgtcacactgaacaactgcacgtcctgtgtgttatgcccagtgtcacctccatgtgttgtaacgccataggtcmgtggggtgtcataaagaaacacagcagacttgcggaagcccagccttgagtctgcttctgtcatttactgaccatgccccttggacaagttatttagtct

SEQ ID NO: 480097 - DNA, 201 bp, Homo sapiens
cagccgcagtcacacagaccgcgacacttgggctctgtgtctggccaggttctagttcttaggtttgctccttacattcatgaaaagagccaaacattttscagagcccagggcacaattttgattcccgttgattttgaatgttctctaatactttgtagaaattcatcaaacctatcttcacggatgagtcctaccttg

SEQ ID NO: 480098 - DNA, 201 bp, Homo sapiens
gtcctgtgtgttatgcccagtgtcacctccatgtgttgtaacgccataggtcagtggggtgtcataaagaaacacagcagacttgcggaagcccagccttgagtctgcttctgtcatttactgaccatgccccttggacaagttatttagtctcccggagtctgtttgctcatctctaaagagagggtgatgacagtacct

SEQ ID NO: 480099 - DNA, 201 bp, Homo sapiens
cggcaacgggcagcccgtgcagctgcaggtggtgtggcaacggagcagggacatctgcctcaaggtacacctcagccgcagtcacacagaccgcgacactygggctctgtgtctggccaggttctagttcttaggtttgctccttacattcatgaaaagagccaaacattttccagagcccagggcacaattttgattccc

SEQ ID NO: 480100 - DNA, 201 bp, Homo sapiens
ctcctcggctcaagcaaccatcccacctcagcctcccgagcagctgggactacagatgcgcaccaccactcccggtaatcccggtttgtttgttttttaawtttttaaataaacacgaggataagcggggatcgtggccctcgcctggggtccctgctacttcgcaggctaaggtgggaggatctcttgagcccaagagtt

SEQ ID NO: 480101 - DNA, 201 bp, Homo sapiens
catgtgttgtaacgccataggtcagtggggtgtcataaagaaacacagcagacttgcggaagcccagccttgagtctgcttctgtcatttactgaccatgycccttggacaagttatttagtctcccggagtctgtttgctcatctctaaagagagggtgatgacagtacctttttcccagggttacagagggattgaatg

SEQ ID NO: 480102 - DNA, 201 bp, Homo sapiens
gcttcccaacctaatcgcaggtgccccaccctaaacgcaggcttcccaacctaatcgcaggcgccccaccccaatcgcaggctccccacactataatcagrcgccccgcccgccgcttcgacctggcgcatgcgtggtgcgcacgcgtcccgtctcctcggccgacaagctctcgcgagacgagccgtgcaggctgaaaaa

SEQ ID NO: 480103 - DNA, 201 bp, Homo sapiens
gtcagtggggtgtcataaagaaacacagcagacttgcggaagcccagccttgagtctgcttctgtcatttactgaccatgccccttggacaagttatttastctcccggagtctgtttgctcatctctaaagagagggtgatgacagtacctttttcccagggttacagagggattgaatgagatgatggatggcccagtg

SEQ ID NO: 480104 - DNA, 201 bp, Homo sapiens
ccccaccccaatcgcaggctccccacactataatcagacgccccgcccgccgcttcgacctggcgcatgcgtggtgcgcacgcgtcccgtctcctcggccracaagctctcgcgagacgagccgtgcaggctgaaaaaatggcgccacccagtacccgggagcccagggtcctgtcggcgaccagcgcaaccaaatccgac

SEQ ID NO: 480105 - DNA, 201 bp, Homo sapiens
gcgtgggagcagaggaggtggtgagaagctgtcagagccttgatctgtcccatagcaaagctgacagcatttgatgatgaggtggatgtggcatgtgagaraagggaagggaaccttggatgaaggttttgtcctgagcagctggaaagctggagttgctggcagccaaagtagctggtttgagcaggtttgtccacgatg

SEQ ID NO: 480106 - DNA, 201 bp, Homo sapiens
tcactgggacaccgtgctcccgtctctcaggcagcgaagttcgatccatcaaccaaaatctatgaagtaagtggacttgtcacctgttctaaaagagactyttttttttttttttttttttttgagatggagtctcgctttgtcacccaggctggagtgcagaggcacaatcttgactcactgcaacctccacctcccagg

SEQ ID NO: 480107 - DNA, 201 bp, Homo sapiens
gggccagcacaagcctgcattcacccctcgtgggtgttggtgctggtgccagggaaacagcgtggctgtagcttccacaggcgcgggggcagggctgcttkggggtgctcctgttcctcttgcagcgcatcctggcggccttgccttcagagacacagaaacatcctctctcaggggatctaaagtcactcctgtgctgct

SEQ ID NO: 480108 - DNA, 201 bp, Homo sapiens
acactctcctgcctcagcctcccaagtagctgggactacaggcgcccgccaccacacctggctaatttttttgtatttttagtagagacggggtttcaccrtgttagccaggatggtctcgatctcctgaccttgtgatccgcccgcctcagcctcccagaatgctgggattacaggcgtgagccaccacacccggccttc

SEQ ID NO: 480109 - DNA, 201 bp, Homo sapiens
gacaagtttgatttactagttgatgccaatgatgtaattctggagagagtggtgagtattttcccttactcttttttttgttttgttttgtttttgagacrgagtctcgctctgtcgcccaggctggagtgcagtgatgcgatctcgactcactgcaagctctgcctcccgggttcacaacactctcctgcctcagcctcc

SEQ ID NO: 480110 - DNA, 201 bp, Homo sapiens
gccaagtgagtcctgcacaaggcatggtgctagccaggaattgttggagtagtccagagaggccgtggcaatgtggacagtcgcctgcagcctcattaccrcctcctccatgggagctcaactcatggtggcctccatggtgggttagcaagatcacctgtcacttccactgtgaccagggcgccatccttcctcactata

SEQ ID NO: 480111 - DNA, 201 bp, Homo sapiens
ggggccaagtgagtcctgcacaaggcatggtgctagccaggaattgttggagtagtccagagaggccgtggcaatgtggacagtcgcctgcagcctcattrccacctcctccatgggagctcaactcatggtggcctccatggtgggttagcaagatcacctgtcacttccactgtgaccagggcgccatccttcctcact

SEQ ID NO: 480112 - DNA, 201 bp, Homo sapiens
agcaccaaataattatcatgccaggcactgtaaggagtgaagagaggaaagaaaatctctgggcttttgagaaacaggctggtgaaggaatacagtcagcrctggagactgggggttggacttgaggtgcttgggcaactttcctcaattcccttcgtttttttccttagtctgaagttgcagccggagtgaagaagagcg

SEQ ID NO: 480113 - DNA, 201 bp, Homo sapiens
ctggaaagctggagttgctggcagccaaagtagctggtttgagcaggtttgtccacgatggtgatggtgacgatcctgttaaacgccctcaggtccacagrccactgagcatttaggttcacagaagaggagcaggcagggctggggaggatcagctcacgtgtagctgaaggtgggcagagcacctgagcctgagctctg

SEQ ID NO: 480114 - DNA, 201 bp, Homo sapiens
aatccaaagtttcttctcagtttgatccaaataaacagaccccgtctggcaaggtaagaactgctcctggaggattttagcacgctggtggcgcctgtttytgacctcctcctctgctgagaagacaggcccatccaggagtccattcctttgcatatctttttcctcacctcatttcttcccaagggcagacagtactga

SEQ ID NO: 480115 - DNA, 201 bp, Homo sapiens
agcacaagcctgcattcacccctcgtgggtgttggtgctggtgccagggaaacagcgtggctgtagcttccacaggcgcgggggcagggctgctttggggygctcctgttcctcttgcagcgcatcctggcggccttgccttcagagacacagaaacatcctctctcaggggatctaaagtcactcctgtgctgctagaat

SEQ ID NO: 480116 - DNA, 201 bp, Homo sapiens
acaaaagcatgtcctttccaactggaaagtcagacaggtatgtggtggacggcggtgtggcccagggagcccagtgagaaagcacctgccctgcgtggtgyggtccgtggggagtagctggggagcgagtgtccaggggtcttcaaccaggatgactcagagaacctcccacagccaggtccctcacgccactcggaaaac

SEQ ID NO: 480117 - DNA, 201 bp, Homo sapiens
gtccaggggtcttcaaccaggatgactcagagaacctcccacagccaggtccctcacgccactcggaaaacaagggcgggaggtgatttgctctgtgccayacatcacagagccaggcactgcaccccaggactcagattccccttgttcctggctctctagttaccgtgtgtcctggggtcacctcagggaaaataggtg

SEQ ID NO: 480118 - DNA, 201 bp, Homo sapiens
cagagccaggcactgcaccccaggactcagattccccttgttcctggctctctagttaccgtgtgtcctggggtcacctcagggaaaataggtgtaaatakttgtgaaattttcctggaccagcctattaggaatgaggaaaaagtaagcacatgtgggttatccttgttgttgaagagtggtttggcttggtttggtttt

SEQ ID NO: 480119 - DNA, 201 bp, Homo sapiens
agtctcgctctgtcgcccaggctggagtgcagtgatgcgatctcgactcactgcaagctctgcctcccgggttcacaacactctcctgcctcagcctcccragtagctgggactacaggcgcccgccaccacacctggctaatttttttgtatttttagtagagacggggtttcaccgtgttagccaggatggtctcgatc

SEQ ID NO: 480120 - DNA, 201 bp, Homo sapiens
aatctcagctcactgcaacctccacctcctgggttcaagcaagtctctcacctcagcctcccgagtagctgggattacaggtgcctgccatcatgcccggmtaaggtttttttttttttttcttctttgagatggagtctcggtctgtcgcccaggctggagtgcagtggcacgatctctgctcactgcaagctgcgcctc

SEQ ID NO: 480121 - DNA, 201 bp, Homo sapiens
tcagctcactgcaacctccacctcctgggttcaagcaagtctctcacctcagcctcccgagtagctgggattacaggtgcctgccatcatgcccggctaakgtttttttttttttttcttctttgagatggagtctcggtctgtcgcccaggctggagtgcagtggcacgatctctgctcactgcaagctgcgcctcccgg

SEQ ID NO: 480122 - DNA, 201 bp, Homo sapiens
atttcccctatgtgacagcatctaatggaacttactggctgaatgtaatgtgtccccaccgtgtgtgtgtgtgtgtgtgtgtgtgtgtgtgtgtgtttttktttttttccagatatgtactgccaaaccacatgatgctgaaaatagctgaagaactgcctaagtgagtttcaaatctgattaatatgttctgactttctc

SEQ ID NO: 480123 - DNA, 201 bp, Homo sapiens
tcctcactataacttgtgcccataaacctctctctctctctctctctttctcacacacacacacacacacaacacgaattttgtttgttgaaaaatctcamagcctatgacatgaacccctatggctgcttgggctgtgagagtccgtctgctttgaaggggctacagatggcattctcgactctagcagccttcggagca

SEQ ID NO: 480124 - DNA, 201 bp, Homo sapiens
ttatttcccctatgtgacagcatctaatggaacttactggctgaatgtaatgtgtccccaccgtgtgtgtgtgtgtgtgtgtgtgtgtgtgtgtgtgtttktttttttttccagatatgtactgccaaaccacatgatgctgaaaatagctgaagaactgcctaagtgagtttcaaatctgattaatatgttctgactttc

SEQ ID NO: 480125 - DNA, 201 bp, Homo sapiens
tggaaatcatcattctcagtaaactatcgcaagaacaaaaaaccaaacactgcatattctcactcataggtgggaattgaacaatgagaacacatggacamaggaaggggaacatcacactctggggactgttgtggggtggggaaaggggggagggatagcattgggagatatacctaatgctagatgatgagttagtgg

SEQ ID NO: 480126 - DNA, 201 bp, Homo sapiens
acacatgcacacatatgtttattgcggcactattcacaatagtaaagacttggaaccaacccaaatgtccaacaatgatagactggattaagaaaatgtgkcacatatacaccatggaatactacgcagccataaaaaaggatgagttcatgtcctttgtagggacatggatgaaattggaaatcatcattctcagtaaac

SEQ ID NO: 480127 - DNA, 201 bp, Homo sapiens
cagcctcaaactcttgggctcaaacgatcctccctcctcaaccacccaagtagctagaccacaggcacacaccaccattcccagctattttttgttattgyttttggtggagacggggtctcactatattgcccaggctatcactcgaattcttaacccctgccccctgcctttccttttttttttttttttttttttaat

SEQ ID NO: 480128 - DNA, 201 bp, Homo sapiens
tgggattacaggcatgaaccactgtgcctggccagagctggcccatgttttctttctttctttctttctttctttttttttttttttgggacggagtttcrctcttgttgctcaggctggagtacaatggcgcgatctcagctgactgcagcctctgcctcctgagttcaaatgattctcctgcctcagcctcccaagtag

SEQ ID NO: 480129 - DNA, 201 bp, Homo sapiens
tttatggtaaatatgccagaccactcaactgtagtagtagaaaaggtattgaggttacagtgctgaagcttgttgtgtgtcctgctgtgtcctacaaaaaygttgcattctagagaatgaaaccccagagcactctggaactctttttttttttttttttgaagtagtgtctacctctgttgcacaggctggagtgcagtg

SEQ ID NO: 480130 - DNA, 201 bp, Homo sapiens
acctgcccttcgtcacctcatgaaaagtaagacagacttaggtggctgactttggagggttttttttgttatatttgctttcattatagatcagcaaccgytggaagctggcccaggtacaagtacaaaaagactctaaagaagctgtcaagaagaaggcagctgagcaaacaggtaacactcacttccttgcaactcagt

SEQ ID NO: 480131 - DNA, 201 bp, Homo sapiens
cgaggtggtgtgtgcctgtaatcccagctactcgggaggctgaggcaggagaatcgcttgaacttgggaggtggaggttgcagtgagccaagatggcgtcrctgcactccagcctgagtgatagagtaagactccatctcaaaaaaaaaaaaaaaaaagatgtaaaagcaaaattagagatgcaggcttcttgtagagttg

SEQ ID NO: 480132 - DNA, 201 bp, Homo sapiens
acacaaactaattacaccctcttcttctctttctggagacctctacatgcacatacattcttaaatgaatgaatgacctttgcgatgttcttgtctcctcrgaagtcataaattggaatttacttttctaattcatcaagttgctgtgttataaagtatttgtattcattgatcataggcagcagaatatggcaaaaaagc

SEQ ID NO: 480133 - DNA, 201 bp, Homo sapiens
ccaggagttcaaggctacagggagctgtgattgtactgctgcattccagcctgggtaacagagcaagaccctgtctctttaaaaaaaaaaaaaaaaaaaaraaagaaagaaagaaagaaaaaggctgggctcatggctcacacctgtaatcccagaactttgggaggccgaggcaggtggatcacttcaggtcaagagttc

SEQ ID NO: 480134 - DNA, 201 bp, Homo sapiens
gtattggccttttcctcacatagagccagagtctgtctgggcattcatgcctttagccccagctctgcaatgtgaggccacaagctaagtgctggagaaayaaaggccatgaaaggcagccctgccctcctgggctaccgtgatcctcgaggaacacaccacaagttgaggatttttatacagatttcttaggatcagaaa

SEQ ID NO: 480135 - DNA, 201 bp, Homo sapiens
catgatcttaaacgttttgtgatcttgattgaagtataagcaagaatgaaaatccacagcccgttggttgccccctgcggaattgagaatccacagtgctrtggcacttactttcagctctccctgattgtgggagtcaggctccaagagggatccacttaaagcttggtgtcgcaaagaacacatggagaagttggccta

SEQ ID NO: 480136 - DNA, 201 bp, Homo sapiens
taattagaaaagacatgaatgtgctaatgatgtttttgtcactgctgggatccccagctctctctaaggaaaggcgggaacgcccacaggatcgtcctgargacttggacgtcccccctgcactggctgatttcatccatcagcagagaacccagcaggttgagcaagacatgtaagtgttggcctgtgtctgactttctg

SEQ ID NO: 480137 - DNA, 201 bp, Homo sapiens
attactaccttagccaacccctgcaaaaagattcatacccatactatgtaaaaatatctattgcatgcacctttattatcagcctcatctctaccacaatrtatatatttatagaccaagaataatctcaaagtgacattgaataacaatccaaactcttaaactctcactaagcttcaaactatactatttctccacagt

SEQ ID NO: 480138 - DNA, 201 bp, Homo sapiens
aagtctatttacaagccaaaatctggcctcacttctactagacctaatttgattagaaaagtccacaccaaaaaccatttcacaaacccaaatatcagccrccattactgtatctactcaaaaaggcctaattaaactttactttctctccttttttattttactccttctaactctaaattatctaatctattaccccga

SEQ ID NO: 480139 - DNA, 201 bp, Homo sapiens
ataaaatatatgccattattcctacacggactataatcataactaatggtataaaaaaatcattgtatttcaactgtaagaatgctaatgaccaaaatacscaaaacacacccgctaataaaaattattaaccattaattcattgatcttcccacagcatccagcatttctacatgatgaaactttggctcacttattggt

SEQ ID NO: 480140 - DNA, 201 bp, Homo sapiens
ttctcagttgacaaagccacgcttacacaacttttagccttccgttttatctttcccttcatcattgcagctctaacaactgttttccttttattcttacrtgaaacaggatataataaccttcagggatctcatcagaccctgacaaaatcactttccaaccttactacgtaatcaaatatattctaggcctaactctcc

SEQ ID NO: 480141 - DNA, 201 bp, Homo sapiens
atgaatctgaggtggattctcagttgacaaagccacgcttacacaacttttagccttccgttttatctttcccttcatcattgcagctctaacaactgttytccttttattcttacatgaaacaggatataataaccttcagggatctcatcagaccctgacaaaatcactttccaaccttactacgtaatcaaatatatt

SEQ ID NO: 480142 - DNA, 201 bp, Homo sapiens
tcacgctccccggcacagttcctcttccccagcaatgcccctccagagcctcttggaagctcaggactggggtgtctctgtcactctcagggaccatgaartcccaccccttttctctggcctcttcttgccacagggacccaggagtcctgccctctagccctcacctgttccatgtgagctgccaaggagggtcaagag

SEQ ID NO: 480143 - DNA, 201 bp, Homo sapiens
acttgagcatccaacccccacttcctgccagctctgtgctcagggacccacagagtcaagcaagttattgaattcagcataccgaattttatttattgccrctcaggagggtgggggcctgctgaaagacagggtcggggcctgcctcctgcatccccggcccaaaagcccgggccaagaaggacacaggcttcaatggct

SEQ ID NO: 480144 - DNA, 201 bp, Homo sapiens; identical to SEQ ID NO: 157345

SEQ ID NO: 480145 - DNA, 201 bp, Homo sapiens
aattcagcataccgaattttatttattgccactcaggagggtgggggcctgctgaaagacagggtcggggcctgcctcctgcatccccggcccaaaagccygggccaagaaggacacaggcttcaatggctgtcatgtgttgcagacaacatggtgttgagatcttgcatggtggagggtgacgctggtccctgaagggag

SEQ ID NO: 480146 - DNA, 201 bp, Homo sapiens
cagttgcaaagtcatacccggccctgcggatccagaagtacagcttaggacccagcagtcagggctgattcctccggagacacagaaccttcctgctcacrctccccggcacagttcctcttccccagcaatgcccctccagagcctcttggaagctcaggactggggtgtctctgtcactctcagggaccatgaagtccc

SEQ ID NO: 480147 - DNA, 201 bp, Homo sapiens
tctgtgctcagggacccacagagtcaagcaagttattgaattcagcataccgaattttatttattgccactcaggagggtgggggcctgctgaaagacagrgtcggggcctgcctcctgcatccccggcccaaaagcccgggccaagaaggacacaggcttcaatggctgtcatgtgttgcagacaacatggtgttgagat

SEQ ID NO: 480148 - DNA, 201 bp, Homo sapiens
tccaaagaactaccttttcaagcaattccaggaagctggactcataggaggaatttgtcagaaaagactccttcagcttcagttgcaaagtcatacccggycctgcggatccagaagtacagcttaggacccagcagtcagggctgattcctccggagacacagaaccttcctgctcacgctccccggcacagttcctctt

SEQ ID NO: 480149 - DNA, 201 bp, Homo sapiens
gcagaggcccaaactgactcacaaacacacagccccatctttccccttccaaagaactaccttttcaagcaattccaggaagctggactcataggaggaayttgtcagaaaagactccttcagcttcagttgcaaagtcatacccggccctgcggatccagaagtacagcttaggacccagcagtcagggctgattcctcc

SEQ ID NO: 480150 - DNA, 201 bp, Homo sapiens
ggtgctcaaaggatctgtggtgctggaggtctacacgcctctcaggacagcgtgtcaggaacctcagagcagcttcacatctgccaaagctgagagggagygaacttgggaagcattttgctcattgtcctacccaagtattaatagcataatagttgatgccaaaggagatggtgacgtcccttccactgtagttgctgt

SEQ ID NO: 480151 - DNA, 201 bp, Homo sapiens
ctgttccgccaaatcagcagtctcgtcctgtggatgcagtgactggaatttcccatctgcaaagcatctctgtagcccagattttgtggagccttaagacrctccctcaatgccaccctgaccccacggctggagaaccctgtgcttatgtggtgggcagggccactgttgatggaggatggcggggacggggtggtgctc

SEQ ID NO: 480152 - DNA, 201 bp, Homo sapiens; identical to SEQ ID NO: 321853

SEQ ID NO: 480153 - DNA, 201 bp, Homo sapiens; identical to SEQ ID NO: 321770

SEQ ID NO: 480154 - DNA, 201 bp, Homo sapiens; identical to SEQ ID NO: 187069

SEQ ID NO: 480155 - DNA, 201 bp, Homo sapiens; identical to SEQ ID NO: 186735

SEQ ID NO: 480156 - DNA, 201 bp, Homo sapiens; identical to SEQ ID NO: 187077

SEQ ID NO: 480157 - DNA, 201 bp, Homo sapiens; identical to SEQ ID NO: 186804

SEQ ID NO: 480158 - DNA, 201 bp, Homo sapiens; identical to SEQ ID NO: 186736

SEQ ID NO: 480159 - DNA, 201 bp, Homo sapiens; identical to SEQ ID NO: 187188

SEQ ID NO: 480160 - DNA, 201 bp, Homo sapiens; identical to SEQ ID NO: 187078

SEQ ID NO: 480161 - DNA, 201 bp, Homo sapiens; identical to SEQ ID NO: 422800

SEQ ID NO: 480162 - DNA, 201 bp, Homo sapiens
gcaaacaccgtcctcccgagcatggaaccctcttgagaacaagtcctcctgagcactgagtcctcctgagcactgagccctccagagcagagagtcctccwgagcagagagccctcctgagcatggggtcctcctgggggtctcctgagtggctcccaatcatacacctgcctcgcacacaccagtgccaagggcctgcgt

SEQ ID NO: 480163 - DNA, 201 bp, Homo sapiens
tacagagcactcaaaatgcaaacaccgtcctcccgagcatggaaccctcttgagaacaagtcctcctgagcactgagtcctcctgagcactgagccctccwgagcagagagtcctcctgagcagagagccctcctgagcatggggtcctcctgggggtctcctgagtggctcccaatcatacacctgcctcgcacacacca

SEQ ID NO: 480164 - DNA, 201 bp, Homo sapiens
aacaactacagagcactcaaaatgcaaacaccgtcctcccgagcatggaaccctcttgagaacaagtcctcctgagcactgagtcctcctgagcactgagycctccagagcagagagtcctcctgagcagagagccctcctgagcatggggtcctcctgggggtctcctgagtggctcccaatcatacacctgcctcgcac

SEQ ID NO: 480165 - DNA, 201 bp, Homo sapiens
cctcctcactttggcctctccactatgaataataaaatgttggcatttttacaccactcactcctccttcccctcctcagtctcaggaatttttaaatgtyagcccttattttcagttcctctattaatcagaaatatatttcagatactgttcttttttttctatttttctttttttgagacaaggtcttgttctgttgc

SEQ ID NO: 480166 - DNA, 201 bp, Homo sapiens
gaactcctgacctcaggtgatcctcccgcctccgcctcccaaagtgctgggattactggtgtgagccaccacacccggcccccgaccctattcttaagtcyctgttctcgaatgcaactttatttccacttcatttagttctaccccatttacttttttaaattacaaaattacaaacataagagccaaaatgagatttta

SEQ ID NO: 480167 - DNA, 201 bp, Homo sapiens
atctatgcctttacttactcctcacccctcactcaattattactttgtcttttatgcagatttatatacattgacatgcacaaatcttagctgtacaattytgaaaatagattttttagagcagttttggttttgcagcaaaattgagcagaaggtacagagttcccatgcactccctgaccccacacatgtagccttccc

SEQ ID NO: 480168 - DNA, 201 bp, Homo sapiens
tggcaggatcttggctcaccacaacctctgcctcccggattcaagtaattctcctgcctcagcctcccgagtagctgggattacaggcacacgtcaccacrcctggctaatttttgtgtttttagtagagaaagggttccaccatgttggccaggctgttcttgaactcctgacctcaggcagcctgcccgcctcagcccc

SEQ ID NO: 480169 - DNA, 201 bp, Homo sapiens; identical to SEQ ID NO: 458784

SEQ ID NO: 480170 - DNA, 201 bp, Homo sapiens
atgactgaaaagtattgatctacgtggttcttttcaaccaaaattaatgtaaataatgtaaaaaaaaaaagttgaattaaagatttattttccaaagagawcttttgtagccgacatggtgtatctttgaatggcttttaatttttttaaacaaaatttcctctttttcttccaatgtgttttttctattttttaaatgtt

SEQ ID NO: 480171 - DNA, 201 bp, Homo sapiens
gtctctccccatgtggcaccaaggggcccaggctgagggagccttcgccatcttccttcacaggtgaatttgaggtcaccggggctgctccctggcccagscggggagaggctgtgagcctctctggaagcagggggagcattcctcctgctcacggtccactggctggagcccagccagggcccacccagctgcagcaga

SEQ ID NO: 480172 - DNA, 201 bp, Homo sapiens
cctgcagggatctgaggggccacccagggctcctgccccaaactcagaattggccgctgcacagacgagaataagtcactggagacaagcttcggaagccrggggtgcgcgggccggcccctctctgcaagcgagggtccacggccaggagagagggagggaacccgcgtcagctctgccactgacgttcccctcatctgc

SEQ ID NO: 480173 - DNA, 201 bp, Homo sapiens
taccaacgtttaggtgatggtggttttgtttgattttttttgtttgtttgtttgttttaggttgatagtaaaagcatttttttatagcatatgcaatagamctactcttcgatttatctatatttactgactgttccacagttataccaagaaatgtttacacagatgatgataagcatatgtagaaatgcaacgttttca

SEQ ID NO: 480174 - DNA, 201 bp, Homo sapiens
cctgccatgggctgggacatcctggggacggaatgttctggaaccacagcagtaggtcagatgggaactctggcacagacgccccctttccagattcttgyccagatcccaagatggatacaaaacatggcaagtatgagctgaggcttagcaaagccacataaatccatcgctgctgcgaaaacaactcgaatgacatgg

SEQ ID NO: 480175 - DNA, 201 bp, Homo sapiens
tgagtactcagaggcccatggcatcagcagaaccagcatggtgggcatgaccccgtgtccccgccatgccggccaaggtgccctcacaccctgggaacacsaatgtccctcccagtggccatgggcctcgtgggtgctggagcctgcaggtctcgtggcaacagcccgaaaatgaaacggcaactttggtttctggtggtg

SEQ ID NO: 480176 - DNA, 201 bp, Homo sapiens
tgctgaagagcaaagcagaatgtccctgaggagggggcctcgccagctcctgcactggaggagcctctgagtacatcgaactggagtctgagctggtcacrcaagcccccgctgagcacctgccatgggctgggacatcctggggacggaatgttctggaaccacagcagtaggtcagatgggaactctggcacagacgcc

SEQ ID NO: 480177 - DNA, 201 bp, Homo sapiens
cgctcgtgctaaactttcttcttccccgcaccgagccccgcacacccagggcagtgagtactcagaggcccatggcatcagcagaaccagcatggtgggcrtgaccccgtgtccccgccatgccggccaaggtgccctcacaccctgggaacaccaatgtccctcccagtggccatgggcctcgtgggtgctggagcctgc

SEQ ID NO: 480178 - DNA, 201 bp, Homo sapiens
tggacacggttcccgccgtctcctgtttagtccgcactgacactagcagctgctccagttaccaacgtttaggtgatggtggttttgtttgattttttttktttgtttgtttgttttaggttgatagtaaaagcatttttttatagcatatgcaatagacctactcttcgatttatctatatttactgactgttccacagt

SEQ ID NO: 480179 - DNA, 201 bp, Homo sapiens
aagtgtcacattcctgaagctaaaaataaacgtgcaacccaacatttcctaagacacaagcgtcttagccaagaacttttgcggctgcaaatcccactgcraagcactgctcagacaagaaaacagacactgctcccgaacagggctgtgcatgccaggctcttggccaccccgatcgctcgtgctaaactttcttcttcc

SEQ ID NO: 480180 - DNA, 201 bp, Homo sapiens
caggacaggacaggacaggacagagcaggatagagcaggacaggacagagcaggatagagcaggacagcttgcatcttccaatgtggagctgtcaccttcrcttttaggcaagagtgttccaggattggccctctcaaaaacccaaataatatcaagtgtcacattcctgaagctaaaaataaacgtgcaacccaacattt

SEQ ID NO: 480181 - DNA, 201 bp, Homo sapiens
gtttcaagacacctacttggtgcctgaagctgcagacagacagatagatagatggatagattatagacagacagacagacagacagacagacagacagacagatagataaagaggggatttattaggggaattggttcacatgattgtggggcctgagaagtcccacacaggccatctgcaagctagagacactagggtgc

SEQ ID NO: 480182 - DNA, 201 bp, Homo sapiens
ctccctccccccaccccacaacagtccccggtgtgtgatgttccccttcctgtgtccatgtgttctcattgttcaattcccacctatgagtgagaacatgyggtgctctgggactcttcttaagatgagctcttcaactctgcggcagctgccttttctggcgctgcgggccccgccacactggccggtccctccacatca

SEQ ID NO: 480183 - DNA, 201 bp, Homo sapiens
tttcaagacacctacttggtgcctgaagctgcagacagacagatagatagatggatagattatagacagacagacagacagacagacagacagacagacagatagataaagaggggatttattaggggaattggttcacatgattgtggggcctgagaagtcccacacaggccatctgcaagctagagacactagggtgct

SEQ ID NO: 480184 - DNA, 201 bp, Homo sapiens
tgtttccaccttcatcaccacgcagacatccaggaggagagagacccccgtgctggcgcgggacgccagcctcagatgcactttctagacgccccgtgaarcagaagcaagggactcctcagcacccaggcctggccactggtgcccaggtggctcagccggccctcagcctgcctgtgtgccctcacagctcaggcggtt

SEQ ID NO: 480185 - DNA, 201 bp, Homo sapiens
gtgtctggtgaaggctcaggctccccagcctctggctgcagaacttataccctttgcctgttgttctcaggcctttggtttgactgagggttttatcatcrgtttccctggttcgggggcttttggacttggactgagcaacactgccagcatccctggctctccagcttgtggacagcttgtagtgggactcctcagcct

SEQ ID NO: 480186 - DNA, 201 bp, Homo sapiens
tggagcccttcctgacccctatctttatcttgcaccacctctaatccccaataagccctcccacctccaccttctgcacaccccagaacgcacgtcctccrcaccgcctgtccctgagccaccctgggccagccaggcacccgccaggacccctgcggcccctccccgatggtcccttccctgcctcccagctactcaggc

SEQ ID NO: 480187 - DNA, 201 bp, Homo sapiens
gacccaatgtttacagagatgcgtgtggaaagcatgtcacagtcagagtcccaggtaccctcacgtcattcctgagggtacaggaaggaatcagaacaagragaaaaaccaacagaaacaaaacagtaacaacaagcaagctacaaaccaaaggcatatgcagcgcacaaagggttaacaccttgactggttcaagagcca

SEQ ID NO: 480188 - DNA, 201 bp, Homo sapiens
aggatttaaaataaagaacaaacccgaggagcatggaacgggtgccaggagctttatctgcgaagagcaaagcccagctgctccggcagacagggccggcrgactcgagggacgcctgcagggatctgaggggccacccagggctcctgccccaaactcagaattggccgctgcacagacgagaataagtcactggagaca

SEQ ID NO: 480189 - DNA, 201 bp, Homo sapiens
gtgagaccctcccccaccggcccaccatttctaactttaaatttaaaaattaaaaaaaaaaaaactaaaaagactttcccagctaaagttttaaagaacaytcccattcttagagaacgcctttgagaagttatttttaactattacctacatgaatcactggaatccaccctgctgtacgacaatgaataaagtcaacca

SEQ ID NO: 480190 - DNA, 201 bp, Homo sapiens; identical to SEQ ID NO: 458790

SEQ ID NO: 480191 - DNA, 201 bp, Homo sapiens
accttctgcacaccccagaacgcacgtcctccgcaccgcctgtccctgagccaccctgggccagccaggcacccgccaggacccctgcggcccctccccgmtggtcccttccctgcctcccagctactcaggccctgagagtgagaggatgtgcgaccgtgactcccaccctggcaggacagagcaggacaggacagagca

SEQ ID NO: 480192 - DNA, 201 bp, Homo sapiens
acacagatttgctttttcctcttcaatctgtatgtcatttgtttcttcttcttgccttattgcattggctgggatctgtgatacagttttatagagagcayttgctgtgcccacatggcagagtacatagaagggtgacaccaggaggtaagctcagaggtcccaaaaactaagcatagtacagtcatcccctcttatctg

SEQ ID NO: 480193 - DNA, 201 bp, Homo sapiens
atgtggttatttaaagccttctctctaggaaactttcaactaccatatattcaagatcttgcagttgatagttttaaactggaatctcagggactcgggckgactgtcacctatacaagctactcagggatacagcagccatgaacggtggtgtgaaaagtggccatcatcatgtattttcaaacttttttgagatataat

SEQ ID NO: 480194 - DNA, 201 bp, Homo sapiens
agagcggatgtctgtttctgactacgttgggggtgcctgttagccagcgaggtggaggagtcctgtaggtggctcggtgttgtgatggttactttcatgtrtcacctggacagggccagagggtgcctagatatttggtcaaacatcactttgggtatttccgtgagggtgtttttggaagagattagcattcaaattggc

SEQ ID NO: 480195 - DNA, 201 bp, Homo sapiens
aacatcacaaataaaactgcaaatttaaaaagataacaagatgccatgtttcattattggattagcaaatactaaaaagaaagctatgcccggggtggggracgctggaggacgtggggccggtcactcactcccgcaggatgccctgacgatgcctgtcagaaatcttaaaaatgtgtgcaatgtcttaaaatttatcct

SEQ ID NO: 480196 - DNA, 201 bp, Homo sapiens
ttttcagcgcacagcgtgttcacgcagatagaaccagcaaaacgtgatgctagactggcgtgggggcatgggagaaaggcccagagatggtccaaggaccygcctgtgtgatggccagcaggtctgtcctgtcctctgatgagcttgggagggagagcggatgtctgtttctgactacgttgggggtgcctgttagccagc

SEQ ID NO: 480197 - DNA, 201 bp, Homo sapiens
ccaggaggctggcacggtcacagctgcactcatgggcgagcaggtctgtgagccaagaggtggtgcccctcccatggccacgcagcggtcgggggccacamtggtggttccagcctgtccctgctgcaccagcaggcacactcgagccacaggcccactgcccctcacatgcagagggtagctggtctcccccaagtcggc

SEQ ID NO: 480198 - DNA, 201 bp, Homo sapiens
ttcaagacacctacttggtgcctgaagctgcagacagacagatagatagatggatagattatagacagacagacagacagacagacagacagacagacagatagataaagaggggatttattaggggaattggttcacatgattgtggggcctgagaagtcccacacaggccatctgcaagctagagacactagggtgctg

SEQ ID NO: 480199 - DNA, 201 bp, Homo sapiens
tcaagacacctacttggtgcctgaagctgcagacagacagatagatagatggatagattatagacagacagacagacagacagacagacagacagacagayagataaagaggggatttattaggggaattggttcacatgattgtggggcctgagaagtcccacacaggccatctgcaagctagagacactagggtgctgg

SEQ ID NO: 480200 - DNA, 201 bp, Homo sapiens
ccttgccaaccatttcctgccacggctggtggtggccaagtcctcagggcctctctgaatgcccggctcctgttccactcacaatccccggtgcaggcctygcctgggagcagcggcttctcagaacataaaccccagggacgctctcaggtgccagctgtgtctagtgtggcctgtttggaccccatgacttggaaaatt

SEQ ID NO: 480201 - DNA, 201 bp, Homo sapiens
aattccagcactttgggagaccgaggtgggtagatcacgaggtcaggagattgagaccatcctggctaacacagtgaaatgctgtctccactaaaaatacaaaaaaaaaaaaaaattagcctggcgtggtggcgggcgcctgtagtcccagctactcgggaggctgaggcagaagaatggcgtgaacccaggaggtggagc

SEQ ID NO: 480202 - DNA, 201 bp, Homo sapiens
ggcgtggtggcgggcgcctgtagtcccagctactcgggaggctgaggcagaagaatggcgtgaacccaggaggtggagcttgcagtgagccaagatcgcgycactgcactccagcctgggcaacagagcgagactccatctcaaaaaaaagaatggtaaggtgtgggtcacaccctagggagagacagtgggcccggtggc

SEQ ID NO: 480203 - DNA, 201 bp, Homo sapiens
ggagcagggctgcccggcagcctggagcagccactcagacgtccacctcctcggagccactgtgttgctgttggactgttagagacaccttgagccccccracccatatgtcagggctgtctcctgtgggcttggggctcagctgatgccaccccggcctcctgtggctcaggccggagtctggagcccttcctgacccct

SEQ ID NO: 480204 - DNA, 201 bp, Homo sapiens
agctctctccagcatgatttccacctcctaggtgtggcattcagtactgtttacaagctgggcagaaacaagccctgcaaggccctgccccaacccctgctcccacccagctccctgacccctgttcccacccagctctctagtggctgctgctctccgcgctcccatgcactgcccagtgtacctgcccagcccatcacc

SEQ ID NO: 480205 - DNA, 201 bp, Homo sapiens
tccaggtcacctgcctgtggagggtggggcagggctgctcccacgatgaggatcgtgaccgggagggcccctgaggaccctgtggttgagttgacccctcyatgctctctttcccctttcccaaagctctgctctttggatgtggtcctggggtttccaggggagacatcaaggcggaggaggcctggccctgaggtaaga

SEQ ID NO: 480206 - DNA, 201 bp, Homo sapiens
tctccagcatgatttccacctcctaggtgtggcattcagtactgtttacaagctgggcagaaacaagccctgcaaggccctgccccaacccctgctcccacccagctccctgacccctgttcccacccagctctctagtggctgctgctctccgcgctcccatgcactgcccagtgtacctgcccagcccatcaccctctc

SEQ ID NO: 480207 - DNA, 201 bp, Homo sapiens
cgtctgaatctgtttcaacttcactgtcagttttgatggactgtttagctgggtgtagaattctcagctctaaatcatcatttttcagaagcttacaggcyccttgcatagacacctaacatcagcaacaccaatgagaagccaaatgccagtgtggttctcatgcctctgtagtagcttgttcttctaacatcagcaaca

SEQ ID NO: 480208 - DNA, 201 bp, Homo sapiens
ctccagcatgatttccacctcctaggtgtggcattcagtactgtttacaagctgggcagaaacaagccctgcaaggccctgccccaacccctgctcccacccagctccctgacccctgttcccacccagctctctagtggctgctgctctccgcgctcccatgcactgcccagtgtacctgcccagcccatcaccctctcc

SEQ ID NO: 480209 - DNA, 201 bp, Homo sapiens
aaaaaattttttttaacccaggaagtgcatgttctgagttcttgcacgtctgaatctgtttcaacttcactgtcagttttgatggactgtttagctgggtrtagaattctcagctctaaatcatcatttttcagaagcttacaggccccttgcatagacacctaacatcagcaacaccaatgagaagccaaatgccagtgt

SEQ ID NO: 480210 - DNA, 201 bp, Homo sapiens
tccagcatgatttccacctcctaggtgtggcattcagtactgtttacaagctgggcagaaacaagccctgcaaggccctgccccaacccctgctcccacccagctccctgacccctgttcccacccagctctctagtggctgctgctctccgcgctcccatgcactgcccagtgtacctgcccagcccatcaccctctcct

SEQ ID NO: 480211 - DNA, 201 bp, Homo sapiens
cagcatgatttccacctcctaggtgtggcattcagtactgtttacaagctgggcagaaacaagccctgcaaggccctgccccaacccctgctcccacccagctccctgacccctgttcccacccagctctctagtggctgctgctctccgcgctcccatgcactgcccagtgtacctgcccagcccatcaccctctcctcc

SEQ ID NO: 480212 - DNA, 201 bp, Homo sapiens; identical to SEQ ID NO: 458787

SEQ ID NO: 480213 - DNA, 201 bp, Homo sapiens
gcatgatttccacctcctaggtgtggcattcagtactgtttacaagctgggcagaaacaagccctgcaaggccctgccccaacccctgctcccacccagctccctgacccctgttcccacccagctctctagtggctgctgctctccgcgctcccatgcactgcccagtgtacctgcccagcccatcaccctctcctccct

SEQ ID NO: 480214 - DNA, 201 bp, Homo sapiens
ggcacggtcacagctgcactcatgggcgagcaggtctgtgagccaagaggtggtgcccctcccatggccacgcagcggtcgggggccacactggtggttcmagcctgtccctgctgcaccagcaggcacactcgagccacaggcccactgcccctcacatgcagagggtagctggtctcccccaagtcggcttggcttctg

SEQ ID NO: 480215 - DNA, 201 bp, Homo sapiens
ccctccgcaggacgctgtgacccccagacagacggtccctccgcaggacgctgtgacccccagacagacggtccctccgcaggaccctgtgacccccagayagacggtccctcctcaggaccctgtgacccccagacagacggtccctccgcaggacgctgtgacccccagacagacggtcactcctcaggaccctatggc

SEQ ID NO: 480216 - DNA, 201 bp, Homo sapiens
ccatgatcatggtatacctctctgtcttggtccattctggtagctataacaaagcatctttgactggatggcttataaacaacagaaatctatttcttgcmgttctggaggttggaaagtccaaggtcaaggtgtctggtgaaggctcaggctccccagcctctggctgcagaacttataccctttgcctgttgttctcag

SEQ ID NO: 480217 - DNA, 201 bp, Homo sapiens
ctgttctggaggggatggaggctggaggctgagcctaagtacagttgggttagtgacaaattagatggctcatgtggttatttaaagccttctctctaggraactttcaactaccatatattcaagatcttgcagttgatagttttaaactggaatctcagggactcgggctgactgtcacctatacaagctactcaggga

SEQ ID NO: 480218 - DNA, 201 bp, Homo sapiens
cagcttcaccaacttcttttgaatgatactagatttttaaaataaatcagatgcaaaaacagtatggctcctggtaacatactactctaaaataatggackagagccaggaaaaggagatttttttttctattttgccgagttatgtcttaattattatgttagcagtctttcctgagaagctaaaaggtaattagcaact

SEQ ID NO: 480219 - DNA, 201 bp, Homo sapiens
taaatatataaagcaaacaaaattagcagcttcaccaacttcttttgaatgatactagatttttaaaataaatcagatgcaaaaacagtatggctcctggyaacatactactctaaaataatggactagagccaggaaaaggagatttttttttctattttgccgagttatgtcttaattattatgttagcagtctttcct

SEQ ID NO: 480220 - DNA, 201 bp, Homo sapiens
aatgttttgcggaaaaaccgtctttatttcgggatctctggagtggcggcggcgtcactccgccgccggcgagtggcctacatcttctccttctgttccakctcattctctccttccacgaatacaagacgctggaaggtgcaggaagagagaggaatggtgacaaacggagcagtctctgtcccacgtgtcagctttggg

SEQ ID NO: 480221 - DNA, 201 bp, Homo sapiens; identical to SEQ ID NO: 458786

SEQ ID NO: 480222 - DNA, 201 bp, Homo sapiens
actttgggtattgtttgcctcttgacagtatgcatgcattcttcctgtgaggaaaccaagtcattattccagagcggaatttttccaggaaggagccaagygctcagatggctctggctaggggaggggatgaagtaaatcgcagtctgcaaattagagctcagtgcattaatatttcctaaaaatatctctcatttgcat

SEQ ID NO: 480223 - DNA, 201 bp, Homo sapiens
cccgtttcacatgtgggttcccaagccactggaagtgtatttttgtgtgtggcgtgaggcagacctctcatcttttctccaagcctatccggcgtgccccytaccctgttattcagagtccacttgtgctccagaggtttgaggcaccccctttatctcatgctgacctcccaggtgcacgggcctccttctgggcttcct

SEQ ID NO: 480224 - DNA, 201 bp, Homo sapiens
ttcacgtttagccctacattgatttaaatattctccagttgctctcattatcttctagtcttctgtgtagatattacatacatagtccattagatttattygcagacatttggtgcattggatgatcatttaaaatgttccctatttttattttctgaccactggtttctggtttatttagaatgcagttgatctttgtgt

SEQ ID NO: 480225 - DNA, 201 bp, Homo sapiens
tttccacctcctaggtgtggcattcagtactgtttacaagctgggcagaaacaagccctgcaaggccctgccccaacccctgctcccacccagctccctgacccctgttcccacccagctctctagtggctgctgctctccgcgctcccatgcactgcccagtgtacctgcccagcccatcaccctctcctccctgtaccc

SEQ ID NO: 480226 - DNA, 201 bp, Homo sapiens
ttccacctcctaggtgtggcattcagtactgtttacaagctgggcagaaacaagccctgcaaggccctgccccaacccctgctcccacccagctccctgacccctgttcccacccagctctctagtggctgctgctctccgcgctcccatgcactgcccagtgtacctgcccagcccatcaccctctcctccctgtaccca

SEQ ID NO: 480227 - DNA, 201 bp, Homo sapiens
tccacctcctaggtgtggcattcagtactgtttacaagctgggcagaaacaagccctgcaaggccctgccccaacccctgctcccacccagctccctgacccctgttcccacccagctctctagtggctgctgctctccgcgctcccatgcactgcccagtgtacctgcccagcccatcaccctctcctccctgtacccag

SEQ ID NO: 480228 - DNA, 201 bp, Homo sapiens
ccacctcctaggtgtggcattcagtactgtttacaagctgggcagaaacaagccctgcaaggccctgccccaacccctgctcccacccagctccctgacccctgttcccacccagctctctagtggctgctgctctccgcgctcccatgcactgcccagtgtacctgcccagcccatcaccctctcctccctgtacccagc

SEQ ID NO: 480229 - DNA, 201 bp, Homo sapiens
acctcctaggtgtggcattcagtactgtttacaagctgggcagaaacaagccctgcaaggccctgccccaacccctgctcccacccagctccctgacccctgttcccacccagctctctagtggctgctgctctccgcgctcccatgcactgcccagtgtacctgcccagcccatcaccctctcctccctgtacccagccc

SEQ ID NO: 480230 - DNA, 201 bp, Homo sapiens
tgccttattgcattggctgggatctgtgatacagttttatagagagcatttgctgtgcccacatggcagagtacatagaagggtgacaccaggaggtaagytcagaggtcccaaaaactaagcatagtacagtcatcccctcttatctgtggggaatatgtttcaagacacctacttggtgcctgaagctgcagacagaca

SEQ ID NO: 480231 - DNA, 201 bp, Homo sapiens
cctcctaggtgtggcattcagtactgtttacaagctgggcagaaacaagccctgcaaggccctgccccaacccctgctcccacccagctccctgacccctgttcccacccagctctctagtggctgctgctctccgcgctcccatgcactgcccagtgtacctgcccagcccatcaccctctcctccctgtacccagccca

SEQ ID NO: 480232 - DNA, 201 bp, Homo sapiens
ctcctaggtgtggcattcagtactgtttacaagctgggcagaaacaagccctgcaaggccctgccccaacccctgctcccacccagctccctgacccctgttcccacccagctctctagtggctgctgctctccgcgctcccatgcactgcccagtgtacctgcccagcccatcaccctctcctccctgtacccagcccag

SEQ ID NO: 480233 - DNA, 201 bp, Homo sapiens
atttcttcatcgaatgggcagtctctggagggtccaattttccttctaggttttcctttcttaggacactgtccttgccaaccatttcctgccacggctgrtggtggccaagtcctcagggcctctctgaatgcccggctcctgttccactcacaatccccggtgcaggcctcgcctgggagcagcggcttctcagaacat

SEQ ID NO: 480234 - DNA, 201 bp, Homo sapiens
tttattcaaaccatggcattctacgcagtattaaaatgatccagctcttcacttcctgaccttaagaactgctaatgatataattgttacatgaaaaaaaygtgcacagtgcctcgcgtgtcacggggtcagatgtgcacagcacaacgtgcgtgcgtagtttggtctgtccacgtaggtacaggcatgagtcatcacctg

SEQ ID NO: 480235 - DNA, 201 bp, Homo sapiens
tctgggagcacccctctcaagagaaccccacagagtgtcctcccatcatcccccaagagcatcccccactcatggccttccctgtgcagagcccagcatcrcccagggaccccccaggcccccaggacactgcccccagcacacccagggctacagggctcctgcatgaggtggaccatcctggggcacagaaggtccctt

SEQ ID NO: 480236 - DNA, 201 bp, Homo sapiens
agttctttgcctttccattaaacttttaggatcagctggtcaatttctacaacaaagcctgctggaatttctattagaataatattgatatttcaggaagkatggacagcttcctagtactgaatcctccaatccatgatcatggtatacctctctgtcttggtccattctggtagctataacaaagcatctttgactgga

SEQ ID NO: 480237 - DNA, 201 bp, Homo sapiens
ctcccaccccagcctctgcagtagcttgagaccacaggtgtgcaacaccacacccagctaattttttcatttttactttttgtagagacagggtctccctrtgttgcccaggctggtgtcaaactcctgggtttaagtgatcttcccaccttggcctcccaaggtattgggattacaggtgtgagccactgcaccagggct

SEQ ID NO: 480238 - DNA, 201 bp, Homo sapiens
ctgagagtgagaggatgtgcgaccgtgactcccaccctggcaggacagagcaggacaggacagagcaggacaggacaggacaggacaggacagagcaggayagagcaggacaggacagagcaggatagagcaggacagcttgcatcttccaatgtggagctgtcaccttcacttttaggcaagagtgttccaggattggcc

SEQ ID NO: 480239 - DNA, 201 bp, Homo sapiens
gacccctgcggcccctccccgatggtcccttccctgcctcccagctactcaggccctgagagtgagaggatgtgcgaccgtgactcccaccctggcaggayagagcaggacaggacagagcaggacaggacaggacaggacaggacagagcaggatagagcaggacaggacagagcaggatagagcaggacagcttgcatc

SEQ ID NO: 480240 - DNA, 201 bp, Homo sapiens
ctttagagagtactgaggagcctgtgtgtcgggggcccgggccccagaggtttaggggaactgctgttttcctgtctatcagaagtctggggtcagcccckctttactcggtacgctcagcccccatctggcgtctcagatatgtctgccttatagacaatttcaaataagttgtccaattttaaataaatgagagtgttc

SEQ ID NO: 480241 - DNA, 201 bp, Homo sapiens
gttcctataaattcaggccccacttgttttgcaaccactggccttggtgacaaacagtcctgaaagctgccccgggggcagggcgcggcggcggtgaagcstgttggggggcggccccccaggaggcagggtccatgggctgcggctagcccatcctgaagggcacccctgactctgagcagggccgggaggtgtggctgc

SEQ ID NO: 480242 - DNA, 201 bp, Homo sapiens
tgaagcctatttgactatagtccttgtgtgcaactaaaaatgtagctttaaacaatcttgctttgttttaattctgcccaatctatttgagaaaggacacwcacaggtactttttagattgtagcctaaagtggattattgatttccttgtttctcaaacgtcaggaggagcataaaactgctaataagaggtgaccaata

SEQ ID NO: 480243 - DNA, 201 bp, Homo sapiens
aattctaagttcctataaattcaggccccacttgttttgcaaccactggccttggtgacaaacagtcctgaaagctgccccgggggcagggcgcggcggcrgtgaagcgtgttggggggcggccccccaggaggcagggtccatgggctgcggctagcccatcctgaagggcacccctgactctgagcagggccgggaggt

SEQ ID NO: 480244 - DNA, 201 bp, Homo sapiens
gagaaattctaagttcctataaattcaggccccacttgttttgcaaccactggccttggtgacaaacagtcctgaaagctgccccgggggcagggcgcggyggcggtgaagcgtgttggggggcggccccccaggaggcagggtccatgggctgcggctagcccatcctgaagggcacccctgactctgagcagggccggg

SEQ ID NO: 480245 - DNA, 201 bp, Homo sapiens
cctcccgagcatggaaccctcttgagaacaagtcctcctgagcactgagtcctcctgagcactgagccctccagagcagagagtcctcctgagcagagagycctcctgagcatggggtcctcctgggggtctcctgagtggctcccaatcatacacctgcctcgcacacaccagtgccaagggcctgcgtgcttggtgccc

SEQ ID NO: 480246 - DNA, 201 bp, Homo sapiens; identical to SEQ ID NO: 458782

SEQ ID NO: 480247 - DNA, 201 bp, Homo sapiens
tttaattttccagttgtttcttgctaatgtataggaaagcaatggatctggtaattgattgtataccctttggccttgctgtattcacttactaattctastgcttttttgtagcttctttgggattttctgcatctacatttataatcatattggttatgaatctacacagatttgctttttcctcttcaatctgtatgt

SEQ ID NO: 480248 - DNA, 201 bp, Homo sapiens; identical to SEQ ID NO: 458785

SEQ ID NO: 480249 - DNA, 201 bp, Homo sapiens
ttatatacgtatcattttgtttgtgaataatgactttttcattttttcctttctgatcattttatcctttattgctttcttcttggcttacctcaccagcygctgctgaaaagaagtgttagtggtgagcatccttatttttttcctgacctcaggggggacgctttcaatatttcactaataagtgtgagatctgtggta

SEQ ID NO: 480250 - DNA, 201 bp, Homo sapiens
ctgtgacccccagacagacggtccctccgcaggaccctgtgacccccagacagacggtccctcctcaggaccctgtgacccccagacagacggtccctcckcaggacgctgtgacccccagacagacggtcactcctcaggaccctatggcccccaggggcttctggggcccagggggagcagggccttgcttgggggttc

SEQ ID NO: 480251 - DNA, 201 bp, Homo sapiens
cacttaataatttcaatagttatctgtagattctattgggtttcttatatacgtatcattttgtttgtgaataatgactttttcattttttcctttctgaycattttatcctttattgctttcttcttggcttacctcaccagctgctgctgaaaagaagtgttagtggtgagcatccttatttttttcctgacctcaggg

SEQ ID NO: 480252 - DNA, 201 bp, Homo sapiens
ggacgctgtgacccccagacagacggtccctccgcaggaccctgtgacccccagacagacggtccctcctcaggaccctgtgacccccagacagacggtcmctccgcaggacgctgtgacccccagacagacggtcactcctcaggaccctatggcccccaggggcttctggggcccagggggagcagggccttgcttggg

SEQ ID NO: 480253 - DNA, 201 bp, Homo sapiens
tcttggttatacttggtattttgcatttccatttaaatctttgaattggcttataaatttcctcaaaatattctgctagaatttttattagaatttcattraagctatagatcaatttggcgagaacggatattctcacaatattgagtgctccagttcacgtttagccctacattgatttaaatattctccagttgctct

SEQ ID NO: 480254 - DNA, 201 bp, Homo sapiens
aagaagcacttataaactattaacctgtgattgtaggtaatgaaacaaccagagggctttataaaattaagatcaaattctaccacagaagcatttgaatygggctcactgcatgccaggcgctgctgtaagcactctacctgcatgttctcatttgatcctcagcaaccccaggaggctggcacggtcacagctgcactc

SEQ ID NO: 480255 - DNA, 201 bp, Homo sapiens
ctagcattagaggtgagcatagagagagaagggagtgtgggaggcgggaaggcccagcgaggcaggagagaaaagacggaagcgtgtttctctggaggccraggcagggggactgcttgaggccaggggttggaggcttcagtgagctaatacctcacacaggttgtattcttttgtgtcttgattatttcacttgatcat

SEQ ID NO: 480256 - DNA, 201 bp, Homo sapiens
tcccttccctgcctcccagctactcaggccctgagagtgagaggatgtgcgaccgtgactcccaccctggcaggacagagcaggacaggacagagcaggavaggacaggacaggacaggacagagcaggatagagcaggacaggacagagcaggatagagcaggacagcttgcatcttccaatgtggagctgtcaccttca

SEQ ID NO: 480257 - DNA, 201 bp, Homo sapiens
ccccagacagacggtccctccgcaggacgctgtgacccccagacagacggtccctccgcaggaccctgtgacccccagacagacggtccctcctcaggacmctgtgacccccagacagacggtccctccgcaggacgctgtgacccccagacagacggtcactcctcaggaccctatggcccccaggggcttctggggccc

SEQ ID NO: 480258 - DNA, 201 bp, Homo sapiens
gggcaggagagagaggacgaactgatggcctttcagcgccgtaggcagtgtcacgtgcataggtcaacacgtggccaggaagatgtctttgcttcagggcrttcatgttctagtggggagatggtgtcagggagcagtgcagtgtgttacctgagacaccgtccagggcaggaacagaggcgtgacagtcagtgcggacct

SEQ ID NO: 480259 - DNA, 201 bp, Homo sapiens
tcaggccctgagagtgagaggatgtgcgaccgtgactcccaccctggcaggacagagcaggacaggacagagcaggacaggacaggacaggacaggacagvgcaggatagagcaggacaggacagagcaggatagagcaggacagcttgcatcttccaatgtggagctgtcaccttcacttttaggcaagagtgttccagg

SEQ ID NO: 480260 - DNA, 201 bp, Homo sapiens
ctgtgacccccagacagacggtccctccgcaggacgctgtgacccccagacagacggtccctccgcaggaccctgtgacccccagacagacggtccctcckcaggaccctgtgacccccagacagacggtccctccgcaggacgctgtgacccccagacagacggtcactcctcaggaccctatggcccccaggggcttct

SEQ ID NO: 480261 - DNA, 201 bp, Homo sapiens; identical to SEQ ID NO: 458781

SEQ ID NO: 480262 - DNA, 201 bp, Homo sapiens
gagagtgagaggatgtgcgaccgtgactcccaccctggcaggacagagcaggacaggacagagcaggacaggacaggacaggacaggacagagcaggatasagcaggacaggacagagcaggatagagcaggacagcttgcatcttccaatgtggagctgtcaccttcacttttaggcaagagtgttccaggattggccct

SEQ ID NO: 480263 - DNA, 201 bp, Homo sapiens; identical to SEQ ID NO: 458783

SEQ ID NO: 480264 - DNA, 201 bp, Homo sapiens
actcccaccctggcaggacagagcaggacaggacagagcaggacaggacaggacaggacaggacagagcaggatagagcaggacaggacagagcaggataragcaggacagcttgcatcttccaatgtggagctgtcaccttcacttttaggcaagagtgttccaggattggccctctcaaaaacccaaataatatcaagt

SEQ ID NO: 480265 - DNA, 201 bp, Homo sapiens; identical to SEQ ID NO: 458788

SEQ ID NO: 480266 - DNA, 201 bp, Homo sapiens
cccccagacagacggtcactcctcaggacgctgtgacccccagacagacggtccctccgcaggacgctgtgacccccagacagacggtcactccgcaggaygctgtgacccccagacagacggtccctcctcaggaccctgtgacccccagacagacggtccctccgcaggacgctgtgacccccagacagacggtcactc

SEQ ID NO: 480267 - DNA, 201 bp, Homo sapiens; identical to SEQ ID NO: 458789

SEQ ID NO: 480268 - DNA, 201 bp, Homo sapiens
ctgtgacccccagacagacggtccctccgcaggacgctgtgacccccagacagacggtcactccgcaggacgctgtgacccccagacagacggtcactcckcaggacgctgtgacccccagacagacggtccctccgcaggacgctgtgacccccagacagacggtcactccgcaggacgctgtgacccccagacagacgg

SEQ ID NO: 480269 - DNA, 201 bp, Homo sapiens
tttttttttttttttgagacggagtttcactcttgttgcccaggctagagtgcagtggcgcgatctcagctcactgcaacctctgcctcccgggttcaagygattctcctgcctcagcctcccgagtagctgggactacaggcacacgccaccatacctggctaatttttgtatttttagtagagatagggctttgccatg

SEQ ID NO: 480270 - DNA, 201 bp, Homo sapiens
ccccagacagacggtccctccgcaggacgctgtgacccccagacagacggtcactccgcaggacgctgtgacccccagacagacggtcactccgcaggacsctgtgacccccagacagacggtccctccgcaggacgctgtgacccccagacagacggtcactccgcaggacgctgtgacccccagacagacggtccctcc

SEQ ID NO: 480271 - DNA, 201 bp, Homo sapiens
ggacgctgtgacccccagacagacggtcactccgcaggacgctgtgacccccagacagacggtccctccgcaggacgctgtgacccccagacagacggtcmctccgcaggacgctgtgacccccagacagacggtccctcctcaggaccctgtgacccccagacagacggtccctccgcaggacgctgtgacccccagaca

SEQ ID NO: 480272 - DNA, 201 bp, Homo sapiens
gaccctgtgacccccagacggtccctccgcaggacgctgtgacccccagacagacggtccctccgcaggacgctgtgacccccagacagacggtccctcckcaggaccctgtgacccccagacagacggtccctcctcaggaccctgtgacccccagacagacggtccctccgcaggacgctgtgacccccagacagacgg

SEQ ID NO: 480273 - DNA, 201 bp, Homo sapiens
cagacggtccctccgcaggacgctgtgacccccagacagacggtccctccgcaggaccctgtgacccccagacagacggtccctcctcaggaccctgtgacccccagacagacggtccctccgcaggacgctgtgacccccagacagacggtcactcctcaggaccctatggcccccaggggcttctggggcccaggggga

SEQ ID NO: 480274 - DNA, 201 bp, Homo sapiens; identical to SEQ ID NO: 458780

SEQ ID NO: 480275 - DNA, 201 bp, Homo sapiens
gcaaaactgcagctgtgagcaatcttctgtttttggaaagtggtagcaagttgatacccactgatcctcaccttgaatttttcagcgcacagcgtgttcaygcagatagaaccagcaaaacgtgatgctagactggcgtgggggcatgggagaaaggcccagagatggtccaaggacccgcctgtgtgatggccagcaggt

SEQ ID NO: 480276 - DNA, 201 bp, Homo sapiens
ctcctgtttagtccgcactgacactagcagctgctccagttaccaacgtttaggtgatggtggttttgtttgattttttttgtttgtttgtttgttttagkttgatagtaaaagcatttttttatagcatatgcaatagacctactcttcgatttatctatatttactgactgttccacagttataccaagaaatgtttac

SEQ ID NO: 480277 - DNA, 201 bp, Homo sapiens
catacaagtataagcccacctatttttgttttctagaattccacttctatttttggtggaatatgaaagtttgactatttcccaaagtggaaaaacacatstttttccttgactgtctggtaatgtctttgttgctcattaaataagtgcatgcagtctccatgggcgcttggtgaacccccttcccgatcccctgagcat

SEQ ID NO: 480278 - DNA, 201 bp, Homo sapiens
tctctccgctagatgacttagcttttgatatgtaccaagatccagaagttgcacagatcatacgaaaattagatgaaagaaaacgggaagctgtccaaaargaacgctatgattatgccaagaaactaaaacaagccattgctgatttgcaaaaggtattgcctttggagaaaacagttcctaatttatgcctgtaatagg

SEQ ID NO: 480279 - DNA, 201 bp, Homo sapiens
gaaaagctcgagagaacaggaatcatgtcgcaggcatctttgtaccatcagtacctacagactgttctgttcaaagtgggtgtgtggttaatgcttcttamctgcaagaatgagatgctagcatctagaaaccctctgcagaagttgttcagaaaatataaaaatgtgtttgctttcagattttgccagtttccacaagaa

SEQ ID NO: 480280 - DNA, 201 bp, Homo sapiens
acctggtgaaaccccttctgtactaaaaatccaaaaattagccgggtgtggtggcgcgtgcctgtcgtcccagctacttgggaggctgaggcaggagaatygaacccgggaggcagagttttcagtgagccgagatcacgccactgcactccagcctggcgacagagtgagactccatcttaaaaaaaaaaaaaagaatcc

SEQ ID NO: 480281 - DNA, 201 bp, Homo sapiens
taaaaacatacagaaaatgatatcaaaagagaaaatctgagggtaaagaaataaaaaatataactgtcttaatagaaatattttcattctttcaccaaatrtgcctcctctaggctagatattatgggaaatattgagatagagataaatgtatgagttttggggcacacagttatgcaccataatttgaaaatctttaaa

SEQ ID NO: 480282 - DNA, 201 bp, Homo sapiens
attctcagggattcaccatcacactttccttatgctctaaaaggtcagttttgtcttagacataaacttcagttaaaatctacagttgggtttttccaatgttttttttatccaacatatgccattaattttttaaataaataaaaacatacagaaaatgatatcaaaagagaaaatctgagggtaaagaaataaaaaata

SEQ ID NO: 480283 - DNA, 201 bp, Homo sapiens
tagttcaatgctaccacatcttcagtttgtgttttcactttgcatgaaacctgatgaggttgagaattactgttttttctaatgctgaatgggccttaagmatggacattgcacagttgggcttctaacagcccactgaagcagggctgttagatactcagtatgaagggaagatttgggcttacccattgaagcagggat

SEQ ID NO: 480284 - DNA, 201 bp, Homo sapiens
agaggatgcactgcttgccttgtctaagaagttaatggaaatgcctgttggaaccccaaaagaagatttaaagaacacactgagagcatccgtctttctcrttagaagagccataaaggacattgtgacctccgtgagtgccctcagctggcgctggctccagcgtgcatggatgagatcatgcgccgtaccacagaagac

SEQ ID NO: 480285 - DNA, 201 bp, Homo sapiens
agaccagcctggccaagatggtgaaaccccatctctactaaaaatacaaaaattagctgggcatggtgtcaggcacctgtaatcccagctagctggaagaytgaggcaggagaattgcttgaacccgcagggggacagaggttgcagtgagccgagccactgcactccagcctgggcgacagagtgagactttgtctcaaa

SEQ ID NO: 480286 - DNA, 201 bp, Homo sapiens
ggatggtctcgatctcctgatcttgtgatccactcaccttggcctcccaaagtgctgggattacaggcatgagccactgcgcccggcctttttttttttttatgaaacagagtgtcactctgtcacccagggtggagtacagtggcgtgatcataactcactatagccttgaactcctggccttggcctcccaaagtgctg

SEQ ID NO: 480287 - DNA, 201 bp, Homo sapiens
gggagccagagcccttaaccgagaaggccttgagagaagccagctctgccatcgatgtgttgggagaaaccttggtaaaaaaaaaaaaaaaaaaaaaaaamcggggtggcagaggggagggtagtctatatggtacgcacacctctgtgtacttacacataaaggagggaaaacgcccacggctttgcatttgtaatattg

SEQ ID NO: 480288 - DNA, 201 bp, Homo sapiens
tccctccattttgacttattcaaaagagcatccccgtccagggcaacatggcaagaccccatccctttaaaagcaaaataaagcatccaagcctgtcttcrtgttctggttccttagtaagcaggctaataatcagaatcgtgtgaccaaaatccttctccacctgcatactggctgtgcagtgcgaaggctccacgggtg

SEQ ID NO: 480289 - DNA, 201 bp, Homo sapiens
accaactgtaactcaatagaatcactaagaaatgaggttctctagcaagagctatactgtgcaactgatcttacatgaagggtctgggaaatctgcctttscttgggtcattgtctctggtctccagcagtgttagcttttccatggtctgcaaagccaggcgtttgtagaggcctagttcaatgctaccacatcttcagt

SEQ ID NO: 480290 - DNA, 201 bp, Homo sapiens
agcatatgtcctctatatgcaaggtgctgtgtttagaaagcagttttcagtttgccattttcagcctttcagacgagatgtcattttcgatataatgttcrtatgtgttactgatagtaaatgccatgtttcctcttggtggaattgcaccgtagtaactcatccgtgttcatcacttttctcttaggtttttcaggcttc

SEQ ID NO: 480291 - DNA, 201 bp, Homo sapiens
tcagcattctgcagtagacccgttactccctgccacagatcctcatccaaagatcaatgtaggtaattctgtttcagattggcgttcaatttatttgggtrtttgtaaaggacatgtgttgtgccaggtgctgttcccatgcatggggtgcatgagtgctccccagccagacccacctctgttccattctaggagccatag

SEQ ID NO: 480292 - DNA, 201 bp, Homo sapiens
aaaagcaaaataaagcatccaagcctgtcttcgtgttctggttccttagtaagcaggctaataatcagaatcgtgtgaccaaaatccttctccacctgcawactggctgtgcagtgcgaaggctccacgggtggcctaggattcacactcccgtcctccgctctttctacatcactgactcaagtgtttagaatcaggaag

SEQ ID NO: 480293 - DNA, 201 bp, Homo sapiens
aggactttcctatcgtgctttaacacatggcacacccagcctcctctgccacctgcaagggaggcccagcccgggccctgcagagcaaactgaggcagttycagatgagagggaaagtgcacacatcacagggactggggaaattcagaatttcctcgtgacgtgggagcggaacggccatcagtggaactagatccttac

SEQ ID NO: 480294 - DNA, 201 bp, Homo sapiens
agcattaatgagcctacctgtccaaaacactcagtaccatgcctagtgtgcagcaactggtcagtcagctttgcttgttgggatgacacaacatcactttsctttgtacacacagtgaatagcagtgccagattttgaataaaagtccacttgggtccagcccaggtgctttctccacaccaccgtgctcctgcaggggca

SEQ ID NO: 480295 - DNA, 201 bp, Homo sapiens
gagcccagcacgccagcctgggcatggcgttctcgcgacagcagcagagggcaacagcaagacaagcccaggcgcatgagttcatttcagcctgccctgcsacgtgtctgccactgtcccattggccaaagcaagccacagtcacccagattcaagggatggagagggacctgccacctctgtgctggggagggaggaatt

SEQ ID NO: 480296 - DNA, 201 bp, Homo sapiens
gggttcaaatccgggcaccaccattccagctctgtgatcacagactaattcttatcagctttatgcctcagttttccatcagctttcaaatgggggtaaamagagtaagcattaatgagcctacctgtccaaaacactcagtaccatgcctagtgtgcagcaactggtcagtcagctttgcttgttgggatgacacaacat

SEQ ID NO: 480297 - DNA, 201 bp, Homo sapiens
tggggtccgcagccggagactgattgagaatggtcttggaggcagctgcggcacctcagctttgctttctgtgtctgagcccagcacgccagcctgggcayggcgttctcgcgacagcagcagagggcaacagcaagacaagcccaggcgcatgagttcatttcagcctgccctgcgacgtgtctgccactgtcccattgg

SEQ ID NO: 480298 - DNA, 201 bp, Homo sapiens
aacatatttcccataaggtgctctgcctctgattttagaactcatgcaaatggggcactcagcccacgttacagattaggaaatgaaggttctgagatacrgaatagtgattgagagtgcacactctcaaggccaggcatggtggctcacgcctgtaatcccatcactttgggaggccaaggctggaggattgtttgagcc

SEQ ID NO: 480299 - DNA, 201 bp, Homo sapiens
cagaaaccctcaggactctcccttgtcacggtcactgagcttgcgcaactagcaactcagcccgtcttgtttctcccgtgcccccacgtgctcccctctcktgtaatgttgaagccaacccagacagcacgttgttgcatctgtaaatgttcccgtcggagctttcggaatcgggacttctttacacagccacagcagcag

SEQ ID NO: 480300 - DNA, 201 bp, Homo sapiens
ctaataaaacccagccctatttggttaaacgattctctttcctacctgattccaagctctcctccctgccccagtgcactacgcagtgactcagcaggctwagtggggacggccgcctcgtacacgcccaccctccacttccccacgtgctcggctcctctggcattggaggcgacgaggaggaacatgggcgtgcaaggc

SEQ ID NO: 480301 - DNA, 201 bp, Homo sapiens
cgggtgacggccatcagcatgggcctgggacgttgttgctgggtgtctgtggccacaggttctgcacctggtccgtgggtaggagtgcccctcctaatgcrggtcctgtgcttgctctgcagggaaaagctcagctgtggccgcatcaggccccttggggtcaaaggccggaagcaagatccccaccccgaagggcggact

SEQ ID NO: 480302 - DNA, 201 bp, Homo sapiens
aggcccagagtctgcactctgagcgaatgcactggaggctcagatgccctgaagtgcagtttggtccatggtcaagagcgtgagctttggagtcagaaagkcctgcttgcaattaagagctttgtgacctgaggcccgttacttctctgagacccgttttctcatgcaggaaatgctctgtgaaccatgatggggcaggat

SEQ ID NO: 480303 - DNA, 201 bp, Homo sapiens
acactgcggtcccttttgcctaataaaacccagccctatttggttaaacgattctctttcctacctgattccaagctctcctccctgccccagtgcactaygcagtgactcagcaggctaagtggggacggccgcctcgtacacgcccaccctccacttccccacgtgctcggctcctctggcattggaggcgacgaggag

SEQ ID NO: 480304 - DNA, 201 bp, Homo sapiens
gatgttttgcccccaaaggcctctcgagagaagttgattgaccactaccttgggcacaacagcgaggaccctgctctagaaggaacgtacgccaggtaagwgtcctgctccccatcaatgaacttcttttactttcctcagaatcctgaaagggtcagtcatttccaaaggattctggacttagagcctctaaattcagtt

SEQ ID NO: 480305 - DNA, 201 bp, Homo sapiens
cgaggcccagagtctgcactctgagcgaatgcactggaggctcagatgccctgaagtgcagtttggtccatggtcaagagcgtgagctttggagtcagaarggcctgcttgcaattaagagctttgtgacctgaggcccgttacttctctgagacccgttttctcatgcaggaaatgctctgtgaaccatgatggggcagg

SEQ ID NO: 480306 - DNA, 201 bp, Homo sapiens
ttgatttatcttatgaaaaactgcaggtttcacatcagaccatttactagctgccaagagtatgattcctatagggttacaggcagatcaagtcaaatttyaattcccagcttcagctccaacaagaaaagctcgagagaacaggaatcatgtcgcaggcatctttgtaccatcagtacctacagactgttctgttcaaag

SEQ ID NO: 480307 - DNA, 201 bp, Homo sapiens
gagccgagattgcgccattgcactccagcctaggcaacagagtgagactccgcctccgaaaaaagaaaagaagaaaaaaatactgtgttgttataaaatayggcgcctggactccatcttgggcccactggtcacatttcttagggtggggcctggtcatccatttgtctttgtttttgtttttctccttgttctgcagtt

SEQ ID NO: 480308 - DNA, 201 bp, Homo sapiens
cggcttacgatgagacggtagatccgtgaggttttatgtttgaagtatttcataatacttaatacggatgttttctcttttatttttcacatgtttataaygtaccttttttgtaagctggaagaaattagttttattttaagaatcagtaacaagagcccctcccaactttagttttcagtgagtgccctggagcataga

SEQ ID NO: 480309 - DNA, 201 bp, Homo sapiens
agtggctcaggcctataatcccaacactttgggaggctgagactggtggatcacttgaggtcaggagtttgagaccagcctggccaacatgatgaaaaccygtctatactaaaaaatacaaaaactagccaggtgtggtgccacacacctataatcctagctactcaggaggctgaggcaggagaatcgcctgaacccggg

SEQ ID NO: 480310 - DNA, 201 bp, Homo sapiens
tgggtgcagtggctcacacctgtaatctcagcactttgggagtccgagatgggtgggtcatctgacgtcaggagttccagaccaacctggctaacatggtraaactccatctctactaaaaatacaaaaaattagccaggcatgctggctcacgcctgtactcccagctgtttgggaggctgaggcatgagaattgcttga

SEQ ID NO: 480311 - DNA, 201 bp, Homo sapiens
gctgtgagtgcttaaagggggcctattcctatgccccacttgaattcattataatacagattcaccaagtacacttttacgacaagtgttttcattaaaaygtacctgtctcgaagggtgttcaagtcgccgtaagcagctggcttgtttaatggggttgatacagcagctgggacacttccatcctcatcctctcgttgc

SEQ ID NO: 480312 - DNA, 201 bp, Homo sapiens
cacaaagaactggggtgtgtaaagaatcggggtgtgtaaatgcatgtcatggaagctccatgtgggaacggcttctgtccattcagcaagtatcactgcaygcctgctgcacctcagccgtctcccagctgaatggaaaacacgctacctttttacttgtataatcgttttagagctcacatcaaactgcttactaaaatt

SEQ ID NO: 480313 - DNA, 201 bp, Homo sapiens
ctaaaacaaaacccagaaatgtgctttcgtgatgaaaacatatcttcaacaggctctcactcactcacactgcagccctttgcccctgacctcactgtttytgtgtcttaggaaaaagaaagtgatgctgtgaagccaaagaatcagggtatgtaaagaattggggtgcacaaagaactggggtgtgtaaagaatcggggt

SEQ ID NO: 480314 - DNA, 201 bp, Homo sapiens
tgggatacagcatgaaatggttttattttgttctggtcattgcctttatccagataatgagaccctcagtgacatcttgcccagattctgtaacactgcgrtcccttttgcctaataaaacccagccctatttggttaaacgattctctttcctacctgattccaagctctcctccctgccccagtgcactacgcagtgac

SEQ ID NO: 480315 - DNA, 201 bp, Homo sapiens
actgaaagacaatgctggggatgaaaaatcattgaccattattcttcaaagtgagtggaaggcaatgtccctgcagggtttgagcggaagagtgggcatgrcctggcgggccctatgccagccagttttgctgctctgttgagagcagcctgtgggacagagaggtcgggtagtagcagagagctaagtggcgagaagtgg

SEQ ID NO: 480316 - DNA, 201 bp, Homo sapiens
cctgtttctctgtccctgtatttcctgtaaacaggaggtgggatctctgggcctcatcaggtgtgcacaggctcggtgtgagtgtggccgcttcacaggcratgctggtgtgtcccccgggaggcgcgtgatatgtgtgacggtggcagctgctgaggctcaaggcctaacccaccgactcaggaggggcctcattctgtc

SEQ ID NO: 480317 - DNA, 201 bp, Homo sapiens
aaccccgtctctactaaaaatacagaattagccaggcgtggtggtgtatgcctgtaatcccagctacacgggaggctgaggcaggagaatcacttgaaccygggaggcagaggttgcggtgagccgagatcacaccatggcactccagcctgggcaacaggagcgaaactccatctcaaaaaatatatatatccctaagac

SEQ ID NO: 480318 - DNA, 201 bp, Homo sapiens
gtccctggtgaagatgaggtggagtgcctgtccttttgtctgcaggccttggctgtcctgcaaagcacctggtttctcaccggtttccctcgggttgtccrtctgtttttattgatttggggccgttctttatacacgtggatgtgagtggttggtcagtcgcatgaattgtgaccatctgctcccactccacagcatgca

SEQ ID NO: 480319 - DNA, 201 bp, Homo sapiens
ggggacagcgtctagtgagccctgtctgagcagtcgttccgtttacctacgtgttcacatgatttccttccgtacatttatgaatggtttatcgaggagcytcaactcactgaggcccagcctgtgtcactgggatacagcatgaaatggttttattttgttctggtcattgcctttatccagataatgagaccctcagtg

SEQ ID NO: 480320 - DNA, 201 bp, Homo sapiens
agcatccgtctttctcgttagaagagccataaaggacattgtgacctccgtgagtgccctcagctggcgctggctccagcgtgcatggatgagatcatgcrccgtaccacagaagaccagagcagcttgagagaggaccagttggtcattgacgtggtcaccaactgtaactcaatagaatcactaagaaatgaggttctc

SEQ ID NO: 480321 - DNA, 201 bp, Homo sapiens
agacggttcacgcgtgattcttaaaaattagctttgcatttgatgtgagttgatccaaatttgaaagaaaaagcaaatattttgtgcttcaggttggtgarcgccttgggaggtatgaggtagagaaacgctgtgccgtggagaaggaagactacgatctcgccaaggagaagaagcagcagatggagcagtatcgtgccg

SEQ ID NO: 480322 - DNA, 201 bp, Homo sapiens
tcacgttcaggtgtcagggtcagctacctcgttactaggaccctgagcccaatgggaaaataggaaaaccagctatcctgaaagtcataaccaacccatgrgcttattaaatgcccatacagcaacagcagccagacctttgctgagtgtggcccattccttccatttccctgtgctcactccctctccttgcaagacggt

SEQ ID NO: 480323 - DNA, 201 bp, Homo sapiens
aatatagttgatatgccataatttgtctcccagtttctaagattaccctaacaagctgttctaatggaaaaataattttcttaccaggcacggagaaaagyggctacagaagaagcagaaaaacaaaagaaagaagaaataaaagctttacaagggcagctggcagcactgaaagaaattcaggctgaagttcaggttgga

SEQ ID NO: 480324 - DNA, 201 bp, Homo sapiens
tcagactcacgttcaggtgtcagggtcagctacctcgttactaggaccctgagcccaatgggaaaataggaaaaccagctatcctgaaagtcataaccaamccatgggcttattaaatgcccatacagcaacagcagccagacctttgctgagtgtggcccattccttccatttccctgtgctcactccctctccttgcaa

SEQ ID NO: 480325 - DNA, 201 bp, Homo sapiens
ccaccactcaccttggcctcccaaagtgctgggattacgggcatgagccaccttgcccagccagtagaaattctaaaacaaaacccagaaatgtgctttcrtgatgaaaacatatcttcaacaggctctcactcactcacactgcagccctttgcccctgacctcactgtttttgtgtcttaggaaaaagaaagtgatgct

SEQ ID NO: 480326 - DNA, 201 bp, Homo sapiens
gtcccagctactcagaaggctgaggcgggagaatggcgtgaggcggagcttgcagcgagccaagatcgcaccactgcactccagcctgggcgacaagagcragactccgtctcaaaaaataaaaataaaaaaataacaccagcttctcagtctctccctcagatgcctcctttgtgtaatagaaaaatcacagtactcttc

SEQ ID NO: 480327 - DNA, 201 bp, Homo sapiens
aaataaaaaaataacaccagcttctcagtctctccctcagatgcctcctttgtgtaatagaaaaatcacagtactcttcccatccttcaagctggcaattrgatggaagcactgtggggaaggagcgctgagagtggatggctacctccctcctgccagcctctccacaaagaccgcagctggggctctgcccttactgaa

SEQ ID NO: 480328 - DNA, 201 bp, Homo sapiens
tataacattcacccacactcccttaagaagatgtgcaaatgtggaggagaaggaagagaaatgaggccccgtaactgtctaaccatactccctgatcacaygctgggctgcacattctcatcaagtttctgtgcagagattgtgagtgcagctttttttgcttttacagttgggctcctgtgctgaaagagtgtgtgtcta

SEQ ID NO: 480329 - DNA, 201 bp, Homo sapiens
acaaaaaattagccgggcgtggtggcgggcacctgtagtcccagctactcagaaggctgaggcgggagaatggcgtgaggcggagcttgcagcgagccaaratcgcaccactgcactccagcctgggcgacaagagcgagactccgtctcaaaaaataaaaataaaaaaataacaccagcttctcagtctctccctcagat

SEQ ID NO: 480330 - DNA, 201 bp, Homo sapiens
ggcccggctgctgaaagacctgggcactggcagctcgggcttcaccattgacaacgtgatgaaggtaagcggacctcgcgtgtgacacaccacgcggcccrgcactcaccacagtgcctggagcgtggcgagggtctcatcggcatttgttgaaggaatgactgaggcagtgatttcagaaaaatagccagtgtttcatcc

SEQ ID NO: 480331 - DNA, 201 bp, Homo sapiens
cctcgggtccctgaggagggtacaggggctcctttcattcagagcctcagattttactatcactcggacatcaggaccaaggatgtcagcatgcagtgtcrggcatctctttctgtttatatttttaaagaaaatatgttgaccctctttcccttataacattcacccacactcccttaagaagatgtgcaaatgtggagg

SEQ ID NO: 480332 - DNA, 201 bp, Homo sapiens
ctggctaacacggtgaaaccccgtctctactaaaaaatacaaaaaattagccgggcgtggtggcgggcacctgtagtcccagctactcagaaggctgaggygggagaatggcgtgaggcggagcttgcagcgagccaagatcgcaccactgcactccagcctgggcgacaagagcgagactccgtctcaaaaaataaaaat

SEQ ID NO: 480333 - DNA, 201 bp, Homo sapiens
tgggaggcagcctcgggtccctgaggagggtacaggggctcctttcattcagagcctcagattttactatcactcggacatcaggaccaaggatgtcagcrtgcagtgtcaggcatctctttctgtttatatttttaaagaaaatatgttgaccctctttcccttataacattcacccacactcccttaagaagatgtgca

SEQ ID NO: 480334 - DNA, 201 bp, Homo sapiens
acgcacaaaaaaaattttaaataaagaggaattccaaataatccttggctcttctctgacagcagcttcccaataaagaaaagatcaactttttaaacttyaatagaaatttcaaatttgtccgtgtttggtgtaatttcacttttacctgcatacagactgctcgcagaaagtgattaattcttgatccaggctcttcta

SEQ ID NO: 480335 - DNA, 201 bp, Homo sapiens
accacgcctggctaatttttttgtatttttagtagagacggggtttcaccatattggccaggctggtctcaaactcctgaccttgtgatccacccacctcsgcctcccaaagtgctggaattacaggcatgagccaccgcgcccggcccaatcatgtgtttttgttgaaatgatcctaccagtgattagtggctattgaga

SEQ ID NO: 480336 - DNA, 201 bp, Homo sapiens
gttgcagtgagccaaggtcatgccactgcactacagtctgggggacagagcaagactccatctcacacacgcacaaaaaaaattttaaataaagaggaatyccaaataatccttggctcttctctgacagcagcttcccaataaagaaaagatcaactttttaaactttaatagaaatttcaaatttgtccgtgtttggtg

SEQ ID NO: 480337 - DNA, 201 bp, Homo sapiens
ccaccctctcgctgccccagcctgtgctcccaggggcctaggctaccatggactgaagggcagtcccctcccacctggtgcccagggcttctgcttgcctygctgatgttgcatgggcagacttcaaaaaggatagttagaaaggtttgggttgatggagtttgcattaatgcaattagtgtataaatatgttttaattgc

SEQ ID NO: 480338 - DNA, 201 bp, Homo sapiens
ttgaacctgggaggtggaggttgcagtgagccaaggtcatgccactgcactacagtctgggggacagagcaagactccatctcacacacgcacaaaaaaawttttaaataaagaggaattccaaataatccttggctcttctctgacagcagcttcccaataaagaaaagatcaactttttaaactttaatagaaatttca

SEQ ID NO: 480339 - DNA, 201 bp, Homo sapiens
aggacctggccgcactgtacattaagccttcagggctgtctcaggccttccttagaatcagagaaggaagcgtcctgtttggagagagccagagagcaccrccagggaggcgctcgcgcaaggccacggtcagcacaggcacggtcccgctttccttagtgcttggagcaatttccataaaacattcaccagaaacctttt

SEQ ID NO: 480340 - DNA, 201 bp, Homo sapiens
aataaaagctttacaagggcagctggcagcactgaaagaaattcaggctgaagttcaggttggaagttaacacgtctttcacctgtgtgcttttagctgaratgtattttgctgtatagatccacatcatacttgacttatttttcatgggattatgcaaatgagcgtcttgattccttttggttttttaggttagttttg

SEQ ID NO: 480341 - DNA, 201 bp, Homo sapiens
tataatcccagcactttgggggctaaggcaggcagatcacttgaggtcaggagttcgagatgagcctggccaacatggtgaaaccctataaaaaattggcmgggcacagtggccggcacctatagtccagctactcaggaggctgaagcaggagaattgcttgaacccgggaggtggaggttgtggtgagccaatattgcg

SEQ ID NO: 480342 - DNA, 201 bp, Homo sapiens
ttgggcagatcacttgaggtcaggaattcaagaccagcctggccagcatggtaaaactccttctctaataaaaacacaaaaattagccaggcgtggtggcrcacacctgtagtcccagctacttgggaggctgaggcaggagaatcccttgaacctgggaggtggaggttgcagtgagccaaggtcatgccactgcactac

SEQ ID NO: 480343 - DNA, 201 bp, Homo sapiens
catgcagacggtcccacagctggtcataaaggaaagaagctggctgcccaggcagtcaggcctgcataagccccacattctgcagggcaagtgcatgtggygtggctcaggaagagcagggatgaagagagtgggaaccccacgaggaaccgtgggcagcaggctggcggggagcccgcggtgcctggcgcgttctgtctt

SEQ ID NO: 480344 - DNA, 201 bp, Homo sapiens
tgtcgcacgcctgtaatcccagcactttgggaggctgagttgggcagatcacttgaggtcaggaattcaagaccagcctggccagcatggtaaaactccttctctaataaaaacacaaaaattagccaggcgtggtggcgcacacctgtagtcccagctacttgggaggctgaggcaggagaatcccttgaacctgggagg

SEQ ID NO: 480345 - DNA, 201 bp, Homo sapiens
aaattgaggcaggaagatcgcttgagccgagatcatgccactgtattccagcctgggtgacagagtgagaccctgtctcaaaaaaaaaaaaaaaaaattayacatatttttctgctgctgttgccgcttcctctttttttttttttttagcagtgtaagaaccgggggtgaatccacttttggggagctaaagggccccgc

SEQ ID NO: 480346 - DNA, 201 bp, Homo sapiens
aaggtattgcctttggagaaaacagttcctaatttatgcctgtaataggttttatgtatacttagaataactacatggtaaaagaaaccagttactaaaakccgtgaagttagtgtgagttcaaagatctcagcaaaataaagttacggagacagataagcactttaaaaatgtaaatggaagcagaagctttacctcttc

SEQ ID NO: 480347 - DNA, 201 bp, Homo sapiens
tgcttgagatcaggagtttgaaaccggcctggggaacatgccaaaaccccatctctactaaaaatacaaaaattagctgggcatggtggtgcacgcttgtrgtctcaactactcaggaaattgaggcaggaagatcgcttgagccgagatcatgccactgtattccagcctgggtgacagagtgagaccctgtctcaaaaa

SEQ ID NO: 480348 - DNA, 201 bp, Homo sapiens
ttcttccttcccttcttgttcccaacatctgatttgaattgacatcctcttacaggtagtacctgtaaggctgtcaccaggcgtatctcatgtgtcatctkctttccctgtatctcattatctgcactgccttacacatcaccacacacccttcagcataagcagaaaacacactcactcattacctcacgggttccctgg

SEQ ID NO: 480349 - DNA, 201 bp, Homo sapiens
ttcccctggttatctccagaatgtgggagcctttgtgtttgcattcgagttgttacctttacttgtcctcccgtgcaatgcccatcatcccctctgatttmagttattgccattggtttcctactaggagcagtactcacattctcctgtaactgccttttcttccttcccttcttgttcccaacatctgatttgaattga

SEQ ID NO: 480350 - DNA, 201 bp, Homo sapiens
ggcatcttggaagaaccctggacagaggccgccatcctgccccacttccatctgccttcctccaccccagacagaggcgccgtcctgccccgcttccatcygccttcctccaggggctgcttttcctacagggcatcctgccccttttctacccaatagaagcagttttcactgcacatacatcttttcccctggttatct

SEQ ID NO: 480351 - DNA, 201 bp, Homo sapiens
gcaatgagtcagatgggcctcctggcccggctgctgaaagacctgggcactggcagctcgggcttcaccattgacaacgtgatgaaggtaagcggacctcrcgtgtgacacaccacgcggcccagcactcaccacagtgcctggagcgtggcgagggtctcatcggcatttgttgaaggaatgactgaggcagtgatttca

SEQ ID NO: 480352 - DNA, 201 bp, Homo sapiens
tcacctggcaatgagtcagatgggcctcctggcccggctgctgaaagacctgggcactggcagctcgggcttcaccattgacaacgtgatgaaggtaagcrgacctcgcgtgtgacacaccacgcggcccagcactcaccacagtgcctggagcgtggcgagggtctcatcggcatttgttgaaggaatgactgaggcagt

SEQ ID NO: 480353 - DNA, 201 bp, Homo sapiens
aagaaagaggaacagaaaaccagtttgcagaacctttccttcaggaaaagccttcatcatattctctaactatttctcctcagcattctgcagtagacccrttactccctgccacagatcctcatccaaagatcaatgtaggtaattctgtttcagattggcgttcaatttatttgggtatttgtaaaggacatgtgttgt

SEQ ID NO: 480354 - DNA, 201 bp, Homo sapiens
gatgaaagaaaacgggaagctgtccaaaaggaacgctatgattatgccaagaaactaaaacaagccattgctgatttgcaaaaggtattgcctttggagaraacagttcctaatttatgcctgtaataggttttatgtatacttagaataactacatggtaaaagaaaccagttactaaaagccgtgaagttagtgtgagt

SEQ ID NO: 480355 - DNA, 201 bp, Homo sapiens
gctgggtgtggtggctaacgcctgtaatctcaccactttgggaggccaaggcaggaggattgcttgagatcaggagtttgaaaccggcctggggaacatgycaaaaccccatctctactaaaaatacaaaaattagctgggcatggtggtgcacgcttgtagtctcaactactcaggaaattgaggcaggaagatcgcttg

SEQ ID NO: 480356 - DNA, 201 bp, Homo sapiens
tgttaacaattgtaggctgggtgtggtggctaacgcctgtaatctcaccactttgggaggccaaggcaggaggattgcttgagatcaggagtttgaaaccrgcctggggaacatgccaaaaccccatctctactaaaaatacaaaaattagctgggcatggtggtgcacgcttgtagtctcaactactcaggaaattgagg

SEQ ID NO: 480357 - DNA, 201 bp, Homo sapiens
cacaccacaatttttaccaatctctctctacccgttaaaaatattttttctcactgctaaatttggctaaaaaaaaaaatgggtatggggaaagttcgtcrtgttaacaattgtaggctgggtgtggtggctaacgcctgtaatctcaccactttgggaggccaaggcaggaggattgcttgagatcaggagtttgaaacc

SEQ ID NO: 480358 - DNA, 201 bp, Homo sapiens
ctacttgggaggctgaggcaggagaatgacttgaatccgggaggtgaaggttgtggtgagccgagattgtgccactgcactccaacctgggcgatagagcragactccatctcaaaaaaaaaaacacacaccacaatttttaccaatctctctctacccgttaaaaatattttttctcactgctaaatttggctaaaaaaa

SEQ ID NO: 480359 - DNA, 201 bp, Homo sapiens
caacatggtgaaatcctatctctgcaaaaaaacacaaaaattagcagggcatggtggctcacacctgtagtcccagctaccagggcagctaaggtggaggrtcccttgagcccgggaggtcaaggctgcagtgagccatgatcacaccactgcactccagcctgggtgacagacgagaccctgtctcaaaataagtaaata

SEQ ID NO: 480360 - DNA, 201 bp, Homo sapiens
ctttgggagtttttagctattatgatttgaacttttttttttttttttttttttgagacggagtttcactcttgactcttgttgcctaggctggagtgcartggtgcaatctcggctcactgcaacctctgtctcacaggttcaaacaattctcctgcctcagcctcctgagtagctgggattacaggcatgtgcctggct

SEQ ID NO: 480361 - DNA, 201 bp, Homo sapiens
ccatgctgaatctcacgtggatgtctcattatgaggctatgttaaaactttgggagtttttagctattatgatttgaacttttttttttttttttttttttgagacggagtttcactcttgactcttgttgcctaggctggagtgcaatggtgcaatctcggctcactgcaacctctgtctcacaggttcaaacaattctc

SEQ ID NO: 480362 - DNA, 201 bp, Homo sapiens
tcaccaactgggaactgagctgtgttaacttttcattgtctaatttcccaagatccttcaaagatgagctccatgctgaatctcacgtggatgtctcattwtgaggctatgttaaaactttgggagtttttagctattatgatttgaacttttttttttttttttttttttgagacggagtttcactcttgactcttgttg

SEQ ID NO: 480363 - DNA, 201 bp, Homo sapiens
aagtgactccccacctcaggtgagactcaccaactgggaactgagctgtgttaacttttcattgtctaatttcccaagatccttcaaagatgagctccatrctgaatctcacgtggatgtctcattatgaggctatgttaaaactttgggagtttttagctattatgatttgaacttttttttttttttttttttttgaga

SEQ ID NO: 480364 - DNA, 201 bp, Homo sapiens
ctaaaaaatttcatttcaaaacttgctcggtttcccagtttgtgccagctgccctcctgccccaaatgtgcctgtcttgaacctttgcatttttggaagcrgtgtggggttagtctacagtggttgggggtgcaggatggaaaagtgactccccacctcaggtgagactcaccaactgggaactgagctgtgttaactttt

SEQ ID NO: 480365 - DNA, 201 bp, Homo sapiens
acaggttcccgcattcagatcccggctgctccactttctgccagtgagacccttaggttcccaggctgcaaacggaataacgatagccgtgaggacacagygggtttatctatcaatagacaccaatgaaatcaatggaaaagacttattctaacttgttattagtcttagtgaatattataatttataagaaatatagtt

SEQ ID NO: 480366 - DNA, 201 bp, Homo sapiens
atcccagctctagcctatggcagactcttcagctgggctcctgaggcctggatgagagccacgcagcctcagagagctccctcctgtttggtgccttcctkccccggacctggaatcagccatctgggcacagaggcctggttcccattagcaggaatggatgtctcaggacagcgctgggggcctcatgcccactgctgc

SEQ ID NO: 480367 - DNA, 201 bp, Homo sapiens
gagccagagcccttaaccgagaaggccttgagagaagccagctctgccatcgatgtgttgggagaaaccttggtaaaaaaaaaaaaaaaaaaaaaaaaacrgggtggcagaggggagggtagtctatatggtacgcacacctctgtgtacttacacataaaggagggaaaacgcccacggctttgcatttgtaatattgtt

SEQ ID NO: 480368 - DNA, 201 bp, Homo sapiens
cagcccgtcttgtttctcccgtgcccccacgtgctcccctctcgtgtaatgttgaagccaacccagacagcacgttgttgcatctgtaaatgttcccgtcrgagctttcggaatcgggacttctttacacagccacagcagcagcctcagccttccagacgtcagtcacattgccgccatctcatcaggtcagaagcatct

SEQ ID NO: 480369 - DNA, 201 bp, Homo sapiens
gttgtataaattattctaatctgatgatactgatatttagcaaaataacatctttcagatcaggtaagtaagcgcagtaagcctgccagtgagagttgcastggagaatgtgacctatggagctccccagcactttcctctctccttcactcactgcaggcagagtccctgccctacgatgagcggcctcttccagctatt

SEQ ID NO: 480370 - DNA, 201 bp, Homo sapiens
gtctgagtctctctctctcagagtttgaaatgcatcacagagtacacagaaaagtgacagaaaccctcaggactctcccttgtcacggtcactgagcttgygcaactagcaactcagcccgtcttgtttctcccgtgcccccacgtgctcccctctcgtgtaatgttgaagccaacccagacagcacgttgttgcatctgt

SEQ ID NO: 480371 - DNA, 201 bp, Homo sapiens
cagtgactcagcaggctaagtggggacggccgcctcgtacacgcccaccctccacttccccacgtgctcggctcctctggcattggaggcgacgaggaggracatgggcgtgcaaggctccgtggcaattattctggccctgtccaacacgatgggctggcggtgccctctttatgccaggcagcgaatgctgagccctgg

SEQ ID NO: 480372 - DNA, 201 bp, Homo sapiens
gttgatcctgcataggggtagtctagctttaaaaaataaaacaataaacataaatgagcctattgagttcaatcagagtagggagcagttttattgaacarcacattttcaaattcttcagttgtgttttgtttttcagctacgtgtctctctgtgataatgaaaagacaggttgcaaagcccgggaactaaaatcagttt

SEQ ID NO: 480373 - DNA, 201 bp, Homo sapiens
gacagtggcccctgcccgatgctaagatgacaggaaaggaaggacgtggggtcttcagcaaagtatcacaagtgactccagacagtctgtgggcaaatgcygaagatagaagcctgtggcttacttcatgtgcaggcggcacagacctccctgggcaggggaggcgctcacaggctctgcaggctggctggagggcgctgc

SEQ ID NO: 480374 - DNA, 201 bp, Homo sapiens
agcaggggtctgatttctgacaccacaaatgggtcctccttgctctttgagctttgtagaaacggaaccatgtggcgtcatgttggatttcttgctttatrgtgtccactgcttgaatggaccacagcaccttcatccaccttccgctgtgcgccagggctgcgtccagtttgggaccatgataaacaatgttgccacagc

SEQ ID NO: 480375 - DNA, 201 bp, Homo sapiens
gtctccctagaccactatgcgtgaaaggcaggcactccttaaatattgataccttggggcccttaagcatttgagttcctgtggaaaatcctttggctccrtcctgcccactagtgccgcctcataagattgatttatcttatgaaaaactgcaggtttcacatcagaccatttactagctgccaagagtatgattcctat

SEQ ID NO: 480376 - DNA, 201 bp, Homo sapiens
ccatggccgatgcactgcccatgcaggcagcattaacacggtccagcctgtggctggagggcaggaggaggagcacacccacgggggcagcccagcgctcygccctctcctcccagactccccatgaccctgctcatgcctctcccaggcaggagcatccctctgcagaggtcctgtacgctcacagcacatgttccgtgt

SEQ ID NO: 480377 - DNA, 201 bp, Homo sapiens
agaaatgaagcaagagtcaagcagaaggggccagacagcgcctttgtcacccgcagagctgggattgcaggcgagccagcgtcctgatactgcccaggccrtggccgatgcactgcccatgcaggcagcattaacacggtccagcctgtggctggagggcaggaggaggagcacacccacgggggcagcccagcgctccgc

SEQ ID NO: 480378 - DNA, 201 bp, Homo sapiens
tgaaaattgaatgtaaatctcatttacaattaaaatgtattttccttttggagtttttgaggagatgcaacaaataagaccccctgtccctgcatttcccrgaagtgagttctgaatgaactgagaaatgaagcaagagtcaagcagaaggggccagacagcgcctttgtcacccgcagagctgggattgcaggcgagcca

SEQ ID NO: 480379 - DNA, 201 bp, Homo sapiens
catgtcatggaagctccatgtgggaacggcttctgtccattcagcaagtatcactgcacgcctgctgcacctcagccgtctcccagctgaatggaaaacaygctacctttttacttgtataatcgttttagagctcacatcaaactgcttactaaaattttgaaaataatttctataaaaagttatttaaattgttttaat

SEQ ID NO: 480380 - DNA, 201 bp, Homo sapiens
agagttttacagggttatacattgttaagggaccaagaatcaagtacaaaaaattaaaaaggaactgtaaaatcccttggtcattcataaataaatatctmaattaggaatactaattaattgaattttcactcatgagtatgttctgaatatttaatatttatttctattattttcatatgttaagatattccattaaat

SEQ ID NO: 480381 - DNA, 201 bp, Homo sapiens
atcaggccccttggggtcaaaggccggaagcaagatccccaccccgaagggcggactgagcaagagctccagcaggacgtacgccaagcgctgacgcggcrctcgggctccttggtctctgtgagggatggagcgggtctcctgattctacaccatctctccagaactctctggccttggtggccccatgctctggctgct

SEQ ID NO: 480382 - DNA, 201 bp, Homo sapiens
atacaacatatataatcaggtaagatgcatgcagcttcgcctttgattctgcccctaccttctttgtgggattatgtggtcacgtatcttttcttagatgmattttcaaggtgatcttataagagaggatctcttctgggagactgctgagctctctgagctgtgctgtctgatccagcagcctctgggcacacgtggcca

SEQ ID NO: 480383 - DNA, 201 bp, Homo sapiens
ggccgcatcaggccccttggggtcaaaggccggaagcaagatccccaccccgaagggcggactgagcaagagctccagcaggacgtacgccaagcgctgaygcggcgctcgggctccttggtctctgtgagggatggagcgggtctcctgattctacaccatctctccagaactctctggccttggtggccccatgctctg

SEQ ID NO: 480384 - DNA, 201 bp, Homo sapiens
aatcatactcttggccagacgcagtgactcatgcctgtaattgcagcactttgggaggccgaggcaggaggatcacttgatttcagaagttcaagaccagyctgggcaacatagtgagacctcatctctactaaaacttaaaaaaaaaacttagccagacatggtggtgagcacctgtaatcccagctactcaggaggctg

SEQ ID NO: 480385 - DNA, 201 bp, Homo sapiens
agacgagggagaaagacccaggcagtgggtctgtgctgcggggtgctgggggccatgggttgtgggggcctcgaggccagcgcagacctgcgccccacacrgggcctggtgaaggcctctcccaggagaatgacgggatgggatggatttttctctttttttgttggggtaaaatgcacagagtgtaaatcttaccatttt

SEQ ID NO: 480386 - DNA, 201 bp, Homo sapiens
gaaatacagcaggcagcaaagcaaagtcccaccctcatggagctggggctccagggaggagcagacgagggagaaagacccaggcagtgggtctgtgctgyggggtgctgggggccatgggttgtgggggcctcgaggccagcgcagacctgcgccccacacggggcctggtgaaggcctctcccaggagaatgacgggat

SEQ ID NO: 480387 - DNA, 201 bp, Homo sapiens
gagggcagagctcatgtcaagtgttcttaccacagatttttaaaagaagaaatgggtacgaatggggaaaaaagatcaaatgtggctgaatataggctgamcttcctatggcaaaaagtcaccgtgacatttccaccaaatgctggaacgtcagagtcacaatcagaaaaggacacaggaggcggaaggaggcaggcagac

SEQ ID NO: 480388 - DNA, 201 bp, Homo sapiens
gggagtttccgttccgcagacctgagttttcagccgtgccgggtgaatgagttctgggacctgctggcacctcaggcctgcagcccacgtggctgcacagygcacgcagagctattcagagggcagagctcatgtcaagtgttcttaccacagatttttaaaagaagaaatgggtacgaatggggaaaaaagatcaaatgt

SEQ ID NO: 480389 - DNA, 201 bp, Homo sapiens
agtttccttcagttgaaagaaaatttccttaaaaaaaagatataaaggtggcagaacacagggagtttccgttccgcagacctgagttttcagccgtgccrggtgaatgagttctgggacctgctggcacctcaggcctgcagcccacgtggctgcacagcgcacgcagagctattcagagggcagagctcatgtcaagtg

SEQ ID NO: 480390 - DNA, 201 bp, Homo sapiens
ggatgaaattgcactatagccacagcgttctgtttcttaaaaaagatccaaaacaagcgtgatgaaagtataacacggcttacgatgagacggtagatccrtgaggttttatgtttgaagtatttcataatacttaatacggatgttttctcttttatttttcacatgtttataatgtaccttttttgtaagctggaagaa

SEQ ID NO: 480391 - DNA, 201 bp, Homo sapiens
tcaacaaaaaaaaaaaaaataggaagctgaagagtagaccctactaggctcagccctggctcctgtagtcgggtgacggccatcagcatgggcctgggacrttgttgctgggtgtctgtggccacaggttctgcacctggtccgtgggtaggagtgcccctcctaatgcaggtcctgtgcttgctctgcagggaaaagctc

SEQ ID NO: 480392 - DNA, 201 bp, Homo sapiens
gcctcctggcccggctgctgaaagacctgggcactggcagctcgggcttcaccattgacaacgtgatgaaggtaagcggacctcgcgtgtgacacaccacrcggcccagcactcaccacagtgcctggagcgtggcgagggtctcatcggcatttgttgaaggaatgactgaggcagtgatttcagaaaaatagccagtgt

SEQ ID NO: 480393 - DNA, 201 bp, Homo sapiens
ctatgattatgccaagaaactaaaacaagccattgctgatttgcaaaaggtattgcctttggagaaaacagttcctaatttatgcctgtaataggttttaygtatacttagaataactacatggtaaaagaaaccagttactaaaagccgtgaagttagtgtgagttcaaagatctcagcaaaataaagttacggagacag

SEQ ID NO: 480394 - DNA, 201 bp, Homo sapiens
tgtctcatgctgacaagatgtgaccactgcaaacaggtcaggccagcggcacagcagccagctacttgcatgagcgggaacacctggctgttgaaaggccragtcaaaaagctgtcccaagtcttagtattttcagaggagaggttgcgagaaaagtaactgaagccaagcacacacctgcaaatgcgtgcgagtcattcc

SEQ ID NO: 480395 - DNA, 201 bp, Homo sapiens
aagaaattagttttattttaagaatcagtaacaagagcccctcccaactttagttttcagtgagtgccctggagcatagagtgtatgaggtccgcgagackgcggttcgaattattttggacatgtacagacagcaccaggcttccatcctggagtaccttcctccagacgacagcaacacacgcaggaacattctctaca

SEQ ID NO: 480396 - DNA, 201 bp, Homo sapiens
aaaatgtgtcatttttataatctgcataaaattgactagtgaataactttcagatgatttttaggagctgtagcatatgaaacttttctttaacagttttrgctgtctctccaaaagatgaggatcactgaaccttgctgacagctttatatgaaataaatcttgtagttaaggttttgtgttgttcctctttctctctga

SEQ ID NO: 480397 - DNA, 201 bp, Homo sapiens
tgccgcagtgagaaaaaaagaggaattgaaatgttttttaggctgagcgttatgtcgcacgcctgtaatcccagcactttgggaggctgagttgggcagaycacttgaggtcaggaattcaagaccagcctggccagcatggtaaaactccttctctaataaaaacacaaaaattagccaggcgtggtggcgcacacctgt

SEQ ID NO: 480398 - DNA, 201 bp, Homo sapiens
tttgtaccatcagtacctacagactgttctgttcaaagtgggtgtgtggttaatgcttcttacctgcaagaatgagatgctagcatctagaaaccctctgyagaagttgttcagaaaatataaaaatgtgtttgctttcagattttgccagtttccacaagaaattgtccttcaaatggtggagagatgtcgaataaggaa

SEQ ID NO: 480399 - DNA, 201 bp, Homo sapiens
tgctctcattgctccttgtcactatcaatctgtatttccctgtttttcccttcagtgtttagtttaagatcatgctgaattgtactaaactgcctccagcrttttccagtaaaaattaacaaattaccttggctttcataggaaatggccttgtttaaagaagttaagtctctccaaattattccatcctacctggtgcag

SEQ ID NO: 480400 - DNA, 201 bp, Homo sapiens
gggagccgttcttctgcggctcttgctggagcggccgccctcgttttcagcttacacagcgagtccttttgggtctcaggtagcgtgccaggtccgtctcrcctgattaacactctgtgtgcctcctctgctgcaggcatggaaagctcacctgatgggcccagccggctgcacgatgaacctgcgcaagacacacattct

SEQ ID NO: 480401 - DNA, 201 bp, Homo sapiens
tctctctgagacactaagcagatgttttgcccccaaaggcctctcgagagaagttgattgaccactaccttgggcacaacagcgaggaccctgctctagawggaacgtacgccaggtaagagtcctgctccccatcaatgaacttcttttactttcctcagaatcctgaaagggtcagtcatttccaaaggattctggact

SEQ ID NO: 480402 - DNA, 201 bp, Homo sapiens
agcgcattaaaaagggaaggtttcaggtaaacattctgtttctatgagcccttactctaagcctgtgggggtgtcatatgtactgggaacaaatactattyggttgaatataaatgtgttcctcttcagcctcccagcttctgggatatgaattagcttcataacactaattttatgatgaagtttccttcagttgaaaga

SEQ ID NO: 480403 - DNA, 201 bp, Homo sapiens
aggcaaaggagaaaaatcagcttgactataaaggtctgacttcagcgcattaaaaagggaaggtttcaggtaaacattctgtttctatgagcccttactctaagcctgtgggggtgtcatatgtactgggaacaaatactatttggttgaatataaatgtgttcctcttcagcctcccagcttctgggatatgaattagct

SEQ ID NO: 480404 - DNA, 201 bp, Homo sapiens
ggtggaattgggtggcagatactcttcctgcccctccatcctctgtcagaattgatgtgagctgctgctgaggtttagggagggaccaggggctgtgggcmcagagctgctctcctccacagctctccagccaccttcagaggcaaaggagaaaaatcagcttgactataaaggtctgacttcagcgcattaaaaagggaa

SEQ ID NO: 480405 - DNA, 201 bp, Homo sapiens
cctgatcaccctgtgttcacagcaggcagaagcccactggtatgggcctcccgccccttccacatccatgttgtgattggatccataagtttactttcttsaaagagttgataggatgtttaaaacatcaacacattgcttaaaatgatgaaaccaaccctcaaaaaacagtctcctaaccagccatcccctcctgtggga

SEQ ID NO: 480406 - DNA, 201 bp, Homo sapiens
tgtcctgccccacgcccggggttttatgaaggttaagtgcaaggactgggaaaagctgtgtgactggcacgtgcgggcctgtgctggacatggaatccggkcattgccgctgggggttctgtaccaaagtgggtagatggcaccccacgctgctgctgaatcaacaggagctgggactgggtaccacaggacatgatgttc

SEQ ID NO: 480407 - DNA, 201 bp, Homo sapiens
tgagcggcctcttccagctattcgtaagcattatggggaggcagtggtggagccggaaatgagtaatgcagacatcagcgatgctcggaggggaggcatgwtaggggagccagagcccttaaccgagaaggccttgagagaagccagctctgccatcgatgtgttgggagaaaccttggtaaaaaaaaaaaaaaaaaaaaa

SEQ ID NO: 480408 - DNA, 201 bp, Homo sapiens
gccgcctcataagattgatttatcttatgaaaaactgcaggtttcacatcagaccatttactagctgccaagagtatgattcctatagggttacaggcagrtcaagtcaaattttaattcccagcttcagctccaacaagaaaagctcgagagaacaggaatcatgtcgcaggcatctttgtaccatcagtacctacagac

SEQ ID NO: 480409 - DNA, 201 bp, Homo sapiens
acaagagcccctcccaactttagttttcagtgagtgccctggagcatagagtgtatgaggtccgcgagacggcggttcgaattattttggacatgtacagrcagcaccaggcttccatcctggagtaccttcctccagacgacagcaacacacgcaggaacattctctacaaaacaatttttgagggatttgctaaaatag

SEQ ID NO: 480410 - DNA, 201 bp, Homo sapiens
atagacaccaatgaaatcaatggaaaagacttattctaacttgttattagtcttagtgaatattataatttataagaaatatagttgatatgccataattwgtctcccagtttctaagattaccctaacaagctgttctaatggaaaaataattttcttaccaggcacggagaaaagcggctacagaagaagcagaaaaac

SEQ ID NO: 480411 - DNA, 201 bp, Homo sapiens
agacacacattctgcagaaggccccggcactgcagccaggtgagggacagcgccgctgagcaggtgtagtctgcatccctccattttgacttattcaaaaragcatccccgtccagggcaacatggcaagaccccatccctttaaaagcaaaataaagcatccaagcctgtcttcgtgttctggttccttagtaagcaggc

SEQ ID NO: 480412 - DNA, 201 bp, Homo sapiens
tcagtgatgaaagcaatactgtaagtttggaaagttttaattcctaaggaagtaaatctatttataatgggagggagtcatttattttcacccaaaaaatrtgtcatttttataatctgcataaaattgactagtgaataactttcagatgatttttaggagctgtagcatatgaaacttttctttaacagttttagctgt

SEQ ID NO: 480413 - DNA, 201 bp, Homo sapiens
tagctggaagactgaggcaggagaattgcttgaacccgcagggggacagaggttgcagtgagccgagccactgcactccagcctgggcgacagagtgagastttgtctcaaaataaaaagaaatgagtagggttttccctcgttctcagctttaaaatatttctcttggagaatttaatactttttatattttaacatagt

SEQ ID NO: 480414 - DNA, 201 bp, Homo sapiens
tgagacactaagcagatgttttgcccccaaaggcctctcgagagaagttgattgaccactaccttgggcacaacagcgaggaccctgctctagaaggaacrtacgccaggtaagagtcctgctccccatcaatgaacttcttttactttcctcagaatcctgaaagggtcagtcatttccaaaggattctggacttagagc

SEQ ID NO: 480415 - DNA, 201 bp, Homo sapiens
aaaattgactagtgaataactttcagatgatttttaggagctgtagcatatgaaacttttctttaacagttttagctgtctctccaaaagatgaggatcaytgaaccttgctgacagctttatatgaaataaatcttgtagttaaggttttgtgttgttcctctttctctctgagacactaagcagatgttttgcccccaa

SEQ ID NO: 480416 - DNA, 201 bp, Homo sapiens
taatacttaatacggatgttttctcttttatttttcacatgtttataatgtaccttttttgtaagctggaagaaattagttttattttaagaatcagtaamaagagcccctcccaactttagttttcagtgagtgccctggagcatagagtgtatgaggtccgcgagacggcggttcgaattattttggacatgtacagac

SEQ ID NO: 480417 - DNA, 201 bp, Homo sapiens
atgaagggaagatggggagtgatttctgacagagtgaagtaagagcatatgtcctctatatgcaaggtgctgtgtttagaaagcagttttcagtttgccaytttcagcctttcagacgagatgtcattttcgatataatgttcgtatgtgttactgatagtaaatgccatgtttcctcttggtggaattgcaccgtagtaa

SEQ ID NO: 480418 - DNA, 201 bp, Homo sapiens
gtgcagtggctcacgcctgtaatcccagcactttgggaggccaaaggtgggtggatcacgaggtcaggagttcaagaccagcctggccaacatggtgaaaycctgtctctactcaaaatacaaaaattagccaggcgtggtggcgcgcacctgtaatcccagctacttgggaggctgaggcaggagaatgacttgaatccg

SEQ ID NO: 480419 - DNA, 201 bp, Homo sapiens
cggaaccatgtggcgtcatgttggatttcttgctttatagtgtccactgcttgaatggaccacagcaccttcatccaccttccgctgtgcgccagggctgygtccagtttgggaccatgataaacaatgttgccacagcgttctggtgtcttccaggatgcacaggaatgcactttcttgggttcacaatgtgttgtggga

SEQ ID NO: 480420 - DNA, 201 bp, Homo sapiens
gtgagttaactttggtgaagttgtgatgtcatcctgtgttgaagaagttactcagttactcggtacgtaaataagtaaatatgtcatttgaaggagccacrtgtatgggaagccccggcgtcctggctaagaaagaacacaggttcccgcattcagatcccggctgctccactttctgccagtgagacccttaggttccca

SEQ ID NO: 480421 - DNA, 201 bp, Homo sapiens
gtatgaagggaagatggggagtgatttctgacagagtgaagtaagagcatatgtcctctatatgcaaggtgctgtgtttagaaagcagttttcagtttgcmattttcagcctttcagacgagatgtcattttcgatataatgttcgtatgtgttactgatagtaaatgccatgtttcctcttggtggaattgcaccgtagt

SEQ ID NO: 480422 - DNA, 201 bp, Homo sapiens
ttatctgtggagagaaacaaatcataaaaaatatttctttgtctttttttttttttttttgagatggagtctcgttctgtcgcccaggctggaggtgcagyggtgccatctcggctcactgcaagccctgcctcctgggttcatgccattctcctgcctcagcctcccaagtagctggtactacaggatgcccaccaccat

SEQ ID NO: 480423 - DNA, 201 bp, Homo sapiens
ctgacatttaataaatactaaaataacggtgattctagcagcagctctaatttcttttagaattttagaaatgagaaagccttttccttgaagctgagaayactgagaacagaaaccttcaagttttcaattacgcttctgaaaagctttcagtagacataaaatcgttttattcttcatgattttatttcctgtggctca

SEQ ID NO: 480424 - DNA, 201 bp, Homo sapiens
ctgcagaatcatacactcttggctgacatttaataaatactaaaataacggtgattctagcagcagctctaatttcttttagaattttagaaatgagaaarccttttccttgaagctgagaatactgagaacagaaaccttcaagttttcaattacgcttctgaaaagctttcagtagacataaaatcgttttattcttca

SEQ ID NO: 480425 - DNA, 201 bp, Homo sapiens
gagacattcaaatatgtaatggtacttacattttttccatcttaacccactggtgaccgtatcactgcagaatcatacactcttggctgacatttaataartactaaaataacggtgattctagcagcagctctaatttcttttagaattttagaaatgagaaagccttttccttgaagctgagaatactgagaacagaaa

SEQ ID NO: 480426 - DNA, 201 bp, Homo sapiens
taaagaatcggggtgtgtaaatgcatgtcatggaagctccatgtgggaacggcttctgtccattcagcaagtatcactgcacgcctgctgcacctcagccrtctcccagctgaatggaaaacacgctacctttttacttgtataatcgttttagagctcacatcaaactgcttactaaaattttgaaaataatttctataa

SEQ ID NO: 480427 - DNA, 201 bp, Homo sapiens
caatctatcgagggttacaattgtgcaccagtgtgccggttagtggacgaaatacacactcaacagcatctgtttgtagttaaggagtttactgtccaaamttccctggagaatgctcttcttctcttagcttttagatttgtacagagtcactcacaggcccaaatccagagtgagtcaggccagcacgataagagatta

SEQ ID NO: 480428 - DNA, 201 bp, Homo sapiens
cctggtgaaaccccttctgtactaaaaatccaaaaattagccgggtgtggtggcgcgtgcctgtcgtcccagctacttgggaggctgaggcaggagaatcsaacccgggaggcagagttttcagtgagccgagatcacgccactgcactccagcctggcgacagagtgagactccatcttaaaaaaaaaaaaaagaatcca

SEQ ID NO: 480429 - DNA, 201 bp, Homo sapiens
agtatatacaagtcattcctgccagagacaccaacgtagcgagagaatctcttaaaattcttttctgtggtcctgtttctgtgtgcattcttagaaatagyggggagccacaatttcaaccttgggccacactgtaaccactgagccactctgcgccctcatccaagcttcacactcaggccgaccgtagcttccccatcc

SEQ ID NO: 480430 - DNA, 201 bp, Homo sapiens
aatagacaccaatgaaatcaatggaaaagacttattctaacttgttattagtcttagtgaatattataatttataagaaatatagttgatatgccataatwtgtctcccagtttctaagattaccctaacaagctgttctaatggaaaaataattttcttaccaggcacggagaaaagcggctacagaagaagcagaaaaa

SEQ ID NO: 480431 - DNA, 201 bp, Homo sapiens
cacactcccgtcctccgctctttctacatcactgactcaagtgtttagaatcaggaagctggccaggcacagtggctcacgcctataatcccagcactttrggggctaaggcaggcagatcacttgaggtcaggagttcgagatgagcctggccaacatggtgaaaccctataaaaaattggccgggcacagtggccggca

SEQ ID NO: 480432 - DNA, 201 bp, Homo sapiens
caggttcattctctcgttctttttccttatgattcacttggtgaaggaaggagctgtttgccccgtagggcttctcatcgtctggatctgctgactacgtycccttgggggcgcttaacctgtttctctgtccctgtatttcctgtaaacaggaggtgggatctctgggcctcatcaggtgtgcacaggctcggtgtgagt

SEQ ID NO: 480433 - DNA, 201 bp, Homo sapiens
aggcagaggttgcggtgagccgagatcacaccatggcactccagcctgggcaacaggagcgaaactccatctcaaaaaatatatatatccctaagactggrtaatttatgaagaaaagaggttgaactggctcacagtgtgtcaagtcctgcggcctgaagttatagagtatatacaagtcattcctgccagagacaccaa

SEQ ID NO: 480434 - DNA, 201 bp, Homo sapiens
ttaacacgtctttcacctgtgtgcttttagctgagatgtattttgctgtatagatccacatcatacttgacttatttttcatgggattatgcaaatgagcrtcttgattccttttggttttttaggttagttttggggtggatgacagaagccctccatggagaggtggaattgggtggcagatactcttcctgcccctcc

SEQ ID NO: 480435 - DNA, 201 bp, Homo sapiens
tttgtcttagacataaacttcagttaaaatctacagttgggtttttccaatgttttttttatccaacatatgccattaattttttaaataaataaaaacayacagaaaatgatatcaaaagagaaaatctgagggtaaagaaataaaaaatataactgtcttaatagaaatattttcattctttcaccaaatgtgcctcct

SEQ ID NO: 480436 - DNA, 201 bp, Homo sapiens
caggccttccttagaatcagagaaggaagcgtcctgtttggagagagccagagagcaccgccagggaggcgctcgcgcaaggccacggtcagcacaggcasggtcccgctttccttagtgcttggagcaatttccataaaacattcaccagaaaccttttgcacatcggtctctgccacacgcagtagaatttccgcaggg

SEQ ID NO: 480437 - DNA, 201 bp, Homo sapiens
cataatacttaatacggatgttttctcttttatttttcacatgtttataatgtaccttttttgtaagctggaagaaattagttttattttaagaatcagtmacaagagcccctcccaactttagttttcagtgagtgccctggagcatagagtgtatgaggtccgcgagacggcggttcgaattattttggacatgtacag

SEQ ID NO: 480438 - DNA, 201 bp, Homo sapiens
ggcggggcttgggctgggaggcagcctcgggtccctgaggagggtacaggggctcctttcattcagagcctcagattttactatcactcggacatcaggaycaaggatgtcagcatgcagtgtcaggcatctctttctgtttatatttttaaagaaaatatgttgaccctctttcccttataacattcacccacactccct

SEQ ID NO: 480439 - DNA, 201 bp, Homo sapiens
atttcataatacttaatacggatgttttctcttttatttttcacatgtttataatgtaccttttttgtaagctggaagaaattagttttattttaagaatsagtaacaagagcccctcccaactttagttttcagtgagtgccctggagcatagagtgtatgaggtccgcgagacggcggttcgaattattttggacatgt

SEQ ID NO: 480440 - DNA, 201 bp, Homo sapiens; identical to SEQ ID NO: 162094

SEQ ID NO: 480441 - DNA, 201 bp, Homo sapiens
gacggaagtcagagctgtggccagattaataatggtgggaatcaggctgaacttccccggcctggggagaatgggggtcgtggtcagaatgtctgacggcrtctgatggggcttaagggaggggtggggcgtgaggagctcagacccaggctagcagggctggccacccacccccagcaggtgcaggcacctgtccatgca

SEQ ID NO: 480442 - DNA, 201 bp, Homo sapiens
ttgtttagtcccctcttcccgcaaagcccccgcctggcattggcccccacccctccccagctcttgtcactcctgccccgcccgtttggcctctggtcagrggaaaaggatcagaggggaggctgggccccaggccggggcgcaggtgcacctgacagaggccccatcttccaccgggcaccagccgaacacctcgcaggt

SEQ ID NO: 480443 - DNA, 201 bp, Homo sapiens
cagcatgggggtgaccactgtgtacatcactgaggccactgcacgctttctcagggaagacgacacatctgaactgaggtaccctccaacgcctgttccakaaaatcagcaaacaactgacaggtgagatccacaggtggcgaaggctttatagctcccacctgatgatgaaaccctcagaatggaggaaacaattttata

SEQ ID NO: 480444 - DNA, 201 bp, Homo sapiens
atgggggtgaccactgtgtacatcactgaggccactgcacgctttctcagggaagacgacacatctgaactgaggtaccctccaacgcctgttccataaamtcagcaaacaactgacaggtgagatccacaggtggcgaaggctttatagctcccacctgatgatgaaaccctcagaatggaggaaacaattttatagtaa

SEQ ID NO: 480445 - DNA, 201 bp, Homo sapiens
aaacatagtagcccatttctccttccggcgagatagacatttgccaatcagaccagtactgcctgttccagcgtttgggtgatccctgtctcaacagtacwagaaataataacacatcttccccctaaggctccatcccccttctatccactatcagttatcagtcttcctatgaagccgggattggctttgggcatttcc

SEQ ID NO: 480446 - DNA, 201 bp, Homo sapiens
tcgttatatcctcgggggatgttactcctaatgtcacatggggtgtactccctgtgatattcttgttaatatcctagggggatgttacttttaatgtcacygggggtgtatatcatgcgtattcaacgcctgtgatactattcctaataccctaggggcatgttcctcctaatgtcacatggggtgtacaccatgtgtgtt

SEQ ID NO: 480447 - DNA, 201 bp, Homo sapiens
ctgacaggtgagatccacaggtggcgaaggctttatagctcccacctgatgatgaaaccctcagaatggaggaaacaattttatagtaagagaaaagggtmcccgagatgggaagaaaaccaaatatggcagcagggaaatacatgataatgttattggtgaaggtgtcacaacatgcaagatgggggagttgagaagggt

SEQ ID NO: 480448 - DNA, 201 bp, Homo sapiens
caggctgtagatcaagggattcagcatgggggtgaccactgtgtacatcactgaggccactgcacgctttctcagggaagacgacacatctgaactgaggwaccctccaacgcctgttccataaaatcagcaaacaactgacaggtgagatccacaggtggcgaaggctttatagctcccacctgatgatgaaaccctcag

SEQ ID NO: 480449 - DNA, 201 bp, Homo sapiens
tgcctgttccagcgtttgggtgatccctgtctcaacagtactagaaataataacacatcttccccctaaggctccatcccccttctatccactatcagttrtcagtcttcctatgaagccgggattggctttgggcatttccaggccttcagtcatacactttctccccacaggcccccttccccaatacacactccccag

SEQ ID NO: 480450 - DNA, 201 bp, Homo sapiens
ggatgttacttttaatgtcaccgggggtgtatatcatgcgtattcaacgcctgtgatactattcctaataccctaggggcatgttcctcctaatgtcacayggggtgtacaccatgtgtgttcacctgctgtgatattattcgtaatatcctaggggaatgttacccctgatggcacaggaggtgtacaccatgtgtgtaa

SEQ ID NO: 480451 - DNA, 201 bp, Homo sapiens
tgccttagagacactagattcaagaatgttccaagaaccagatcatcatatataacaaattcgtaattgctagaaaatatagcctatcttttccgaagaamaatatgtaataaaaccattctcttcactttaagaaaaaggttatcctaattaaaggaaattaagaactcaaatattttattttattctaatagattgata

SEQ ID NO: 480452 - DNA, 201 bp, Homo sapiens
gcgatcaagttttgcagctgggagtctaaaagactgagaaaaaaaaagacaacaaaaccaggaagccacagaaacacgggttcatgatggctgaatgatayagagggtgacagatggctacaaactggtcataggccatcacactcaggagcatgtctctcttccatgcctccaaaaatggcagagagagacatctgagtc

SEQ ID NO: 480453 - DNA, 201 bp, Homo sapiens
cactttaagaaaaaggttatcctaattaaaggaaattaagaactcaaatattttattttattctaatagattgatacaaattcccttgatttagaacattyataaacactgtataacagctgaaaccatgccatctggaaatgaaattaaagttgatagttcataagcagaaaatagttccacatgccagttaggtcctag

SEQ ID NO: 480454 - DNA, 201 bp, Homo sapiens
tgaatgatacagagggtgacagatggctacaaactggtcataggccatcacactcaggagcatgtctctcttccatgcctccaaaaatggcagagagagayatctgagtcaggcagcctgcataggagatgactctgctgtgagattggatgtccacgatcatcttggggaccgtggtggaggtgaaaccgatgtcaggca

SEQ ID NO: 480455 - DNA, 201 bp, Homo sapiens
tgtgtctgcattttggatataagcaattcacaagtcatgttttcagatttcagagcaatccacactcagcaatattttacagttctgacaaactcaattgycttctaatgctttcatcattgatttctgtgttattcacttcttgctctacacacctgccttagagacactagattcaagaatgttccaagaaccagatca

SEQ ID NO: 480456 - DNA, 201 bp, Homo sapiens
cggtgcatcttgttttaaaattcatgtaagctataactcctgtccttagcttaggtggacttagaattttcataagaacgtttggccagatgcggtggctyacgcctgtaatcccagcactttggggggccgaggagggtggatcacgaggtcaggagatcaagaccatcctggccaacatggtgaaaccccacctctact

SEQ ID NO: 480457 - DNA, 201 bp, Homo sapiens
ctgtccttagcttaggtggacttagaattttcataagaacgtttggccagatgcggtggctcacgcctgtaatcccagcactttggggggccgaggagggyggatcacgaggtcaggagatcaagaccatcctggccaacatggtgaaaccccacctctactaaaactgcaaaaactttgcccggtatggcggcgcgcacc

SEQ ID NO: 480458 - DNA, 201 bp, Homo sapiens
ctgagtctcagaggatggacgtctcaccctttgccatacagataagtagaaagggtggtattccaaattcatggccagactctaagtcccgggtactatayttcatggtcttccaactctcaaaaagttgtggttttgtttttgtttttgtttgagacagagtctcattctgttgcccaggctggagtgcagtggagtgac

SEQ ID NO: 480459 - DNA, 201 bp, Homo sapiens; identical to SEQ ID NO: 394425

SEQ ID NO: 480460 - DNA, 201 bp, Homo sapiens
gaaattaggaatttccacatccttgaagcaggtgatttgtaaggcgatcaagttttgcagctgggagtctaaaagactgagaaaaaaaaagacaacaaaaycaggaagccacagaaacacgggttcatgatggctgaatgatacagagggtgacagatggctacaaactggtcataggccatcacactcaggagcatgtct

SEQ ID NO: 480461 - DNA, 201 bp, Homo sapiens
gaaactatagcaagggtgataggcatgtaataaacaaactcacaagaaactgatgtataaattaaaacaccaatttattaatgttagaaaaatgtctgacygtatcaaggattaccaattatatggagaggggggaactcttaacatggttggtgaaagggtaaactggcacatcagctcaagaaaacaatttaacaatgt

SEQ ID NO: 480462 - DNA, 201 bp, Homo sapiens; identical to SEQ ID NO: 394465

SEQ ID NO: 480463 - DNA, 201 bp, Homo sapiens
taaacaaactcacaagaaactgatgtataaattaaaacaccaatttattaatgttagaaaaatgtctgactgtatcaaggattaccaattatatggagagrggggaactcttaacatggttggtgaaagggtaaactggcacatcagctcaagaaaacaatttaacaatgttaggtaaaattcatataccctatcaataag

SEQ ID NO: 480464 - DNA, 201 bp, Homo sapiens
ttactcctaatatgtcacaggggtgtacacactttgatattatttgtaatctcatagagagatattacttcaaatattacagtggatgtacacacatagtrtataccctgtgatattattcataatatcccagggagatacaactcctgatatcacagtaagtttaccccgtgtgtgtacacccttgatattagtcgtaat

SEQ ID NO: 480465 - DNA, 201 bp, Homo sapiens
acccatcatctaaatggattttgtttttacagttgagggctatgtacatattccagattctactcatctttcattggatatatggtttgcagatacttctscagtctgtagcttagtcttcatcgtttttacatgacccacagccagattctgagctctgcaggaccagaaactatagcaagggtgataggcatgtaataa

SEQ ID NO: 480466 - DNA, 201 bp, Homo sapiens
cagaggaagaagtgcatgggggtgtggaggtgggagtcagggctgacggccaggatgctgagcaggttccacagcaccgtgaccaggcacacaggcacagyccagtgacgaccagctgcagtgctggatcctctgagagttctaggaggaggaatataaagacatctgttagattctgtgggtctgtatagtttggacatc

SEQ ID NO: 480467 - DNA, 201 bp, Homo sapiens
tgttccataaaatcagcaaacaactgacaggtgagatccacaggtggcgaaggctttatagctcccacctgatgatgaaaccctcagaatggaggaaacamttttatagtaagagaaaagggtccccgagatgggaagaaaaccaaatatggcagcagggaaatacatgataatgttattggtgaaggtgtcacaacatgc

SEQ ID NO: 480468 - DNA, 201 bp, Homo sapiens
gagggtggatcacgaggtcaggagatcaagaccatcctggccaacatggtgaaaccccacctctactaaaactgcaaaaactttgcccggtatggcggcgygcacctgtagtcccagctactcgggaggctgacgcaggagaatggcttgaacctgggaggcagaggctacagtcagccgagatcacaccactgcactcca

SEQ ID NO: 480469 - DNA, 201 bp, Homo sapiens
tgttagattctgtgggtctgtatagtttggacatcttttgcttagaaaagagggttgaaaaaccggaaacaagtaaaccaacacccagcattgtgtctgcrttttggatataagcaattcacaagtcatgttttcagatttcagagcaatccacactcagcaatattttacagttctgacaaactcaattgtcttctaatg

SEQ ID NO: 480470 - DNA, 201 bp, Homo sapiens
tcctgatatcacagtaagtttaccccgtgtgtgtacacccttgatattagtcgtaataaccagggcaaatatgactcctaatatcacacagtctgcacacyctgtgatatttttcataatattttagggagatattgcttctaatatcacagtgggtgtaccccatgtgtatactctgtgacagtgttttttatatcctag

SEQ ID NO: 480471 - DNA, 201 bp, Homo sapiens
aagctgaggcaaggagaatcgcttgaacctgagaggcggaggttgcagtgagccgaggttgcaccactgcactccagcctgggtgacagtgtgagactccrtctcaataaataaataaataaaataaaaaaatttaaaatacacgaggatatatttttaggggtacatacacgttaatggtataaaaaacatgcaatggaa

SEQ ID NO: 480472 - DNA, 201 bp, Homo sapiens
ggtcagtacatgggttcttatgcaacgattttctacatttctcaatattattaaaaattatattgagaccctgtaaaatatgtaagtttgtggacatgtasctctctatctggaaggctatactgtaaaattttaagaagttgatgggtacagaattggattcaagagaaagggcatgaccttatggcgggcagtcaggag

SEQ ID NO: 480473 - DNA, 201 bp, Homo sapiens
gcttgaacctgagaggcggaggttgcagtgagccgaggttgcaccactgcactccagcctgggtgacagtgtgagactccgtctcaataaataaataaataaaataaaaaaatttaaaatacacgaggatatatttttaggggtacatacacgttaatggtataaaaaacatgcaatggaaatgataaacaccaaatttag

SEQ ID NO: 480474 - DNA, 201 bp, Homo sapiens
tatatttttaggggtacatacacgttaatggtataaaaaacatgcaatggaaatgataaacaccaaatttagaatagcaatttacctctggagaagaagamgagaatgggattagaaagaggtatgtgggggctttaactgtatctgtagtgtattaggacaaaaaaaaagtagtcaatagagttaaattttctctttttc

SEQ ID NO: 480475 - DNA, 201 bp, Homo sapiens
tggcacaggaggtgtacaccatgtgtgtaaaccgcccgtgtcattattcgtaatatcctagggggttgtttcttttaatgtcacaaagggtgcacaaaatrtcacagaaggtgtacaccttgtgacgttatctgtaataccctagaaggatgttactcctaatatgtcacaggggtgtacacactttgatattatttgtaa

SEQ ID NO: 480476 - DNA, 201 bp, Homo sapiens
accgcccgtgtcattattcgtaatatcctagggggttgtttcttttaatgtcacaaagggtgcacaaaatgtcacagaaggtgtacaccttgtgacgttawctgtaataccctagaaggatgttactcctaatatgtcacaggggtgtacacactttgatattatttgtaatctcatagagagatattacttcaaatatta

SEQ ID NO: 480477 - DNA, 201 bp, Homo sapiens
aagaaaaggaccttaagaaaatgctgaacagggccaggtggtggctcacgcctataattccagcactttgggaggctgaagcgggcggatcacctgaggtmacgagaccagcctggccaacatggcaaaaccccgtctctactaaaaatacaaaaattagctgggcgtggtggcaggcgcctgtaatcccagctactcagg

SEQ ID NO: 480478 - DNA, 201 bp, Homo sapiens
gaatagcaatttacctctggagaagaagacgagaatgggattagaaagaggtatgtgggggctttaactgtatctgtagtgtattaggacaaaaaaaaagyagtcaatagagttaaattttctctttttctttctggctgcctgacatccagcagccatcatgaatgactcataaattatccagaccaggacgttaatcac

SEQ ID NO: 480479 - DNA, 201 bp, Homo sapiens
atctgtaataccctagaaggatgttactcctaatatgtcacaggggtgtacacactttgatattatttgtaatctcatagagagatattacttcaaatatyacagtggatgtacacacatagtgtataccctgtgatattattcataatatcccagggagatacaactcctgatatcacagtaagtttaccccgtgtgtgt

SEQ ID NO: 480480 - DNA, 201 bp, Homo sapiens
cacaggggtgtacacactttgatattatttgtaatctcatagagagatattacttcaaatattacagtggatgtacacacatagtgtataccctgtgataktattcataatatcccagggagatacaactcctgatatcacagtaagtttaccccgtgtgtgtacacccttgatattagtcgtaataaccagggcaaatat

SEQ ID NO: 480481 - DNA, 201 bp, Homo sapiens
cactttgatattatttgtaatctcatagagagatattacttcaaatattacagtggatgtacacacatagtgtataccctgtgatattattcataatatcmcagggagatacaactcctgatatcacagtaagtttaccccgtgtgtgtacacccttgatattagtcgtaataaccagggcaaatatgactcctaatatca

SEQ ID NO: 480482 - DNA, 201 bp, Homo sapiens
caaattcgtaattgctagaaaatatagcctatcttttccgaagaaaaatatgtaataaaaccattctcttcactttaagaaaaaggttatcctaattaaakgaaattaagaactcaaatattttattttattctaatagattgatacaaattcccttgatttagaacatttataaacactgtataacagctgaaaccatgc

SEQ ID NO: 480483 - DNA, 201 bp, Homo sapiens
gtaagtttaccccgtgtgtgtacacccttgatattagtcgtaataaccagggcaaatatgactcctaatatcacacagtctgcacaccctgtgatattttycataatattttagggagatattgcttctaatatcacagtgggtgtaccccatgtgtatactctgtgacagtgttttttatatcctagggaggtattactc

SEQ ID NO: 480484 - DNA, 201 bp, Homo sapiens
caatattttacagttctgacaaactcaattgtcttctaatgctttcatcattgatttctgtgttattcacttcttgctctacacacctgccttagagacaytagattcaagaatgttccaagaaccagatcatcatatataacaaattcgtaattgctagaaaatatagcctatcttttccgaagaaaaatatgtaataaa

SEQ ID NO: 480485 - DNA, 201 bp, Homo sapiens
aaaatcagcaaacaactgacaggtgagatccacaggtggcgaaggctttatagctcccacctgatgatgaaaccctcagaatggaggaaacaattttataktaagagaaaagggtccccgagatgggaagaaaaccaaatatggcagcagggaaatacatgataatgttattggtgaaggtgtcacaacatgcaagatggg

SEQ ID NO: 480486 - DNA, 201 bp, Homo sapiens
attttacagttctgacaaactcaattgtcttctaatgctttcatcattgatttctgtgttattcacttcttgctctacacacctgccttagagacactagrttcaagaatgttccaagaaccagatcatcatatataacaaattcgtaattgctagaaaatatagcctatcttttccgaagaaaaatatgtaataaaacca

SEQ ID NO: 480487 - DNA, 201 bp, Homo sapiens
gaagtgtctgtggtattttacccatcatctaaatggattttgtttttacagttgagggctatgtacatattccagattctactcatctttcattggatatrtggtttgcagatacttctccagtctgtagcttagtcttcatcgtttttacatgacccacagccagattctgagctctgcaggaccagaaactatagcaag

SEQ ID NO: 480488 - DNA, 201 bp, Homo sapiens
attgatttctgtgttattcacttcttgctctacacacctgccttagagacactagattcaagaatgttccaagaaccagatcatcatatataacaaattcrtaattgctagaaaatatagcctatcttttccgaagaaaaatatgtaataaaaccattctcttcactttaagaaaaaggttatcctaattaaaggaaatta

SEQ ID NO: 480489 - DNA, 201 bp, Homo sapiens
acttcaggtcaggggatatttccggtgaattgtatggactttaagcttaaaatattaatgaatgtatctaaaattcactttgcctttactttatgcatccrtcacatagagatcacgcagcgggcacccacgatcggtttcatcatcgctcacttccattggatcaactagatcaactcagatgagagtgctgagtctcag

SEQ ID NO: 480490 - DNA, 201 bp, Homo sapiens
aggtgatttgtaaggcgatcaagttttgcagctgggagtctaaaagactgagaaaaaaaaagacaacaaaaccaggaagccacagaaacacgggttcatgrtggctgaatgatacagagggtgacagatggctacaaactggtcataggccatcacactcaggagcatgtctctcttccatgcctccaaaaatggcagaga

SEQ ID NO: 480491 - DNA, 201 bp, Homo sapiens
gagactgtgctgccgtgcggctgcacggctgccacaggacacctttaatatccctgtttctcaggctgtagatcaagggattcagcatgggggtgaccacygtgtacatcactgaggccactgcacgctttctcagggaagacgacacatctgaactgaggtaccctccaacgcctgttccataaaatcagcaaacaactg

SEQ ID NO: 480492 - DNA, 201 bp, Homo sapiens
tctgctgtgagattggatgtccacgatcatcttggggaccgtggtggaggtgaaaccgatgtcaggcaaggacaggttgcagaggaagaagtgcatggggrtgtggaggtgggagtcagggctgacggccaggatgctgagcaggttccacagcaccgtgaccaggcacacaggcacagcccagtgacgaccagctgcagt

SEQ ID NO: 480493 - DNA, 201 bp, Homo sapiens
acccttgatattagtcgtaataaccagggcaaatatgactcctaatatcacacagtctgcacaccctgtgatatttttcataatattttagggagatattscttctaatatcacagtgggtgtaccccatgtgtatactctgtgacagtgttttttatatcctagggaggtattactcgtaatatcacagtgggtgttcac

SEQ ID NO: 480494 - DNA, 201 bp, Homo sapiens
gtaatatcctagggggttgtttcttttaatgtcacaaagggtgcacaaaatgtcacagaaggtgtacaccttgtgacgttatctgtaataccctagaaggrtgttactcctaatatgtcacaggggtgtacacactttgatattatttgtaatctcatagagagatattacttcaaatattacagtggatgtacacacata

SEQ ID NO: 480495 - DNA, 201 bp, Homo sapiens
cacagcccagtgacgaccagctgcagtgctggatcctctgagagttctaggaggaggaatataaagacatctgttagattctgtgggtctgtatagtttgracatcttttgcttagaaaagagggttgaaaaaccggaaacaagtaaaccaacacccagcattgtgtctgcattttggatataagcaattcacaagtcatg

SEQ ID NO: 480496 - DNA, 201 bp, Homo sapiens
tggtgaaaaccacaaataaacatcaacaggggagtggagtggcatagtcatacagtggaatcgtagacagcagtgaaaataagtgagtgaaaagaacataygagaaaacctcacggtgtagccataaagcaagatacaaaatagtaagacaccatttatataacatttaaaaggccaggcgcggtggcttatgcctgtaat

SEQ ID NO: 480497 - DNA, 201 bp, Homo sapiens
aaaagaacatacgagaaaacctcacggtgtagccataaagcaagatacaaaatagtaagacaccatttatataacatttaaaaggccaggcgcggtggctyatgcctgtaatcctagtactttgggaggccaaggcgggcggatcacgaggtcaggagttcgaggccaacatagtgaaactccatctctactaaaaataca

SEQ ID NO: 480498 - DNA, 201 bp, Homo sapiens
aatgccagccacttgggaagctgaggcaaggagaatcgcttgaacctgagaggcggaggttgcagtgagccgaggttgcaccactgcactccagcctgggygacagtgtgagactccgtctcaataaataaataaataaaataaaaaaatttaaaatacacgaggatatatttttaggggtacatacacgttaatggtata

SEQ ID NO: 480499 - DNA, 201 bp, Homo sapiens
agacaggtctcagttaatttagaaagtttattttgccaagattgaggacacacctgtgacacagccttaggaagttctgatgacatgtgcccaaggtggtyggggcacagcttggttttatacattttagggagacacgagacatcaatcaatatgtaagaaatacattagttccatccagaaaggtggagacagctcaaa

SEQ ID NO: 480500 - DNA, 201 bp, Homo sapiens
aaagtttattttgccaagattgaggacacacctgtgacacagccttaggaagttctgatgacatgtgcccaaggtggtcggggcacagcttggttttatayattttagggagacacgagacatcaatcaatatgtaagaaatacattagttccatccagaaaggtggagacagctcaaagcaaggcccccccattggggac

SEQ ID NO: 480501 - DNA, 201 bp, Homo sapiens
ctaacaattggccctttgttaatgagcgtatcttctgatactgaagctacaaagaaaacactgaaaatattggactgtttttttcctacttcatactaatrtatggttctctgtggggttttgttgtttttagatcgaatttcaaaagaatccggcaaagtttttgaagatgtccttgaaagtttctattcaattgactgt

SEQ ID NO: 480502 - DNA, 201 bp, Homo sapiens
aaggcctgttgtcatggttgttgtattaagtctgttttcatgctgctgataaagacatacccaagactgggaagaaaaagaggtttaattggacttacagwtccacgtggctgcggaggcctcagaatcatggcaggaggtgaaaggcactttttacatggcggcagcaagagaaaatgaggaggaagcaaaagcggaaac

SEQ ID NO: 480503 - DNA, 201 bp, Homo sapiens
gttgatcacagtgaaagagtttgagtttagggactgggacatgttgtgggtagggggagggaagctataacttaacaaatgacacaactccaagataggasagttttgagcttcatcctttggataaagcaaactttttgtaatttctttttaaatgtttctctagtttgctttatgtactgtgttttttagtaagtcagt

SEQ ID NO: 480504 - DNA, 201 bp, Homo sapiens; identical to SEQ ID NO: 394356

SEQ ID NO: 480505 - DNA, 201 bp, Homo sapiens
gggatattttagctaattcatctggggtgtgtagtgaactcacatctagggctgggaaatctttctggtttagtaatttttcattgtaattgatgcactcrggaacatacctccttcctaatttcagagctattttgaaatatgaatgaaaaactcagtaaaaaaaaaagtcaacttttaaaaatagtagggtctggtcag

SEQ ID NO: 480506 - DNA, 201 bp, Homo sapiens
tgcagtgaactgaggttgtgccattgcactccattctgggcgacaagagcaagactccgtctcaataaataaatagatagatagatagtaaggtctgatarttaggatattctgaagtaagagctaaattttggttttgtttttcctgttgctgattttggtgacacatctctgttgatatcagtaaatatcaattgataa

SEQ ID NO: 480507 - DNA, 201 bp, Homo sapiens
aggacctattttcctgcaagaaaattggatattttttccacaataaaattaaagtagctattaaagattttaggccaggcatggtggctcatgcctgtaawcccagtactttgggaggctgaggcaggtggatcatgaggtcaggagatggagaccatcctggccaacatggtgaaaccctgtttctactaaaaatacaaa

SEQ ID NO: 480508 - DNA, 201 bp, Homo sapiens
agcatgatatctccagccgtccagtttttagttgtttgcaaccaaaggttaaatccagttcttgtttctcttatcatagctggaagcagaaatagccactrttttagtatttgggtaaccttttaaatgtcttttaggcaaaatgtcgtgactttgagaatatgctgtggtttgaatctttgctgttttatggttgtgaag

SEQ ID NO: 480509 - DNA, 201 bp, Homo sapiens
attatatgttctttttagtttcctcagtgacttttatattccatttaaactcaattaacaatcttttggattgcagacatagtatgggaaggaggtgccascagctgaaacatcactgtgatgaggctatcttggattattttacccttcatattttcaagaaaatagaaactttgcatctctcatactgccatattctta

SEQ ID NO: 480510 - DNA, 201 bp, Homo sapiens
caaatttgtaaactgtcttaatacatgaaatttatgcacagaccccgcccccctcctttttttttttcttttttttttttttttagctcatcagctgtcawtagtgtcattgtattttatgtgtggcccaagacagttcttccagtatggcccagggaagccaaaagattgggcacccaaaccatttaaacagcatataaa

SEQ ID NO: 480511 - DNA, 201 bp, Homo sapiens
acaggtttatttctgtttgaaggagtgttgtgcaaattcttgtattttgtagagacagatttgcgatttctttggtggtatttccacagtggattttattmttagagaacttttaggaatgccctaaatttaatattagtattactcccattcagcagccttatctgatactagatgaagactccttagaataatgaggca

SEQ ID NO: 480512 - DNA, 201 bp, Homo sapiens
atatagtgccttttcagggtcatgagattatattatttttatctgttttccagcatcataatacagtttcattacttttttttttttttttttttgagacrgagttgtgctcttgttgcccaggctggagtgcagtggtgcaatctcggctcactgcaacctctgcctcctgggttcaagcgattctcctgccttagcctc

SEQ ID NO: 480513 - DNA, 201 bp, Homo sapiens
aaatgacaaaatgaaagctctttctcacagtgatttgctgtatatcttctgaactcattcagtggaccctgtggttgtcaagggcccttattgagtagcartacagttctgttatttaattgtaacacagatgctttgtaaatgtattttataagaagacagaattgttgccactggaacatttctgctgcaatgactaga

SEQ ID NO: 480514 - DNA, 201 bp, Homo sapiens
cgtgtccatagactatctaaaagactcagatttcgtttgacttcatatattacattttttagagtgttttgttttttattaactccataggcttagatctrtttatatctatacccaaaatctccattttacaaagtattttattccaaaagttcattcaagtttgatattttcacaggagaaagtgatttctgagttcca

SEQ ID NO: 480515 - DNA, 201 bp, Homo sapiens
agtagctgggactacaggtgtgcgccaccaagcccagctaatttttgtatgtttagtagagacagggtcttaccatattggcctggctggtcttgaactcytgatctcaggtgatccacccgccttggcctcccaggggattacaggcgtgagccaccatgcctggcctagcatgggtttagagcaaaaggaaataggtag

SEQ ID NO: 480516 - DNA, 201 bp, Homo sapiens
attgatctcaatgaattttgttttgcttttttaaaatgggtcccctgtctctgggctagtcatttaaacatatgtaagttttgttctatatggataaatgkaaacttttttttttttaacatgctgtagcttgcatatctgtttcctttctttgaaaatgtgtgcttggaaaaattgattgcagaagctctaaaatagcca

SEQ ID NO: 480517 - DNA, 201 bp, Homo sapiens
ctcgaagatggatctttgatagttaaaattccgaaagggaaggtattgggggtatgatcaaggattaaaatgactaaagctgttttggaaaagaacaagtrcacctgacaggtcagagtagatgatttgtgaaggaagtagttagaagtttcatgtgaaagatacgttgacagattgtgaaggatgttcagtatccagtaa

SEQ ID NO: 480518 - DNA, 201 bp, Homo sapiens
ccggccacttctatttgttaaaaatgaaaaaaaaaattatagctaaaataaaactgctttggtgggtttttcctttttaccccgtcccactctttcccatrtatattaccattatatgttctttttagtttcctcagtgacttttatattccatttaaactcaattaacaatcttttggattgcagacatagtatgggaag

SEQ ID NO: 480519 - DNA, 201 bp, Homo sapiens
agaacaaaataactccattagtttgacctttctgtgaacatttgctacttttgcaatggaatcatgcaagtatataaaattgcttttattacagacatctytgtattccacctgcctttttttattttccatttgcagtctgttcagttcaggaagctgctataacacttggtgccagtgttcccaaactctaaataatgt

SEQ ID NO: 480520 - DNA, 201 bp, Homo sapiens
atccggcaaagtttttgaagatgtccttgaaagtttctattcaattgactgtattaaatcacagtttgaagcatggcgttcaaaatactacacatcctacraagatgcttacattggcctttgtttgccaaaattattcaaccccctcatacgacttcagctcctcacttggactcctcttgaggtgagtggcttctgtca

SEQ ID NO: 480521 - DNA, 201 bp, Homo sapiens
accaacagggccatgctccttccaaaggctctaggctcaaatccttccttgcctcttccaacttctgatggctgctgacatagcttggctatggccacatygctccaatctctgctgctgtcttcacatcacttttttttctctctctctctctcctgtgtgcgtgtttaattttcctctgcctccctgttataaggacac

SEQ ID NO: 480522 - DNA, 201 bp, Homo sapiens
tggattgagcccataattgaatgaaaagttcccctttttttaattaaaaaaatttttaatgatgtcaataccattggaataaactttcttaatttatgaaktttattttacatatattttaattcttcaaaaatttaggtgaacaacctttggacaaaacaggacatgttaaggatacaaatcaagaagatggagttatca

SEQ ID NO: 480523 - DNA, 201 bp, Homo sapiens
tttagttgtttgcaaccaaaggttaaatccagttcttgtttctcttatcatagctggaagcagaaatagccactattttagtatttgggtaaccttttaawtgtcttttaggcaaaatgtcgtgactttgagaatatgctgtggtttgaatctttgctgttttatggttgtgaagaacgagagcaagaaaaagatgatgta

SEQ ID NO: 480524 - DNA, 201 bp, Homo sapiens
catagttgcctgcagtggtaacattaccagcacccagaattggccaaaaaattgaaaatgctaataatcatccttgaaatcatgaaactcttacaaaagtrgtcaaatgttacagagctgcaatataaaataggaaactgtaagttgctacattgtagtggttgttaatggttacaagagctcttcttatctctaacatgg

SEQ ID NO: 480525 - DNA, 201 bp, Homo sapiens
gaaaacggaggggagcctggaggaggctgggaaagctgtcagacaatgaggcaggcaggtctcacctgtgtgaaggaaggaggatgaaagtcttagacatyggtgcagttctaaagtttcagcagggccaactggcagctctgacaggtacaaccaggggtctccttgctagtatgagatctgagagacagaatttcctga

SEQ ID NO: 480526 - DNA, 201 bp, Homo sapiens
aatctggttctcccacttgggccatcagggccattaaagcctgaaatacacaaaatttgagatgttaggttttttttttcttttttttatacctagtcccrcagagagatgttagttttcagtttaaaaaaatcaatatggaaggaagatgtcatcattttaaatagcctttcattatgatttctcaccaccacacctcag

SEQ ID NO: 480527 - DNA, 201 bp, Homo sapiens
gaagtatagtggacagatgtttcccccaccccttcttttacctaggcaagagattaggggagtcttttttgattaaagagagtaggtccaaaataaagacyctgaaacactaaaatctggggatccccaacaaaagaactggctcagtacctagtgatccgacggagacacctctgttagacagctcctgcccacacacac

SEQ ID NO: 480528 - DNA, 201 bp, Homo sapiens
ccaaagacgacaagatgatattaaagatgaatcttcggagttttcaagccattcaagtcagtccatcttgaaggtttttattattcattaaacaaccttgkttacttagtgcagcctaattgaaaattagagatcttggagctttttttttttttttaaagaaacaatttccttgctgttgtgtcaggtagatctaaaaat

SEQ ID NO: 480529 - DNA, 201 bp, Homo sapiens
tgtgaagaacgagagcaagaaaaagatgatgtagatgttgccctactacctaccattgtggaaaaggtgattcttcctaaactaacaggtaaatctcctgktctctgaattgagcattcagacacactggctttctcaaatctatttttatgagtttataattcagagcatgtttccttatagaaattacatgagaaataa

SEQ ID NO: 480530 - DNA, 201 bp, Homo sapiens
tgcccagccataaattgcctggctcagccttccgagtagctgggactacaggcgcccaccaccacgcccggctacttttttgtatttttagtagagacggkgtttcatcatgttagccaggatggtctcgatctcctgacctcgtgatctgcccgcctcagcctcccaaagtgctgggattacaggtgtgagccaccgcgc

SEQ ID NO: 480531 - DNA, 201 bp, Homo sapiens
taccagatttcatctatatcccatttcttttctaggttcaagccagtcaacccgcagaagtgaatatgtactaccagaacacttaccagacaatgccttayggctcatcctatggcattccttatagttatacggcctatggatcatcagatgccaaatctcaaaaaacagataatacagtccctttcaaaactcccagta

SEQ ID NO: 480532 - DNA, 201 bp, Homo sapiens
tccaatctctgctgctgtcttcacatcacttttttttctctctctctctctcctgtgtgcgtgtttaattttcctctgcctccctgttataaggacacttrtgattgcatctagggctctagggcccacctggataattgaaaataatctcaagacccttaatcaaatctgtaaacctaaattaacattcacagacaagga

SEQ ID NO: 480533 - DNA, 201 bp, Homo sapiens
gaccgtcctgtctcattcatgattttactccctgcccagcttgcagatacatgcatttgaattttagtagtctgtcatatttaaaatcccacatatgtgakttaaatatgcaataaagaatacgccttgctgattagccacacccaggcaatttaatatccatggtcttctataatgtttataccacattgtaaatattca

SEQ ID NO: 480534 - DNA, 201 bp, Homo sapiens
tttcttttctttctcaatattaatgaaactcattgatctcaatgaattttgttttgcttttttaaaatgggtcccctgtctctgggctagtcatttaaacmtatgtaagttttgttctatatggataaatgtaaacttttttttttttaacatgctgtagcttgcatatctgtttcctttctttgaaaatgtgtgcttgga

SEQ ID NO: 480535 - DNA, 201 bp, Homo sapiens
cctttttctacaacacagacttcaagaatggtgggaattacactaaaattaatcaatggatatccttcagtagtgaatgcagaaaataaaaatacacaggkaatttagtatcttttgaagccttttttttttttcctctttctgttgaatatgagcaagcattgagagaatgagtggttatcctaaaccaatcagaaatct

SEQ ID NO: 480536 - DNA, 201 bp, Homo sapiens
ttcggaggatggcagcaggaactgagggaaatggacagactggatggtcgtggagacacacaacttgagagagaggtcaggaatgacctccagacctctgscgcaagcagctggttgaatagtgttaccatttactaagttgagaaacaactgggaaactataagtttttatggtgggatgggatggggctttcattttat

SEQ ID NO: 480537 - DNA, 201 bp, Homo sapiens
gttgaggaatgaactaatagattattaagtattaattactttagggtcttcaatgaggaaaattaaaaatttgagaaactagttcactcagttcaatattyagttacatgatttggaatatggcttatttttcttgtcatagtccttattaaaatgtgtgatctacttttaactttttaggtatacctaaaggcactttta

SEQ ID NO: 480538 - DNA, 201 bp, Homo sapiens
acagacagtgctggtacaagtatgcaagttttctgtaaacagattactttcaaacagttgggagccccagggagataatagaaggtatcctactcaacagsagtatatagaatgctgtagaagaggaatattgtaagaacaagaactatctcttgaaaactaaaaatatgataactgaaatataaatttaaataggattgg

SEQ ID NO: 480539 - DNA, 201 bp, Homo sapiens
tttgctttttgaggcggagtttcccttttgttgcccaggctggagtgcaatggcacgatctcagctcactgcacccaccgcctcccaggttcaagcgattytcctgcctcagcctcctgagtagctgggactaacaggcgtgcaccaccatacccagctgatttttgtatttttagtagagatggggtttctccatgttgg

SEQ ID NO: 480540 - DNA, 201 bp, Homo sapiens
gttaataggacaaagaagactaaagcttatattgtagaaaaagaggaaaaataaattaggattggcattaatagaggtctgcttgacaaaaaattaaaggkacaattggcttctgtgtctcaatcctctttttttcttaatagtgatagctgaaaatatgtgggaccctttttctacaacacagacttcaagaatggtggg

SEQ ID NO: 480541 - DNA, 201 bp, Homo sapiens
tggattgtttctcttgggactcagaaaacaataccataaaatgaaggcctcagaaacagccttagaagaactttttctttgaccttctcctgcccaccttycagtcctgttctcccttgagggttgccatagaaactagaatccctgttgccccaggcgggtcatagacaccagaaccccttttccgcaaagccaaccata

SEQ ID NO: 480542 - DNA, 201 bp, Homo sapiens
atggaaaaatggtcctgtagtcctttttaatgtatttcagattaagactgacttaactttcttctgaactgctgctaaaagcaaaactagtttctgttagttttttttttttttttttgctttttgaggcggagtttcccttttgttgcccaggctggagtgcaatggcacgatctcagctcactgcacccaccgcctccc

SEQ ID NO: 480543 - DNA, 201 bp, Homo sapiens
aacaattaattcaagctttactggattgagcccataattgaatgaaaagttcccctttttttaattaaaaaaatttttaatgatgtcaataccattggaakaaactttcttaatttatgaattttattttacatatattttaattcttcaaaaatttaggtgaacaacctttggacaaaacaggacatgttaaggatacaa

SEQ ID NO: 480544 - DNA, 201 bp, Homo sapiens
atttttatctgttttccagcatcataatacagtttcattacttttttttttttttttttttgagacggagttgtgctcttgttgcccaggctggagtgcartggtgcaatctcggctcactgcaacctctgcctcctgggttcaagcgattctcctgccttagcctcccaagtagctgggattacaggtgcccgccaccac

SEQ ID NO: 480545 - DNA, 201 bp, Homo sapiens
aggtacaattggcttctgtgtctcaatcctctttttttcttaatagtgatagctgaaaatatgtgggaccctttttctacaacacagacttcaagaatggkgggaattacactaaaattaatcaatggatatccttcagtagtgaatgcagaaaataaaaatacacaggtaatttagtatcttttgaagcctttttttttt

SEQ ID NO: 480546 - DNA, 201 bp, Homo sapiens
agaactttagatgatgatgtatttatgcccttatatcccaaaaagtaagtaactctgaagaacattaaagataatattctccattgtgtttcagagaaggsttataaaattctgaaaaactagcttgaaatacaaacttcacccatgtagtgtattacagagagactagattagtggcgagattgttcccttaagcagaat

SEQ ID NO: 480547 - DNA, 201 bp, Homo sapiens
tggtttgagaggagtacagacagatttttgtttttgagatacatgagctatttttttttaagtatttagtacttttaaaatttcaaatcaaagaaaagtgrtttgcccttaccttagctttaaaaccactatgtcagcttgtggtggatgtagttactcagaattgacagcacctttttattttagatattttgtttcgga

SEQ ID NO: 480548 - DNA, 201 bp, Homo sapiens; identical to SEQ ID NO: 395483

SEQ ID NO: 480549 - DNA, 201 bp, Homo sapiens; identical to SEQ ID NO: 395478

SEQ ID NO: 480550 - DNA, 201 bp, Homo sapiens; identical to SEQ ID NO: 395244

SEQ ID NO: 480551 - DNA, 201 bp, Homo sapiens; identical to SEQ ID NO: 395270

SEQ ID NO: 480552 - DNA, 201 bp, Homo sapiens; identical to SEQ ID NO: 395479

SEQ ID NO: 480553 - DNA, 201 bp, Homo sapiens; identical to SEQ ID NO: 395232

SEQ ID NO: 480554 - DNA, 201 bp, Homo sapiens; identical to SEQ ID NO: 395397

SEQ ID NO: 480555 - DNA, 201 bp, Homo sapiens; identical to SEQ ID NO: 395320

SEQ ID NO: 480556 - DNA, 201 bp, Homo sapiens; identical to SEQ ID NO: 395321

SEQ ID NO: 480557 - DNA, 201 bp, Homo sapiens; identical to SEQ ID NO: 395312

SEQ ID NO: 480558 - DNA, 201 bp, Homo sapiens; identical to SEQ ID NO: 395398

SEQ ID NO: 480559 - DNA, 201 bp, Homo sapiens; identical to SEQ ID NO: 395313

SEQ ID NO: 480560 - DNA, 201 bp, Homo sapiens; identical to SEQ ID NO: 395314

SEQ ID NO: 480561 - DNA, 201 bp, Homo sapiens; identical to SEQ ID NO: 395399

SEQ ID NO: 480562 - DNA, 201 bp, Homo sapiens; identical to SEQ ID NO: 395315

SEQ ID NO: 480563 - DNA, 201 bp, Homo sapiens; identical to SEQ ID NO: 395316

SEQ ID NO: 480564 - DNA, 201 bp, Homo sapiens; identical to SEQ ID NO: 395317

SEQ ID NO: 480565 - DNA, 201 bp, Homo sapiens; identical to SEQ ID NO: 395477

SEQ ID NO: 480566 - DNA, 201 bp, Homo sapiens
cgggcggagcgcgggctggcgccgaggaccggccttgcgagcggcgcgcactataaaatggcgcgtgctgcaacccgcgcccgcttcggagagagaaatgytggggtgaggttcttaagtttattactttttccggctgtgtggaaagacgcacgtgtcctgaagggttcgaggctgcgacgggagcggccatgtagtcgc

SEQ ID NO: 480567 - DNA, 201 bp, Homo sapiens
tcccccattcgtgccttttctgtgtccttcccctgacagcatccctccagacactctgctgtttcctgcctaggcgtggctgcagccatggctaggaaagygctgccacccacccacctgggccagagctggttctgctcctgctgcagggacactgagctggctatctcggcgcttcgggcaagaactgcaacaggctct

SEQ ID NO: 480568 - DNA, 201 bp, Homo sapiens
gcacgtcgtcctttggcaatattaaaatctaccaacaaatgggaaaagttaacatttgcaccatcttgccatattcaaaaaccttgtgcttaagtgttttkaaagtaagtttcatggccgaacgcggtggctcatgcctgttatcccagcactttgggaggccgaggtgggtgggtcgcttgaccctaggagttcaagacc

SEQ ID NO: 480569 - DNA, 201 bp, Homo sapiens
aaatagtcccagcggattctctctcgtgtcgggccgccctcggggtcctttctcttcacggcccatctttgatgctgtcttcagaattgccggacgcaggkgacaagacaatcgtttccatcatatccttgcccctttttgtcagccccagagacagcgtctcctcgcttgttcaggaagattctagcggaagcaggcagt

SEQ ID NO: 480570 - DNA, 201 bp, Homo sapiens
acatggtaggggaggcaaaaagccttgggcactaccctccctgtggagctgttcggtgtccgtcgagctagccacaccctgacaccatgttcaagggtacyggaagagaagggtgtctgcccccaacctcccctgtgggtgtcactggccagatgtcatgagggaagcaggccttgtgagtggacactgaccatgagtccc

SEQ ID NO: 480571 - DNA, 201 bp, Homo sapiens
acatgtcaaaactcagcagtggaaaagagacagtaactaccaggtgatcctgtcacgttacttcatgggttttgtagggtgaatgcaatgtgtctttaagyacagcttagcctgcagtgaaccgtttatacataaactgatagaattcagggaactcctattttcacaataaaaataacaggctttatcaggagaattgtt

SEQ ID NO: 480572 - DNA, 201 bp, Homo sapiens
gctctgatcacccctgaggacacagtgcaccccaggacctttgacacctgggggtctgaggggccccagttttaatggcttgtggacttgcagactgtttyctcccccactctcactgtgtctttctgtgttacaggtgcagcttcaagcttaggaccacccaccatgcctatccaggtaagaacccttgctcctgctcct

SEQ ID NO: 480573 - DNA, 201 bp, Homo sapiens
ttcaggggaaagaactaatcaaacatgtcaaaactcagcagtggaaaagagacagtaactaccaggtgatcctgtcacgttacttcatgggttttgtaggstgaatgcaatgtgtctttaagtacagcttagcctgcagtgaaccgtttatacataaactgatagaattcagggaactcctattttcacaataaaaataac

SEQ ID NO: 480574 - DNA, 201 bp, Homo sapiens
gcgtggactggagggaacaagcatttgcgtttcaggggaaagaactaatcaaacatgtcaaaactcagcagtggaaaagagacagtaactaccaggtgatyctgtcacgttacttcatgggttttgtagggtgaatgcaatgtgtctttaagtacagcttagcctgcagtgaaccgtttatacataaactgatagaattca

SEQ ID NO: 480575 - DNA, 201 bp, Homo sapiens
gtattttcaatagagacagggtttcaccatattggccaggctggtctcgaactcctgacttcgtgatctgcccacctcggcttcccaaagtgctgaggttrcaggcgtgagccaccgtgcccggccgcgtttcctactctttaagctctgttagcttggcctctgtccctgaaggtaagtggcctcaggacctggttgcag

SEQ ID NO: 480576 - DNA, 201 bp, Homo sapiens
ttaaaatctaccaacaaatgggaaaagttaacatttgcaccatcttgccatattcaaaaaccttgtgcttaagtgttttgaaagtaagtttcatggccgarcgcggtggctcatgcctgttatcccagcactttgggaggccgaggtgggtgggtcgcttgaccctaggagttcaagaccagcctgagcaacatggcaaaa

SEQ ID NO: 480577 - DNA, 201 bp, Homo sapiens
gttctgaggggccccactccgggaggtgatggtgggggtgtggctgtttcccccattcgtgccttttctgtgtccttcccctgacagcatccctccagacwctctgctgtttcctgcctaggcgtggctgcagccatggctaggaaagcgctgccacccacccacctgggccagagctggttctgctcctgctgcagggac

SEQ ID NO: 480578 - DNA, 201 bp, Homo sapiens
attaaaatctaccaacaaatgggaaaagttaacatttgcaccatcttgccatattcaaaaaccttgtgcttaagtgttttgaaagtaagtttcatggccgracgcggtggctcatgcctgttatcccagcactttgggaggccgaggtgggtgggtcgcttgaccctaggagttcaagaccagcctgagcaacatggcaaa

SEQ ID NO: 480579 - DNA, 201 bp, Homo sapiens
cgaaatgtcttttacagctgatatgttcaaacctgactcagtcgagggtctctcctcattattatttacaagttggctttgtttcttcttccttctctcartaagttcttccaggggatttgtgtcttggcagctttctctgtttatgggttatgtgcagatgtaggcagtgctaaagaaacctgcaaacagtgggggatg

SEQ ID NO: 480580 - DNA, 201 bp, Homo sapiens
gcccatttcctatctcccccaccacgaccccagcaaggatctctacttgacttacctccttcaggcaaccacctagaaaatcgttgagtttgttcatgtcrcaagtgaaagtattttttcatgcattcatcgttggcacgtcgtcctttggcaatattaaaatctaccaacaaatgggaaaagttaacatttgcaccatct

SEQ ID NO: 480581 - DNA, 201 bp, Homo sapiens
ttcccaggacggccccctgtcaatctccacactggccccgcctccagcccagtggctgggacttaatttgggtccggcccttcggcttgggccccgcctcwgcagcctcactcagctcaagcccctgccgcgcaaatagtcccagcggattctctctcgtgtcgggccgccctcggggtcctttctcttcacggcccatct

SEQ ID NO: 480582 - DNA, 201 bp, Homo sapiens
tggctaggaaagcgctgccacccacccacctgggccagagctggttctgctcctgctgcagggacactgagctggctatctcggcgcttcgggcaagaacygcaacaggctctcctgggtcctgcaggtgtacagccgggcccctgccttgtgcctcagctctcgagagctgctgctgccgggtgacctgatccaacctga

SEQ ID NO: 480583 - DNA, 201 bp, Homo sapiens
gccctcggggtcctttctcttcacggcccatctttgatgctgtcttcagaattgccggacgcaggtgacaagacaatcgtttccatcatatccttgcccckttttgtcagccccagagacagcgtctcctcgcttgttcaggaagattctagcggaagcaggcagtattcctttccctaagcatgaaatggggtttcccaa

SEQ ID NO: 480584 - DNA, 201 bp, Homo sapiens
gagtttgcgactcctatagctggcgcgagcggggatgctggggcggacccccctccgtctgccccgcggcggagctcgccccttgtgctgcccgcacgccrcgggcctccgccatcttgtcgatttggttgggggagaggggtgggcgggctgggaggcgacattgagttctttccgagtgtttccattttcgtgctacct

SEQ ID NO: 480585 - DNA, 201 bp, Homo sapiens
ggctgggtttttaattttccttgattagtttaaacaaggacccccctcttcctacaaagcatatttctatgcaaaatggggcttttggtgtttctgaggtkgttaaacagcagcacccactgagcgagcacccacagtgttagtgcttttgcggagaataaactgaacttatcctgccagggtcccagtgagaggcagctg

SEQ ID NO: 480586 - DNA, 201 bp, Homo sapiens
cagggcccgccaggccaccaggctcatgctgggacccaacccagtgcacaaggacttggctgctgagccacacacccaggagaaggtggataagtgggctrccaagggcttcctgcaggctaggggaggagccacccccgcttccctattgtgaccaggcctatggggaggagctgtccatacgccaccgtgagacctggg

SEQ ID NO: 480587 - DNA, 201 bp, Homo sapiens
ccacatcaggagggggtgagggcaccggggcctccatgatgtccagcactgggctccgactgccactgaggacacggtgccccccgggacctttgacaccygggggtctgaggggccctggctctggggagggctggtgggtatcttggctgccctgcaccccactgaccttctcccctcccctgtgccctcctgcctcca

SEQ ID NO: 480588 - DNA, 201 bp, Homo sapiens
tcttctgtgatgtcccccttaggacagtaggtggtcctgggacccacatcaggagggggtgagggcaccggggcctccatgatgtccagcactgggctccractgccactgaggacacggtgccccccgggacctttgacacccgggggtctgaggggccctggctctggggagggctggtgggtatcttggctgccctgc

SEQ ID NO: 480589 - DNA, 201 bp, Homo sapiens
ccctattgtgaccaggcctatggggaggagctgtccatacgccaccgtgagacctgggcctggctctcaaggacagacaccgcctggcctggtgctccagrggtgaagcaggccagaatcctgggggagctgctcctggtttgagctgcattcaggaagtgcgggacatggtaggggaggcaaaaagccttgggcactacc

SEQ ID NO: 480590 - DNA, 201 bp, Homo sapiens
aaggtggataagtgggctaccaagggcttcctgcaggctaggggaggagccacccccgcttccctattgtgaccaggcctatggggaggagctgtccataygccaccgtgagacctgggcctggctctcaaggacagacaccgcctggcctggtgctccaggggtgaagcaggccagaatcctgggggagctgctcctggt

SEQ ID NO: 480591 - DNA, 201 bp, Homo sapiens
tttaatatgtgtatctctttattatttcaatgtttaacaacaaatacatgctgcattacttgcgttataaaaataatgggtgtgaagaaaaagagaagtcrgtagaacccattctaccctaactacttgggatttctttggacagggttctgcttcattggcacatggggcaacttgtaaagaatgctatgcagttgggag

SEQ ID NO: 480592 - DNA, 201 bp, Homo sapiens
atgatctgtccattactgagagtgagatgttaaatatcctattattattatacagcagtgtatctcttcctttagatctattaatatctgctttatatacktggaagctctgatgttaggtgcatagatatttataatttttatatcctcttgccaaattgactcctttatcattatatagtgaacttcttcgtgattttt

SEQ ID NO: 480593 - DNA, 201 bp, Homo sapiens
tcctgactggaatgaagatttgattgctagagctccaacagtcactttgggaccataatattaccttgaggatgggagctacactcagtattagaacaccraaatcagtctatctctgaaaacgccacagaattatcacatatgcccaggactatacaacttttgttacatgagaaagataaaacttttaattttttgcca

SEQ ID NO: 480594 - DNA, 201 bp, Homo sapiens
attttctgtctggatgatctgtccattactgagagtgagatgttaaatatcctattattattatacagcagtgtatctcttcctttagatctattaatatytgctttatatacttggaagctctgatgttaggtgcatagatatttataatttttatatcctcttgccaaattgactcctttatcattatatagtgaactt

SEQ ID NO: 480595 - DNA, 201 bp, Homo sapiens
gctatgtgttaagatatgaccaatgagatataagcaggaattgttaggtaggacttgtacaaaagtgttttaaaggtggactgactttactggaacaccartgtgttccttacctttcacttcttcctgactggaatgaagatttgattgctagagctccaacagtcactttgggaccataatattaccttgaggatggga

SEQ ID NO: 480596 - DNA, 201 bp, Homo sapiens
ctaactcatatcagcaccttctagtgctctatccacttggccttctgccaaccctacccagttaatttcaatcctatttattcaatgtctttactcctgtktttaagcagtcaatgtgatgcccgacttcagatgtcctctcaacattacacaaccatcccttgattcatacctccctgaccacctcaaatctctcacaaa

SEQ ID NO: 480597 - DNA, 201 bp, Homo sapiens
gtttaattttcatgtgtttttgtattttctgaggtccctcttgctactgatttctagttttatttcattatggtcagaaaaaaacacttgatacaatttayatattttttaatttgttcagacttgcgttgtgtcctaacatatggtctatcctggaggatgtgccatgtgctgatgagaagaatgtgtattctgtagcag

SEQ ID NO: 480598 - DNA, 201 bp, Homo sapiens
ctgacttcctgcagaaaaaaaaaggagtccagaaaacattgagatatttttaaacgcagagagaactaaattaacacagaattctatgttcagcaaaaatrtcctcccaaaaaccaatctcaaaaagcatgtttttaaaaaaggaaaattaggaaaatttgtcacaagcaggcttacactataagaagtactaaaggaaat

SEQ ID NO: 480599 - DNA, 201 bp, Homo sapiens
gtatttctgaagtctcatttattatgtctcctttttcattactgaatttatttatttaggtcttctttttttctcagtctagctaaaggttagtcaatttycttttcaaaaaactaacttcttgtttcatctatcttctgtaaattttgtctcaattttatttattttggctctgatcttcattatttatttccttctact

SEQ ID NO: 480600 - DNA, 201 bp, Homo sapiens
ttaatttttcagttgtggtacaccttgaattttacaattttttttctttctcttacacaggcaaagcaaattgaagaattggagcactgaatataacatcyacagacatttgaattagaaaatgtattaattatttattgctgcataacaaattactccaaaattcaatggtttaaaaaaataaacatttattttctctga

SEQ ID NO: 480601 - DNA, 201 bp, Homo sapiens
cattccagtcaagacttccagtgttatgttgaaaaaaagtggtgaaagtgggcatccttgtgtttgttccattccttagaggaaaggccttcaatgtttcyccattcagtacaatgttagccatgggtttgtcatatatggcctttattattttaaggtgtgttccttttatacccattctgatgaggattttcatcataa

SEQ ID NO: 480602 - DNA, 201 bp, Homo sapiens
gtaagggatccactggaaatttgcacctaggaagtctggcttgtgctccaaaccactgggatacaccctggatacgctttatctcccaaagaggaagagarttgctcagtttatatgttgcatgagtgagtgagtaagagtgaataagtgtttaaattcactatgttcataaaattcggctctattgaaatggcttaaggc

SEQ ID NO: 480603 - DNA, 201 bp, Homo sapiens
acgaagtctcatgtttggatctgtaagatttgctaaagggccaaaattgtacatgctttgactaattattaaattccacagccagacacactgcccccccmcacacacacacacatgattgttcaattaatatctgtcaaacagcttgatactcataaatgcagatgcacatattaactcctttcttccttcttcttgtct

SEQ ID NO: 480604 - DNA, 201 bp, Homo sapiens
ttcttgtttgcctcatatatctgtttaaaaacattcgctgaatcccatgaagacatcttcttaaggtaaagtagaatgagaatcatctaagtaaatcaacragtgaactgcaatttttgtcaaaaccaatcttggcctagcagccaagttttttccatcagggaacatgatttccactctaccctgaatttaggacaaact

SEQ ID NO: 480605 - DNA, 201 bp, Homo sapiens
cattgaatctgtgcattgctttgggtattattgtcaatttaacaatattaattattatattaatttcatttcttttcagaattttatagttttccttgtaytgaccttgcacttctttggttagattgattcctaggtatttgatatttttgtagctattgtaaatgcaattaccttcctaatatctttttcagattgttt

SEQ ID NO: 480606 - DNA, 201 bp, Homo sapiens
atgttggcctccttggaagtcttttccctcaatgggtacttggcctcagctacagaggtaatagttacttccaatatctgctactattgtattctgtagcrttctccttattgcttcttagttaatcctattattaattaattcttagttcattataataattctttatatttgaaatattccattcaagttactgagtag

SEQ ID NO: 480607 - DNA, 201 bp, Homo sapiens
cacttgaagactattattcctggccatgtacagtgagccaaaaggacagaaacaaacgtgatggtgtgagggaggaagcctcccaccatcttacccaattkcataattacagttccctcccaaataaaccaaaagcttccacaagattcctcctctgctatcctgattttatctaggaattgaactattagcatcatcctt

SEQ ID NO: 480608 - DNA, 201 bp, Homo sapiens
atagaggtctagtttaattcttctgcatatggatatccagttttctagcactacttactgaaaagactgtcccttctccattttatttcttggtgcctttrtcaaagatgagttggctgtaaatgtgtgtatctatatctggattctctattctgttccgttgttgtatgtatctatttttatgtgagtaccatgatgttt

SEQ ID NO: 480609 - DNA, 201 bp, Homo sapiens
ttgtcacaaatgtcaggagcttactgcattctaaactaaattaacttatatggtggaatgtcaggcatgtaaggccaaataatctagcacattaattaatyatcatatattattttgcaaagatccaaaaatcagaaaagtctcaaagaaattgaacttctattagggtagacttccttaaaccaattaacatgtatttta

SEQ ID NO: 480610 - DNA, 201 bp, Homo sapiens
ctgttcttgggtaaatgagaaagtatcaaagtaccttcctatcctctccccaaaaaaattatagttaagtttaccgtcttagaatgatattaaaggaaatkaaattacatgtaatttatcaggccacccaggccagatagaataactcctgagacttttctgggaatatgtgaataaaaacttggagaataaccccaaatc

SEQ ID NO: 480611 - DNA, 201 bp, Homo sapiens
tgaaataagcagttacaagacttgagctagtttttcactaggtttctttatgataggaaaaattatcattgttctagtttaaacatttattagtatatatrtctcagtttatagatatttctcctcacctactaaatttcagagatgctattcaaaggaaattaacactaaattttccagcagaatctgtgatatagagaa

SEQ ID NO: 480612 - DNA, 201 bp, Homo sapiens
tttgtgtgtgtgttgttgttgttgttgttattgtgagacagagtctcactcttcgcccaggctagaatacagtggcgtgatcccagatcactgcaacctcygcctgctgggtccatgctattctactgccttagcctcccaagtagctgggattacaggcatgcaccactacaactggctaacttttgtgtttttagtaga

SEQ ID NO: 480613 - DNA, 201 bp, Homo sapiens
atgtgcacaggggtaaggggagatcagacaataaacatataaataagagaatgcatagtctatctgatggtaataagtctatcctaatttccttgagcacrgtaaggagagtaaggagtgtctagggtaaaaatggtagttactgtattcgaaagagtggttaggaaaggctgatttgataaggtaacatttgagcaagat

SEQ ID NO: 480614 - DNA, 201 bp, Homo sapiens
cagatttattatattttaacatttttacttcggtgccttgatgatgaatttaattttgaaacatttcaggattacttaattcaagtttcaaaatagaactsaacttcatttaagttggcatttcattgatttaaaacatgaagtccactttctgtaattctccatgggattaaataagagagagactatccaattgatttt

SEQ ID NO: 480615 - DNA, 201 bp, Homo sapiens
tttgctggtatgtgcacaggggtaaggggagatcagacaataaacatataaataagagaatgcatagtctatctgatggtaataagtctatcctaatttcyttgagcacggtaaggagagtaaggagtgtctagggtaaaaatggtagttactgtattcgaaagagtggttaggaaaggctgatttgataaggtaacattt

SEQ ID NO: 480616 - DNA, 201 bp, Homo sapiens
aaggagtgtctagggtaaaaatggtagttactgtattcgaaagagtggttaggaaaggctgatttgataaggtaacatttgagcaagatctgaagagagtkagttagtaagccttgtagatattgggaggaaaagcctcctgagtagattgggacagcaagtgcatggacaatgagtgttatgttctaggaacaatggaat

SEQ ID NO: 480617 - DNA, 201 bp, Homo sapiens
agtataaaataaaagatctccatcatgatagagataatttgctggtatgtgcacaggggtaaggggagatcagacaataaacatataaataagagaatgcrtagtctatctgatggtaataagtctatcctaatttccttgagcacggtaaggagagtaaggagtgtctagggtaaaaatggtagttactgtattcgaaag

SEQ ID NO: 480618 - DNA, 201 bp, Homo sapiens
aaatatttttcaactctgtactttcctgtttctcctccttcctctctgatttcttcttcatcttctctttgttgtcaggtgttctaataggtagtgtccaytgaggctctcattttggcaagcagctcttctcttgatttacccatttagccatttcatccactcccgtgacagatgatttccaaacttacatctttacct

SEQ ID NO: 480619 - DNA, 201 bp, Homo sapiens
ctctgggtgcacatgcacagtagctgcacatgcttgttcatgcatcgtgtgtctcattagcatctgaaatctccacccaggagtgtatttttcactattgwaatgagcaaagcgccaatttgaggactggtaaaatccaagtgcacatgctctctagaaggaaaagtccccaccgcagatagctttgcttgaatgagctca

SEQ ID NO: 480620 - DNA, 201 bp, Homo sapiens
tgggaggcagaggtaggagggttgcttgagctcaggagtttgagaccagcctgggcaacgtggtgagaccttgtctctacgaaaaattagccaggcatggyggtgcatgcctgtagtcccagctacttgggaggctgagacaagaggatcactcgagacaggaggtcgaggctagagtaagctgtgattgctactgcactc

SEQ ID NO: 480621 - DNA, 201 bp, Homo sapiens
cactctttctgaacttttctttgatcatcatattttatactttgatttttatttaaataaaaatttttaaaaacctggtgcaccacatgtttaatacccaycctcccgaacattgaaatatctattttcttgtcttattcttctcttcacctaattcctcctacttactataataataataatactttttttttttgagac

SEQ ID NO: 480622 - DNA, 201 bp, Homo sapiens
ccacttgttttgaattctaaaaggtgatgtttttactataatgggagtacttatgtggaatactgtctaatttttaccatctgaagactgttcttgaaaartatctcatcatcttgggtcacttcagcctgacagtctattcatggaatcaactatctgtgatattagctgataactcattcttgtttgcctcatatatct

SEQ ID NO: 480623 - DNA, 201 bp, Homo sapiens
tgctaaatatcatcccttttaacctgaccttccactatctagttgacaaagagttcatccagtgcaaaaacttatattctgcaacttaaaattctatcagwggttgaagtaacactgacataaattgaatccagttaatttcagacaagaagtgcacagttcataagaaaaaagttttataacagatgcaacttagccaat

SEQ ID NO: 480624 - DNA, 201 bp, Homo sapiens
acatgaatagacactggattccctgacttgggcaatatttatcctgtttttcagtctgaaaactgatttttcttctataccaatgtgccattgtcagtgcrctatcatattgtgtctttacttagagatgtgtctcaatatgagaagactaaacaataatgatatagacctataaaggactatgtgatgtatcatttcatt

SEQ ID NO: 480625 - DNA, 201 bp, Homo sapiens
gtgcactatcatattgtgtctttacttagagatgtgtctcaatatgagaagactaaacaataatgatatagacctataaaggactatgtgatgtatcattwcatttacatttcttcttagaacatgaaaggtggtgaagcaagaagaataaagatatacaaagtagaaacgtttgatttttcttgggtctacatttttttc

SEQ ID NO: 480626 - DNA, 201 bp, Homo sapiens
tgaaaggtggtgaagcaagaagaataaagatatacaaagtagaaacgtttgatttttcttgggtctacatttttttctctatcataaccagcttttaaacwataaaatatgctcatttatgaggatcatcattatgagttgcagtgaaaatccacttcaagccatctgcctagttacaaaacctcggagtgcctgctctcc

SEQ ID NO: 480627 - DNA, 201 bp, Homo sapiens
tggatcatggaggtagagttctcatgaatgggtttagccccattcccgcctggtactttatagtgaatgagttcttaccagatctggttgtttaaagtgtrtggcacctcctctctctctctcactcctgctctgccatgtaagacacttgctctcgctttgccttccactatgagtaaaagctccctgaggcctccccag

SEQ ID NO: 480628 - DNA, 201 bp, Homo sapiens
caaggggaggaacctcagctccaccttttgaagtagggagtatcaaaaatttccaaatatatttttaaactaccatgggagaaacatatgtacattacacktaagtaaacaatgatacaaatgacttctgacttcctgcagaaaaaaaaaggagtccagaaaacattgagatatttttaaacgcagagagaactaaattaa

SEQ ID NO: 480629 - DNA, 201 bp, Homo sapiens
accttctcaagcaacacacaaacacagaaaccataaatataaagaccaacaaattgaaccttgtaattttatttttacattttaataccaaaggggagaastcattaaaaggtactttctaacgccagaaaagggttcatagtcttgacaccaaaagcacaattcaaaaagaaaaaaaattataaattggattaaatcaat

SEQ ID NO: 480630 - DNA, 201 bp, Homo sapiens
acataaaacaacttgcatttattttatttttattatttatttattttttcgaggccaagtccccctctgtcacccaggctggagtgcaggggcatgatctyggctcactgcaacctccatctcccaggttcaagtgattcttatgcctcagcctcctgagtagctggtactataggcgagcaccaccacgcctggctaatt

SEQ ID NO: 480631 - DNA, 201 bp, Homo sapiens
gctcaggagtttgaggcagtagtgcacaatgatcacacctgtgaatagccactgcattccaacctggacaacctagtaagaccccatctttttaaaaaaawaagtattttggagtacctatcatctgccaggcactatgctaaatactggtatgaacactgtttttattactgttgccttttttacattaatttgattgtc

SEQ ID NO: 480632 - DNA, 201 bp, Homo sapiens
gtgaaaatcacattagcagaaatattcatatgtgcattggttgagaggtaacagacatgtctggaaggataatcacctaaaggtgatggtagttgcctttsgatgggggtgtgttttgagagtgttccttcattctttaccttgttctgctgcagcatagagttttctattcccctttccagttgtagactcatcttccag

SEQ ID NO: 480633 - DNA, 201 bp, Homo sapiens
gtgaatgatacatggaatcaaatgaaaaagcatttaaaatagtagaggggaaaaaaggaagaccaaaaatatattaagaaacacataaaaaagaaagcaartaacatagaaaaagtgaaattccaatcatattattaaacagggacatttcgtgttgataaaagttacaaagccaaatgacaaagcatgaaagtctatgaa

SEQ ID NO: 480634 - DNA, 201 bp, Homo sapiens
acagtgatccaaagttcatcactaaaagatgtggggaaaaagtggtgatcaaaactttgcaatacaataatggacctttttaaatctaaaaatgtgaaaawcaatgcatcaattttcatactttctcttttaaattttctttcttttgatccccaatatattatcagtataatcaaatgacattagtattaaccaacatca

SEQ ID NO: 480635 - DNA, 201 bp, Homo sapiens
atgccacaaaatacaactgtagtgggaaaatttaacacaccagtaacactttttgagaagtatattgacccttgcactctacaaatggagactaaatattmttttcatgtaccttggattatttcctaaagtgtatcatattagctacaaaataacctcaaaaatttcaaaaagtagaaattccagagctcacagcctctg

SEQ ID NO: 480636 - DNA, 201 bp, Homo sapiens
acctccactgactcagacttccataaacaagacactttggacacaaaggagtttctcgttctgtttctgtatctgtcgcctctaaaaaatacagtgatccmaagttcatcactaaaagatgtggggaaaaagtggtgatcaaaactttgcaatacaataatggacctttttaaatctaaaaatgtgaaaatcaatgcatca

SEQ ID NO: 480637 - DNA, 201 bp, Homo sapiens
taatcaccacctgtcagacttaacgtgcatttttatcctcagtttgcaatattactaatcacctcatttagattagaagcgtgccaagaaaagactatagttttatgacatttttataaagcatcaagcatcatgtatgctcaaaataactgttagagcatcatagccagtggttttatgtgtttcttcatttctattcaa

SEQ ID NO: 480638 - DNA, 201 bp, Homo sapiens
atggcaaagaacgatataaagacaatcatctggcttctgctactttacaaacaaaaggcaagagatagcatactggagagaaaacaaaataaaaacttttmataatgatagtgtcccatgtatcaatctcccattgtatttccacattgcacagttaatatcagaggccacctccactgactcagacttccataaacaaga

SEQ ID NO: 480639 - DNA, 201 bp, Homo sapiens
aaaaaaaaagtggtaaagtagtaacagtgtgtctacaataaactcccatttaggaaaagaaagaaaaggccaggcacggtggctcacgcctgtaatcccartactttgggaggtggaggcaggcgaatcacgaggtcaggagatcaataccatcctggctaacacagtgaaaccccgtctctactaaaaatacaaaaaaaa

SEQ ID NO: 480640 - DNA, 201 bp, Homo sapiens
ctgcttccccgatgcataatttaggttataattattttctcattttcccctccagctggcaccagtttgatcgctcccatttcatagatctttacaatgtyacactgttgctccagcttatttagaaatcctggaaagaggggaagtggagattgcagggcagcctcagccctcagaaaagtttctctgctttctcatgtg

SEQ ID NO: 480641 - DNA, 201 bp, Homo sapiens
aatcccagtactttgggaggtggaggcaggcgaatcacgaggtcaggagatcaataccatcctggctaacacagtgaaaccccgtctctactaaaaatacaaaaaaaaaaattagccaggtgtggtggcgggcgcctgtagtcccagctactcgggtggctgaggcaggagaatggcgtgaacccaggaggcggagcttgc

SEQ ID NO: 480642 - DNA, 201 bp, Homo sapiens
ctcagatggaacaagaggctgccagacgagaggtaggcaaggtggcacagactcaactgtcaccctaactgtatttctcaccctaccataaccttcgttaytgacatggtcaaaaaggaaacagaggctgcggcaatggcagcagcagcaacagtgaaagcaaccaagagagaaggcagctggcactggagggcatcgtgc

SEQ ID NO: 480643 - DNA, 201 bp, Homo sapiens
agttccaacctcacagttttgttgggacaattacgttgtaaacatacatagcgctgcatgccaggcagattcaggggttggcaagtagcagcgactattcrctttttatcttcctgctgcctattcccatgtttgctaagtcaatttttgaatcaacagagggaactctgagacaacatcctaacagcgagcaggtggcag

SEQ ID NO: 480644 - DNA, 201 bp, Homo sapiens
gcagaggctgcacaaggcgcggttctcagccagcagcgtctgccacagcaggctgcctctaaaatcataacacgtaaaagttctaagtgatgtttgtctgyctcagaagtgcaaatgtgacatttgcccctggctgcagtcatggtgtgggtgaaaagagcagaggggcatccaagagtgacaagaattgctttctgtcat

SEQ ID NO: 480645 - DNA, 201 bp, Homo sapiens
ataattcaccagaatgtttataaacacatgcatataagaaaattgcccatgtgcacagaaagaacgatctgaaagggctaaaggaaacccagtcttcacasaggctgggaatagcgcctgtctccaacagccatagtggaaatttttataattcataagaccttggacagagtactcagaaggatcttgcctccatagctg

SEQ ID NO: 480646 - DNA, 201 bp, Homo sapiens
aaaaagataccagcagcagcaacaaaaaccatcaagtacctgggaattaacagaatattgaagaacacagaatatggaatgcatatagaacattttatatktaaatacatacatataatatctttaaaatgatatactatacaatatacagtattaaagaatatattaataatgtcaatatactccaactcaaactacaaa

SEQ ID NO: 480647 - DNA, 201 bp, Homo sapiens
atccaactcccctcagattcattctttccacactgctgccagagagatgcttattcaaagcaaatatgagaatcctctacttaaatctcatgaatgaattmcagttttaagatggagtagagatcttctggaactctattccagaaagaaacaggaattcagatttcatctttgattaaatcagaaataaatagaacttga

SEQ ID NO: 480648 - DNA, 201 bp, Homo sapiens
atttgggcagggacactgatccaaaccatatcaccaagtgaaagaattcagacacagaaaaccacatgctgtatgattcgatttatatgaaatatactcartagatcaatccatagaaaagtagtcaccaggggctacagggaggaggaaatgggaagggactgcttaatgggtagagggttcccttttggggtaatgaac

SEQ ID NO: 480649 - DNA, 201 bp, Homo sapiens
taaacacctgtcgactaactttcagattatgatctgattataaaaataagagttacagtctctgtcctcgtgcatcttacaatctagcaaagaaaatatayattaaactaataattattacaaacagttgttctctatgtttctgtgcagtgagatgtctccttcacatttcaagattagatcaatttttttcttttttct

SEQ ID NO: 480650 - DNA, 201 bp, Homo sapiens
cccatttgtctatttttgctttggttacttgtgcttttgagatcttacagagtaaacctttgcccaggccagtgtcctggagattttcccccaatgtttcyttctagtagtttcatggttttaggtcttagatttaagtgtttaatccatattgactgaatttttgcatatagtgagagatagaggtctagtttaattctt

SEQ ID NO: 480651 - DNA, 201 bp, Homo sapiens
tcctgcctcaaatgcacataacccattgatagacccatagcaatgcaataaacacctgtcgactaactttcagattatgatctgattataaaaataagagktacagtctctgtcctcgtgcatcttacaatctagcaaagaaaatatatattaaactaataattattacaaacagttgttctctatgtttctgtgcagtga

SEQ ID NO: 480652 - DNA, 201 bp, Homo sapiens
cttgaagaattccccaaactgactttgcctctttttacatctcagagtggtaggaaatcctaataatcatgtatcatttcctttctaaatatttttcaacyctgtactttcctgtttctcctccttcctctctgatttcttcttcatcttctctttgttgtcaggtgttctaataggtagtgtccactgaggctctcattt

SEQ ID NO: 480653 - DNA, 201 bp, Homo sapiens
aattcctttttcaaaacattaatatcgttatatttctgtaaaattatttacaaagtgtaaacaacccagatcatagccacaaatagaaataaaagctacaragtaacttatccaccccacccctatgatgtttcagagccaatgagaattgaaaggtgaggctgagctcttccattctctgaatgaagataaccaggcttc

SEQ ID NO: 480654 - DNA, 201 bp, Homo sapiens
ggaggccaagttagctcgcatggaatgaatccaagaagacatttctgttgctctagatcattgtcatgctggacaagtttaaagaacttcattactaatcyacgttggattccattgtgggtcttatccttccacacttgctctcctatagcaattcctttttcaaaacattaatatcgttatatttctgtaaaattattt

SEQ ID NO: 480655 - DNA, 201 bp, Homo sapiens
caagtacctgggaattaacagaatattgaagaacacagaatatggaatgcatatagaacattttatatttaaatacatacatataatatctttaaaatgayatactatacaatatacagtattaaagaatatattaataatgtcaatatactccaactcaaactacaaattcaattcaatcccaatcaaaagtccagctcg

SEQ ID NO: 480656 - DNA, 201 bp, Homo sapiens
aagccttgtagatattgggaggaaaagcctcctgagtagattgggacagcaagtgcatggacaatgagtgttatgttctaggaacaatggaataggagcayggaggccaagttagctcgcatggaatgaatccaagaagacatttctgttgctctagatcattgtcatgctggacaagtttaaagaacttcattactaatc

SEQ ID NO: 480657 - DNA, 201 bp, Homo sapiens
cagaagttaactaaccttccacacaactagaatcagtggtactgccaggattgaaacccaggcaacattgcttcaaagtcatctgtcctaaccactacackgtattataaagatagtgccttttcatccattcattccacatctattgagtacctgcaactgttctagaacatgggggatgtagcagcaagtataaaataa

SEQ ID NO: 480658 - DNA, 201 bp, Homo sapiens
acgcacctgtagtcccagctactcaggaggctgaagcaggagaattgcttgaatctgggaggcagaggttgcagtgagccgagaccgcactattgcactcmagcctgggtgacagggcaagactccgtctcaaaaaaaaaaaaaaaatagtgatagctaacattaacagagcaacaactctgtaccaggcactgtcctcag

SEQ ID NO: 480659 - DNA, 201 bp, Homo sapiens
gcacgcacctgtagtcccagctactcaggaggctgaagcaggagaattgcttgaatctgggaggcagaggttgcagtgagccgagaccgcactattgcackccagcctgggtgacagggcaagactccgtctcaaaaaaaaaaaaaaaatagtgatagctaacattaacagagcaacaactctgtaccaggcactgtcctc

SEQ ID NO: 480660 - DNA, 201 bp, Homo sapiens
agaatattctgaatagagataaattaattaatggatccaacaaccagcatcagcgtgctcatacttcaaaaggatagtactcttttttaatgcctccaatwtcttattaggaaaaacaggtcaaattaagacaaactaattcagctcaatttgtctcttttcagcttcaggtcttataagattgtaaaagcccacacctat

SEQ ID NO: 480661 - DNA, 201 bp, Homo sapiens
aagcctggccaacatagtgaaacctcatctcgactaaaaatacaaaaattagctgggtgtgctggcacgcacctgtagtcccagctactcaggaggctgargcaggagaattgcttgaatctgggaggcagaggttgcagtgagccgagaccgcactattgcactccagcctgggtgacagggcaagactccgtctcaaaa

SEQ ID NO: 480662 - DNA, 201 bp, Homo sapiens
tgctacataggtaaacacgtgccatggtggtttgctgcacctatcaacccatcacctaggtattcagctcaacatgcattaactattttcttttcttttcttttttgtgtgtgtgttgttgttgttgttgttattgtgagacagagtctcactcttcgcccaggctagaatacagtggcgtgatcccagatcactgcaacc

SEQ ID NO: 480663 - DNA, 201 bp, Homo sapiens
gctacataggtaaacacgtgccatggtggtttgctgcacctatcaacccatcacctaggtattcagctcaacatgcattaactattttcttttcttttcttttttgtgtgtgtgttgttgttgttgttgttattgtgagacagagtctcactcttcgcccaggctagaatacagtggcgtgatcccagatcactgcaacct

SEQ ID NO: 480664 - DNA, 201 bp, Homo sapiens
ctacataggtaaacacgtgccatggtggtttgctgcacctatcaacccatcacctaggtattcagctcaacatgcattaactattttcttttcttttcttttttgtgtgtgtgttgttgttgttgttgttattgtgagacagagtctcactcttcgcccaggctagaatacagtggcgtgatcccagatcactgcaacctc

SEQ ID NO: 480665 - DNA, 201 bp, Homo sapiens
cactattttcatgcttctaaacactttatgtgtattagtccactagatcctcataacaaactcttggggtaagtatgattcataatcatttacagataagyaaactgaactgcagaagtgttaacatagtgaggaagtgaaggagccaagattccaactccaccatccggccgcagaggctgcacaaggcgcggttctcag

SEQ ID NO: 480666 - DNA, 201 bp, Homo sapiens
tacataggtaaacacgtgccatggtggtttgctgcacctatcaacccatcacctaggtattcagctcaacatgcattaactattttcttttcttttcttttttgtgtgtgtgttgttgttgttgttgttattgtgagacagagtctcactcttcgcccaggctagaatacagtggcgtgatcccagatcactgcaacctcc

SEQ ID NO: 480667 - DNA, 201 bp, Homo sapiens
taacatttttatttttatttgtatagaagatatattccaatatacttgaatatgctgagctaattctctttccacactccccaaattatcttccctccccrccacatacataatagcttgaaatttctcatatctggccagaaaagggtagggggtaggcaagaaaaaaaggtaacgcatggtgggcaaagatggtctgag

SEQ ID NO: 480668 - DNA, 201 bp, Homo sapiens
tatgagctgtaacactcactgcaaaggtctgcagcttcactcctgaggccagcaagactacgaacccatcagaaggaagaaactctgaacgtgtccgaacrtcagaaggaacaaactctggacgcaccgtcttcaagaactgtaacactcactgtgagggtccgtggcttcattcttagtcagtgagaccaagaacccacc

SEQ ID NO: 480669 - DNA, 201 bp, Homo sapiens
acataggtaaacacgtgccatggtggtttgctgcacctatcaacccatcacctaggtattcagctcaacatgcattaactattttcttttcttttcttttttgtgtgtgtgttgttgttgttgttgttattgtgagacagagtctcactcttcgcccaggctagaatacagtggcgtgatcccagatcactgcaacctccg

SEQ ID NO: 480670 - DNA, 201 bp, Homo sapiens
gctagctgtctttgtatttcaatgcatgtatccatttttattttataaatcaaggtctaacttatctgttgttttgtcctgattcttccattaaatatacyatgaacatttgcgtagataagtaaatatttttttaacatactcttaatagctacatgggttgtagtccattttataggtctcaactaggtgcaattttgc

SEQ ID NO: 480671 - DNA, 201 bp, Homo sapiens
gcgtgtaccattacgcccagctaatttttgtatttttagtagagatggggtttcaccatgttggccgggctggtctcgaactcctgacctcaaatgatccrcccacctcggcctcccaaattgcttcaattacaggcctgagccaccatgtcaagccccgagttcttacagcaagtaacactggaggtgggatacaaaccc

SEQ ID NO: 480672 - DNA, 201 bp, Homo sapiens
ctcatcctttttatgactgcatagtataccatggagtatatctgccacattttcttaatccagtctatcattgatggacatttgggttggttctacgtctytgttattgtgaatagtgccacaataaacatacgtgtgcatgtgtctttacagcagcatgatttataatcctttgggtatatacccagtaatgggatggct

SEQ ID NO: 480673 - DNA, 201 bp, Homo sapiens
gtatttcaatgcatgtatccatttttattttataaatcaaggtctaacttatctgttgttttgtcctgattcttccattaaatatactatgaacatttgcstagataagtaaatatttttttaacatactcttaatagctacatgggttgtagtccattttataggtctcaactaggtgcaattttgcccccaggggacat

SEQ ID NO: 480674 - DNA, 201 bp, Homo sapiens
cactctgagggagaatctgtctgtcccacaattctcctctagtttctgatggttgccaacaaacctcagcatctctgtctttttgttttctttttttttatttttttttttttgagacagagtctcgctctgtcacccaggctggagtgcagtggcgtgatctcagcaacttttgcctcctaggttcaagcgattctcgtg

SEQ ID NO: 480675 - DNA, 201 bp, Homo sapiens
gcgggcgggaacctgggctgcgcgcggcgctcgcgggccagcgcgagttccgggtgggcgtgggccccgcgggccccgcactcggagccgccggccggccmgggcagtgaggggcttagcacccgggctagcagctgcggagggtgcgccgggttccccagcagtgccggcactgcgctcgaattctcgccaggcctcagc

SEQ ID NO: 480676 - DNA, 201 bp, Homo sapiens
tgagggcattatcttcattatcttatctccaacttctccctcactcccacatccaattacttaccaaaaattattgattattcttctcctaattatttctwagttaggactactctctgcatcctcactaacaccaccctactccagtctcttatcgtctgacctatttgctggccctaaacctaatccaactcccctcag

SEQ ID NO: 480677 - DNA, 201 bp, Homo sapiens
ggaggctgaggcgggtggatcacaaggtcaggagattgagaccatcctggctagcacggtgaaaccccatctctactaaaaatacaaaaaaattagccagscatggtggtgggcgcctgtagtcccagctactcgggaggctgaggcaggagaatggcgtaaagctggtaggcagagcctgcagtgagccgagatcacgcc

SEQ ID NO: 480678 - DNA, 201 bp, Homo sapiens
aatagaaaccactcgaaacacagagagaaagtaaatttttaaaaaatgaaaagagtgggccgggcacggttgctcatgcctgtaatcccagcactttgggrggccgaggcgggcagatcacgaggtcaggagatcgagaccatcccggctaacacggtgaaacccagtctctactaaaaatacaaaaaattagctgggcat

SEQ ID NO: 480679 - DNA, 201 bp, Homo sapiens
gtggtggcgggcgcctgtagtcccagctactcgggtggctgaggcaggagaatggcgtgaacccaggaggcggagcttgcagtgaacggaaatcgtgccaytgcactccagcctgggcaacagagcgactgactgaatctcaaaaaaaaaaaaaaaaaaaaaaaagcaagaaaaagaaaaagaaagaaaaggccaggcacg

SEQ ID NO: 480680 - DNA, 201 bp, Homo sapiens
ggaaagagactcaagatcttcaggggatatgccctgataattcaccagaatgtttataaacacatgcatataagaaaattgcccatgtgcacagaaagaaygatctgaaagggctaaaggaaacccagtcttcacacaggctgggaatagcgcctgtctccaacagccatagtggaaatttttataattcataagaccttg

SEQ ID NO: 480681 - DNA, 201 bp, Homo sapiens
tccagtagacacagaatagaaaaacatttgaaaaattatgatgcataaaagagaggaaaagagccagatattttaaatgatcatgaagatgagaagaaacagttggtacttcaacttaatggtttgttgttttagggaaaacactagggttatcatgtggagacttagtttctgtgtaatattgaaacagcctaacatcta

SEQ ID NO: 480682 - DNA, 201 bp, Homo sapiens
gacccagatgactgccttaagaagttcgaggcttcaatgcagggagtagcctgacaagctctctgagttgaagagatagagttgagagcatgatgaccaaygaagctaaagattgcaggacagaaaggtgaggaaagagactcaagatcttcaggggatatgccctgataattcaccagaatgtttataaacacatgcata

SEQ ID NO: 480683 - DNA, 201 bp, Homo sapiens
ccaaccacctcggcctcccaaagtgctgggattacaggcgtgagccaccgcgcctggcccataaatctttttaaaacaaggcactccattaatatagatawcaactacatctttaataaattagcaagtgaataaacagttttatttcattttccttcttcccttcttttctcccttcctccccacctcccttccttcttt

SEQ ID NO: 480684 - DNA, 201 bp, Homo sapiens
aacaccagaaatagattaaattatcttttttgttgttgctattagctgctagaaagcttagagctcaacattcaacttattgtttgcaagtatccaagacyagatatttcaagtactgactgctgtgatttgaatgtgttccccagaaattcaagtgttagaaacttaatccctaatgcaacggtgttgggatgtggggcc

SEQ ID NO: 480685 - DNA, 201 bp, Homo sapiens
cacaaaattacaacaatttataaatgttaatctttaaaatgcacttgagaatgattgtcccaaaggttaagtggaagctttttcaaaaaacagatcacaargaactatgccaaccctttcctaaaaatttctataaaattcaaaggaagaaataaacaggaaatctagtttacaaatgaaatttaatatagtagtcgtata

SEQ ID NO: 480686 - DNA, 201 bp, Homo sapiens
ttattcatgcttagtatgtgccaggcaatttttatgtattaatcttcacagcaaccttgtgaggtaagtactattagtttctgcattttacaattgaggaractaaggcaagagattaagacgtacaccaaagatctcaaagctggtaagggatccactggaaatttgcacctaggaagtctggcttgtgctccaaaccac

SEQ ID NO: 480687 - DNA, 201 bp, Homo sapiens
tgttagtttattatctttaaatgtttggcaaaattcagcagtgaagccatcaggtcttgaaatttttattgatgagaggttttttattatgcctttgatcycattactcaatactggtttgttgaggttttctatttcttcgtagttcaatattcatcaattgtacatgtccagatatttgtccatttcttctgggttttc

SEQ ID NO: 480688 - DNA, 201 bp, Homo sapiens
tactggtttgttgaggttttctatttcttcgtagttcaatattcatcaattgtacatgtccagatatttgtccatttcttctgggttttccaatttgttgstatatagttgttcataatactgtccacagattctttgtatttctgaagtctcatttattatgtctcctttttcattactgaatttatttatttaggtctt

SEQ ID NO: 480689 - DNA, 201 bp, Homo sapiens
ggtgggcagatcaggaagtcaggagttagagacaagcctggccaacatagtgaaacctcatctcgactaaaaatacaaaaattagctgggtgtgctggcaygcacctgtagtcccagctactcaggaggctgaagcaggagaattgcttgaatctgggaggcagaggttgcagtgagccgagaccgcactattgcactcca

SEQ ID NO: 480690 - DNA, 201 bp, Homo sapiens
gcaattaccttcctaatatctttttcagattgtttactatttgtatatataaatgctgctgatttttatatgttaattttgtatcctgcaaatttactgatttttttttttttttttttttgcctagtcattccagtcaagacttccagtgttatgttgaaaaaaagtggtgaaagtgggcatccttgtgtttgttccatt

SEQ ID NO: 480691 - DNA, 201 bp, Homo sapiens
gctctgatcttcattatttatttccttctactgattttgggcttggtttcttcttgcttttccagtttcttcaggtgcactgttaggttgtgtatttgaaracttcctactttttgataaatgtatttatcgccataaacttctcccttaggactgtttttgatgtatcccacagattttgatatgttgtatttccatttt

SEQ ID NO: 480692 - DNA, 201 bp, Homo sapiens
cagaaataaaggcaaaaaacacacatacgaaaaaatctacactttaactctatcaccctcatattttgagttttagttgtctcaatttacattttttacaytccatatcttttaataagttgctgtagctattattgtttttgacagatttgtcttttgggctttattatcagagttgtgagtagattgcacaccaccatt

SEQ ID NO: 480693 - DNA, 201 bp, Homo sapiens
tctgctggcaaggtgaatcacttagatgaatcactcaaatgccaggcaattggagccagcacttggtgggaggcctcagttcctctccatgtggactcttycctactattgtgtaagcgtcttcatgatatagtgggtagacttccctcaaaacaagaagagagaaatacagagagccagagagaagctctttacatgtgc

SEQ ID NO: 480694 - DNA, 201 bp, Homo sapiens
tacaaaaaaaaaccatagatatcacaagttattttaaacagatgacatttaccttagatcacacaataaagaccagaaataaaggcaaaaaacacacatamgaaaaaatctacactttaactctatcaccctcatattttgagttttagttgtctcaatttacattttttacattccatatcttttaataagttgctgtag

SEQ ID NO: 480695 - DNA, 201 bp, Homo sapiens
ctttaactctatcaccctcatattttgagttttagttgtctcaatttacattttttacattccatatcttttaataagttgctgtagctattattgttttwgacagatttgtcttttgggctttattatcagagttgtgagtagattgcacaccaccattataggaatagagtattcttggtttgtctacgtacttaattc

SEQ ID NO: 480696 - DNA, 201 bp, Homo sapiens
ctctttgccagaccagatttaaaggaagaggagaaatagactctacctcttgacagagaaatggcatgttttagggtagaaggaattggtggtgaccattsttgcattcagtctactatagctcctcactgcctctctggccccaacaatcccttcccttctgacctctggatagcatgtatttatacgtccagatttgaa

SEQ ID NO: 480697 - DNA, 201 bp, Homo sapiens
aatctttaccactatgttgcagccttctttttggccctaggtgtgtcttaagtccaggttcaccttggctttggtaaatgatcagagtgatgtccgttttsaatgggtgaggtcctaaagggacctggcactgttagaaggctagctaggagtttacacccaaggaaactatgaaacgtaccttctatggtgtgatgctcc

SEQ ID NO: 480698 - DNA, 201 bp, Homo sapiens
ctcctgaacaaccattctgatttgatgtcttcttttgccaagttgcagagcagagtttccagggctgggggtggtagttccacttccctcctttgtcttcrcctgtcctctgtgaagtttctcccttcaggcagccacagtgcttcccttgggttaagacaataacaggtctcctcccaagatatccaagatggtagaaaa

SEQ ID NO: 480699 - DNA, 201 bp, Homo sapiens
tgactggctttacttggagcattctaagaggccccataggatgctgaagtttgttatgatcttccttggaagtctcaaaacatcacttccattgcactctwtgccagaccagatttaaaggaagaggagaaatagactctacctcttgacagagaaatggcatgttttagggtagaaggaattggtggtgaccattcttgc

SEQ ID NO: 480700 - DNA, 201 bp, Homo sapiens
tttgagtgtctttacataatggtggttcacagtagttaaactttttagatagtgactggctttacttggagcattctaagaggccccataggatgctgaartttgttatgatcttccttggaagtctcaaaacatcacttccattgcactctttgccagaccagatttaaaggaagaggagaaatagactctacctcttga

SEQ ID NO: 480701 - DNA, 201 bp, Homo sapiens
gatttttttccctatggcatctgctgaggctggaatgtccaagatgtcttttttgctcacattccttgttctttgactggaatggctggaacagctagggsctgacctgcatcactctctctccatatggttttactacatagctagtttgagtgtctttacataatggtggttcacagtagttaaactttttagatagtg

SEQ ID NO: 480702 - DNA, 201 bp, Homo sapiens
tttaaaaatcagtctgttatgctcacaattctctgtatataaaatttggttgggggaaaatggatatggcttatgtctgctccaaaatatctgggccctcrtctagggtagcacaaatggctgaagagggatgaggtgactaaattggggccataagacagtggccttgatttttttccctatggcatctgctgaggctgg

SEQ ID NO: 480703 - DNA, 201 bp, Homo sapiens
ccagtagacacagaatagaaaaacatttgaaaaattatgatgcataaaagagaggaaaagagccagatattttaaatgatcatgaagatgagaagaaacagttggtacttcaacttaatggtttgttgttttagggaaaacactagggttatcatgtggagacttagtttctgtgtaatattgaaacagcctaacatctaa

SEQ ID NO: 480704 - DNA, 201 bp, Homo sapiens
tgtttcactcttctgactccaacttagtggttctcagccctgaataattttgcccccaggagatatttagcaatgtctagagacatttttggttattacawcagggcagggcaggggtggagggctgaggggagatgttactggcatctagcacgtaaataccaggattactgctaataaacatcctaggcggaagatagc

SEQ ID NO: 480705 - DNA, 201 bp, Homo sapiens
cagtagacacagaatagaaaaacatttgaaaaattatgatgcataaaagagaggaaaagagccagatattttaaatgatcatgaagatgagaagaaacagttggtacttcaacttaatggtttgttgttttagggaaaacactagggttatcatgtggagacttagtttctgtgtaatattgaaacagcctaacatctaaa

SEQ ID NO: 480706 - DNA, 201 bp, Homo sapiens
agtagacacagaatagaaaaacatttgaaaaattatgatgcataaaagagaggaaaagagccagatattttaaatgatcatgaagatgagaagaaacagttggtacttcaacttaatggtttgttgttttagggaaaacactagggttatcatgtggagacttagtttctgtgtaatattgaaacagcctaacatctaaaa

SEQ ID NO: 480707 - DNA, 201 bp, Homo sapiens
cttctaataaagggtatatcagtttttcttccaataaactgaaaccagggctttgcagggcagtgtcagacatgaaaagcagcacctttagacatgactcyggttatacaatattacctcgtgaataaatgtattgagagcaacatgcaatttttgggacttttactgtttgctctttaatttctaattctgtgaaaacga

SEQ ID NO: 480708 - DNA, 201 bp, Homo sapiens
ttttcttttttttttttgagatagagtctcgctctgtcacccaggccggagtgcagtggtacgatctcggctcactgcaacctccacctcccgggttcacrccattctcctgcctcagcctcccgagcagctgggactacaggcgcccgccaccacacccggctaattttttgtatttttagtagagatggggtttcaccg

SEQ ID NO: 480709 - DNA, 201 bp, Homo sapiens
aaactaccaggtcacatcataactttgctgacttgtccccttccccgccagactccgggttccttgaggcctgcaacttttccttgtactctgccttgtamcctgctttggcacatgggaaagtttccaaaaattactctatcttatatgttaaaatgataaccatacgctgctcccaaattattaacctgttaattcacg

SEQ ID NO: 480710 - DNA, 201 bp, Homo sapiens
cacttgaggtcaggagttcaagaccagtctggccaacatggtgaaaccccatctctactaaaaatataaaaattggctgggaatggtggcacatgcctgtkgtcccagctattcaggaggctgaggcagaagaatcacttgaacctgggaggcagatgttgcagtgagccgagatcgtgccactgcactccagcctgggca

SEQ ID NO: 480711 - DNA, 201 bp, Homo sapiens
cagatgcccatcaactgaaaaatgaataaataaaatgtgggatatccatacaataaagtattattcagccataaaaagaaaggatgcactaatgcaatatrgacgaaacctaaaaaatactatgctaagtgaaaagccagatacaaaaattgtattgttccatttatatgaaaaattcagaattgacaaatccataaagta

SEQ ID NO: 480712 - DNA, 201 bp, Homo sapiens
tgaggcaggagaatcgcttgaacccgggagacagaggttgcagtaagccaagattgcgccactgtactccagcctgggcaacagagcaagactctgtctcaaaaaaaaaaaaaaaggaaagaaaagtcatgaccagaagagtaagcagaggttgaccatgattattaggactcctttttctggccacaccaggaaaatcac

SEQ ID NO: 480713 - DNA, 201 bp, Homo sapiens
ttttttaatttttaatgtttcttgttacttttacatttccctcttattttgtttgagaaggtaaccggtatattagcaagatctcaggctttagaatcaaytatccttcagtttgtattttagctttgctgattacttagcctttggagacccactttcttcgcttccaaaatgaatataaaagtactaccagccaggcgt

SEQ ID NO: 480714 - DNA, 201 bp, Homo sapiens
gaggcaggagaatcgcttgaacccgggagacagaggttgcagtaagccaagattgcgccactgtactccagcctgggcaacagagcaagactctgtctcaaaaaaaaaaaaaaaggaaagaaaagtcatgaccagaagagtaagcagaggttgaccatgattattaggactcctttttctggccacaccaggaaaatcacg

SEQ ID NO: 480715 - DNA, 201 bp, Homo sapiens
ccaatgtatcttatgtcttgacttggaggaacatattttttaatttttaatgtttcttgttacttttacatttccctcttattttgtttgagaaggtaacyggtatattagcaagatctcaggctttagaatcaattatccttcagtttgtattttagctttgctgattacttagcctttggagacccactttcttcgctt

SEQ ID NO: 480716 - DNA, 201 bp, Homo sapiens
attgattctatggtataattaggcacatttttgctatctgttctcatggaccaaaagagtcatttattaatttgcaaaaagaaaatacaactgtcaagccraccagaatgcttatcagttaacatgtcaaaagtctaatagaaaaccaaactattatatctattttaaccccacatagcagcccttcaagtgagtgacgtt

SEQ ID NO: 480717 - DNA, 201 bp, Homo sapiens
ctcacctacagcgcgttccagtcctgccgctctatttatggtaagtgccctgtataggtccaccatgtttatttttatattaaacttttactttacctttyctatatttaaatatgtttagatgcacaaatatttaccattgtgttacaattgcctacaatattcagtacagtaacatgctgtaaaggtttgtagcccagg

SEQ ID NO: 480718 - DNA, 201 bp, Homo sapiens
gctctttagtttaattagatcccatttgtcaattttggcttttgttgccattgcttttggtgttttagacacaaagtccttgcccatgcctatgtcctgartggtattgcctaggttttcctctagtgtttttatggttttaggtctaacatgtaaatctttaatctatgttgaattaatttttgtataaggtgtaaggaa

SEQ ID NO: 480719 - DNA, 201 bp, Homo sapiens
cagtcaatctccattctccccttcctccttactaaaagaacctgattgttggtggtatcaatatatctgactaaagtattaaatttcccttaattcctgayagaaagggatggctatgtgttaagatatgaccaatgagatataagcaggaattgttaggtaggacttgtacaaaagtgttttaaaggtggactgacttta

SEQ ID NO: 480720 - DNA, 201 bp, Homo sapiens
attgcataggttacttttctgctttctgtttcttttattttaacattttttctataataagcatgtgtcaactaagaggaaattttgtaaaaaaaaaaaawcgaaattttacaaattgaatggaaaaatttgaaacagcaattaaccagtgttttgtgttttttttttttttttggtttttttttttttgccttcattgac

SEQ ID NO: 480721 - DNA, 201 bp, Homo sapiens
caaggacaggctgcttctctgaagaactaaatctggaaacaggagatttcacaatgtagaaagcaaatgaagttggagagagcagaggatgaataggcccratatgttttctttcagaaatatttgaaagttagcaatgcaaagttattaaacaatacatgggttaattttttgtacttttatcacactgtttcattgtga

SEQ ID NO: 480722 - DNA, 201 bp, Homo sapiens
gaagacatacaaacggccaataagcacatgaaaagatgctcaacattattcagtcatttggaaaatgcacactaaaaccacaatgagataccattttacawccactgagatggatattatatatatatatatatatatattttttttttttttgagatggagtctcactctgtcatccaggctggagtgcagtggctcaat

SEQ ID NO: 480723 - DNA, 201 bp, Homo sapiens
aacattggattagacaaacatttcttagataggacacaaaactcaccaaccataaaacgaattaaattgggcttcatcaaaattaaacagttgccttcatrtaaggacatcatttttaaatgattatgcaagccacagactaggaaaaatattacaatacatatacctggcatctaatctataaactaacacccagaataa

SEQ ID NO: 480724 - DNA, 201 bp, Homo sapiens
tcttagataggacacaaaactcaccaaccataaaacgaattaaattgggcttcatcaaaattaaacagttgccttcatataaggacatcatttttaaatgrttatgcaagccacagactaggaaaaatattacaatacatatacctggcatctaatctataaactaacacccagaataaaaaagaacttctacaaatcaaa

SEQ ID NO: 480725 - DNA, 201 bp, Homo sapiens
cccatcatttcaccctagtgaatcatttgaagactacttgaccactgcaacaacatttcttcccactgcagccaaaataatttataattattcaaatatgwttgtaccagcaacctgatacaatttctttaatgattgctcattgcctttaagataaagtctcggccggggcggtggctcacacctgtaatcccagcactt

SEQ ID NO: 480726 - DNA, 201 bp, Homo sapiens
gtctccaaaagaggaaaaagaaaaaccaaaccagataatgacattgttaatagcacggattattatttaaaataacagtagcttcaaatatagtgatattkgtagctctgtcctttcatttaaaggagcatatattcatttaaattatatcaaaatctttgaatattttagtttaaaatacttatacactgtctatataga

SEQ ID NO: 480727 - DNA, 201 bp, Homo sapiens
attcttgtttgcctcatatatctgtttaaaaacattcgctgaatcccatgaagacatcttcttaaggtaaagtagaatgagaatcatctaagtaaatcaaygagtgaactgcaatttttgtcaaaaccaatcttggcctagcagccaagttttttccatcagggaacatgatttccactctaccctgaatttaggacaaac

SEQ ID NO: 480728 - DNA, 201 bp, Homo sapiens
ttaaaaagtggtccaaaaaagtacagaaggaatgaatagtcccttcaaagttataaattagataatgagaaattgtataaaagttaataaaagagagattmtctctttgcaattgcaacattaaatcttccactgctcaaatggaaatcagatcctaacaacaaagagactgccctttaagaactgcagtttcctattatt

SEQ ID NO: 480729 - DNA, 201 bp, Homo sapiens
agatatataccaaaaagaactgaaaacagatagtcaaacaaaaatttttgtacacaaatgttcctagcaacactattcatagtagataaaaagtagaaacmacgcaaatgtccatgaattaatgaatgcataaacaaaatgtggtagatccatttaatggaatattattcagccatgaaaaaacaatgcttcagtgtggat

SEQ ID NO: 480730 - DNA, 201 bp, Homo sapiens
tgataactcattcttgtttgcctcatatatctgtttaaaaacattcgctgaatcccatgaagacatcttcttaaggtaaagtagaatgagaatcatctaaktaaatcaacgagtgaactgcaatttttgtcaaaaccaatcttggcctagcagccaagttttttccatcagggaacatgatttccactctaccctgaattt

SEQ ID NO: 480731 - DNA, 201 bp, Homo sapiens
atattaaaaactcatacatctcaataataaaatgactaacaacccaattaaaaatgggcaaaggacttgcatagacatatttctatagaagacatacaaayggccaataagcacatgaaaagatgctcaacattattcagtcatttggaaaatgcacactaaaaccacaatgagataccattttacatccactgagatgga

SEQ ID NO: 480732 - DNA, 201 bp, Homo sapiens
agaaatattaaatttttattccaacaaagatgagctaaccatcctcttttccgtaaaatgtccttactaagataagtgcttatattgggtttatgtttgcrtatgggtttgggtcttccatatcatcattaaaagtttataatgagagaaggaatcaatcagtttcattctgtgaaggtcataccccatcttgataacagt

SEQ ID NO: 480733 - DNA, 201 bp, Homo sapiens
accctcccagcagactctcactcagtgactgttaagaaatattaaatttttattccaacaaagatgagctaaccatcctcttttccgtaaaatgtccttamtaagataagtgcttatattgggtttatgtttgcgtatgggtttgggtcttccatatcatcattaaaagtttataatgagagaaggaatcaatcagtttca

SEQ ID NO: 480734 - DNA, 201 bp, Homo sapiens
cttgttctaagaaaccagtaatctaccctcccagcagactctcactcagtgactgttaagaaatattaaatttttattccaacaaagatgagctaaccatyctcttttccgtaaaatgtccttactaagataagtgcttatattgggtttatgtttgcgtatgggtttgggtcttccatatcatcattaaaagtttataat

SEQ ID NO: 480735 - DNA, 201 bp, Homo sapiens
agtttaagagaagtcaattgcttattttataaagtctgttctaagcctcccaggaggtggaatgagtgacgaaatcatttcagctctgtaggatcccaaawcattcactcactcaggactaactacatgtatttcagatgagatgtgtacttgcctacatgcaagctagatggggacagggatatggttttatttaccttg

SEQ ID NO: 480736 - DNA, 201 bp, Homo sapiens
atgcctgtagtcccagctacttgggaggctgagacaagaggatcactcgagacaggaggtcgaggctagagtaagctgtgattgctactgcactccagccygggcaaaagagtgatgctctttaaccattatttactgagatcacataacatgctaaacactatgctagatgctttatatacatcattgcatgacataaac

SEQ ID NO: 480737 - DNA, 201 bp, Homo sapiens
cattaacaataattttctttgatgtaatcagtgatgtttgttataggtgagtcataaggagtaagttgtaagacagtgctcttggatgctggaggtgcagkaataggtcaagcccaggaattcaatgccatcagtaaagtatctgaagtccctgacagatcctgaaacatgttttactctacacaactttactaacacaac

SEQ ID NO: 480738 - DNA, 201 bp, Homo sapiens
tgttttcaataattagaacatttaccgcaggattctagagtctccacagggttcaggagaggattcttctccaacaagccttccttcagtatgcattaackgatctcctattgagaggtgacagcatgctggcagccctcgcagcccttgctcgctctcagcgcctcctcggcctcggcgtccgctctgggcatgctcgag

SEQ ID NO: 480739 - DNA, 201 bp, Homo sapiens
caccacgtctggctaattttttgtatttttagtagaggcagggtttcacagtgttagccaggatggtctcaatctcctgacgtcttgatccgcccgcctcrgcctcccaaagtgctgggattacaggcgtgagccaccgcgcccagcccttgcgtgtgcatttctttattccggattcgcagcatcatcttttgggctttg

SEQ ID NO: 480740 - DNA, 201 bp, Homo sapiens
tttcattctgtgaaggtcataccccatcttgataacagtgctctgtttaaaacaaaagggaacaattttgtatgttgaaaatgcatgtttgggtctgcaartctttagtgaaataaattcgccacagaaaatgtttatcagagtagctataacagaaagcatttaacagggaatttcatgcttaccacttgttttgaattc

SEQ ID NO: 480741 - DNA, 201 bp, Homo sapiens
ctcatatgtcattaacaaataggggaatgatttccaaacggcatggaagttacctttgtaactttgtgtttcccagcacattaattttttgatcccatcargttcatgtaaaacacattaacacagctgagcatctagccacagagaacaaaggactgcacatagtgcccattcacttcaagttagcttttggctcacttt

SEQ ID NO: 480742 - DNA, 201 bp, Homo sapiens
taagtgatcaaaatgcttaagggtagtttttctaatcatgtgtccacagattgagggagtggagagcacatgtgtgcacacacacacacacacacacacasagagagacacacacacacatattctctctctttattttcctcataaacacaaacctttgatatccgagcgtgggagctaaatttacattctttaatgaga

SEQ ID NO: 480743 - DNA, 201 bp, Homo sapiens
tcagcttctgcttgaagttgaggatgtgactgtgaatgaaacctatgttttctaaggcttacaaaactctttctctcggtttctctctctctttctttttytctctctctcacacacatgcacacactattatcactaatttaattaatatctagtgaattaggaattgtttcaaataatgacattttgtccttaattccc

SEQ ID NO: 480744 - DNA, 201 bp, Homo sapiens
ttcatagcttgaaagtgacacttgaagactattattcctggccatgtacagtgagccaaaaggacagaaacaaacgtgatggtgtgagggaggaagcctcycaccatcttacccaatttcataattacagttccctcccaaataaaccaaaagcttccacaagattcctcctctgctatcctgattttatctaggaattga

SEQ ID NO: 480745 - DNA, 201 bp, Homo sapiens
accacattaatagtgatagctaaggctgggcgcagtggctgacacctgtaattccagcactttgagaggccgaggtgggcagatcaggaagtcaggagttmgagacaagcctggccaacatagtgaaacctcatctcgactaaaaatacaaaaattagctgggtgtgctggcacgcacctgtagtcccagctactcaggag

SEQ ID NO: 480746 - DNA, 201 bp, Homo sapiens
gaaggaaaagtccccaccgcagatagctttgcttgaatgagctcaattatactgcgaacgctgaggcctgtgttggttgtatggccaccacgatcactgcktcctggcaacatggtcacttccttgactacctatcctgcctcaaatgcacataacccattgatagacccatagcaatgcaataaacacctgtcgactaac

SEQ ID NO: 480747 - DNA, 201 bp, Homo sapiens
ttcttatatgttctggttattaataccttctcagatggatagtgtgcaaatattttctcccattctgtaagttgtctcttcactttgttgattgtttcctstgctgtgcagaagccttgtagcttgatgtaatcccatttgtctatttttgctttggttacttgtgcttttgagatcttacagagtaaacctttgcccagg

SEQ ID NO: 480748 - DNA, 201 bp, Homo sapiens
tgaggttttctatttcttcgtagttcaatattcatcaattgtacatgtccagatatttgtccatttcttctgggttttccaatttgttggtatatagttgwtcataatactgtccacagattctttgtatttctgaagtctcatttattatgtctcctttttcattactgaatttatttatttaggtcttctttttttctc

SEQ ID NO: 480749 - DNA, 201 bp, Homo sapiens
tttatctggattgatccctcctcccttctttacttcacaactcaacccttcaagactcagtttaagagaagtcaattgcttattttataaagtctgttctragcctcccaggaggtggaatgagtgacgaaatcatttcagctctgtaggatcccaaatcattcactcactcaggactaactacatgtatttcagatgaga

SEQ ID NO: 480750 - DNA, 201 bp, Homo sapiens
tcatgtgtttttgtattttctgaggtccctcttgctactgatttctagttttatttcattatggtcagaaaaaaacacttgatacaatttacatatttttkaatttgttcagacttgcgttgtgtcctaacatatggtctatcctggaggatgtgccatgtgctgatgagaagaatgtgtattctgtagcagttgggtgaa

SEQ ID NO: 480751 - DNA, 201 bp, Homo sapiens
ccgtggttcacctaggagctgcacaggacaaggggagctcccaccgccagccaagggaggcggcgactgattgtgctaccccgcctgggaaaccatgcttyttccacagatctgcaacccatggatcaggagacccctcatgagcccatgccaccagggccttgggtctcaagcacggagctgtgcagattctcagcagcc

SEQ ID NO: 480752 - DNA, 201 bp, Homo sapiens
ccaataagcacatgaaaagatgctcaacattattcagtcatttggaaaatgcacactaaaaccacaatgagataccattttacatccactgagatggatattatatatatatatatatatatattttttttttttttgagatggagtctcactctgtcatccaggctggagtgcagtggctcaatctcagctggctgcaac

SEQ ID NO: 480753 - DNA, 201 bp, Homo sapiens
ttttctctctgctgtgaatcccccaagcttgttacaggaaaatgaacaattattagagtaaaaatctgtttttattgggcatcaatgaacactcctagtgyagcaacttcagcagagaatcttttggttttaaagataaacattttgtttagatgtacatgttttcctatttacaaagtaatatcaaatgaccagctgaaa

SEQ ID NO: 480754 - DNA, 201 bp, Homo sapiens
caataagcacatgaaaagatgctcaacattattcagtcatttggaaaatgcacactaaaaccacaatgagataccattttacatccactgagatggatattatatatatatatatatatatattttttttttttttgagatggagtctcactctgtcatccaggctggagtgcagtggctcaatctcagctggctgcaacc

SEQ ID NO: 480755 - DNA, 201 bp, Homo sapiens
ttatttttttgccaaaatctcttgtgcattttgaacttaatgtaaataccctttgttctattttcagttcttttatataaagactttatattaaatccacrtttaaatcagaaacactctgatgcaagcagatagagaaaacacgtctttttgtgtctcttccttgggaatgagaaaacttgccccagaatccacccagca

SEQ ID NO: 480756 - DNA, 201 bp, Homo sapiens
tctgtagtctgtgtgataatttactttaaattgcttcaatataaacattttggggggtgatgttgtgtgtgtgtgtgtgtgtgtgtgtgcctacacgcatrtgagcttgcccttgatagcataatgcacattatccctaatccacatcctctggacaattaattagcactgaaatatcctaagaagaatcaacattttaag

SEQ ID NO: 480757 - DNA, 201 bp, Homo sapiens
aataagcacatgaaaagatgctcaacattattcagtcatttggaaaatgcacactaaaaccacaatgagataccattttacatccactgagatggatattatatatatatatatatatatattttttttttttttgagatggagtctcactctgtcatccaggctggagtgcagtggctcaatctcagctggctgcaacct

SEQ ID NO: 480758 - DNA, 201 bp, Homo sapiens
ggaacattatatggagataaaaaagctaggcacacaccaaaatatatattgtatgattccagttatgtcacattcaagaacaggttaaactaatctgtgaygacaaaactcaaaaagtgatttcctttgaaagggtgatctttgactagaaagggacaggaaagaacgtcctcgggtgataaaaaatattttatattttgt

SEQ ID NO: 480759 - DNA, 201 bp, Homo sapiens
tccaggaaatattaaaaattgaagtaacatataacaaacgtttaaactgacctgattttgagtcagtgctttggggctgctggtgatatattttaattttrgtcttaatttgtcttcttttccctcacatgggtgacattccattctaggaggaactttgtactggttctacttatcggtcattgtcattcctgacagtat

SEQ ID NO: 480760 - DNA, 201 bp, Homo sapiens
tgaacttcaatccttatctaactggacacataaaaattaatttgagattgatcacagacctaaacataaaatccaaaaatatgaagcttctagaaaaaaawatatatatttgaaacattggattagacaaacatttcttagataggacacaaaactcaccaaccataaaacgaattaaattgggcttcatcaaaattaaac

SEQ ID NO: 480761 - DNA, 201 bp, Homo sapiens
acacataaaaattaatttgagattgatcacagacctaaacataaaatccaaaaatatgaagcttctagaaaaaaatatatatatttgaaacattggattakacaaacatttcttagataggacacaaaactcaccaaccataaaacgaattaaattgggcttcatcaaaattaaacagttgccttcatataaggacatcat

SEQ ID NO: 480762 - DNA, 201 bp, Homo sapiens
catcaaaattaaacagttgccttcatataaggacatcatttttaaatgattatgcaagccacagactaggaaaaatattacaatacatatacctggcatckaatctataaactaacacccagaataaaaaagaacttctacaaatcaaaaacaaaaaaaaaaagacgagcaaatccagttatttaaataggtgaaaacttg

SEQ ID NO: 480763 - DNA, 201 bp, Homo sapiens
tgtagcctaagagtaagtgtttataaagtctacagtagtgtctagtaatgtcctaggctttcacattcactcactactcacacactgactcacctacagcrcgttccagtcctgccgctctatttatggtaagtgccctgtataggtccaccatgtttatttttatattaaacttttactttaccttttctatatttaaat

SEQ ID NO: 480764 - DNA, 201 bp, Homo sapiens
tatgttgataagaggagactccaagccagaataaaacatacaacttgttcaaagaatcaaatccagccatttaggggattaggactgtatgtgaagaaacwatattaaaatctacaaatgggaaggcgggctcagagttgggagctctgagtaagaataaatagttcaagagaaaagaaatgtagtactttgggaggtaac

SEQ ID NO: 480765 - DNA, 201 bp, Homo sapiens
ttaagctaagtttaaaaaagattaaaagagtccaaaagtttaaaaagattaaaagtttatgaagtacaaaagttatagtaagctacagttaatttagtttycctagaatatgtatttttaggatatgtatgtttaggatatgtatttttagaatatgtatgttaaagaatatgtatttttctacatttagtgtagcctaag

SEQ ID NO: 480766 - DNA, 201 bp, Homo sapiens
atctaatctataaactaacacccagaataaaaaagaacttctacaaatcaaaaacaaaaaaaaaaagacgagcaaatccagttatttaaataggtgaaaayttgaagagatactacacaacagaagatatacaaatcctcagtaaattcatgacaaagttgcttaacatcattggtaatttttaaaaattccatttgaaat

SEQ ID NO: 480767 - DNA, 201 bp, Homo sapiens
aaagtctgttctaagcctcccaggaggtggaatgagtgacgaaatcatttcagctctgtaggatcccaaatcattcactcactcaggactaactacatgtrtttcagatgagatgtgtacttgcctacatgcaagctagatggggacagggatatggttttatttaccttgttatccctaggacttagcacactaattatg

SEQ ID NO: 480768 - DNA, 201 bp, Homo sapiens
gatacaaatgacttctgacttcctgcagaaaaaaaaaggagtccagaaaacattgagatatttttaaacgcagagagaactaaattaacacagaattctawgttcagcaaaaatatcctcccaaaaaccaatctcaaaaagcatgtttttaaaaaaggaaaattaggaaaatttgtcacaagcaggcttacactataagaa

SEQ ID NO: 480769 - DNA, 201 bp, Homo sapiens
taagcacatgaaaagatgctcaacattattcagtcatttggaaaatgcacactaaaaccacaatgagataccattttacatccactgagatggatattatatatatatatatatatatattttttttttttttgagatggagtctcactctgtcatccaggctggagtgcagtggctcaatctcagctggctgcaacctcc

SEQ ID NO: 480770 - DNA, 201 bp, Homo sapiens
tttttaaagtcactttcagtccatttttctttgcttagcccaaaaccttaaaaaggctattcactctttctgaacttttctttgatcatcatattttataytttgatttttatttaaataaaaatttttaaaaacctggtgcaccacatgtttaatacccatcctcccgaacattgaaatatctattttcttgtcttattc

SEQ ID NO: 480771 - DNA, 201 bp, Homo sapiens
gcaaaacatgtttataggattatggcctcattccctgcttctgtctcatagggctgggtgaacttaggaatgccagaaactccaattctcagttaaagggyctgaaaaaggcagacacaactgaaaagggagtagcaagatatctacgggtcgcatatgccaagtaactagccattgaacttgagcaaaccagaacccaca

SEQ ID NO: 480772 - DNA, 201 bp, Homo sapiens
tttaccatatttttgttttaatatgtttagatacacaaatatcactgtattacaattacctataggattcagtacagtaacaggcagtacagatttgcagcctaggagcgatagtctataccatacaacctaggtgtgtggtaggctatgccatctaggtttgtgtaagtacaccctatgaggtctgcgcaatgacaaaaa

SEQ ID NO: 480773 - DNA, 201 bp, Homo sapiens
atagtatgcagcaaggccctccccagaggccagggccttaatcttggacttcccagtctccagaaatatgggaaataaatttctgttttttataaattacmcattctgtggtattctgttatagcagcacaaacagaatgagaccctaaacttgctccactgtcaaccattctgcagttttatttctctttgtccaaccat

SEQ ID NO: 480774 - DNA, 201 bp, Homo sapiens
acgatgatctttcttacactgctgcagcattaaattgccacaaggaaaagtgagcaactgagtcctcaggggctaaacatggccttggaaacttgaggtaytgatgagttttaattcactgaggttgctttgtgagatgggatagtattagacaagtatagtcatgcactgtataacaatgtttgggtcaatggcagacca

SEQ ID NO: 480775 - DNA, 201 bp, Homo sapiens
ttttttctataataagcatgtgtcaactaagaggaaattttgtaaaaaaaaaaaatcgaaattttacaaattgaatggaaaaatttgaaacagcaattaaycagtgttttgtgttttttttttttttttggtttttttttttttgccttcattgactgttcctcttgttgacaattcactgccttagttttcctagagaga

SEQ ID NO: 480776 - DNA, 201 bp, Homo sapiens
taacacgtaaaagttctaagtgatgtttgtctgtctcagaagtgcaaatgtgacatttgcccctggctgcagtcatggtgtgggtgaaaagagcagagggkcatccaagagtgacaagaattgctttctgtcatcatcaaggctgcgtcagctcacgctgtggtcaggtaaggtttgagaccaggagagtctacttcattg

SEQ ID NO: 480777 - DNA, 201 bp, Homo sapiens
aaatcgcccctggctgagcaccactgaactagacaaaagggaagtcatggaaaggtttgacggaaagagacacaatcaaaatctcaatattatttttattrattgcatttagaagcaatttcaatgttaatgtgagggaaagtgtgtaatagtttttacaaaactggtgaaaaaagataaatcttggaataaacagtccag

SEQ ID NO: 480778 - DNA, 201 bp, Homo sapiens
tgagctaatatagaaacagaaagtcaaataccacatgttctcacccacaagtgggagctgaacatttagtacatatgcatacaaagtagggaacaacagahaggacctgcttgagggtagtgagagggaggaatgggaggatcgaaaaactacctaacaggtgctatgcttattacctgggtggtgaaataatctgtatgc

SEQ ID NO: 480779 - DNA, 201 bp, Homo sapiens
ttatcatgttggccaggctggtcttgaactcctgacctcaagtgatcctcccacctcggcctcccaaagtgttgggattacaggtgtgagccactgtgccyggcccaataatgtcatttgttaagttttctgattaaaaataatagatgcttattgttgaaatcttggaaaatacagagataaataattacacccaatttc

SEQ ID NO: 480780 - DNA, 201 bp, Homo sapiens
gctgctcaaatgtccatccataaaagaacaggtaaacaaatttcattaaatttgtactgtggaatactactcaccgataaaaaaaaaataacagactactkgtatttgtgtgcatctcaggaacattatatggagataaaaaagctaggcacacaccaaaatatatattgtatgattccagttatgtcacattcaagaaca

SEQ ID NO: 480781 - DNA, 201 bp, Homo sapiens
tttgagatggagtctcactctgtcacccaggctggagtgcaggattacaggtgcctgccaccactcccatctaattttcgtatttttagtagagagggggwtttatcatgttggccaggctggtcttgaactcctgacctcaagtgatcctcccacctcggcctcccaaagtgttgggattacaggtgtgagccactgtgc

SEQ ID NO: 480782 - DNA, 201 bp, Homo sapiens
atcagaaacactctgatgcaagcagatagagaaaacacgtctttttgtgtctcttccttgggaatgagaaaacttgccccagaatccacccagcaaatatmatttaattggccagaattggatcatgttccccatacctgaaccaatcactggcgagagaatgggctgtctttaaaccaatcaggagcacccctggatctg

SEQ ID NO: 480783 - DNA, 201 bp, Homo sapiens
aaaaaattatttcaagaaatttggactctttctagagaaataagggaacaaattttcaataaatgctttatttatctagaaagagtttgtcaagattgtakttcagtgatttaagttgaagtaccaaatatacacctgagctggaataatgggaaagattctctattacaggtttcagtaattgaataactgggaagaaaa

SEQ ID NO: 480784 - DNA, 201 bp, Homo sapiens
gagtgacgaaatcatttcagctctgtaggatcccaaatcattcactcactcaggactaactacatgtatttcagatgagatgtgtacttgcctacatgcamgctagatggggacagggatatggttttatttaccttgttatccctaggacttagcacactaattatgtgcttcaaaatggctagaaatataatgaatgtt

SEQ ID NO: 480785 - DNA, 201 bp, Homo sapiens
gactccatctcaaaaaaaaaaaaaaaaatacaaaaattagctgggcgtggtggtggacaactgtaatcccagctactagggaggctgaggcaggagaatcrcttgaacccgggagacagaggttgcagtaagccaagattgcgccactgtactccagcctgggcaacagagcaagactctgtctcaaaaaaaaaaaaaaag

SEQ ID NO: 480786 - DNA, 201 bp, Homo sapiens
tatcctatagaagttctataccatgacatgaatagacactggattccctgacttgggcaatatttatcctgtttttcagtctgaaaactgatttttcttcyataccaatgtgccattgtcagtgcactatcatattgtgtctttacttagagatgtgtctcaatatgagaagactaaacaataatgatatagacctataaa

SEQ ID NO: 480787 - DNA, 201 bp, Homo sapiens
aattaatataaaataaataaaagaaaataaaaataaattaaacatgatttaaaattaaatcaaagaaaaatcctcagtgtggtccccatagtggcagcctkggaattacctgaagctgttaaaaaagcagactccccagccccaccccaaactactaaattttaacctgatttagccaagaccccaaggtaaatagcccat

SEQ ID NO: 480788 - DNA, 201 bp, Homo sapiens
gtaggatcccaaatcattcactcactcaggactaactacatgtatttcagatgagatgtgtacttgcctacatgcaagctagatggggacagggatatggytttatttaccttgttatccctaggacttagcacactaattatgtgcttcaaaatggctagaaatataatgaatgttgcagaatcataaaatctagcccaa

SEQ ID NO: 480789 - DNA, 201 bp, Homo sapiens
gttattattataagtaacactggaaagataattctggtagttactgtttgctgagactattctgtagtctgtgtgataatttactttaaattgcttcaatrtaaacattttggggggtgatgttgtgtgtgtgtgtgtgtgtgtgtgtgcctacacgcatgtgagcttgcccttgatagcataatgcacattatccctaat

SEQ ID NO: 480790 - DNA, 201 bp, Homo sapiens
gcccaaccttattctggctgaattccttccacagttccacaattcttctagtataactactgggagtgtgggaatggagtctgaaggccatgtgagtattyatctctatgtatgagaaaactcaggaattaaaccaaaactatataaacttgaggtttaagatatttttacacattttttatgtaaaaagtaactcatact

SEQ ID NO: 480791 - DNA, 201 bp, Homo sapiens
aggccatgtgagtatttatctctatgtatgagaaaactcaggaattaaaccaaaactatataaacttgaggtttaagatatttttacacattttttatgtmaaaagtaactcatactagttgcagaaaatataaatcgtaaaacacaactctaagcacattctttctttcatccattatcaaaagactatgatttggtaca

SEQ ID NO: 480792 - DNA, 201 bp, Homo sapiens
tctacaaatgagaaaattgaagcccagagacatcaatgactcaccaggtatcacaaagcaaattcagctcaaagctgggtcttcagattcccaacactgcwttccctccaggaagtaacatctcttacttagggagagagacatcctgggaagacagcatgagggtgatatttccaaagttagacaggcaggctttcttga

SEQ ID NO: 480793 - DNA, 201 bp, Homo sapiens
gtgaaatggagacatattagctgcagctcagggcaagaaagaatctgaattgagatttgttcatttgaagtaaagtctagttatagttatgacttcaaatrtttctttataaggaactcaactctactcatctaccttgccttagatttagaatgcaattcttcttttttatttgatgttcacatttttcttcagcccatg

SEQ ID NO: 480794 - DNA, 201 bp, Homo sapiens
ctacaaatgagaaaattgaagcccagagacatcaatgactcaccaggtatcacaaagcaaattcagctcaaagctgggtcttcagattcccaacactgcaytccctccaggaagtaacatctcttacttagggagagagacatcctgggaagacagcatgagggtgatatttccaaagttagacaggcaggctttcttgat

SEQ ID NO: 480795 - DNA, 201 bp, Homo sapiens
ctgtctgccatgtccacgtttatgaaggggttaaaatgaaaaatcaaaattccccttagcccaaagtgtgtgtgtttaattcccaactaataaggtttggytctgtgtcatcaccaaattccagtggaattgtaatccccagtgttggagatgaagcctggtgggaggtgattggatcatggaggtagagttctcatgaat

SEQ ID NO: 480796 - DNA, 201 bp, Homo sapiens
ggctctgaggaatccgggcagtccggaagagtgggattcccaccagcacagcacacccgcttgtccaaggggcagtcagagtgcttccttaaacggatccyggatcccatgcctcctgactggatgagatcccccagtagaggtcgccagacactttataggggagcgttcccactggctcaggtaggtgcttctctgggt

SEQ ID NO: 480797 - DNA, 201 bp, Homo sapiens
cttagcccaaagtgtgtgtgtttaattcccaactaataaggtttggctctgtgtcatcaccaaattccagtggaattgtaatccccagtgttggagatgargcctggtgggaggtgattggatcatggaggtagagttctcatgaatgggtttagccccattcccgcctggtactttatagtgaatgagttcttaccagat

SEQ ID NO: 480798 - DNA, 201 bp, Homo sapiens
gtttatagattcttgttctctgtaactagtaacttcaagtattctgttttatctaagaagtacaatgaaggtcatcagaagcctgagcaggcctgaactaycgctgcctgggcaccatagtaaacgttatgagatgaaccagtgcaaggctctttagagcaaaacctagataatggacatctgggttgcttggcaatggtc

SEQ ID NO: 480799 - DNA, 201 bp, Homo sapiens
ggtgggaggtgattggatcatggaggtagagttctcatgaatgggtttagccccattcccgcctggtactttatagtgaatgagttcttaccagatctggwtgtttaaagtgtgtggcacctcctctctctctctcactcctgctctgccatgtaagacacttgctctcgctttgccttccactatgagtaaaagctccct

SEQ ID NO: 480800 - DNA, 201 bp, Homo sapiens
gttaacatagttcaccaaggaggggaacgttagctgatatattttcgaatgatcttcagcaggatttttgagagttttctagtgagttctaagttaatttwaaaaaattatttcaagaaatttggactctttctagagaaataagggaacaaattttcaataaatgctttatttatctagaaagagtttgtcaagattgta

SEQ ID NO: 480801 - DNA, 201 bp, Homo sapiens
tcccagcagactctcactcagtgactgttaagaaatattaaatttttattccaacaaagatgagctaaccatcctcttttccgtaaaatgtccttactaakataagtgcttatattgggtttatgtttgcgtatgggtttgggtcttccatatcatcattaaaagtttataatgagagaaggaatcaatcagtttcattct

SEQ ID NO: 480802 - DNA, 201 bp, Homo sapiens
tgagtgcattcaataataaatgtatcctcctgtttacaccccaaggtctctctctggtcctcaggatcccgcaacaatacctaagcatcaataaaacaccrtctacttccccacagaggcagcttgcaaagtgtgatgagttttcacaaatgacactgtgataaatctctttgtggcttgcggggctctcagaagatacaa

SEQ ID NO: 480803 - DNA, 201 bp, Homo sapiens
atcattgaaattaaaataattttaattgtttaatttaaaccaggttttctggtttagccattattaagcttttgtcttctaagtaatcacactgctaccckgtgtaaataaccacttctgaaactttcctcataaaccatctttttgctggattattccctcaaagaatcacaaatcactatctgtgccacttatcaattt

SEQ ID NO: 480804 - DNA, 201 bp, Homo sapiens
ggttgcttggcaatggtcatgtgtaatcctgagttataaacctgtcacaatttaattaattgttctgcctctgtatccttgctttcacgtgaccgtaaccrtaagcctgcttcaaactagcccacctcttttgtgaagtgtgtataaaagtcaagtgctgtctttgttctgggcccagtctttggacattgagtctgctag

SEQ ID NO: 480805 - DNA, 201 bp, Homo sapiens
actagtaacttcaagtattctgttttatctaagaagtacaatgaaggtcatcagaagcctgagcaggcctgaactaccgctgcctgggcaccatagtaaasgttatgagatgaaccagtgcaaggctctttagagcaaaacctagataatggacatctgggttgcttggcaatggtcatgtgtaatcctgagttataaacc

SEQ ID NO: 480806 - DNA, 201 bp, Homo sapiens
acccaggaaaagtcctgataatattatctaatgcgctctggagactctcccagcactccctcaacacagggagaagaaaaaacaaattttcctttgttttrtggaatgagtttatagattcttgttctctgtaactagtaacttcaagtattctgttttatctaagaagtacaatgaaggtcatcagaagcctgagcaggc

SEQ ID NO: 480807 - DNA, 201 bp, Homo sapiens
tatcaaagaggaaaggtgctagctagaaaattctatccacccaccacatatcctgatcattttattgagatgttcaacaactgccctgtatggacttgacrtggtcaaagagagatgctttttggttttaagggcagcatcttggagagagataatagagagttttccaggattcattaaatttatcaaagactaaccatt

SEQ ID NO: 480808 - DNA, 201 bp, Homo sapiens
aagaaaaaagttttataacagatgcaacttagccaatgaggagtgattgattctggaacattcagagaaaaaggctatagttacctatactcaatagtgtrtcaaagaggaaaggtgctagctagaaaattctatccacccaccacatatcctgatcattttattgagatgttcaacaactgccctgtatggacttgacat

SEQ ID NO: 480809 - DNA, 201 bp, Homo sapiens
ttttttaattacagaaaaatcctagatgaaaataacaaattgtaggggcacagggatcccgttcaccttctgaaggttccctgaaaataaagtgacaaaaraccgattaataggagaaaagcatacaaatttattaatgtacagggggaaaaaaatcacagagtgattatcaagtaacccaatgcagtacagaagcttata

SEQ ID NO: 480810 - DNA, 201 bp, Homo sapiens
cttatatggtggaatgtcaggcatgtaaggccaaataatctagcacattaattaattatcatatattattttgcaaagatccaaaaatcagaaaagtctcraagaaattgaacttctattagggtagacttccttaaaccaattaacatgtattttaattgtgtctccaagacatgattttgaagatcagcctgagaatta

SEQ ID NO: 480811 - DNA, 201 bp, Homo sapiens
attgtacttgttagttacttcagttttagtttagtgtaaaacaatatagacacctgtttttcaaaaaactttttttaattacagaaaaatcctagatgaawataacaaattgtaggggcacagggatcccgttcaccttctgaaggttccctgaaaataaagtgacaaaagaccgattaataggagaaaagcatacaaatt

SEQ ID NO: 480812 - DNA, 201 bp, Homo sapiens
ttctggtttagccattattaagcttttgtcttctaagtaatcacactgctaccctgtgtaaataaccacttctgaaactttcctcataaaccatctttttkctggattattccctcaaagaatcacaaatcactatctgtgccacttatcaatttatagcatcccagttccagattaacctttgtcttgctttgtgataca

SEQ ID NO: 480813 - DNA, 201 bp, Homo sapiens
ctattgagaggtgacagcatgctggcagccctcgcagcccttgctcgctctcagcgcctcctcggcctcggcgtccgctctgggcatgctcgagaagcccytcagcccgacactgcgctctgggggcccctctctgggctggccaatgcgggagccagctccctctgcttgtggggaggtgtggagggagtggcgcgggcg

SEQ ID NO: 480814 - DNA, 201 bp, Homo sapiens
tgaatagccagacagagtacattcatagggcaatgtatgtggaaaggaaagtgaaatttccatgccctctgtgggcatatcaccctccagacacctccacrtgttcagcaatccagaagcctttctgaacactattcttttgggtttttatggaggcttcattacataggcatgattgattacattattagccattggtga

SEQ ID NO: 480815 - DNA, 201 bp, Homo sapiens
aggtgtggagggagtggcgcgggcgggaacctgggctgcgcgcggcgctcgcgggccagcgcgagttccgggtgggcgtgggccccgcgggccccgcactsggagccgccggccggcccgggcagtgaggggcttagcacccgggctagcagctgcggagggtgcgccgggttccccagcagtgccggcactgcgctcgaa

SEQ ID NO: 480816 - DNA, 201 bp, Homo sapiens
cctgcagaaccatgagccaaataaacctcttttttaaatatataaattatcaagcctcgggtattcctttatagcaacacgaacagactaaggccgatgcygtcaattttctgtaatcccatttcctacactacttttcgtcattgcatttatccctttctaatgtattacgtttatctctttctaatgtattacatattt

SEQ ID NO: 480817 - DNA, 201 bp, Homo sapiens
gccaaccagaatgcttatcagttaacatgtcaaaagtctaatagaaaaccaaactattatatctattttaaccccacatagcagcccttcaagtgagtgasgttttaagaggccaataagtaatactcttttcttccactcttgagcttgacattcactaagaaataaaattattgacaaaagctttattggaggatgagg

SEQ ID NO: 480818 - DNA, 201 bp, Homo sapiens
tgtacaacctgcagaaccatgagccaaataaacctcttttttaaatatataaattatcaagcctcgggtattcctttatagcaacacgaacagactaaggycgatgctgtcaattttctgtaatcccatttcctacactacttttcgtcattgcatttatccctttctaatgtattacgtttatctctttctaatgtatta

SEQ ID NO: 480819 - DNA, 201 bp, Homo sapiens
tctccgcaggatcagctgactcagtctttccccctgctggctctgaggaatccgggcagtccggaagagtgggattcccaccagcacagcacacccgcttrtccaaggggcagtcagagtgcttccttaaacggatcctggatcccatgcctcctgactggatgagatcccccagtagaggtcgccagacactttataggg

SEQ ID NO: 480820 - DNA, 201 bp, Homo sapiens
catgcctgtaatcccagcacttcaggaggctaaagcaggtggattgcttgagctcaagagttcaagaccaccctgggtaatatgacaaaaccctgtctctrtaaaaaaaaatacaaaaaatactatctgggtgtggtaacatgtgcctgtagtcccagctatttgggaggctgaggtgggagggaggtggaggttgtagtg

SEQ ID NO: 480821 - DNA, 201 bp, Homo sapiens
gccaggcatggtgactcatgcctgtaatcccagcacttcaggaggctaaagcaggtggattgcttgagctcaagagttcaagaccaccctgggtaatatgrcaaaaccctgtctctataaaaaaaaatacaaaaaatactatctgggtgtggtaacatgtgcctgtagtcccagctatttgggaggctgaggtgggaggga

SEQ ID NO: 480822 - DNA, 201 bp, Homo sapiens
gccttccttcagtatgcattaactgatctcctattgagaggtgacagcatgctggcagccctcgcagcccttgctcgctctcagcgcctcctcggcctcgscgtccgctctgggcatgctcgagaagcccttcagcccgacactgcgctctgggggcccctctctgggctggccaatgcgggagccagctccctctgcttg

SEQ ID NO: 480823 - DNA, 201 bp, Homo sapiens
aattaattaactgatgaatatccgtcctgtactttcatgcaagaatcaaggagaaaaattattggtaatgatttaccatctaagtaaaataagtatgtatwattcacacttacttaggaaattcaaacatcaatggttctttaacttttctttcatcaaggatccctctgagaatctgatgaaagttatgaaccctctctg

SEQ ID NO: 480824 - DNA, 201 bp, Homo sapiens
gacagcatgagggtgatatttccaaagttagacaggcaggctttcttgatgcttcttaaaattcaatagcctcacggcacacctacttcagctggttactstaagattaacgagctatcagctatggcagcacctggtaaattataaactggaaagcagttggtaaactgtaaggtacctggtaaactgtaaaccgtaaag

SEQ ID NO: 480825 - DNA, 201 bp, Homo sapiens
gtaggcaaggtggcacagactcaactgtcaccctaactgtatttctcaccctaccataaccttcgttactgacatggtcaaaaaggaaacagaggctgcgrcaatggcagcagcagcaacagtgaaagcaaccaagagagaaggcagctggcactggagggcatcgtgccaggttccaggcacagagggattctggcagtg

SEQ ID NO: 480826 - DNA, 201 bp, Homo sapiens
ttgtgccgggaccctaggccctgccaggaagggagcaggggagatgagattcttataattacactcgtttagactcagccatcatggggttacccacagargactctgatctgtccccaggctgggagttgcagaagcacctgttacagcagaagtcatttggcaagccaaacaaaatgcggattcatccaggccacctgt

SEQ ID NO: 480827 - DNA, 201 bp, Homo sapiens
gcttccccgatgcataatttaggttataattattttctcattttcccctccagctggcaccagtttgatcgctcccatttcatagatctttacaatgtcasactgttgctccagcttatttagaaatcctggaaagaggggaagtggagattgcagggcagcctcagccctcagaaaagtttctctgctttctcatgtgtc

SEQ ID NO: 480828 - DNA, 201 bp, Homo sapiens
tccacagtccaaagtctcatctgagacaagacaagtctctttcgcctatgagcctataaaatcaaaagcaagctagttacttcctagatacaatgggggtmcaggtattggtaaatatagccataccaaatgggagaaattggccaaaacaaggggttccagggcccatgcggggaagtcaaatccagcaggcagtcaaat

SEQ ID NO: 480829 - DNA, 201 bp, Homo sapiens
aagcatgtgtcaactaagaggaaattttgtaaaaaaaaaaaatcgaaattttacaaattgaatggaaaaatttgaaacagcaattaaccagtgttttgtgttttttttttttttttggtttttttttttttgccttcattgactgttcctcttgttgacaattcactgccttagttttcctagagagacatttgttttctg

SEQ ID NO: 480830 - DNA, 201 bp, Homo sapiens
taaaaataaaatgatctgcttccaaaacaaatcagattcacgacattaaactcacttgttttagataatcctcatgaattaccttcttctattgttcaggwtacattgatgtgttatcattttgctaaggcaaaatcaatttcctcacaattttaatgtgtggcaggtcttttaggtctcagtattttttaactagacctt

SEQ ID NO: 480831 - DNA, 201 bp, Homo sapiens
atgcatgtttgggtctgcaaatctttagtgaaataaattcgccacagaaaatgtttatcagagtagctataacagaaagcatttaacagggaatttcatgyttaccacttgttttgaattctaaaaggtgatgtttttactataatgggagtacttatgtggaatactgtctaatttttaccatctgaagactgttcttga

SEQ ID NO: 480832 - DNA, 201 bp, Homo sapiens
tgtaacattaagtttctagtaagaaaaaacaaggtgatatttaaccacaacttacccactaatgctcaaatatcaacaaaactaagtggggttattgggarcacataggctttctccactggattgaaaaagactattacttctgtcaggagaccacttctacctgacctgtatcaagttgatcaaaaaagaatcagaatt

SEQ ID NO: 480833 - DNA, 201 bp, Homo sapiens
tttctctttgggctttagttttaggtattacatacataggtaaaatataaatatttatgccattcattaacctgcattttttttcttgtgtcttgactggrtcccaaatttacatcttttaaataggtatgatccagaaacctggcagctatgtgctgcaagactgcctttctgttgaatcactcctctttggcatagaca

SEQ ID NO: 480834 - DNA, 201 bp, Homo sapiens
attacttgcgttataaaaataatgggtgtgaagaaaaagagaagtcggtagaacccattctaccctaactacttgggatttctttggacagggttctgctycattggcacatggggcaacttgtaaagaatgctatgcagttgggaggctgaggcgggtggatcacaaggtcaggagattgagaccatcctggctagcacg

SEQ ID NO: 480835 - DNA, 201 bp, Homo sapiens
ctcacataatcacaacgtcccacaataggctggggagcaaggaagtcagtccaagtcccaaggctgaagaacttgtagtctggtgttcaagggcaggaagmatccagcacgggagaaagatgtagtcttttcacattcttctgcctgctgttatcctagccatgctggcagctgattagattgtgcctacccagattaagg

SEQ ID NO: 480836 - DNA, 201 bp, Homo sapiens
tgggacactggacagaaggttgttcccatgatggttttttttattttttatttttgagatggagtttcgctctgttgcccaggctggagtgtaatggtgcratctcggctcactgcaacctctgcctcctgggttcaagcgattctcctgcctcagcctcccgagtagctgggattacaggcgcctgacaccacgccccgc

SEQ ID NO: 480837 - DNA, 201 bp, Homo sapiens
gagtagctgggattacaggcgcctgacaccacgccccgctaattttttgtatttttagtagagatggggtttcaccatgttggccaggctggtctcaaackccagacctcaggtgatccacctgcctcagcctcccaaagtgctgagattacaggggtgagtcaccgcgcctggccaatgttgttgttgtttttaagacag

SEQ ID NO: 480838 - DNA, 201 bp, Homo sapiens
gtcacggcggaatctagagtttgtgtatcctgacttctttcggtttgagtttagtaggtttgttcagtatcctatgggaaatcatttattttaaagttttktttttttggtttgtttgttttggcagtaaaattttaaaagcaaggtggaatggaagactaaaacatgccttgggttctgcagagttttagacttttggag

SEQ ID NO: 480839 - DNA, 201 bp, Homo sapiens
ttgaatgtgttggtttggtttatctgtgccctgaatttggcatcatgaacttgcactcttggttcagttggaggcggaggtggcccagagccgtgtggatmtgtgctggtgtcaccactgatggtggcaaagggaagagtgatgctgaggaggaagcaggagaatcctgaaggtcgaaggccatggggcccggctgccata

SEQ ID NO: 480840 - DNA, 201 bp, Homo sapiens
gttaagagggccggacatggtggctcatgcctgtaatcccagcattttgggaggctgaggtgggtggatcacctgatgtccagagtttgagaccagccagrccaacatggtaaaaccccgtctctactagaaatacaaaaattaaccaggcatggtgacatgcgcctgtaatcccagctaactgggaggctgaggcaggag

SEQ ID NO: 480841 - DNA, 201 bp, Homo sapiens
gacagtttggacatttttgcagtgctgtgtgacaccacctcatctaattccaaaacattttcattaccgtgaaagaaagccccgtaccgggatgatgaaargttctggagatggaggtggtgatggttacattaacaatgtgaatatacttaatgtcacaggattgtatatttagaaatggttaattaaaatagtgaattt

SEQ ID NO: 480842 - DNA, 201 bp, Homo sapiens
ctcactctgggaaccgcactgtccagcactttatatctcgagtatgctgcccttggggctttgggatctgcagttccacatcagctttactgctagactgygttcctcaacgctttggtctctttctgtctatggcccacccctcactcagtgcctgcgcatagtaggtgcccattcgtggcccagtcagggtgattggca

SEQ ID NO: 480843 - DNA, 201 bp, Homo sapiens
gtgaaacattgcttgtgaaggttttcacacattgcctggcgaacgtccactcaaatgttagaagcagttactattctgtcttgtagatttgggaatgaggwattttgaagtcttaaaatcagtggagtaattatctccaccacttcttaggcagacactgccccacccttatggagctgtatttagagcttgcagtgaagt

SEQ ID NO: 480844 - DNA, 201 bp, Homo sapiens
atgcgatcaggcagacgaaatgagttctgtgcctaggcagagcatgatctcgacttcctttcatttgctaattctgtcttttgcagggaacgcttcctccctctttgtttcatttctctttgccaagaaaattcccatttatcctctgagaccgaggtgaggcattgcctcactctgggaaccgcactgtccagcacttta

SEQ ID NO: 480845 - DNA, 201 bp, Homo sapiens
tcaaatcccatgggcgagttatttaatctctgtaagtcttggtttcctcttccgcaaaatgggtctgatgaacctgataagagttgttggaggattctgargtgaaacattgcttgtgaaggttttcacacattgcctggcgaacgtccactcaaatgttagaagcagttactattctgtcttgtagatttgggaatgagg

SEQ ID NO: 480846 - DNA, 201 bp, Homo sapiens
agtacgtgaggtgtggctagtgcagtcaaggaattgactttatttttagtcacttttcatttgtttaaatttaaatagccgtgtatggctagtggctaccstacggaacagttgcagatctgtaacatatcatctagagaattagagtgtgcctgcgttgcaacacagctttctatcttctaccttctgctggctacaaca

SEQ ID NO: 480847 - DNA, 201 bp, Homo sapiens
gcctttccgtgtgtgtagttgttagcagtgccattgttaatggctgtgtggtgttgcactgctttgtatttctctaattaattcatttggtcaaaacatayttgagaagctactagtaccaggttctaagtgctgggctctagcagtgaacacaatggacacaaatccctgccctcctggaacttacattctagtggagtg

SEQ ID NO: 480848 - DNA, 201 bp, Homo sapiens
aaaataaacagcaacaaaggattttagaatactttgccatgatttattgattctgtccgttgtgatttttttttttgcgacgatggaaattgttaaatacrtgagccactagccacgtgtgactattgagtacgtgaggtgtggctagtgcagtcaaggaattgactttatttttagtcacttttcatttgtttaaattta

SEQ ID NO: 480849 - DNA, 201 bp, Homo sapiens
ctgtgtcagaaacttctttcttcacttagcggcctggcgtccttgcctttccgtgtgtgtagttgttagcagtgccattgttaatggctgtgtggtgttgyactgctttgtatttctctaattaattcatttggtcaaaacatacttgagaagctactagtaccaggttctaagtgctgggctctagcagtgaacacaatg

SEQ ID NO: 480850 - DNA, 201 bp, Homo sapiens
aaaaactgatgcctggcgacagcactgttccccatttgacaagtggccttttattattgatctttggttgggtagcagcagttgccagagagaattgttcrttgtggtcaaccagtgctcctgcctcagtcgtgttttgcttttaaccatgtcttcctggaatgacacttgaaagggcagtcatcatgtgttagcccagaa

SEQ ID NO: 480851 - DNA, 201 bp, Homo sapiens
cgtaaagttaatggaagaaaaactagaaacttcagttaagtaaaaaataagtcacccacaagcgcttgatgagaaagtgggttatgttcacactcacaagrgctcgcacattttcagcaaagggtcagggagccaagactgtgtcagaaacttctttcttcacttagcggcctggcgtccttgcctttccgtgtgtgtagt

SEQ ID NO: 480852 - DNA, 201 bp, Homo sapiens
cctagcattactgctgataaaacgaatccctcctttctaatcccattgctcttttcttgatgtaaaaactgatgcctggcgacagcactgttccccatttsacaagtggccttttattattgatctttggttgggtagcagcagttgccagagagaattgttcattgtggtcaaccagtgctcctgcctcagtcgtgtttt

SEQ ID NO: 480853 - DNA, 201 bp, Homo sapiens
ttttaatttgttagcacaatgtatttagtcatatacgtctgctatgaataaaacatctttttaaaaatggcccgggcatgtgaagtttgtcttacgattcyccattttttttaaagctgtcattgtttggggtgtgctttctatgaaacttcagactttgtgttgagcccaggacagtagggtgtcatgcatttttagcat

SEQ ID NO: 480854 - DNA, 201 bp, Homo sapiens
ttttgttgtttggaaatcgtttctatactggtttgagtgtttctttgtgaaaacccctccctatttagtttttgtgaaaaccctttactatttagtcaaaytttttggaacttctagcttgatgctgtgaacctttatgttctgaaattccgcagtttgtaatgctccaaatcaagagaagtcattcctaggtcctggttt

SEQ ID NO: 480855 - DNA, 201 bp, Homo sapiens
ctttcctaagttctgcctaaaattagaactgctaaagggacttcttgaattccatggaaatctttttgtggttcgaagccatgtcgtgatattttccctcycatatcataggatggagaatgtgggtagtgggtccaacactggatagtgatttcaggattttttttttacccctcactgctttgttttggggttcccatc

SEQ ID NO: 480856 - DNA, 201 bp, Homo sapiens
cccacctgtccgatgacatctccccacccatggccggcaactgcacccacaaagaactgctcactgttttctgaaacccttaaaacccttgatccctatcygctggcacatgtgcattccaggcccagaatgtcctttccagccctccccttcttcaccctgtttgtatgcttgaggatctgctgcttgtctcccaggagt

SEQ ID NO: 480857 - DNA, 201 bp, Homo sapiens
ggaaaattacagatgggcatttgggttgaggtcccctctcagacttggagtgtgtgtaggaggaaggcaggtggacgccggaccttctaggacaggcatcraaggctggtccatcagacatgcgctttaatcagtgagtctggatcgccgaggttggtgaagcatgttggtgaagaaaattgctgatggcttagttcttac

SEQ ID NO: 480858 - DNA, 201 bp, Homo sapiens
gttaaataaactgaaacataaaaataaacagcaacaaaggattttagaatactttgccatgatttattgattctgtccgttgtgatttttttttttgcgaygatggaaattgttaaatacatgagccactagccacgtgtgactattgagtacgtgaggtgtggctagtgcagtcaaggaattgactttatttttagtcac

SEQ ID NO: 480859 - DNA, 201 bp, Homo sapiens
ttatagtccaggcacttggaattagatggattattccctgttgaaagacagcccctttcattctgttgcccccagtgcacactgacggatctgtccactgyagtcctggagtgatcacatctggagttttttctctttgttctttaatccagaatccaggctcggttcttcccattcactgtttgaatcgaaagccgttca

SEQ ID NO: 480860 - DNA, 201 bp, Homo sapiens
agtacaaaggaagtggaggaagcaagattaagccaaagataatggagagagaaggttagaagagaaaagggaaaattacagatgggcatttgggttgaggycccctctcagacttggagtgtgtgtaggaggaaggcaggtggacgccggaccttctaggacaggcatcgaaggctggtccatcagacatgcgctttaatc

SEQ ID NO: 480861 - DNA, 201 bp, Homo sapiens
cggaatctagagtttgtgtatcctgacttctttcggtttgagtttagtaggtttgttcagtatcctatgggaaatcatttattttaaagttttttttttttggtttgtttgttttggcagtaaaattttaaaagcaaggtggaatggaagactaaaacatgccttgggttctgcagagttttagacttttggagactcgag

SEQ ID NO: 480862 - DNA, 201 bp, Homo sapiens
attatctttagagcttccaatttttgctctgagtacaaaggaagtggaggaagcaagattaagccaaagataatggagagagaaggttagaagagaaaagrgaaaattacagatgggcatttgggttgaggtcccctctcagacttggagtgtgtgtaggaggaaggcaggtggacgccggaccttctaggacaggcatcg

SEQ ID NO: 480863 - DNA, 201 bp, Homo sapiens
ttccattttcccacctataaagggcctaggagcctagatcatcacaagtaatttttttttggctctaatattctatgatttaaaatcttgccttggttctyattagctatgaatgaagtgtaaatttccttttctatattatctttagagcttccaatttttgctctgagtacaaaggaagtggaggaagcaagattaagc

SEQ ID NO: 480864 - DNA, 201 bp, Homo sapiens
ttaaaaaaaatctgtgtagcacaaaaaataatctatgttgttgaaataacaaaagtctatatgcggtagttagaataacaactagcttgggatctgggatrcgtaggtttgacttcgtgcctttgcagctatgtgaccttgagtaaatatttcccttctctgggcttccattttcccacctataaagggcctaggagccta

SEQ ID NO: 480865 - DNA, 201 bp, Homo sapiens
gtctcgctttgtcaccccaggctggagtgcagtggtgcaatgttggctcactgtaacctccacctcctgggttcaagcgattctcctgcctcagcctcccragtagctgggattacaggcacgcgccaccattcccagctaacttttgtatttttagtagaggtgggcttttgccaggctggtcaggctgacctcaggtga

SEQ ID NO: 480866 - DNA, 201 bp, Homo sapiens
ggtctctccttaccctttgtctgtgcaaggagccggtgcagcctgctgaggtcttttgggcccccactgccctgcgggagcctcgcaagaagaggggctgygaaattggagagtgagatgtgccttggtatcctgtgtgcatcctccagactcactgagggatgtggcagctcacagaccactccacaccgccagcttccc

SEQ ID NO: 480867 - DNA, 201 bp, Homo sapiens
gcttaagcctaggtttgagttccacttactagtgacataacctgggacaaatcacttgggcatttttcctttctataacatgggatggtcacagtactgaygcggctggaggtgctgcgaggattaaatgagttgaagtgtgcagagtactcacagcagtgcctggcacatcctaagcgctgtacgtcttcctgcaacctt

SEQ ID NO: 480868 - DNA, 201 bp, Homo sapiens
ctgcaaagactctcagatgccagtttaaaagaacacttacagttctgcctttttgtctgttaactttaatagatgtcaactccatgaaattctggtgaaawcctccttgcatgaatattaatcacctgccgttaaccacgtacaagaaaattttagaaaggcaaacttagtaaacatctgtccaaatcatttggagcaaag

SEQ ID NO: 480869 - DNA, 201 bp, Homo sapiens
ctcgacctcccaaagtgcggggattacaagcgtaaacccactgtgcccggcctatgataggttttcacctactgagaatggacttaatttttccttttagraataagagtcagagctaaggcccaagactaaggcaagtgacaaagccactcaatactatatgtgatcaggagagtttgtgaaggacaaggactcctttta

SEQ ID NO: 480870 - DNA, 201 bp, Homo sapiens
atagtctacttcctagtgttactgtgaacagtgccagatgtgtagcagttgctcactgtatttgatgatgaggatggtggtggtgacggtggtagtgtttrtgtagaaggaaacaggcctggaggctgaagcaactatgacttgatgtaagcaaaagctactagtcaagtgctctcgttgcggattttgctattttagagt

SEQ ID NO: 480871 - DNA, 201 bp, Homo sapiens
cttggtgacccctccctgaggtcaagtctctggtgcaaaggacaactgggtagaaggcactcaccctgcttcatggatggagtggaggaggggagggaatytttcctctgaggggagaaggtgctgggttgtttgggttcccagctgggttgtttcctggctccagccagactgctcttgtttgctcctgagttttatttt

SEQ ID NO: 480872 - DNA, 201 bp, Homo sapiens
actgtaacctccacctcctgggttcaagcgattctcctgcctcagcctcccaagtagctgggattacaggcacgcgccaccattcccagctaacttttgtrtttttagtagaggtgggcttttgccaggctggtcaggctgacctcaggtgatccgcccacctcggtctcccaaaattctggaattacaggcatgagccac

SEQ ID NO: 480873 - DNA, 201 bp, Homo sapiens
ttgttgagtattaaataagtaaaagtcgagggcttagcatgaaataagtgctaaataaatgctcgtatctatttgagccaccctagtaattcctggcagarcctcctgctgatagtggcactcagatgtttcaaagaatagaagcaacctatgccttcagtttgataatgcagtagagacaagtgcagtgcttttcaacat

SEQ ID NO: 480874 - DNA, 201 bp, Homo sapiens
ccttcctttccttctccctattaattatagttttactttctcagtaaaaggattatgatattgatggatttggtactgtggctcttcaatttaaaaaaaawttttttaacatgttttgctttcattcccacccccacgatggcagcgttttgatgctttggtggatgttaagctttgatggctaacgcttcccctctcagc

SEQ ID NO: 480875 - DNA, 201 bp, Homo sapiens
gacattgcagggtgtgtggatggggtgtggttgttgccggaaagaccacagaactctagtcagcagatccccactctaaagagaaggccttggcccttcayaagattgaggaatgaatgttttccgttccagtaaattgtttaaggtgtgtgcgtataattttttagtcctttcctaccccgactttttaaaataatcgaa

SEQ ID NO: 480876 - DNA, 201 bp, Homo sapiens
ctgttattgcctggctgaaaaccaggcctgccgctgatggccctaaagggaaccgcatctgccaggacgacagagcgtcagcaatgtgttggactcatcayaaagcagacacatgtttcctgcattatggagctgttgggccacatgacctagaagcccttctggtgccaggagtctgaattccatgatgcttacatccag

SEQ ID NO: 480877 - DNA, 201 bp, Homo sapiens
ccattttgatcccattttgattctgaatgcattaaaaaaaatctgtgtagcacaaaaaataatctatgttgttgaaataacaaaagtctatatgcggtagktagaataacaactagcttgggatctgggatacgtaggtttgacttcgtgcctttgcagctatgtgaccttgagtaaatatttcccttctctgggcttcca

SEQ ID NO: 480878 - DNA, 201 bp, Homo sapiens
cctgggatccatttccttccttctgagaatctgaaatgccttcctcaggcattggatgtattaccatctaaacttccctgagatggttgttcaaaaccatraaagtaattacagaggcagatgaaaatgagagtcacacaacactgctcttcaaaggcccttgctgacacaagcagatggcacagtggccgggatgggcca

SEQ ID NO: 480879 - DNA, 201 bp, Homo sapiens
aatttaagattctggacattaaagatgatctagtctgcctgggatccatttccttccttctgagaatctgaaatgccttcctcaggcattggatgtattaycatctaaacttccctgagatggttgttcaaaaccatgaaagtaattacagaggcagatgaaaatgagagtcacacaacactgctcttcaaaggcccttgc

SEQ ID NO: 480880 - DNA, 201 bp, Homo sapiens
acttaaaaaaataagaaaaggaaaattaaggaaattaagaaaaagatggtaagtacctaccacataggctgtggtgagaacaaaaagacttaatacacatraaccactcagaacagagcccagcccatggtacacattcaataaagcctagctatcctgattttcagtcttaaaatcatgcctactttttagggtaacaaa

SEQ ID NO: 480881 - DNA, 201 bp, Homo sapiens
attacaggagctgagaaatatttgaactgagtggcatgcatttgtctgggctacttaaaaaaataagaaaaggaaaattaaggaaattaagaaaaagatgrtaagtacctaccacataggctgtggtgagaacaaaaagacttaatacacatgaaccactcagaacagagcccagcccatggtacacattcaataaagcct

SEQ ID NO: 480882 - DNA, 201 bp, Homo sapiens
actataatggaatttcagtttattagcactaggcgcagttccatattttgttgattttagactctggatgaatatacaatttgttttaaatatgaaagtaygattttctgtattattgaacacaaagaattggtttctaggtatctggtagacttggaacccgaggctttgtggagcagggtctctgcttccttcacatcc

SEQ ID NO: 480883 - DNA, 201 bp, Homo sapiens
ttacagcctttacatgtatttttttttttttatccctcttgatggaagtggtaggagggaattgcagttatcattaagtgcatctcttctgggcaagtgcycagcatttcaagctagcaggtcgctctggtttccaaaatattagcatctcatattgtttccaaaagggaacagctctgagtggtctttgtcctttatagg

SEQ ID NO: 480884 - DNA, 201 bp, Homo sapiens
agaaagaatatccttggttactcccttgcttacagcctttacatgtatttttttttttttatccctcttgatggaagtggtaggagggaattgcagttatyattaagtgcatctcttctgggcaagtgcccagcatttcaagctagcaggtcgctctggtttccaaaatattagcatctcatattgtttccaaaagggaac

SEQ ID NO: 480885 - DNA, 201 bp, Homo sapiens
accttctccagaaagaatatccttggttactcccttgcttacagcctttacatgtatttttttttttttatccctcttgatggaagtggtaggagggaatkgcagttatcattaagtgcatctcttctgggcaagtgcccagcatttcaagctagcaggtcgctctggtttccaaaatattagcatctcatattgtttcca

SEQ ID NO: 480886 - DNA, 201 bp, Homo sapiens
cccacggaatgaatcgaagagaaaaatagaattagtcactgaacagattatcgaattgagcaaatctttaaagaattccaaagatagaaatgtcttggacmcagcaggactaatttttgtttcaacattggaaggcagccctgcttcttattatagacatgttcaaatagtttaagtgctggttactgaccagattatctg

SEQ ID NO: 480887 - DNA, 201 bp, Homo sapiens
gcctgggctcagggaagtgaccacagagatagagaggaagacaggtggattcaagagctacttaggagaaatgcaaatgaaagaaggaagagttgaaggcratggtaaatttctggatccggtagtcaggttggcagatggtggagtatttctttaaccaccaaggaagaagcattttggagccgtgaggatgctctgttg

SEQ ID NO: 480888 - DNA, 201 bp, Homo sapiens
cactgacgcccctttctgaaaaggagaagccacgtgctgcagccttcccttccaagactgtgagtgtggatggggtagaacagagtgtttcccatggcatrgagggaagcagaagagggcatattgggtttacttaaatctgaaaacctgtgcccaagacatgcgtggctagcaactctagggtagctttttgttttgtca

SEQ ID NO: 480889 - DNA, 201 bp, Homo sapiens
ggaatcttgttttaactgtacgtttcaaacaaaggaattgaggctcagagagaccctgggactagaaaagacttgtggttatttgaacccatcttaattgkgtctcaatccttttattcttttctctaacacggctttattttctgataggaatgttcactgttttcccaagttgctcacaggtatatggggattgggggg

SEQ ID NO: 480890 - DNA, 201 bp, Homo sapiens
ctgggattacaggtgtgagccaccctgccagccagtgctgggatgaatataagcaaaaggtgtaacctgggggcagagaggaaggagcctcactaagcctkggggtagggtagtgataatgaggaggagcatgaggggtcagctgttgaagaatgaggaggggatattcaaggtggagaggacagcgtgcaccaacacatg

SEQ ID NO: 480891 - DNA, 201 bp, Homo sapiens
atgtgctgctcacaagcagagagggcaaagggtcgggaggagggctggaatgtgcagttcctccgggctgttctagtgtgcagcataattgtgtgtgtgtktttaattgacaaattaacatagtagtgtgcactgacgcccctttctgaaaaggagaagccacgtgctgcagccttcccttccaagactgtgagtgtggat

SEQ ID NO: 480892 - DNA, 201 bp, Homo sapiens
ctgcctcagcctcccaagtagctgggattacaggcacgcgccaccattcccagctaacttttgtatttttagtagaggtgggcttttgccaggctggtcargctgacctcaggtgatccgcccacctcggtctcccaaaattctggaattacaggcatgagccaccgcgcccggccactagggtagttttaatgagctcag

SEQ ID NO: 480893 - DNA, 201 bp, Homo sapiens
ctgctgggaaacccatgtcagagctctgcgttcctctcctcacagctcagcgctcccattagcatttttcagccatcctggggactgtggcctctgtctgycttccttggatacacactcaattttaaacgcactcagagccaagagccacggctatagtttgagagtgcttgagagtgcgtgtcccacctggggtgcttg

SEQ ID NO: 480894 - DNA, 201 bp, Homo sapiens
ggtgccccacagccccacctgctgggaaacccatgtcagagctctgcgttcctctcctcacagctcagcgctcccattagcatttttcagccatcctggggactgtggcctctgtctgccttccttggatacacactcaattttaaacgcactcagagccaagagccacggctatagtttgagagtgcttgagagtgcgtg

SEQ ID NO: 480895 - DNA, 201 bp, Homo sapiens
cccttggctccaggagcagctgtcacacctggtgtcctgaccactgtcagtggccagaaccaaagaagcaccttggcttagacaatcccctgcccactgasttgagaaacctctggtttaatttctcatctttagatgtattgttcccctaaagggagaggtgctataagtgggtttgaagcctgtctccatggtggtaat

SEQ ID NO: 480896 - DNA, 201 bp, Homo sapiens
caggtaagggtgcccttggctccaggagcagctgtcacacctggtgtcctgaccactgtcagtggccagaaccaaagaagcaccttggcttagacaatccsctgcccactgacttgagaaacctctggtttaatttctcatctttagatgtattgttcccctaaagggagaggtgctataagtgggtttgaagcctgtctc

SEQ ID NO: 480897 - DNA, 201 bp, Homo sapiens
ttcatgatttggtgttttgaaaacgtgttttgtggtttgcactgcatctccagggcagagagctaattgcattatgttgtgcttctctctcttctgcctcrtctgttcccctccttcctccttcctcttaccactgctcccctttctttaccttccgtgcccacccctcacccctgcttgtcctccacagcagcctgaaca

SEQ ID NO: 480898 - DNA, 201 bp, Homo sapiens
ttggtcatgtggacccagatggtccatccaagaacattccagtcatgctgaagccccagtggacttttgctgcaggctcatggttcctgcaggcagattarccctgtcccttttcttgctactgacatcagctcccctcgttttggtggtaggcgaagcagcagagttgggcgcacttgacgttttagaaccccagacctc

SEQ ID NO: 480899 - DNA, 201 bp, Homo sapiens
tcacttcagagacttccttaagtatgacggccctggaaaacaggtgggagcaaataggacctatctgagttcacattctcaaagtgcagaataggtattamtttgaggcctttgccaagtggtacttgacgtgttccttcccccacctttgtcttccaagtttgacagtttccatgcctattgtgcttcgtaatgatacct

SEQ ID NO: 480900 - DNA, 201 bp, Homo sapiens
acacagaaacagctggggtcagagtaaaaacattaattaaagcatcactttgttaaaaggtaaaacatatgcacaccaacatagtgagttgatttgctgaygttcttgacagcgggcttgaccagactcagctaggatgaaatcacctcagcaaatccatcggcagtgcttagctgggttggccttggtcatgtggaccca

SEQ ID NO: 480901 - DNA, 201 bp, Homo sapiens
aatgatgtatggatcaccaaggaaatgataatctgtaaaaagtgcttcaagctgttttggtcagcagcaaatagatttgggcttagggttggtgtaggccrtgactctaacagagtttgtggtttgatatctaccttctccagaaagaatatccttggttactcccttgcttacagcctttacatgtattttttttttttt

SEQ ID NO: 480902 - DNA, 201 bp, Homo sapiens
ctctgctgcaattaatgcccatgtatatatccttttggagtcctacaagtgatctatttttaatgatgtatggatcaccaaggaaatgataatctgtaaaragtgcttcaagctgttttggtcagcagcaaatagatttgggcttagggttggtgtaggccgtgactctaacagagtttgtggtttgatatctaccttctc

SEQ ID NO: 480903 - DNA, 201 bp, Homo sapiens
tcattattctcttgatagatatttaggttatctccaggtatttgctactacaagctctgctgcaattaatgcccatgtatatatccttttggagtcctacmagtgatctatttttaatgatgtatggatcaccaaggaaatgataatctgtaaaaagtgcttcaagctgttttggtcagcagcaaatagatttgggcttag

SEQ ID NO: 480904 - DNA, 201 bp, Homo sapiens
acagatgtttttgcatatataaacaaacatgctgggaggaaaaaaaaaaaacaacactagttttccacaatatgtggaatgacacatggaataaaatatamctgtgtgacctttttcagaaggtagcccctaagaaacattgttctgtgctttttactgcatagtatattatagttatctttccagtacctataagtccac

SEQ ID NO: 480905 - DNA, 201 bp, Homo sapiens
cagcattcccttggagaatgtgacacagaaactagaagcatggtttcttcatccagtatgtcagcttggtgtggatcttaaccagtatctttttaaaagtsctttaaaaaaattactccatagcttatgtgtgtctgttatagaaacttgagaaaatacaaccgtagagaagaacttaatatgcaaaccattgcagggcct

SEQ ID NO: 480906 - DNA, 201 bp, Homo sapiens
gtgggattccacatattagaagttgcaactagttttctggataataaagcacatgtgaagaagaatgaaaaaggaagaaaatgaaccactgtttctgcacragttggcttgatgggttctttgatcactttaatgacgtgctggttgttgaaccttgagctgtgcctttggttgcaatttgcgttttcctccttacgtggg

SEQ ID NO: 480907 - DNA, 201 bp, Homo sapiens
acgtggtaagcagatggaggctgactcccagtgttaactgcattctgcacgtggactcttccccttgggtggctgcacaagaagatgcagcttaagttatcagagctgagctgactcgtattttcccattttttaaaactctgtgggattccacatattagaagttgcaactagttttctggataataaagcacatgtgaa

SEQ ID NO: 480908 - DNA, 201 bp, Homo sapiens
catctacactcaagctctccccagcacgaagaatgcatttatgttccaacatcaattctctgactgcagctgctgtcctattcagttatgacacacctagkgttagtgtagaccccacaagctaagagttcagtcccatgagactgccccaaattcagtcaccagccacaagtggggtcctcagattcctcacacttctgc

SEQ ID NO: 480909 - DNA, 201 bp, Homo sapiens
actgagagtagagggcaggatgtatctgctcaatctgtctatggtgatgttttggtgcacgctgatgcctatttcctttcactgcggagcttgtacactamacacttagcaggaagttcagacctaagacgctgcatcctggacattctgccccctgaagatattggtttgtttcttatcttctgtcgactgtgtgtgtgt

SEQ ID NO: 480910 - DNA, 201 bp, Homo sapiens
cctgggttgatttttacacaggctgatctcactgttgccagaacaaacgaaggaagtaacaatggcttatgccctcatttcaccccatatttttgtttcarggtttcataaagtaaatagagttcttgctctgtcagtcactgctactactaccaccactaccacgaccacacctgtattaattagtactgttccctattg

SEQ ID NO: 480911 - DNA, 201 bp, Homo sapiens
gctggtcgtatcagacgccaccctcttcccccagcaccaccatgtccagaaagtccagtgtctgcaggtgagtgaagccggggtccactcttgctttcagsacgggtcatttttctttatgctaatgtgagcaatggagccagtccttatctcttagaatggctcattctcaaacaggaaatgggatgatgagctgaaaga

SEQ ID NO: 480912 - DNA, 201 bp, Homo sapiens
ctgatgaatcacatgctggcttttgtgcttggtaacaatcttttcgtctccttggagagctggctcagagggcaaatttgggagctcatgttttctattcyatcaaattatatttattagaccagagcatgcatgcattcacttgacaaataaacatttactgagtgcttcttatgtgaatgaaaggtggaccttatactc

SEQ ID NO: 480913 - DNA, 201 bp, Homo sapiens
catcttatgaaaaagatgacatttttatgctttattcatttaattcacatcacacgcacactatgggaagagacatatttgggggaactgatgaatcacaygctggcttttgtgcttggtaacaatcttttcgtctccttggagagctggctcagagggcaaatttgggagctcatgttttctattctatcaaattatatt

SEQ ID NO: 480914 - DNA, 201 bp, Homo sapiens
tccaaattagataacactgggttcagtggcctttttttctttcctatgtagatacagtttttaaagtcagcattattaattatggatagacatgtgccttrtaacttgtgaaaggaagtaaagatacatttttccaatttctgacaatcacaggctgttattttttaattttattttatctatttatttattttagatgga

SEQ ID NO: 480915 - DNA, 201 bp, Homo sapiens
aaataaacattgtagttttagcttatcatctatcctgaatggaaatgtcttgactataattatagcaatctttacagagtatacttattttagaatgctayaatttgagagtcctttaattataatacacatttaaaataactttgctataatcataggataacttaaatttatattttccaaattagataacactgggtt

SEQ ID NO: 480916 - DNA, 201 bp, Homo sapiens
caacacaactctctgaatttgtggacctcaaaagatcactctatcttaaaaccagtatatccaactgggacatgaaataatttctttcacagtttttttttataaatataattacatgttgtattagtgaatttaataaataaacattgtagttttagcttatcatctatcctgaatggaaatgtcttgactataattata

SEQ ID NO: 480917 - DNA, 201 bp, Homo sapiens
tgagacgaggatggagtcaagtccgtgggagctggaatagccaggaccagcgctcaaggagtcagtggtgactctcctaacactgccgatgggagtgaagmgaatgggcttttgtatatattaaatcagtaccaacacaactctctgaatttgtggacctcaaaagatcactctatcttaaaaccagtatatccaactggg

SEQ ID NO: 480918 - DNA, 201 bp, Homo sapiens
gccataaaatatagttgattccatctacaaatagggcaattgcttcagagagaataacagctcaggacactcacacaaccagtgattgagctcccgttgtstactagatcttgcagtgctatggagagtgtaaagatgattaagctactctccttagcctcaagcaacttagcatggcagatgggagataacctgaaagct

SEQ ID NO: 480919 - DNA, 201 bp, Homo sapiens
  misc_feature (1)...(201): n = A,T,C or G
agaaagtgaagctgaagaccaggaacgggaacccccaagtgccactgtctccccaggccagattccagagagtgaccctgcagacctgagcccaagggatnctccacaaggagaagacatgctgaacgccatccgaaggggcgtgaaactgaagaagaccacgacaaacgatcgctcagcccctcgcttttcttaggttca

SEQ ID NO: 480920 - DNA, 201 bp, Homo sapiens
atttaaatatactatgttctggatgaaaagagcaggagtaacaattgatgagcaatattcagagtgaagtaaatctggaaatggtagactgtgttgggatwggggggagggccatgggaggggtacatcgtcaacatagccgatcctgttacatttaagagtagcctcgtaggttgaatttcttctggtagcttcatggta

SEQ ID NO: 480921 - DNA, 201 bp, Homo sapiens
gcattcacttgacaaataaacatttactgagtgcttcttatgtgaatgaaaggtggaccttatactcatgtggtcctttgtcaagcaacggagacagatayagaaataatggtgaaagaattggcttgttcttgattctgtcaggctttaaaatttctagtgctggtcaaatagggcagaaatgaccactgaatatcaagt

SEQ ID NO: 480922 - DNA, 201 bp, Homo sapiens
aggaagggcgtatctgactctctgtgctcttgggaaccccgtgtacctccaggcctagcaaggggaagtctaaaccaaagatgccagaagtacattgtctktgaccactaactgttgcaacagagtcagcatctaatgtgttgtttcttagagttatttgcaatgactttgagaacaaaagctcccctgggagggtcagca

SEQ ID NO: 480923 - DNA, 201 bp, Homo sapiens
tttcctactccaaaattaatttcacctctaccacttatattttttaatgttttatttttccttttaggtagaaatgcctctgttttcctcctgtataaaaytttgcctggtagtaggtgtttcttttttctttttttttttgaggcagagtcttgctctgtcacctaggctggagtgcagtggtgcgatcttggctcaccg

SEQ ID NO: 480924 - DNA, 201 bp, Homo sapiens
aaatccagccattgtgtcagatattaattgtaaatcagaacaagctatttataagtcccaagaagtttgataaagctaatttttccagggtttgtgtttgwtgtcaactctttaaaaaatatgcttcaaagtggttttgtgtacatgtatgtcattatttttaaaaattttgagcagaatgttttcttgccctactggaaa

SEQ ID NO: 480925 - DNA, 201 bp, Homo sapiens
gagaatcacttgaacccgggaggtggaggttgcagtgagccgagatggcgccactgcactgtagcctgggcgacagggcgagacgccgtctcaaaaaaaaacacacaaacagaaagtgataggaacccttccatcacatcaagcctggtgcttctatatgattggaatgacggtactgatgcccccctggcagacacccct

SEQ ID NO: 480926 - DNA, 201 bp, Homo sapiens
gctggttcattaaatttggatgattggcattgagttggatgagaataaatccagccattgtgtcagatattaattgtaaatcagaacaagctatttataartcccaagaagtttgataaagctaatttttccagggtttgtgtttgatgtcaactctttaaaaaatatgcttcaaagtggttttgtgtacatgtatgtcat

SEQ ID NO: 480927 - DNA, 201 bp, Homo sapiens
gtgggaggtctcctcctatagtaatacagtaaaacatttaagtacatttcccctacttttttaagattcagcctcatttaaccgtctggcagtctttcagrgtagaccaagaaaattgttatcttccccttttatcagtgaggatcttgaagcttaaagtaatgaacagatcagctgtcttaaacatataaagtaaaattt

SEQ ID NO: 480928 - DNA, 201 bp, Homo sapiens
tgattctcatgcctcagcctcctgagtagctgggactacaagcatgcgccaccatgcctggctaatttttgtatttttagtagagatggggattcaccacrttggccaggctgatctcgatctcctggcctcaagatgtctgcccaccttggcctcccaaagtgctggaattacagctgtgagccatggcgcccggccctt

SEQ ID NO: 480929 - DNA, 201 bp, Homo sapiens
taacatttacgctctgttctgcaaaaataatccccaggtgtttagtcttagttttgttttgttttattttattttatattattttattttttgagacggastgttgctctgttgcccagtctggagtgcagtggtgcgatctcagctcaccgtaacctccatctcccaggctcaagtgattctcatgcctcagcctcctga

SEQ ID NO: 480930 - DNA, 201 bp, Homo sapiens
agttgattaacctcattataattttttcctcctttcctgaacaagaaaatcaagaggtagcatatgttgtttttaccttgtcagggttcataacatttacrctctgttctgcaaaaataatccccaggtgtttagtcttagttttgttttgttttattttattttatattattttattttttgagacggagtgttgctctg

SEQ ID NO: 480931 - DNA, 201 bp, Homo sapiens
tttaaaaaatgcaatgactttattgttttcattaaaatgatacatgacccttataaagaaaactcacaagactccagccataaaggaaagtacaaaggagraagcaatacattggtccagattttaactcccagaagtaacccgtattaatattttatagacaactttccagatatctcttatgtacattttcagacagaa

SEQ ID NO: 480932 - DNA, 201 bp, Homo sapiens
tcattttccaatccgtgttctgctctgctgtttagggggctagagagcagaaaagagagggtggaaaagtgcttcatttgggcagtggttttatgattaakaatagagtgcctttgatattaaagcaatattattaaattattaaattagttagaagtttcggcattggaaaactagagcccagtaccctattgtgttact

SEQ ID NO: 480933 - DNA, 201 bp, Homo sapiens
ggagagaatggcccacaaaggctgaggctatgaggtagacaggcaatgacctttcatgccttgcagggcaggccatgttaaggatattgttcttttcttgygagcaatgggagctgttgaaaagcagtgagaatatttgcattttgaaagtaatccacagccgggtgtggtggctcatgcctgtaatcccagcactttggg

SEQ ID NO: 480934 - DNA, 201 bp, Homo sapiens
gactctctgtgctcttgggaaccccgtgtacctccaggcctagcaaggggaagtctaaaccaaagatgccagaagtacattgtctttgaccactaactgtkgcaacagagtcagcatctaatgtgttgtttcttagagttatttgcaatgactttgagaacaaaagctcccctgggagggtcagcagacttggtgtgtgca

SEQ ID NO: 480935 - DNA, 201 bp, Homo sapiens
gtgctgtgaataagtataagggatttcagagatcaagtaagagaagcctaatctggggagaaagttcacagcaggattccctgaaggatcgagaattaagygagacctgtaggataaaaggtgttaggaatgtagcagagggacagcagagtgaagatgggaaggggcccaggccctggaggatgagagggagaggagaga

SEQ ID NO: 480936 - DNA, 201 bp, Homo sapiens
taattttgtgtgttagagaaaggatgaagtttagattgcagaagaggcatagaagccttagtttatttaagctgaatcactcctctgtgtttctgttggtyacaagtttgctctgccccatcaaagagggccaagatgtcttgtgactacagcggacagtgaaatatgactgccatttaaaagcctcaaacttgatcaccc

SEQ ID NO: 480937 - DNA, 201 bp, Homo sapiens
agaaataaagatgaaattcaaaccgggggtagtgctgtgaataagtataagggatttcagagatcaagtaagagaagcctaatctggggagaaagttcacrgcaggattccctgaaggatcgagaattaagcgagacctgtaggataaaaggtgttaggaatgtagcagagggacagcagagtgaagatgggaaggggccc

SEQ ID NO: 480938 - DNA, 201 bp, Homo sapiens
ttcctccgggctgttctagtgtgcagcataattgtgtgtgtgtgtttaattgacaaattaacatagtagtgtgcactgacgcccctttctgaaaaggagargccacgtgctgcagccttcccttccaagactgtgagtgtggatggggtagaacagagtgtttcccatggcatggagggaagcagaagagggcatattggg

SEQ ID NO: 480939 - DNA, 201 bp, Homo sapiens
gctgccacctggtgggtgagggtttttaatctttgggcagagacgaggaaaagggaggtacacagggggctcccaaagggtttccattccttgccctttakagcctggagagggcatgcagagggcctgtggcttgtcccagccggaggttccccttaaggggaccagctgccttctctggggagctgtctatggggtccc

SEQ ID NO: 480940 - DNA, 201 bp, Homo sapiens
tcatcttcatgattatgcttgttttatagagaatgatgcagaggcactgagagatggagtcacttagccaggttcagctagctagcaggtagtggaactgrtatttgaaccaagttggtcaggttccagatcccatgcacttaattgctgtgttcatctgccctctagaagtcaaccctcctaagaacacgtcgctggtgt

SEQ ID NO: 480941 - DNA, 201 bp, Homo sapiens
gagggatagatggaaactgcagggcccttcctgcgaggcggtggggcagagaataggttcagtgttaagggaattaggcagtgtggctcaaccctgcctckgtaccattctttctgtgaccttaggtgagtcccttgacttctctaggacttggtctccattgaaacatgagcagattggcccaattggataaccccttcc

SEQ ID NO: 480942 - DNA, 201 bp, Homo sapiens
aggatctttatttcattccagaaaactctgtaaagtttcctcatttaaaaattccttccttctgtggccgggtgtggtggctcacactgtgatcccagcastttgggaggccgaggcaggcagatcacttaaggtcaggagttcgagaccagcctggccaacatagtaaaaccctgtctctacaaaaaatacaaaaattag

SEQ ID NO: 480943 - DNA, 201 bp, Homo sapiens
agacttggggctggattctagctgtgcccgtggctggcttagtgctcatgattgtggccctgtgcagaccactttgcctccctcagtctcagtttccccayctatcaaaacggatattcattcctgccttgaatgtgttatgtaataatgattaaggaaaataaaatgcaagtgttgaagttgatacaggatctttatttc

SEQ ID NO: 480944 - DNA, 201 bp, Homo sapiens
cagttatcaaaactctcatctgtacatcattttccaatccgtgttctgctctgctgtttagggggctagagagcagaaaagagagggtggaaaagtgcttyatttgggcagtggttttatgattaagaatagagtgcctttgatattaaagcaatattattaaattattaaattagttagaagtttcggcattggaaaact

SEQ ID NO: 480945 - DNA, 201 bp, Homo sapiens
atgtcacagtttatgctttctgtgataaatgtaatggctgtttcctacctaacatattttctgttaagcaaagtggtaaaattgttccatattctgctttstcttagaatataagaaagcccgccaagagataaaaaagaagtcctcggatacgctgaaactgcagaagaaagcaaaaaaaggtaactcctaaaattctgc

SEQ ID NO: 480946 - DNA, 201 bp, Homo sapiens
aggtggtgatggttacattaacaatgtgaatatacttaatgtcacaggattgtatatttagaaatggttaattaaaatagtgaatttcttggtttatattwatttatttatttaccatgagaaaaacacacaaaaatctcatactcattaagcagttactccctgtccccacccttcccagcttctggcagtgttttgtgt

SEQ ID NO: 480947 - DNA, 201 bp, Homo sapiens
gcttcgatctcccgggctcaagggattctcccacctcagcctcctgagtagctaggactacaggcatgtgccacagcacccagctaggtttttttttttttcttttgagatggagtctcgctctttcgcctaggctggagtgcagtggtgcgatctcggctcaatgcaacctccactttccgggttcaagcaattctctgc

SEQ ID NO: 480948 - DNA, 201 bp, Homo sapiens
tggatattattcgggtggagtacttggaaaaaagtgggttcagcaagacagtggttgtccatgctcagttgagttatttctggaggaaggttacatgtacyccttagcagaggttttaggccttgagctgtaatgaatttgctagggagagacattccttatgcttttgttatctgtttgcattttaggacaacagtagta

SEQ ID NO: 480949 - DNA, 201 bp, Homo sapiens
gagaacgtttcgggtaattgtgatttaggtatgttttgacaaccacatttaaatcctgacaacagaatgtatctatttaatttctccctttttcccccccrcttggtaaaagcgctttaattgattgtctgataaacccacttcaagaacagatggaagaatggaagaaagtggccaaccagctggataaagaccacgcaa

SEQ ID NO: 480950 - DNA, 201 bp, Homo sapiens
atttactcactttttttttttttcatttctcaacaaggaggtttttgtcttctgttcttagaagttgattttttttctttttttagaatctattaaattayatattgcctaaaacaggtgggcctgactctctctgatagactgtcaagtgtcattaagtcagcagcaagctactttgggcaaccttctggctgggtggat

SEQ ID NO: 480951 - DNA, 201 bp, Homo sapiens
ctgtgggaagttgccagctgctgcctggcccctctgctaggtttattggtgtcaccaaaacagccaagggcccactctgtccctactctcctgtaggcacrtccgtgtcaggggatgaggagaacaaagtgatcccgttgtgaggctgagtgctgtttctttggtgtgaaacaacattcagcagctgatagtctgatccct

SEQ ID NO: 480952 - DNA, 201 bp, Homo sapiens
agagcttccagtgtcttgggttgcgggtttcttttgaaacttgagtatggtctcctttatgtagtcttgctgtccaaaaggcaggactttttctctgctgyctttcaatctttctagttaccttcttcctcctttcttacttcctctaagcttgaattattatagtaaaactgctctcaggtgggtagaaacttctttttt

SEQ ID NO: 480953 - DNA, 201 bp, Homo sapiens
gaactgaattcttcctcctcacgtaagtcctccccagctctgtggctcctcccaagttgccctttctctggcagttcccggcccctgtgttccttgtgtgrcagcgtggtgttgaattccctcagctgtcccagtggcgctgggctgggagaggcagttgctgcattatttatggagcaccggtcaccagccgtgctgatg

SEQ ID NO: 480954 - DNA, 201 bp, Homo sapiens
tgcatttttagtagagacagggttttgtcatgttccccaggctggtctcgaactcctgagctcaggtgatccatctgcctcagccttccaaagtgctaggwttataggagtgaggcactgcgcccagcctcgtgctttctttttcatgtggttgggggtcctgaccatttccagggtggtattacaatccctctgggccat

SEQ ID NO: 480955 - DNA, 201 bp, Homo sapiens
taatcccagcacattgggaggccaaggcaggcagatgacttgaatccaggagttcgagaccagcctgggcaacatggcaaaacccatctctactaaaaatrcaaaaattagtcgggtgtggtagtgtttccctgttgtcccagctacttgggggactgaggcaggaggatcgcttgggcctgggaagtcgaggcagcaatg

SEQ ID NO: 480956 - DNA, 201 bp, Homo sapiens
tgtcagatgcaccattattttccagaccactaagaaaggaaaaaaaaaacctaccgattaaactgtgacacaccattgattgtaagacacaccctgattgktgaggtgtaaaaatgggggaaagtggctctcttagaatgaaatatcttagaatgaatttgtgtgagtcaggggcaggtgaaagtcattttgcaggattct

SEQ ID NO: 480957 - DNA, 201 bp, Homo sapiens
gttgctgcctctcttgagttgcaacccatcagccatttatggtttttgtaggactaattgattcacgcctggtgccattcttccattcataaacatccttkactgctgcagatgagtcctgcaaaacactccagcctccatttattagtttgttctttcattcattcattcaggaaaggggtatgacaagcctcctctgtg

SEQ ID NO: 480958 - DNA, 201 bp, Homo sapiens
ctaacgggatgggcaaagcctgacggaatggcagggtggggaagcagttgctgcctctcttgagttgcaacccatcagccatttatggtttttgtaggacyaattgattcacgcctggtgccattcttccattcataaacatccttgactgctgcagatgagtcctgcaaaacactccagcctccatttattagtttgttc

SEQ ID NO: 480959 - DNA, 201 bp, Homo sapiens
atgcacaatacagtggcgataaaccagaccctactggttctctgcagttgggcaatgaccttgtcggaggaggcgaggccatgatattgctggaggaggcraggccatgatgttaccctggctccagtgctcatccatgggacatgtggtcagcccctgtgtcccacaatcccattgccttctggcaacttcctaactgat

SEQ ID NO: 480960 - DNA, 201 bp, Homo sapiens
gggatgctgaggcagaagaatcgcttaaacctgggaggcagaggttgcagtgagccgagatcgctccactgcactccagtctgggtgacagagtgagaccytgtctccaaaataaaagaaatttactgcaaagggatgttgcatttcaggtgaatgtatgtagccttcagaggccgggctatttattagatgtattttata

SEQ ID NO: 480961 - DNA, 201 bp, Homo sapiens
gctgggtgtggtggcgtgcacctgcattctcagcgacttgggatgctgaggcagaagaatcgcttaaacctgggaggcagaggttgcagtgagccgagatygctccactgcactccagtctgggtgacagagtgagaccctgtctccaaaataaaagaaatttactgcaaagggatgttgcatttcaggtgaatgtatgta

SEQ ID NO: 480962 - DNA, 201 bp, Homo sapiens
ggatagtactaggagctctccttcccacagggatgtcagtggagtgaggaggaagaacaaggagcagagggtgggatggttccagccagttcttcgaggcyaagcccagggcttagaaggctgatgaggaaatacagaatgtaggcacagccagaccccttctgtctgggtggaagcagggatgctagaattttaccctta

SEQ ID NO: 480963 - DNA, 201 bp, Homo sapiens
tacccaaatagtgagcattgtctctgataggcaatttttcaaccctcactcctttcctcttttacattttttattttttgtagagatgaggtcttgctatsttgcccaggctgttctccaattcctagcctcaagcagtcttcctgccttggcctcccaaagtgccaggattacaggcatgagccaccacatctggctgtt

SEQ ID NO: 480964 - DNA, 201 bp, Homo sapiens
ttgttttatttttgttcgttttttttgagacagggtctcactctgttgcccaggatgaagtgcagtggcgggatcataggtcactgtaaccttgaactcckggattcaggcaattctcctacctcagcctaccaagtagctgggactataggcatgtgccaccatgcttggctaattttattttagatttgagaatacatg

SEQ ID NO: 480965 - DNA, 201 bp, Homo sapiens
  misc_feature (1)...(201): n = A,T,C or G
gatcttttccaacatcataattctatcttgagaaaactgaggcatgaattatccatgaagcagctctccatccctgaactccctatagtagcttagcaagnatggagcgcaatccctgtggtaccgattagacagggccaggctctagaagcaaaatatgagagctggctttaaagcaccaacacccgtaatagcgtgtag

SEQ ID NO: 480966 - DNA, 201 bp, Homo sapiens
gaaatacctgggaaggtgacagaagcagtgaagcagagaaacggagtgggggcactgacatttgagatgatcttttccaacatcataattctatcttgagraaactgaggcatgaattatccatgaagcagctctccatccctgaactccctatagtagcttagcaaggatggagcgcaatccctgtggtaccgattagac

SEQ ID NO: 480967 - DNA, 201 bp, Homo sapiens
aagcaagtcaatagccccctggccccacagacatgtagtgctcacgggggcagaacaggagtgctgttgagccccccccctaaagcaacctgtgtatttcyctcctccaacctgcagcctggtgaggagatggaggcttgtgaggagctggccctggccctgtctcggggcctgcagctggacacccagaggagcagccgg

SEQ ID NO: 480968 - DNA, 201 bp, Homo sapiens
cagagtgggacccaagcaagtcaatagccccctggccccacagacatgtagtgctcacgggggcagaacaggagtgctgttgagccccccccctaaagcarcctgtgtatttctctcctccaacctgcagcctggtgaggagatggaggcttgtgaggagctggccctggccctgtctcggggcctgcagctggacaccca

SEQ ID NO: 480969 - DNA, 201 bp, Homo sapiens
tcgagccattccaggcagacatgtagcaaaagcccgagctggggtccgccctcatgcaataaataacacctgtgcacataagagaggtgacaggcagggcmtccctggggacctgggcctgtggcacgtgaagaaacacccaagagagcacgaagtcccaatgccatgaccagatatttcggtgccaggcatgcttctggg

SEQ ID NO: 480970 - DNA, 201 bp, Homo sapiens
ggggtccgccctcatgcaataaataacacctgtgcacataagagaggtgacaggcagggcatccctggggacctgggcctgtggcacgtgaagaaacaccyaagagagcacgaagtcccaatgccatgaccagatatttcggtgccaggcatgcttctgggtcccagcaaaagacacacaaatccgtgtccttggggaccc

SEQ ID NO: 480971 - DNA, 201 bp, Homo sapiens
ctagggtcagagtgggacccaagcaagtcaatagccccctggccccacagacatgtagtgctcacgggggcagaacaggagtgctgttgagcccccccccyaaagcaacctgtgtatttctctcctccaacctgcagcctggtgaggagatggaggcttgtgaggagctggccctggccctgtctcggggcctgcagctgg

SEQ ID NO: 480972 - DNA, 201 bp, Homo sapiens
cagaactttctagggtcagagtgggacccaagcaagtcaatagccccctggccccacagacatgtagtgctcacgggggcagaacaggagtgctgttgagscccccccctaaagcaacctgtgtatttctctcctccaacctgcagcctggtgaggagatggaggcttgtgaggagctggccctggccctgtctcggggcc

SEQ ID NO: 480973 - DNA, 201 bp, Homo sapiens
ggagctgtctatggggtccccgcagccctccagtggaggcagaggccctggctcctgaccgcacttgttttgcataggactgggctaagcctgggccctaygaccagcctctggtgaacaccctgcagcgccgcaaagagaagcgagaaccggaccccaacgggggaggacccactaccgccagcggcccacctgcagcag

SEQ ID NO: 480974 - DNA, 201 bp, Homo sapiens
caaccatcgccactatctaatttcacaacattttcattatccccgaaagacacctcatgcccattaagcagtccctccctgtttcacagtctccccacccrcgctgaccctgacaaccactcatctgccttctgtctctggatttgcctattctggacattttatacaaatggaatcatgtagtacacagccttttgagga

SEQ ID NO: 480975 - DNA, 201 bp, Homo sapiens
gtctctcctccaggacgcctttcctccttgaggggcttaggatccccgctgagagctctgcccagaatctgggcttcgctgtcgtagcactgtactgtacrttacctgttccctggtctggagattctcccaccttggcctcccaaagtgctgggattacaggcatgggtcactgcatccaggctcctttcttttattttt

SEQ ID NO: 480976 - DNA, 201 bp, Homo sapiens
taattcaatattagactcatggaaaaaagaaatacagagtgacttaaactgtcatttccacagtcaataagcatttttgcatacatatatacctgcgtatrtatgtatgtatatatttatgccacaaacagagctgcaagcctcaaaataattctcaaatcagatttggttgtgttaagcttgcaaaacatctttaacttt

SEQ ID NO: 480977 - DNA, 201 bp, Homo sapiens
ggagagggatgatgtgatgctctcgggcctttgcctgtggacaccaggggtcactgcccagagtgttagccataggactagagtgtccatggtgccctatrgactaaagaacttgggaaaggtgggccttttttctttcattccttcagctttgtttggagcctgggatttccatccatgaactgcagcctcagatggaca

SEQ ID NO: 480978 - DNA, 201 bp, Homo sapiens
cctgggagctagtgtttgacaagtaatagggtttgtgacatagtaacattttagtgactgtagaggtaagcatttataagtaaaattactaccatattccmtgaagtctgaggcccggaagagagcaggctggtcacagttcggggctgaactccacataactgacaggttggcagctttgagagaggaaggattcctggg

SEQ ID NO: 480979 - DNA, 201 bp, Homo sapiens
tttaaccttgaacatttctataaaatgagccccccaccctgaattttcacaacaaccataaacccattttgagataaaggcagcagaattttcacccacartcagattttccatcagcattggccccagcagtttctttcgtatgttttattttagtctggagcttctcagatttgtatcctatctaaccagggcacctgg

SEQ ID NO: 480980 - DNA, 201 bp, Homo sapiens
acacagtttttaaccttgaacatttctataaaatgagccccccaccctgaattttcacaacaaccataaacccattttgagataaaggcagcagaattttyacccacaatcagattttccatcagcattggccccagcagtttctttcgtatgttttattttagtctggagcttctcagatttgtatcctatctaaccagg

SEQ ID NO: 480981 - DNA, 201 bp, Homo sapiens
caggggattttccatggtgttcatgagggaggagcttgataatctaccactgagcacaaccaggcaagatgcctttcccccacatccttgtttatcctccytcacaaacaaatgaatcgtcagatctttgacccacctttgttcctccagaatggactgggagtttgaagagaaaaatctagcagcatccactttgcaagc

SEQ ID NO: 480982 - DNA, 201 bp, Homo sapiens
tacaggaaaaggacaacatcctcagacaaggatggagtgggacagaccaaaatgcagattgattagggttgattcaggaagtgctgcagatagggaagccygtgctgggttctgattggagcatgatcacctatagccatatatcctgggccctgattgccatatgtaaaatgggactcattcatgtctgctttcctcctt

SEQ ID NO: 480983 - DNA, 201 bp, Homo sapiens
acagtttccatgcctattgtgcttcgtaatgatacctataaatttcttagaagccttgggataatgcagaaaggcctttatgcaaatgttctctagtaatkattacagaaattatgtcattttctcctgcagctttcacagcctataatcttcaaaaccctttattaagtcttgtgagaatgctaggaatgggtgcagggg

SEQ ID NO: 480984 - DNA, 201 bp, Homo sapiens
aaaaaaccaattagctgggcgtggtggcatgcgcctgtaatcccagctactcgggaggctgagacacaagaatcacttgaactcaggaggcggaggctgcrgtgagctgagattgcactgttgcactccagcctggacaacacagcaagactccatctcaagaaaaaaaatagttaatatataatcttttatcccccctac

SEQ ID NO: 480985 - DNA, 201 bp, Homo sapiens
atgttactgtacgtggccaaaggggtctctgctgatgtgtggtgatgtggttaagggtcttgaggcagggaggtgatcctggatgatccaggtgggtcccmcataatcacaaggattctcataagaaggaggcaggaaaattggaggcggagagagaagatgtaaggacagaagcagaagtcagagaagggagtagattgc

SEQ ID NO: 480986 - DNA, 201 bp, Homo sapiens
catccctgaagcagccactgccaaaggggatggagttagcatcatgggcctagaccgatcatgtgagggcgaatgggtgctgcagtcagccacagtgcccwgccacactctccagattcacaactcttacctttttttaatggccatgataaggatgccccaaagatgtccacgttctaacccctagaacctgtgaatgtt

SEQ ID NO: 480987 - DNA, 201 bp, Homo sapiens
ccaacctggcccagcaggctcctgtgaggctgtccagcgtgtcctcccatgactcaggattcatatcccaggatgccttccagtccaagtcaccatccccmatgccgccagaggcccccaaccaggtaagggtgcccttggctccaggagcagctgtcacacctggtgtcctgaccactgtcagtggccagaaccaaagaa

SEQ ID NO: 480988 - DNA, 201 bp, Homo sapiens
ttttttttgccacatgtacttgcttttgtaattatgtaaccaaaatagtacatacacggatgacatattagtgtgaaaagagaactcgtttttttgaaaastaagttatgtgttttggaaagagttgcaaaacaacttataaagaaattcctgttgtttaaggtgtggttgagacaatcagtataaataaagaggggatgg

SEQ ID NO: 480989 - DNA, 201 bp, Homo sapiens
cagcgtgtcctcccatgactcaggattcatatcccaggatgccttccagtccaagtcaccatcccccatgccgccagaggcccccaaccaggtaagggtgyccttggctccaggagcagctgtcacacctggtgtcctgaccactgtcagtggccagaaccaaagaagcaccttggcttagacaatcccctgcccactgac

SEQ ID NO: 480990 - DNA, 201 bp, Homo sapiens
ttaacatgttttgctttcattcccacccccacgatggcagcgttttgatgctttggtggatgttaagctttgatggctaacgcttcccctctcagcacctyattcacccagctggctctgtccccttaggtgattctggacttgaaaggttctgattacagctggtcgtatcagacgccaccctcttcccccagcaccacc

SEQ ID NO: 480991 - DNA, 201 bp, Homo sapiens
agaaagcaagcaagtcccttagcagtcaggtcataacagggcacatttctgaccgaaccctctcaaggcagaggaggagtttggtgggtttcatacacccygcagattcctgttggctctaaccctcaattacctaatcttatgctttaacacataactgcattggatgtgagagtaacgtaccgtatggtcattgttcta

SEQ ID NO: 480992 - DNA, 201 bp, Homo sapiens
gatcacatttgaagacaatagtgtttaagaaagcaagcaagtcccttagcagtcaggtcataacagggcacatttctgaccgaaccctctcaaggcagagkaggagtttggtgggtttcatacaccctgcagattcctgttggctctaaccctcaattacctaatcttatgctttaacacataactgcattggatgtgaga

SEQ ID NO: 480993 - DNA, 201 bp, Homo sapiens
tggaactgagttttgaagttggagactgaaaatcctttagggagaagaaaattgacacaaccgggctttctgacagacaaggactggcccacccctgcctytaaggaaccctggggtctgggagaggacccaaaagccttcttctaggggagcacgcctggcagctctgagatatgaaagagagaacccagcaaaaacagg

SEQ ID NO: 480994 - DNA, 201 bp, Homo sapiens
tgctctgggagtgtgaatggtggctcctaaaacaggcctctttgtgactatggggatggtttattctgcctgcttcaagctatatcatgaaaatcattctrtgtccccagcaactatcagtagccaccagaaagttgccggttcattcaaattattcacccctcccctcatcatgcacctatgctactgagtacttaccgt

SEQ ID NO: 480995 - DNA, 201 bp, Homo sapiens
agtgagagtgtttgtgttcccttcacacaggccaaccagaccttcgtaagagcttctcatcccctgttcaggtcattctgatgctttttacatgctaggcrctatgggggctacagaaggatgagtgtggtatctactgaaacagaaataaattaaccctgttacaaagcaaagtagaagactgcaatgaagacccaaccg

SEQ ID NO: 480996 - DNA, 201 bp, Homo sapiens
gagtgagagtgtttgtgttcccttcacacaggccaaccagaccttcgtaagagcttctcatcccctgttcaggtcattctgatgctttttacatgctaggsgctatgggggctacagaaggatgagtgtggtatctactgaaacagaaataaattaaccctgttacaaagcaaagtagaagactgcaatgaagacccaacc

SEQ ID NO: 480997 - DNA, 201 bp, Homo sapiens
atgtcacaggattgtatatttagaaatggttaattaaaatagtgaatttcttggtttatatttatttatttatttaccatgagaaaaacacacaaaaatcycatactcattaagcagttactccctgtccccacccttcccagcttctggcagtgttttgtgttttatcattatagccttagcccctaacatagtaggggc

SEQ ID NO: 480998 - DNA, 201 bp, Homo sapiens
caccactgcactccagcctgggtgacagagcaagacactgcctccccctaaccctccaaagaagtgaaaatcatcatggcaggtttaaatgccaaacattyatacttaaggcatttcagcacattttgaaagccagacttttaatgatataagcttaccctaggtctcctgcccattctctttgtgcgttgtcccaggtcg

SEQ ID NO: 480999 - DNA, 201 bp, Homo sapiens
taatatgaatccaatatggtggtcatgaaggaagggctgtggttcagcctagagaagagcatcagtctctgcaggagttcccttggaggcctcaaaaaaaragttttctccaggacagcactgaaaacccaaccaaggcctcagccaggtgctctgagggaggtgggctgctccctataaacggtgacagccaccaaaggc

SEQ ID NO: 481000 - DNA, 201 bp, Homo sapiens
ccaggaggcagaggttgcagtaagcagagattgcaccactgcactccagcctgggtgacagagcaagacactgcctccccctaaccctccaaagaagtgaraatcatcatggcaggtttaaatgccaaacatttatacttaaggcatttcagcacattttgaaagccagacttttaatgatataagcttaccctaggtctc

SEQ ID NO: 481001 - DNA, 201 bp, Homo sapiens
gggggctcaaggcactggctgcaagttttcccattgtctgtccctgaagtaagtgtctgggacccgcgggggctggatgcccgggaggacacctgattccyccgggcacggggtgggggcgcctggcgcggtggtggggaggaagtgggggctctgcccgctcgcaggaaggagtcccctagcctaggagactgagaggga

SEQ ID NO: 481002 - DNA, 201 bp, Homo sapiens
ggataaagaccacgcaaaaggtacaggggcgagatgtctagcgcatcactgcacgctggggggcgctgtgggaagttgccagctgctgcctggcccctctrctaggtttattggtgtcaccaaaacagccaagggcccactctgtccctactctcctgtaggcacgtccgtgtcaggggatgaggagaacaaagtgatccc

SEQ ID NO: 481003 - DNA, 201 bp, Homo sapiens
tgggaggctgaggcaggggaatcgcttgaacctgggaggtggtggttgcagtgagccgagatcgcgccactgcactccagcctggtgacagagcgagactytgtcttaaaagaaaagcattcttggaacatggctgttctggagccccggggtttagatgagaacgtttcgggtaattgtgatttaggtatgttttgacaa

SEQ ID NO: 481004 - DNA, 201 bp, Homo sapiens
actagaatatcacagggaaaatgggaagaagggtcactcccaccagtcacattgacagcttcttagtagtcattgaaaaacattcttggggccaggcgcgrtggctctcgcctgtaatcccagcactttgggaggccaaggcaggcggctcatgaggtcaggagatcaagaccatcctggccaacatggtgaaaacccatc

SEQ ID NO: 481005 - DNA, 201 bp, Homo sapiens
cagcatttaaatccccacaatctgtctgacttggctcattcattgcctgagtatttgttaggcatctgctgcataccaggcactggtcgaggccctggggktgcagcagatcaccagccagccaggcccctgccttcacagagcctgtgctcctgcatgggtctctccttaccctttgtctgtgcaaggagccggtgcagc

SEQ ID NO: 481006 - DNA, 201 bp, Homo sapiens
atctctgtgcttatgaagatgggggtaggcagtgaacttaatagcttttcagagcttctgcagcgagggtttgcggggaggccactggtgcagtgagcatstcaggtggcttccctggaacagcactggaaacagtgagccctccttatggaaaaaggatgcatgttcctacgccagtgctcaccagggacgagtttgccc

SEQ ID NO: 481007 - DNA, 201 bp, Homo sapiens
tttcgaggtgaggagcatgttttggccccgatcgccaacacccttgcagatttcaggttaaggaagcagtcatgtgtggcacacagcatttaaatccccayaatctgtctgacttggctcattcattgcctgagtatttgttaggcatctgctgcataccaggcactggtcgaggccctgggggtgcagcagatcaccagc

SEQ ID NO: 481008 - DNA, 201 bp, Homo sapiens
ttgcctattatctctgtgcttatgaagatgggggtaggcagtgaacttaatagcttttcagagcttctgcagcgagggtttgcggggaggccactggtgcrgtgagcatgtcaggtggcttccctggaacagcactggaaacagtgagccctccttatggaaaaaggatgcatgttcctacgccagtgctcaccagggacg

SEQ ID NO: 481009 - DNA, 201 bp, Homo sapiens
aatactagtcactataagagcaaaatcaatctagttgttatgtacctattgttaaacagaatgtggaaatatgttagaacttaattgctttcattttttttaaatgaaagtgtataagtggatattataatgtgtatatttgggttaataattaaactataatggaatttcagtttattagcactaggcgcagttccatat

SEQ ID NO: 481010 - DNA, 201 bp, Homo sapiens
cattatgagaacatgtgttgcctattatctctgtgcttatgaagatgggggtaggcagtgaacttaatagcttttcagagcttctgcagcgagggtttgcrgggaggccactggtgcagtgagcatgtcaggtggcttccctggaacagcactggaaacagtgagccctccttatggaaaaaggatgcatgttcctacgcc

SEQ ID NO: 481011 - DNA, 201 bp, Homo sapiens
gcccccaccctcccttgtttactttcttttggttaaagtgctgcttctttcgaagggcccctgtttctgtggcacagcctattccagatcactcaaacggktgtttgtgcttttctgattcctaactctgggctgccgaatgctttttcatctcctacaattgagctcagagccagagaagggcttttgaaggttcatttc

SEQ ID NO: 481012 - DNA, 201 bp, Homo sapiens
gtgcccacggaatgaatcgaagagaaaaatagaattagtcactgaacagattatcgaattgagcaaatctttaaagaattccaaagatagaaatgtcttgkacacagcaggactaatttttgtttcaacattggaaggcagccctgcttcttattatagacatgttcaaatagtttaagtgctggttactgaccagattat

SEQ ID NO: 481013 - DNA, 201 bp, Homo sapiens
atgtgattcttgttgccttttccttttgtctgttgcagtagaggctggtgtgatgcccctaggaagaaacctggaacccagagtcccagacagaacttgtrgcggcctgctgattggtcctcactgcaccgtaatcatttctaaccaccccattcccatgaccgggtgcacctcattatctcctcccaagggcaggttgaa

SEQ ID NO: 481014 - DNA, 201 bp, Homo sapiens
gtcctccacagcagcctgaacagtgtcaacagcagtgactcccggtccagcggctcccactcgcattcccccagctcacattaccgctaccgcagctccawcctggcccagcaggctcctgtgaggctgtccagcgtgtcctcccatgactcaggattcatatcccaggatgccttccagtccaagtcaccatcccccatg

SEQ ID NO: 481015 - DNA, 201 bp, Homo sapiens
aagtccagtgtctgcaggtgagtgaagccggggtccactcttgctttcaggacgggtcatttttctttatgctaatgtgagcaatggagccagtccttatytcttagaatggctcattctcaaacaggaaatgggatgatgagctgaaagaatggtaataattttggtcttgctctttagtctctggattaattttggatc

SEQ ID NO: 481016 - DNA, 201 bp, Homo sapiens
gttaggatgaggtcattaaggtgggccctaatccaataggactggggtctttataggaagagggaaatttagacacacacacacaggaatgccttcacacrtgtcttatgggaagatggacacacacaggccgtgagcctagcacaacagaggcagaaatttgaacaatgcagctgcaagccaaggaatgctggagtcacc

SEQ ID NO: 481017 - DNA, 201 bp, Homo sapiens
ctggctttgtggggaatgtcagttgtgtgttttcaaattagtgtttctttaatggcaagtggaacattttcttcattatgagaacatgtgttgcctattayctctgtgcttatgaagatgggggtaggcagtgaacttaatagcttttcagagcttctgcagcgagggtttgcggggaggccactggtgcagtgagcatgt

SEQ ID NO: 481018 - DNA, 201 bp, Homo sapiens
ctacttggaagtttttttttttaaaggaactatctggtctttcatttttgagaagatacaggatttttttttttcttctgctcacctagtatctagtgcarcattttcatttttactggagacactgaatctcagtgaagtcacttgtccgaggtcacacagctaggaaggagactggggattctagcgttgggttttcta

SEQ ID NO: 481019 - DNA, 201 bp, Homo sapiens
tggttgtccatctctccatgcccaagggtaaaaataaaatgctgatgaagccagaggaacacagtttgttcatttgaagttcttaatatcctgagtgctgrctttgacctttaatgaaaatgatggtccttttggcaggggccagctgcctcataaatgtgcagcttaaagaacaaggatgagtttccctgaacaagagaa

SEQ ID NO: 481020 - DNA, 201 bp, Homo sapiens
actctcaaccttaggtgagccaccatgcccagcctgtttgtttttttagctcatcagctatcattagtgtattttaagtgtggcccaagacaattcttccrtgtggcccagagaagccaaaagattggacacacccgactgagatgatcttgtaaatggcacaggcaaaaaagtttgtgttttgcagccattttcaaggct

SEQ ID NO: 481021 - DNA, 201 bp, Homo sapiens
ggaggtcatttgggggaggagggggtcacttacctcaataggtaagtttttggtgtgtatctgttttagaaaaagattcctgatacagtcacaggcgagcytacactcacatttgttatatttggtgtgtgtggtagttatgtgcccaggaaccaaagatttccactttacttagatctttcatttcttttttctttttct

SEQ ID NO: 481022 - DNA, 201 bp, Homo sapiens
aaatacagagtgacttaaactgtcatttccacagtcaataagcatttttgcatacatatatacctgcgtatgtatgtatgtatatatttatgccacaaacmgagctgcaagcctcaaaataattctcaaatcagatttggttgtgttaagcttgcaaaacatctttaactttgtcctgtctgcaagaccatatagttcttt

SEQ ID NO: 481023 - DNA, 201 bp, Homo sapiens
acccatgtctttgctaccacctcttgctatattcctaccctttttttttttttttttttttgaggcaggtatttgctctgtcgcccaggctggagtgcagkggcatgatcatggctcattacagcctcagcctattgggcttaaaccatcctcccacctcagccacccaagtagctgggactacagatgcagaccaccaag

SEQ ID NO: 481024 - DNA, 201 bp, Homo sapiens
tgaacctggaaggtggaggttgcaatgagccaagattgcaccactgcactccagcctgggcaacggagggagactctgtctcaaaaaaaaaaataaaaaaattctggtaaagccttctgtttccatctgtaactacaaaaagtttataagggatttttaaaaataataatggccagcattcattaggtacttattatggtc

SEQ ID NO: 481025 - DNA, 201 bp, Homo sapiens
ttggattcacattaccactgcttgacctgagactcgatttgggagctagaaactaaaaccagttatgcccttccattgaatagatggaggctgggaggctsgggcttgtctagcttgtagggactcaagggcactttggtcgtgtcacggtgctgctttctctcctgcgcaagcctcatacttgctttctctgttgaatgg

SEQ ID NO: 481026 - DNA, 201 bp, Homo sapiens
aattgcttgaacctggaaggtggaggttgcaatgagccaagattgcaccactgcactccagcctgggcaacggagggagactctgtctcaaaaaaaaaaataaaaaaattctggtaaagccttctgtttccatctgtaactacaaaaagtttataagggatttttaaaaataataatggccagcattcattaggtacttat

SEQ ID NO: 481027 - DNA, 201 bp, Homo sapiens
catggtgaaaccccatctctactaaaagtacaaaaattagctgggcgtggtggtgggcgcctgtaatcccagctactcaggaggctgaggtgggagaatcrcttgaactcgggaggtggaggtggcagtgagccgagatcatgccactgcactccagcctgggccacagaacaagactctgtcttaaaaaaaaaaaaagta

SEQ ID NO: 481028 - DNA, 201 bp, Homo sapiens
atctgcacagcaaatagcactgatgctttcgagtgagagtgtttgtgttcccttcacacaggccaaccagaccttcgtaagagcttctcatcccctgttcrggtcattctgatgctttttacatgctaggcgctatgggggctacagaaggatgagtgtggtatctactgaaacagaaataaattaaccctgttacaaagc

SEQ ID NO: 481029 - DNA, 201 bp, Homo sapiens
gtaccatagttcagctatttcctttcctttcctttcctttatttcttttgttgttgttgttgagacagagtctcagtctgttgcccaggttgaagtgcagwggcgcagtctcagctcactgtaacctccacctcctgggttcaagcgattctcaagctactcctcccaagtaggtgggattacaagcatgtgccaccacac

SEQ ID NO: 481030 - DNA, 201 bp, Homo sapiens
aggcacgcactgttctcttgtactgccaggccttttttgcacgtgctcttctgttcatctggaacgctgcatcttcccgccttctggaacctccaacatamactgtcttccttccatctcagcttagacaagcccttcttgatctcctcctatcacattgtgtcatccagtactgtttatctgtcattttgtaccactgcg

SEQ ID NO: 481031 - DNA, 201 bp, Homo sapiens
gaggtggcgttagagcaacaacttaagaaccgtgaagatgtgggcagggggtgagggcagtgttcagtgcaagggaagagagcatgtgcagaagccctgargcagaagccagtacctccctcatttgtgtttaggttgcgtccagtttttttttttttttttactaattataagcaaccctacaacaagtacatccttgtg

SEQ ID NO: 481032 - DNA, 201 bp, Homo sapiens
tgcatttgatgaaaggagactccaggaagtcgagccattccaggcagacatgtagcaaaagcccgagctggggtccgccctcatgcaataaataacacctrtgcacataagagaggtgacaggcagggcatccctggggacctgggcctgtggcacgtgaagaaacacccaagagagcacgaagtcccaatgccatgacca

SEQ ID NO: 481033 - DNA, 201 bp, Homo sapiens
tccagaaagtccagtgtctgcaggtgagtgaagccggggtccactcttgctttcaggacgggtcatttttctttatgctaatgtgagcaatggagccagtscttatctcttagaatggctcattctcaaacaggaaatgggatgatgagctgaaagaatggtaataattttggtcttgctctttagtctctggattaattt

SEQ ID NO: 481034 - DNA, 201 bp, Homo sapiens
taaactgatttaccatccttgcctttgtctatgaagagctcattctaaaaaagtaactaacataaaaaacaaggaaacagctgtttgcataggccttaagkgttgggaattaggacccccatcataccccagggcagtgggaaggaacactcaggcccactgcttgaaaagatgtcggcaacctgaacatgcacaatacag

SEQ ID NO: 481035 - DNA, 201 bp, Homo sapiens
tgtgtcttgagctctcttttgagatcctaggcccagggtagcaaatacagagtctgcatccttccactgtcctgcggttgtagcagacattactagctgawctagccaatccattttccatctagcgcatagctgcccacagcaccctccacacagtgccccaggcatccatacacctgatcagaattagcccaagagata

SEQ ID NO: 481036 - DNA, 201 bp, Homo sapiens
actttgccctgagacgttgtcagccctcccatgctctccctttcctctagaccggggttgccatttcactcgttggtaggaggacctctggttaaatggaagagtgtggtttgggatgggacactaaggcgaggggtggagaagcttcatcagcaggagactgtcccagcagcagaccctgtgtcctttagtggtgcaact

SEQ ID NO: 481037 - DNA, 201 bp, Homo sapiens
aagaatgtctcatttccccccaccccaggagctcagagtcagctcagctgccaaaatgtcaggagtacctgctcttcagaataggatagtgtccaagtttwaaactctttcccctttatctacaaacatcaattgagtctttattctaagtcatgcattttgctagatactgagaattcaggaatggctcacacgtagttg

SEQ ID NO: 481038 - DNA, 201 bp, Homo sapiens
tcttagcactttgggaggctgaggtgggtggatcacctgaggtcaggagttcgagaccagcctggccaacatggtgaaactctgtctctactaaaaaaaaataaaaaaatcagctgggtgtggtggcacgtgcctgtaatcccagctacttaggaggctgaggcaggagaattgtttgaacccaggaggtagaggttgcag

SEQ ID NO: 481039 - DNA, 201 bp, Homo sapiens
agcaagttctctggtcctggagatgtttcaactgagtccagatgactatttggcagggacgataaagaagaaattctggtgtcatgtgaaactaggttacycctaaggtctcatgcagcttttagattctcctagatgctgacggttctttagaaagtggctttaagaaatcccagggctgactgttgagaataccatttg

SEQ ID NO: 481040 - DNA, 201 bp, Homo sapiens
gcttcctgttctacagaggcacatacattatgtctagaaattgtttttattgtaccatagttcagctatttcctttcctttcctttcctttatttcttttkttgttgttgttgagacagagtctcagtctgttgcccaggttgaagtgcagtggcgcagtctcagctcactgtaacctccacctcctgggttcaagcgatt

SEQ ID NO: 481041 - DNA, 201 bp, Homo sapiens
gtgctgggttcctgattgggaaccttggtagaaaagcccaggggctgcattctggcgttctgtgagccccacaggcagcagagctgtccctggggtaagckttggttctggggaggtccctgttcacaggtgccatcttcacatcaaatctgcttctgtgcaaatacgcttgagtgtctgagatcaagatcattttacgtc

SEQ ID NO: 481042 - DNA, 201 bp, Homo sapiens
ctgtggagcagctcctgttggatgaagaaacaaagattcagagtagatgtcacccaaggttataccattggttggagggagagctggaacagtgaccaggkatatccagctccagaaccctgaatcttaacctctgtggtatactcctgttcggtgggttgccctgagccaattgttctgctctctgagtcttgctcctca

SEQ ID NO: 481043 - DNA, 201 bp, Homo sapiens
ggcactctggccacactggactccttagagaccctccaggcacgcactgttctcttgtactgccaggccttttttgcacgtgctcttctgttcatctggamcgctgcatcttcccgccttctggaacctccaacatacactgtcttccttccatctcagcttagacaagcccttcttgatctcctcctatcacattgtgtc

SEQ ID NO: 481044 - DNA, 201 bp, Homo sapiens
cctttccttctgagggcttgagagggcagggagcctgccatgccctttgaggctggtttcctgggaatggagggagaagggctgatgttgctttagtgctygctggtggccattcccctaacgggaagccatctgggttgttaaggagcgctggtcccttcagacaggagaagcacgatgtactgcccactggtgggtccc

SEQ ID NO: 481045 - DNA, 201 bp, Homo sapiens
gggcaaggactattttattgactaaccctagagtctgtgcatggtaggtatggatgatttagtaaacacataaaatatgtcattctttcaaaggcaggagsctcttcctttcctccccctgcccttttccccttgtcactaaaatccatgtcccaggttgaaattgggtacttctttcctatagaaacattgttatgggac

SEQ ID NO: 481046 - DNA, 201 bp, Homo sapiens
acactggactccttagagaccctccaggcacgcactgttctcttgtactgccaggccttttttgcacgtgctcttctgttcatctggaacgctgcatcttsccgccttctggaacctccaacatacactgtcttccttccatctcagcttagacaagcccttcttgatctcctcctatcacattgtgtcatccagtactgt

SEQ ID NO: 481047 - DNA, 201 bp, Homo sapiens
agactggttattcggatgattcactttggaaaggcccctggttcttcccagatggaggggggtggccttgtggtgtggtgtctgggagagagaaccctccyctcaggcaggctgtggcctctgtgtgttacgatggaaactacctgtccagcctccagcaggacaggaggccacttaacgttggaggcacttggctgtctc

SEQ ID NO: 481048 - DNA, 201 bp, Homo sapiens
aactttcttgaaacggtttttttttgcttttattttattttattttatttatttttaagatggagtctcactctgttgcccagactggagtgcaatggctygatttcggctcactgcaacctccgcctcccgggtccaagcgattttcctgcctcagcttcctgagtagctgggattacaggcgcctgcctccacgcccag

SEQ ID NO: 481049 - DNA, 201 bp, Homo sapiens
acagccgcagcaatgacaaaaacctcatgagaagatgcctgggtcaagggtcttacttccagcagcttccctgcaaatccagtgcaaataaacataggctstcctttgcagtttgttgcagtggaatcttgtctgttgcatgctgaagcgtaggatgttaggcctcttctgacatcacagcagagcgtttgcatgttcatg

SEQ ID NO: 481050 - DNA, 201 bp, Homo sapiens
atttggaaatggaatgtctgtgtgtgatccccttcctgtttcagctgggacttttctcattcccagcttattttaggatgatgtgggcttcctttgaagcrccacttatcaacattactaaactctaagataggcccagtttggggtagtggatttgatcacaaacactgatgtgtaccttcttagctccatgggttgaag

SEQ ID NO: 481051 - DNA, 201 bp, Homo sapiens
atgtttgttttatttataaatattcaggtttcccctcccttgaatgtcaatgccattttgtatctccgcactcatcctgttatattaattttttttccttycccccccctttttttgtttgtttccagttgtctaacgggttttctcactatagtttatcaagtgagtcccacgtggggcccacgggtgcaggccttttcc

SEQ ID NO: 481052 - DNA, 201 bp, Homo sapiens
aagcagaagttgcagtgagccaagatcacaccactgcactcccagcactctagcctggacaacagagtgagactctgtctcaaaaaaaaaaaaaaaaaaaaatgagatacctactttataatggtacctataagaggagtataatgagattttaaaaaaatgaatacaacattcctgcaagggtttgtcatgttgcaagca

SEQ ID NO: 481053 - DNA, 201 bp, Homo sapiens
ctcctcctatcacattgtgtcatccagtactgtttatctgtcattttgtaccactgcgcctgtgtttattttagggcaaggactattttattgactaaccytagagtctgtgcatggtaggtatggatgatttagtaaacacataaaatatgtcattctttcaaaggcaggagcctcttcctttcctccccctgccctttt

SEQ ID NO: 481054 - DNA, 201 bp, Homo sapiens
atctcctcctatcacattgtgtcatccagtactgtttatctgtcattttgtaccactgcgcctgtgtttattttagggcaaggactattttattgactaaycctagagtctgtgcatggtaggtatggatgatttagtaaacacataaaatatgtcattctttcaaaggcaggagcctcttcctttcctccccctgccctt

SEQ ID NO: 481055 - DNA, 201 bp, Homo sapiens
gaagcagaagttgcagtgagccaagatcacaccactgcactcccagcactctagcctggacaacagagtgagactctgtctcaaaaaaaaaaaaaaaaaaaaatgagatacctactttataatggtacctataagaggagtataatgagattttaaaaaaatgaatacaacattcctgcaagggtttgtcatgttgcaagc

SEQ ID NO: 481056 - DNA, 201 bp, Homo sapiens
ggaagcagaagttgcagtgagccaagatcacaccactgcactcccagcactctagcctggacaacagagtgagactctgtctcaaaaaaaaaaaaaaaaaaaaatgagatacctactttataatggtacctataagaggagtataatgagattttaaaaaaatgaatacaacattcctgcaagggtttgtcatgttgcaag

SEQ ID NO: 481057 - DNA, 201 bp, Homo sapiens
gaacccaggaggcagaggttgcagtgagccaagatcatgccattgtactccagcctgggccacaagagtgaaactctatctcaaaaaaaaaaaaaaaaaacaaaaaaccaaacacagaaaacacaaaaattagctgggcatggtggcacatgcctgtagtcccagctacttgggaggctgaggcacaagaatctcttgaac

SEQ ID NO: 481058 - DNA, 201 bp, Homo sapiens
ggtaatccccctgttctttcccctagctgtgtggggcgggacccatgtctttgctaccacctcttgctatattcctaccctttttttttttttttttttttgaggcaggtatttgctctgtcgcccaggctggagtgcagtggcatgatcatggctcattacagcctcagcctattgggcttaaaccatcctcccacctca

SEQ ID NO: 481059 - DNA, 201 bp, Homo sapiens
cttccctgcaaatccagtgcaaataaacataggctctcctttgcagtttgttgcagtggaatcttgtctgttgcatgctgaagcgtaggatgttaggcctyttctgacatcacagcagagcgtttgcatgttcatgttgaatgtgttggtttggtttatctgtgccctgaatttggcatcatgaacttgcactcttggttc

SEQ ID NO: 481060 - DNA, 201 bp, Homo sapiens
ctgaagatggtagagaagcctgggggaagcttgggatgagactgtgtgtgtaccctgccttgcgtgccttttgtcctcccagcccagaagaatcaaaaaarcacagctgctgtcttgaatatgtctaatcaaatcctataatcagtttcagattatgattatttctctgtaagtggtgaccaggaggcagatcagcaggag

SEQ ID NO: 481061 - DNA, 201 bp, Homo sapiens
gcactgttctaggtacttgggacacatcagtgaacaaagcaaagatccctgccacggagttcttagttggtgaggctttctgaagatggtagagaagcctsggggaagcttgggatgagactgtgtgtgtaccctgccttgcgtgccttttgtcctcccagcccagaagaatcaaaaaagcacagctgctgtcttgaatat

SEQ ID NO: 481062 - DNA, 201 bp, Homo sapiens
caggaaactcccattgggggagaagcagaaagcagccggcagctctaagacagcaatttccacaggtagctggggctgagggtcttccttcaggggacttyggtcaatccctgatggacggcagtgcagtgtgcaccgcaggcagcggcaattccaagtccaaaggcccagttttgcatcaagttgaaatctatgggttgg

SEQ ID NO: 481063 - DNA, 201 bp, Homo sapiens
gagccatgtcactgtgtcagaggctgtgtgcttttccgctttttagtttgcacccccacccccctgcccttgattgagaatgtgctcctgagcaatgcgaygattttggaaacctagaatgaacagattcatttgaagatgctttggaatttttaaatttgcataatgaaatgagcaaatcactatcaccattaaatgagg

SEQ ID NO: 481064 - DNA, 201 bp, Homo sapiens
tgctgctcagacagccctcacagccgcggcaacctggaagctcagaatcgacaccaagagtggggctcctcttggggacagagggtgggacaaggctgagrgcattttctagaatgagtgcctggctgctggacaatgaccacatggttgtctcaagggagaggaaggggtatggggaatttggaggtgtgaaggctttct

SEQ ID NO: 481065 - DNA, 201 bp, Homo sapiens
acactccaggatgagaaacctaaaagtctatcttgatgaggcttcatagctggaaaccacccctcatggatccacaggctgcatttgatgaaaggagactycaggaagtcgagccattccaggcagacatgtagcaaaagcccgagctggggtccgccctcatgcaataaataacacctgtgcacataagagaggtgacag

SEQ ID NO: 481066 - DNA, 201 bp, Homo sapiens
tggctgactaggactccagcagggacctggggttccatcagatcagtgtaaagcgatggtttcccaaatgagacctctccagagatggttcattccacccmgcaatggccaccagaaacattgtgctgaccagagggcttcactgccccaaaccccaaaatcacactccaggatgagaaacctaaaagtctatcttgatga

SEQ ID NO: 481067 - DNA, 201 bp, Homo sapiens
agccatgtgccaggtccagaactagaagaaacttgggtgtaggtgagatcataggaacagtccctgccccagctgaacatcaggaagccagactgggagcrcatgccgtggctgactaggactccagcagggacctggggttccatcagatcagtgtaaagcgatggtttcccaaatgagacctctccagagatggttcat

SEQ ID NO: 481068 - DNA, 201 bp, Homo sapiens
aggtaatccccctgttctttcccctagctgtgtggggcgggacccatgtctttgctaccacctcttgctatattcctaccctttttttttttttttttttttgaggcaggtatttgctctgtcgcccaggctggagtgcagtggcatgatcatggctcattacagcctcagcctattgggcttaaaccatcctcccacctc

SEQ ID NO: 481069 - DNA, 201 bp, Homo sapiens
caggtaatccccctgttctttcccctagctgtgtggggcgggacccatgtctttgctaccacctcttgctatattcctaccctttttttttttttttttttttgaggcaggtatttgctctgtcgcccaggctggagtgcagtggcatgatcatggctcattacagcctcagcctattgggcttaaaccatcctcccacct

SEQ ID NO: 481070 - DNA, 201 bp, Homo sapiens
gcaggtaatccccctgttctttcccctagctgtgtggggcgggacccatgtctttgctaccacctcttgctatattcctaccctttttttttttttttttttttgaggcaggtatttgctctgtcgcccaggctggagtgcagtggcatgatcatggctcattacagcctcagcctattgggcttaaaccatcctcccacc

SEQ ID NO: 481071 - DNA, 201 bp, Homo sapiens
gtcacataatctagccatgggcaggatgtcggaacatactgaagcatattggtgggctgagctcaagtaataaagctgatttttttttttttttttttttttactgcctgaaacaggcacacttaacaacagccgcagcaatgacaaaaacctcatgagaagatgcctgggtcaagggtcttacttccagcagcttccctg

SEQ ID NO: 481072 - DNA, 201 bp, Homo sapiens
ggtcacataatctagccatgggcaggatgtcggaacatactgaagcatattggtgggctgagctcaagtaataaagctgatttttttttttttttttttttttactgcctgaaacaggcacacttaacaacagccgcagcaatgacaaaaacctcatgagaagatgcctgggtcaagggtcttacttccagcagcttccct

SEQ ID NO: 481073 - DNA, 201 bp, Homo sapiens
gtgagctcgcagagggtgcccaggggcttgtggtggggctggagaatggcaatctgtggagatcccctgcacccctctcgccctgtgaaacatcccaaatyaaaatagggggttgctgccgtataaaaaattattctcttgaaaatctctggtttaggtgagatctctctttgaagtgcaagatgatttttaagaaccttc

SEQ ID NO: 481074 - DNA, 201 bp, Homo sapiens
tgcccaagtattagttttgtcaactgcagattaaaaatgaaaaaattggtacacagaccctgccctgttgaagtcatctttgggaatctgtcttgtgatcrtgtggaacgatgcaacagttgcttactcttggcatgaatgaaggccagaaatgttgtgaaacagaaaagtttgttttgggtacttgtccatttgcttggg

SEQ ID NO: 481075 - DNA, 201 bp, Homo sapiens
cggatggttcaagtgcccagaacccactttctggttgaatctttctgactctctaagggttagtaaggatttctctggggaaagagataggggctgggcgyggtggatcacgcctgtaatcccagcaccttgggaggctgaggtgggcagatcacttgaggtcaggagttcaagaccagcctggccaacgtggtgaaaccc

SEQ ID NO: 481076 - DNA, 201 bp, Homo sapiens
aggttcatccgaattgtggcagaaggcaggatctctgtcttttttaaggctgaaaaatatattcatattctctctctctctctctctctctctctctctctctctttctctttctgtctctcacactttccttactcattcatcagggaggttcttaactgagagagtgaagccacctcgtgctggtgcatcactgagaga

SEQ ID NO: 481077 - DNA, 201 bp, Homo sapiens
ttatgccccagtttctcactgatagccagccctcatcttttgagtaccaacttgataactaaattgaaccaggtttttaaacactgtaagatgattccagwtttttagatagctcagagggccgtggggacaccagggtcagaggccagaggtaccaggttgcaggggaggataagcacagccttaccttctcttttgaga

SEQ ID NO: 481078 - DNA, 201 bp, Homo sapiens
caggttcatccgaattgtggcagaaggcaggatctctgtcttttttaaggctgaaaaatatattcatattctctctctctctctctctctctctctctctytctctttctctttctgtctctcacactttccttactcattcatcagggaggttcttaactgagagagtgaagccacctcgtgctggtgcatcactgagag

SEQ ID NO: 481079 - DNA, 201 bp, Homo sapiens
tttcacttagcataacgtcctccaggttcatccgaattgtggcagaaggcaggatctctgtcttttttaaggctgaaaaatatattcatattctctctctytctctctctctctctctctctctctctttctctttctgtctctcacactttccttactcattcatcagggaggttcttaactgagagagtgaagccacct

SEQ ID NO: 481080 - DNA, 201 bp, Homo sapiens
gggtcccctggaacctggcctctttgatgttgtgctggccttaattaggaacaccctaattaagtcactgaggaggaagcttttttcttaaaaaaaaaaaattagcagatgttttgagagcatttcatgagggattacttctcaaagattatgtaagtaacgtaaagttaatggaagaaaaactagaaacttcagttaagt

SEQ ID NO: 481081 - DNA, 201 bp, Homo sapiens
tttctttcacttagcataacgtcctccaggttcatccgaattgtggcagaaggcaggatctctgtcttttttaaggctgaaaaatatattcatattctctctctctctctctctctctctctctctctctctttctctttctgtctctcacactttccttactcattcatcagggaggttcttaactgagagagtgaagcc

SEQ ID NO: 481082 - DNA, 201 bp, Homo sapiens
ttggggacagagggtgggacaaggctgagggcattttctagaatgagtgcctggctgctggacaatgaccacatggttgtctcaagggagaggaaggggtwtggggaatttggaggtgtgaaggctttctcccagaccaggtgttgcgtgcctgtccatcctcctccctcccttcccgagccacccaccagaccgttggat

SEQ ID NO: 481083 - DNA, 201 bp, Homo sapiens
tgaccgcccgggtggcagccacagcggccccactctccctggtccccctgcctgctgctcagacagccctcacagccgcggcaacctggaagctcagaatygacaccaagagtggggctcctcttggggacagagggtgggacaaggctgagggcattttctagaatgagtgcctggctgctggacaatgaccacatggtt

SEQ ID NO: 481084 - DNA, 201 bp, Homo sapiens
cacctttgtctttaggagcagatccttctatccagacagaggctctttgattgagattgacccaacaaagccagcccgtgcccgtttttggaaacacccayaggctcttaccttgtttccacatctcttagcctcttcagaatgttctgcaaggaaagaatgctgtctggctctgtgttccagggttgtgttggcagaaga

SEQ ID NO: 481085 - DNA, 201 bp, Homo sapiens
ctgttctagtaccacttgttccccgttactttgtctcaccaagtcaagaaggcccagcagggtggttctcaaagtgaggtccccaggtcagcagcatcacrtgggaactggctagaaatgcaagttcttgggcccaacccagacccaccaagtccaaacctctgggggtggggacccagtcgtctgtgttttaaaggagca

SEQ ID NO: 481086 - DNA, 201 bp, Homo sapiens
gaagagttgccccaggacattttccttgtcaggaataagccaggctaaatgtgccctttgggcattgaaaattggaaatggctggtcctagaaaaacagcygccttaaatccttttggggcatgaataaatactttttttacatcctggaaaattgtggttttgactccagcaaggaccccagggaggaggggcacttgtt

SEQ ID NO: 481087 - DNA, 201 bp, Homo sapiens
tgtcttagcagaaatccccggtataattcaatgttgttgactaggagtcctcatgcacattaggtctctgggcgatgcatcttgcatatctgcctctctgygtcctttcacctacatctcccgtttcctccttcacctcccccacccctgctccttggtaaccactgttttattttctatgtcttctacttaaaaaaatat

SEQ ID NO: 481088 - DNA, 201 bp, Homo sapiens
aagactaacaccctgtcttaaactccagaagtggttgcctgcacctaactggggtctgtggacctggccagataattcctaaacatgggccaggctccgcrtagaccccactttcagtttttcatcatcagagacctgtctggaggtcttgttattactgggcttgttctacagcaagagcattcaagactctccactaga

SEQ ID NO: 481089 - DNA, 201 bp, Homo sapiens
taaacagacatttatcaagcacctgctgtatacacacatgacattgtactaggggctgtgctgggaaagaccaaaatcctgccctgaagaagtttaggaaktatctctctggtttgagtgataggtaaggcccctgcataggcagcccaaggtggaagctcatgagctggtgtcccctgctgtcaccctgctgtccccacc

SEQ ID NO: 481090 - DNA, 201 bp, Homo sapiens
tattaaacagacatttatcaagcacctgctgtatacacacatgacattgtactaggggctgtgctgggaaagaccaaaatcctgccctgaagaagtttagraagtatctctctggtttgagtgataggtaaggcccctgcataggcagcccaaggtggaagctcatgagctggtgtcccctgctgtcaccctgctgtcccc

SEQ ID NO: 481091 - DNA, 201 bp, Homo sapiens
ggatctgaaatccacacacccaggccctgacagatttggggcacgtgttgttacagccgctgaggtctgtggctagggaaatatgggcatgtcatgtagarcatttatctatgaaacaaggacaatgggtgtcaggaaatttccaggcatttgccagacatctgccattttaatgtggagggtagcaaacagctttgtgtg

SEQ ID NO: 481092 - DNA, 201 bp, Homo sapiens
tctgaaaagaaaagatttgcatttttggatctgaaatccacacacccaggccctgacagatttggggcacgtgttgttacagccgctgaggtctgtggctrgggaaatatgggcatgtcatgtagaacatttatctatgaaacaaggacaatgggtgtcaggaaatttccaggcatttgccagacatctgccattttaatg

SEQ ID NO: 481093 - DNA, 201 bp, Homo sapiens
gagcacctgctgtgggggctggtgggagctccaggttccacagctgagccgtggggagcagaagacagagctttcctgctaataaggatcataaatgccakccctgggctgggcaagcatcctgctgccggttcatatcactggatttagcatcctgtggcggtggtttaattggaagagataattggtgccgtgtcctgg

SEQ ID NO: 481094 - DNA, 201 bp, Homo sapiens
ggttgttgcgaggattagatgaaattacacaaggtacttcttggagttcctggctcactgtaggcatttaatccatgcaacttattatttagctgacaaaatgcctataattagatgttagggaaattgctgtcatcgatggggaaagttccccaatggagttggaactgttgactctgctgtcctggcttctccaagtcc

SEQ ID NO: 481095 - DNA, 201 bp, Homo sapiens
tcagtttccccatctttaaaatgaggatgggcaatgaagaattgcctcagagggttgttgcgaggattagatgaaattacacaaggtacttcttggagttyctggctcactgtaggcatttaatccatgcaacttattatttagctgacaaaatgcctataattagatgttagggaaattgctgtcatcgatggggaaagt

SEQ ID NO: 481096 - DNA, 201 bp, Homo sapiens
gaatgaagatgaatgaatgaatgaatgtgtacacagagcttaggcctaggcctggctcatgagtgcccagcacttgtgagctctcatgattaactcatttscctcctgccccaaggaccctcttgggaaataaaacctccctgaagatactttgggatcctgtaaaatccgtgtgtgttactttcagggtctgctgtggtg

SEQ ID NO: 481097 - DNA, 201 bp, Homo sapiens
ggtttctttcacttagcataacgtcctccaggttcatccgaattgtggcagaaggcaggatctctgtcttttttaaggctgaaaaatatattcatattctctctctctctctctctctctctctctctctctctttctctttctgtctctcacactttccttactcattcatcagggaggttcttaactgagagagtgaag

SEQ ID NO: 481098 - DNA, 201 bp, Homo sapiens
ctgacctcaagtgatccgcctgccttggcctccaagagtgctgggattatgggaatgagccactgcacccagtcatttaccttttttttttttttttttttcaatatggcaagagctcctaaaatctactgtcttagcagaaatccccggtataattcaatgttgttgactaggagtcctcatgcacattaggtctctggg

SEQ ID NO: 481099 - DNA, 201 bp, Homo sapiens
cctgacctcaagtgatccgcctgccttggcctccaagagtgctgggattatgggaatgagccactgcacccagtcatttaccttttttttttttttttttttcaatatggcaagagctcctaaaatctactgtcttagcagaaatccccggtataattcaatgttgttgactaggagtcctcatgcacattaggtctctgg

SEQ ID NO: 481100 - DNA, 201 bp, Homo sapiens
ggaggcagaggttgcagtaagctgagatcacgccactgcacactcactccagcctgggtgacagagcaagaccctgtctcaaaacaaacaaacaaacaaamaaaaaaacacagaagatccttcagtgtttcaggtgctctttggtttttttaggccaaatgcttaaattggacagttaattttatgcatttctctcttttg

SEQ ID NO: 481101 - DNA, 201 bp, Homo sapiens
ggaagagttgagaacaagggatttgaaatctgatagccttagtttgaatcctggcctcaacatattttccctttgtgactgtggatcagcaacttaacctrcgtgagccttggtctcctcctttataggatagatgcctgccttgagggttgtggagaaggtgaaatgttgagtacctaatgcatgaagtggcactcagtc

SEQ ID NO: 481102 - DNA, 201 bp, Homo sapiens
gactgggctggatcatttccctttctctttaatctaaaaagaacctgaagctggctacttccttggtgttcatggatgggtgagagccatcttgagcctcycctatctgctagacacaaaggacgtgaagatgaatggagcatggccctcatactttacaaatatcatagtctaaggggagtcagaaatgcagacagatgt

SEQ ID NO: 481103 - DNA, 201 bp, Homo sapiens
tccttttcaacatggtgccatggttaaaagacctggccctagagttctatttgggtttgatttgcagcctctccctttcagtcttcatcagactctgcacagtttcctgctgcgtatagtaggtgttcattatgcttaaactaaagtcacagcctacagaaaatttgaccctggagccaactgagaggggagggagagagg

SEQ ID NO: 481104 - DNA, 201 bp, Homo sapiens
gggtggcactgacaaagctgcaaaggctcgatggctttattagcaactcaccttgtgccatttttcaggtagatctggctgttggttccatgaaatatggscacgttggtgaaatactcttaggcttctaaaaaagagaaaggaaaaaaaagaaatagtgctttcctctgctcgacacaccacagttccagcttcaggatg

SEQ ID NO: 481105 - DNA, 201 bp, Homo sapiens
atccttttcaacatggtgccatggttaaaagacctggccctagagttctatttgggtttgatttgcagcctctccctttcagtcttcatcagactctgcacagtttcctgctgcgtatagtaggtgttcattatgcttaaactaaagtcacagcctacagaaaatttgaccctggagccaactgagaggggagggagagag

SEQ ID NO: 481106 - DNA, 201 bp, Homo sapiens
gggagtaggatggctctagaaaagcatgaaccaacacggatgcttcaggatctgacagttctggagccaggtgcttcttttgtggtcttaggcagggctgygtttcctcatcttttagggtacacgtccaactccctgggtgatcatgctattaaataagggaacatgtaagatatagggcacacagcaaaagattgaaaa

SEQ ID NO: 481107 - DNA, 201 bp, Homo sapiens
tcctgacctctagtgatccgcctgccttggcctcccaaagtgctgagattacaggcatgagccaccacctgggccaggccgccaatacctttttaatttakccccttgctacatacgcatttgaaaaaataaaattacttttttgttgtgacaatgtgtagtaagtgcttgccagttcagccttttgatgaattcaaactg

SEQ ID NO: 481108 - DNA, 201 bp, Homo sapiens
caacttttggagactttctatttactgaaaactaagggtaaatgatttatctttttgctggatttagctgtctataaatttctctgtgccttgaaaaaaaatcacacttattctaatgtgtcctcattcttaataaccacaattggcgggaagaggggaaaaaagatttatctgccagtgagccagttttttgtttaacat

SEQ ID NO: 481109 - DNA, 201 bp, Homo sapiens
ctgattccttactctttgcctttgacctctgtgctgcgtgtatgtttcaggctcaagggcgaatcctcagggtgcaggccaatgaaatgctcaagtgctcycagtcctccttattttccctttcttatacacatgtttctggctccaggtgtagttggtaactttttatctcagtgatgatgctgccttaaatacatgtgt

SEQ ID NO: 481110 - DNA, 201 bp, Homo sapiens
ggaagtcgagccattccaggcagacatgtagcaaaagcccgagctggggtccgccctcatgcaataaataacacctgtgcacataagagaggtgacaggcrgggcatccctggggacctgggcctgtggcacgtgaagaaacacccaagagagcacgaagtcccaatgccatgaccagatatttcggtgccaggcatgctt

SEQ ID NO: 481111 - DNA, 201 bp, Homo sapiens
gtgcccaagacatgcgtggctagcaactctagggtagctttttgttttgtcatgttatgtttttaagacagtctcgctttgtcaccccaggctggagtgcrgtggtgcaatgttggctcactgtaacctccacctcctgggttcaagcgattctcctgcctcagcctcccaagtagctgggattacaggcacgcgccacca

SEQ ID NO: 481112 - DNA, 201 bp, Homo sapiens
aaccaccatcatcagcagcaggcccaaagctcagatctgttattccagtagctgcagtggaagagccgagtgggtggacaggcagtgggggaagcctgagytttgctgcctctgcctttggagggccgtgggtgtgattctgtaagcagtggagagccacccaaggcacaatgggatcagacccgctgtaggaggttggct

SEQ ID NO: 481113 - DNA, 201 bp, Homo sapiens
gagttttactggaacctttgccgagagcctgacatgagtcagttcatggagtaaatagagcattttatttatttgaaatgatgggaggtcagtttggaatraataaagaaactgtatagccttttgactttgtaagttctaaagattctgcttatctttcaaagagaaatctctgcaaccccctttaattttttctcttgt

SEQ ID NO: 481114 - DNA, 201 bp, Homo sapiens
aatgagattgaaggatagtaattgtctccacccttatttagatgatgcccatcgctctggcgtttgtgttttcaaatgttttggataaagcgagtgccggsagagtgtgctatttagtgagctcagtccagcctcggtcttgagcattgactgtgggtcctctgctgttggggttctcgacttgcccaccagctgccttat

SEQ ID NO: 481115 - DNA, 201 bp, Homo sapiens
gacagtggttgtccatgctcagttgagttatttctggaggaaggttacatgtactccttagcagaggttttaggccttgagctgtaatgaatttgctaggragagacattccttatgcttttgttatctgtttgcattttaggacaacagtagtagcagcagctgccttcttggacgcctttcagaaagtggctgacatgg

SEQ ID NO: 481116 - DNA, 201 bp, Homo sapiens
tcttttaaaaattggtgacaaggtcttgctctgttgcccaggctggaatgagtagcgcaatcatagctcactgcaacctcttgggctcaaacagtcctccygcctcagcctcccgagtagctactaggactacaggtgcacgccaccatgctggctaattgtttttcgttttttcgtttttgtttttgttttttgtagaga

SEQ ID NO: 481117 - DNA, 201 bp, Homo sapiens
acatttccctttctactagaacacctcgagggatctgtttcatctccttcaagtggcagattcccggaccctcggtttgtaaaagtgttagcagttccttytgacgcaccacgcgttcggatggatgaaggttttggatacatttttttttttgtcctgatagacggaatctgatgtatgcagccagataatcacttcctt

SEQ ID NO: 481118 - DNA, 201 bp, Homo sapiens
tccagtgcaaataaacataggctctcctttgcagtttgttgcagtggaatcttgtctgttgcatgctgaagcgtaggatgttaggcctcttctgacatcamagcagagcgtttgcatgttcatgttgaatgtgttggtttggtttatctgtgccctgaatttggcatcatgaacttgcactcttggttcagttggaggcgg

SEQ ID NO: 481119 - DNA, 201 bp, Homo sapiens
aatcccagaactttgggaagctgaggcgggaggatcacttgagcctaggagtttgaaagcagcctggtcaacatagtgagaccccatctctacaaaaggamaatttaaaaattagctgggtatggtggcacatgcctgtagtcccagctactcaggaggctgaggtgggaggaccatttgaggccagagttcgatgggagg

SEQ ID NO: 481120 - DNA, 201 bp, Homo sapiens
ccctgcaaatccagtgcaaataaacataggctctcctttgcagtttgttgcagtggaatcttgtctgttgcatgctgaagcgtaggatgttaggcctcttytgacatcacagcagagcgtttgcatgttcatgttgaatgtgttggtttggtttatctgtgccctgaatttggcatcatgaacttgcactcttggttcagt

SEQ ID NO: 481121 - DNA, 201 bp, Homo sapiens
taagcaactccttattttgtagcccacccaaaacttttgtaacagaagagagctaaagttaaactgcacccaaagagtccattgttggtgtgttgaaatasttaaaaaaaaaaattcaaaaacactaggtaatagtaacaacaaaccctttcaccggatcactcatctgcttctgaacatcaactcataatctttggagca

SEQ ID NO: 481122 - DNA, 201 bp, Homo sapiens
cagaatcgacaccaagagtggggctcctcttggggacagagggtgggacaaggctgagggcattttctagaatgagtgcctggctgctggacaatgaccayatggttgtctcaagggagaggaaggggtatggggaatttggaggtgtgaaggctttctcccagaccaggtgttgcgtgcctgtccatcctcctccctccc

SEQ ID NO: 481123 - DNA, 201 bp, Homo sapiens
ttccagcagcttccctgcaaatccagtgcaaataaacataggctctcctttgcagtttgttgcagtggaatcttgtctgttgcatgctgaagcgtaggatkttaggcctcttctgacatcacagcagagcgtttgcatgttcatgttgaatgtgttggtttggtttatctgtgccctgaatttggcatcatgaacttgcac

SEQ ID NO: 481124 - DNA, 201 bp, Homo sapiens
gcaagtaatagaagtcaacatttaatgaacacttgctttgtgccaagcacactgttgtaagcactttaaatatattaagttatttaggtctcacaactttrtatgatagtttattatttccatttcacagataaatgagcttgggcacagagaggtaaactgatgtcctcaaggtcaacagctactaggtggaggagttga

SEQ ID NO: 481125 - DNA, 201 bp, Homo sapiens
gcaatgactttgagaacaaaagctcccctgggagggtcagcagacttggtgtgtgcaccaggcagggctcctggcaggcctgcccagcaggtccccaagcstgggcctgagccccgacagcagttgcagccacagggcatctgcagttatcaaaactctcatctgtacatcattttccaatccgtgttctgctctgctgtt

SEQ ID NO: 481126 - DNA, 201 bp, Homo sapiens
attcctatcacatccacaattgaaagcatgtattctgcacctgcctcgtttcagagtttaaatatcttctcagtgaactgcgcctgttatgaaatgctaartacttgaaaccaaaaccacatggtggttattctggaactgttttcctttcaacttttggagactttctatttactgaaaactaagggtaaatgatttatc

SEQ ID NO: 481127 - DNA, 201 bp, Homo sapiens
cttcaaagggtaggctgactttgggctccttctgttgaaaatggagatgtttttctttccacagtatagtgtcccctccctagtctttgggtgtgtcatcytagcatgtggagcttttgtaaacagaaaatttacagtgagtgaaagctttatctgctgattgattcgttaaattaaaaaaagccttcaatttctgcctac

SEQ ID NO: 481128 - DNA, 201 bp, Homo sapiens
gggtggttgaaatgggtgaatctagccaggagaaggtttccgaggggagaggtggccttggaactgagttttgaagttggagactgaaaatcctttagggmgaagaaaattgacacaaccgggctttctgacagacaaggactggcccacccctgcctctaaggaaccctggggtctgggagaggacccaaaagccttctt

SEQ ID NO: 481129 - DNA, 201 bp, Homo sapiens
tgcattttccatgcatgttaggaataatgtccagttttgagacagtcctgttacacattctgagttatgattaatttttaaaaatcaaattattaatcaayacctttttattccttcacaaacgcttcatgtgcccgacttagccttagaagttcttcattgtttttcttattataaaagtggggtgggattagaaagtga

SEQ ID NO: 481130 - DNA, 201 bp, Homo sapiens
ttaaagtgagaactacttggaagtttttttttttaaaggaactatctggtctttcatttttgagaagatacaggatttttttttttcttctgctcacctaktatctagtgcaacattttcatttttactggagacactgaatctcagtgaagtcacttgtccgaggtcacacagctaggaaggagactggggattctagcg

SEQ ID NO: 481131 - DNA, 201 bp, Homo sapiens
atctatatatacataaagctagtatttgatagtgtactgcaggctattgtaagactttgtttctgttcacaattccttgaatgaggattttggggtcattktttttcttccattttttaaatttcatttttttaaaattgtgggctgcttcctttttaaccacatgttaaacattacacattaaacgttaaaacatttgtg

SEQ ID NO: 481132 - DNA, 201 bp, Homo sapiens
ccatagacatacctcttaaaccaaacctaactttgtagcttatctgcccccacttcattatctttagttgacatttggggccagtgatggaacccggtggtatctgtctggcacactcacaaagaaagtgttattaaatctctcaaatacatgtagcaggtcaaatatatgccttttcttatgatgttgaagttttcaatt

SEQ ID NO: 481133 - DNA, 201 bp, Homo sapiens
acagtttggacatttttgcagtgctgtgtgacaccacctcatctaattccaaaacattttcattaccgtgaaagaaagccccgtaccgggatgatgaaaagttctggagatggaggtggtgatggttacattaacaatgtgaatatacttaatgtcacaggattgtatatttagaaatggttaattaaaatagtgaatttc

SEQ ID NO: 481134 - DNA, 201 bp, Homo sapiens
tcatctgaaaaacaactactctgccaagttgcacgtatacaactctgtaaagagtccacatcttactaaaaaaagactgcttcctttttaccaaaaggtcmtttcccagagtgaaaatatgcaagtttttttttttgttttcagaagattaagtcaaatgagaataggaatggggtgaacagagcgcttgagttcccgttc

SEQ ID NO: 481135 - DNA, 201 bp, Homo sapiens
ctcacgcctgtaatcttagcactttgggaggctgaggtgggtggatcacctgaggtcaggagttcgagaccagcctggccaacatggtgaaactctgtctytactaaaaaaaaataaaaaaatcagctgggtgtggtggcacgtgcctgtaatcccagctacttaggaggctgaggcaggagaattgtttgaacccaggag

SEQ ID NO: 481136 - DNA, 201 bp, Homo sapiens
tgacacttttccccaaattcacaaacaccagtgttttcgtaatgttcataattgtgccctccagtgttcagcgcagaactaccatgtgtggttataatttsctctcccacgccccagtaaatgctgattcaagcattgtttttaagagggagaaggaagagaagagctttaaaaataatgttagagaaggtgtgcctgaag

SEQ ID NO: 481137 - DNA, 201 bp, Homo sapiens
catcccctgctctttggaggcaggtacagttttaagagactctggtcataaaagtcagattcgggcaacacttggccctcgcttgggttcttttacagcastggtttcaacaggagtgatttgttgcccaacacttggtactctctggagacattttggaggatcacaagtctggaggtgaggttaaaggaagtctgctgt

SEQ ID NO: 481138 - DNA, 201 bp, Homo sapiens
tccatgttttgtggcttcattttcaacactttattatgggaagttttaaacacacacacaaaaaagacaatactatgatgaacccccacttaccccattaygcagcttcagtaaccatcaactttctgctgttcttattttcagacatgttgccccccagcccaacccctttttgtgtcctgcagtattgtaaagcaaagt

SEQ ID NO: 481139 - DNA, 201 bp, Homo sapiens
ccgtaatagcgtgtagaccaataggtttggtgtacattgttctaggctctcgtctctgctctgtcccatctccctttgtccatcacaagtgccatataccygaggggataaatgcattgacgctggagcttaagcctaggtttgagttccacttactagtgacataacctgggacaaatcacttgggcatttttcctttct

SEQ ID NO: 481140 - DNA, 201 bp, Homo sapiens
atcttgagaaaactgaggcatgaattatccatgaagcagctctccatccctgaactccctatagtagcttagcaaggatggagcgcaatccctgtggtacygattagacagggccaggctctagaagcaaaatatgagagctggctttaaagcaccaacacccgtaatagcgtgtagaccaataggtttggtgtacattgt

SEQ ID NO: 481141 - DNA, 201 bp, Homo sapiens
tggtagaagatgaaaggcacttcttacatggtggcaggcaagagagaatgagagccaagcgagaacggaaaccccatatcaaaacatcagacctcatgagycttattcactatcgtgataacagtataggggaaaccacccccatgattcagttacctcccacctggtccttcccacaatacatgggaattatgagagcta

SEQ ID NO: 481142 - DNA, 201 bp, Homo sapiens
tcacaatcatggtagaagatgaaaggcacttcttacatggtggcaggcaagagagaatgagagccaagcgagaacggaaaccccatatcaaaacatcagayctcatgagtcttattcactatcgtgataacagtataggggaaaccacccccatgattcagttacctcccacctggtccttcccacaatacatgggaatta

SEQ ID NO: 481143 - DNA, 201 bp, Homo sapiens
aattctatcttgagaaaactgaggcatgaattatccatgaagcagctctccatccctgaactccctatagtagcttagcaaggatggagcgcaatccctgtggtaccgattagacagggccaggctctagaagcaaaatatgagagctggctttaaagcaccaacacccgtaatagcgtgtagaccaataggtttggtgta

SEQ ID NO: 481144 - DNA, 201 bp, Homo sapiens
aaggatgccccaaagatgtccacgttctaacccctagaacctgtgaatgttactgtacgtggccaaaggggtctctgctgatgtgtggtgatgtggttaarggtcttgaggcagggaggtgatcctggatgatccaggtgggtcccacataatcacaaggattctcataagaaggaggcaggaaaattggaggcggagaga

SEQ ID NO: 481145 - DNA, 201 bp, Homo sapiens
tggacttcccaggttcctccctagccccggcctttgaggggtggtgtttgtagcgggtggctgaccaggaaggaagccttaccacccctcacctgggctgrggaggctctgcttcgtgcctctcccagcagtgtctgcacctttggcgtggctaggactccactacctgaccctgtggcctgtccagttttcaagctgatg

SEQ ID NO: 481146 - DNA, 201 bp, Homo sapiens
cctccccagcagcctcctctccatgtctttgtcccatccctgaagcagccactgccaaaggggatggagttagcatcatgggcctagaccgatcatgtgarggcgaatgggtgctgcagtcagccacagtgccctgccacactctccagattcacaactcttacctttttttaatggccatgataaggatgccccaaagat

SEQ ID NO: 481147 - DNA, 201 bp, Homo sapiens
caaggctgtggacgtgtgtgtctgtcagtctgtctgtctgtctgtcttagcatgaggtttagcaggcagcctcaggaaaaacttacagcccgaaagggagkgtctggccatgctgctggcactccctcttttcctagagacacgtgtgcaggtgtctgagtgcaggctaagtacaagttgcccatttcggctccagaaccc

SEQ ID NO: 481148 - DNA, 201 bp, Homo sapiens
taaaacgtcagtttctagaaaacaggatcctgaattcagctaagcatgattcccagggccatccctgggaagctgtcctgaagatgcctcctgctaagacrggttgcggaggggagtcagtggctgaaagggtgatttcaggatagattgtcctggcaaataaggaggggtcctctgcatgaataagcagtgtaccctgcc

SEQ ID NO: 481149 - DNA, 201 bp, Homo sapiens
tcccaaagtgttgggattataggtgtgagccactgtgcctggccgcttggagactttgaatcttagctcggagtgcagtagctgtgtgaccttgccaactrcagatgctttttaagtcccagtttcctcacatgtctgaaatgataataatacctcctcccggagttgttgttatttatttattttttattttttgagacg

SEQ ID NO: 481150 - DNA, 201 bp, Homo sapiens
tgctttctactaattgtttgtttaattagaaaatgagtaattatttatccagaaaatagaatccaaaaccgtggggctgaaatcttctctaattgcaccaygtgatcatgcttttctgaggattgtatttttggtgtgtgtaggtggtaggggagtcttattttgtggctggtgtttactgagagatccatcttttgctca

SEQ ID NO: 481151 - DNA, 201 bp, Homo sapiens
gtggggtgccgcccgcctgagtgtaatctcctttgccaccactagtcccttttgtttgttcaaccatattggccaaattcctttccatcccaggatcacartatttgctgttccctctgtttggttgctcttctgcagatctttgtgtggtttcagctcaaatataacctcaggagggccttttctgaccgcccagcaaaa

SEQ ID NO: 481152 - DNA, 201 bp, Homo sapiens
gttgggtagcagcagttgccagagagaattgttcattgtggtcaaccagtgctcctgcctcagtcgtgttttgcttttaaccatgtcttcctggaatgacrcttgaaagggcagtcatcatgtgttagcccagaatgaactcaccggaatcccacatttaccaaaacatatcctggatcctcagggcaggatgtcaccaga

SEQ ID NO: 481153 - DNA, 201 bp, Homo sapiens
tcactagcctttaacttctggattgcctttggtgttcaagcccagaactctttcgtgtaattagagtcttactatttctacctagcaaacttttttttttkctttttaaaaagattgatgcatccacatgttatgggggcacatatgatactttgataaattgatataatgtgtaaagttcgaatcatttgagaggccgag

SEQ ID NO: 481154 - DNA, 201 bp, Homo sapiens
  misc_feature (1)...(201): n = A,T,C or G
aggcactgtcacaaagatctggaccaaaatatatccaagtcgtgtcatctattgaagctaagcaacttcagaaaagggccacagtatgaagagggctgtgntgcaggatcccgtgggaacacacagtcagaccatctgagcaggcctggcagtcccccaggccctgggagggaggcctgtgtgttccccactgtcccctgt

SEQ ID NO: 481155 - DNA, 201 bp, Homo sapiens
gctggaaaagcacaagaaagaaggggaaaagttagcttctgttgaacacacaggcactgtcacaaagatctggaccaaaatatatccaagtcgtgtcatcyattgaagctaagcaacttcagaaaagggccacagtatgaagagggctgtgttgcaggatcccgtgggaacacacagtcagaccatctgagcaggcctggc

SEQ ID NO: 481156 - DNA, 201 bp, Homo sapiens
ttttaaccagattgtttaattgagacttcactagcctttaacttctggattgcctttggtgttcaagcccagaactctttcgtgtaattagagtcttactrtttctacctagcaaactttttttttttctttttaaaaagattgatgcatccacatgttatgggggcacatatgatactttgataaattgatataatgtgt

SEQ ID NO: 481157 - DNA, 201 bp, Homo sapiens
tttgaagttcttaatatcctgagtgctgactttgacctttaatgaaaatgatggtccttttggcaggggccagctgcctcataaatgtgcagcttaaagarcaaggatgagtttccctgaacaagagaaacagcagcaagcgtggaagtcctgcgtgcatcaggagcactctgctaattaaaggcaagagtgggatgcctg

SEQ ID NO: 481158 - DNA, 201 bp, Homo sapiens
acaccaccatagagatcagcccaagattgtgtgggggctctggggagggcctctgattcccatttagggtgggagtacagagtccaggaaggcttttgatytgggtgacaccctcgctcggaactgagttttattttgcttattttaaaagcatttatatgcaaaccaggcactatgctaagtgcttgacacaaacttatt

SEQ ID NO: 481159 - DNA, 201 bp, Homo sapiens
aggcatcacagtcactcaagaagttcactttaagggacagatttcaaggccctgccactcccatggaatcagaataactgggtgagacccaggaatctccrattttgaaaagctttccaggagatgttgctctccattgaggtatgtttgtgctgtcctgtaaagcctcttgccatcttgccataacccacctgtccgatg

SEQ ID NO: 481160 - DNA, 201 bp, Homo sapiens
tgaaggttttcacacattgcctggcgaacgtccactcaaatgttagaagcagttactattctgtcttgtagatttgggaatgaggtattttgaagtcttaraatcagtggagtaattatctccaccacttcttaggcagacactgccccacccttatggagctgtatttagagcttgcagtgaagttgcaggaaatggaga

SEQ ID NO: 481161 - DNA, 201 bp, Homo sapiens
atcctccccacttccccgcccctcccgggaattgggtttagtgtcatttacagatgtttttgcatatataaacaaacatgctgggaggaaaaaaaaaaaacaacactagttttccacaatatgtggaatgacacatggaataaaatatacctgtgtgacctttttcagaaggtagcccctaagaaacattgttctgtgctt

SEQ ID NO: 481162 - DNA, 201 bp, Homo sapiens
ggagggaagcagaagagggcatattgggtttacttaaatctgaaaacctgtgcccaagacatgcgtggctagcaactctagggtagctttttgttttgtcrtgttatgtttttaagacagtctcgctttgtcaccccaggctggagtgcagtggtgcaatgttggctcactgtaacctccacctcctgggttcaagcgatt

SEQ ID NO: 481163 - DNA, 201 bp, Homo sapiens
aactcctgctttgacatttttttttctttttttttttttgagacggactcttgctcttgtcacccaggctggaatgcagtggcacaatctcagctcactgyaaccttcccctctagggttcaagtgattctcctgcctcagcctcccaagtagctgggattacaggcgcccaccatcacgcccagctaatttttgtatttt

SEQ ID NO: 481164 - DNA, 201 bp, Homo sapiens
actattgagtacgtgaggtgtggctagtgcagtcaaggaattgactttatttttagtcacttttcatttgtttaaatttaaatagccgtgtatggctagtrgctaccgtacggaacagttgcagatctgtaacatatcatctagagaattagagtgtgcctgcgttgcaacacagctttctatcttctaccttctgctggc

SEQ ID NO: 481165 - DNA, 201 bp, Homo sapiens
gggtagagtaggagtttggaggtgatgtatttcaccaaaggcaaataatctcatagtgaacaaactcctgctttgacatttttttttctttttttttttttgagacggactcttgctcttgtcacccaggctggaatgcagtggcacaatctcagctcactgcaaccttcccctctagggttcaagtgattctcctgcctc

SEQ ID NO: 481166 - DNA, 201 bp, Homo sapiens
ggaagggcgtatctgactctctgtgctcttgggaaccccgtgtacctccaggcctagcaaggggaagtctaaaccaaagatgccagaagtacattgtcttygaccactaactgttgcaacagagtcagcatctaatgtgttgtttcttagagttatttgcaatgactttgagaacaaaagctcccctgggagggtcagcag

SEQ ID NO: 481167 - DNA, 201 bp, Homo sapiens
ggggtagagtaggagtttggaggtgatgtatttcaccaaaggcaaataatctcatagtgaacaaactcctgctttgacatttttttttctttttttttttttgagacggactcttgctcttgtcacccaggctggaatgcagtggcacaatctcagctcactgcaaccttcccctctagggttcaagtgattctcctgcct

SEQ ID NO: 481168 - DNA, 201 bp, Homo sapiens
tgtctctgttgacatagatttctctgctgagctttgcagtgaagaagtcctgagtcttctcagaattagataaccacatccatgtttctacaactaactgktgcacctgctacctgaaggatgaccaaaccagagcttctctgtgtacagactgctgactttaagagtttattctctaaggtgatctagagtttcctgtca

SEQ ID NO: 481169 - DNA, 201 bp, Homo sapiens
ctcaagtgattctcatgcctcagcctcctgagtagctgggactacaagcatgcgccaccatgcctggctaatttttgtatttttagtagagatggggattyaccacgttggccaggctgatctcgatctcctggcctcaagatgtctgcccaccttggcctcccaaagtgctggaattacagctgtgagccatggcgcccg

SEQ ID NO: 481170 - DNA, 201 bp, Homo sapiens
tgacctcctcatccacctgcctcctaaaatgctgggattacaggcgtgagctaccgtgcctggcctggtgttttttttttgtttgtttgtttgtttgtttktttttttgtatttttagtagaaatggggtctcgccatgttgtctgggctggtcttgaactcctgggctcaagtgatcctcctgcctcagcttcccaaagt

SEQ ID NO: 481171 - DNA, 201 bp, Homo sapiens
ttaacctggggtcatttttatcgggctttatataattccaacagaaagcaaaggactgtgagtgcttaagttagcctgagcagtaaagaggcttttagacytactgagaatagtttttggattcacattaccactgcttgacctgagactcgatttgggagctagaaactaaaaccagttatgcccttccattgaatagat

SEQ ID NO: 481172 - DNA, 201 bp, Homo sapiens
gaaccgcactgtccagcactttatatctcgagtatgctgcccttggggctttgggatctgcagttccacatcagctttactgctagactgcgttcctcaaygctttggtctctttctgtctatggcccacccctcactcagtgcctgcgcatagtaggtgcccattcgtggcccagtcagggtgattggcatcgtacattg

SEQ ID NO: 481173 - DNA, 201 bp, Homo sapiens
catgggcaggatgtcggaacatactgaagcatattggtgggctgagctcaagtaataaagctgatttttttttttttttttttttttactgcctgaaacargcacacttaacaacagccgcagcaatgacaaaaacctcatgagaagatgcctgggtcaagggtcttacttccagcagcttccctgcaaatccagtgcaaa

SEQ ID NO: 481174 - DNA, 201 bp, Homo sapiens
ggactgacagcagggacagtcttgtttgcttttatttttcctctgcccagcactgacatatgggggttgggtcacataatctagccatgggcaggatgtcrgaacatactgaagcatattggtgggctgagctcaagtaataaagctgatttttttttttttttttttttttactgcctgaaacaggcacacttaacaaca

SEQ ID NO: 481175 - DNA, 201 bp, Homo sapiens
caagtgagtgcctcgttgctcaaggagtgaattgagaagggcttagttctgtccctgatactgtcagtctaggttctaagttgtagcaacagaaatcactkcagaatcagacagggaagttgctgaagaatgtgggggagtccaaaggatccctttctctcctatgttttgtgttcctctactctaatacctgggaactat

SEQ ID NO: 481176 - DNA, 201 bp, Homo sapiens
ctcctgggctctgtatcttaagccattttagagaaattatttgatgtcctcagagggaggagaatgctaaaaccacctcttttaatctgcggtctctggasttttcctctttaaccactttggagacgggatgaattggtttcttagtaattaagagccaggagctctttttattgcttgtccttaacctctgacttcact

SEQ ID NO: 481177 - DNA, 201 bp, Homo sapiens
ccatccccgactccaccacagatatacttggaatgcgatcaggcagacgaaatgagttctgtgcctaggcagagcatgatctcgacttcctttcatttgcyaattctgtcttttgcagggaacgcttcctccctctttgtttcatttctctttgccaagaaaattcccatttatcctctgagaccgaggtgaggcattgcc

SEQ ID NO: 481178 - DNA, 201 bp, Homo sapiens
gaaaaaaagaaaaagaaaaaagaaaaatgttctagaagatcatagccatgatcttgatggcttcatcaggactaatcactatggaaaattaaggatgcccrtttcttatatttaatgcggtagctgtgttttcttttggttgacctggccttttggcactcctgggctctgtatcttaagccattttagagaaattatttg

SEQ ID NO: 481179 - DNA, 201 bp, Homo sapiens
cacaagaacattaagtcctgaccttgtgcctttctatgactcaacacagagagagccttgcgtcctttcttttggttgtcgtgctgagtctatgatctttwcgaggtcatagcagtaggaaccttaatgactgaagatgagtattgcagggattcacattagtcctgtgttctttcttgagtaacagtggtcagtagggtc

SEQ ID NO: 481180 - DNA, 201 bp, Homo sapiens
tatgtagggagctatctcccgcacatgtgtccccatccccgactccaccacagatatacttggaatgcgatcaggcagacgaaatgagttctgtgcctagrcagagcatgatctcgacttcctttcatttgctaattctgtcttttgcagggaacgcttcctccctctttgtttcatttctctttgccaagaaaattccca

SEQ ID NO: 481181 - DNA, 201 bp, Homo sapiens
gtgcatgtgtgtgtgtgcatgtgtgtgtgtatgcatgtgtgtgtgtgcatatgtgtgtgtgtgcatgcatgtgtgtgtgtgcatgtgtgtatttattttargatggggtgttgctgtgtttcccaggctgaaatgcagtggcacaatctcagctcactgcagccttgcctttcctggctcaacagatcctcccacctcagc

SEQ ID NO: 481182 - DNA, 201 bp, Homo sapiens
ccacctctgcctcccaggttcaagtgattctcctgcctcagcctcccgagtatctgtcccccaggccggagtgtgcagtggtgcaatcttggctcgctgcmacctctgcctcccaggttcaagagattctcctgcctcagcctcccaagtagctaggactatagacatgcaccaccacacccggcttttttttttttgtat

SEQ ID NO: 481183 - DNA, 201 bp, Homo sapiens
atttagtgcattcataatgtggggtaatgaccacctctaccaattcaaaacctagttgcagtgagccgagattgtggcactgcactccagcctgggcgacmgagtgaggctccatctcaaaaaataaaaaaataaaataatatattctgtacctgccccttagacagtctggttcattaagtttcttggaaaggttcaggg

SEQ ID NO: 481184 - DNA, 201 bp, Homo sapiens
aaggtcattgctttgctttgtgtccctgaatgtatatagacaaagacactgaatgttagtagaaagcagccagaaatatgtaggtcactgtctttgactcrtttttggctggaaccttctgcagtggtcctacaaaacaaaccccaaaataaacaaaactaccttcaatatattcactagccagctctcttgtttgcccca

SEQ ID NO: 481185 - DNA, 201 bp, Homo sapiens
tctagggtcagagtgggacccaagcaagtcaatagccccctggccccacagacatgtagtgctcacgggggcagaacaggagtgctgttgagccccccccytaaagcaacctgtgtatttctctcctccaacctgcagcctggtgaggagatggaggcttgtgaggagctggccctggccctgtctcggggcctgcagctg

SEQ ID NO: 481186 - DNA, 201 bp, Homo sapiens
cgctgccacctctgcctcccaggttcaagtgattctcctgcctcagcctcccgagtatctgtcccccaggccggagtgtgcagtggtgcaatcttggctcrctgccacctctgcctcccaggttcaagagattctcctgcctcagcctcccaagtagctaggactatagacatgcaccaccacacccggcttttttttttt

SEQ ID NO: 481187 - DNA, 201 bp, Homo sapiens
aacctaactttgtagcttatctgcccccacttcattatctttagttgacatttggggccagtgatggaacccggtggtatctgtctggcacactcacaaasaaagtgttattaaatctctcaaatacatgtagcaggtcaaatatatgccttttcttatgatgttgaagttttcaattactgctgcttttatgagggagaa

SEQ ID NO: 481188 - DNA, 201 bp, Homo sapiens
aggggacccgaacagagctcaagggcaatggaacttgctcaaggccaagtcattgggaagtgacagttgtaggactggctcttgggttttcctgttttctrtgcatctttattcattatttctacatggtgtttgctggcaggggaggctgacacattgggtagactagtgaaagatcagtgttcctcaagaagcttctat

SEQ ID NO: 481189 - DNA, 201 bp, Homo sapiens
ttaagtcaaatgagaataggaatggggtgaacagagcgcttgagttcccgttcgtgttgcgctccctgcgtgatggagagagggctcagggaggcggagcyggatggggaggcggctgcaggccccctctgcctgctcacagctgtgtggccctgggtgggtcagtacagctggacacacctgagtttcgttgtctatgag

SEQ ID NO: 481190 - DNA, 201 bp, Homo sapiens
caaaaatggtatgaatttcaaatgtaagagtgcatccctaaagttttatgggaacacagcccattcatttgggttttgtctgtggttacttttatgctacrgtggcataggtgagtagtcacagcagagaccaaagggccctcaaagcctgacatgtttactaaatgacctttcctggcagaatgtccctgatttcacttt

SEQ ID NO: 481191 - DNA, 201 bp, Homo sapiens
gatttctctgctgagctttgcagtgaagaagtcctgagtcttctcagaattagataaccacatccatgtttctacaactaactgttgcacctgctacctgraggatgaccaaaccagagcttctctgtgtacagactgctgactttaagagtttattctctaaggtgatctagagtttcctgtcatttgactctgttccct

SEQ ID NO: 481192 - DNA, 201 bp, Homo sapiens
tatgtaagcatatcttcaagataaattttccagctcctaagccctcctatacacagattttagagctgccattgccctagtgggaggtgatgtaaaaaaaatattgttttaaatgggtttgtaaatgtacagtctgcttttggtctcatcattttggtgtttttccacttcaatttgtcttgcgtcattttaatttgttag

SEQ ID NO: 481193 - DNA, 201 bp, Homo sapiens
aaatttgtggtcctctgccaacaggtgactaaaggactctttaaattttcttgagattcacagaacaggggtaggtattttctttctgaaatatgctgttrtaatgtccttgccttgttcttttccggtttatgcagaactttaaacctccctcccctataaataaagaaaaaaaccagatacaccatatcctaaaaagtt

SEQ ID NO: 481194 - DNA, 201 bp, Homo sapiens
agtcttagctttccctgtgtgtttccaagggtttaatacatacataatgatcaagagaacctgatttaacattttgctcaccctagtattaaaaaaaaaaattctggagaaggtaataaagactaagtttaaagaatgtcttggcagttgttaaaggaaattttaattaaatcccaaaatagtgggtacatgagaataatt

SEQ ID NO: 481195 - DNA, 201 bp, Homo sapiens
gttgttaagtttctctatttagagtccattggtagtcaagaccacctgggtgctgtttgcaagacataactatcatggaagtatttaatactatactattkgtatagcaggtacatgatatgctattagtgctgtagaaatgttatgttagagacgggaacctgaagcccctccttgtggcacatagacaacctttgtttt

SEQ ID NO: 481196 - DNA, 201 bp, Homo sapiens
caagttgatgactagtgtccccaccctgctctgacttcacttaaagacaacccccaaaatggctttagcgtaaaatggaaaagatggtaaattattctggygtgagggctaccctgttgttagagttaagaaagtgcatggctgctgtttaagaacctttgatttgagttgaatcccagcctgcactcttttttgcagtgt

SEQ ID NO: 481197 - DNA, 201 bp, Homo sapiens
ccaggctggtcttgaactcctgacctcctcatccacctgcctcctaaaatgctgggattacaggcgtgagctaccgtgcctggcctggtgttttttttttktttgtttgtttgtttgtttttttttttgtatttttagtagaaatggggtctcgccatgttgtctgggctggtcttgaactcctgggctcaagtgatcctc

SEQ ID NO: 481198 - DNA, 201 bp, Homo sapiens
ttatacttaaggcatttcagcacattttgaaagccagacttttaatgatataagcttaccctaggtctcctgcccattctctttgtgcgttgtcccaggtmggtgagacaagtctttgtgaactggttgagtgagttgtcagggaccttgatggtatgagaggaactaagtgtaatctgcacagcaaatagcactgatgct

SEQ ID NO: 481199 - DNA, 201 bp, Homo sapiens
acactgtcttccttccatctcagcttagacaagcccttcttgatctcctcctatcacattgtgtcatccagtactgtttatctgtcattttgtaccactgygcctgtgtttattttagggcaaggactattttattgactaaccctagagtctgtgcatggtaggtatggatgatttagtaaacacataaaatatgtcatt

SEQ ID NO: 481200 - DNA, 201 bp, Homo sapiens
ttgaattccctcagctgtcccagtggcgctgggctgggagaggcagttgctgcattatttatggagcaccggtcaccagccgtgctgatgagctacacacagttattctctgcaccatgtgtgggatgccgtcctgggcctctgttcaataggaaacaaaacgaagccaaacaaccctaagccagaatggctgttggccga

SEQ ID NO: 481201 - DNA, 201 bp, Homo sapiens
agtgggtgcttcatgaaggataggacattttaaaaaggaattattttgatggccctggttcatggcatgtaggggatgtcattggttggtttggatggagkaagatggttcagagagcggggcaggcaggggttttccaggataaagagccatgtggacgacagagaggtgggagagggatgatgtgatgctctcgggcct

SEQ ID NO: 481202 - DNA, 201 bp, Homo sapiens
cgctctccatttgccttggggtgagagctctgcctaccccccagcatggctttcctgaagccatttccaggcctggcctcctcctgcctctcttgctctarcctaatcctctcactgccatgccacatccctggcactctggccacactggactccttagagaccctccaggcacgcactgttctcttgtactgccaggcc

SEQ ID NO: 481203 - DNA, 201 bp, Homo sapiens
gttgaattccctcagctgtcccagtggcgctgggctgggagaggcagttgctgcattatttatggagcaccggtcaccagccgtgctgatgagctacacacagttattctctgcaccatgtgtgggatgccgtcctgggcctctgttcaataggaaacaaaacgaagccaaacaaccctaagccagaatggctgttggccg

SEQ ID NO: 481204 - DNA, 201 bp, Homo sapiens
acgtacaagaaaattttagaaaggcaaacttagtaaacatctgtccaaatcatttggagcaaagcactagctccttagatcttccagccatgacactgttrtgttagtgtaaaatgacactgaggatgtgcaaaagttactgaatctaagattgctttgcatctgttttcctgtgttccttggaacctgctttttgtattt

SEQ ID NO: 481205 - DNA, 201 bp, Homo sapiens
tgttgaattccctcagctgtcccagtggcgctgggctgggagaggcagttgctgcattatttatggagcaccggtcaccagccgtgctgatgagctacacacagttattctctgcaccatgtgtgggatgccgtcctgggcctctgttcaataggaaacaaaacgaagccaaacaaccctaagccagaatggctgttggcc

SEQ ID NO: 481206 - DNA, 201 bp, Homo sapiens
tgtgcaggctgggcaggggctgggtgcgggctgctgactcaccagctgcagtgaacaggacctgccttgggagacctttcctagtgttggggcagcgtatrtcaggctctgtgaccgtcaccatggagatgtgattcttgttgccttttccttttgtctgttgcagtagaggctggtgtgatgcccctaggaagaaacctg

SEQ ID NO: 481207 - DNA, 201 bp, Homo sapiens
gtgttgaattccctcagctgtcccagtggcgctgggctgggagaggcagttgctgcattatttatggagcaccggtcaccagccgtgctgatgagctacacacagttattctctgcaccatgtgtgggatgccgtcctgggcctctgttcaataggaaacaaaacgaagccaaacaaccctaagccagaatggctgttggc

SEQ ID NO: 481208 - DNA, 201 bp, Homo sapiens
acatcagctttactgctagactgcgttcctcaacgctttggtctctttctgtctatggcccacccctcactcagtgcctgcgcatagtaggtgcccattcrtggcccagtcagggtgattggcatcgtacattgagtcatcaaagcagagttgaattctacttgctagtcacccttctaaacacttgttgttttccccatc

SEQ ID NO: 481209 - DNA, 201 bp, Homo sapiens
tgtgatatgtttttaaaagatgacagttaaaatgataaagactggttattcggatgattcactttggaaaggcccctggttcttcccagatggaggggggyggccttgtggtgtggtgtctgggagagagaaccctcccctcaggcaggctgtggcctctgtgtgttacgatggaaactacctgtccagcctccagcagga

SEQ ID NO: 481210 - DNA, 201 bp, Homo sapiens
tggccctggctgtctttcaataaaactttacttacagaaacaggcagtgggccggatttggcctgctgccatagtttgccagctcttgatttagggtttgrtctaaatggaaatggttattgttaatactattatttttggaaagtttatgaaggatggcaggttgcccacaacagatagaaagggaaactctctgttttg

SEQ ID NO: 481211 - DNA, 201 bp, Homo sapiens
ccgagccacccaccagaccgttggatgagccatgtcactgtgtcagaggctgtgtgcttttccgctttttagtttgcacccccacccccctgcccttgatkgagaatgtgctcctgagcaatgcgatgattttggaaacctagaatgaacagattcatttgaagatgctttggaatttttaaatttgcataatgaaatgag

SEQ ID NO: 481212 - DNA, 201 bp, Homo sapiens
tttttagtagagacagggttttgtcatgttccccaggctggtctcgaactcctgagctcaggtgatccatctgcctcagccttccaaagtgctaggattayaggagtgaggcactgcgcccagcctcgtgctttctttttcatgtggttgggggtcctgaccatttccagggtggtattacaatccctctgggccatctgc

SEQ ID NO: 481213 - DNA, 201 bp, Homo sapiens
gtaaatggcacaggcaaaaaagtttgtgttttgcagccattttcaaggctaacataaggtatcaggacgctgctcagtgacttatgtgtgaccagggtctmtaatgattggagaggggatatttgtctcgtgtgaacagagtctgatctctgtgaagacttgtgataccagaaactggttgcttctccatttcctccctct

SEQ ID NO: 481214 - DNA, 201 bp, Homo sapiens
atctcaatcttacataaagtacaaataaaatctataaaaatgattgctatttataataataggcaacatagctaaaaactgtggttattatgtaagcatawcttcaagataaattttccagctcctaagccctcctatacacagattttagagctgccattgccctagtgggaggtgatgtaaaaaaaatattgttttaaa

SEQ ID NO: 481215 - DNA, 201 bp, Homo sapiens
agatcatgccactgcactccagcctgggtaatggagtgagactctgtctcaaaaaaaaaaaaaaaaaatcagggtaattgggatatctatcacctgaaatrtttgtcttcttattactacttaccaaactctttagcctcaaactgaaaacaattttttttcaaattaaaaacatcatataaaaggcccttcttttaggtc

SEQ ID NO: 481216 - DNA, 201 bp, Homo sapiens
gcttttgcagcctagcattttagattctgtaacaggtgtatttcattcatgtccttgatcgctctatttgtaccattaggactcaggatgagacagataaraacacacaaaaatctagactcacctctgagtttcttccagaagctcaaggggtctccctctaattaagaggaatatgccctggccacggacatgaagttg

SEQ ID NO: 481217 - DNA, 201 bp, Homo sapiens
tctgtgtgcctctccacaggactgggctctctctcgcttttgcagcctagcattttagattctgtaacaggtgtatttcattcatgtccttgatcgctctrtttgtaccattaggactcaggatgagacagataagaacacacaaaaatctagactcacctctgagtttcttccagaagctcaaggggtctccctctaatt

SEQ ID NO: 481218 - DNA, 201 bp, Homo sapiens
tattttaaaagcatttatatgcaaaccaggcactatgctaagtgcttgacacaaacttatttaatcttccaaccacccagcgaggtagtcttagtaactaktataattcccattttacagatggggaaactgaggtgctgcgcggttaagccatttgcccatgtcatacagctagtgagaagcatagctgggagttagttg

SEQ ID NO: 481219 - DNA, 201 bp, Homo sapiens
gggaagcagtagggatgattggatagaccatttttctgagtttccataaaatgaagaacccttttaaaataaggatctcattgggttgtatctatttatgygtccctcatatttgactgcaaacctgttgagatacagactatgacttattcatgtctgaagccccaaaacgtagtgcctagaacataggagatgtttaaa

SEQ ID NO: 481220 - DNA, 201 bp, Homo sapiens
cattggttgaccatgtcagtaagatggtttctgatgtttccacccgccctgtgtcttgacagatttgcagccagattcagatatggcagtgggctccttcrtgttggaaaggttgtgttgttccactccgtctgtctggatgcttcctagggcgtgtcccacctctggcctccagttgaggttttctagtctggagagaca

SEQ ID NO: 481221 - DNA, 201 bp, Homo sapiens
gagatcagcccaagattgtgtgggggctctggggagggcctctgattcccatttagggtgggagtacagagtccaggaaggcttttgatctgggtgacacyctcgctcggaactgagttttattttgcttattttaaaagcatttatatgcaaaccaggcactatgctaagtgcttgacacaaacttatttaatcttccaa

SEQ ID NO: 481222 - DNA, 201 bp, Homo sapiens
ggagacgtcggtccctgcctgctttgccctgtcagacttgcacctgcagatttgagtttgtgtctatgcaccacacttagaggaagagtagagagacacgmtgagtgtctctgggatgcagtcagggtgtgaagcagggtcccggggagaagtggggttggatgtgaaactggattttgaaaagacttccatgtggaagca

SEQ ID NO: 481223 - DNA, 201 bp, Homo sapiens
caggcaggcaggtaattagagttcagtgtaatccacaccaccatagagatcagcccaagattgtgtgggggctctggggagggcctctgattcccatttarggtgggagtacagagtccaggaaggcttttgatctgggtgacaccctcgctcggaactgagttttattttgcttattttaaaagcatttatatgcaaacc

SEQ ID NO: 481224 - DNA, 201 bp, Homo sapiens
tcataacatttacgctctgttctgcaaaaataatccccaggtgtttagtcttagttttgttttgttttattttattttatattattttattttttgagacrgagtgttgctctgttgcccagtctggagtgcagtggtgcgatctcagctcaccgtaacctccatctcccaggctcaagtgattctcatgcctcagcctcc

SEQ ID NO: 481225 - DNA, 201 bp, Homo sapiens
gttttcagaagattaagtcaaatgagaataggaatggggtgaacagagcgcttgagttcccgttcgtgttgcgctccctgcgtgatggagagagggctcarggaggcggagctggatggggaggcggctgcaggccccctctgcctgctcacagctgtgtggccctgggtgggtcagtacagctggacacacctgagtttc

SEQ ID NO: 481226 - DNA, 201 bp, Homo sapiens
tgggttcttcccatgggccgaatgtggcagtcctgccttaaccttttgtgtgaggacacctgtgatttggccccagctaagtggcccgctatgtgtccagygctccctaactcggactcccaggcttccttgacacagcctgtgctcctcacttttgttgtttgtcctgtcctgtctctgccattgctgcctactgaaatc

SEQ ID NO: 481227 - DNA, 201 bp, Homo sapiens
gccacacaaggcttttcaggctctggaatatggctacacctcagcgccctctcgccaggcaagaaaaatgacattcaatggaaagacacttaaaaaaaaaatggctatggaaatgacaaacacagttatcactgtgacactggtggcctttgactctttactggctaccagggcatcgttcctagcagcctggggtgggag

SEQ ID NO: 481228 - DNA, 201 bp, Homo sapiens
ctgtttgtttattagggaaggagagggtggggtccttggctaggacatttgtaagtcagatacattgaggcctgggggagggaaagttgctttattagggkcatcttttcccatctacatcctttgagtttcctcctttttctggggcaaccaccaaaagtggccatcctgtgcctctagtctgccctgtggcagcagctt

SEQ ID NO: 481229 - DNA, 201 bp, Homo sapiens
ccacatcagctttactgctagactgcgttcctcaacgctttggtctctttctgtctatggcccacccctcactcagtgcctgcgcatagtaggtgcccattcgtggcccagtcagggtgattggcatcgtacattgagtcatcaaagcagagttgaattctacttgctagtcacccttctaaacacttgttgttttcccca

SEQ ID NO: 481230 - DNA, 201 bp, Homo sapiens
aatgctgcttcttcctgcctttaaaatcaggaaagggggcaaagctgattgattacaagtaaaatgaaaaaatactgtttctgctaagacagaaagggacytttaatacgcgcccttttaatctgattgtcagaagtaggacagtgcacagtttctcaaagatggccagaggatctgataaaatacaaaagaattgtggag

SEQ ID NO: 481231 - DNA, 201 bp, Homo sapiens
ccacccttatggagctgtatttagagcttgcagtgaagttgcaggaaatggagaagttgagtttttttcttgctaagtaaatcgcccctgagttcattacraaggtcagctggcccagcaggacctatttgcattctgtatttgcaaaccctactgtttgtttattagggaaggagagggtggggtccttggctaggacat

SEQ ID NO: 481232 - DNA, 201 bp, Homo sapiens
cctaagcagttgttggctctgacttcttggtttcatggtgagggagttcaaggaggacacagcataggttgtgaaaaaaatctctgttctgtctctcagcyggtgattgtttacagacattttggtttgcttgtttgttaataagaaacccgtggtcatctggtttccaaagcagctctctgcttccattctggttcttcc

SEQ ID NO: 481233 - DNA, 201 bp, Homo sapiens
atgaaagaatgcagttattttagttcatgcagatgaagcgaagaatttttttttttttttttttttgagatggagtttcactctcgttgcccaggctggastgcaatggtgcgatcttggctcactggaacctccacctcccgggttcaagcgactgtcctgcctcatcctcccgagtagttaggattacaggcatgcgcc

SEQ ID NO: 481234 - DNA, 201 bp, Homo sapiens
accttgtagtcacttttggtaaaatattaacattcatgaaagaatgcagttattttagttcatgcagatgaagcgaagaatttttttttttttttttttttgagatggagtttcactctcgttgcccaggctggagtgcaatggtgcgatcttggctcactggaacctccacctcccgggttcaagcgactgtcctgcctc

SEQ ID NO: 481235 - DNA, 201 bp, Homo sapiens
ggattgtcttacccctaacagagagaaagtcttgctccattcaatggggtttccccattaggctttagtgtatttccccagatgatacttgaattacatcyggatgtgtgtgtgctgttccctgtctaacctcggcagccttcatcaatgccggtgaattatgcgatggtggtggcggcggcgggagcagcagcagtgggg

SEQ ID NO: 481236 - DNA, 201 bp, Homo sapiens
aagaagcccgacatggaaatcacagatgatgcattttgggtgtgatttatgcaacaaagatagcatgagacactggtcagcatatttggttttttttttgktttttttttttttgtagtacaaccatctacgtttgagcctacgccaggcagacccttgcaaagaccacacagacagcaaatgtgggagctgggctttgaa

SEQ ID NO: 481237 - DNA, 201 bp, Homo sapiens
tttgatggccctggttcatggcatgtaggggatgtcattggttggtttggatggaggaagatggttcagagagcggggcaggcaggggttttccaggatawagagccatgtggacgacagagaggtgggagagggatgatgtgatgctctcgggcctttgcctgtggacaccaggggtcactgcccagagtgttagccata

SEQ ID NO: 481238 - DNA, 201 bp, Homo sapiens; identical to SEQ ID NO: 365163

SEQ ID NO: 481239 - DNA, 201 bp, Homo sapiens; identical to SEQ ID NO: 364806

SEQ ID NO: 481240 - DNA, 201 bp, Homo sapiens
caggtggaggttgcagtgagccgagattgcgccattgcactccagcctgagtgacagagtgagacctctgtctcaaaaaaaaaaaaaaaaaaaaaaaaaaaggaaaaaaaggaaaaattagctgggtgtagtggtgcatgcctgtaatcccagctactcttgcgaggctgaggcaggagaatcgagatggcgccactgcac

SEQ ID NO: 481241 - DNA, 201 bp, Homo sapiens
tcgaactcctgacctcaggtgatccacccaccttggcctcccaaagtgctgggattacaggtgtgagccactgaacccagcctttttttttttttttttttgtatttttagtagaaaaataaaaagtacaatgtgctgcacacatcgggggttttgctgtgttacccaggctggtctccaactcctgggctcaagcattct

SEQ ID NO: 481242 - DNA, 201 bp, Homo sapiens
ttttgaatgccttttggtttaaaaccttgatggagaagtatcaagcccgttgtgggtaggtctcttgattgattgtgtgtgttcggaatagatcttaaagyacccctcttagattattactgcgaagagacgttgtaaaaaataaatcagtgatttttgtagtggccaaatgtttgaaaagttgatccagttaacacaagt

SEQ ID NO: 481243 - DNA, 201 bp, Homo sapiens
tctcactctgtcgccgcgtgatcatatctaactgcagccttggcttccttccacctcagcctcccaagtagctgggactacaaccgcgcaccaccatgccyggctaattttttgtatttttagtagagacggggtttcaccatgttgaccaggctggtctcgaactcctgacctcaggtgatccacccaccttggcctccc

SEQ ID NO: 481244 - DNA, 201 bp, Homo sapiens
ctgataccccttccccagggctccccacccccacccctcacattccaggctggagctaaaaatagctgtgttgggaggtggggtgcaccacagctctgggrtctgctataaatatcacagccagcactcaccctgccctggtccctacccttgcccagtcctgggcactcctgcagacagtggggttggtcccctagtatc

SEQ ID NO: 481245 - DNA, 201 bp, Homo sapiens
agcccgccgggcctccttccttccccagaaaccctccaggcctgggagaggacgcgttttgcattcaggaaaaaccaatcgctcccctatcgtacataacsaagagaaaaggtggcggacgaggggcgtggcaaagtgattagtgcggcctggaccctgcgtgccttgcgcgctgcgggctctttgcgtctgcgtagttcg

SEQ ID NO: 481246 - DNA, 201 bp, Homo sapiens
ggcgtgctttcggagaggaggcctgggtttgaggagctttttagcgtccccagaggaaattagtttatcagggcgcactgtacagacccaaacgggtgttrcagtggtgtagggagaaggctctcattgcattctcctttagctatgctgggactgggctgtgcggcgccctcctcctaggttatttgagaaagttgtttt

SEQ ID NO: 481247 - DNA, 201 bp, Homo sapiens
gccctctggcaaagggagcacacttccgttagttttgtatttgtatggacttttatacctatgacgtttctggttctgttaatcttgtttttccgactgaytgaaacttcatctctgttatcatttgtgtattttcttagaaaaagcttgtggtgaaggggggcaaaaaaaagaagcaagttctgaagttcactcttgatt

SEQ ID NO: 481248 - DNA, 201 bp, Homo sapiens
tatcagggcgcactgtacagacccaaacgggtgttgcagtggtgtagggagaaggctctcattgcattctcctttagctatgctgggactgggctgtgcgrcgccctcctcctaggttatttgagaaagttgtttttccgtgttcttcgtcccaagatcctacttttcctcttttgttgggactccctggttaacatttcc

SEQ ID NO: 481249 - DNA, 201 bp, Homo sapiens
agttttgtatttgtatggacttttatacctatgacgtttctggttctgttaatcttgtttttccgactgactgaaacttcatctctgttatcatttgtgtrttttcttagaaaaagcttgtggtgaaggggggcaaaaaaaagaagcaagttctgaagttcactcttgattgcacccaccctgtagaagatggaatcatgg

SEQ ID NO: 481250 - DNA, 201 bp, Homo sapiens
gggtggtttggaagtactaatgcatagatgaagcgaatcaaaatgtcagaagttcttgacggtagtgttgtaataagattctaggttttagccttaacctygtccaagctggagtggacaggcacctagaatactttgcaactcccttcatgagaaggtggatgagacaggattaagggagatgagctaagacggatcagg

SEQ ID NO: 481251 - DNA, 201 bp, Homo sapiens
tgaaaattgtgggtatgcaaggcattttgtatgcctgcactctaattttggaaaaatagtatttttttgaaattgggaatgttagggcaaacaaaaggaartgttcattttattgtggttcataaactaagagaccttcatgcctgtagagattggggagactggaaagtttgagtgagtcaagagtgctagaatgatttc

SEQ ID NO: 481252 - DNA, 201 bp, Homo sapiens
ttgaatgccttttggtttaaaaccttgatggagaagtatcaagcccgttgtgggtaggtctcttgattgattgtgtgtgttcggaatagatcttaaagtayccctcttagattattactgcgaagagacgttgtaaaaaataaatcagtgatttttgtagtggccaaatgtttgaaaagttgatccagttaacacaagttt

SEQ ID NO: 481253 - DNA, 201 bp, Homo sapiens
gcaatctcggctcactgcaagctccgcctcctgggttcacgccattctcctgcctcagcctcccgagtagctgggactacaggtgcccgccaccacggccrgctaattttttgtatttttagtagagacagggtttcaccattcacaggatggtctcgatctcctgacctcgtgatccgccccaccttggcctcccaaagt

SEQ ID NO: 481254 - DNA, 201 bp, Homo sapiens
gttatttgagaaagttgtttttccgtgttcttcgtcccaagatcctacttttcctcttttgttgggactccctggttaacatttccggttcttctgctctwtctgtctggttgggcttttgaatgccttttggtttaaaaccttgatggagaagtatcaagcccgttgtgggtaggtctcttgattgattgtgtgtgttcg

SEQ ID NO: 481255 - DNA, 201 bp, Homo sapiens
gaatgatgcattagtttcccggtaggaggtgagtgcttcattcatccattcattcatgtctgcatctgttcaactagtatttacagagcatctaccatggrcacatagaagggaacacaccagccaaggttagtcaagtacacagattaacaaataatgacaggctgcattaactgcttggaagaaaatcataaggatgat

SEQ ID NO: 481256 - DNA, 201 bp, Homo sapiens
aagttggagccttactctcctggcacctgggtcccagctcgggcagagccaaccttgggcccgggggatggggtctggggggttttggggaactttgggasacttactggcacagcgggcaggtgaggcggccgtcggtcgcgcggccacgcaggcagccggcacagaagtcgtggaaacagtccagaagacacgggcgct

SEQ ID NO: 481257 - DNA, 201 bp, Homo sapiens
cccaggctggagtgcaatggcgccatctcagctcaccacaacctccgcctcccgggttcaagcgattctcctgcctcagcctcccgagtagctgggattayaggcatgtgccaccgcgcctggctgattttgtatttttagtagagacggggtttctccatgttggtcaggctggtctcgaactcccgacctcaggtgacc

SEQ ID NO: 481258 - DNA, 201 bp, Homo sapiens
agcctcccatgccaaggaggtgggaggtgccctggaaatagctgcctcatgccacttaggccatgactggatttaatgtcagtggtgtgccacagtgcagwggctagacaactgaaaggggctaccaaggctgggaaaaaaatgcaattgttgctgtgagtgactttgaaagactctggtgccttgtggtgcccttctgaa

SEQ ID NO: 481259 - DNA, 201 bp, Homo sapiens
ccaagactcggggacgaatccgcggaagggcggcttggtcggcgtgctttcggagaggaggcctgggtttgaggagctttttagcgtccccagaggaaatyagtttatcagggcgcactgtacagacccaaacgggtgttgcagtggtgtagggagaaggctctcattgcattctcctttagctatgctgggactgggctg

SEQ ID NO: 481260 - DNA, 201 bp, Homo sapiens
aaagtaaagccaacccctttatttatctttgggctcgtccagtctggcttcccccctccgatcgttcgcagtgggacagcccgccgggcctccttccttcmccagaaaccctccaggcctgggagaggacgcgttttgcattcaggaaaaaccaatcgctcccctatcgtacataaccaagagaaaaggtggcggacgagg

SEQ ID NO: 481261 - DNA, 201 bp, Homo sapiens
caagcgggcggctggggcacgcacggagccccgcttgagctcccgcggcccctctgcccgggcgcccgcgccctccctatcgcgcctggacccgactgggygtccagaggtcatggagtggggagccgctagggcccaggttagggctggggcctggagctccccggcgcagggagaacaggcagtgaggactggcgaggg

SEQ ID NO: 481262 - DNA, 201 bp, Homo sapiens
tatctcaccaaaaaatatttgaagaagaataatctacgtgactggttgcgcgtagttgctaacagcaaagagagttacgaattacgttacttccagattamccaggacgaagaagaggaggaagacgaggattaaatttcatttatctggaaaattttgtatgagttcttgaataaaacttgggaaccaaaatggtggttt

SEQ ID NO: 481263 - DNA, 201 bp, Homo sapiens
cactccagcctgggcaacaagagcgaaactctgtctcaaaaaaaacaaacaaaagaaaaccaacatactaaatcaagtggtgggaaattttaaggtatgttagtacaaattggttgtagttaatgcttttatgtttagctatgtccgtgaagaagagactttgaagcttaagtgaagtcctcacagtctgcctgggaagca

SEQ ID NO: 481264 - DNA, 201 bp, Homo sapiens
cgccgcctcatttcctcggcggccaattgggggcgccagagagcagcggacgcccctccaccgactttccagcgcttgggaggcggagtgagacgccctgyaatcccagccctgcctttcgctggttgtgagctcttggccatgttactgacctctcagagcctcagcgctgggttaaaatagaactggtgtcctgataat

SEQ ID NO: 481265 - DNA, 201 bp, Homo sapiens
agttctagaccagctgaccaacatggagaaactccgtttctactaaaaatacaaaattagctgggtgtggtggtgcatgcctgtaatcccagctactgggkaggctgaggcaggagaattgcttgaaccagggaggcggaggttgcggtgagccaagatagcaccattgcactccagcctgggcaacaagagcgaaactct

SEQ ID NO: 481266 - DNA, 201 bp, Homo sapiens
tcagcctctggaatagctggcaccacaggcatgcaccaccatacctagctaatttttaaatttttttgtagaggaagggtcttcctaagttgcccaggctygtcttgaactcctgggcttgagcaatcttcctgccttggcttcccaaagtgccgggattacaggtgtgagctactgcacccagccagttaacatattttg

SEQ ID NO: 481267 - DNA, 201 bp, Homo sapiens
ttcgctcacctccctttctaactccgctgccgccatggctcctgtggttagtatggctccgcgtgaggcctcggctccaggggaggcacgtgggcctcgcsgagcccggcatctacccaggctcgctggggacggcgccctgcagcgtcctgctggggtgggctggcaggtcggccggagcgggccagagcccctgccgat

SEQ ID NO: 481268 - DNA, 201 bp, Homo sapiens
gcttgagccaggaggttgaggctgcagtgagctgtgactgcacctctgcagtcccacctgggtgatagagtaagaccctgtctcgaaagaaaaacaaaaawagaaaagctgggaaaagttccaagcagaggcaagagcaagtgcaaagccccagaaatgggaagacatttagagactagcagatcaatgtggctggagatg

SEQ ID NO: 481269 - DNA, 201 bp, Homo sapiens
cgccatggctcctgtggttagtatggctccgcgtgaggcctcggctccaggggaggcacgtgggcctcgccgagcccggcatctacccaggctcgctgggkacggcgccctgcagcgtcctgctggggtgggctggcaggtcggccggagcgggccagagcccctgccgatcccagcacgttgtaggcggaggaggccgcg

SEQ ID NO: 481270 - DNA, 201 bp, Homo sapiens
cctcttggccctctggcaaagggagcacacttccgttagttttgtatttgtatggacttttatacctatgacgtttctggttctgttaatcttgtttttcygactgactgaaacttcatctctgttatcatttgtgtattttcttagaaaaagcttgtggtgaaggggggcaaaaaaaagaagcaagttctgaagttcact

SEQ ID NO: 481271 - DNA, 201 bp, Homo sapiens
aatccttccgccacattttgactcagcagtttggttttgacattttattctttttcctctaatagccatgtttgggggattcagacttcgtatttgtgtgyagaagtctcctaaatttgcatttgctctaaattctccagaaggttgaactattgccaggatcagtatcattacaacaaaaataatttttaaacacaaaat

SEQ ID NO: 481272 - DNA, 201 bp, Homo sapiens
cgccgcgcggccccgcgcgccaggcccctgcgctcaccagcaccgcctgctccagccgctcgcagccctgcacgtaagccgattccaggtccacgcagtgygcccggctctccctgcagaaggcggcgggtgaggcccgctccagcggcccccagccccctcccctcgcgtcccctgtacgcacttctgcatgtcgcggaa

SEQ ID NO: 481273 - DNA, 201 bp, Homo sapiens
ttgtttaagacaggatctcactctgtcgccgcgtgatcatatctaactgcagccttggcttccttccacctcagcctcccaagtagctgggactacaaccrcgcaccaccatgcccggctaattttttgtatttttagtagagacggggtttcaccatgttgaccaggctggtctcgaactcctgacctcaggtgatccac

SEQ ID NO: 481274 - DNA, 201 bp, Homo sapiens
aaaaaaaaaaaattgtaaagtcagctggggccaggtgggatggctcatgcccgtaatcctagcactttgagaggctgaggtgggaggatcacttgagtctrggaggtcgagacttgagcttgggaggttgagactgcagtgagctgtgattgcgctggtgagactctgtctccaaaaccaaaacaaaaaatgatattagtt

SEQ ID NO: 481275 - DNA, 201 bp, Homo sapiens
tgcgcggggcctccctctgccgtggcctctcctacctctcctcactcccaccctcggaattccccgccgggtgtcctctgggtgacccgcaggcgacgccycttccggcatccaccttccccagggtggctgctgccttgaggcgcggcggggccgaaccgacctccgcgctcgccatctgctttgcgcactggttccggc

SEQ ID NO: 481276 - DNA, 201 bp, Homo sapiens
ccccagaggaaattagtttatcagggcgcactgtacagacccaaacgggtgttgcagtggtgtagggagaaggctctcattgcattctcctttagctatgytgggactgggctgtgcggcgccctcctcctaggttatttgagaaagttgtttttccgtgttcttcgtcccaagatcctacttttcctcttttgttgggac

SEQ ID NO: 481277 - DNA, 201 bp, Homo sapiens
agcagagtttctttcaaacttcactgaggcatcagttgctctttggcaatgtcccttaaccatgattattaactaagtttgtggcttgagtttacaaattytacttgttgcattgatgttcccatgtagtaagtcatttttagtttggttgtgaaaaaaccctgggctgaagttggcatttcagttaaaagaaaaaaagaa

SEQ ID NO: 481278 - DNA, 201 bp, Homo sapiens
aatttccttatttcttttttcttcccaagactttcaaaaagtaaagccaacccctttatttatctttgggctcgtccagtctggcttcccccctccgatcrttcgcagtgggacagcccgccgggcctccttccttccccagaaaccctccaggcctgggagaggacgcgttttgcattcaggaaaaaccaatcgctcccc

SEQ ID NO: 481279 - DNA, 201 bp, Homo sapiens
tcactgaggcatcagttgctctttggcaatgtcccttaaccatgattattaactaagtttgtggcttgagtttacaaattctacttgttgcattgatgttmccatgtagtaagtcatttttagtttggttgtgaaaaaaccctgggctgaagttggcatttcagttaaaagaaaaaaagaaactagtcccagatttgaaaa

SEQ ID NO: 481280 - DNA, 201 bp, Homo sapiens
cccctgcctgctcgctgcactccaggtcacagttggcacagcgcaccgcctccacgccatcccctgagctgtccaccaggaactgcagcagccggtccacyggcgggagcccgctgggacccttcagcaccgtctggtgtctgcagagaagcccaggccccgagattctgataccccttccccagggctccccacccccac

SEQ ID NO: 481281 - DNA, 201 bp, Homo sapiens
cttccattttctagttactcttaaatgctgccttcacaaggttaatttggctgttaatagtgattagaatttttatcacttaattgataattttaagcctrctaactagggttccctatgaaattgaaagtaaaagtctaagaataatgcctgctggctctcgagatacttgccctacttaaaaatctataatttaaaatt

SEQ ID NO: 481282 - DNA, 201 bp, Homo sapiens; identical to SEQ ID NO: 205007

SEQ ID NO: 481283 - DNA, 201 bp, Homo sapiens; identical to SEQ ID NO: 205010

SEQ ID NO: 481284 - DNA, 201 bp, Homo sapiens
attacgagcgtgagtcacagcacccggctaagtaatttctatttattgtgccaaaacatgtcaaaatcatgacctctttgaatggtatatttgagaggatrttcatttcattggttaaccatggactactctgtccacgtagtgaaaacatgcaccagtttttacctattatcatggtagtatcatctgccaaaatttcaa

SEQ ID NO: 481285 - DNA, 201 bp, Homo sapiens
tgagtgtcatagcagaatattttacagactttctatgagattatttttatggtacaaagtatttacatttccctcatgtttatcattatgccaattttacrtggcagtcatgccactgactctgctatttagctaagtaatttcttttttcggagactgtctcactctgtctcccaggctggactgcagtggtgcgattct

SEQ ID NO: 481286 - DNA, 201 bp, Homo sapiens; identical to SEQ ID NO: 205015

SEQ ID NO: 481287 - DNA, 201 bp, Homo sapiens; identical to SEQ ID NO: 205022

SEQ ID NO: 481288 - DNA, 201 bp, Homo sapiens
tgctaggtactgtgcttagataatctgtgtataatagtgttaatcctcaaaatttgggtgttatacccctattatagataaggaaactgaggctcagagamaaagtaactttgtcactgtcacaaagctagtaagtaacagaggtaggatttatattcaaaaccctgtgtgttcattggaaccgtatcaggcttggggcta

SEQ ID NO: 481289 - DNA, 201 bp, Homo sapiens; identical to SEQ ID NO: 204962

SEQ ID NO: 481290 - DNA, 201 bp, Homo sapiens; identical to SEQ ID NO: 204991

SEQ ID NO: 481291 - DNA, 201 bp, Homo sapiens; identical to SEQ ID NO: 134565

SEQ ID NO: 481292 - DNA, 201 bp, Homo sapiens; identical to SEQ ID NO: 134567

SEQ ID NO: 481293 - DNA, 201 bp, Homo sapiens
ccaagtgctgggatgacaggcgtgagccatcacgcccagccttaaatacgaatacttgaatggagggaaacacacacacagggaagcctgagaggaaaacrtacttctgaatagaaaagtttggttttggctttttaatttccaagtttccctcatcttcatggccttaacacttaaagttactgctataaatcttatttc

SEQ ID NO: 481294 - DNA, 201 bp, Homo sapiens
ttgaacccaggaggcagaggcaatgagccaagatcccgccactccactccagcctgggtggctgagagactgtgtctccaaaaaaaaaaaaaaaaaaaaargaaagagaatctggagattgtgccttatgccaagcttagcattataaagactgtatttaaattttagcaagcatatttttttacctttaaatctggaaag

SEQ ID NO: 481295 - DNA, 201 bp, Homo sapiens
ctcatgggaacaagatgattgcaagaggcccacacaccatgtcctagccgggcatggtggctcacacctgtaatcccagcactttgggaggccgaggtggrcaaatcacttgaggccaggagtttgagaccagcctggccaacatagcaaaaccccatctctaccaaagtacaaaaattagccagacgtggtagcatgaga

SEQ ID NO: 481296 - DNA, 201 bp, Homo sapiens
atttaactaaatttgtgttgtaatttgaattgatttcaactctgcagtttgttttttgttgttgtgttttttgttttcttgttttgttttgttttgttttrtcttgttttgttttgttttgttttgttgagatggagtctcaatctgtcacccaggctggagtgcagtggcgtgatctcggctcactgcaacctctgcctc

SEQ ID NO: 481297 - DNA, 201 bp, Homo sapiens
ctctctcccagtgcttcatctctcccctgcattttatttaattttatttttttgagacggagtttcactcttgttgtcaaggctggagtgcaatgatgtgwtctcagctcactacaacctccacctcctgggttcaagcgattctcctgtctcagcctccgagtagctgggattacaggcctctgccaccatgcctggcta

SEQ ID NO: 481298 - DNA, 201 bp, Homo sapiens
gcactttgggaggccgaggtggacaaatcacttgaggccaggagtttgagaccagcctggccaacatagcaaaaccccatctctaccaaagtacaaaaatwagccagacgtggtagcatgagactgtagtcccagctacttggaaggctgaatcagaagagtggcttgaacccaggaagcggaagttgcagtgagccgaga

SEQ ID NO: 481299 - DNA, 201 bp, Homo sapiens
attaacccattcaaaggacttgtctctaaccaactggttatttctccttttctgcccaagactaatgcccttccagatgaggatcttcacctcagtcatcmcatcctctctcccagtgcttcatctctcccctgcattttatttaattttatttttttgagacggagtttcactcttgttgtcaaggctggagtgcaatga

SEQ ID NO: 481300 - DNA, 201 bp, Homo sapiens
attgcagtgagccgaggttgtgccactgcactccatcctgattgacagagtgtgactctttctcaaaaaaaaaaaaaaaaagtatgtatgtatgtatgtatgtatatatatatacacacacacacacacacacacacacacacatatatacatatgtatatatgatatatctttctagtggggtcacttaaaaatatttca

SEQ ID NO: 481301 - DNA, 201 bp, Homo sapiens
tcagcagggggcgctggctgtcaactgagagctcatctgtggctgtcaacaaagcacctattgtatggcttctgcgtggcaacctcaagagagtggcattyttcacaggggtggctgtctccctccagaatgggcagttcaacagaactaagtaggggctttagccttttatgtcctaactttgaaaatcagattcaagga

SEQ ID NO: 481302 - DNA, 201 bp, Homo sapiens
gccgaggttgtgccactgcactccatcctgattgacagagtgtgactctttctcaaaaaaaaaaaaaaaaagtatgtatgtatgtatgtatgtatatatayatacacacacacacacacacacacacacacacatatatacatatgtatatatgatatatctttctagtggggtcacttaaaaatatttcagcaatggata

SEQ ID NO: 481303 - DNA, 201 bp, Homo sapiens
tttcacaggggtggctgtctccctccagaatgggcagttcaacagaactaagtaggggctttagccttttatgtcctaactttgaaaatcagattcaaggrgaagggccaaggtacggtgtctcactcctgtaatcccaacattttgggaggctgaggtgggcagatcacctgaagtcaggagttcgagaccagcctggcc

SEQ ID NO: 481304 - DNA, 201 bp, Homo sapiens
cgaggttgtgccactgcactccatcctgattgacagagtgtgactctttctcaaaaaaaaaaaaaaaaagtatgtatgtatgtatgtatgtatatatatayacacacacacacacacacacacacacacacatatatacatatgtatatatgatatatctttctagtggggtcacttaaaaatatttcagcaatggataaa

SEQ ID NO: 481305 - DNA, 201 bp, Homo sapiens
ggctgtctccctccagaatgggcagttcaacagaactaagtaggggctttagccttttatgtcctaactttgaaaatcagattcaaggagaagggccaagktacggtgtctcactcctgtaatcccaacattttgggaggctgaggtgggcagatcacctgaagtcaggagttcgagaccagcctggccaacatggtaaaa

SEQ ID NO: 481306 - DNA, 201 bp, Homo sapiens
attttgagagactgaagcgggaggattgcttgagaccaggagttcaagaccaacgtggccaacatagcaagaccccatctcaaaaaaaaaaaaaaaaaaagaggaagacctaggatgtttccttaccttatcaatataaaggattttgaaagacatcaatggatggaccattataatgattaactgtctcttattctagat

SEQ ID NO: 481307 - DNA, 201 bp, Homo sapiens
gactgtctcccacaaaaaaccacaaaccggtgtaacaactattttacgtagcagttccactataaagtactagaggtaatctaaagtttatttcaagtatragagagatgtatatagggtttatgcaaatactgtgccatttttaaaaagggactttgagccgggcacagtagctcacgcctgtaatcccagcactctaga

SEQ ID NO: 481308 - DNA, 201 bp, Homo sapiens
aaacaaagtacaggattaagaaaaaaacacaagccagatgtgggtcacgcctgtaatcccggcactttgagaggccgaggtgggcagattacctgaggtcwggagatcagggccagcctagccaacatggcgaaaccctgtctctactaaaaatacaaaaattagccaggtgtagtggcgggcgcctgtaatcccagctac

SEQ ID NO: 481309 - DNA, 201 bp, Homo sapiens
tacctggttgtgaatggtgagggaggaaatttggaatctagttgttgtttatatatatattgactttcagttgatgctattttcagttccacctgaacttytaccttcagaagtacctgatgcctgcaatttctgaggctttccaaggtttcttggttagaattagcttgcttccgggtttcctgtacagctgccttagat

SEQ ID NO: 481310 - DNA, 201 bp, Homo sapiens
tcccttttctgcacccagtgaatcatttttagtttcagttactgtacaaaagtcaaactcccacttttgtactaccttcctccaggtctggagctcagtamtcctgtggcttctacctcactctgaccaccttgttttctcattctgcttctcttcctcagaaaaggtttattttgtgtttaagcccagcaaagtcttttt

SEQ ID NO: 481311 - DNA, 201 bp, Homo sapiens
aaataataattctggggatcccaacgataattcatctttaatttactgtttctcatagaggttataaatggggaatgttatttcatttgcggtattagtarggggcacatcccaatatttaatatatgatatccggctgggcatgatagctcaagcctgtaatctcaacactttgggaggctgaggcaggtggattacttg

SEQ ID NO: 481312 - DNA, 201 bp, Homo sapiens
ccctgcagaactacacctaagaatgcctgacagaccagcgtatatgccaatccaaaacaaaaactaaacaagtccatggaaacagccaatttgacagcacwtatacagcccaacgtttcattaatgacactatttaatgctattctatttaatgcttcagatggggaagaagttctgttcacctaccctgctttttcagca

SEQ ID NO: 481313 - DNA, 201 bp, Homo sapiens
gcctgggacgaggtggtgggctttctgctgatcatcctaatcctgctgacaggctatgccattgccgtaagcccccacgttgctgtctctccttctccgtrtgctgtggtcttggaatcgcatcgcttcccatagaaatggtcacaacacagaaacccgaggtggtacagtaggaaagccgggtttagttctagttccaca

SEQ ID NO: 481314 - DNA, 201 bp, Homo sapiens
tggctaatttttgtatttttagtagaggcggggtttcgccattttggccagactggtctcaaactacggacctcaagtgattcacccacctgagcctcccrtagtgctgggattacaggtgtgagccaccatgcccagcctctgcactatttacaaaaagctgagactatctaaataattattgactcagtataccaaccc

SEQ ID NO: 481315 - DNA, 201 bp, Homo sapiens
ttcatcagcttctatgaggcagtaaaagtgaactctgctgcgactcaccttgtgggcttcccggttctcctggcaactgttcagttatggaacctgctgcrtcatagccccaggctgcgggtcatcagcaggacactgagccgagcctgggacgaggtggtgggctttctgctgatcatcctaatcctgctgacaggctat

SEQ ID NO: 481316 - DNA, 201 bp, Homo sapiens
agcattgttgccttatcctgaagagcagaacagttacttcctagtaaaatagaatcctctagatataaagattaaaaataataattctggggatcccaackataattcatctttaatttactgtttctcatagaggttataaatggggaatgttatttcatttgcggtattagtaaggggcacatcccaatatttaatata

SEQ ID NO: 481317 - DNA, 201 bp, Homo sapiens
atccacaactcacaggaggccacaatagaaagcagttctcacatcaacaagcatttgacctcacaggactcagggctgccacgatcagcagcaggggcgckggggaaactgcagtataggcacatacttcttgctgagtaactgtcagctttccttggtgcagattcatcagcttctatgaggcagtaaaagtgaactctg

SEQ ID NO: 481318 - DNA, 201 bp, Homo sapiens
gaccacttcttgtatttttaatctttgctggtttagaaactatacattgtattttttcctctttctcctcttgcttttccacttcctgcttctgttcctcytcttcctcttctaattctttttattggttacttttaatttttaacacactttttctccatattaattttctaagaataacgtttcttctgcctgaacatg

SEQ ID NO: 481319 - DNA, 201 bp, Homo sapiens
tgcaatctgcagcaggtagatcacttgaatagtatgtggccttctgttactcccatatccacaactcacaggaggccacaatagaaagcagttctcacatsaacaagcatttgacctcacaggactcagggctgccacgatcagcagcaggggcgctggggaaactgcagtataggcacatacttcttgctgagtaactgt

SEQ ID NO: 481320 - DNA, 201 bp, Homo sapiens
ctccttctccgtgtgctgtggtcttggaatcgcatcgcttcccatagaaatggtcacaacacagaaacccgaggtggtacagtaggaaagccgggtttagwtctagttccacacttaactggtatgacttaaacccacatatttttctctaaaatggggataaaacttagctcacacggtaatataaaggtcaaatcaact

SEQ ID NO: 481321 - DNA, 201 bp, Homo sapiens
tcccatggagaggaacatctatgtttcccatgccaagtgttgccaagtggtgctttgctaacctttgcatcagtggccaacagcctgggtggtgatctgtstaacttttcctgaggcattgtttcaagtaggccttatggagagcagtttatgcagtgacagcggatctgtgcagagtgccacttgctagtgtctgtgggg

SEQ ID NO: 481322 - DNA, 201 bp, Homo sapiens
tttctgaagactacagacctgaactaagaccataacccatttgtccaagtgagatctgataaatgcctggcagtgtgctttgcccacagacatcagctgcrttcatcacacttgagcagggagagacctagctaatctctcagacaagcaacagtgactgtgctgtctatgtttagggttgtcagctgaaacagcagaagt

SEQ ID NO: 481323 - DNA, 201 bp, Homo sapiens
actgtgtctccaaaaaaaaaaaaaaaaaaaaaagaaagagaatctggagattgtgccttatgccaagcttagcattataaagactgtatttaaattttagsaagcatatttttttacctttaaatctggaaagttatgaattaaattgatcagtagtgacattgttggatatactgtgtttatgttcatttgttgattaat

SEQ ID NO: 481324 - DNA, 201 bp, Homo sapiens
gtattttttttttcattctcaggcttgataactaatttagaaatttttgctgggcatggtggctcacgcctgtaatcccagcaccttgggaggctgaggtrggcagatcacttgaagccaggagttcaagactagcctgggcaaaatgtcaaaaccctgtctctacaaaaaatacaaaacttagccgggcatggtggcatg

SEQ ID NO: 481325 - DNA, 201 bp, Homo sapiens
gatggtattaattggatatttggtctactcaccactcaaaaagaattgtcagtttgtcagaataacatgaaatatgaatcctcccttataggttatatgarataatatattctccttccctgtcaaattgtaactttttttttataaaatgcatttgaaatgtataaagaatattaagctgctaataagaagtatgcaaat

SEQ ID NO: 481326 - DNA, 201 bp, Homo sapiens
agtagagacagggtttcacaatgtcggccaggtaggtctcaaacttttgacctcaagtgacccacctgcctcagcctcccaaagtgctgggattacaggtrtgagccaccacacccggccaccatgtttattttagggaggatgaatcctaaaattagattgtggtgatggttgcacaatcctgtgaatatactaaaaaac

SEQ ID NO: 481327 - DNA, 201 bp, Homo sapiens
agtcaataatgttagatgtcagcctgggcaacatggcaaaacctcatctttaccagactacaaaaattacccaggtgtggtggcatgcacctgtggtcccrgctactcgggaggctgagatgtgagaattgcttgagcctgggaggcagaggttgcagtgagctaagatcacgccactgcacttcagcctgggcgacagag

SEQ ID NO: 481328 - DNA, 201 bp, Homo sapiens
ggccatgtaggcatttgggtgaaagtaatgtatcatgaaatgtaaactgaacagaccagatcagatgagagagtttatgtagcattcatttttattttacrctggcagggatagaggcctcttaaaaatgatccactgtagaagttgggaacattaaacagatttctggatttaactaaatttgtgttgtaatttgaattg

SEQ ID NO: 481329 - DNA, 201 bp, Homo sapiens
ctgggcagctgcagctctgcccaggagtgtggggctcccaaccctccaactcagaagggggcagggctcccacctgttactggctcccgcagctcaacagygcacaaagccccggccatgcctcccactgcagccgatgtcatggcagcagccactccagacagggtgctgctgccatcactaatattttgaagctttgtg

SEQ ID NO: 481330 - DNA, 201 bp, Homo sapiens
tttgagagactgaagcgggaggattgcttgagaccaggagttcaagaccaacgtggccaacatagcaagaccccatctcaaaaaaaaaaaaaaaaaaagaggaagacctaggatgtttccttaccttatcaatataaaggattttgaaagacatcaatggatggaccattataatgattaactgtctcttattctagatca

SEQ ID NO: 481331 - DNA, 201 bp, Homo sapiens
atcccagctacttgggaggctgaggcagaagaattgcttaagcctgggaggcagaggttgccatgagccaagatcgcaccattgcgctccaggctacagarcaagactgtcttaaaaaaaaaaaaaaaaaaaaaaaaaaaagacaggctgggcactcagtggctcatgcctgaaatcccactgtaatcctagcactttggg

SEQ ID NO: 481332 - DNA, 201 bp, Homo sapiens
tgagagactgaagcgggaggattgcttgagaccaggagttcaagaccaacgtggccaacatagcaagaccccatctcaaaaaaaaaaaaaaaaaaagaggaagacctaggatgtttccttaccttatcaatataaaggattttgaaagacatcaatggatggaccattataatgattaactgtctcttattctagatcatg

SEQ ID NO: 481333 - DNA, 201 bp, Homo sapiens
tgcctcttggtttgttggttggttggttgtttctttcagatggggtcttgctctgtcaccccagctggagtgctgtgacatggatcacagctcactgtagyctcaacctcgccagcctcaggtgatcctcccacctcagcttcctgagtagctgggactacaggtgtgtgccaccatgcctggctaattttaaaactattt

SEQ ID NO: 481334 - DNA, 201 bp, Homo sapiens
cccctgtaacgccagcactttgagaggccaaggcaggaggatcacttaagcccaggaatttgagactagcctgggcaacagagcgagactctgtctccacaaaaaaaaaaaaaaaattagccgagcgtggtggcgtgcacctgtagtcctaactacttgggaggctgaggcaagaggattgcttgagccaaggagttcaaa

SEQ ID NO: 481335 - DNA, 201 bp, Homo sapiens
gaggccgaggtggacaaatcacttgaggccaggagtttgagaccagcctggccaacatagcaaaaccccatctctaccaaagtacaaaaattagccagacktggtagcatgagactgtagtcccagctacttggaaggctgaatcagaagagtggcttgaacccaggaagcggaagttgcagtgagccgagatacagccac

SEQ ID NO: 481336 - DNA, 201 bp, Homo sapiens
tgcctcagcctcccaagtagctgggactacaggcatgcgcctccaagcctggctaatttttatatttttagtagagatggggtttcaccatgttgtccagsctggtctcaaactcctagcctcaggtgatccacctgcctcagcctcccaaagtgctaggattacagatatgagccaccacacccgctgattcattcattt

SEQ ID NO: 481337 - DNA, 201 bp, Homo sapiens
aaaataacattaatacaatcactgattttattccgatttcaccaggtttacaagcacatttctgtatgtgtgtgtattgagtcctgtgtgattttaccacmtgtgtagacacgtgaccataaaatcatttttttttaaagatggattataggatggataaggatatgtatgtaaggaagcagacttagtaggatgttaatt

SEQ ID NO: 481338 - DNA, 201 bp, Homo sapiens
cgtcaaaagcagcaggaagcctggtactgggaggcatagaaattcaagtgaaacttttcttaaatttatcttcgtgtctgctgactcaagacctgagaactttttctctctatttttttttcctttggttccaagattggaccttgcaggactccttttaggacaggaatgagccaaaagaaaacactagccaggtgtagt

SEQ ID NO: 481339 - DNA, 201 bp, Homo sapiens
gtcaaaagcagcaggaagcctggtactgggaggcatagaaattcaagtgaaacttttcttaaatttatcttcgtgtctgctgactcaagacctgagaactttttctctctatttttttttcctttggttccaagattggaccttgcaggactccttttaggacaggaatgagccaaaagaaaacactagccaggtgtagtg

SEQ ID NO: 481340 - DNA, 201 bp, Homo sapiens
ggattacaggtgtgagccaccatgcctgaccacttcttgtatttttaatctttgctggtttagaaactatacattgtattttttcctctttctcctcttgyttttccacttcctgcttctgttcctcctcttcctcttctaattctttttattggttacttttaatttttaacacactttttctccatattaattttctaa

SEQ ID NO: 481341 - DNA, 201 bp, Homo sapiens
aaagcagcaggaagcctggtactgggaggcatagaaattcaagtgaaacttttcttaaatttatcttcgtgtctgctgactcaagacctgagaactttttctctctatttttttttcctttggttccaagattggaccttgcaggactccttttaggacaggaatgagccaaaagaaaacactagccaggtgtagtggctc

SEQ ID NO: 481342 - DNA, 201 bp, Homo sapiens
acttcctgcttctgttcctcctcttcctcttctaattctttttattggttacttttaatttttaacacactttttctccatattaattttctaagaataaygtttcttctgcctgaacatgacaaagaattagcaatgctttaaccgttcttgagtaacctctctcccaattcccatgttttaaattactctctagtgtta

SEQ ID NO: 481343 - DNA, 201 bp, Homo sapiens
agcagcaggaagcctggtactgggaggcatagaaattcaagtgaaacttttcttaaatttatcttcgtgtctgctgactcaagacctgagaactttttctctctatttttttttcctttggttccaagattggaccttgcaggactccttttaggacaggaatgagccaaaagaaaacactagccaggtgtagtggctcat

SEQ ID NO: 481344 - DNA, 201 bp, Homo sapiens
agcagagatggtgccaccgcagtccaacttggcaacagagtgagaccatctccaaaaaaaaaaaaaaaaaattctcacaaaaccaagtttaggggaggatggggagcaactgaaacactcacacgcccctagtgagagtgtaaaatggtatggccacttcagagaacagcttgccagtttcttgtgaagttaaacatacac

SEQ ID NO: 481345 - DNA, 201 bp, Homo sapiens
ggcgtttcactctgttgcccaggctggtctcaaactcctgcgctcaagcagtccacctgcctcaccctcccaaagtgctaagattacaggtgtgagccacygtgcccgacttttttttttttttttttttttgagatagagtcttgctctatcgcctaggctggagtgcagtgacatgatctcggctcactgcaacctccg

SEQ ID NO: 481346 - DNA, 201 bp, Homo sapiens
tgagaaaggtttgcagtctggtgtctggtacatgaactcccttagaagttgggaagggaaagataagatctactctcttttctttttgttttttttgacasagtctcattctgtcacccaagctagaatgcagtggtgcaatttcaactcactgcagccttgacctcccgggctcaaacaatccttccacctcagcctttc

SEQ ID NO: 481347 - DNA, 201 bp, Homo sapiens
ttggctcatgcctgtagttcaagcactttaggaggccgaggcaggcggattacctgagggagttcgagaccagcctggccaacatagagaaatgccgtctytactaaaaatacaaatttagccgggcgtggtggcatatgcctgtaatcccagctgctcgggaggcggaggttgcagtgagccgagatcgcgcccttgcac

SEQ ID NO: 481348 - DNA, 201 bp, Homo sapiens
caatcccagaatgaaaatatttgaaaggtaacaataaaatataacacacattttaaaatacagtagaagagtcaggcatggtagcatgtacctgtagttcytgttacttaggaggccaaagtgaaaagattgcttgagctcaggagtgaggatgcaatgagctatgatcatcccactgccctctgagcgagactgtctccc

SEQ ID NO: 481349 - DNA, 201 bp, Homo sapiens
tgagcaaagaccaagccaccagctggatgatttcaattattttatcagtgcttcagaacatcttcatcagccagccagtaaaggtatgtgagggatgggamgaaccattggagttgcagaagttaggggaactgaggtccctgggtgtcaatccaaggtgcctagtggttttgacaatgtaacataaacaacaaaaaacaa

SEQ ID NO: 481350 - DNA, 201 bp, Homo sapiens
tcacttccttggagaaatccctgatagtgagcatagatcctgacagtccccttttaatgacactctacctggggttccagtatcagccgaactgcactcamttccacctgaacatcacccttccaaaggataaggtgtggcaaaaaggtaaaacccaatcagctgtcagaaacttactttgatttctttttgcctaggatg

SEQ ID NO: 481351 - DNA, 201 bp, Homo sapiens
tcacagtgaacgtcacttccttggagaaatccctgatagtgagcatagatcctgacagtccccttttaatgacactctacctggggttccagtatcagcckaactgcactcaattccacctgaacatcacccttccaaaggataaggtgtggcaaaaaggtaaaacccaatcagctgtcagaaacttactttgatttcttt

SEQ ID NO: 481352 - DNA, 201 bp, Homo sapiens
gctctggagaaatgttagcttggaaacccatcccaccagcctcaacatgagcacacatcagcttacaatcacagtgaacgtcacttccttggagaaatccytgatagtgagcatagatcctgacagtccccttttaatgacactctacctggggttccagtatcagccgaactgcactcaattccacctgaacatcaccct

SEQ ID NO: 481353 - DNA, 201 bp, Homo sapiens
gcacacacacccaggcttggccaaaactttgctccaaaatcagagcaggtgctgggagtggggagaggccatgcagtgggagcaggcacttctgaacctgyaggggcaggggggtttcctgagcccccgagtgcagggatgcccaggtctgcagctgtggctgggcagctgcagctctgcccaggagtgtggggctcccaa

SEQ ID NO: 481354 - DNA, 201 bp, Homo sapiens
agcgggaggattgcttgagaccaggagttcaagaccaacgtggccaacatagcaagaccccatctcaaaaaaaaaaaaaaaaaaagaggaagacctaggaygtttccttaccttatcaatataaaggattttgaaagacatcaatggatggaccattataatgattaactgtctcttattctagatcatgctctggagaaa

SEQ ID NO: 481355 - DNA, 201 bp, Homo sapiens
cagcccccaggcttcaaatgatccctggctttaaaggtggggctttactggggacctgcccctttctgcccaggagcctgtctgcctcctgctgccatccrtgtcacccatggtgcccaggctgtttgtgccaaggggcacctgcgggcccatgccaagccaccctcagcccccccttaccctccctgcctcacatgcttg

SEQ ID NO: 481356 - DNA, 201 bp, Homo sapiens
attataggcctgagccactgcgcctggccatggactcagtttttcttggtgatcttggcaatgatatgtcattcagagccggaaggggccttcaggaaccyttttttgagagacaggactatttgaaagatgagaaagctgaggcccagagagactggatgactcaccttagcccctaccagccagctggtgacagagcca

SEQ ID NO: 481357 - DNA, 201 bp, Homo sapiens
gtggatctgacaagtgtggataaaatagcgtgtggaagccataaaattctacaagtattaaatatgttgtgggtgggtaaaatgaaacctcttgctaaacraaggagaactttcatagctcaagaaatacattctcagattcttttacgttccaggccaggtgaggacaggttgtcacttttgtaattatcaccttgttcc

SEQ ID NO: 481358 - DNA, 201 bp, Homo sapiens
ccttagcactctgtctgactagaatcaacgtcttgattctaattccaggttgggccacagagcacaattctgaggacacagtgtctctgtaaccacctgascttctttgccagcgacttctttgtcgtgcccaggaccgtgaatgttgaagacacgatcaaactgttccttcgcgtgaccaacaatcctgttggggtgtca

SEQ ID NO: 481359 - DNA, 201 bp, Homo sapiens
gattttatgtgatcacagttgtgtgggctcggaaaaaggatcaagcagatatgcagaaggtaatgagactttgatttcaacagatttgccatgatgttttragtaattaaataagatgaaggaaaaaacaccttcgtcaaaagcagcaggaagcctggtactgggaggcatagaaattcaagtgaaacttttcttaaattt

SEQ ID NO: 481360 - DNA, 201 bp, Homo sapiens
acctgtaatcccagcactttgggaggccgaggtggacaaatcacttgaggccaggagtttgagaccagcctggccaacatagcaaaaccccatctctaccaaagtacaaaaattagccagacgtggtagcatgagactgtagtcccagctacttggaaggctgaatcagaagagtggcttgaacccaggaagcggaagttg

SEQ ID NO: 481361 - DNA, 201 bp, Homo sapiens
gttttgtgggtcagaaattcagtgaggccatggctggggagttttcccttgggatctttcatcctggctgggtctgttactcatctgtaagctcctctgtrttagatttccaaaaatgattcgctcacaaggtcagcagggggcgctggctgtcaactgagagctcatctgtggctgtcaacaaagcacctattgtatggc

SEQ ID NO: 481362 - DNA, 201 bp, Homo sapiens
agggggcgctggctgtcaactgagagctcatctgtggctgtcaacaaagcacctattgtatggcttctgcgtggcaacctcaagagagtggcatttttcayaggggtggctgtctccctccagaatgggcagttcaacagaactaagtaggggctttagccttttatgtcctaactttgaaaatcagattcaaggagaagg

SEQ ID NO: 481363 - DNA, 201 bp, Homo sapiens
tgcaggactccttttaggacaggaatgagccaaaagaaaacactagccaggtgtagtggctcatgcctataattccaacacttggggaggccagggcaggmggatcacttgagctcaagagttcaaggccagcctggccaccataacaagaccttgtctctactaaaaaaaaaaaaaaaaaaaagagcctggcatggtggt

SEQ ID NO: 481364 - DNA, 201 bp, Homo sapiens
gaggcagggaagttgaacccgggaggtcaaggctgcagtgagctgagatcacgccactgcactccagcctgtgcgaaggagtgaagactccatctcaaaasaaaacagagaaaacaaataagtcttgaaactaaaaatcatggactctcagcaagaagtgggaaaaaaaaaatgagatcctgtctctaaaaaacaaaccaa

SEQ ID NO: 481365 - DNA, 201 bp, Homo sapiens
aattagccggctgtggtggtgcatgtctgtagtcccaactactcaggaggctgaggtgggaggatcacttgaacctgggaggcagaggttgcagtgagccragaatgaaccactgcactccagcctgggcaacatagcaagactccgtctcaaaaaataagaatataactataatatacaagaaatttatatggcatgttt

SEQ ID NO: 481366 - DNA, 201 bp, Homo sapiens
gcccgcctcggcctcccaaagtgctgggattacaggcgtgagccaccgcgcccggccgtgtgtgtccatctttactcttgactcatagttagctatttaastggatagaaattttttgttatttttcccttaacactttgaagattttaatacattgtcttctgcctgtggagcagttcctaagcagaaacattgtgacag

SEQ ID NO: 481367 - DNA, 201 bp, Homo sapiens
tgttttcttgcacttggaaattctagaatacgccaagtgttcacttcttgttgccctgggtgtagggttgtcagcattagtaaacaaaaatacaggctacytagttaaatttgcattttaaatgaacagtgcatcgttagtgtaagtgtgccccaaattattcatagtttatctgaaatgcagatttagctgggtattctc

SEQ ID NO: 481368 - DNA, 201 bp, Homo sapiens
tgacagctatatggctggctagcaacacttccacttggcttgtaagaagacagcacagatgaatttatcttcttaattgaccctttaataaaatgtctttrgctctagtaataattcttgtcttgaagtatattttgtcctatatgagtatagccactccagcccttttttgattgctgtttacatggaataccttcttcc

SEQ ID NO: 481369 - DNA, 201 bp, Homo sapiens
agagaaaacaaataagtcttgaaactaaaaatcatggactctcagcaagaagtgggaaaaaaaaaatgagatcctgtctctaaaaaacaaaccaaaaatayatgttttaaattgtgtgttgcttgtgtataggaataaactggtagaaattttctctccttcaccaaaacttaaggggtagcgaatactatttcccctccc

SEQ ID NO: 481370 - DNA, 201 bp, Homo sapiens
tctccttcagttatgtaagtttttaccgtatagacatattttatatgtctattggatgtttattaggagcatttaagtgtagtgttatttcttctggatasttttttttttattatataggtctccctttgatcctgttgacactttgtatcttaaattccattttatattaactaaagaaagttgacatactgatattat

SEQ ID NO: 481371 - DNA, 201 bp, Homo sapiens
agcccttttttgattgctgtttacatggaataccttcttccatctttttagtccagtggcttgatcttggctcactgcaacctcctgggttcaagcaattstcctgccttagcctcccgagtagctagaaatacaggcatgtgccaccatgccttgctaatttttgtatttttttagagatggggtttcaccatgttggcc

SEQ ID NO: 481372 - DNA, 201 bp, Homo sapiens
tttaatacatgagtttaatatgtttacattaaccatgattaccaatccatttggacttaatttaccatattattttgcattatttgttataatccattctytttatctactttccacattgtcaaattgacaggttttgtagttttttttggttttttttttttaaggttctctgcctcttggtttgttggttggttggtt

SEQ ID NO: 481373 - DNA, 201 bp, Homo sapiens
tttgctatttgttttctatacgtattgtatcttttttgttcctctgtttctttatcactgccttttttttaatcaccatcacaaatggggttcaacagttrcccacacctactggcatagaatctcccagaggacatcactgccttctctgtgttaaatggatattttctagtctaccgtattcttttgtcgtatctttta

SEQ ID NO: 481374 - DNA, 201 bp, Homo sapiens
cagccagttttctgtatttcttatcattactctgggcttttttctccttgttgaagtagctcttttaatagttctaatgagaagtgtgtgtgtgtccatcttttttttttttttttgagacggagtctcgctctgtcgcccaggctggagtgcagtggcgggatctcggctcactgcaagctccgcctcccgggttcaagc

SEQ ID NO: 481375 - DNA, 201 bp, Homo sapiens
gctattgttgtcatacaaattacatcttcatgcattgtgtgtccatcatatagattcttaatcactgctgcatgtagttattttttaaggcagaagagttrcaatctatatatttatttatgtgtatgtttacactgtttttacaacttttaaaattacggtaaaaacacataacatttaccatcttcaccatttttaagt

SEQ ID NO: 481376 - DNA, 201 bp, Homo sapiens
gaagaaggaacggggagagtttcactgtgtttttcactttcagaggacacacaaaaattgacttccattttaacttttctcattagacaaaacatatcaastttaccgctgagctcttacactctgggtcacccagcccctgtgaggctaggctttccgtcggctttagctttgaaggagctcttgaataaacatccagga

SEQ ID NO: 481377 - DNA, 201 bp, Homo sapiens
attaggaacacaacatggtctttactgccaggataattttatctctagataaacgtagttaacttcctcagtaaatagttaaacctaggagaggaatgactttgcgattattttaattgttgaagatgaaagttgatgtcatgcttttctttcagtgcgtccatttgctgtggcctggtctgaactgctggtcagcatcca

SEQ ID NO: 481378 - DNA, 201 bp, Homo sapiens
aggtgttgaatagaggcttgggagttgctatgtcgcttgttgctgggcaaatcacatcttaaactggtgcactttcagaataaaatctcatgtatttcctyttctgatttctcttttcagacatctgttttcctccatgattgtggaaaagttcacccaggattatctgtggctttcaattgcaactcggcatccctggaa

SEQ ID NO: 481379 - DNA, 201 bp, Homo sapiens
ttaggaacacaacatggtctttactgccaggataattttatctctagataaacgtagttaacttcctcagtaaatagttaaacctaggagaggaatgactttgcgattattttaattgttgaagatgaaagttgatgtcatgcttttctttcagtgcgtccatttgctgtggcctggtctgaactgctggtcagcatccac

SEQ ID NO: 481380 - DNA, 201 bp, Homo sapiens
tgtagtaagcaatccttttttttttttgagacagggtcttgctctgttacccaggctggtctagaactcctggcctcaagtgatcctcctgcctcagcctyctgaagtgctaggattacaggcatgagtcaccatgcccagcctactatgcaatacttttactaaactccactacccttactttcaggattagaaagaaac

SEQ ID NO: 481381 - DNA, 201 bp, Homo sapiens
aagagccatccaggtaatgcaccacaccaagccttctttatcccctgtaatcttcctcatcctctatctcagccgatgcatacaagattattccctcaacwtttgtgcttcagggaagtcaccagttttgccatcctgagctcagaagaaggaaaaaagcccatctcaaatggcctgtccaaatggttgacttcagtctgc

SEQ ID NO: 481382 - DNA, 201 bp, Homo sapiens
gccaggcatggctgtggttgcctgtaatcccagctacttgggaggctgacacagaaggattgcttgaacttgggaggtgaaggttgcagtgagccaagatsaggccattgcactccatcctaggtgacaagagtgaaactccatctcacaaaaaaaaaaaaaaaaaaaaattccttcctttttaaagctaaatgatgggcc

SEQ ID NO: 481383 - DNA, 201 bp, Homo sapiens
ttatctggtgactgtacctaagtgggaaggaggtggaaggatttagaggcccaagacctgatcgggtgattctatgactgtttcacttgagaggcacaggmcctggaggttcaggcctcatccccactttagtgacttaggtctgctcatgtgtctgtctgctgcccacacctcagccctgctttctgcagggctgccaga

SEQ ID NO: 481384 - DNA, 201 bp, Homo sapiens
acttaggtctgctcatgtgtctgtctgctgcccacacctcagccctgctttctgcagggctgccagacacctgccggagttcatcctcctgctcctcagcyggaggaggcaggaactataccaagtggaggcctagtaagttgcatggttctgcttttcttgcaggtgaaggtcactgtcctggctgataatgaccccagc

SEQ ID NO: 481385 - DNA, 201 bp, Homo sapiens
atctttccctgtctcattgtaggttgtcatcaccctctatggatcagagggacggagtgagccccatcacctctgtgacccccagaagacagtctttgaaygagggggcctggatgtcttccttctcaccacttggacctctctagggaacctgcacagccttcggctctggcatgacaattctggcgtcagtccctcctg

SEQ ID NO: 481386 - DNA, 201 bp, Homo sapiens
ttactgtatgagatgtgcctaaggagttagagaaataactagacgatgataaagtccttgaacctaacgtgttaggtttgaatgattcagtatcttccttsagcagcacccagaattaggagaggtgctagagaaagtagatgatacaattaattaagaatgaggattactggttccttggagttaggaaaaaagagaaaa

SEQ ID NO: 481387 - DNA, 201 bp, Homo sapiens
ctcctatagttccagctacttaggagtctaaggtgggaggattgcttggcccaggaggtcgaggctgcagtaagccgtgattgcgccactgtactccagcytaggtgacagagtgagaccctgtctcaaaactaaaaaaaaaaaaaaaaaagcaaactgacatttaactgacatttgttagggataagtgtaattcatgac

SEQ ID NO: 481388 - DNA, 201 bp, Homo sapiens
cctgtgaagcggagatgagactaagtagagtgagaagtcattaatgtaaatgataaagactacaacccatttatgccccctgatgatgaaaggcagatggsatatttgaaaaggtggcaagccactgtcacatatgggacagagaaaggttataaaatgtgtagatacatacttatctattcataggtgagaaaggtttgc

SEQ ID NO: 481389 - DNA, 201 bp, Homo sapiens
ttttgggggtgatgaaactacttggtatcttgactgtagtggtggatatacaactctaagtattaaacaacactcatggaattacacaccaaaaagtgactttttttttttttttttttttttttttactatatgtaagttaagatataaattttttaaagcaaaacctgtaattgcagtggccaaaacacatgtaagaaa

SEQ ID NO: 481390 - DNA, 201 bp, Homo sapiens
tgccccctgatgatgaaaggcagatgggatatttgaaaaggtggcaagccactgtcacatatgggacagagaaaggttataaaatgtgtagatacatactkatctattcataggtgagaaaggtttgcagtctggtgtctggtacatgaactcccttagaagttgggaagggaaagataagatctactctcttttcttttt

SEQ ID NO: 481391 - DNA, 201 bp, Homo sapiens
ggaaacaaacctttagtcatggggtggtagaaggcaagataggtagcaaatacctggttgtgaatggtgagggaggaaatttggaatctagttgttgtttwtatatatattgactttcagttgatgctattttcagttccacctgaacttctaccttcagaagtacctgatgcctgcaatttctgaggctttccaaggttt

SEQ ID NO: 481392 - DNA, 201 bp, Homo sapiens
tggtgcaatttcaactcactgcagccttgacctcccgggctcaaacaatccttccacctcagcctttcaagtagctcaggactacaggtgcacaccaccaygcccagctaatttttatatattttgtagagttgggattttgcgacgttgcccaagctgtgctcaaatgcctgagctcaagcaatccacctgcctcagcct

SEQ ID NO: 481393 - DNA, 201 bp, Homo sapiens
gctgctcgggaggcggaggttgcagtgagccgagatcgcgcccttgcacttcagcttgggcaacaagagtgaaactgcatctcaaaaaaaaaaaaaaaaaagaaaaaaaaaagtgattggccaggcacagtggctcacgcctgtaatcccaacattttgggaggccaagatgggttgatcacctgaggtcaggagttcaag

SEQ ID NO: 481394 - DNA, 201 bp, Homo sapiens
ctggaggctgaggagagagaatcctgtgagcccaggagttggaagctgcaataagccatgatcatgccactacactccagaccctatgtctatttaaattaaaaaaaaaaaaaaaaaaaaaaggccaggtgcggtggctcatgcctataatcctaatactttgggaagccgaagccagcggatcacttttgaggtcaggag

SEQ ID NO: 481395 - DNA, 201 bp, Homo sapiens
ataagactacataatattctatagccattgtcctataaatagttggctcgcaaccattagtggaaacactccaatgcctgactgcaaattattaaagaaayagtatctttacatttactaattttttaaaaatctttggtactttttttactccactattagcagtaatttcaattttctcacttttctctttttgtcttc

SEQ ID NO: 481396 - DNA, 201 bp, Homo sapiens
ctgggactacaggcgcccgccactacgcccagctaattttttgtatttttagtagagacggggtttcaccgttttagccgggatggtctcgatctcctgamctcgtgatccgcccgcctcggcctcccaaagtgctgggattacaggcgtgagccaccgcgcccggccgtgtgtgtccatctttactcttgactcatagtt

SEQ ID NO: 481397 - DNA, 201 bp, Homo sapiens
cctgcccctttctgcccaggagcctgtctgcctcctgctgccatccatgtcacccatggtgcccaggctgtttgtgccaaggggcacctgcgggcccatgscaagccaccctcagcccccccttaccctccctgcctcacatgcttgtccgtgtccaaagttcggagaaggccgaggcagtagggggctgcttgtcagcac

SEQ ID NO: 481398 - DNA, 201 bp, Homo sapiens
cctgcctcaccctcccaaagtgctaagattacaggtgtgagccaccgtgcccgacttttttttttttttttttttttgagatagagtcttgctctatcgcytaggctggagtgcagtgacatgatctcggctcactgcaacctccgcctcctggattcaagtgattctcctgcctcagcctcctgagtagctgggattaca

SEQ ID NO: 481399 - DNA, 201 bp, Homo sapiens
agcccatctcaaatggcctgtccaaatggttgacttcagtctgctggctcctcttaggtttcactagcctggcttcagccttttttacagcactttatagsttggaattgagcaaagaccaagccaccagctggatgatttcaattattttatcagtgcttcagaacatcttcatcagccagccagtaaaggtatgtgagg

SEQ ID NO: 481400 - DNA, 201 bp, Homo sapiens
taaattttttaaagcaaaacctgtaattgcagtggccaaaacacatgtaagaaattcagtttcactagtccaataaaatgataatattgcatttttgtttkaataatggcaaagaaaaataataatacacagtaatgccaaggaaatgaacagccagtgctcgttaaggaaaatctggcaatatgtagtgacaacctgcaa

SEQ ID NO: 481401 - DNA, 201 bp, Homo sapiens
attcctctgttagtttccacatttagtcaccatgctggagagtgcctaccctctaactggctaaggctaactggcctaccctctaactgactagggctaacttatcacctggatgaacctcacaaacacaatcttgggcaaaacaagaggttgcagaaaaattggcacaatatcttaatcatgtaaaaacgatgcatgtct

SEQ ID NO: 481402 - DNA, 201 bp, Homo sapiens
tcccaaagtgctaggattacaggtgtgagccactgtgcccagccacagccattgtatcttattttaagtaaaatgtatcattagtggcagaataattctgkgaaggaaatgtgtatgtatgtatttataattattagattgaaccatatgaaacagccagtttttgactggttttgacctgcataagtctatagacttagg

SEQ ID NO: 481403 - DNA, 201 bp, Homo sapiens
acttgtggtaattaatcttttcgtttcggccattctcatggcctttggaaaagaaagaaagtcgcttaaggtaggtaactaaaagataaactagcatgctrttatatcactgggaaagctccactgtaactgcccctaagatgacgggctgacataatttataatgcacagtatcatattccctttattagtttcaaaagc

SEQ ID NO: 481404 - DNA, 201 bp, Homo sapiens
attatctggttgacctgaaattgttataataatcatttttaagtaggtaaaacagtttggtgcttgaaaatattttgccatatagatttccatcagggtgrcattgactgtaatcaacccctctgttgggatatttttaaacagtgccctagtggcaacaatgaatgggccaataccaagggaaaataaataccatttgtt

SEQ ID NO: 481405 - DNA, 201 bp, Homo sapiens
tcagtccctccttcctcacttcttgtgtccttaatcttattggcaaaggacactgagccgaagcttgtgctcttgtgcttggccagattaacaagattctstgcttctcaatggccccttgaaagtgcattaacagggtagggtaagttggttcaagccatgagaggccaagaaggggaggactgcttgaggccaagaatt

SEQ ID NO: 481406 - DNA, 201 bp, Homo sapiens
catttaatcaagatttcttgaatatgtggttgaattaggctgtgagtgaggtattctccagaaatggaccatgtagttggcattaatggtgattgtctcarggttggacttcgagttcaagtgcagtagccacttaagctttgggaccgcggccatttgctcagtctgtttcttagggcagggaggttttctgcttcccac

SEQ ID NO: 481407 - DNA, 201 bp, Homo sapiens
tgtcacgcatgctgggcaatctctggcagaaacaacttcaagcccaaaggaagaaggtcatccgaataccttcacctcttatctacaagtgtcattgcagraggcatctggtcaggtaaacatgggaaattcaagtcacaggtagctttgtgacccccaaaaagtacttggttcacccatttgcctccctgcagaactaca

SEQ ID NO: 481408 - DNA, 201 bp, Homo sapiens
attctccagaaatggaccatgtagttggcattaatggtgattgtctcagggttggacttcgagttcaagtgcagtagccacttaagctttgggaccgcggscatttgctcagtctgtttcttagggcagggaggttttctgcttcccacctcttgctatgagtcattttaagtcattacctcttgaatatggactcttttt

SEQ ID NO: 481409 - DNA, 201 bp, Homo sapiens
aaacaatccttccacctcagcctttcaagtagctcaggactacaggtgcacaccaccacgcccagctaatttttatatattttgtagagttgggattttgygacgttgcccaagctgtgctcaaatgcctgagctcaagcaatccacctgcctcagcctcacgcagtgctgggattgtaggtgtgcatcaccatgtctggc

SEQ ID NO: 481410 - DNA, 201 bp, Homo sapiens
gaaggctgaggcacaataatcacttgaacccaggaggcagaggcaatgagccaagatcccgccactccactccagcctgggtggctgagagactgtgtctscaaaaaaaaaaaaaaaaaaaaaagaaagagaatctggagattgtgccttatgccaagcttagcattataaagactgtatttaaattttagcaagcatatt

SEQ ID NO: 481411 - DNA, 201 bp, Homo sapiens; identical to SEQ ID NO: 144807

SEQ ID NO: 481412 - DNA, 201 bp, Homo sapiens
aggcatctaagttaataataatagtagtaataataataaatagggcggatgtaaagaacacgcatgtcgatacttctgaaacatgctttaaccttaactgytgtatataagcacttatgtaatttgagtgcttctctgtctcactgtggcaggaattgtagatgggctcacgcaaaccccccctttccatcttcttcctac

SEQ ID NO: 481413 - DNA, 201 bp, Homo sapiens; identical to SEQ ID NO: 144809

SEQ ID NO: 481414 - DNA, 201 bp, Homo sapiens; identical to SEQ ID NO: 144810

SEQ ID NO: 481415 - DNA, 201 bp, Homo sapiens; identical to SEQ ID NO: 144811

SEQ ID NO: 481416 - DNA, 201 bp, Homo sapiens; identical to SEQ ID NO: 144812

SEQ ID NO: 481417 - DNA, 201 bp, Homo sapiens
gctaggattacaggcgtgtatcaccctgcccagcttttttttttttttttttttttttttttgagatggagtcttgctctgtcgcccaggctggagtgcartggcgtgatcttggctcactgcaatctccgcttcccgggttcaagcgattctcctgtctcagcctcctgagtagctgggactacaggtgcctgccaccac

SEQ ID NO: 481418 - DNA, 201 bp, Homo sapiens; identical to SEQ ID NO: 144813

SEQ ID NO: 481419 - DNA, 201 bp, Homo sapiens
gttgggcggagcttgggttgggagtgagacagcatagcagtccaggctggtcctttgagcgcagctcaaagaaggggacggggagggcgtcactatacaaytgtggccgggtgggacctgggctgtttgctcttggaggctgtacagctgcaagctttgccgctcacgaactggagctggagaaagagccccccaaggatg

SEQ ID NO: 481420 - DNA, 201 bp, Homo sapiens
acttgtttttccatttgattgtatcttggatgtctttttacgtcagcatatatggatttattgtattcttttactagttagttacaaattacttatcccaycttatggagaaaccctatgttttttgacctagtctggtgattttaaggagccccctgattattatggtcttttatagcacagttctcttctttttcctaa

SEQ ID NO: 481421 - DNA, 201 bp, Homo sapiens
aaatctattctatatactgttttttcaacttgtttttccatttgattgtatcttggatgtctttttacgtcagcatatatggatttattgtattcttttastagttagttacaaattacttatcccaccttatggagaaaccctatgttttttgacctagtctggtgattttaaggagccccctgattattatggtctttt

SEQ ID NO: 481422 - DNA, 201 bp, Homo sapiens
atgtacaaatatatatatctgtcttttatatttttctttacacagctgaaaatctattctatatactgttttttcaacttgtttttccatttgattgtatyttggatgtctttttacgtcagcatatatggatttattgtattcttttactagttagttacaaattacttatcccaccttatggagaaaccctatgttttt

SEQ ID NO: 481423 - DNA, 201 bp, Homo sapiens
atgaggtttccctgctgtgggagaatgtggatactttgtagtttactttctcgatattttttttctgagatcttccccttgttgttaatactaattttgtrctctcacaagcaccctccccaagcccttatactgcgctctgcccctcacttagggcctgagctatggaattggccctagggcagcaggaacctattgttt

SEQ ID NO: 481424 - DNA, 201 bp, Homo sapiens; identical to SEQ ID NO: 144821

SEQ ID NO: 481425 - DNA, 201 bp, Homo sapiens
cgcgatcttggctcactgcaagctccgcctcccaggttcacgcctttctcctgcctcagcctcccgagtagctgggactacaggcacccgccaccacgccsagctaattttttgtatttttagtagagacggggtttcaccgtgttagccaggatggtcttgatctcctgacctcgtgatccactagcctcggcctcccaa

SEQ ID NO: 481426 - DNA, 201 bp, Homo sapiens
ggatcgcttgaacccgtaagagcaagattgcagtgagccgagatcatgcccctgcactccagcctgggtgacagagtgtctaaaaaaaaaaaaaagttgatgtactatgaacttagatatacaattgcttcttggccttttgactaacatcaagtgtaaacttgttttctccgtattttcctgtgctgatgcatttggaga

SEQ ID NO: 481427 - DNA, 201 bp, Homo sapiens
gagagtagtggttctcccagaatggagtttgagatctgagaacggacagactgcctcctcaagtgggtccctgacccctgagtagcctaactgggagacamctcctagtaggggctgactgacacctcatacagctgggtgcccctctgagatgaagcttccagaggaaggatcaggcagcaacattggcctttctgcagt

SEQ ID NO: 481428 - DNA, 201 bp, Homo sapiens
aatggagtttgagatctgagaacggacagactgcctcctcaagtgggtccctgacccctgagtagcctaactgggagacacctcctagtaggggctgactracacctcatacagctgggtgcccctctgagatgaagcttccagaggaaggatcaggcagcaacattggcctttctgcagtaattgctgttctgcagccta

SEQ ID NO: 481429 - DNA, 201 bp, Homo sapiens
actgaggtacccggttcatctcactggggcttgtcagacagtgggtgcagcccacagaatgtgagctgaagcagggcggggcatcacttcacccgggaagygcaaggggtcgggaaattccctttcctagccaagggaagccatgacagacggtacctggaaaatcgggacactcccaccctaatactgtgcttttccaat

SEQ ID NO: 481430 - DNA, 201 bp, Homo sapiens
caagaccttgtctcaaaaaaaaaaaaaagaaagaataaccagtataattaattataattacctgcctcaaaattaataattaataagtctaattaataaartaagtctcaaaatcaataactaattaatataataatgataatttctgaagttgagtatactagtttctaaaaattaagagagtggtgactctgacaacta

SEQ ID NO: 481431 - DNA, 201 bp, Homo sapiens
gatcctcagcttcatgtgtggtcttctgggaatggccctggttgcttgcgcagatgctcctttcccaagcgcctcctataatctgttcttctcttgctttrcaaaaggagtgcatacccttaatctgccctgaattgcccctgggaggcaaaacctctggggcaccaaacaaagggacactttcaaatatggacttctgaa

SEQ ID NO: 481432 - DNA, 201 bp, Homo sapiens
ttgtctgtgggagtttattcatctgtctctcctatttacctctcccaaaccaggatttccacttctcaaacctgctgtgatctcacaactggagggaggargtgagctggggggctcatctccactggctgcaggaacaggcctccagggcctccagactggtaagggaggtacatatttcccactctgttggaatttagc

SEQ ID NO: 481433 - DNA, 201 bp, Homo sapiens
aagcaagtcagtaacagttgagaccactgttatctgcctttttccagtcttttgaggaaatattctcaaagcaaggggtcagcagtcagtggtcttcaaaktgggaagagtaaagtggacagttctaggggactccagttttagatcctcagcttcatgtgtggtcttctgggaatggccctggttgcttgcgcagatgct

SEQ ID NO: 481434 - DNA, 201 bp, Homo sapiens
ggctcaggcctgtaatcccagtgctttggcaggtggaggtgggagagtcacttgaggctaggagttggagaccagcctgggtaagacccctgtttctacaraaaaacctttttaaattagccgggcgtggtggtatgtgcctgtagtcccagctacttgggagtctgagatgggagaatcgcttgagcccaggagtttgag

SEQ ID NO: 481435 - DNA, 201 bp, Homo sapiens
cccaaccaggtcacctatttgctgtgtgatctttggccagtctcgccctgggcctccgtgccccacacctgttgcacaaaggtgagacttgcctttgaggracagttgagagggaaacagaagatccaggcagcaaagtcattcagaaaggtaaaagtgctattcaaaacctaagtagtactgctaaccttcatgctgaag

SEQ ID NO: 481436 - DNA, 201 bp, Homo sapiens
cttggttatccatggcccaaaaatattaaacagaaaattccagaagtaaacaattcctgggttttcaattgcatgtcattctgagtagtgtgatgcaaccyctccctgtcccgctctgtcctgcctggtacgtgagtcacacctttgttcagcatttccacactgtcgatgctacccacctgtcagtcacctggtagctgt

SEQ ID NO: 481437 - DNA, 201 bp, Homo sapiens
atcttgactcactgcaacctccactccctggttcaagcaattcccttgcctcagcctcctgagtagctgggattataggtgctgccaccacgcccagctattttttttttttttgtatttttagtaaagatggggtttcatcatgttggccagactggtcttgaactcctgacttcagggaagccacccgccttggcctcc

SEQ ID NO: 481438 - DNA, 201 bp, Homo sapiens
aaaaaaacttgccttacagattcctctgctgttaggagcagccatgtgacataattttggccattaagaatgtaagctctatgaggacaagggtttttttwatttttctattttgttctctgctggtcaaaaactcatcatattgtacactctaaacatctctggtctattgtacattaattttaaacccaataatgtata

SEQ ID NO: 481439 - DNA, 201 bp, Homo sapiens
aggataaataactttgtccaaattattttgttatgttagtcacagaagcacgtcttttcacactccatgcctctctaagacctgctgtttcttctagaatrttctcctccccaccttactcccattccacctgccaaaaattcagccttctaaaccctgttcagatatgcctttcctgtgcaaccttcccttctccccgtg

SEQ ID NO: 481440 - DNA, 201 bp, Homo sapiens
aaatattcatcaagttttacacttaagatttgtactctttactgaacttaaattataccttatctgggcacagtggcacatgcctatatacccagctattkgagaggctgattggggagaatcacttgagctcagaagtgcaaatccagcctgggcaacatggagagacccctactctaaagaaaaaaaaaactaaataaa

SEQ ID NO: 481441 - DNA, 201 bp, Homo sapiens
taaaaaattatttgtattaacattaaaaacagaatttccactaggagaccacagaggacacatgtatctagtagcctagttaagtatgtggctggggtggygagaatatcatctttatgaaaggtcagtgttcacatgggattgtgtgtttgaggcacactaagaaaattaattttgtcaaagaagagggtttctgtagag

SEQ ID NO: 481442 - DNA, 201 bp, Homo sapiens; identical to SEQ ID NO: 144828

SEQ ID NO: 481443 - DNA, 201 bp, Homo sapiens
gagggccatatagtctggttaatatcagagtgaaagctggaaatgtttaggaaggagggagccagaataatctggaagcagcaatgaggaacaagaaaacytattccattgtggagtgtaagaaacagccaccacttgagaggactgcagagaaagcagtgtcttcaagggagacctagtttcctttagagcaagaaagtg

SEQ ID NO: 481444 - DNA, 201 bp, Homo sapiens
aggactttgggcagaggtgtaactggaagcactagaactgggcagtcggtagttttgcttttatgcacaaagagatgattcaggtgctggcacgacacagygagatggcacaaggcttcatcatgctactcagaatagtatgtaataaatgaactgtttatttctgtaattttcccatttaatattttcaaatcgtggttg

SEQ ID NO: 481445 - DNA, 201 bp, Homo sapiens; identical to SEQ ID NO: 144843

SEQ ID NO: 481446 - DNA, 201 bp, Homo sapiens; identical to SEQ ID NO: 144844

SEQ ID NO: 481447 - DNA, 201 bp, Homo sapiens; identical to SEQ ID NO: 144845

SEQ ID NO: 481448 - DNA, 201 bp, Homo sapiens; identical to SEQ ID NO: 144846

SEQ ID NO: 481449 - DNA, 201 bp, Homo sapiens
cttcctcaatggcccgtgagtggcagagcttgtgaaaggaagttgattcactgcgagtgaaccagaactcagaaagaccagtaagcatccaggaaacaccrgccaccatctaggcctgtggtgatggcggttttatcacgaattccttcctgacaatcaactgctcccgggcagaagcgatcgctttcttgacccacccaa

SEQ ID NO: 481450 - DNA, 201 bp, Homo sapiens; identical to SEQ ID NO: 144848

SEQ ID NO: 481451 - DNA, 201 bp, Homo sapiens
agccttgacctcccaggctcaagtgatcctcccaactcagctagtagctgggactacaggcgtgtgcccacacctggccaatttttgttcctttttggaatttttttttttttttttcggtagagacagggttttgtcatgttgcccaggctggtttgaactcccaggctcaagtgatctgcccacctgggcctcccacag

SEQ ID NO: 481452 - DNA, 201 bp, Homo sapiens; identical to SEQ ID NO: 144849

SEQ ID NO: 481453 - DNA, 201 bp, Homo sapiens
cgccaccacgcctggctaattttgtatttttagtagagacagagtttctccacgttagtcaggctggtctcgaactcccaacctcaggtaactccccccayctcagcctgccaaagtgctgggattccaggtgtgagccaccacgcctggccaacaaaaaagattttttttaacatgagaagattgtcagctttccctggt

SEQ ID NO: 481454 - DNA, 201 bp, Homo sapiens
gtgggcgagcctttaatgataatgcaaatctgatcaggcatcagagaatccacagtggggacagaccctattactgtacagagtgtgggaatagtttcacsagtagttccgagtttgttatacatcagagaatccacactggggagaaaccctatgagtgtaatgagtgtggcaaagcttttgttggtaattcacccctac

SEQ ID NO: 481455 - DNA, 201 bp, Homo sapiens
tgatctttgccgatttccatcagctaagtccgctaagcacaaatgacaagaacctgtggtgcttgccttgacttgatttcaattgtgtggctcttcctccyttcctgtttctctctggcagagagaagagaaatttctcttcctccagtgaaggactttgggcagaggtgtaactggaagcactagaactgggcagtcggt

SEQ ID NO: 481456 - DNA, 201 bp, Homo sapiens; identical to SEQ ID NO: 144850

SEQ ID NO: 481457 - DNA, 201 bp, Homo sapiens
agtgttgaggtaatttattgttaacaacaagaacaatacatagcttccttgtcttttaaatctttcaaatacaaataattcatgttaacaaaaatttataygatgtaagaaagcttcccagaagagcctctcttagccatttgggcccacaataaattatcatccttggaatctctggattttgaggcagagtgatagaga

SEQ ID NO: 481458 - DNA, 201 bp, Homo sapiens
cacgagtagttccgagtttgttatacatcagagaatccacactggggagaaaccctatgagtgtaatgagtgtggcaaagcttttgttggtaattcacccytacttcggcatcagaaaatccacactggagagaaaccctatgagtgtaatgagtgtggcaaaagctttggaaggacttcccatctaagccaacatcagcg

SEQ ID NO: 481459 - DNA, 201 bp, Homo sapiens; identical to SEQ ID NO: 144851

SEQ ID NO: 481460 - DNA, 201 bp, Homo sapiens
ctgtccctcccttctgccaaaaacaaaaaaggacccaccttgcaagacgggcttgagaaagcactcgctcccaggaagctgtgaaagtaacagctttaacrctgctgagactcaaggggtggggagactgcttgaggtgggctgggagaagcaaatgaggaagcattttcccccagactggaggcatcctggcatgttgac

SEQ ID NO: 481461 - DNA, 201 bp, Homo sapiens
gaaatgccatggttcttggtcataagacacactgcagagatctctcagtaggaaaacagggctggcccttttctttggtgatgaacacaaactgcaccctktttttctcccacgtgtccttccgctgccagccagtgttggaatctccctacccaattccagacttaattgcttactgcgtctagcacctgggtggcttca

SEQ ID NO: 481462 - DNA, 201 bp, Homo sapiens
aaagtttttattatttatttatttatttttgcagagacaaggtcttgaaatgttgctcatggctgagcacagtggctcatgcctgtagtcccaacactttkggaggccgaggcgggtggatcatatgaggtcaggagtttgagaccagcctggccaacatggtgaatgcctgcctctgctaaaaatacaaaaattagctgg

SEQ ID NO: 481463 - DNA, 201 bp, Homo sapiens; identical to SEQ ID NO: 144852

SEQ ID NO: 481464 - DNA, 201 bp, Homo sapiens
tgaaaacgccaccaaagggtggtgagaagggagaatctatgtttggcacaggaaccacgaaggtgccagatgggtgacctcaagcagcagctgattagagwgggctgaattatagatgtcccccaaatcggtaccatgtagcctcgtagagacaaaatgggaaattctgagggggaaaaaaaccagatagatactaattta

SEQ ID NO: 481465 - DNA, 201 bp, Homo sapiens
ctcaacttgccgcacatagcaactacgtttttttttttgttttttttttttttgagacagagtcttgctctgttgcccaggctgcagtacacactggcgcratctcggttgactgaaacctctgcctcccgggttcaagtgattctcctgcctcagccccctgagtaggtgagactacaggcgcacaccaccacgcccggc

SEQ ID NO: 481466 - DNA, 201 bp, Homo sapiens
ttctgtaaccttataagaatggaagaacaggggctgacagacaagaactgatctccatctctccagacctaccatagagcttttgaaacttggtttgtgcattattatctcatttttctgatatgtctgaagtaggagtaggagctttgtggttatttagagagctttattttctcaactgtaaaattaggcaatgggttt

SEQ ID NO: 481467 - DNA, 201 bp, Homo sapiens
tagaattttataagcagggcttataattaggaaaaagctaacatttcctagggattaggagaatagacctttcaaagtgacaccctccctccctccatccygcttggggccagttctgtgtcctgtgcggggcttggtgactctggaccctccttgcctgccaactgctgctggcctgaagcccgtttcctccccaagctg

SEQ ID NO: 481468 - DNA, 201 bp, Homo sapiens
tctgtaaccttataagaatggaagaacaggggctgacagacaagaactgatctccatctctccagacctaccatagagcttttgaaacttggtttgtgcattattatctcatttttctgatatgtctgaagtaggagtaggagctttgtggttatttagagagctttattttctcaactgtaaaattaggcaatgggttta

SEQ ID NO: 481469 - DNA, 201 bp, Homo sapiens; identical to SEQ ID NO: 144853

SEQ ID NO: 481470 - DNA, 201 bp, Homo sapiens
ctgtaaccttataagaatggaagaacaggggctgacagacaagaactgatctccatctctccagacctaccatagagcttttgaaacttggtttgtgcattattatctcatttttctgatatgtctgaagtaggagtaggagctttgtggttatttagagagctttattttctcaactgtaaaattaggcaatgggtttat

SEQ ID NO: 481471 - DNA, 201 bp, Homo sapiens
attcctgacttcaagtgatctgcccaccttggcctcccaaagtgctgggattacaggcatgagccaccacacccagcctatatagcatgattttatattaygcactctatgctatataaaaatgccatgatattatatattctttaaactttttggcctaggaggatggggctgaattagggattagatgatacacatata

SEQ ID NO: 481472 - DNA, 201 bp, Homo sapiens
gacttctctcagagtggggcccaagaatttgcctaacaaattcccaagtgttgcatccgctactggtggtggtctggagaccacactctgaataccactgytctagttagtggtgattcattcaagaggttcattcaggagttgatgaagtcaggttgtcagctgggcagaggatagattcagtgtgggacaagactggaa

SEQ ID NO: 481473 - DNA, 201 bp, Homo sapiens
ctcccaggttcaagtgattcccctgcctcagcctcctgagtagctgggactataggcacgtgccaccaggctcagctaattttttgtattttagtagagayggggcttcaccatgttgactgggatggtcttgatctcctgaccttgtgatccgcctgcctcagcctcccaaaaatgcagggattacaagtgtgagccccc

SEQ ID NO: 481474 - DNA, 201 bp, Homo sapiens
tgagacccagaaaggaagattgagcaagatattataaaccaaaaataaaattctaaggccccccaaccatctgaaaggacttcctcctcagccaggactcttttttttttttttttttttgaaatgaagtcttgctctgttgtccaggctggagtgcagtggcacgatctcagctcactgcaacctcgactcctcaggttc

SEQ ID NO: 481475 - DNA, 201 bp, Homo sapiens
gagacccagaaaggaagattgagcaagatattataaaccaaaaataaaattctaaggccccccaaccatctgaaaggacttcctcctcagccaggactcttttttttttttttttttttgaaatgaagtcttgctctgttgtccaggctggagtgcagtggcacgatctcagctcactgcaacctcgactcctcaggttca

SEQ ID NO: 481476 - DNA, 201 bp, Homo sapiens
ggtgtgtatgttatgtatgattttctaggccattatatatgaatatcaggtcaggagaataagatggacattacaaactatttgttagaaaaagggggcaytgggtgtgacagcgcgccatccactggtccatttccaagactcccacacgtggctgcacctgcagcttcacctccccgggctgggtccccgcttggctct

SEQ ID NO: 481477 - DNA, 201 bp, Homo sapiens
cccgaatagctgggaccacaggcatgtgtcaccacctctggctaatttttttttttttgagacggagtcttgctctgttgcccaggctggagtgcagtggygcaatcttggctcactgcaagctctgcctcccgggttcacaccattctcctgcctctgccacccgagtagctgggactacaggcgcccgccagcacgccc

SEQ ID NO: 481478 - DNA, 201 bp, Homo sapiens
gataggaaaacccgtactaaagatactctacctacattaatttatttgtttaatttttgacaacaagcatgtattacttttgaaaagatgaaaaataaagwtttatttaaaaaaggaaaaaggtatgagtacatttttaattttcatgtaattgagaaaacctttctaagtattagatgaaagctagaaactatccacagg

SEQ ID NO: 481479 - DNA, 201 bp, Homo sapiens
attatctcatttttctgatatgtctgaagtaggagtaggagctttgtggttatttagagagctttattttctcaactgtaaaattaggcaatgggtttatkatgcaaacatttggggccagcatttatgtgatctgattccttcctatttctttcaacaagtcctcactcctgatttctgaccctagaaagaagtgaaaac

SEQ ID NO: 481480 - DNA, 201 bp, Homo sapiens
gaggcccggccgcctggtgacgcacttccggcagcgccggggagcagtccgctacggaggtgagtgcagggctccgggcgctgtgtgccgtgccctgtccsccaggctctgggtccggttgagacgcactcccaccctgggtgctgcagggtctcccgtggcctacgctgccaggaggcccaggctgggagagggagcagg

SEQ ID NO: 481481 - DNA, 201 bp, Homo sapiens; identical to SEQ ID NO: 144831

SEQ ID NO: 481482 - DNA, 201 bp, Homo sapiens; identical to SEQ ID NO: 144833

SEQ ID NO: 481483 - DNA, 201 bp, Homo sapiens; identical to SEQ ID NO: 144835

SEQ ID NO: 481484 - DNA, 201 bp, Homo sapiens; identical to SEQ ID NO: 144837

SEQ ID NO: 481485 - DNA, 201 bp, Homo sapiens; identical to SEQ ID NO: 144838

SEQ ID NO: 481486 - DNA, 201 bp, Homo sapiens
agggtcttgctctaccacccaggctggagtgcagtggcacgatcatggctcactgcagacttgccctcccaggctcaagtgatcctcgtacctcagcctcsctagtagttgggactacaggcatgcgccaccacacccagtttatatatatatataaattttttttttgagatggagtctcgctctgttgcccaggctgga

SEQ ID NO: 481487 - DNA, 201 bp, Homo sapiens
atgggtgtcttcatatcatgtacctgaagcagagagctggcccgactgaggtccaagtaaggccccccaacttcagccttgaggtgtagggatagctgagygaggtttgtttccttttctctgttcttcactactgagtagttagctcccttggcccctgaccccagtgccactgtcaggaagccccctccaattgagtaa

SEQ ID NO: 481488 - DNA, 201 bp, Homo sapiens
ggctgcagctgcccaggaggggtggttgggcctgggagtgacacgaagcgtccctgagtggtggagcttgtgccaaccacatagcttagtgatgcaaaggrgagagtagccggccagtgggaaggccggtctccctgctttcccaaatgttcttggagaaacagtgaagctttcggagaagttggaaaggatgagacttga

SEQ ID NO: 481489 - DNA, 201 bp, Homo sapiens
ccacccgagtagctgggactacaggcgcccgccagcacgcccggctaatttttatatttttagtagagacggggtttcaccgtgttagccaggatggtctygatctcctgaccttgtgatccacccgccctggcctcccaaagtgctgggattacaggcttgagccaccgcgcccagcctaatttttgtattttttataga

SEQ ID NO: 481490 - DNA, 201 bp, Homo sapiens
tctgcctcccgggttcacaccattctcctgcctctgccacccgagtagctgggactacaggcgcccgccagcacgcccggctaatttttatatttttagtrgagacggggtttcaccgtgttagccaggatggtcttgatctcctgaccttgtgatccacccgccctggcctcccaaagtgctgggattacaggcttgagc

SEQ ID NO: 481491 - DNA, 201 bp, Homo sapiens
ggcagcagaagcagcccggcttttggaggacattgtctcctggagcagtgtcagtcccaaaaggtaactcagccctgcttctctcggctcagggttgacartgacctgggaatgacttctacaacgtaattacgaattcactcagttttagaatatatttagtagtctcagaatcgctaattcatacccccatgaaaagca

SEQ ID NO: 481492 - DNA, 201 bp, Homo sapiens
ggcgattctctggcctcagcctcccgagtagctgggaatacaggcatgcgccaccacgcctggctaattttgtatttttagtagagacagagtttctccaygttagtcaggctggtctcgaactcccaacctcaggtaactccccccacctcagcctgccaaagtgctgggattccaggtgtgagccaccacgcctggcca

SEQ ID NO: 481493 - DNA, 201 bp, Homo sapiens
tgtcttcaaattcactcatcttttttctgtaatgtctaatctgccgttaatcccatccaatgtatttttattgcacattataggtttttatctttagaagwttgatttgggtcttttttatatgtttcatttctccaccaaacttttagatgtatcagatatggttgtaataacttttaaatgtcattgcctactaattct

SEQ ID NO: 481494 - DNA, 201 bp, Homo sapiens; identical to SEQ ID NO: 144815

SEQ ID NO: 481495 - DNA, 201 bp, Homo sapiens; identical to SEQ ID NO: 144816

SEQ ID NO: 481496 - DNA, 201 bp, Homo sapiens; identical to SEQ ID NO: 144817

SEQ ID NO: 481497 - DNA, 201 bp, Homo sapiens; identical to SEQ ID NO: 144818

SEQ ID NO: 481498 - DNA, 201 bp, Homo sapiens
gccatggcgcatgactgccattgtattctacatgtctaaaagctttggataaggaaaaaaaaattggtatttgaatttcaatgtgcataacaactctaggrtagttgctatatttatccccagtttacaggctgggtatagtgaaatctagtagattgatgggagaatagagcagatacctctgagatgcacgcacatcac

SEQ ID NO: 481499 - DNA, 201 bp, Homo sapiens
tatctatgctgtccaatacagtagccactagcctcacgcagctattgggtccttgaaatgtggctagtgtgactgaggagctaaaaatttattaaattttwattaacttaaatctaaacaactactggtggctagtggctactctatcagagagcacagatattttcttcaagggtgtggctcttagattctggacctcat

SEQ ID NO: 481500 - DNA, 201 bp, Homo sapiens
taactttaaaacaatccagacagacactggactttcagaagggaaatcagaggtggttgagtctaccactgtctgttccctcaatggccctcttcactctrttcacactgtcatctgctgttctggtcttattttcaatgctgggaaattttactctgacactgtttaggaggtaaacatttgccttgtagaggcaagcat

SEQ ID NO: 481501 - DNA, 201 bp, Homo sapiens
ctaggctcttaggagtttttaaagatttggacattagaataaattagcttctttgaagccaaatataaattaacttcaacagaccgagctaggaaaagtakctactcaagtatctcaggcagtggagaagctcaatcactactcggccgaatggagtgcgagagttctgacctgacatccaggaagctttatgaagctcgt

SEQ ID NO: 481502 - DNA, 201 bp, Homo sapiens; identical to SEQ ID NO: 144824

SEQ ID NO: 481503 - DNA, 201 bp, Homo sapiens
acagtggggacagaccctattactgtacagagtgtgggaatagtttcacgagtagttccgagtttgttatacatcagagaatccacactggggagaaaccstatgagtgtaatgagtgtggcaaagcttttgttggtaattcacccctacttcggcatcagaaaatccacactggagagaaaccctatgagtgtaatgagt

SEQ ID NO: 481504 - DNA, 201 bp, Homo sapiens
agactttctgtaagtaccatagaacatttccagttaaatgtttatttcaagaacttagtcacctgactatacctggctcccgaggacactatatccttcasctgagtggcagtgtactacatcaaataacttcgagattttgtttaggaggaggaaggagaacaagtgtttgagtggatagctagcagcctctgccatggc

SEQ ID NO: 481505 - DNA, 201 bp, Homo sapiens
taacagcagtaatttttttttggcacttaacatgtgacagacactttcctagtcactacacagatttactcaatatgataactttatgaagagtgtgctayaattaactccatgttacagttgggaagacattaattaggttgcctaaggacacagtagtggagtaggtattcgaatacaggcagtctggtttcagaactc

SEQ ID NO: 481506 - DNA, 201 bp, Homo sapiens
aagaaaagtcttaactaggaaactaaaagctttcactcttaaagctttcattttctgtttattcagttttttatttggaatggatgctactctaggccttwaactgagaaatgccaggctattgtagctattatatcttggtatttgccattttaattcctaggacagcacgcccgctttgcccttgacctggctagggag

SEQ ID NO: 481507 - DNA, 201 bp, Homo sapiens
atacaccatgcctgaagctaaaaatatatacgggtttttgaattgcagcagccaataaattccatttttgtttggttggttttggctttggcacacctgarttaggttttcttgccttggaacagaattttgacttaaacagtgttgtcattgtagcagttgtttgaagttttcagggataacatacctgatggagaaatg

SEQ ID NO: 481508 - DNA, 201 bp, Homo sapiens
gggagaaaccttttgagtgtagtgagtgtggaaaagcctttaatggtaattcttcgttaattcggcaccagaggattcacactggagagagaccctatcastgtgaggagtgtgggcgagcctttaatgataatgcaaatctgatcaggcatcagagaatccacagtggggacagaccctattactgtacagagtgtggga

SEQ ID NO: 481509 - DNA, 201 bp, Homo sapiens
cagtcaattttatatcctaatggaatctcttctggtagtgagagaagttccagatttttcgttgtaaaaatagtcatataatggtctaatatccagttctktcacattttctcattacctatccctcacaggactttccctcaagtccctacctgtcccctctgccccacactctggcccggagccagaggattggctctg

SEQ ID NO: 481510 - DNA, 201 bp, Homo sapiens
tttttttgtttttttggttttttttttttttgagatggagttttgcttttgtcgcccaggctggagtgcaatggcacaatctcggctcactgcaacctccrcctctcgggttcaagcaattctcctgcctcagcctcccgagtagctgggattacaggtgcccgccattacgcctggctaatttttgtatttttagtagag

SEQ ID NO: 481511 - DNA, 201 bp, Homo sapiens
actaaaacctatttaattttatactctgcattgatgaattgtatggtgtgtgaattaaatgttaataaggcaggtgtgtgtgtgtgtgttcagtatttttraaactaaattctttcaccttcttgcctgaaaccagctcctcttcttcaattcctgatctcagctaatggcaccttcatctatcaggtcatccaaaattca

SEQ ID NO: 481512 - DNA, 201 bp, Homo sapiens; identical to SEQ ID NO: 144842

SEQ ID NO: 481513 - DNA, 201 bp, Homo sapiens
caaggcactaaaatgtctacaaatgtgatcatttttcatgacctacattgctaatgtggtccacattacccttaagctcctgctttaaggtccataaatacccctaaggaaaatccaccagcacgctcagtcctctcttgctgaagtgcctcactgccctctcctgcagtgttctttctatctaataaaactttccttttc

SEQ ID NO: 481514 - DNA, 201 bp, Homo sapiens; identical to SEQ ID NO: 144856

SEQ ID NO: 481515 - DNA, 201 bp, Homo sapiens; identical to SEQ ID NO: 144859

SEQ ID NO: 481516 - DNA, 201 bp, Homo sapiens; identical to SEQ ID NO: 144822

SEQ ID NO: 481517 - DNA, 201 bp, Homo sapiens
tgagagtggaaattttcttcctttccactccctgcaaaacaaaaataagttattcccaactctttttgtttttaattttagtgttcccatcttctggccawgaatatactcaactcttcaccaagtaaacatacgggttcccatgtttctaaaaaccgataaaattaacaatagagacttgtttttgttttatatccagac

SEQ ID NO: 481518 - DNA, 201 bp, Homo sapiens
aggaaaggaagaggatgtctcccaatcggaaacaccgagatgcggaaaagttgcaccgtagaaagagcagccgtgctcatgacgcacttctggcctccaarcgccccacaagcgtgacgcacttccggcctcctaaccgttctcgctagcggtgcgcttctggcctgttttgagtccgcgctcaaaggtgccaaagtgcaa

SEQ ID NO: 481519 - DNA, 201 bp, Homo sapiens
agaggatacatactggggagaaacctttcaaatgtatggaatgtgagaaagcattcagctgtagttctaactatattgtgcaccagagaatccatacaggrgagaaaccctttcagtgtaaggagtgtggaaaagccttccatgttaatgcccatttaattcggcatcagagaagccacactggggagaaacccttcagat

SEQ ID NO: 481520 - DNA, 201 bp, Homo sapiens
ccttatagtaagggagtataatcatatatgtccaactctttattcatcaaaaaatgattattgatcatgaactgtgttataaacactattctagaaactcrggatacagtcatggacaagatagaaaagcctctttcttgaggagtttacactctgcagaaagcctgagggttgctcttgaagacctggatcatggtccca

SEQ ID NO: 481521 - DNA, 201 bp, Homo sapiens
ccccagaatgatacctggcacataaccagtaaaacctcgataaatatttgctgaatagatagccattggagaattaggagtttattgaagatgttatggargaggcctcctgggaatgtctaagggctttaaaacttgatctcttaaaactatggtcattaaaaacaaaatacagagagagccaaaatttggttaatggat

SEQ ID NO: 481522 - DNA, 201 bp, Homo sapiens
ttgggcagggacacatatccaaactataccaaacaccatctttagaaaacaaggcactagagcccaaactccacacatgctaactctccatggactgccartatcttcaaggagccactcactctctcgcttgcaggtctagcatccaaatctgcacaagagggatcttccacaagatgggagcatgaaaaagaaatgtag

SEQ ID NO: 481523 - DNA, 201 bp, Homo sapiens
ccttggaataaaatccaaactctttaacatggcctgcaaagctctaatgacttcatggcgcagcacttcctccctcctctctccccatgatgtgtcaagctttttttttttttttttttccactgaagggcctacacatgctattcctcctgcctggaatgctgtctccttgattatgtgcccagatagttcattcttatc

SEQ ID NO: 481524 - DNA, 201 bp, Homo sapiens
accacacctggctcatttttatatttttagtagagatgcgatttctccatgttggccaggctggtcttgaactcctggcctcaagcaatccatccaccttkgcctcccaaagtgctgggattacaggtgtgagccactgtgtctgacctatgtgccttttatttctttttctggccttgctcttgctaagactcccaatat

SEQ ID NO: 481525 - DNA, 201 bp, Homo sapiens
tacatctccgaaatccatgcacgttgaaactcattgtgcatcccttgctgacatcaaggcactaaaatgtctacaaatgtgatcatttttcatgacctacrttgctaatgtggtccacattacccttaagctcctgctttaaggtccataaatacccctaaggaaaatccaccagcacgctcagtcctctcttgctgaagt

SEQ ID NO: 481526 - DNA, 201 bp, Homo sapiens
tcaggcagaccatctggaggcaaaactccctgtctgaggaattagaaagtaattagacttgcctattatctaaagctggcatctggtaccagacttcttcsccctaaatttataagtaactaggagttctatacatctccgaaatccatgcacgttgaaactcattgtgcatcccttgctgacatcaaggcactaaaatgt

SEQ ID NO: 481527 - DNA, 201 bp, Homo sapiens
ggactatctgtggtggggatgtagagaagaggaatagcaggacctgatcagagaaggatggccgtgcctctaattcaggggtaagggaaggtcacagggaktggagtcaagggagggggaagacagtcacatgggacggaatgtctcattgtgcttgtgaagctttcaaagtttaggatgcagactttaggtctctgagaa

SEQ ID NO: 481528 - DNA, 201 bp, Homo sapiens
ggcaggaggactgctttagcccagcaggtcaaggctgcagtgagcggtgatggtgccaccactctccagcctggtcaatagagtgagacaccctctctttstatgtatatatgggactgatttaaaaggctaggcattctggtgaatgtaaaattaactttgagggccatgaagcctgggagcatcgttcacattgtgttc

SEQ ID NO: 481529 - DNA, 201 bp, Homo sapiens
ggtgaatggggacgtggaaaccgcccctgtgggatgtactgtgcaggggtgtcagtggagcacagtcgcagaggattggactatctgtggtggggatgtasagaagaggaatagcaggacctgatcagagaaggatggccgtgcctctaattcaggggtaagggaaggtcacagggagtggagtcaagggagggggaagac

SEQ ID NO: 481530 - DNA, 201 bp, Homo sapiens
gggccaggcacggtggctcatgcctgtaatcccagcactttaggaggctgaggtgggaggatcacttaaggccaggagttcaagactagtctgggaaatayggtgaaaccctgggtctacagaaaaattaaaaaattagccaggcatggtggcatgcacttgtagtcccagctactcgcaaggctgaggcaggaggactgc

SEQ ID NO: 481531 - DNA, 201 bp, Homo sapiens
gctcctagagaggcccggccgcctggtgacgcacttccggcagcgccggggagcagtccgctacggaggtgagtgcagggctccgggcgctgtgtgccgtsccctgtcccccaggctctgggtccggttgagacgcactcccaccctgggtgctgcagggtctcccgtggcctacgctgccaggaggcccaggctgggaga

SEQ ID NO: 481532 - DNA, 201 bp, Homo sapiens
atctctcatctgcgtttgtctcctttctcactctcttgtccttgtgaatctgcagcctttttgtcctttcagtgtcatgttatggggctcaggaaatgccmatgttcattccacttacatctaatatgcaactattctttaaaatcaagtccatgcaatgtaatattctgcagctgttagaggaataacatatatctacat

SEQ ID NO: 481533 - DNA, 201 bp, Homo sapiens
aatgcttggcccatagaaggcgcttggtgaaagtctgggaaaggaaggaatgaatgagcctttgttcaaccttaaaaaggaactttttttttttttttgaracagagtctctctctgtcacccaggctggagtgcaatggcatgatctcaggtcactgcaacctctgcctcctgggttcaagcaattctcatgcctcagcg

SEQ ID NO: 481534 - DNA, 201 bp, Homo sapiens
ctgtcgagtccctcttgtctccttgatggaattaagaggtagacatcttgggtgctgctcctgctctgccctcatccctgcccatctcagtctgacattcyccatggttccccatgacctcctaccagcatgtcccttggatcactagttttagtgctaaatatccccgatgctcttgatcattatttctagaaattctct

SEQ ID NO: 481535 - DNA, 201 bp, Homo sapiens
ggggcttgtcagacagtgggtgcagcccacagaatgtgagctgaagcagggcggggcatcacttcacccgggaagcgcaaggggtcgggaaattccctttyctagccaagggaagccatgacagacggtacctggaaaatcgggacactcccaccctaatactgtgcttttccaatggtattagcaaatggcacaccagga

SEQ ID NO: 481536 - DNA, 201 bp, Homo sapiens
gagacacaagggtcttcctcaatggcccgtgagtggcagagcttgtgaaaggaagttgattcactgcgagtgaaccagaactcagaaagaccagtaagcawccaggaaacaccggccaccatctaggcctgtggtgatggcggttttatcacgaattccttcctgacaatcaactgctcccgggcagaagcgatcgctttc

SEQ ID NO: 481537 - DNA, 201 bp, Homo sapiens
tccaaggtaaccacttcaaattttaggctgaggagaagggcttaaaaaagggaacttggaatgggaggcatgtgagaggggtactgagtacaaggtctacrtgtcttgttccagtggctatcttgagctgtggtccacttagagtgtgggctggcatcatctcaacaatggccaggttattttctaactgccttgaatttc

SEQ ID NO: 481538 - DNA, 201 bp, Homo sapiens; identical to SEQ ID NO: 144854

SEQ ID NO: 481539 - DNA, 201 bp, Homo sapiens; identical to SEQ ID NO: 144857

SEQ ID NO: 481540 - DNA, 201 bp, Homo sapiens; identical to SEQ ID NO: 144858

SEQ ID NO: 481541 - DNA, 201 bp, Homo sapiens; identical to SEQ ID NO: 144860

SEQ ID NO: 481542 - DNA, 201 bp, Homo sapiens
ctcctctaggcaaggaaaactcccctcagacgctttgctgcctggcctcctgccagcaacaagcaggagctgaaaaccagaagttgaggcgtgagtttggycactccgtagtgtgcacttggtgagggcagcagctcgccacagctgccagccgtctgtccattcacccatctgtccatctggcagcccgctgttcagacc

SEQ ID NO: 481543 - DNA, 201 bp, Homo sapiens
tctgtcttcagcccccacctgtttgtccatctgtccaattacctgtgagtctatctatgcaccttcttgtccattcatctgcccacccatctgtccctccrtctgcccaccggcctcccctctccttctgggccgcagagccatggcccaggactgcagagccatggttggcctggtcctgctggggctggggcttgtgct

SEQ ID NO: 481544 - DNA, 201 bp, Homo sapiens
ctgcaacttctgcctcctgggttcaggtgattctcctgtctcagcctcctgagtagctgggattacaggtgttagccatcacgtctggctaatttttgttktttttttttttttgagacggagtatcgctctgtcacccaggctggagtgcagtggcaagatcttgtctcactgcaacctccacctctcaggttcaagcaa

SEQ ID NO: 481545 - DNA, 201 bp, Homo sapiens
gggcccacaaaagccagggcaagcctcccctccctgccagccacctggtctgcttcccagaaattctgtcttgcaggctgttgggaggatcccagtacttygtaaactaaagcaagggaggagtggccgttctctctgttcattcattcaccttttcattcattccttcttccctccattcccccatctgtccatccttcc

SEQ ID NO: 481546 - DNA, 201 bp, Homo sapiens
gggattacaggtgtccaccatcacacctggctaattgttgtatttttaatagagatgaacttttgccatgttggtcaggctgatcccaaactcctcatttsaggtgatccgcccgcctcagcctcccaaatgctgggattacaggcatgagacagcccacaaccctggcctgcaggcagtatcttttttcctctggctgct

SEQ ID NO: 481547 - DNA, 201 bp, Homo sapiens
gagatggggttctgccatgttggccaggctggtcttgaactcttggccttatgtgattggcctacctctgtctcccaaagtgctgggattataggcctaarccaccactcccagcctccttttttttttttttttttttttgagacggagtctcgctctgtcgcccaggctggagtagagtggtgcgatctcggctcactg

SEQ ID NO: 481548 - DNA, 201 bp, Homo sapiens
ttggccaggctggtcttgaactcttggccttatgtgattggcctacctctgtctcccaaagtgctgggattataggcctaaaccaccactcccagcctccttttttttttttttttttttttgagacggagtctcgctctgtcgcccaggctggagtagagtggtgcgatctcggctcactgcaacctccccctcccagtt

SEQ ID NO: 481549 - DNA, 201 bp, Homo sapiens
tgctttctcttgagcttttttcctgctgtcttatttccttgtttgcttagttgtttttaatttggcaatggaagttgtgtataaaaatcgttacaaataatttttttttttttttgagatggagtctcgctttgttgcccaagctggagtgcaatgacgtgatctcggctcactgcaacctctgcatcccagggttcaatt

SEQ ID NO: 481550 - DNA, 201 bp, Homo sapiens
gtctcgctctgtggcccaggctggagtgcggtggtgggatctcagctcactgcaacttctgcctcctgggttcaggtgattctcctgtctcagcctcctgrgtagctgggattacaggtgttagccatcacgtctggctaatttttgttgtttttttttttttgagacggagtatcgctctgtcacccaggctggagtgca

SEQ ID NO: 481551 - DNA, 201 bp, Homo sapiens
cactgcaacttctgcctcctgggttcaggtgattctcctgtctcagcctcctgagtagctgggattacaggtgttagccatcacgtctggctaatttttgttgtttttttttttttgagacggagtatcgctctgtcacccaggctggagtgcagtggcaagatcttgtctcactgcaacctccacctctcaggttcaagc

SEQ ID NO: 481552 - DNA, 201 bp, Homo sapiens
gaaaaccagccaccaccccattccaccgcctggaggtactagttttgtcttaatggctacacacacacacacacacacacacacacacacacacacacacacacgtgtgtatatatatgtatatgtatggcatataatggtatgtgtatatataatgtgtggacatatggcatatattggtgtgtatgtcaaccaatacat

SEQ ID NO: 481553 - DNA, 201 bp, Homo sapiens
atgaatagtgctcctaagcaaatactgttttttgtttttgccagtgtagaggcttaacgaggagatatatacacttaggtagggtggaatacagttaatgraacattttaggaaccagggcaggaatttatatttgatcagtttggatgattttgattatgcctaacattttctttcatctcatggtttgatatttttctt

SEQ ID NO: 481554 - DNA, 201 bp, Homo sapiens
aggaatttgctaccagtcttccttttcagaagaccttttctgtagtgttttagggaagacggatgcctttcccccatctccttttatcattcccccccccctccaaagaaaataactaacccttcaaaaattcattgcattaagtgggacaagaattcattattttaattttttaacaactcgatggaggtataattgata

SEQ ID NO: 481555 - DNA, 201 bp, Homo sapiens
aacctcggcctcccacagtgctgggattagaggagtgagccactgcgcctggcttgagaccctgtatctttaaaaacaaaacaaactccgtgtgtgtgtgygtgtgtgtgtgtgtgtgtgtgtgtgtgtagtagtagtagtagtagtatgtatatgtatgtaaaataaaaactttttttcccacctgtctcctcttttaga

SEQ ID NO: 481556 - DNA, 201 bp, Homo sapiens
tcaatcatattgtgtaaacttttgtaaaatgcctccagctcaggcctactttattataaacatcgtttcatgccattagctatgtctgctgcatcatttcrtggctgccaagtagtcccttgtaaggttgtaagcttttttatcataattcttgctaaagtccgtcttgttttgatttcatgatatgcttttaggaagaat

SEQ ID NO: 481557 - DNA, 201 bp, Homo sapiens
cacagctcagtgcagtctcaatctcctggattcaagctatcctccttccttagcccctcgagtagctgggtgggactacagatgtgtgccaccatttttgkatttttatttatttttttgtagagacaagtctgtggctgtgttgccacaggctggtcttgaatgcatgatctcaagtgatcttcccacctcagcctccca

SEQ ID NO: 481558 - DNA, 201 bp, Homo sapiens; identical to SEQ ID NO: 90628

SEQ ID NO: 481559 - DNA, 201 bp, Homo sapiens
aggccacttattcctcagatatagatttagcttcgtaattcagataattctcaatctcttttaaatgtccttcaattatcagagataatgatgatgacgaygacagcaatgacgccgataacatcaactataatttaataatcagtatatgccaggcctattcatatatcaactgatttagtcatcacagcagccccatga

SEQ ID NO: 481560 - DNA, 201 bp, Homo sapiens
ttttcctgtgttttgaaatcttgcaagattaagaattattagtggtgaaatgacgtaaagaatagtggtgtcaagcacacattgtgagaaaggaatgtgggctctgagcaggttctgtgtgtgtgcttggcttctgcaaggggctccacaattggggcagagggaaagcttggctcacttgccttgatcttagagggcaga

SEQ ID NO: 481561 - DNA, 201 bp, Homo sapiens
tgcctcagcctcccaagtagctgggattacagggtgcatgccaccacgcccagctaatttttgtatttttaatagagacagggttttgccatgttagccargctggtctcgaactcctgacctcaagtgatccccctgcctcagcctcccaaagtgttgggattacaggtgtgagccacaccacccggccaagagtaattt

SEQ ID NO: 481562 - DNA, 201 bp, Homo sapiens
tgcagggtatgtcttttatattttattttattttattttttatgtttgttatgttatgttatgttatgttatgttatgttatgttatgttatgttatgttdtttttgagacagaattttgctcttgttgctcaggctggagtgcaatggctagacctcggctcaccgcaacctctgcctcctgggttcaagcaattctcct

SEQ ID NO: 481563 - DNA, 201 bp, Homo sapiens
ggagtagaaatagaaaggttttttcctattccttgtaattccagtttccttatgataatccaagaccaagtgactcacaagtcttaaagcacagtaatccytttaatttttttagatcatacacttttctttatctgtctgattgtgtttcttctttccagttatggcagggtgtacacagccgacccctaccatgccctt

SEQ ID NO: 481564 - DNA, 201 bp, Homo sapiens
tgggcccaagaaatccaccagccttaacctcccaaagtgctgggattacaggtatgagacactgcgcctggccaatacagaacatttttaaaagcctggtwctgcatgttgccaaacagtccttatggagacagcaaaaaactatgtattctcagtgtgatttgttattttgaatttagatttctgtagatgtttattttt

SEQ ID NO: 481565 - DNA, 201 bp, Homo sapiens
aaatttttttcttctcctaccactttgttcccccttttttctttctttctttttttttttttgttttgttttaaaggtagaaaaatgtgaacatgcaggarcatgaataaaaaagataacttagcttccctgtgggtttttggtttttgtatgttttcataaaggtaacatacagaagagttttatttctgaccagactga

SEQ ID NO: 481566 - DNA, 201 bp, Homo sapiens
gaattctgttagagattgccctgtgggaatccctgctattttaagctgagaggaagtgagggaaaaagagcctcattctttcgacttttttttttttttttaagtcagcttcatagacaatactcatacatctcatttctctacctcagtgttgttttggtgagtctgtattgtctctaccagtccaggaagtgataggaa

SEQ ID NO: 481567 - DNA, 201 bp, Homo sapiens
catagaatgtacttacacaaacctagatatatacctgactatatattatatatggtacagcctaatgcctttaggctgcaaaccagtacagcatgttactytactgattactgtaggcaattgtaacacaatggcaaatattttcatatttaaacatatctaagcatggacaaggcacagtaaaaacatggcattatcatc

SEQ ID NO: 481568 - DNA, 201 bp, Homo sapiens
gacttatttttcacaaagcattcacattagttattttcaaggaaattttctaatttatttcattgatgtgtgtatatatatatatatatatatatatatawcatttaattatataattataagaacttacgacttctataaactggcaggtgaataaacacaagtgatttttggtaagcatacaactcagctactgggaga

SEQ ID NO: 481569 - DNA, 201 bp, Homo sapiens
aagaaggaaactgaaattcctgatgtaatgtatattttttcatatatatatgtttaagagactgggttttgctatgtggcttaggctggtctcaaattcckggccccaagcgatcctctcaccttggcctcttgagcagctgcaacaagaagcatgagccactgcaccaaacctgataacaatgattttctgaaagatagc

SEQ ID NO: 481570 - DNA, 201 bp, Homo sapiens
tttcagtgtcttgacttatttttcacaaagcattcacattagttattttcaaggaaattttctaatttatttcattgatgtgtgtatatatatatatatatatatatatataacatttaattatataattataagaacttacgacttctataaactggcaggtgaataaacacaagtgatttttggtaagcatacaactca

SEQ ID NO: 481571 - DNA, 201 bp, Homo sapiens
atttatttgtttttcattctggtttgtgtctgtcctagagcttctctaagctgggaaacttatgcctttgatagtacttttatatcttagtcatatatcasaaaaacattctcatacctggagatccaccccacggagtttctgattgggtaagtgtaagattgggcttacccattcaaatgtttaaaaatcccaaaggtg

SEQ ID NO: 481572 - DNA, 201 bp, Homo sapiens
cattctgatgagtgtgagttttatctcaatgtggttttgatttgcataatgacttatgatgttgagcatctcttcatgtacttactggccatttgcacatmtcttttgcagaactgtctgaattcctacacattttctggttatttagctccatttatttattacacattcttttgggtgtctacatgtgttagatactgt

SEQ ID NO: 481573 - DNA, 201 bp, Homo sapiens
gtggaggagagtcaatagttttcatctttgttttttttggaggagattcaagtcccagcttgttttaaccaccttattttatagatggggaatcagaagtscagagaagatggtgacttgggtaaggccacccagttagctaatagtaaaactagaactagaagcctggtcttctaattcctattcctgtgctgtctccat

SEQ ID NO: 481574 - DNA, 201 bp, Homo sapiens
tgcgctccagcctgggtgacagaacaagaccctgtctcaaaaataaatgaataaataaacccaggcaggattttagattgatgatacaatgtagtggtttrgattcctagttgactgtttgtgatttgtgcatgtgcttaggcgtgttcccaggccttgattaaggctagaatgttttatggatttgcagtatttttaaag

SEQ ID NO: 481575 - DNA, 201 bp, Homo sapiens
aacctgggccacagagtgagactccatctcaaaaacaaacaaaacaagtagcctcttgaattattggagtcagaggcagagcatctaaaatgtggctccaraccctttctgcccaccagactcacattgcaaaatccagcatttttgagatgtaggaattcaggaagcaaggttagaattattggcaatacccatattgct

SEQ ID NO: 481576 - DNA, 201 bp, Homo sapiens
tcagcctccatgtcttgtatttcccttttgtatttgtctgtcagtgtctctctgaatataagtgttcttttgctggtgtgacaagataagatattctggartctttggagaatgtgggagcatgaagtcttcatatgacttgaaagttcttgagtaacttatttctgtcaagttttctatcttgtttgttaaaataactta

SEQ ID NO: 481577 - DNA, 201 bp, Homo sapiens
aggttgtaagcttttttatcataattcttgctaaagtccgtcttgttttgatttcatgatatgcttttaggaagaataggatactgagtgctttggtactrtgggtaaacaatttgtccagagtggcttaaagtataaaattaaggcagtaagcagattttggttgagaaggggacatggaactggaaaggcaatactaaa

SEQ ID NO: 481578 - DNA, 201 bp, Homo sapiens
ctttttctccgtgagaatattatagaagaggtagtattctagctgtttagagaatgagaatgaggccagtggggttgtgtctcactctctaggtgaatgtygacctctactcagttctaatctcaccgtgcagtctttgtggtcccaaggctctgcagtaggtgaattaggcccgcgcagtctctgtggcccgagtcacag

SEQ ID NO: 481579 - DNA, 201 bp, Homo sapiens
aagtctttagctgcttgtcatgatactgaatagatctttttgcagcagcattttagctctgagctggctgtgttttacagtgttggagatcagttggttamctttggcatttcctaccttcatacgtaagcattaaagtgtgttaagtgcatgtagtagcccttcagagaggcgcttatcagggacttctagtgatttttg

SEQ ID NO: 481580 - DNA, 201 bp, Homo sapiens
tgttggccaggctggtctcgaactcctgacatcatgatccacccgcctcggcttgcaaagtgctgggattacaggcatgagccacgtgcccggcactgtarcatgtttttatggatctggggaaaataccaagcggagacacttcacaatacatggtatttttcacatcactcatattggatatgtttgaaaataaggaag

SEQ ID NO: 481581 - DNA, 201 bp, Homo sapiens
taaaatcttttgagagcttgtgttttttctcaggattgtctgttctcttgtttggcctgacttctgcgtaactttcaagctccgtctctttccacattccycctccaagtccatgtccagtggcttatagttttcttagcatgtggtgccacccagctaatgaatacctctgtgcttttgttcctttcccttctacccaaa

SEQ ID NO: 481582 - DNA, 201 bp, Homo sapiens
acttttcatcatgtaattccttacctaggggttgtttcttggacatctgtttatggtagacagatagtttctgggaaccagtcatactaggtgatacagcmcccccttacccaccctggtctccttctggtataccattcctctccgggatctgacattattggtatcccacatgttcccttccgaagtcataattcctca

SEQ ID NO: 481583 - DNA, 201 bp, Homo sapiens
tttaactttcattttgctgtaaagcagactggtgcagacaggcctcaagtttacaggactgctgagaaagaaattgagttatgctactttgtataaacaaraatgttgctagtgaatctctagtttaacatctctcaggccttcagtttgatgtcaggctttaataatttgtagaaaaagacagtcattttagtaagcaga

SEQ ID NO: 481584 - DNA, 201 bp, Homo sapiens
catactgcacagtgtcaagaccaatatctaaaatcattgtagaggattggtttgctacctctgatgtattctttcaactgtttatttcctcctgaatcacyatcatgaaaaaaagttaaattgcaaagatttgagttgttgggaagttagtgaatggctgctaaggatcttaattttttctgagcctgcttgttattgctt

SEQ ID NO: 481585 - DNA, 201 bp, Homo sapiens
tacagttgctccccttcagtctctgaataaaatcctgtgaccctgcatgatcaggaacctggctgtctctctagtctcatctcctgccatccttttctttytgtatttcattctaatgacactggcctctttgctgttctcttaacatgcctaagaccctcctgctcaggacccttctgcttttctccctgcccaaaatgt

SEQ ID NO: 481586 - DNA, 201 bp, Homo sapiens
gctggacgtggtggcaggcacctgtaatcacagctactcaagaggctgaggcaggagaatagcttgaatccaggaggcagaggttacagagagccaagatygtgccactggactccagcctgggtgacagttcaagactccatctttttttttttttaaagcaaattatagaatgcatctgatgtctatagttacttatct

SEQ ID NO: 481587 - DNA, 201 bp, Homo sapiens
gaagttttacacactaggaaaattgtttgtgaaatgtcttccgttgtaatccaagagaatttactgtcatatttgcaaagagagactactcaccagaaacrtgggacttccttattttgtaacattgctgaattactttataaagtggttgaatttagtcctgttcaatgtagtcgtttcagtatattgaccaaacttgag

SEQ ID NO: 481588 - DNA, 201 bp, Homo sapiens
ctgtgtactaattggtaaatgttttaaaaacaaagcatagaattcagaattgccctgaatctgccttcaaggactgatacaaaaccttgtttttgtccttygaagctttcttaactgctacctaaagttatttgctggaatgggtgcccttggaactgttctgaggctcctaatagagatttattttggaatcaaacccat

SEQ ID NO: 481589 - DNA, 201 bp, Homo sapiens
gaattgcttgaactggggaggtagaggttgcagtgagctgagactacaccattgcattccagcctgagtgatagagcgagactttgtctcaaaaacaaaayataaaacaaacaaaaacaacaactacaaaaaaacaaaaactaggatggttgataatcaatagtcacctatttgcaggcctttcagatttgagagtatttg

SEQ ID NO: 481590 - DNA, 201 bp, Homo sapiens
acaaatcttattcttctccctagaggtaaccactattagaagtttgttatatatccttctttatattttcgatgcatttagttacctttttttttttttttaagagatgggatgtcgctgtgctgcccaggctatctcaaactccagggcttgagtgatcctcctgcctgagccttctgtgtagctagccatttctgcttg

SEQ ID NO: 481591 - DNA, 201 bp, Homo sapiens
tctgcagtaggtgaattaggcccgcgcagtctctgtggcccgagtcacagaggaaggtgttcctttcccaagtagtgaatggaagccggcagggcaccagwtgctgtgttgtttcccctgttgctttttccttcacacccggtgtaaagtttccaggcatttgtgcaacctgatagcagaaagcgcctgtcctagcagtcg

SEQ ID NO: 481592 - DNA, 201 bp, Homo sapiens
tattcctttgtgtgtatatagcacaatttgtttatctgtttatcccttaatggacgtttgggtttccatcctttggcttttttttttttttttttttttttgagatggagtcccactctgtcgcccaggctggagcgcagtggtgtgatctctgctcactgcaagctctgcctcccaagttcatgccattctcctgcctca

SEQ ID NO: 481593 - DNA, 201 bp, Homo sapiens
tgtctttccccttccctgctggcaaccaccaatctgctttctcttttgatgaatttacctgttctggagattttatataaatggagtcatataatatatgrccttttatgtctggcttctttcacttagtactgtgtgttttcattgtttatccatgttgtagcatatatcagtacttctttcctttttataactgaatga

SEQ ID NO: 481594 - DNA, 201 bp, Homo sapiens
cctgggttcaagagattctcctgcctcagcctcccaagtagctgggattacaggcacacgccactgtggccagctaattttttgtatttttagtagaggcraggtttcgccatgttggccaggctggccttgaactcctgacctcaggtgttccacccgccttggcctcccaaagtgctgggattatagatgtgagccact

SEQ ID NO: 481595 - DNA, 201 bp, Homo sapiens
ttttctttctgagcaacaagggtttgctgcctgaggaattatgaggaagactctatctatctatctatctatctatctatctatctatctatctatctatccatctatctatctatctatctagagatggagtctttcctgctttgttgcccaggctggccttgaacttctgggctccagtgatcctcccaccttctgtga

SEQ ID NO: 481596 - DNA, 201 bp, Homo sapiens
tatgttccaaattgcctttctgtgtttattttaggaattaaaattctaagaatcataagactacaaaggtatttaggaaatacatatttaattatgcagtwtgaataaaccttcacgttgtcttttctggtatacccccaaaagtcttttgttattgtttgcttttgattgatggcaggttttaaaagcttacccctaaac

SEQ ID NO: 481597 - DNA, 201 bp, Homo sapiens
attttctttctgagcaacaagggtttgctgcctgaggaattatgaggaagactctatctatctatctatctatctatctatctatctatctatctatctatccatctatctatctatctatctagagatggagtctttcctgctttgttgcccaggctggccttgaacttctgggctccagtgatcctcccaccttctgtg

SEQ ID NO: 481598 - DNA, 201 bp, Homo sapiens
cattttctttctgagcaacaagggtttgctgcctgaggaattatgaggaagactctatctatctatctatctatctatctatctatctatctatctatctatccatctatctatctatctatctagagatggagtctttcctgctttgttgcccaggctggccttgaacttctgggctccagtgatcctcccaccttctgt

SEQ ID NO: 481599 - DNA, 201 bp, Homo sapiens
agacctataatgtggtaagtgcattaagagaattgagtaaatggggagatggggggaggagggtctaaactagctgggaccggtggaagtcagggaaaggracctgggggatgtaacaggagctatccttctgtgttttaaacagtagaaagaatagagaaatactggtttaatgggtagaacacagggtgggggaattag

SEQ ID NO: 481600 - DNA, 201 bp, Homo sapiens
gcattttctttctgagcaacaagggtttgctgcctgaggaattatgaggaagactctatctatctatctatctatctatctatctatctatctatctatctatccatctatctatctatctatctagagatggagtctttcctgctttgttgcccaggctggccttgaacttctgggctccagtgatcctcccaccttctg

SEQ ID NO: 481601 - DNA, 201 bp, Homo sapiens
tggaggagagtcaatagttttcatctttgttttttttggaggagattcaagtcccagcttgttttaaccaccttattttatagatggggaatcagaagtcsagagaagatggtgacttgggtaaggccacccagttagctaatagtaaaactagaactagaagcctggtcttctaattcctattcctgtgctgtctccatt

SEQ ID NO: 481602 - DNA, 201 bp, Homo sapiens
tcattttaccctcagctgctatttcagtattacttggaacaattcgattcattttgatgatgcaaactctgacctgtaatcaaaatggtccttttgaggcrcaaaggtgaatttagctttgcttgggcttttaacacttgtatatgcatctgtttatgtcctttctgtcttatgtgttccttagttgattcttagtagtgg

SEQ ID NO: 481603 - DNA, 201 bp, Homo sapiens
actgggtaatttatgaagaaaagagatttaattgactcacagttccaaagccttaacaggaggcatgactgggaggcctcaggaaacttacaatcatggcrgaaggggaagcaagcacatcttaaccatggtggagcaggagagagagagagtgtgaagggggaggtgccacatgcttttaaacgatcactcgagaactca

SEQ ID NO: 481604 - DNA, 201 bp, Homo sapiens
ggaggagagtcaatagttttcatctttgttttttttggaggagattcaagtcccagcttgttttaaccaccttattttatagatggggaatcagaagtccwgagaagatggtgacttgggtaaggccacccagttagctaatagtaaaactagaactagaagcctggtcttctaattcctattcctgtgctgtctccatta

SEQ ID NO: 481605 - DNA, 201 bp, Homo sapiens; identical to SEQ ID NO: 90629

SEQ ID NO: 481606 - DNA, 201 bp, Homo sapiens
ctttgggaggctgaggcgggggatcatgaggtcaggagatcgagaccatcctggccaacatggtgaaaccccgtctctactaaaaatacaaaaattagccrggtgtgctggcatgtgcctgtagtcccagctacctgggaggctgaggtgggaaaattgcttgaacccaggaggtggaggttgctgtgagctgagattgta

SEQ ID NO: 481607 - DNA, 201 bp, Homo sapiens
ggacttgaatagatatctgtacacccatattcatagcagctttattcacaatagttaaaaggtggaggcaacccaagtgtccattgacagatgaatggatrgacaaaatgtgatttttacgtaccacatattgtaggctacaatacagtgatatgcacataaaattgtgttttatataattttaacacaatattattattt

SEQ ID NO: 481608 - DNA, 201 bp, Homo sapiens
aattttgattcagtgtgaatctctgcaaatgaaaattttgttaatagttgcctaatttctttttctttttcttttcttttcttttcttttcttttcttttctttttttttttttttttttgagacggagtttcattctgtcacccaggctggactgcagtggcataatctcggctcactgcaacctccacctcccggttca

SEQ ID NO: 481609 - DNA, 201 bp, Homo sapiens
gaatggatggacaaaatgtgatttttacgtaccacatattgtaggctacaatacagtgatatgcacataaaattgtgttttatataattttaacacaatawtattatttggacttagaaggaaattctgacacgtgctacaatatggatgaaccacaaagatatggtaagtgagataagtgcagtgagctgagattatgtc

SEQ ID NO: 481610 - DNA, 201 bp, Homo sapiens
gatatggtaagtgagataagtgcagtgagctgagattatgtcacggcgcaaataaatattgtttgactattcacgtgaggtacttaaagtagtcacattgrtggagacaaagtagaatgctggttggcagtggacggagggagacaggaatggggagttagtgtttattgggtgcagcatttcagttggggaagatcagaa

SEQ ID NO: 481611 - DNA, 201 bp, Homo sapiens
aaggtcagatgccgtgataggtaccgtacttgacagtgaaaagccattaaaagattctaagtaggattgggagtagggtgaagtgaagtttataattagaytttttaaaaagatacctacatagattagaggagagtaaaagtgcagagagaagttaggtgattgttgtgtaagagtctgagtgacagggaaggtcatgat

SEQ ID NO: 481612 - DNA, 201 bp, Homo sapiens
gtggggtccacatctgtgcattcaaccaaccacggattgaaaataattcagaaaaaaaataacaatgcaacaataaaaataatacaaataaaaatactaartaactacgtagcatttacactgtattaggtattataagtgatctggagatgatttaaaatctctgggaggatatacataggttatatgtaaatactgtgc

SEQ ID NO: 481613 - DNA, 201 bp, Homo sapiens
ctggtgacttttttttctctttttaagagctttattcaagtcaaaggtgtcttgcctttacagttgcctttacagcttttttttttcttttttttttttttgagacagagtcttgctcttgctctgttgcctaggctggagtgtagtggcacaatctcagctcactgcaacctccacctaccaggctcaggtgattctcat

SEQ ID NO: 481614 - DNA, 201 bp, Homo sapiens
gttatgcacttaggttttttgcctatttctgtatatgtaatcgctttggtagaaagtttactttcttctacttgcgttctgtgattgctacagctgatagmtagctttcccttcatacacatactgatccttttcctgtcgagcttgtaggatgtgagtgtgcacatacatttttgtgtttatgtgttggggtgttatgtg

SEQ ID NO: 481615 - DNA, 201 bp, Homo sapiens
ctagggagcagagaatgcatagagggattttgaacctttgtaccttactttaggaacagtgttattgatggcaggtgggcagctgagagagttagaggagmttttgttggcttttaaatatatctctagacttctgaaggcagcagttcttctattctcatgtatggtttggctggtaaattttaaggtatgaccgcttct

SEQ ID NO: 481616 - DNA, 201 bp, Homo sapiens
ttcaaaactcagcctcaagggaaagaccggactggcttttccctctgagtaattcagaagaggggtgtgtgtgtgtgtgtgtgtgtgtgtgtgtgtgtgttgacaagtgatttggaggcaagtttacaatattcttgttggccaagcctgtaactgcccttaaatttacatataccagcttgtgtcatttattggtattct

SEQ ID NO: 481617 - DNA, 201 bp, Homo sapiens; identical to SEQ ID NO: 405313

SEQ ID NO: 481618 - DNA, 201 bp, Homo sapiens
tgggccccagcgatcctcccacttcagcctcctgagtagctatgacaacaggtatgccactatgcctggctagttctaaatttttttttttttttttttttgtagagacagggacttgccatgttacccaggctggtcttgaactctcggcctcaagcagtcctcctgccttggcctcccaaagtgctgggattacaggtc

SEQ ID NO: 481619 - DNA, 201 bp, Homo sapiens
tttcaaaactcagcctcaagggaaagaccggactggcttttccctctgagtaattcagaagaggggtgtgtgtgtgtgtgtgtgtgtgtgtgtgtgtgtgttgacaagtgatttggaggcaagtttacaatattcttgttggccaagcctgtaactgcccttaaatttacatataccagcttgtgtcatttattggtattc

SEQ ID NO: 481620 - DNA, 201 bp, Homo sapiens
aggaactcaccaccctgtctagttttcttgcttctttcaacctttgaggagtcatcttatgtttaatatatgaaatgtctagggttttaaattgtacttastgggagggatagggaaaagtatgtgtattccatcttcctggaagcagaagtctgtagttttgttttatgttaattaaataatagtatgtctatcaaagag

SEQ ID NO: 481621 - DNA, 201 bp, Homo sapiens
taacatcctaaagtgcacaagagagtctcccacaatgaagaattatctggcccaaaatgtcagtaatgctgaggttgagaaccctgcattaactttaaaaraacagttgttgagtaaaggcaacagttgttgaatgtgactgtttctctccccttctactctgctttgtagaactctgcacatccatttattcttccactt

SEQ ID NO: 481622 - DNA, 201 bp, Homo sapiens
atttcaaaactcagcctcaagggaaagaccggactggcttttccctctgagtaattcagaagaggggtgtgtgtgtgtgtgtgtgtgtgtgtgtgtgtgtgttgacaagtgatttggaggcaagtttacaatattcttgttggccaagcctgtaactgcccttaaatttacatataccagcttgtgtcatttattggtatt

SEQ ID NO: 481623 - DNA, 201 bp, Homo sapiens
tggtgcgatctcagctcactgcaacctccacttcccgggttcaagcgatactcgtgcctcagcctccagagtagctgggattacaggtgtgtgccaccacrtccggctaatttttgtatttttagtagagacgaggttttgccatgttggccaggctggtctcgagctcctagactcaggtgatccctccgcctcagcctc

SEQ ID NO: 481624 - DNA, 201 bp, Homo sapiens
tgtgtattaagagcaacttttttttttttttttgagatggagttttgctctgttgcccaggctggagtgcagtggcgggatctcggctgcggtggtgagcyttcgcctcctgggttcaagcaattctcctgcctcagcctcccaagtagctgggattacagggtgcatgccaccacgcccagctaatttttgtatttttaa

SEQ ID NO: 481625 - DNA, 201 bp, Homo sapiens
gacttgggttccaggcctgtttttgtgaccttggacatgtcacttgaaactcaagggaatgaacctgagtttccattatcaatcaaaagagaataatgttrtctatctaacagaattgttatgagtaggaggatgtgcttgacaccaatttctgcttcttagactagctctgtaaccttgagaaagacatttaaaaccttg

SEQ ID NO: 481626 - DNA, 201 bp, Homo sapiens
agatttcaaaactcagcctcaagggaaagaccggactggcttttccctctgagtaattcagaagaggggtgtgtgtgtgtgtgtgtgtgtgtgtgtgtgtgtgttgacaagtgatttggaggcaagtttacaatattcttgttggccaagcctgtaactgcccttaaatttacatataccagcttgtgtcatttattggta

SEQ ID NO: 481627 - DNA, 201 bp, Homo sapiens
aatctctgcagtgctaaaagacttcctgtgctctgctccctgcttttcaagcctctgcctgacttcctgtgttagggacagagctgtacttaagcctagcrtgtttgttgtatgcttcttggtctcctttgcagagtttaccctgttacttctgttgatttaggtaaagtgaccctcttggtgtttatttttgaattcttt

SEQ ID NO: 481628 - DNA, 201 bp, Homo sapiens
caaacccgctctccagactgctaacacagtgatctatctaaaagagccaatctggccaggtgcggtggctcatgcctgtaatcccagcactttgggaggcygaggcgggcagatgacttgaggtcagaagttcgagaccagcctggccaacatgatgaaaccctgtttctactaaaaatacaaaaattagctgggcgtggt

SEQ ID NO: 481629 - DNA, 201 bp, Homo sapiens
gaggtgagctaatattggatgataaggagggaagactggatgtaggtgctggtgagcaggttctacttggtgtgtgtgtgtgtgtgtgtgtgtgtgtgtgtatgtattcatttatcatttctgtcaatcctagttaatagtgagacccccgtccctttccctcatttactcctggggcctattatctgttggttgccttca

SEQ ID NO: 481630 - DNA, 201 bp, Homo sapiens
ttaagttccatgtaatatgtatgtgtcacaaaatatgattcttttaactttatttttaatttattattattttttttttgagacagagtctctcactatcrcccaggctggagtgcagtggtgcgatctcggatcactgccagctctgcctcctgggttcacgccattctcctgcctcagcctcccaagggcaggtgcctg

SEQ ID NO: 481631 - DNA, 201 bp, Homo sapiens
tgaggtgagctaatattggatgataaggagggaagactggatgtaggtgctggtgagcaggttctacttggtgtgtgtgtgtgtgtgtgtgtgtgtgtgtgtatgtattcatttatcatttctgtcaatcctagttaatagtgagacccccgtccctttccctcatttactcctggggcctattatctgttggttgccttc

SEQ ID NO: 481632 - DNA, 201 bp, Homo sapiens
gtgaggtgagctaatattggatgataaggagggaagactggatgtaggtgctggtgagcaggttctacttggtgtgtgtgtgtgtgtgtgtgtgtgtgtgkgtatgtattcatttatcatttctgtcaatcctagttaatagtgagacccccgtccctttccctcatttactcctggggcctattatctgttggttgcctt

SEQ ID NO: 481633 - DNA, 201 bp, Homo sapiens
acacaaactagagataatttgttttgcttcattggggtggcctaaccaagtaagggatgttcagcagtgggatacttgcaaaactaagtgttgaaagcttkcattatttcatcattaaaaattatttaagctgtagtgtactattttgtttattaattgatgaatacaaatgtatatatttgtggtacacaaaaaacccaa

SEQ ID NO: 481634 - DNA, 201 bp, Homo sapiens
caggtgaggtgagctaatattggatgataaggagggaagactggatgtaggtgctggtgagcaggttctacttggtgtgtgtgtgtgtgtgtgtgtgtgtrtgtgtatgtattcatttatcatttctgtcaatcctagttaatagtgagacccccgtccctttccctcatttactcctggggcctattatctgttggttgc

SEQ ID NO: 481635 - DNA, 201 bp, Homo sapiens
tgataacactattaccttattattaatggaaactgaggttttttttcctagtttttcactaaggcaaacaacactgttttgaaaatcttcgcacatgcttytttgtctagatagagatgtgaagttacaggaaggtatatgcattcaatattttgatagtactgccaaattactttccataacagcatcccaatatactta

SEQ ID NO: 481636 - DNA, 201 bp, Homo sapiens
tagtgatactgcttttcatgtatgcctttactaaagcatctaattcatcatatgggcagttaataagtatgaattgatgagatgacagtcgtgtatttttwactcttcagggaaagaaagaccttgtgctatcccttccaatttctcccttttgatctgtgacatttggaagtagttatggccgggcgccatggctcactc

SEQ ID NO: 481637 - DNA, 201 bp, Homo sapiens
ggttctgcctgggtccttccttctctgctgcagcctggaaactttatccatgtgataagttggggcagttgtaaagctcaacttgcttgtttcctgactcwggaatctctgtccttccttgcctactagacaatgtcttgagtgctgttgtttcatgtattttgtggtttttttagtagtttcaggtaaaaagaaaaatct

SEQ ID NO: 481638 - DNA, 201 bp, Homo sapiens
tagaggaactacagacagggcctggggagactgggggtgtctgaatgtggcctgcagcagttgcttgagttggaatacttttgggcagaggctcatagaartttctttcaattgcttttttttttcttttaagaagctttttcccatacaaattggaattgtttgaaggagtgggccttaattgttgccagccagagtgat

SEQ ID NO: 481639 - DNA, 201 bp, Homo sapiens
cagatgtaaaactggaaatgtatttgagaaggagaaagtcagatctgatttcaaagtagaattattcttcagggtgactcaagagattagcttgagttgartttgtctcccaactccctcccattttctagctactctgtcatttttttttcactatcacgctgacatgtgaacacaacagaagctaactagaaatttaac

SEQ ID NO: 481640 - DNA, 201 bp, Homo sapiens
cttcctgtgttagggacagagctgtacttaagcctagcatgtttgttgtatgcttcttggtctcctttgcagagtttaccctgttacttctgttgatttargtaaagtgaccctcttggtgtttatttttgaattcttttgttttgtttgcctgcttttattttccattagaactctgtcaggcagagggattgtgagaag

SEQ ID NO: 481641 - DNA, 201 bp, Homo sapiens
gtgcaaattttgattcagtgtgaatctctgcaaatgaaaattttgttaatagttgcctaatttctttttctttttcttttcttttcttttcttttcttttcttttctttttttttttttttttttgagacggagtttcattctgtcacccaggctggactgcagtggcataatctcggctcactgcaacctccacctcccg

SEQ ID NO: 481642 - DNA, 201 bp, Homo sapiens
cttttgtgcaaattttgattcagtgtgaatctctgcaaatgaaaattttgttaatagttgcctaatttctttttctttttcttttcttttcttttcttttcttttcttttctttttttttttttttttttgagacggagtttcattctgtcacccaggctggactgcagtggcataatctcggctcactgcaacctccacc

SEQ ID NO: 481643 - DNA, 201 bp, Homo sapiens
cttaaccagtgcttgctaagtcttgagatcccaagggttgtatgtcggtgtacagataacactacagcatcatcaaccatgtcctctggcatgagactgayttaccttatccttagcaaaacttaaaccttacaaatctcatgataatttctaaatatctcactcttaaatacgaggtctatttctaggtctagattttga

SEQ ID NO: 481644 - DNA, 201 bp, Homo sapiens
tagatacattttttttccagaaaaggtgattgtttgccttaatttccgagtaaaaaaggatatatgtttacaacagggtgtatgttgtggctgtaggagakaatgatgctaactggttcacatgggtagcagacacgtgaccttggcctctttagcatggtcctctaatcagctgatttaattttagtggaatccctgaag

SEQ ID NO: 481645 - DNA, 201 bp, Homo sapiens
ttggccatgatttggaggtcttcagtgacttcagtaaggtaaatttcaattgagtagtatggaggaaaggaagctggggttctggagattggatgaaacamtcaaagagttgagactacagggagaagtacctctttccttcatttgtttatttaataaatatttcttgagtacttaccacgtcccagacactgtcctgaa

SEQ ID NO: 481646 - DNA, 201 bp, Homo sapiens
aaccagccaccaccccattccaccgcctggaggtactagttttgtcttaatggctacacacacacacacacacacacacacacacacacacacacacacacgtgtgtatatatatgtatatgtatggcatataatggtatgtgtatatataatgtgtggacatatggcatatattggtgtgtatgtcaaccaatacattac

SEQ ID NO: 481647 - DNA, 201 bp, Homo sapiens
actggggcacaacttttagtctgaggggagctagtggaaatctagacaatagaagtcatcgatagcagcttttcctcaaatgtgtgactcctcaggggctraactgctcttagcttagaattatgctttactagagatctagcagataagtgggttaatcactaccatcctgtaactagttatatagcttccagacatgag

SEQ ID NO: 481648 - DNA, 201 bp, Homo sapiens
aaaccagccaccaccccattccaccgcctggaggtactagttttgtcttaatggctacacacacacacacacacacacacacacacacacacacacacacacgtgtgtatatatatgtatatgtatggcatataatggtatgtgtatatataatgtgtggacatatggcatatattggtgtgtatgtcaaccaatacatta

SEQ ID NO: 481649 - DNA, 201 bp, Homo sapiens
aaaaccagccaccaccccattccaccgcctggaggtactagttttgtcttaatggctacacacacacacacacacacacacacacacacacacacacacacacgtgtgtatatatatgtatatgtatggcatataatggtatgtgtatatataatgtgtggacatatggcatatattggtgtgtatgtcaaccaatacatt

SEQ ID NO: 481650 - DNA, 201 bp, Homo sapiens
tttagtattaaaaacaatatatttgtataggttttattacaaaagtaatatatgtttattattggggcacaaggaaacttttgggggttttggatatatgygttgactatcttgattgtggtgatgatttcatgagaatataagtgcatatatcaaaacttaccaaattgtatactgtaaataaataagtgctgtttatca

SEQ ID NO: 481651 - DNA, 201 bp, Homo sapiens
tgaggagagagaagctgaggcgtcttggtgaatacagcattgatctgggccttgtattaatggtaattagaattcgagtaagcatagatggtagtgggaaragttaagaacgtcagttctcaatacaaagttgaagtgatgagaaggatcaaaatgcctcgggataaaagcataggtttctacttgattgaagctttaggt

SEQ ID NO: 481652 - DNA, 201 bp, Homo sapiens
tggtggcgtgtgcctgtggtcccagctactctggaggctgaggtgagaggatcgcttgagcctgggaggcagaggttgcgatgagtcgagatcacgccacygcactgcagcctgggctacagagtgagaccctgtctcagaaaaaaaaaaaaaaaaaaaaaaggattgtgggagaagatggcggccgctgcacaatcccgg

SEQ ID NO: 481653 - DNA, 201 bp, Homo sapiens
ttttggtggaggagagtcaatagttttcatctttgttttttttggaggagattcaagtcccagcttgttttaaccaccttattttatagatggggaatcaraagtccagagaagatggtgacttgggtaaggccacccagttagctaatagtaaaactagaactagaagcctggtcttctaattcctattcctgtgctgtc

SEQ ID NO: 481654 - DNA, 201 bp, Homo sapiens
ttggtggaggagagtcaatagttttcatctttgttttttttggaggagattcaagtcccagcttgttttaaccaccttattttatagatggggaatcagargtccagagaagatggtgacttgggtaaggccacccagttagctaatagtaaaactagaactagaagcctggtcttctaattcctattcctgtgctgtctc

SEQ ID NO: 481655 - DNA, 201 bp, Homo sapiens
tggtggaggagagtcaatagttttcatctttgttttttttggaggagattcaagtcccagcttgttttaaccaccttattttatagatggggaatcagaartccagagaagatggtgacttgggtaaggccacccagttagctaatagtaaaactagaactagaagcctggtcttctaattcctattcctgtgctgtctcc

SEQ ID NO: 481656 - DNA, 201 bp, Homo sapiens
atagataatcatacacttaccttccctatttcttggcctaggggtaaatgcttttctggactaaactgctgcgtaacatgtaacagaaagaacagttatamttatggctctggctctactgtttactagctatttggcctggatccagtcacttaatctctctgagtctgactctcctcacctgataatggaaataatacc

SEQ ID NO: 481657 - DNA, 201 bp, Homo sapiens
caatttacacctgttatcttagcataattattaataaatgacccctttctctctcagaatgtcccagtttgaatgataaactatttactctccttatatawgctttgggtaacatcttaaaaaagcagtctttgaaaaggaaaacatgatgcttaatgaaaagtataaagaaaaaaatacatagtttattaaagagaaatg

SEQ ID NO: 481658 - DNA, 201 bp, Homo sapiens
tttagagtcagagatattaaggattttgactagtcacatagttagaaagtgacccagccagaatttgaatctgtatcttcaactcccaaggttccgtccarcctttctattgcatgatgaaaggagttacatatatctgtaatataactagtagagtctgaagtgaatagtttatatgatttgagagtcaggagttgtaaa

SEQ ID NO: 481659 - DNA, 201 bp, Homo sapiens
caaggctctaaaagctgcttttatttttttgagacaaagtttccctctgttgcccaggctggagtgcagtggtgcgatctcggctcactgcaacctcgacytcctgagttcaagtgattcttgtgcctcagcctcccaagtagttgagactacagaggcgcaagtcaccatgcctgacgaatttttgtgtttttagtagag

SEQ ID NO: 481660 - DNA, 201 bp, Homo sapiens
ttctcccacctccacagcaggcacagtgagctttccattcagacagtgagcttgtgttgccttttagcccagggagctcagcccacaaaccatgggtctcrgtttgtgcttgacaggactttgttaagtgaatcagggagtctgaattattcattctccttcctcatcctgctgttcatatcaaattcctgctgtgtcttt

SEQ ID NO: 481661 - DNA, 201 bp, Homo sapiens
cttaaggggaggaaaagcaggacctaccttttgaatggagtagtatcaaatactttgtgagcatattttaaaaccattacatccacctttattttctgctrttttcccctgttaacatacctgtgttttaataactgcctctgatgatggtcagagtccagtggctaaagttcattttaccctcagctgctatttcagtat

SEQ ID NO: 481662 - DNA, 201 bp, Homo sapiens
acagtgaatggaagaagaggatgaatatctaagtagcaatgttgagcactttgaaaattacaaaagcaatgtatgttctcatttactccttcgtgtgcacrtgcatcttccctcatttaaaagttcccttgaaagcaagggccttatttttaattcatctttttttactccatcagtcgactaacagtgcttggaaaatat

SEQ ID NO: 481663 - DNA, 201 bp, Homo sapiens
gggagcttgctctccttctcggagggccggagcagcgtggggccaaagacagtggcgaggttgtgcagggacatcttattgactgcctccttctctgccaycctgtagaggacggaagcagagggtgctgtttcaacgccaccaccaggagagaggcagaggggctgtgccgtgctagagtcctcagggagggagtgacct

SEQ ID NO: 481664 - DNA, 201 bp, Homo sapiens
atcatcgtcacacccacagcgctggccgccagtgaggaccctgtgaggggcacctgtgtggggtgtgaaccacctgaacgccttttctctacctcgcaggkctcagcagcacccggtgaacagcagcaggaggagccgctagagcagctgctcatgggcagagcagcccttgggcaactcctgccaccaccccctccccag

SEQ ID NO: 481665 - DNA, 201 bp, Homo sapiens
tcatcgtcacacccacagcgctggccgccagtgaggaccctgtgaggggcacctgtgtggggtgtgaaccacctgaacgccttttctctacctcgcagggstcagcagcacccggtgaacagcagcaggaggagccgctagagcagctgctcatgggcagagcagcccttgggcaactcctgccaccaccccctccccagg

SEQ ID NO: 481666 - DNA, 201 bp, Homo sapiens
agcgctggccgccagtgaggaccctgtgaggggcacctgtgtggggtgtgaaccacctgaacgccttttctctacctcgcagggctcagcagcacccggtraacagcagcaggaggagccgctagagcagctgctcatgggcagagcagcccttgggcaactcctgccaccaccccctccccagggagcccaaggcagggg

SEQ ID NO: 481667 - DNA, 201 bp, Homo sapiens
cctgtgtggggtgtgaaccacctgaacgccttttctctacctcgcagggctcagcagcacccggtgaacagcagcaggaggagccgctagagcagctgctsatgggcagagcagcccttgggcaactcctgccaccaccccctccccagggagcccaaggcaggggaggctcagcatggaatgaaacaggggagtgaggga

SEQ ID NO: 481668 - DNA, 201 bp, Homo sapiens
atctcggactgcagaccctcacggccttcccacactttgtcctcacttgcaacaggggcttctggtctgcctgccgtttctaaagcacccagtatggatgyacagcaggagacacacaagtcccaagactgcctgggcctactggaccccttagcatctgctgcaggggtcccctctacagctcccatgtctgggaagaag

SEQ ID NO: 481669 - DNA, 201 bp, Homo sapiens
gtgaaccacctgaacgccttttctctacctcgcagggctcagcagcacccggtgaacagcagcaggaggagccgctagagcagctgctcatgggcagagcwgcccttgggcaactcctgccaccaccccctccccagggagcccaaggcaggggaggctcagcatggaatgaaacaggggagtgagggacacaaggaggtg

SEQ ID NO: 481670 - DNA, 201 bp, Homo sapiens
caggagacacacaagtcccaagactgcctgggcctactggaccccttagcatctgctgcaggggtcccctctacagctcccatgtctgggaagaagcacaraccaccaggccccctgttctcctcctcagatccccttcctgccacctcttctgattcccaggactcagcccaggtcacctcgctgattcctgcccccttc

SEQ ID NO: 481671 - DNA, 201 bp, Homo sapiens
cacctgaacgccttttctctacctcgcagggctcagcagcacccggtgaacagcagcaggaggagccgctagagcagctgctcatgggcagagcagccctygggcaactcctgccaccaccccctccccagggagcccaaggcaggggaggctcagcatggaatgaaacaggggagtgagggacacaaggaggtgggaagt

SEQ ID NO: 481672 - DNA, 201 bp, Homo sapiens
ttcctcaaacacagtgagtgaggacggacctcaggctgtctcttcgggtcacacccagtgtgaaaagacggcagatacagcaccagggcagacactcgccyccaggggtggctcccccagatcccaggcctctaggccccgtatatgcaagtttcccctgctgccacgcaggcgaggggagcctttgatgctgccacctcc

SEQ ID NO: 481673 - DNA, 201 bp, Homo sapiens
ccagggagcccaaggcaggggaggctcagcatggaatgaaacaggggagtgagggacacaaggaggtgggaagtgggagggtcccagccccaccaagtacrcagagacccccttgtcgtcctggacaccacaggggcacctgcaggctgggagaccaggtcctctgtgcatgggcccgggaggcagacctgccccaagggt

SEQ ID NO: 481674 - DNA, 201 bp, Homo sapiens
cgtgtgagccttgctctcctggggaggctcaggctgacggctgatgtgggcattgccgagggtaacctgtggcccagtgtatatggccgggtctcctcaarctgcattcattcaagtaggacccagggtgcatgcccatctccagcccagggcagctcccctgtaagctgggtgagctactgaagccaaggtgggaggcag

SEQ ID NO: 481675 - DNA, 201 bp, Homo sapiens
acctcaggctgtctcttcgggtcacacccagtgtgaaaagacggcagatacagcaccagggcagacactcgcctccaggggtggctcccccagatcccagkcctctaggccccgtatatgcaagtttcccctgctgccacgcaggcgaggggagcctttgatgctgccacctcccttagagatggggtaccgggtcactgc

SEQ ID NO: 481676 - DNA, 201 bp, Homo sapiens
caggggaggctcagcatggaatgaaacaggggagtgagggacacaaggaggtgggaagtgggagggtcccagccccaccaagtacgcagagacccccttgwcgtcctggacaccacaggggcacctgcaggctgggagaccaggtcctctgtgcatgggcccgggaggcagacctgccccaagggtgatgcagaggccaca

SEQ ID NO: 481677 - DNA, 201 bp, Homo sapiens
gacaagcccctctcaccccgagagagctgaccaggcagctcacgagcagagccacatcccgggagtccgagaaaggtcctggctgggctcagccacctcaytggccacgggcagcctttgtcgtgtgagccttgctctcctggggaggctcaggctgacggctgatgtgggcattgccgagggtaacctgtggcccagtgt

SEQ ID NO: 481678 - DNA, 201 bp, Homo sapiens
gatacagcaccagggcagacactcgcctccaggggtggctcccccagatcccaggcctctaggccccgtatatgcaagtttcccctgctgccacgcaggcraggggagcctttgatgctgccacctcccttagagatggggtaccgggtcactgctgaagacctggaccgggagaaggaggaggcattccagcgcatcaac

SEQ ID NO: 481679 - DNA, 201 bp, Homo sapiens
ggggaggctcagcatggaatgaaacaggggagtgagggacacaaggaggtgggaagtgggagggtcccagccccaccaagtacgcagagacccccttgtcrtcctggacaccacaggggcacctgcaggctgggagaccaggtcctctgtgcatgggcccgggaggcagacctgccccaagggtgatgcagaggccacagg

SEQ ID NO: 481680 - DNA, 201 bp, Homo sapiens
cactgcaatctccacctcagcaggagagcaggaatcttcagtgatccacgggcagatctgccaccattgtgggcacctgttcctcccgcaacctttgtgcycgcctctctccttccagtacctattgcatgaccccccacgtccgcctcccgccattgccagcaagtgcctcgcgcgggtacctggctgcgcttattaatc

SEQ ID NO: 481681 - DNA, 201 bp, Homo sapiens
cacaggggcacctgcaggctgggagaccaggtcctctgtgcatgggcccgggaggcagacctgccccaagggtgatgcagaggccacaggtgctgcacgcdccagcgcccactctagacatcagcctccaggttgactaagggtcaggtcatgtttgaaaccatgcttggctggaccgggacccatggcaagagcacctgg

SEQ ID NO: 481682 - DNA, 201 bp, Homo sapiens
gcattccagcgcatcaacagtgcactgcaggttgaggaccaggccatctaggactgcagaccctcacggccttcccacactttgtcctcacttgcaacagrggcttctggtctgcctgccgtttctaaagcacccagtatggatgcacagcaggagacacacaagtcccaagactgcctgggcctagtggcccccctgcat

SEQ ID NO: 481683 - DNA, 201 bp, Homo sapiens
aggcatgagccactgtgcccggcctctcactacatttaagtgacgccatggctcatgcctgtaatcctggcactttgggaggccaaggcaggtggatcacytgaggtcaggagttcgacacgagcctggccaacatggggaaaccccgtctctagtaaaaatgcacaaattagtcaggtgtggtggtacaagcctgtaggc

SEQ ID NO: 481684 - DNA, 201 bp, Homo sapiens
gccactgtgcccggcctctcactacatttaagtgacgccatggctcatgcctgtaatcctggcactttgggaggccaaggcaggtggatcacttgaggtcrggagttcgacacgagcctggccaacatggggaaaccccgtctctagtaaaaatgcacaaattagtcaggtgtggtggtacaagcctgtaggcccagctac

SEQ ID NO: 481685 - DNA, 201 bp, Homo sapiens
agtgacgccatggctcatgcctgtaatcctggcactttgggaggccaaggcaggtggatcacttgaggtcaggagttcgacacgagcctggccaacatggrgaaaccccgtctctagtaaaaatgcacaaattagtcaggtgtggtggtacaagcctgtaggcccagctacttggaaggctgaggcaggagaatcacttta

SEQ ID NO: 481686 - DNA, 201 bp, Homo sapiens
tgtcggccacggtggtgtgtaggtggctgagctcagattgcagctgctaagacaccagccacttaccaagagaaagccaggctgcttcaaacccagggccsgcggcaaaaaagcatcacttccggccggggagtctggaagccacgccttgtgggaggtcacactggcatctaggccttcgcctgcactgcagaaggagag

SEQ ID NO: 481687 - DNA, 201 bp, Homo sapiens
catgttcatgggattatttcttgaaaatacttggcggcctccatgcttctgttttctttgagccaggtggtcaggagggcttacaaagaatgcctgggctyccccgcagctgccggcagatggggtagcgaatggtcctgtgcctccacctgctccgggagggagtctcccgtctctaggcctggccccttcctaaccctc

SEQ ID NO: 481688 - DNA, 201 bp, Homo sapiens
acaggggcacctgcaggctgggagaccaggtcctctgtgcatgggcccgggaggcagacctgccccaagggtgatgcagaggccacaggtgctgcacgctycagcgcccactctagacatcagcctccaggttgactaagggtcaggtcatgtttgaaaccatgcttggctggaccgggacccatggcaagagcacctggg

SEQ ID NO: 481689 - DNA, 201 bp, Homo sapiens
ccacagtgcagagggaggcgggtggcaaagaggagaggcaggggcgggggtggcagtggtgctagtccttagaagcagtgagttactgcagacaggggtcrggggaaaaggtccttggtgctgggggtctggtgggagcagaggggcaccccaacggcctggagacctggagtcctgggcagccacaagagagctgggcta

SEQ ID NO: 481690 - DNA, 201 bp, Homo sapiens
tctgacagattccaggcctggggttagcagcctgtgcccccggctgggagatcagacccggtgttggtcctgccacccacgtgctgtgtgagaggagaatscctgacccctgccctgggccttaacacacatccgacgaatgaatgaagggttgcctcagtaccggtgctccaagtcctgcgatgctaagtgcttttctcc

SEQ ID NO: 481691 - DNA, 201 bp, Homo sapiens
tctctgccaccctgtagaggacggaagcagagggtgctgtttcaacgccaccaccaggagagaggcagaggggctgtgccgtgctagagtcctcagggagrgagtgacctcgaccctggctgtgctgcaagctgactccagccttggtacttctgggtctcagtggcccaggacaaggggccagctctgggctgatgggga

SEQ ID NO: 481692 - DNA, 201 bp, Homo sapiens
cccccttgtcgtcctggacaccacaggggcacctgcaggctgggagaccaggtcctctgtgcatgggcccgggaggcagacctgccccaagggtgatgcasaggccacaggtgctgcacgctccagcgcccactctagacatcagcctccaggttgactaagggtcaggtcatgtttgaaaccatgcttggctggaccggg

SEQ ID NO: 481693 - DNA, 201 bp, Homo sapiens
ttgtcgtcctggacaccacaggggcacctgcaggctgggagaccaggtcctctgtgcatgggcccgggaggcagacctgccccaagggtgatgcagaggcyacaggtgctgcacgctccagcgcccactctagacatcagcctccaggttgactaagggtcaggtcatgtttgaaaccatgcttggctggaccgggaccca

SEQ ID NO: 481694 - DNA, 201 bp, Homo sapiens
tctcctcaagctgcattcattcaagtaggacccagggtgcatgcccatctccagcccagggcagctcccctgtaagctgggtgagctactgaagccaaggygggaggcagctgacaacaccacccacggcccatgcggaggtggcagaaaggctggactcagcaggaacaccaaatcccggaccaggcagaaaccacccaa

SEQ ID NO: 481695 - DNA, 201 bp, Homo sapiens
cagcctttgtcgtgtgagccttgctctcctggggaggctcaggctgacggctgatgtgggcattgccgagggtaacctgtggcccagtgtatatggccggstctcctcaagctgcattcattcaagtaggacccagggtgcatgcccatctccagcccagggcagctcccctgtaagctgggtgagctactgaagccaagg

SEQ ID NO: 481696 - DNA, 201 bp, Homo sapiens
gaactgctctcaaaccaacaaacaggcttctcttggcaacagactcatgacaaaggattcaagattgtttgaaaaaaaaaaaaggggagcagggaggcagwaagtcctggaaaagtaaattgtttattttacaataagaaagtgattacatatttttttttttacaatggtggaaaattagaagtcattgtgaaaatgatg

SEQ ID NO: 481697 - DNA, 201 bp, Homo sapiens
ggctgggctcagccacctcattggccacgggcagcctttgtcgtgtgagccttgctctcctggggaggctcaggctgacggctgatgtgggcattgccgarggtaacctgtggcccagtgtatatggccgggtctcctcaagctgcattcattcaagtaggacccagggtgcatgcccatctccagcccagggcagctccc

SEQ ID NO: 481698 - DNA, 201 bp, Homo sapiens
actgctctcaaaccaacaaacaggcttctcttggcaacagactcatgacaaaggattcaagattgtttgaaaaaaaaaaaaggggagcagggaggcagaargtcctggaaaagtaaattgtttattttacaataagaaagtgattacatatttttttttttacaatggtggaaaattagaagtcattgtgaaaatgatgtc

SEQ ID NO: 481699 - DNA, 201 bp, Homo sapiens
gccgcccctgagcctgctgctgccacgggccctgtctctacccaggacgccccccgaccctcgcagtgtcagggaaatgatcatggtggtggtgacactcygcaggcagggctgctgagagaagctgagaagggtcacactgcaggcaggggcccgtgtgacaagcccctctcaccccgagagagctgaccaggcagctca

SEQ ID NO: 481700 - DNA, 201 bp, Homo sapiens
ccgggcccagataggtacagagagcagaggctcctgttctgtcctcgccacccacgagggtgacactgcttgtaaatggtggctgtgctctcccagcaagwaaaaagcacaactaaatccacactgcacacagacgcagacagaaagccttcaagtggctctgttttctgctccctgccttgccaggtccacaagcagaga

SEQ ID NO: 481701 - DNA, 201 bp, Homo sapiens
cagaggccacaggtgctgcacgctccagcgcccactctagacatcagcctccaggttgactaagggtcaggtcatgtttgaaaccatgcttggctggaccrggacccatggcaagagcacctgggcaccagtgtttagccctggtctgcaggaaggaggacagcagactttaggaccccacagcatggcagtgctgaccat

SEQ ID NO: 481702 - DNA, 201 bp, Homo sapiens
aatgctgccaggacacggattgtccagggattacattccagcatcttattaggtatctggatctgttgggaaaaaaattagaaactatgtataaaacttamaaatattcaagtatcaaaaggttatttaggatgaaagttttaaaacaagtcatcagcaagctgctgccaccaagtggagacttatacaaaagttgagcga

SEQ ID NO: 481703 - DNA, 201 bp, Homo sapiens
gctccagcgcccactctagacatcagcctccaggttgactaagggtcaggtcatgtttgaaaccatgcttggctggaccgggacccatggcaagagcaccygggcaccagtgtttagccctggtctgcaggaaggaggacagcagactttaggaccccacagcatggcagtgctgaccatttcacccacttggcctccttg

SEQ ID NO: 481704 - DNA, 201 bp, Homo sapiens
cctctcctcctgcaggaccgtctggaaacttggctctcagtttgatctcccttctctcctctgcctgccccaagcccctctttctaaaaaagtgatgccaygttcatgggattatttcttgaaaatacttggcggcctccatgcttctgttttctttgagccaggtggtcaggagggcttacaaagaatgcctgggctccc

SEQ ID NO: 481705 - DNA, 201 bp, Homo sapiens
gcccactctagacatcagcctccaggttgactaagggtcaggtcatgtttgaaaccatgcttggctggaccgggacccatggcaagagcacctgggcaccmgtgtttagccctggtctgcaggaaggaggacagcagactttaggaccccacagcatggcagtgctgaccatttcacccacttggcctccttgaggaatag

SEQ ID NO: 481706 - DNA, 201 bp, Homo sapiens
cccactctagacatcagcctccaggttgactaagggtcaggtcatgtttgaaaccatgcttggctggaccgggacccatggcaagagcacctgggcaccaktgtttagccctggtctgcaggaaggaggacagcagactttaggaccccacagcatggcagtgctgaccatttcacccacttggcctccttgaggaatagg

SEQ ID NO: 481707 - DNA, 201 bp, Homo sapiens
accccgtctctagtaaaaatgcacaaattagtcaggtgtggtggtacaagcctgtaggcccagctacttggaaggctgaggcaggagaatcactttaaccrggaggcagaggttgcagtgagccaatatcatgccactgcactccagcttgggggacagagtgagacaccgtctcaaaaaaaaaaaaaagaaaatagaaaa

SEQ ID NO: 481708 - DNA, 201 bp, Homo sapiens
cgcctcccgccattgccagcaagtgcctcgcgcgggtacctggctgcgcttattaatccgttaagctcgctctgtcacgggcgccgtgatgtgctcacgcrcccgctccctcaggtttaaaaggcgcgttgcccggcaacagaagaaactgctggcttagccgttggccgagttggcggctggacgaggacgctcagagcc

SEQ ID NO: 481709 - DNA, 201 bp, Homo sapiens
ccactctagacatcagcctccaggttgactaagggtcaggtcatgtttgaaaccatgcttggctggaccgggacccatggcaagagcacctgggcaccagygtttagccctggtctgcaggaaggaggacagcagactttaggaccccacagcatggcagtgctgaccatttcacccacttggcctccttgaggaataggg

SEQ ID NO: 481710 - DNA, 201 bp, Homo sapiens
cactctagacatcagcctccaggttgactaagggtcaggtcatgtttgaaaccatgcttggctggaccgggacccatggcaagagcacctgggcaccagtstttagccctggtctgcaggaaggaggacagcagactttaggaccccacagcatggcagtgctgaccatttcacccacttggcctccttgaggaataggga

SEQ ID NO: 481711 - DNA, 201 bp, Homo sapiens
gggcagtcagctcttgctcctagtaagagagatgcaatagggctctgtggctgagctgggtgccttgcctcacacctgtaatcccaacctttgagaggccraggcgggaggattgcttgaggccgggaattttgagaatagcctggacaacatagccagaccccatgtctacaaaataataataaaacacacagctatagt

SEQ ID NO: 481712 - DNA, 201 bp, Homo sapiens
tctagacatcagcctccaggttgactaagggtcaggtcatgtttgaaaccatgcttggctggaccgggacccatggcaagagcacctgggcaccagtgttyagccctggtctgcaggaaggaggacagcagactttaggaccccacagcatggcagtgctgaccatttcacccacttggcctccttgaggaatagggatgg

SEQ ID NO: 481713 - DNA, 201 bp, Homo sapiens
cccaggacgccccccgaccctcgcagtgtcagggaaatgatcatggtggtggtgacactccgcaggcagggctgctgagagaagctgagaagggtcacacygcaggcaggggcccgtgtgacaagcccctctcaccccgagagagctgaccaggcagctcacgagcagagccacatcccgggagtccgagaaaggtcctgg

SEQ ID NO: 481714 - DNA, 201 bp, Homo sapiens
ttagacatcggtggagaacaggatgctctgtctcttgctgtccagggcagggatggcctccagccgcaagaagtacagcagcacctcgacctgccctcgcrgagtggggaagaggagagtggctcagagcggggctcacagctgctggtggggaggtctttggggcccaagtccccaagtccacctcaggtgctagaaacc

SEQ ID NO: 481715 - DNA, 201 bp, Homo sapiens
atgcttggctggaccgggacccatggcaagagcacctgggcaccagtgtttagccctggtctgcaggaaggaggacagcagactttaggaccccacagcayggcagtgctgaccatttcacccacttggcctccttgaggaatagggatggggagccctctggggatgagcaaggccttccaggacaggctcggttctggt

SEQ ID NO: 481716 - DNA, 201 bp, Homo sapiens
cctctcaccccgagagagctgaccaggcagctcacgagcagagccacatcccgggagtccgagaaaggtcctggctgggctcagccacctcattggccacrggcagcctttgtcgtgtgagccttgctctcctggggaggctcaggctgacggctgatgtgggcattgccgagggtaacctgtggcccagtgtatatggcc

SEQ ID NO: 481717 - DNA, 201 bp, Homo sapiens
agagcacctgggcaccagtgtttagccctggtctgcaggaaggaggacagcagactttaggaccccacagcatggcagtgctgaccatttcacccacttgkcctccttgaggaatagggatggggagccctctggggatgagcaaggccttccaggacaggctcggttctggtcccctgctttttgaggttgggttaaaat

SEQ ID NO: 481718 - DNA, 201 bp, Homo sapiens
tcagccacctcattggccacgggcagcctttgtcgtgtgagccttgctctcctggggaggctcaggctgacggctgatgtgggcattgccgagggtaaccygtggcccagtgtatatggccgggtctcctcaagctgcattcattcaagtaggacccagggtgcatgcccatctccagcccagggcagctcccctgtaagc

SEQ ID NO: 481719 - DNA, 201 bp, Homo sapiens
ggctgacggctgatgtgggcattgccgagggtaacctgtggcccagtgtatatggccgggtctcctcaagctgcattcattcaagtaggacccagggtgcrtgcccatctccagcccagggcagctcccctgtaagctgggtgagctactgaagccaaggtgggaggcagctgacaacaccacccacggcccatgcggagg

SEQ ID NO: 481720 - DNA, 201 bp, Homo sapiens
agtgtttagccctggtctgcaggaaggaggacagcagactttaggaccccacagcatggcagtgctgaccatttcacccacttggcctccttgaggaatakggatggggagccctctggggatgagcaaggccttccaggacaggctcggttctggtcccctgctttttgaggttgggttaaaatgccgaccatggcagag

SEQ ID NO: 481721 - DNA, 201 bp, Homo sapiens
ctcacccacaacccccaggccggccttccctgcagcctgggcttggccaccttggcctgattgagcactgaggcctcctgggcacccagccccatcactgyacctgctgcttccagccccaccccaccggctcaggggttcttcccagcggcgctgatcatgaagtcaacatgcacgcaagtcgtctcaggaaacttttta

SEQ ID NO: 481722 - DNA, 201 bp, Homo sapiens
tccagccccaccccaccggctcaggggttcttcccagcggcgctgatcatgaagtcaacatgcacgcaagtcgtctcaggaaactttttaatgaaagtgtyggccacggtggtgtgtaggtggctgagctcagattgcagctgctaagacaccagccacttaccaagagaaagccaggctgcttcaaacccagggcccgcg

SEQ ID NO: 481723 - DNA, 201 bp, Homo sapiens
acacggattgtccagggattacattccagcatcttattaggtatctggatctgttgggaaaaaaattagaaactatgtataaaacttaaaaatattcaagyatcaaaaggttatttaggatgaaagttttaaaacaagtcatcagcaagctgctgccaccaagtggagacttatacaaaagttgagcgagtccactgagct

SEQ ID NO: 481724 - DNA, 201 bp, Homo sapiens
atcatgaagtcaacatgcacgcaagtcgtctcaggaaactttttaatgaaagtgtcggccacggtggtgtgtaggtggctgagctcagattgcagctgctragacaccagccacttaccaagagaaagccaggctgcttcaaacccagggcccgcggcaaaaaagcatcacttccggccggggagtctggaagccacgcct

SEQ ID NO: 481725 - DNA, 201 bp, Homo sapiens
atggtgatgggctggctggggttggcagggagcttgctctccttctcggagggccggagcagcgtggggccaaagacagtggcgaggttgtgcagggacaycttattgactgcctccttctctgccaccctgtagaggacggaagcagagggtgctgtttcaacgccaccaccaggagagaggcagaggggctgtgccgtg

SEQ ID NO: 481726 - DNA, 201 bp, Homo sapiens
cggtggtgtgtaggtggctgagctcagattgcagctgctaagacaccagccacttaccaagagaaagccaggctgcttcaaacccagggcccgcggcaaaraagcatcacttccggccggggagtctggaagccacgccttgtgggaggtcacactggcatctaggccttcgcctgcactgcagaaggagagccgggtccc

SEQ ID NO: 481727 - DNA, 201 bp, Homo sapiens
atcctctcctcctgcaggaccgtctggaaacttggctctcagtttgatctcccttctctcctctgcctgccccaagcccctctttctaaaaaagtgatgcmatgttcatgggattatttcttgaaaatacttggcggcctccatgcttctgttttctttgagccaggtggtcaggagggcttacaaagaatgcctgggctc

SEQ ID NO: 481728 - DNA, 201 bp, Homo sapiens
ctccctttgtgcccgggcccgggcctctgcagacagacctccatgcccagaggtcagaaatcagatataaccagacatcccagacctcctggacgagctcstgcaccaaccgaaatgccatctccagctcctacagctccacgggaggcttgccggggctaaagcggaggagggggccagcctcatcccactgccagctga

SEQ ID NO: 481729 - DNA, 201 bp, Homo sapiens
tccgagttccagggcgtcctccagctcagccactgcactgagaacatggactctctgtggggcccaggagccgggagtcacccctttggggtccacaacasccggctgtccccagacttgtgtccagggaagatagtgttgagggccctcaaggagagcggggcagggatgcctgagcaggacaaggaccctagagtccaa

SEQ ID NO: 481730 - DNA, 201 bp, Homo sapiens
ccacagcatggcagtgctgaccatttcacccacttggcctccttgaggaatagggatggggagccctctggggatgagcaaggccttccaggacaggctcrgttctggtcccctgctttttgaggttgggttaaaatgccgaccatggcagaggggtcacagctcaggttcccacacctcacttttcacagcctccaaggg

SEQ ID NO: 481731 - DNA, 201 bp, Homo sapiens
ctctggggatgagcaaggccttccaggacaggctcggttctggtcccctgctttttgaggttgggttaaaatgccgaccatggcagaggggtcacagctcrggttcccacacctcacttttcacagcctccaagggcagcagtgcacatggaggagacgtctcccacgaggccaaggcctccaatgctcaccgatgccctc

SEQ ID NO: 481732 - DNA, 201 bp, Homo sapiens
ctggctgggctcagccacctcattggccacgggcagcctttgtcgtgtgagccttgctctcctggggaggctcaggctgacggctgatgtgggcattgccragggtaacctgtggcccagtgtatatggccgggtctcctcaagctgcattcattcaagtaggacccagggtgcatgcccatctccagcccagggcagctc

SEQ ID NO: 481733 - DNA, 201 bp, Homo sapiens
cccaattggccattggtgcttacatcctcaccacaggccaggttcattctgggcccccagagggagctgaaactaccacagggccctcccagggatgctgrgcattctaggggtcctggtcagggtgggtggtgtgtgctgcaaagaagggtctgcaggcacaaaatcctgttgctttgaagatgctgggaaggaccctct

SEQ ID NO: 481734 - DNA, 201 bp, Homo sapiens
tgcaggaccgtctggaaacttggctctcagtttgatctcccttctctcctctgcctgccccaagcccctctttctaaaaaagtgatgccatgttcatgggrttatttcttgaaaatacttggcggcctccatgcttctgttttctttgagccaggtggtcaggagggcttacaaagaatgcctgggctcccccgcagctgc

SEQ ID NO: 481735 - DNA, 201 bp, Homo sapiens
ccattggtgcttacatcctcaccacaggccaggttcattctgggcccccagagggagctgaaactaccacagggccctcccagggatgctgggcattctargggtcctggtcagggtgggtggtgtgtgctgcaaagaagggtctgcaggcacaaaatcctgttgctttgaagatgctgggaaggaccctctggggtctca

SEQ ID NO: 481736 - DNA, 201 bp, Homo sapiens
gggcccccagagggagctgaaactaccacagggccctcccagggatgctgggcattctaggggtcctggtcagggtgggtggtgtgtgctgcaaagaaggrtctgcaggcacaaaatcctgttgctttgaagatgctgggaaggaccctctggggtctcagtgccctcccctggcatttgaggcaggtccgggtccttcaa

SEQ ID NO: 481737 - DNA, 201 bp, Homo sapiens
atacagggcagtggacagaccgcactgagtcctgggcttccacctcctgtccacccccaaggcaggaaggccaagtccccacagaagcccctggtccactscaccaagtggcatgagtgggtacgatggtgtaaaaactggcttctatagaagctgtttgtacaactcttgttttctctttttttaaaataataaaacagt

SEQ ID NO: 481738 - DNA, 201 bp, Homo sapiens
aaagacacagagaaggatgtgacatgcctgggccatggagcactctgagatctcatcgcggacaccactgcccacacctccatcccgtcctgcgcaggccracactcactgacatcgaaggctgccttcagtgcctggatgtctgcggccacaccggccggacacgtggtagatgcccacctcctccatgcctcggcgctc

SEQ ID NO: 481739 - DNA, 201 bp, Homo sapiens
tgagctcagattgcagctgctaagacaccagccacttaccaagagaaagccaggctgcttcaaacccagggcccgcggcaaaaaagcatcacttccggccrgggagtctggaagccacgccttgtgggaggtcacactggcatctaggccttcgcctgcactgcagaaggagagccgggtccccctcctggagaacgctgc

SEQ ID NO: 481740 - DNA, 201 bp, Homo sapiens
gacatgcctgggccatggagcactctgagatctcatcgcggacaccactgcccacacctccatcccgtcctgcgcaggccaacactcactgacatcgaagsctgccttcagtgcctggatgtctgcggccacaccggccggacacgtggtagatgcccacctcctccatgcctcggcgctcgatctcctccacgcactggc

SEQ ID NO: 481741 - DNA, 201 bp, Homo sapiens
gcatgcctgtcctccctctgcaagctctgtcttcacggcatgtgctttctcaggaacctttcaagcggccagaacccctgcgaatcacacatgacctttgygggaaggtcaggaggcctgtctaagtcaagtcagcacgggaagggcatctgacagattccaggcctggggttagcagcctgtgcccccggctgggagatc

SEQ ID NO: 481742 - DNA, 201 bp, Homo sapiens
aacccctgcgaatcacacatgacctttgcgggaaggtcaggaggcctgtctaagtcaagtcagcacgggaagggcatctgacagattccaggcctggggtkagcagcctgtgcccccggctgggagatcagacccggtgttggtcctgccacccacgtgctgtgtgagaggagaatccctgacccctgccctgggccttaa

SEQ ID NO: 481743 - DNA, 201 bp, Homo sapiens
ctcgccacccacgagggtgacactgcttgtaaatggtggctgtgctctcccagcaagaaaaaagcacaactaaatccacactgcacacagacgcagacagraagccttcaagtggctctgttttctgctccctgccttgccaggtccacaagcagagaggagtgtcaggcacatggccccgctgtcaggctccccagtgag

SEQ ID NO: 481744 - DNA, 201 bp, Homo sapiens
ccacagcgctggccgccagtgaggaccctgtgaggggcacctgtgtggggtgtgaaccacctgaacgccttttctctacctcgcagggctcagcagcaccyggtgaacagcagcaggaggagccgctagagcagctgctcatgggcagagcagcccttgggcaactcctgccaccaccccctccccagggagcccaaggca

SEQ ID NO: 481745 - DNA, 201 bp, Homo sapiens
agggctggatttggcttttctaagcaacatgtgttcctgcgcagggctgaatggtcgctgagacagagatggaagccaggacaagggagcccaccgggccyagataggtacagagagcagaggctcctgttctgtcctcgccacccacgagggtgacactgcttgtaaatggtggctgtgctctcccagcaagaaaaaagc

SEQ ID NO: 481746 - DNA, 201 bp, Homo sapiens
gaggggagcctttgatgctgccacctcccttagagatggggtaccgggtcactgctgaagacctggaccgggagaaggaggaggcattccagcgcatcaasagtgcactgcaggttgaggaccaggccatctaggactgcagaccctcacggccttcccacactttgtcctcacttgcaacaggggcttctggtctgcctg

SEQ ID NO: 481747 - DNA, 201 bp, Homo sapiens
cgcagggctgaatggtcgctgagacagagatggaagccaggacaagggagcccaccgggcccagataggtacagagagcagaggctcctgttctgtcctcrccacccacgagggtgacactgcttgtaaatggtggctgtgctctcccagcaagaaaaaagcacaactaaatccacactgcacacagacgcagacagaaag

SEQ ID NO: 481748 - DNA, 201 bp, Homo sapiens
tgaatggtcgctgagacagagatggaagccaggacaagggagcccaccgggcccagataggtacagagagcagaggctcctgttctgtcctcgccacccaygagggtgacactgcttgtaaatggtggctgtgctctcccagcaagaaaaaagcacaactaaatccacactgcacacagacgcagacagaaagccttcaag

SEQ ID NO: 481749 - DNA, 201 bp, Homo sapiens
atggtcgctgagacagagatggaagccaggacaagggagcccaccgggcccagataggtacagagagcagaggctcctgttctgtcctcgccacccacgasggtgacactgcttgtaaatggtggctgtgctctcccagcaagaaaaaagcacaactaaatccacactgcacacagacgcagacagaaagccttcaagtgg

SEQ ID NO: 481750 - DNA, 201 bp, Homo sapiens
tcgccacccacgagggtgacactgcttgtaaatggtggctgtgctctcccagcaagaaaaaagcacaactaaatccacactgcacacagacgcagacagamagccttcaagtggctctgttttctgctccctgccttgccaggtccacaagcagagaggagtgtcaggcacatggccccgctgtcaggctccccagtgagc

SEQ ID NO: 481751 - DNA, 201 bp, Homo sapiens
ctaaatccacactgcacacagacgcagacagaaagccttcaagtggctctgttttctgctccctgccttgccaggtccacaagcagagaggagtgtcaggyacatggccccgctgtcaggctccccagtgagctgcgggctcagcaggagctgcccactgacacacaggggacacccactcctgccaccttgggagcggtt

SEQ ID NO: 481752 - DNA, 201 bp, Homo sapiens
ccttcaagtggctctgttttctgctccctgccttgccaggtccacaagcagagaggagtgtcaggcacatggccccgctgtcaggctccccagtgagctgygggctcagcaggagctgcccactgacacacaggggacacccactcctgccaccttgggagcggttgccagacagagccgcactgggtgctggtgtcatcc

SEQ ID NO: 481753 - DNA, 201 bp, Homo sapiens
cttcaagtggctctgttttctgctccctgccttgccaggtccacaagcagagaggagtgtcaggcacatggccccgctgtcaggctccccagtgagctgcrggctcagcaggagctgcccactgacacacaggggacacccactcctgccaccttgggagcggttgccagacagagccgcactgggtgctggtgtcatcca

SEQ ID NO: 481754 - DNA, 201 bp, Homo sapiens
aggcacatggccccgctgtcaggctccccagtgagctgcgggctcagcaggagctgcccactgacacacaggggacacccactcctgccaccttgggagcrgttgccagacagagccgcactgggtgctggtgtcatccagggaccccacacacttccttaaatgtgatcctgcttccctctgggcagctgcatcctctcc

SEQ ID NO: 481755 - DNA, 201 bp, Homo sapiens
cagagaggagtgtcaggcacatggccccgctgtcaggctccccagtgagctgcgggctcagcaggagctgcccactgacacacaggggacacccactcctsccaccttgggagcggttgccagacagagccgcactgggtgctggtgtcatccagggaccccacacacttccttaaatgtgatcctgcttccctctgggca

SEQ ID NO: 481756 - DNA, 201 bp, Homo sapiens
gcacatggccccgctgtcaggctccccagtgagctgcgggctcagcaggagctgcccactgacacacaggggacacccactcctgccaccttgggagcggktgccagacagagccgcactgggtgctggtgtcatccagggaccccacacacttccttaaatgtgatcctgcttccctctgggcagctgcatcctctcctc

SEQ ID NO: 481757 - DNA, 201 bp, Homo sapiens
atgacctttgcgggaaggtcaggaggcctgtctaagtcaagtcagcacgggaagggcatctgacagattccaggcctggggttagcagcctgtgcccccgkctgggagatcagacccggtgttggtcctgccacccacgtgctgtgtgagaggagaatccctgacccctgccctgggccttaacacacatccgacgaatga

SEQ ID NO: 481758 - DNA, 201 bp, Homo sapiens
atctgacagattccaggcctggggttagcagcctgtgcccccggctgggagatcagacccggtgttggtcctgccacccacgtgctgtgtgagaggagaahccctgacccctgccctgggccttaacacacatccgacgaatgaatgaagggttgcctcagtaccggtgctccaagtcctgcgatgctaagtgcttttctc

SEQ ID NO: 481759 - DNA, 201 bp, Homo sapiens
tgacagattccaggcctggggttagcagcctgtgcccccggctgggagatcagacccggtgttggtcctgccacccacgtgctgtgtgagaggagaatccstgacccctgccctgggccttaacacacatccgacgaatgaatgaagggttgcctcagtaccggtgctccaagtcctgcgatgctaagtgcttttctcctc

SEQ ID NO: 481760 - DNA, 201 bp, Homo sapiens
gtgttggtcctgccacccacgtgctgtgtgagaggagaatccctgacccctgccctgggccttaacacacatccgacgaatgaatgaagggttgcctcagyaccggtgctccaagtcctgcgatgctaagtgcttttctcctctgagtcttagcaatggacaattccaatacctccacacaggacactagagtaagaaacc

SEQ ID NO: 481761 - DNA, 201 bp, Homo sapiens
ggcgtggtgtttagacacagataggagtccagggtatgactgatggaggccccggcccacgtgaccagcaaggtcagaggcccagccagattccatcctgrggaagcaaatgaattctcagaggaagtggtctgtgtctgcatgaactgctctcaaaccaacaaacaggcttctcttggcaacagactcatgacaaaggat

SEQ ID NO: 481762 - DNA, 201 bp, Homo sapiens
aggccttccaggacaggctcggttctggtcccctgctttttgaggttgggttaaaatgccgaccatggcagaggggtcacagctcaggttcccacacctcrcttttcacagcctccaagggcagcagtgcacatggaggagacgtctcccacgaggccaaggcctccaatgctcaccgatgccctctgcgaagctggggta

SEQ ID NO: 481763 - DNA, 201 bp, Homo sapiens
tttagacacagataggagtccagggtatgactgatggaggccccggcccacgtgaccagcaaggtcagaggcccagccagattccatcctggggaagcaartgaattctcagaggaagtggtctgtgtctgcatgaactgctctcaaaccaacaaacaggcttctcttggcaacagactcatgacaaaggattcaagattg

SEQ ID NO: 481764 - DNA, 201 bp, Homo sapiens
tgatggaggccccggcccacgtgaccagcaaggtcagaggcccagccagattccatcctggggaagcaaatgaattctcagaggaagtggtctgtgtctgyatgaactgctctcaaaccaacaaacaggcttctcttggcaacagactcatgacaaaggattcaagattgtttgaaaaaaaaaaaaggggagcagggaggc

SEQ ID NO: 481765 - DNA, 201 bp, Homo sapiens
ttgtttgaaaaaaaaaaaaggggagcagggaggcagaaagtcctggaaaagtaaattgtttattttacaataagaaagtgattacatatttttttttttayaatggtggaaaattagaagtcattgtgaaaatgatgtctacctgccttgctgatgagtaggatgtgatttggctctttaggaaactgaatttgcagaact

SEQ ID NO: 481766 - DNA, 201 bp, Homo sapiens
ggagcagggaggcagaaagtcctggaaaagtaaattgtttattttacaataagaaagtgattacatatttttttttttacaatggtggaaaattagaagtsattgtgaaaatgatgtctacctgccttgctgatgagtaggatgtgatttggctctttaggaaactgaatttgcagaacttaagaatattgatttataaag

SEQ ID NO: 481767 - DNA, 201 bp, Homo sapiens
tggaaaagtaaattgtttattttacaataagaaagtgattacatatttttttttttacaatggtggaaaattagaagtcattgtgaaaatgatgtctaccygccttgctgatgagtaggatgtgatttggctctttaggaaactgaatttgcagaacttaagaatattgatttataaagggcatggccattgacccagtcc

SEQ ID NO: 481768 - DNA, 201 bp, Homo sapiens
tcaggctccccagtgagctgcgggctcagcaggagctgcccactgacacacaggggacacccactcctgccaccttgggagcggttgccagacagagccgyactgggtgctggtgtcatccagggaccccacacacttccttaaatgtgatcctgcttccctctgggcagctgcatcctctcctcctgcaggaccgtctgg

SEQ ID NO: 481769 - DNA, 201 bp, Homo sapiens
gagccgcactgggtgctggtgtcatccagggaccccacacacttccttaaatgtgatcctgcttccctctgggcagctgcatcctctcctcctgcaggacygtctggaaacttggctctcagtttgatctcccttctctcctctgcctgccccaagcccctctttctaaaaaagtgatgccatgttcatgggattatttct

SEQ ID NO: 481770 - DNA, 201 bp, Homo sapiens
ccttccagtacctattgcatgaccccccacgtccgcctcccgccattgccagcaagtgcctcgcgcgggtacctggctgcgcttattaatccgttaagctsgctctgtcacgggcgccgtgatgtgctcacgcgcccgctccctcaggtttaaaaggcgcgttgcccggcaacagaagaaactgctggcttagccgttggc

SEQ ID NO: 481771 - DNA, 201 bp, Homo sapiens
gagcagctgctcatgggcagagcagcccttgggcaactcctgccaccaccccctccccagggagcccaaggcaggggaggctcagcatggaatgaaacagsggagtgagggacacaaggaggtgggaagtgggagggtcccagccccaccaagtacgcagagacccccttgtcgtcctggacaccacaggggcacctgcag

SEQ ID NO: 481772 - DNA, 201 bp, Homo sapiens
gcaccagtgtttagccctggtctgcaggaaggaggacagcagactttaggaccccacagcatggcagtgctgaccatttcacccacttggcctccttgagraatagggatggggagccctctggggatgagcaaggccttccaggacaggctcggttctggtcccctgctttttgaggttgggttaaaatgccgaccatgg

SEQ ID NO: 481773 - DNA, 201 bp, Homo sapiens
ctgcctgccccaagcccctctttctaaaaaagtgatgccatgttcatgggattatttcttgaaaatacttggcggcctccatgcttctgttttctttgagycaggtggtcaggagggcttacaaagaatgcctgggctcccccgcagctgccggcagatggggtagcgaatggtcctgtgcctccacctgctccgggaggg

SEQ ID NO: 481774 - DNA, 201 bp, Homo sapiens
aggaggacagcagactttaggaccccacagcatggcagtgctgaccatttcacccacttggcctccttgaggaatagggatggggagccctctggggatgrgcaaggccttccaggacaggctcggttctggtcccctgctttttgaggttgggttaaaatgccgaccatggcagaggggtcacagctcaggttcccacac

SEQ ID NO: 481775 - DNA, 201 bp, Homo sapiens
gaggcagtgggtgactcccctgggttacgacaagccggagacctctcccgaggtggtcacatggagcgcccgggacacgagtccttgcgcagtttaggctygtcatcatcgtcacacccacagcgctggccgccagtgaggaccctgtgaggggcacctgtgtggggtgtgaaccacctgaacgccttttctctacctcgc

SEQ ID NO: 481776 - DNA, 201 bp, Homo sapiens
ctctttctaaaaaagtgatgccatgttcatgggattatttcttgaaaatacttggcggcctccatgcttctgttttctttgagccaggtggtcaggagggyttacaaagaatgcctgggctcccccgcagctgccggcagatggggtagcgaatggtcctgtgcctccacctgctccgggagggagtctcccgtctctagg

SEQ ID NO: 481777 - DNA, 201 bp, Homo sapiens
taggaccccacagcatggcagtgctgaccatttcacccacttggcctccttgaggaatagggatggggagccctctggggatgagcaaggccttccaggayaggctcggttctggtcccctgctttttgaggttgggttaaaatgccgaccatggcagaggggtcacagctcaggttcccacacctcacttttcacagcct

SEQ ID NO: 481778 - DNA, 201 bp, Homo sapiens
aaaaaagtgatgccatgttcatgggattatttcttgaaaatacttggcggcctccatgcttctgttttctttgagccaggtggtcaggagggcttacaaasaatgcctgggctcccccgcagctgccggcagatggggtagcgaatggtcctgtgcctccacctgctccgggagggagtctcccgtctctaggcctggccc

SEQ ID NO: 481779 - DNA, 201 bp, Homo sapiens
gtgtgctccgagttccagggcgtcctccagctcagccactgcactgagaacatggactctctgtggggcccaggagccgggagtcacccctttggggtccwcaacacccggctgtccccagacttgtgtccagggaagatagtgttgagggccctcaaggagagcggggcagggatgcctgagcaggacaaggaccctaga

SEQ ID NO: 481780 - DNA, 201 bp, Homo sapiens
attatttcttgaaaatacttggcggcctccatgcttctgttttctttgagccaggtggtcaggagggcttacaaagaatgcctgggctcccccgcagctgycggcagatggggtagcgaatggtcctgtgcctccacctgctccgggagggagtctcccgtctctaggcctggccccttcctaaccctccacgtatcctgt

SEQ ID NO: 481781 - DNA, 201 bp, Homo sapiens
tgggaaaaaaattagaaactatgtataaaacttaaaaatattcaagtatcaaaaggttatttaggatgaaagttttaaaacaagtcatcagcaagctgctrccaccaagtggagacttatacaaaagttgagcgagtccactgagctgagaggacagaaatgaagtcacctgtgctggggcaggggcagggacactggggg

SEQ ID NO: 481782 - DNA, 201 bp, Homo sapiens
agctacttggcaggctgaggcaggaaggtccattgagtccgggaattggaggctgcattgagctataatcgcaccattgcactccagcttgggtgacaaastgagaccctgtctctaaaagaaaaaaaaattggcctgtgagcatgggtttgattttcaaacaggactcggagggtagggacaaacagtgctgtcaccctt

SEQ ID NO: 481783 - DNA, 201 bp, Homo sapiens
agtccaggcctgtggaagccaaacaggagagcgtgggccggaagggcggtcaggatcgggggacgaggtcgctctccctggagaacgaaccctaaagtgcrtagcctggggttccctccctgggggtcctgtcccccgacgtttcacgggccttctgagctgccttccaaggaggactaacacggcaacaaaagatccatt

SEQ ID NO: 481784 - DNA, 201 bp, Homo sapiens
cggtcaggatcgggggacgaggtcgctctccctggagaacgaaccctaaagtgcgtagcctggggttccctccctgggggtcctgtcccccgacgtttcaygggccttctgagctgccttccaaggaggactaacacggcaacaaaagatccatttctgcacaaaaatccttctgggaagaaaaagaagaaagccaagaat

SEQ ID NO: 481785 - DNA, 201 bp, Homo sapiens
ggtcaggatcgggggacgaggtcgctctccctggagaacgaaccctaaagtgcgtagcctggggttccctccctgggggtcctgtcccccgacgtttcacrggccttctgagctgccttccaaggaggactaacacggcaacaaaagatccatttctgcacaaaaatccttctgggaagaaaaagaagaaagccaagaatg

SEQ ID NO: 481786 - DNA, 201 bp, Homo sapiens
acccccttgtcgtcctggacaccacaggggcacctgcaggctgggagaccaggtcctctgtgcatgggcccgggaggcagacctgccccaagggtgatgcrgaggccacaggtgctgcacgctccagcgcccactctagacatcagcctccaggttgactaagggtcaggtcatgtttgaaaccatgcttggctggaccgg

SEQ ID NO: 481787 - DNA, 201 bp, Homo sapiens
cctggacaccacaggggcacctgcaggctgggagaccaggtcctctgtgcatgggcccgggaggcagacctgccccaagggtgatgcagaggccacaggtrctgcacgctccagcgcccactctagacatcagcctccaggttgactaagggtcaggtcatgtttgaaaccatgcttggctggaccgggacccatggcaag

SEQ ID NO: 481788 - DNA, 201 bp, Homo sapiens
aatggtggaaaattagaagtcattgtgaaaatgatgtctacctgccttgctgatgagtaggatgtgatttggctctttaggaaactgaatttgcagaactkaagaatattgatttataaagggcatggccattgacccagtccatcttatgcaaatctggatgccataaataatatttaaaaatgaaagtattggggtgga

SEQ ID NO: 481789 - DNA, 201 bp, Homo sapiens
aatttgcagaacttaagaatattgatttataaagggcatggccattgacccagtccatcttatgcaaatctggatgccataaataatatttaaaaatgaargtattggggtggaggttgcagtgagcagagattgcccccgctacactccagcctggtcgacagagtgaactctgtctcaaaaaaaaaaaaaaaagaaaag

SEQ ID NO: 481790 - DNA, 201 bp, Homo sapiens
tataaagggcatggccattgacccagtccatcttatgcaaatctggatgccataaataatatttaaaaatgaaagtattggggtggaggttgcagtgagcrgagattgcccccgctacactccagcctggtcgacagagtgaactctgtctcaaaaaaaaaaaaaaaagaaaagaaagaagaagccattcccaacgttgct

SEQ ID NO: 481791 - DNA, 201 bp, Homo sapiens
gggcatggccattgacccagtccatcttatgcaaatctggatgccataaataatatttaaaaatgaaagtattggggtggaggttgcagtgagcagagatygcccccgctacactccagcctggtcgacagagtgaactctgtctcaaaaaaaaaaaaaaaagaaaagaaagaagaagccattcccaacgttgctcatcaa

SEQ ID NO: 481792 - DNA, 201 bp, Homo sapiens
agtattggggtggaggttgcagtgagcagagattgcccccgctacactccagcctggtcgacagagtgaactctgtctcaaaaaaaaaaaaaaaagaaaaraaagaagaagccattcccaacgttgctcatcaaattatgaccataaatttccaggatcagactaacggctaaagagactgatgcatcaacaccaggcaga

SEQ ID NO: 481793 - DNA, 201 bp, Homo sapiens
gtattggggtggaggttgcagtgagcagagattgcccccgctacactccagcctggtcgacagagtgaactctgtctcaaaaaaaaaaaaaaaagaaaagraagaagaagccattcccaacgttgctcatcaaattatgaccataaatttccaggatcagactaacggctaaagagactgatgcatcaacaccaggcagag

SEQ ID NO: 481794 - DNA, 201 bp, Homo sapiens
tgagcagagattgcccccgctacactccagcctggtcgacagagtgaactctgtctcaaaaaaaaaaaaaaaagaaaagaaagaagaagccattcccaacrttgctcatcaaattatgaccataaatttccaggatcagactaacggctaaagagactgatgcatcaacaccaggcagagaataaagcagatttttttgtt

SEQ ID NO: 481795 - DNA, 201 bp, Homo sapiens
aacggctaaagagactgatgcatcaacaccaggcagagaataaagcagatttttttgttgttgttctggagagcttctaggaacttgaaaaatacatatgscacactcttaagacccggtggttcttaatcagggatgttcattaaaatgctggaaaactgtaaagacttccaggtcccatccaaggagattttgcttctg

SEQ ID NO: 481796 - DNA, 201 bp, Homo sapiens
ccccacgtccgcctcccgccattgccagcaagtgcctcgcgcgggtacctggctgcgcttattaatccgttaagctcgctctgtcacgggcgccgtgatgygctcacgcgcccgctccctcaggtttaaaaggcgcgttgcccggcaacagaagaaactgctggcttagccgttggccgagttggcggctggacgaggacg

SEQ ID NO: 481797 - DNA, 201 bp, Homo sapiens
ggagagcttctaggaacttgaaaaatacatatgccacactcttaagacccggtggttcttaatcagggatgttcattaaaatgctggaaaactgtaaagayttccaggtcccatccaaggagattttgcttctgattgactggctagtggcctggccattggtattttgaaaaatccctccaagtgattcttttacatccc

SEQ ID NO: 481798 - DNA, 201 bp, Homo sapiens
ccaggtcccatccaaggagattttgcttctgattgactggctagtggcctggccattggtattttgaaaaatccctccaagtgattcttttacatcccagmtagaaaaccctaaattaaaggtgaaaaaaccagacaccaagtggcatttaaataaatgtcaactttaactccacaaagcatctggttgcatgtggacaga

SEQ ID NO: 481799 - DNA, 201 bp, Homo sapiens
cacgcgcccgctccctcaggtttaaaaggcgcgttgcccggcaacagaagaaactgctggcttagccgttggccgagttggcggctggacgaggacgctcmgagcccagctctcgagagttcaagcaaccgacggttccccactgctcccaggagcggttacctgggcactctgtgcccctccttcctgttcgggcccagg

SEQ ID NO: 481800 - DNA, 201 bp, Homo sapiens
tggcttttctaagcaacatgtgttcctgcgcagggctgaatggtcgctgagacagagatggaagccaggacaagggagcccaccgggcccagataggtacrgagagcagaggctcctgttctgtcctcgccacccacgagggtgacactgcttgtaaatggtggctgtgctctcccagcaagaaaaaagcacaactaaatc

SEQ ID NO: 481801 - DNA, 201 bp, Homo sapiens
ccttgcaactgggtctgaaagagctgcaggaggcagtgggtgactcccctgggttacgacaagccggagacctctcccgaggtggtcacatggagcgcccrggacacgagtccttgcgcagtttaggcttgtcatcatcgtcacacccacagcgctggccgccagtgaggaccctgtgaggggcacctgtgtggggtgtga

SEQ ID NO: 481802 - DNA, 201 bp, Homo sapiens
aggggaggctcagcatggaatgaaacaggggagtgagggacacaaggaggtgggaagtgggagggtcccagccccaccaagtacgcagagacccccttgtygtcctggacaccacaggggcacctgcaggctgggagaccaggtcctctgtgcatgggcccgggaggcagacctgccccaagggtgatgcagaggccacag

SEQ ID NO: 481803 - DNA, 201 bp, Homo sapiens
ggcccccagagggagctgaaactaccacagggccctcccagggatgctgggcattctaggggtcctggtcagggtgggtggtgtgtgctgcaaagaagggyctgcaggcacaaaatcctgttgctttgaagatgctgggaaggaccctctggggtctcagtgccctcccctggcatttgaggcaggtccgggtccttcaaa

SEQ ID NO: 481804 - DNA, 201 bp, Homo sapiens
ttgtccagcccttggcgtggtctccaccaggtccccagcccaccagtgtaggccgcccctgagcctgctgctgccacgggccctgtctctacccaggacgycccccgaccctcgcagtgtcagggaaatgatcatggtggtggtgacactccgcaggcagggctgctgagagaagctgagaagggtcacactgcaggcagg

SEQ ID NO: 481805 - DNA, 201 bp, Homo sapiens
tggctgggctcagccacctcattggccacgggcagcctttgtcgtgtgagccttgctctcctggggaggctcaggctgacggctgatgtgggcattgccgmgggtaacctgtggcccagtgtatatggccgggtctcctcaagctgcattcattcaagtaggacccagggtgcatgcccatctccagcccagggcagctcc

SEQ ID NO: 481806 - DNA, 201 bp, Homo sapiens
tctgtgtctgcatgaactgctctcaaaccaacaaacaggcttctcttggcaacagactcatgacaaaggattcaagattgtttgaaaaaaaaaaaaggggrgcagggaggcagaaagtcctggaaaagtaaattgtttattttacaataagaaagtgattacatatttttttttttacaatggtggaaaattagaagtcat

SEQ ID NO: 481807 - DNA, 201 bp, Homo sapiens
ggcaggggaggctcagcatggaatgaaacaggggagtgagggacacaaggaggtgggaagtgggagggtcccagccccaccaagtacgcagagaccccctygtcgtcctggacaccacaggggcacctgcaggctgggagaccaggtcctctgtgcatgggcccgggaggcagacctgccccaagggtgatgcagaggcca

SEQ ID NO: 481808 - DNA, 201 bp, Homo sapiens
aagagagctgggctacctttccaggcggtctagaaggaaaaggaaggtgagcaggttggcctccggcagggacaacaacaggttgagcatgcagctcttcyttgcaactgggtctgaaagagctgcaggaggcagtgggtgactcccctgggttacgacaagccggagacctctcccgaggtggtcacatggagcgcccgg

SEQ ID NO: 481809 - DNA, 201 bp, Homo sapiens
agtgcgtagcctggggttccctccctgggggtcctgtcccccgacgtttcacgggccttctgagctgccttccaaggaggactaacacggcaacaaaagamccatttctgcacaaaaatccttctgggaagaaaaagaagaaagccaagaatggagtcaaaacgctacccagtgctgactaagcctctcaaaccctgttct

SEQ ID NO: 481810 - DNA, 201 bp, Homo sapiens
aaagagctgcaggaggcagtgggtgactcccctgggttacgacaagccggagacctctcccgaggtggtcacatggagcgcccgggacacgagtccttgcrcagtttaggcttgtcatcatcgtcacacccacagcgctggccgccagtgaggaccctgtgaggggcacctgtgtggggtgtgaaccacctgaacgccttt

SEQ ID NO: 481811 - DNA, 201 bp, Homo sapiens
tacccagtgctgactaagcctctcaaaccctgttctaagtggagtgtggtttctaagtcagggaaatggaagaggccccacccacacagggacagggccayggcccccacaggatgaagcagcagcatttattcaagatacaacagtgagggaatccggtcacgttcccttctccccagagagggcgcttcttgacaagtg

SEQ ID NO: 481812 - DNA, 201 bp, Homo sapiens
ccggcctgcgctgaatttcatcagtgccctctgcccaccacatcctcatacagggcagtggacagaccgcactgagtcctgggcttccacctcctgtccamccccaaggcaggaaggccaagtccccacagaagcccctggtccactccaccaagtggcatgagtgggtacgatggtgtaaaaactggcttctatagaagc

SEQ ID NO: 481813 - DNA, 201 bp, Homo sapiens
cagcagcatttattcaagatacaacagtgagggaatccggtcacgttcccttctccccagagagggcgcttcttgacaagtgattcagtagaaatcttttrgactcttaagttaagttcataaaaaccactgctttcaccctgtctcccagggccaggcctggactcagagatgaactggcttggggcgccctcgggtggc

SEQ ID NO: 481814 - DNA, 201 bp, Homo sapiens
gcttcttgacaagtgattcagtagaaatcttttagactcttaagttaagttcataaaaaccactgctttcaccctgtctcccagggccaggcctggactcygagatgaactggcttggggcgccctcgggtggccacataaaaaacccacagtctgaggccagcctggggctttcagacctgggcgggatctgcccaggcc

SEQ ID NO: 481815 - DNA, 201 bp, Homo sapiens
gctggagtacagtggctccatcatggatcactgcagcctctaactcctgggctcaagcaatcctcctgtgtcagcctcccagatacctaggattacagatrtgtgccccaatgcctgcctaatttttctttgtattttttctggagatggggtttgctacattgcccagactggtctcaaacacctgggttcagttgtcct

SEQ ID NO: 481816 - DNA, 201 bp, Homo sapiens
cagcaaggtcagaggcccagccagattccatcctggggaagcaaatgaattctcagaggaagtggtctgtgtctgcatgaactgctctcaaaccaacaaayaggcttctcttggcaacagactcatgacaaaggattcaagattgtttgaaaaaaaaaaaaggggagcagggaggcagaaagtcctggaaaagtaaattgt

SEQ ID NO: 481817 - DNA, 201 bp, Homo sapiens
tacagtggctccatcatggatcactgcagcctctaactcctgggctcaagcaatcctcctgtgtcagcctcccagatacctaggattacagatatgtgccmcaatgcctgcctaatttttctttgtattttttctggagatggggtttgctacattgcccagactggtctcaaacacctgggttcagttgtcctgcctcgg

SEQ ID NO: 481818 - DNA, 201 bp, Homo sapiens
ggtttgctacattgcccagactggtctcaaacacctgggttcagttgtcctgcctcggcctcccaaagtgctgggattacaggcatgagccaccacactcraacacttggggtggttttaagcccccagcaaggtgcaccagcaggaccaggaggtggcctgggcaccccctatcactcccatccatgcaaacctaggcaa

SEQ ID NO: 481819 - DNA, 201 bp, Homo sapiens
cccaaagtgctgggattacaggcatgagccaccacactcgaacacttggggtggttttaagcccccagcaaggtgcaccagcaggaccaggaggtggcctrggcaccccctatcactcccatccatgcaaacctaggcaagtccctctctctgaatctcagccaccaccacatacaatgcaagtcggaagatgggcaggac

SEQ ID NO: 481820 - DNA, 201 bp, Homo sapiens
tgttgcccaggctggagtgcaatggtgcgatctcagctcactgcaatctccacctcagcaggagagcaggaatcttcagtgatccacgggcagatctgccrccattgtgggcacctgttcctcccgcaacctttgtgcccgcctctctccttccagtacctattgcatgaccccccacgtccgcctcccgccattgccagc

SEQ ID NO: 481821 - DNA, 201 bp, Homo sapiens
tggggtggttttaagcccccagcaaggtgcaccagcaggaccaggaggtggcctgggcaccccctatcactcccatccatgcaaacctaggcaagtccctstctctgaatctcagccaccaccacatacaatgcaagtcggaagatgggcaggactgggggtggggcaggcagagaccacctctgtcaggctggggttgca

SEQ ID NO: 481822 - DNA, 201 bp, Homo sapiens
tcagcaggagagcaggaatcttcagtgatccacgggcagatctgccaccattgtgggcacctgttcctcccgcaacctttgtgcccgcctctctccttccmgtacctattgcatgaccccccacgtccgcctcccgccattgccagcaagtgcctcgcgcgggtacctggctgcgcttattaatccgttaagctcgctctg

SEQ ID NO: 481823 - DNA, 201 bp, Homo sapiens
tcagccaccaccacatacaatgcaagtcggaagatgggcaggactgggggtggggcaggcagagaccacctctgtcaggctggggttgcatgggctggagrctgtcttcccatacctgagacatgacctccaaggacctgctgtcagtcatggtgatgggctggctggggttggcagggagcttgctctccttctcggagg

SEQ ID NO: 481824 - DNA, 201 bp, Homo sapiens
cctggagcccgttcagcccatcccccagttcactttgcctgtgggatctccccgttgctcctgcccgtggactgagtggcaggccatcctacaagcacccrgacacttgacatcagtggtgtcaagacaactctaagaaggttttccgtgatcctgcaagccctgccttccttcctgggatcctgccttcaatttgattgc

SEQ ID NO: 481825 - DNA, 201 bp, Homo sapiens
atgaccccccacgtccgcctcccgccattgccagcaagtgcctcgcgcgggtacctggctgcgcttattaatccgttaagctcgctctgtcacgggcgccstgatgtgctcacgcgcccgctccctcaggtttaaaaggcgcgttgcccggcaacagaagaaactgctggcttagccgttggccgagttggcggctggacg

SEQ ID NO: 481826 - DNA, 201 bp, Homo sapiens
gctctgtcacgggcgccgtgatgtgctcacgcgcccgctccctcaggtttaaaaggcgcgttgcccggcaacagaagaaactgctggcttagccgttggcsgagttggcggctggacgaggacgctcagagcccagctctcgagagttcaagcaaccgacggttccccactgctcccaggagcggttacctgggcactctg

SEQ ID NO: 481827 - DNA, 201 bp, Homo sapiens
agccagattccatcctggggaagcaaatgaattctcagaggaagtggtctgtgtctgcatgaactgctctcaaaccaacaaacaggcttctcttggcaacwgactcatgacaaaggattcaagattgtttgaaaaaaaaaaaaggggagcagggaggcagaaagtcctggaaaagtaaattgtttattttacaataagaaa

SEQ ID NO: 481828 - DNA, 201 bp, Homo sapiens
cgtgatgtgctcacgcgcccgctccctcaggtttaaaaggcgcgttgcccggcaacagaagaaactgctggcttagccgttggccgagttggcggctggaygaggacgctcagagcccagctctcgagagttcaagcaaccgacggttccccactgctcccaggagcggttacctgggcactctgtgcccctccttcctgt

SEQ ID NO: 481829 - DNA, 201 bp, Homo sapiens
ggtccttggtgctgggggtctggtgggagcagaggggcaccccaacggcctggagacctggagtcctgggcagccacaagagagctgggctacctttccasgcggtctagaaggaaaaggaaggtgagcaggttggcctccggcagggacaacaacaggttgagcatgcagctcttccttgcaactgggtctgaaagagct

SEQ ID NO: 481830 - DNA, 201 bp, Homo sapiens
tcctctcctcctgcaggaccgtctggaaacttggctctcagtttgatctcccttctctcctctgcctgccccaagcccctctttctaaaaaagtgatgccrtgttcatgggattatttcttgaaaatacttggcggcctccatgcttctgttttctttgagccaggtggtcaggagggcttacaaagaatgcctgggctcc

SEQ ID NO: 481831 - DNA, 201 bp, Homo sapiens
ggcagagaccacctctgtcaggctggggttgcatgggctggagactgtcttcccatacctgagacatgacctccaaggacctgctgtcagtcatggtgatrggctggctggggttggcagggagcttgctctccttctcggagggccggagcagcgtggggccaaagacagtggcgaggttgtgcagggacatcttattga

SEQ ID NO: 481832 - DNA, 201 bp, Homo sapiens
ccccccgaccctcgcagtgtcagggaaatgatcatggtggtggtgacactccgcaggcagggctgctgagagaagctgagaagggtcacactgcaggcagrggcccgtgtgacaagcccctctcaccccgagagagctgaccaggcagctcacgagcagagccacatcccgggagtccgagaaaggtcctggctgggctca

SEQ ID NO: 481833 - DNA, 201 bp, Homo sapiens
taaatccacactgcacacagacgcagacagaaagccttcaagtggctctgttttctgctccctgccttgccaggtccacaagcagagaggagtgtcaggcrcatggccccgctgtcaggctccccagtgagctgcgggctcagcaggagctgcccactgacacacaggggacacccactcctgccaccttgggagcggttg

SEQ ID NO: 481834 - DNA, 201 bp, Homo sapiens
gtgtgagccttgctctcctggggaggctcaggctgacggctgatgtgggcattgccgagggtaacctgtggcccagtgtatatggccgggtctcctcaagytgcattcattcaagtaggacccagggtgcatgcccatctccagcccagggcagctcccctgtaagctgggtgagctactgaagccaaggtgggaggcagc

SEQ ID NO: 481835 - DNA, 201 bp, Homo sapiens
cccccgaccctcgcagtgtcagggaaatgatcatggtggtggtgacactccgcaggcagggctgctgagagaagctgagaagggtcacactgcaggcaggsgcccgtgtgacaagcccctctcaccccgagagagctgaccaggcagctcacgagcagagccacatcccgggagtccgagaaaggtcctggctgggctcag

SEQ ID NO: 481836 - DNA, 201 bp, Homo sapiens
agggtgacactgcttgtaaatggtggctgtgctctcccagcaagaaaaaagcacaactaaatccacactgcacacagacgcagacagaaagccttcaagtrgctctgttttctgctccctgccttgccaggtccacaagcagagaggagtgtcaggcacatggccccgctgtcaggctccccagtgagctgcgggctcagc

SEQ ID NO: 481837 - DNA, 201 bp, Homo sapiens
tgccaccttgggagcggttgccagacagagccgcactgggtgctggtgtcatccagggaccccacacacttccttaaatgtgatcctgcttccctctgggsagctgcatcctctcctcctgcaggaccgtctggaaacttggctctcagtttgatctcccttctctcctctgcctgccccaagcccctctttctaaaaaag

SEQ ID NO: 481838 - DNA, 201 bp, Homo sapiens
gccccaagcccctctttctaaaaaagtgatgccatgttcatgggattatttcttgaaaatacttggcggcctccatgcttctgttttctttgagccaggtrgtcaggagggcttacaaagaatgcctgggctcccccgcagctgccggcagatggggtagcgaatggtcctgtgcctccacctgctccgggagggagtctc

SEQ ID NO: 481839 - DNA, 201 bp, Homo sapiens
cctgccaccttgggagcggttgccagacagagccgcactgggtgctggtgtcatccagggaccccacacacttccttaaatgtgatcctgcttccctctgsgcagctgcatcctctcctcctgcaggaccgtctggaaacttggctctcagtttgatctcccttctctcctctgcctgccccaagcccctctttctaaaaa

SEQ ID NO: 481840 - DNA, 201 bp, Homo sapiens
atttgattgcacaggtaccacagcaagccagtgctgtgtgctccgagttccagggcgtcctccagctcagccactgcactgagaacatggactctctgtgsggcccaggagccgggagtcacccctttggggtccacaacacccggctgtccccagacttgtgtccagggaagatagtgttgagggccctcaaggagagcg

SEQ ID NO: 481841 - DNA, 201 bp, Homo sapiens
cagttcctcaaagacagtgagtgaggacaggcctcaggctgtctcttcaggtcacacccagtgtgaaaaggcagcagatatagcaccagggcagacactcrccctcaggaatgactcctccacatccgaggcctctaggcccagtacacacaagtttcccctgctgccacgcaggcgaggggagcctttgatgctgccacc

SEQ ID NO: 481842 - DNA, 201 bp, Homo sapiens
aagtacgcagagacccccttgtcgtcctggacaccacaggggcacctgcaggctgggagaccaggtcctctgtgcatgggcccgggaggcagacctgcccyaagggtgatgcagaggccacaggtgctgcacgctccagcgcccactctagacatcagcctccaggttgactaagggtcaggtcatgtttgaaaccatgct

SEQ ID NO: 481843 - DNA, 201 bp, Homo sapiens
tcggccacggtggtgtgtaggtggctgagctcagattgcagctgctaagacaccagccacttaccaagagaaagccaggctgcttcaaacccagggcccgmggcaaaaaagcatcacttccggccggggagtctggaagccacgccttgtgggaggtcacactggcatctaggccttcgcctgcactgcagaaggagagcc

SEQ ID NO: 481844 - DNA, 201 bp, Homo sapiens
cacatcctacataaataaaaagtcgtatggggaaggaggttggggagggaataaaaaattggcacagacattgatagactggtttccagtttcaaggtaayagatgcacatcatgagaccagaggaggcagagacaagggctggatttggcttttctaagcaacatgtgttcctgcgcagggctgaatggtcgctgagaca

SEQ ID NO: 481845 - DNA, 201 bp, Homo sapiens
tgggctggagactgtcttcccatacctgagacatgacctccaaggacctgctgtcagtcatggtgatgggctggctggggttggcagggagcttgctctcyttctcggagggccggagcagcgtggggccaaagacagtggcgaggttgtgcagggacatcttattgactgcctccttctctgccaccctgtagaggacgg

SEQ ID NO: 481846 - DNA, 201 bp, Homo sapiens
tgacctccaaggacctgctgtcagtcatggtgatgggctggctggggttggcagggagcttgctctccttctcggagggccggagcagcgtggggccaaasacagtggcgaggttgtgcagggacatcttattgactgcctccttctctgccaccctgtagaggacggaagcagagggtgctgtttcaacgccaccaccag

SEQ ID NO: 481847 - DNA, 201 bp, Homo sapiens
aggacctgctgtcagtcatggtgatgggctggctggggttggcagggagcttgctctccttctcggagggccggagcagcgtggggccaaagacagtggcraggttgtgcagggacatcttattgactgcctccttctctgccaccctgtagaggacggaagcagagggtgctgtttcaacgccaccaccaggagagaggc

SEQ ID NO: 481848 - DNA, 201 bp, Homo sapiens
agccgttggccgagttggcggctggacgaggacgctcagagcccagctctcgagagttcaagcaaccgacggttccccactgctcccaggagcggttaccygggcactctgtgcccctccttcctgttcgggcccaggccgaggacctgccagtagggctcagttgcctggagcccgttcagcccatcccccagttcactt

SEQ ID NO: 481849 - DNA, 201 bp, Homo sapiens
ttgctctccttctcggagggccggagcagcgtggggccaaagacagtggcgaggttgtgcagggacatcttattgactgcctccttctctgccaccctgtmgaggacggaagcagagggtgctgtttcaacgccaccaccaggagagaggcagaggggctgtgccgtgctagagtcctcagggagggagtgacctcgaccc

SEQ ID NO: 481850 - DNA, 201 bp, Homo sapiens
cactctgtgcccctccttcctgttcgggcccaggccgaggacctgccagtagggctcagttgcctggagcccgttcagcccatcccccagttcactttgcytgtgggatctccccgttgctcctgcccgtggactgagtggcaggccatcctacaagcacccggacacttgacatcagtggtgtcaagacaactctaagaa

SEQ ID NO: 481851 - DNA, 201 bp, Homo sapiens
ccttctcggagggccggagcagcgtggggccaaagacagtggcgaggttgtgcagggacatcttattgactgcctccttctctgccaccctgtagaggacsgaagcagagggtgctgtttcaacgccaccaccaggagagaggcagaggggctgtgccgtgctagagtcctcagggagggagtgacctcgaccctggctgt

SEQ ID NO: 481852 - DNA, 201 bp, Homo sapiens
caactctaagaaggttttccgtgatcctgcaagccctgccttccttcctgggatcctgccttcaatttgattgcacaggtaccacagcaagccagtgctgygtgctccgagttccagggcgtcctccagctcagccactgcactgagaacatggactctctgtggggcccaggagccgggagtcacccctttggggtccac

SEQ ID NO: 481853 - DNA, 201 bp, Homo sapiens
ctcgaccctggctgtgctgcaagctgactccagccttggtacttctgggtctcagtggcccaggacaaggggccagctctgggctgatggggaggtcttcmtgatgtgcttgggagggaagaggggggtccaagtgcactgctggccacggccaaagctctgagctctttgttaaggccacagtgcagagggaggcgggtg

SEQ ID NO: 481854 - DNA, 201 bp, Homo sapiens
cgggaagggcatctgacagattccaggcctggggttagcagcctgtgcccccggctgggagatcagacccggtgttggtcctgccacccacgtgctgtgtragaggagaatccctgacccctgccctgggccttaacacacatccgacgaatgaatgaagggttgcctcagtaccggtgctccaagtcctgcgatgctaag

SEQ ID NO: 481855 - DNA, 201 bp, Homo sapiens
gggcccaggagccgggagtcacccctttggggtccacaacacccggctgtccccagacttgtgtccagggaagatagtgttgagggccctcaaggagagcrgggcagggatgcctgagcaggacaaggaccctagagtccaagagaatcctggtgatcagagaagggtccccgaggtcaccggggatgcaccgtctgcatt

SEQ ID NO: 481856 - DNA, 201 bp, Homo sapiens
agctgactccagccttggtacttctgggtctcagtggcccaggacaaggggccagctctgggctgatggggaggtcttcatgatgtgcttgggagggaagsggggggtccaagtgcactgctggccacggccaaagctctgagctctttgttaaggccacagtgcagagggaggcgggtggcaaagaggagaggcaggggc

SEQ ID NO: 481857 - DNA, 201 bp, Homo sapiens
cccctttggggtccacaacacccggctgtccccagacttgtgtccagggaagatagtgttgagggccctcaaggagagcggggcagggatgcctgagcagsacaaggaccctagagtccaagagaatcctggtgatcagagaagggtccccgaggtcaccggggatgcaccgtctgcatttcggcccctgcgggacaatgg

SEQ ID NO: 481858 - DNA, 201 bp, Homo sapiens
tcttcatgatgtgcttgggagggaagaggggggtccaagtgcactgctggccacggccaaagctctgagctctttgttaaggccacagtgcagagggaggmgggtggcaaagaggagaggcaggggcgggggtggcagtggtgctagtccttagaagcagtgagttactgcagacaggggtcgggggaaaaggtccttggt

SEQ ID NO: 481859 - DNA, 201 bp, Homo sapiens
tgtgtccagggaagatagtgttgagggccctcaaggagagcggggcagggatgcctgagcaggacaaggaccctagagtccaagagaatcctggtgatcasagaagggtccccgaggtcaccggggatgcaccgtctgcatttcggcccctgcgggacaatggaggcctctctccctttgtgcccgggcccgggcctctgc

SEQ ID NO: 481860 - DNA, 201 bp, Homo sapiens
ggggggtccaagtgcactgctggccacggccaaagctctgagctctttgttaaggccacagtgcagagggaggcgggtggcaaagaggagaggcaggggcrggggtggcagtggtgctagtccttagaagcagtgagttactgcagacaggggtcgggggaaaaggtccttggtgctgggggtctggtgggagcagagggg

SEQ ID NO: 481861 - DNA, 201 bp, Homo sapiens
ggacaaggaccctagagtccaagagaatcctggtgatcagagaagggtccccgaggtcaccggggatgcaccgtctgcatttcggcccctgcgggacaatrgaggcctctctccctttgtgcccgggcccgggcctctgcagacagacctccatgcccagaggtcagaaatcagatataaccagacatcccagacctcctg

SEQ ID NO: 481862 - DNA, 201 bp, Homo sapiens
tgcagagggaggcgggtggcaaagaggagaggcaggggcgggggtggcagtggtgctagtccttagaagcagtgagttactgcagacaggggtcgggggawaaggtccttggtgctgggggtctggtgggagcagaggggcaccccaacggcctggagacctggagtcctgggcagccacaagagagctgggctacctttc

SEQ ID NO: 481863 - DNA, 201 bp, Homo sapiens
catgcccagaggtcagaaatcagatataaccagacatcccagacctcctggacgagctcctgcaccaaccgaaatgccatctccagctcctacagctccaygggaggcttgccggggctaaagcggaggagggggccagcctcatcccactgccagctgaccctcagttcctcaaagacagtgagtgaggacaggcctcag

SEQ ID NO: 481864 - DNA, 201 bp, Homo sapiens
ccggggctaaagcggaggagggggccagcctcatcccactgccagctgaccctcagttcctcaaagacagtgagtgaggacaggcctcaggctgtctcttyaggtcacacccagtgtgaaaaggcagcagatatagcaccagggcagacactcgccctcaggaatgactcctccacatccgaggcctctaggcccagtaca

SEQ ID NO: 481865 - DNA, 201 bp, Homo sapiens
cggggctaaagcggaggagggggccagcctcatcccactgccagctgaccctcagttcctcaaagacagtgagtgaggacaggcctcaggctgtctcttcrggtcacacccagtgtgaaaaggcagcagatatagcaccagggcagacactcgccctcaggaatgactcctccacatccgaggcctctaggcccagtacac

SEQ ID NO: 481866 - DNA, 201 bp, Homo sapiens
aaacttggctctcagtttgatctcccttctctcctctgcctgccccaagcccctctttctaaaaaagtgatgccatgttcatgggattatttcttgaaaayacttggcggcctccatgcttctgttttctttgagccaggtggtcaggagggcttacaaagaatgcctgggctcccccgcagctgccggcagatggggtag

SEQ ID NO: 481867 - DNA, 201 bp, Homo sapiens
gtgcgcattggtttccccagctgtcaagtaaagggattggatgaggaagtcttgtcaaggtggaatgatctcagatttggggcagcagtgaatgatcccgytccctgggccatgccagtggcccggcctcggctcaacacagccccaacactctggaatggggatgagggggcagtcagctcttgctcctagtaagagaga

SEQ ID NO: 481868 - DNA, 201 bp, Homo sapiens
caggccaggttcattctgggcccccagagggagctgaaactaccacagggccctcccagggatgctgggcattctaggggtcctggtcagggtgggtggtstgtgctgcaaagaagggtctgcaggcacaaaatcctgttgctttgaagatgctgggaaggaccctctggggtctcagtgccctcccctggcatttgaggc

SEQ ID NO: 481869 - DNA, 201 bp, Homo sapiens
cacatcccgggagtccgagaaaggtcctggctgggctcagccacctcattggccacgggcagcctttgtcgtgtgagccttgctctcctggggaggctcargctgacggctgatgtgggcattgccgagggtaacctgtggcccagtgtatatggccgggtctcctcaagctgcattcattcaagtaggacccagggtgca

SEQ ID NO: 481870 - DNA, 201 bp, Homo sapiens
tgctgccacgcaggcgaggggagcctttgatgctgccacctcccttagagctggggtaccgggtcactgttgaagacctggaccgggagaaggaggcggcmttccagcgcatcaacagtgcactgcaggttgaggacaaggccatctcggactgcagaccctcacggccttcccacactttgtcctcacttgcaacagggg

SEQ ID NO: 481871 - DNA, 201 bp, Homo sapiens
gattggatgaggaagtcttgtcaaggtggaatgatctcagatttggggcagcagtgaatgatcccgttccctgggccatgccagtggcccggcctcggctsaacacagccccaacactctggaatggggatgagggggcagtcagctcttgctcctagtaagagagatgcaatagggctctgtggctgagctgggtgcctt

SEQ ID NO: 481872 - DNA, 201 bp, Homo sapiens
aggccgaggacctgccagtagggctcagttgcctggagcccgttcagcccatcccccagttcactttgcctgtgggatctccccgttgctcctgcccgtgsactgagtggcaggccatcctacaagcacccggacacttgacatcagtggtgtcaagacaactctaagaaggttttccgtgatcctgcaagccctgccttc

SEQ ID NO: 481873 - DNA, 201 bp, Homo sapiens
agatagtgttgagggccctcaaggagagcggggcagggatgcctgagcaggacaaggaccctagagtccaagagaatcctggtgatcagagaagggtcccsgaggtcaccggggatgcaccgtctgcatttcggcccctgcgggacaatggaggcctctctccctttgtgcccgggcccgggcctctgcagacagacctcc

SEQ ID NO: 481874 - DNA, 201 bp, Homo sapiens
ttgttctggagagcttctaggaacttgaaaaatacatatgccacactcttaagacccggtggttcttaatcagggatgttcattaaaatgctggaaaactstaaagacttccaggtcccatccaaggagattttgcttctgattgactggctagtggcctggccattggtattttgaaaaatccctccaagtgattctttt

SEQ ID NO: 481875 - DNA, 201 bp, Homo sapiens
cctggtctgcaggaaggaggacagcagactttaggaccccacagcatggcagtgctgaccatttcacccacttggcctccttgaggaatagggatggggasccctctggggatgagcaaggccttccaggacaggctcggttctggtcccctgctttttgaggttgggttaaaatgccgaccatggcagaggggtcacagc

SEQ ID NO: 481876 - DNA, 201 bp, Homo sapiens
gcagagggaggcgggtggcaaagaggagaggcaggggcgggggtggcagtggtgctagtccttagaagcagtgagttactgcagacaggggtcgggggaawaggtccttggtgctgggggtctggtgggagcagaggggcaccccaacggcctggagacctggagtcctgggcagccacaagagagctgggctacctttcc

SEQ ID NO: 481877 - DNA, 201 bp, Homo sapiens
gaggcgggtggcaaagaggagaggcaggggcgggggtggcagtggtgctagtccttagaagcagtgagttactgcagacaggggtcgggggaaaaggtccktggtgctgggggtctggtgggagcagaggggcaccccaacggcctggagacctggagtcctgggcagccacaagagagctgggctacctttccaggcggt

SEQ ID NO: 481878 - DNA, 201 bp, Homo sapiens
agtggtgctagtccttagaagcagtgagttactgcagacaggggtcgggggaaaaggtccttggtgctgggggtctggtgggagcagaggggcaccccaamggcctggagacctggagtcctgggcagccacaagagagctgggctacctttccaggcggtctagaaggaaaaggaaggtgagcaggttggcctccggcag

SEQ ID NO: 481879 - DNA, 201 bp, Homo sapiens
gtggcagaaaggctggactcagcaggaacaccaaatcccggaccaggcagaaaccacccaagactgaggggctcgtgccagagcggtggccacaggtaagracccgggcccaggctgtgtggcaggaatcctccatgtcccagggcttagcatagcaaaggaagaccagccgggtcaccctggtggccatctgtccctgtc

SEQ ID NO: 481880 - DNA, 201 bp, Homo sapiens
gctgaccctcagttcctcaaagacagtgagtgaggacaggcctcaggctgtctcttcaggtcacacccagtgtgaaaaggcagcagatatagcaccagggyagacactcgccctcaggaatgactcctccacatccgaggcctctaggcccagtacacacaagtttcccctgctgccacgcaggcgaggggagcctttgat

SEQ ID NO: 481881 - DNA, 201 bp, Homo sapiens
tccttggtgctgggggtctggtgggagcagaggggcaccccaacggcctggagacctggagtcctgggcagccacaagagagctgggctacctttccaggyggtctagaaggaaaaggaaggtgagcaggttggcctccggcagggacaacaacaggttgagcatgcagctcttccttgcaactgggtctgaaagagctgc

SEQ ID NO: 481882 - DNA, 201 bp, Homo sapiens
gcgcagggctgaatggtcgctgagacagagatggaagccaggacaagggagcccaccgggcccagataggtacagagagcagaggctcctgttctgtcctygccacccacgagggtgacactgcttgtaaatggtggctgtgctctcccagcaagaaaaaagcacaactaaatccacactgcacacagacgcagacagaaa

SEQ ID NO: 481883 - DNA, 201 bp, Homo sapiens
ggcagcagatatagcaccagggcagacactcgccctcaggaatgactcctccacatccgaggcctctaggcccagtacacacaagtttcccctgctgccaygcaggcgaggggagcctttgatgctgccacctcccttagagctggggtaccgggtcactgttgaagacctggaccgggagaaggaggcggcattccagcg

SEQ ID NO: 481884 - DNA, 201 bp, Homo sapiens
gacctggagtcctgggcagccacaagagagctgggctacctttccaggcggtctagaaggaaaaggaaggtgagcaggttggcctccggcagggacaacarcaggttgagcatgcagctcttccttgcaactgggtctgaaagagctgcaggaggcagtgggtgactcccctgggttacgacaagccggagacctctcccg

SEQ ID NO: 481885 - DNA, 201 bp, Homo sapiens
tggagacctggagtcctgggcagccacaagagagctgggctacctttccaggcggtctagaaggaaaaggaaggtgagcaggttggcctccggcagggacracaacaggttgagcatgcagctcttccttgcaactgggtctgaaagagctgcaggaggcagtgggtgactcccctgggttacgacaagccggagacctct

SEQ ID NO: 481886 - DNA, 201 bp, Homo sapiens
cacgggaagggcatctgacagattccaggcctggggttagcagcctgtgcccccggctgggagatcagacccggtgttggtcctgccacccacgtgctgtrtgagaggagaatccctgacccctgccctgggccttaacacacatccgacgaatgaatgaagggttgcctcagtaccggtgctccaagtcctgcgatgcta

SEQ ID NO: 481887 - DNA, 201 bp, Homo sapiens
aagtgcttttctcctctgagtcttagcaatggacaattccaatacctccacacaggacactagagtaagaaaccttcacagttagaacgcagtgctgtgcrgaggccttaacttgagttctgttttgcacctggatttaccagcacatcaaagctgcttcgcaagccccctcattagcagggcttatctgggggagctgct

SEQ ID NO: 481888 - DNA, 201 bp, Homo sapiens
ccagtacacacaagtttcccctgctgccacgcaggcgaggggagcctttgatgctgccacctcccttagagctggggtaccgggtcactgttgaagacctkgaccgggagaaggaggcggcattccagcgcatcaacagtgcactgcaggttgaggacaaggccatctcggactgcagaccctcacggccttcccacactt

SEQ ID NO: 481889 - DNA, 201 bp, Homo sapiens
aggaaggtgagcaggttggcctccggcagggacaacaacaggttgagcatgcagctcttccttgcaactgggtctgaaagagctgcaggaggcagtgggtyactcccctgggttacgacaagccggagacctctcccgaggtggtcacatggagcgcccgggacacgagtccttgcgcagtttaggcttgtcatcatcgtc

SEQ ID NO: 481890 - DNA, 201 bp, Homo sapiens
cccctgctgccacgcaggcgaggggagcctttgatgctgccacctcccttagagctggggtaccgggtcactgttgaagacctggaccgggagaaggaggmggcattccagcgcatcaacagtgcactgcaggttgaggacaaggccatctcggactgcagaccctcacggccttcccacactttgtcctcacttgcaaca

SEQ ID NO: 481891 - DNA, 201 bp, Homo sapiens
gtgagcaggttggcctccggcagggacaacaacaggttgagcatgcagctcttccttgcaactgggtctgaaagagctgcaggaggcagtgggtgactccyctgggttacgacaagccggagacctctcccgaggtggtcacatggagcgcccgggacacgagtccttgcgcagtttaggcttgtcatcatcgtcacaccc

SEQ ID NO: 481892 - DNA, 201 bp, Homo sapiens
cgcaggcgaggggagcctttgatgctgccacctcccttagagctggggtaccgggtcactgttgaagacctggaccgggagaaggaggcggcattccagcrcatcaacagtgcactgcaggttgaggacaaggccatctcggactgcagaccctcacggccttcccacactttgtcctcacttgcaacaggggcttctggt

SEQ ID NO: 481893 - DNA, 201 bp, Homo sapiens
ggcagggacaacaacaggttgagcatgcagctcttccttgcaactgggtctgaaagagctgcaggaggcagtgggtgactcccctgggttacgacaagccrgagacctctcccgaggtggtcacatggagcgcccgggacacgagtccttgcgcagtttaggcttgtcatcatcgtcacacccacagcgctggccgccagt

SEQ ID NO: 481894 - DNA, 201 bp, Homo sapiens
tgatgctgccacctcccttagagctggggtaccgggtcactgttgaagacctggaccgggagaaggaggcggcattccagcgcatcaacagtgcactgcargttgaggacaaggccatctcggactgcagaccctcacggccttcccacactttgtcctcacttgcaacaggggcttctggtctgcctgccgtttctaaag

SEQ ID NO: 481895 - DNA, 201 bp, Homo sapiens
tccttgcaactgggtctgaaagagctgcaggaggcagtgggtgactcccctgggttacgacaagccggagacctctcccgaggtggtcacatggagcgccmgggacacgagtccttgcgcagtttaggcttgtcatcatcgtcacacccacagcgctggccgccagtgaggaccctgtgaggggcacctgtgtggggtgtg

SEQ ID NO: 481896 - DNA, 201 bp, Homo sapiens
attccagcgcatcaacagtgcactgcaggttgaggacaaggccatctcggactgcagaccctcacggccttcccacactttgtcctcacttgcaacagggrcttctggtctgcctgccgtttctaaagcacccagtatggatgcacagcaggagacacacaagtcccaagactgcctgggcctactggaccccttagcatc

SEQ ID NO: 481897 - DNA, 201 bp, Homo sapiens
taggcttgtcatcatcgtcacacccacagcgctggccgccagtgaggaccctgtgaggggcacctgtgtggggtgtgaaccacctgaacgccttttctctrcctcgcagggctcagcagcacccggtgaacagcagcaggaggagccgctagagcagctgctcatgggcagagcagcccttgggcaactcctgccaccacc

SEQ ID NO: 481898 - DNA, 201 bp, Homo sapiens
cagtgcactgcaggttgaggacaaggccatctcggactgcagaccctcacggccttcccacactttgtcctcacttgcaacaggggcttctggtctgcctsccgtttctaaagcacccagtatggatgcacagcaggagacacacaagtcccaagactgcctgggcctactggaccccttagcatctgctgcaggggtccc

SEQ ID NO: 481899 - DNA, 201 bp, Homo sapiens
tgcactgcaggttgaggacaaggccatctcggactgcagaccctcacggccttcccacactttgtcctcacttgcaacaggggcttctggtctgcctgccrtttctaaagcacccagtatggatgcacagcaggagacacacaagtcccaagactgcctgggcctactggaccccttagcatctgctgcaggggtcccctc

SEQ ID NO: 481900 - DNA, 201 bp, Homo sapiens
ccatctcggactgcagaccctcacggccttcccacactttgtcctcacttgcaacaggggcttctggtctgcctgccgtttctaaagcacccagtatggaygcacagcaggagacacacaagtcccaagactgcctgggcctactggaccccttagcatctgctgcaggggtcccctctacagctcccatgtctgggaaga

SEQ ID NO: 481901 - DNA, 201 bp, Homo sapiens
ccaccaccccctccccagggagcccaaggcaggggaggctcagcatggaatgaaacaggggagtgagggacacaaggaggtgggaagtgggagggtcccarccccaccaagtacgcagagacccccttgtcgtcctggacaccacaggggcacctgcaggctgggagaccaggtcctctgtgcatgggcccgggaggcaga

SEQ ID NO: 481902 - DNA, 201 bp, Homo sapiens
catctccagcccagggcagctcccctgtaagctgggtgagctactgaagccaaggtgggaggcagctgacaacaccacccacggcccatgcggaggtggcrgaaaggctggactcagcaggaacaccaaatcccggaccaggcagaaaccacccaagactgaggggctcgtgccagagcggtggccacaggtaagaacccg

SEQ ID NO: 481903 - DNA, 201 bp, Homo sapiens
tgcacaaaaatccttctgggaagaaaaagaagaaagccaagaatggagtcaaaacgctacccagtgctgactaagcctctcaaaccctgttctaagtggastgtggtttctaagtcagggaaatggaagaggccccacccacacagggacagggccacggcccccacaggatgaagcagcagcatttattcaagatacaac

SEQ ID NO: 481904 - DNA, 201 bp, Homo sapiens
ttaaatatatcttccgctccccaacccaagtctggctattgtgactgttgtattattccagaaagggaacagggaggaagaaagaatcagagacatgtggytaaagtcatcttctttctggaatctcttcgtctggcttgttttttgttgttttgttttttagtgaaaagagggtgactttcttcatctgagaacatttta

SEQ ID NO: 481905 - DNA, 201 bp, Homo sapiens
aaatttcctccctactccatctctataaccaataattccagcccccagaaatattgttatatccactggtagaattactcccaggcaaatataaacatacrtgcacaagtgcaatagacatagataaaattttaatgagattatatttattgtttaccttatttttatgacttaataaagctaccctattatttttgtatg

SEQ ID NO: 481906 - DNA, 201 bp, Homo sapiens
ctggtctcgaactcctgacctcaagccacccacctgccttggcctcccaaagtgctgagactacaagcctgagccaccgtccctggccaaaaaacaaaaaacaaaacacacacacacacacacacacacacacacacacacactttaaagatatgcccacaccattttctccccctatttatagctgtactttgtctatgt

SEQ ID NO: 481907 - DNA, 201 bp, Homo sapiens
tggtctcgaactcctgacctcaagccacccacctgccttggcctcccaaagtgctgagactacaagcctgagccaccgtccctggccaaaaaacaaaaaamaaaacacacacacacacacacacacacacacacacacacactttaaagatatgcccacaccattttctccccctatttatagctgtactttgtctatgtt

SEQ ID NO: 481908 - DNA, 201 bp, Homo sapiens
gtctcgaactcctgacctcaagccacccacctgccttggcctcccaaagtgctgagactacaagcctgagccaccgtccctggccaaaaaacaaaaaacamaacacacacacacacacacacacacacacacacacacactttaaagatatgcccacaccattttctccccctatttatagctgtactttgtctatgttgt

SEQ ID NO: 481909 - DNA, 201 bp, Homo sapiens
tcgaactcctgacctcaagccacccacctgccttggcctcccaaagtgctgagactacaagcctgagccaccgtccctggccaaaaaacaaaaaacaaaacacacacacacacacacacacacacacacacacacactttaaagatatgcccacaccattttctccccctatttatagctgtactttgtctatgttgttgg

SEQ ID NO: 481910 - DNA, 201 bp, Homo sapiens
agttgcggggcttgcctggggtggggcggggcggcctaggggtggggcggggcggcctaggggtggggccgcctaggggtggggccggcggccctcgggaygggtcctgccagggcgcaaagatggcggtggaaaggcggggcgaaggcggggcgtgaggcgtggaggtgtggcctgactggggcggggcggggcggggcg

SEQ ID NO: 481911 - DNA, 201 bp, Homo sapiens
ctcgaactcctgacctcaagccacccacctgccttggcctcccaaagtgctgagactacaagcctgagccaccgtccctggccaaaaaacaaaaaacaaaacacacacacacacacacacacacacacacacacacactttaaagatatgcccacaccattttctccccctatttatagctgtactttgtctatgttgttg

SEQ ID NO: 481912 - DNA, 201 bp, Homo sapiens; identical to SEQ ID NO: 215264

SEQ ID NO: 481913 - DNA, 201 bp, Homo sapiens
agcctcctttctatttgtcagagagccatcagagcagcaagagctattaggaagaagactggtgagagcaaaatgaaaaaattttgtaaatactcactctyggtgatctttgcttatccgccccttcatgccactcacctctgagtgtttatccaaaacatgaaattaagccgtgggtgaggtgctcgtctctgtcagacc

SEQ ID NO: 481914 - DNA, 201 bp, Homo sapiens
gcaagtttctcaacatcctgcacctgcctttccctctaaaaggagggtgatgctagtgcctccctgggtgatgtgtcatgaacataaatgcaagtgctttmgagcagcacacacggcaaagccccaccaagtgttaatttctattatcccacactaaggaccgagggaaggaattgcctcaaagcctgaaggagccgaggg

SEQ ID NO: 481915 - DNA, 201 bp, Homo sapiens
cactcacaggttgggacctagggcaagtttctcaacatcctgcacctgcctttccctctaaaaggagggtgatgctagtgcctccctgggtgatgtgtcaygaacataaatgcaagtgctttagagcagcacacacggcaaagccccaccaagtgttaatttctattatcccacactaaggaccgagggaaggaattgcct

SEQ ID NO: 481916 - DNA, 201 bp, Homo sapiens
agaaggaggaaagacaggcagcaagatgcactgtatatatggtgggtgagaacgtgggctccaggccacacaagtggctctgccactcacaggttgggacytagggcaagtttctcaacatcctgcacctgcctttccctctaaaaggagggtgatgctagtgcctccctgggtgatgtgtcatgaacataaatgcaagtg

SEQ ID NO: 481917 - DNA, 201 bp, Homo sapiens
ggacccctccaaggccatgtagccagcaagtcgcagcatcagattcagggcccaggtcttctggtgcaagaacccctgcactttctaccctaccacatggygagagcactgcctaataaaaccacgcagatgcttcagctttacttcaaccagatttttctttataataaaaacaaaagtacaatgtcttttttccactgg

SEQ ID NO: 481918 - DNA, 201 bp, Homo sapiens
cgtgaaagcgactgcacagaaacagagacactgagaaagcacaggccaagcgcctggaatggcagcgggaagaaagagctctgtcctgcaatcaccttgcragaaatccaacctttccaaagcccagagccaggaggggtgtgcaagagaacgtgagtgggttccatgcccaccctccagatggatggagcctctgttcgg

SEQ ID NO: 481919 - DNA, 201 bp, Homo sapiens
tgcaacattataagcactgaggcttctggaccccagcatttaattagattacagtcttgacaatagctcacctgatacatcatgcaataacaagctccctygggtaggttaaaaatgcaaattaagtgtcagaaataggaacaccacctcaactactgaatgcactcccactaagtgcaaagcacaggagatggtttaaag

SEQ ID NO: 481920 - DNA, 201 bp, Homo sapiens
agcccaacaatggcaggactcaagcgtggtcttctgactcctctccttggcctattcctagtcatgcttcaagattcagcccaggaggcatcttcttccaygaaagctttcttggatgtccccagatacttaggtgcccctttttctggattcctgaacaccggcatacatacttctattatagcaagtatgctaaatggc

SEQ ID NO: 481921 - DNA, 201 bp, Homo sapiens
aaaaaggcatacttctccaagggctgaataggatttcataaaccaaaaaacctacagctttcagctgcggtactgtcctggtctaatttaccctgcagccrcgcaagacaatgaagttgggaatttctatttgagggagtatttttccccttctctccctctcctgacagtggtcttcaataacagcctgtgaagctctgg

SEQ ID NO: 481922 - DNA, 201 bp, Homo sapiens
acatcctcagttcacagctaactgcagaatcatagcatgaaaaaaggcatacttctccaagggctgaataggatttcataaaccaaaaaacctacagcttycagctgcggtactgtcctggtctaatttaccctgcagccacgcaagacaatgaagttgggaatttctatttgagggagtatttttccccttctctccctc

SEQ ID NO: 481923 - DNA, 201 bp, Homo sapiens
gagacaggatttcaccatgttggtcaggctggtctggaactcctgacctcaggtgatccacccacctccacctcctaaagtgctgggattacaggcgtgarccactgcgcccagcctgcaatttttttttttttttttttttgagacggagtcttgttctgttgcccaggctggagtgcagtggtgtgatcttggctcact

SEQ ID NO: 481924 - DNA, 201 bp, Homo sapiens
cacataccagctgagtgaccctgagcaatccactcagccactctcagttctcattttgtgctttttccatcatgccccgctggctgtgaatccagtccaastgcgtgcaaattatgcctttgctttatatttactgagcaacaactatgtgccgcaacagatttttttaatactctattttatttgcaatcacagatctga

SEQ ID NO: 481925 - DNA, 201 bp, Homo sapiens
gatataattcatataccaaataagtcacccttttaatgtgtacatttcagtggtttttagggtattcagagttgtgcagccatcaccgctatctaattccrtagcattttaatcacccagaaaacaaaccccaaccctccccatattcccgccttcctcaaaccttcaaaaccaccaatctactttctatctctatggact

SEQ ID NO: 481926 - DNA, 201 bp, Homo sapiens
actctgtgcctttgagacaacctgccacacacacacacaaagccagcaactaaaaggaaactggcattaatacaattcagtgtgagggtatgatctggggstgtggaggtggagatgacgttgttttatttcttacaataatacatgtatttcaggtaatcgaatttggttcttagcgctaatgtcattttctgctaattt

SEQ ID NO: 481927 - DNA, 201 bp, Homo sapiens
caggagatggagaccacggtgaaaccccgtctctactaaaaataaaaaattagccaggtgcagtggcaggagcctgtagtcccagctacttgggaggctgmggccagagagtggtgtgaacctaggaggcggagcttgcagtaagccaagatcacgccactgcgctccagcctgggtgacagagcgagactccgtctcaaa

SEQ ID NO: 481928 - DNA, 201 bp, Homo sapiens
gggagatggggctgggtaaaggcagagtgtacaagcctctgccagaactcacattcacacaccacagccacaagagccggcaaattacatggggaaaaacyctgcacaagcttgccttgtgctgacatgtactattattatacactctgtgcctttgagacaacctgccacacacacacacaaagccagcaactaaaagga

SEQ ID NO: 481929 - DNA, 201 bp, Homo sapiens
atacagttcacaagacagcctccctgccccccataaggaaggattctccagcccccaaaatctagcgcttataaatcactatttattttcacagctactcttttttttttttttttccagttgaggaaactgggccctgagacattaacttgcccaaaagatcacagtgggcaacattctagagcacagtggaagccgaca

SEQ ID NO: 481930 - DNA, 201 bp, Homo sapiens
tatattttccttttgatgttcttaataacaatttctcctctctagtttacttcactgtaagagtacagtatataatatataacatacatacaaactacatstgaatcaactgttactgttaaagcttctggtcaacagtaggttatcaagagtcaaatgttcaggaagtcaaaagttatatgcatctccacgatgtgctta

SEQ ID NO: 481931 - DNA, 201 bp, Homo sapiens
gcccacagagaagcagcctcggggagcgggcggggctggggaatccctggcctccctcctttccttctggctgatcttctgcagaagacctcacaaaaggragctgaggggccaggaagcctgtggatgccctgaagaagaatgagtagatctgaaagggcagtagaacagaaccagaatccagtgcaaaggccctggggc

SEQ ID NO: 481932 - DNA, 201 bp, Homo sapiens
aagagctgggtgcccttatttaagggcctgcaaagcccattcccaaacaacaggcgctatcaaggacaatgaagatcaacaacaggaacacaggatggacrtggccctagccccttccctaagccttggttcctacagttgcaaagatctttatctctgcttcctgaggaaggctgtcaagagaagcaaatgagttagcgt

SEQ ID NO: 481933 - DNA, 201 bp, Homo sapiens
aggcaagactgggggaattggggtgcagggacagaattccctccccactcggatcatgcctcccagtcagtgtcaatatctacctctctgctcaataaatsctgatgatcatcttaatagaaatcattacctactaaatggcaaaggaatgagaaagcaaggcaatatggatgagagaaagaggttttgagatgagatgtg

SEQ ID NO: 481934 - DNA, 201 bp, Homo sapiens
ggttcatcaggaactagaggaccaaccaacaaggtcatttacctgtcaccactgctgcattcactggtaatcaaaaggggcagggtaggggaggaccacgracccaaagagaaggtctgggagcatgcagacatgcctctcaagcctcacaattgtccttttgctaaatttaggttgaaacaaaacgttcaaagccccctc

SEQ ID NO: 481935 - DNA, 201 bp, Homo sapiens
gggcatggaaggaggcgggggatgagatgagagcacctcaaggtatgagtacagaagcggagaaggaccccctgaatgtagaaagacacagctgattttcygcagggctcaaaagccaatagagaaatttgagagctgaggcactgtgtggtatgatacagtgtttcagacttgctgtgttgcttttcctactgggatcat

SEQ ID NO: 481936 - DNA, 201 bp, Homo sapiens
tgccctgcctaaaagcaggacatcagtttacaaaggtagcagtgtcccttcactccttcttccaggaaggacaaaggctgatcatgaaagaagctttggcycttctcagccaggagaaggcactggaggaatctgcttaacaaattcccatgtatttgatatttgccttcccacagttgctgcacctagggactcgaagcc

SEQ ID NO: 481937 - DNA, 201 bp, Homo sapiens
gagacataggcaaaaggaaacatcttccatgctacctctggctaccatggaatgcctcacacctgtttcctggaaacacataatatcgaagttggaaggawccatagaagtcctccaaaacatgttcctggaacttggaaggtgtaggagatcagaatctgccagcccaaaatatgtcactttagcaaaagcattattttg

SEQ ID NO: 481938 - DNA, 201 bp, Homo sapiens
ggagtcacaaatcaggggagagatgctgctggtacatagtaggttcggaaagctgcaaaatgtcatacagttcacaagacagcctccctgccccccataargaaggattctccagcccccaaaatctagcgcttataaatcactatttattttcacagctactcttttttttttttttttccagttgaggaaactgggccc

SEQ ID NO: 481939 - DNA, 201 bp, Homo sapiens
acaagacattatacagtcatcctagatacagtgggcagagtatgacaggaagagtgaagaaagcgaagacaaaatttgcaagccgtgtaacctcagcgtasgtacttactctctcaggccttagtttccttattggaaaaatggaataacagtacatgcctcgcaagtttgtcaagattaaaagagataccatgtgtcctt

SEQ ID NO: 481940 - DNA, 201 bp, Homo sapiens
tatcccccccgcattcttaacagtgttccagtttggacaagacattatacagtcatcctagatacagtgggcagagtatgacaggaagagtgaagaaagcraagacaaaatttgcaagccgtgtaacctcagcgtacgtacttactctctcaggccttagtttccttattggaaaaatggaataacagtacatgcctcgca

SEQ ID NO: 481941 - DNA, 201 bp, Homo sapiens
gaaaaataaccatttccccaacccaggtgtgctcaaaggctgaacaaaggccaatcccacagagtagagggagttaaatagatcctaggaggtggtctggrtatgaaggctgcttgctgggcgaaggggcagtggttatttgagattcttcattgtgaaagcaaactaatcaggctctctagcatcaggcatttggaaagc

SEQ ID NO: 481942 - DNA, 201 bp, Homo sapiens
tcctgttttgccttcagcagctccatttatcttctttaaataatacgtttattgagatataattcatataccaaataagtcacccttttaatgtgtacatktcagtggtttttagggtattcagagttgtgcagccatcaccgctatctaattccgtagcattttaatcacccagaaaacaaaccccaaccctccccatat

SEQ ID NO: 481943 - DNA, 201 bp, Homo sapiens
tagccacgatggtctcgatctcctgaacttgtgatccgcccacctcagcctcccaaagtgctcggattacaggcatgagccaccgcacccagcccggcctrcatttctaagtagaatgacccgagagaacttattgagatagtgatattggggcaaaacttggatatctgaggaggttaaattcaggaaagggaatagcta

SEQ ID NO: 481944 - DNA, 201 bp, Homo sapiens
tactttgccaaagaaataatatccagctttctttacttgtctgataatgtttgtaaaaagatccagaagctcaaaggtattaactgtcacccccctccccrcaaaaaaaggcattcttggaatgagcttttatttcagaaaagaaaccaatttatgtagtgtcatcataaaataatgcatagagatgatgaactgacgatg

SEQ ID NO: 481945 - DNA, 201 bp, Homo sapiens
atactggctgataaggctgggacctgaaactagttcctctctctaaatggctaacacagaaaaccaaggcaacgacagtcagggaaggcagggacttcctsaggcttggaaaggtcaggggaagcttcttagggcaggtgagatttgagcagagcagggccagcattaaagacatcagcagggaggagaggtgagatcaaa

SEQ ID NO: 481946 - DNA, 201 bp, Homo sapiens
acccagaagaatcacatgatacacgtgatatcacaaatatactggctgataaggctgggacctgaaactagttcctctctctaaatggctaacacagaaarccaaggcaacgacagtcagggaaggcagggacttcctgaggcttggaaaggtcaggggaagcttcttagggcaggtgagatttgagcagagcagggccag

SEQ ID NO: 481947 - DNA, 201 bp, Homo sapiens
tttcagataaattaaataactgcagaatagtcataatgacagtgttttttttaaaacaatatttaataattgcttactctgtgccagtacttttcagccargggcaatttgcccccctgccgcggagacatttggcaatgtctggagacacttttggagtcacaaatcaggggagagatgctgctggtacatagtaggttc

SEQ ID NO: 481948 - DNA, 201 bp, Homo sapiens
gatcatgggggcagatttctcatgaatggtttagcaccattctcttggtgcgatccttgtgagatatggttgtttaaaaagcgtatggcacctccccgtaytctctctcctgcttctcctctggtcatgtgacacacctgctcccactttgcctttcgccctgattgtaagcaccctgaggcctccccagaagccaagcag

SEQ ID NO: 481949 - DNA, 201 bp, Homo sapiens
gtgcaatctcccaatatttaaccattagcaacaaattcaaaaatggtaaaagcagtaggcgggccaaacccaacacaagtgcaagccagatgcagccaatyttggtttaacatgcgataaatagaaacgattgctacagtttccattattgttatagtttaaatagtacatttccttcttgtgtttctatatcttccacaa

SEQ ID NO: 481950 - DNA, 201 bp, Homo sapiens
attttagattctagaaaggagataaataacttgccatggtcacaaaaggagtttcaggcatcgatggactcagagcaagttctctgcctcaatgtcaacaratgactctggcttcccacaaaagatgtacaggtcaaacctccctgacatgcacgaagacctggatgctgtgtaggtcagaagggatcctcccctctcttc

SEQ ID NO: 481951 - DNA, 201 bp, Homo sapiens
aatacgtttattgagatataattcatataccaaataagtcacccttttaatgtgtacatttcagtggtttttagggtattcagagttgtgcagccatcacygctatctaattccgtagcattttaatcacccagaaaacaaaccccaaccctccccatattcccgccttcctcaaaccttcaaaaccaccaatctactttc

SEQ ID NO: 481952 - DNA, 201 bp, Homo sapiens
ttcagataaattaaataactgcagaatagtcataatgacagtgttttttttaaaacaatatttaataattgcttactctgtgccagtacttttcagccaarggcaatttgcccccctgccgcggagacatttggcaatgtctggagacacttttggagtcacaaatcaggggagagatgctgctggtacatagtaggttcg

SEQ ID NO: 481953 - DNA, 201 bp, Homo sapiens
cacttttcagataaattaaataactgcagaatagtcataatgacagtgttttttttaaaacaatatttaataattgcttactctgtgccagtacttttcakccaagggcaatttgcccccctgccgcggagacatttggcaatgtctggagacacttttggagtcacaaatcaggggagagatgctgctggtacatagtag

SEQ ID NO: 481954 - DNA, 201 bp, Homo sapiens
tgagtctgaaacaccacccaccccctcacctgtgggcaggcaaagcacctcctgtgttcatgtcatctcctgtatcaagcccttcctgatgaccaacttgsagccgggtgccctctatccatgcctccatggccgcctatgataatgtcccccatatcatttaccattctgctcatgaatttggcttcattcatctcgcaa

SEQ ID NO: 481955 - DNA, 201 bp, Homo sapiens
aatcctgatgatcatcttaatagaaatcattacctactaaatggcaaaggaatgagaaagcaaggcaatatggatgagagaaagaggttttgagatgagawgtgagtagatttggaaaagccgggtagggagaatcagtctgtcatggctagcacggatgggtcaatgccggcagcagaaacaaggctccctgaaggtcaa

SEQ ID NO: 481956 - DNA, 201 bp, Homo sapiens
ttctcctgctaccgggaccgcgggatggaccagatatcaagagagccatccatagggagctggctgggggtttccgtgggagctccagaactttccccagmtgagtgaagagcccagcccctcttatgtgcaattgccttgaactacgaccctgtagagatttctctcatggcgttctagttctctgacctgagtctttgt

SEQ ID NO: 481957 - DNA, 201 bp, Homo sapiens
tcccgaggcgtccccggcatctccggcccgaatcccggagtgccgggtcgcgcctgcaccgaaggtcccggctcctgtgccctccctgcagccgtcagggmccgtcccccaactcccctttccgctcaggcagggtcctcgcggcccatgctggccgctggggacccgcgcagcccagaccgttcccgggccggccagccg

SEQ ID NO: 481958 - DNA, 201 bp, Homo sapiens
gcttcccgggttcaagcgattctcccacatcagcctcccaagtagctgggattgcaggcttgcgccaccatgtctggctaattttgtatttttagtagagrcagggtttctccatgttggtcaggctggtcttgaactccctacctcaggtgatccacctgcctcggcctcccaaagtgttgggattataggcgtgagcca

SEQ ID NO: 481959 - DNA, 201 bp, Homo sapiens
atcccccagttcttgcaggctgagcctcaggttattgcggtcccctgcctccttccaccaagtgctcagttcctagagtgagggtatttctcagagagaakctttccagggtccttccccacagctccagagccttggctccgggattttgcctcaggagagaagcaggccctaaaacagatagctcctaatctctttcca

SEQ ID NO: 481960 - DNA, 201 bp, Homo sapiens
gtgtacaactattatgaatcaataaaaaacaatttgaaaagtaaggtatgtggcagaggtggaaaaaaatgctttcctccaaacagccacaatttgattgyatcagtttgtagagtaagagcaagttatgcctcagtgtgttgttgaaaataatagaacaatatgccacaattagtggagcttcatagctgggtgtggtca

SEQ ID NO: 481961 - DNA, 201 bp, Homo sapiens
gattggcctgtccatcctcaatgctacctggccaatttaggggcccagtgcctctggatgctagactctggggtcgattatctccaccggaatgtaatggrtgaacatgcatgtgatggtgtccaagccagaacagtgggtaaagccaatggctataagaggagccaatcagtacatctttcatctcgaggaaactgagaa

SEQ ID NO: 481962 - DNA, 201 bp, Homo sapiens
agaagaaagaaaagcaaagcaaagcccaggcctgtacctactagaggtcctgataacttcaccactgaattctatcaaacatttcaagaaaaattaatacrgttcttcacaaagtcttcaaaaatgaaaaagaggagaaaatacttacaaacgaattttatgagactggtattaccctgttgccaaaaaccaggaaaagac

SEQ ID NO: 481963 - DNA, 201 bp, Homo sapiens
atcttgcatatagaccctgaggaatccactaccaaagtattggaactaataaattattagtttagtaaggttataggatacaagatcattacacaaaactyagttgtaaatgtatccacttggaatgaacaatctgaaaaggaaattaagaaaattccatttacaataacctaaaaaataaaaatacttataacaaaagag

SEQ ID NO: 481964 - DNA, 201 bp, Homo sapiens
gcttgagaaacatctcaggtttcattttctctctaagaatgtaaaatcacttttaaaacctaagaagaatttttgtgtttgaacgtaaacacctaacaatstcctaggtcccagaatgtcctaatgttatagaaatggctttcttgtaagtacttggaagcactgcctgtctcttgtgtgactgacttgattttccccata

SEQ ID NO: 481965 - DNA, 201 bp, Homo sapiens
tcccggacggggtggctgccgggcggagacgctcctcacttcccagacggggtggctgccgggcggaggggctcctcacttctcatacggggcggctgccrggcggaggagctcctcacttcacagacggggcggttgccaggcagagggtctcctcacttctcagacggggcggccgggcagagatgctcctcacctccc

SEQ ID NO: 481966 - DNA, 201 bp, Homo sapiens
cacttcacagacggggcggttgccaggcagagggtctcctcacttctcagacggggcggccgggcagagatgctcctcacctcccagacggggtggcggcsgggcagaggcgctcctcacatcccagacggggcggcggggcagaggcgctccccacatcccagacgatgggcggccgggcagagacgctcctcacttcct

SEQ ID NO: 481967 - DNA, 201 bp, Homo sapiens
gtggcgcgcgcctgcaattgcaggcactcggcaggctgaggcaggagaatcaggcagggaggttgcagtgagccgagatggcagcagtatagtccagcttyggctcggcatgagagggagaccgtggaaagagagggagagggagaccatggggagagggagaccatggggagagggagagggagagggcacttgtgtgat

SEQ ID NO: 481968 - DNA, 201 bp, Homo sapiens
tggcgcgcgcctgcaattgcaggcactcggcaggctgaggcaggagaatcaggcagggaggttgcagtgagccgagatggcagcagtatagtccagcttcrgctcggcatgagagggagaccgtggaaagagagggagagggagaccatggggagagggagaccatggggagagggagagggagagggcacttgtgtgatt

SEQ ID NO: 481969 - DNA, 201 bp, Homo sapiens
cccctacacccaccccttcctccctctcaggctaaacctattatatcatcttagtcaccaaaaagctaataccacacacacacacacacacacacacacayacacacagctcatttccctgtctctaccttatttctggttttgccctgtgcagaatgccccttcacctgccttttagctaccctgttggattgttcttct

SEQ ID NO: 481970 - DNA, 201 bp, Homo sapiens
tgagacaggaggattgcttgaacctgggaggtggaggttacagtgagctgagattgagccattgcactccagcctgggtgacaaagtgagactccatctcaaaaaaaaaaaaaaaaatgtagtcagggtttttttggtgcagtcacatgacacactaaaccatcttgcaatgtttaagtcacctgttggattgtatattga

SEQ ID NO: 481971 - DNA, 201 bp, Homo sapiens
gaggcagaagaatcgcttgaatccgggaggcagaagttgcagagagccaagatcacaccactgcactccagcctggacgacagagtgagactccatctcawaataaataaataaataaataaataaataaagtaaaaaaattaaaaaaggtaggtgtctagaagaagaattgcatagaattgacagaagaggtgaacccca

SEQ ID NO: 481972 - DNA, 201 bp, Homo sapiens
tgctccccgcctaaacctatgggctttaattctatacctatgatagcctgcttatttaaccagagggaacaacacttatgttactcttcctttagccatcragccagtgacagaagccctcagtgattgttctgggggacccagaagtcacaagaatggaacagttttgcttctacctgccccaattcagaaagctgaaat

SEQ ID NO: 481973 - DNA, 201 bp, Homo sapiens
ccctggggaacctggaattgtttcattctcagtgggagcgacacgtgtcctggcatctgagccttccgagtgaggggagtgagtctggccatcaggctggkgttgagggacacagggtgccttgagcctggctttcgtgccttcagagccacagtgccaatgatgggagtggtggcttggtgtggcgtaactgtaccacca

SEQ ID NO: 481974 - DNA, 201 bp, Homo sapiens
aggcagaggctgcagtgagcggagatcgcgccactgcagttcagcctggcaacggagtgagactccgtctcaaaaaaaaaaaaaaaaaaaaaagagaaagwaaagaaaagcttgatctggccacttagtacagccatccccctttactggcccttcctctttgcttatttggaagggggaaggtttcccacaccccaaacc

SEQ ID NO: 481975 - DNA, 201 bp, Homo sapiens
cctgagccgtgtctcactgtctgcccaagccctgatgcatgataccctcttgccggcagagtggaatacatggaaaagagcaagcatctgcaggagcagcwcaatgaactcaagacagaaatcgaggccttgaaactgaaagagagggagacagctctggatattctgcacaatgagaactccgacaggggtggcagcagc

SEQ ID NO: 481976 - DNA, 201 bp, Homo sapiens
tctcaagcgccagcagcttctcttggatcaggaagacataaaagtccaatgtcatcttcaatttgtgcaggctccccttggagttgcagagccagtgaagkgaagtagaacagttaaaaaaacacccggggaagtgataaatcacagagagagattgcatatgcgggaaaggtgtctcccacaattaaaacaagtggccag

SEQ ID NO: 481977 - DNA, 201 bp, Homo sapiens
aagcttgatctgggccggacgcggtggcttatgcctgtaatcccagcactttgggaggccgaggcaggcggatcacgaagtcaagagattgagaccatccyggccaacatggtgaaaccctgtctctactaaaaatacaaaaattagctgggcgtggtggcatgcgcctgtagttccagctactcaggaggctgaggcagg

SEQ ID NO: 481978 - DNA, 201 bp, Homo sapiens
cgcctggagttattaggttagtatctaaaatgggttcagtactgtgagtcttattgtttaaaatgaatgagatggtcccctcctaccttcttttctcctcycctgggatgagtggattgaggcaaggcccccagagactagttgaaggaatcctggtgctctgattagttttgttccccagcttaattgtacagcttcctt

SEQ ID NO: 481979 - DNA, 201 bp, Homo sapiens
tgggttcagtactgtgagtcttattgtttaaaatgaatgagatggtcccctcctaccttcttttctcctcccctgggatgagtggattgaggcaaggcccscagagactagttgaaggaatcctggtgctctgattagttttgttccccagcttaattgtacagcttcctttctctcaccactgatagccaaagtagctct

SEQ ID NO: 481980 - DNA, 201 bp, Homo sapiens
ggaagccgtctgctgctggcagggcagcaggagaatgtttgtcacaggtgccttccaggcttgctttctccagaccctggggccatttctcagaagtaccytaatgggccacccaaaatcctcaggtagcagtgaggaggaacagttgaagatgcagattgcatgcctgggttagagagtgccggctgggtaccaggttct

SEQ ID NO: 481981 - DNA, 201 bp, Homo sapiens
agagccatgggggtggcctccagcagcagggaggagcattgtgcagtaaattctgactccggggctcctgtggggattggaacccataggaattgcacaakgagggtaaaggatggggcggcagcagccaggtctgtctaaggggcgagcagcagtggccgaaggctcccagggccctcgggcagcagcccttgctgacca

SEQ ID NO: 481982 - DNA, 201 bp, Homo sapiens
gcgagcagcagtggccgaaggctcccagggccctcgggcagcagcccttgctgaccagtgcagccaggtcgtggctgcctccagctggtgggtctgccttyccctctgaccgcctcagtgccttctggaggactgtggctctctctcctgcccagtggctgtggtgccttcctacttctgtgtgggcagactgatttccct

SEQ ID NO: 481983 - DNA, 201 bp, Homo sapiens
gtttttcttcacccctcgcagatggagcggcagcgcctcgctcgagagaagcagatgagggaggaggctgaacgcacgagggatgagttggagaggaggcygctgcagatgaaagaagaagcaacaatggccaacgaagcactggtgatttctgaggggctggggttccaggaggctacttggggacttccttggcttttc

SEQ ID NO: 481984 - DNA, 201 bp, Homo sapiens
gacagctgacctgttggctgaaaaggcccagatcaccgaggaggaggcaaaacttctggcccagaaggccgcagaggctgagcaggaaatgcagcgcatcraggccacagcgattcgcacggaggaggagaagcgcctgatggagcagaaggtgctggaagccgaggtgctggcactgaagatggctgaggagtcagagag

SEQ ID NO: 481985 - DNA, 201 bp, Homo sapiens
gacaggagttcaagactaccttggccaacatagcaaaaccccatctctactaaaaatacaaaaattagccagccgtggtggcatgctcttgtagtgccatytactctggaggctgagacatgagaatcacttgaactcgggaggtggaggttgcagtgagctcagattgtgctactgcactccaacctgggcaacaaagca

SEQ ID NO: 481986 - DNA, 201 bp, Homo sapiens
tggcctctacctactagatgccagtagcattcccccaccccatcccagttgttgtgacaaccaaaaatgtcttcagacattgtcaagtgtccctggggtasggaggacaccctccaatctcctctttctccctacccaacctccatgaccacattgagaaccactgatctatagaaaaggataatagtagtgacattcaga

SEQ ID NO: 481987 - DNA, 201 bp, Homo sapiens
ttctgattcagtagttctgggatggaagtgagaattttgtattaataacaaactctcaggtgatgatacctgtgccaccggcccaaggaccacactttgartagcagagcagtagtagaaagtgcatcggctttgaaagaagacagacctgggcttgaattctagctaaaatacttctactttggacaagttacatagctc

SEQ ID NO: 481988 - DNA, 201 bp, Homo sapiens
tgctgcattgctcaattggctggatgctttggaagatttttccacttgaaagatttgttgtttgtcattttgagaaagtgggtgctgagtgtaatttgccrggaggctaaacggctatgttatttcttatctaggctggaattttactctaataattcaatctatcagtaagaaaagccaaataggaagttgtaagagatc

SEQ ID NO: 481989 - DNA, 201 bp, Homo sapiens
ccacagcctgggctccctgcctggggaagtggccaggcttcataggggcatcacttggcccgcctggtaggcatggaggccagtgccatacgtgaccttgytgttgcctgcaccccttcctaacgagcaccctgctccccactggaaggagaggggccagggctcctccctccccagggaggggagaaacgtgatgttgct

SEQ ID NO: 481990 - DNA, 201 bp, Homo sapiens
aagaaagtggaaagaagagatcatttgaaggacttcctcaacttaacaactatttgcctatggcattattttattgcatttggtgtatgatactatctcaraagcattttgtaaacttgccagtggcttacatttttgccggatgaatgacatgactaacgatccgtgctacattacctcagtgtctagtttgtcattttg

SEQ ID NO: 481991 - DNA, 201 bp, Homo sapiens
aggaccatcattaatgaaatgtgcggttggcatctggtttcctcagtagccaagtcactagactattggcatcttttgtatgtacttagttgaggaaattytttaacttatgccagaaagggaatttaatctgccaatgactatgaacccattggctggatggaagttgagcttgtgttaaaagctctgatgtaatgaacc

SEQ ID NO: 481992 - DNA, 201 bp, Homo sapiens
tgaggcaggagaattgcttgaacctgggaggtggaggttgcggtgagctgagatcacgccattgcactccagcctgggtgacagagcgagactctgtctcaaaaaaaaaaaaaaaaaaattgacaaattaattctcttaagattcaaaaaaaacaatgcaatacaattctgctatttgaaagataattatgagattcaaaa

SEQ ID NO: 481993 - DNA, 201 bp, Homo sapiens
ataggctttgattttatattctactgtatgtttcagttagtttctttttaaacattctttaacttttgattatttccttatcagacttgagttttctaggraaggagtttttttttttaatcagagaataaatttccaagtcattgtccccggagggataaattaaaatgcagggcctatttccaaccgcattagtgactt

SEQ ID NO: 481994 - DNA, 201 bp, Homo sapiens
gcatttgagtatctgtaggtttttcacttttacaaaaatttctgcagtgcacaatcttttatttttatacaattgtatgagtagttctggggatatattcttttttttttttttttttttttgagacggagtctcactcagtcacccaggctggagtgcagtggcgcgatctcggctcactgcatctccgcctcccaggtt

SEQ ID NO: 481995 - DNA, 201 bp, Homo sapiens
cgcctctgacttttattctcactgccagcccctacacccaccccttcctccctctcaggctaaacctattatatcatcttagtcaccaaaaagctaataccacacacacacacacacacacacacacacacacacagctcatttccctgtctctaccttatttctggttttgccctgtgcagaatgccccttcacctgcct

SEQ ID NO: 481996 - DNA, 201 bp, Homo sapiens
tatgatcataaagatattcttctatattgtcttctaaaagtttcaagggcttaatctttgcatttaagtatttaatccttctggagttgatttttgtgtarggtgtaagggagggatacaacttatttttttccacatgcataacctgttgcctcagcccagcttactgaacgagctttcctatcctccctggtctgcaga

SEQ ID NO: 481997 - DNA, 201 bp, Homo sapiens
gcctctgacttttattctcactgccagcccctacacccaccccttcctccctctcaggctaaacctattatatcatcttagtcaccaaaaagctaataccacacacacacacacacacacacacacacacacacagctcatttccctgtctctaccttatttctggttttgccctgtgcagaatgccccttcacctgcctt

SEQ ID NO: 481998 - DNA, 201 bp, Homo sapiens
cctctgacttttattctcactgccagcccctacacccaccccttcctccctctcaggctaaacctattatatcatcttagtcaccaaaaagctaataccacacacacacacacacacacacacacacacacacagctcatttccctgtctctaccttatttctggttttgccctgtgcagaatgccccttcacctgccttt

SEQ ID NO: 481999 - DNA, 201 bp, Homo sapiens
ctctgacttttattctcactgccagcccctacacccaccccttcctccctctcaggctaaacctattatatcatcttagtcaccaaaaagctaataccacacacacacacacacacacacacacacacacacagctcatttccctgtctctaccttatttctggttttgccctgtgcagaatgccccttcacctgcctttt

SEQ ID NO: 482000 - DNA, 201 bp, Homo sapiens
gaagtgccaatatagtgtgtttgtcttttgctctgcaattctgcaggtactggatcatgatgtttcaaaggaagaaccagtcacctttcacttcttggccwaattttatcctgagaatgctgaagaggagctggttcaggagatcacacaacatttattcttcttacaggtacatcagtcaaggctaccccccagttctga

SEQ ID NO: 482001 - DNA, 201 bp, Homo sapiens
atatcagagtgacatcttgtgaagtatagaatggtatctcacttggcgcatactttctgtttagcttaaagagttaaaactaaattatatcatgaagaagtttttttttttgttttttttttgagacagagtctcgctctgtcgcccaggctggagtgcagtggcagtgccatctcggctcactgcaacgtccgcctccca

SEQ ID NO: 482002 - DNA, 201 bp, Homo sapiens
ggccactaccacgcccggctaatttttgtatttttagtagagatggtgtttcaccatgttggtcaggctggtctcgaactcctgaccttgtgatctgcccrccttggcctcccaaagtgctgggattacaggcgtgagccactgcacccagccacttctatactgttttaacaggctgttatgaaaacttttgtatctgcc

SEQ ID NO: 482003 - DNA, 201 bp, Homo sapiens
ccttgtgcagcgagtttccttccactccaaatgagggctagaccacagcactggcgggtggacctgcacgtgaagatacagccactcagtccgtcgcaggktcagtgctgtgggagcccagggcacccgccgcgggctgctctgactgctggccaggaccgctgtcaggggcagagcataagtacggcttttagacaactt

SEQ ID NO: 482004 - DNA, 201 bp, Homo sapiens
agtggatgccctggggcttcacatttatgaccctgagaacagactgacccccaagatctccttcccgtggaatgaaatccgaaacatctcgtacagtgacwaggaggtaggacatgtgtgtactgcagatgggtccagcagatctttccctgtctgcccccctcactggagcctccccagccagggcatctccttgttatt

SEQ ID NO: 482005 - DNA, 201 bp, Homo sapiens
ttcaatgactgtttttcttcacccctcgcagatggagcggcagcgcctcgctcgagagaagcagatgagggaggaggctgaacgcacgagggatgagttgkagaggaggctgctgcagatgaaagaagaagcaacaatggccaacgaagcactggtgatttctgaggggctggggttccaggaggctacttggggacttcc

SEQ ID NO: 482006 - DNA, 201 bp, Homo sapiens
ggcagggacaggggcactgccagatgagggttgcacctaggtctgagttatcatgcagctttctgagttgctcctccaatagaatggtgccttatttacaygccctctctctgtgtgactatctccctgggtgtagctttttaaaaatagctttactgttttgtaaaaatgatgcataattataaaagtggcaaacaatac

SEQ ID NO: 482007 - DNA, 201 bp, Homo sapiens
cagctaagagcactgtgccctccagatgcggtctgaggagacagctgacctgttggctgaaaaggcccagatcaccgaggaggaggcaaaacttctggccyagaaggccgcagaggctgagcaggaaatgcagcgcatcaaggccacagcgattcgcacggaggaggagaagcgcctgatggagcagaaggtgctggaagc

SEQ ID NO: 482008 - DNA, 201 bp, Homo sapiens
accaaggtgcattcactacagttttcctcaccacgctttgcatgtcgttctgggaatatggttcctttttgcctgccctgcttcaggccccttactgtatwcgggggtcactccctgtgcatgatgcaggttgggccaggtccctgcaccaggcctcacatgccgtgaccacctgagccccataggatgaggatctgcacc

SEQ ID NO: 482009 - DNA, 201 bp, Homo sapiens
atatacactggagcaaagcttatacactgctgtaactgctctttcctcttagcagtcaatcctgaaggagatcatccatatcagctttttaatcatgtttkgttgtgtggatggattgtaatttatttaaccagtccctcatggatgagtatttagtctgttttcttttgcaattttgaacaaaatgacactgaacatccc

SEQ ID NO: 482010 - DNA, 201 bp, Homo sapiens
gttgtgtggatggattgtaatttatttaaccagtccctcatggatgagtatttagtctgttttcttttgcaattttgaacaaaatgacactgaacatccckgaacacaaatcttgacacacacacgtggatatattggtagaataaattcttataatagaactgtggggtcaaattttcgattttgatactctccaaagaa

SEQ ID NO: 482011 - DNA, 201 bp, Homo sapiens
tgccccatggcaacctccagaggaaagaggctcagagaggtcaggggtgtctgcagtgagctgctgatggcagagagtgagctctcggaccttctcagccsggtgtggagctcttgcctctcccgcgaacctcagtttagttatcttcatagcccacgtcctggtcgcttaacaaacattgagctcctgatcggcacataa

SEQ ID NO: 482012 - DNA, 201 bp, Homo sapiens
tttgtctaatgtgggattcctgactcccttcgtccaaggcaccggtgtgtgtgtgtcttgcactccagagctgacctccaccgcccagcctgggaagtcaytgtagggagtgagacactgaagccctgagaagccagtgccatcatccccaccccgcccagggttccggaacattcattcccccaccggtgaggacctggc

SEQ ID NO: 482013 - DNA, 201 bp, Homo sapiens
ccactaggtggtgccagactgcatcatttttaaagacagccttttctcttccaactcttttgccactgttctcttttttgcttctttgccaaatttggacygagctttgaaaacttcatataaactttctcttagtgagttatgttgcttatagcttttccctccaccttgcctgttttagtcttcttgtttcaatagttt

SEQ ID NO: 482014 - DNA, 201 bp, Homo sapiens
ggagtctaactctgtcaccaggctggagtacagtggcgccatctcagctcatggcaatctctgcctcctgggttcaagcgattctcttgcctcagcctccygagtagctgggactacaggtgcttgctaccacgcccagctaatttttgtatttttagtagagacagggtttcaccatgttggccaggatggtctcgatct

SEQ ID NO: 482015 - DNA, 201 bp, Homo sapiens
ttgaaaatgactttgggagagaatggcatataatttatgaatctcatgttgctgtgtgcagactcctagtgatcagaagagagaaaagaattgtgggaagrgaagcttagtttcttagtactctttaatgcaaatcagggacagagtgccaaagtacaattgagttagaaaattgagtgtgtaaagtgtaggtagagagtg

SEQ ID NO: 482016 - DNA, 201 bp, Homo sapiens
gccaaggtatttttagagagaggaaatcagtatgtttcaccaaaggggtaaaatatataccttaaggcctaattatgcaattacatttttaataacgagtktcataaattcttgcttcattgcaatcattaattggaagactgttctgctcagaagcctcatctagttatcatgattatcatcaacatcgtcaaccaacca

SEQ ID NO: 482017 - DNA, 201 bp, Homo sapiens
gtgtgtgtgtgtacacccttgccttcaaggagtttgtgatctgcagaactggaggaaagacagaaaacttggggaaagacaagtacctcatttttcaataygtgtaaagcccatactgattcatgtatgtggcattgggggacatggacagcagggagacaaagggatagatcttagaaaggtctagttacaaataaatgg

SEQ ID NO: 482018 - DNA, 201 bp, Homo sapiens
ggtgactgggtgagtagcttcccctttggcctcagttaggcatccttgacaggacagacctgtgattggactgtctggtctctcatggttctttttctccrtgatttatgactttgattatgatttctttatattaaaaaaaaacttgtagtaaaaccagtcttatttaaaggaatactagccttttatcaaagggcaaag

SEQ ID NO: 482019 - DNA, 201 bp, Homo sapiens
agctcatcactggggcgctgtagctgtatagtagagaagggggcacattcctgaattaagtcatgcagaaagcaggacgtagagatgctaccagtttcctwctcctcacaggctctcctgggcaagcagaagttaccaggattagactgctgctggccctggcttctttacccattgttaccagcctgattgcttctggct

SEQ ID NO: 482020 - DNA, 201 bp, Homo sapiens
tgaatattacctcttgctataggtgactttgtgaatacttcaaactgtaaaatcacaactttcaggaaatgtgataaatttagtgggaaaaaaatttaatkcacgccttgcaaaggcttctttgagggtagcacaggaggaagtgccaatatagtgtgtttgtcttttgctctgcaattctgcaggtactggatcatgatg

SEQ ID NO: 482021 - DNA, 201 bp, Homo sapiens
tgtgtggtcagtcctggcctgggaggcgaggagtggtcatgggctggcaggagtcttttggccgtggacatacctgctcttgttttataccttttggatcktcatttgccgatgcctacctggtgggatgtcatctctggaaatgaggaataaaccctaatagcatatctaaaagaaacatctctagtaatttctacgctt

SEQ ID NO: 482022 - DNA, 201 bp, Homo sapiens
gcctcagcccagcttactgaacgagctttcctatcctccctggtctgcagaaccacatcttgatgtaggagagtaaggtgcacccagaagacatggtgaaktgtcctccagtcctctcttgatttatgatttttacctcctggcatatctgaggcgccttcattttgcatgtttccagagctgacggcactagaggccact

SEQ ID NO: 482023 - DNA, 201 bp, Homo sapiens
gtgagactctgtcttaaaaaaaaaaaaaaaaaaaaaaaaagaggacttcagagctctagtgacacttggtttgtcccccatatgtggtacttcagacatcrtgcttcatgctatgctgtgtctctaattgtcctatttcttccttaattcctcattagattgtaagccccttaaaggcaagcctcattaagtacacagtag

SEQ ID NO: 482024 - DNA, 201 bp, Homo sapiens
atctcaaactcctgggctcaaacattcctcctacttcagccccccaaagtgctagggttacaggcatgagctgctatgcctgcctggcctgactgggctttttctttctttctttcttagtttctttttttttaaaagaattgtagatatgtagtaagccaccttatggaaattgtaatatgatggaaattagagaacaaa

SEQ ID NO: 482025 - DNA, 201 bp, Homo sapiens
ccgcgcagcccagaccgttcccgggccggccagccggccaccatggtggccctgaggcctgtgcagcaactccaggggggctaaagggctcagagtgcagsccgtggggcgcgagggtcccgggcctgagccccgcgccatggccggggccatcgcttcccgcatgagcttcagctctctcaagaggaagcaacccaagac

SEQ ID NO: 482026 - DNA, 201 bp, Homo sapiens
tctcaaactcctgggctcaaacattcctcctacttcagccccccaaagtgctagggttacaggcatgagctgctatgcctgcctggcctgactgggctttttctttctttctttcttagtttctttttttttaaaagaattgtagatatgtagtaagccaccttatggaaattgtaatatgatggaaattagagaacaaat

SEQ ID NO: 482027 - DNA, 201 bp, Homo sapiens
ctcaaactcctgggctcaaacattcctcctacttcagccccccaaagtgctagggttacaggcatgagctgctatgcctgcctggcctgactgggctttttctttctttctttcttagtttctttttttttaaaagaattgtagatatgtagtaagccaccttatggaaattgtaatatgatggaaattagagaacaaatt

SEQ ID NO: 482028 - DNA, 201 bp, Homo sapiens
tcaaactcctgggctcaaacattcctcctacttcagccccccaaagtgctagggttacaggcatgagctgctatgcctgcctggcctgactgggctttttctttctttctttcttagtttctttttttttaaaagaattgtagatatgtagtaagccaccttatggaaattgtaatatgatggaaattagagaacaaattg

SEQ ID NO: 482029 - DNA, 201 bp, Homo sapiens
tggggcagagccacctggggtttcccaacaaaaagcaacattggcaaggtagccatttcagtgcaccgtgtataagaatgcctccttctgccaggcgcggyggctcatgcctgtaatcccagcactttgggaggccaaggtgggtggatcataaggtcaggagttcaagaccagcctggccaatatggtgaaacctgatct

SEQ ID NO: 482030 - DNA, 201 bp, Homo sapiens
tttttgtatttttagtagagatggggtttccccatgttggtcaggctggtttcgaactcctgacctcgtgatctgcccgcctcagcctcccaaagtgctgkgattataggtgttagccaccgtgcccagctgtacttttattttttttttttgagatggagtttcactcttgttgcccaagctggagtgcaatggcatgat

SEQ ID NO: 482031 - DNA, 201 bp, Homo sapiens
atcttggctcactgcaacctccgcctcctgggttcaagcgattctcctgcctcagcctcccaagtagctgggattacaggtgcgcgccaacacatccagcttttttttttttgtatttttagtagaaatgggttttcaccatgttagccaggctggtcttgaactcctgacctcaggtgatccgcccgcctcagcctccca

SEQ ID NO: 482032 - DNA, 201 bp, Homo sapiens
ctgacctgtaaatttgttctttaacaatggctgcaggtgggagcatatggtggtttataaaaacgctgtcgggctttgtttccttctttagctgccgtgtstacttctgaagtctgggaagtgccaagccacgcggcctcaagggagctggctggtgtttgagctgtggcagaagcacctggggctccagggagcaggctg

SEQ ID NO: 482033 - DNA, 201 bp, Homo sapiens
cgcgccaacacatccagcttttttttttttgtatttttagtagaaatgggttttcaccatgttagccaggctggtcttgaactcctgacctcaggtgatcygcccgcctcagcctcccaaaaggctgggattataggcgtgagccaccgtgccccacctgccacatgtctcttgcaggggacaaaaaactcctctggttct

SEQ ID NO: 482034 - DNA, 201 bp, Homo sapiens
ggcacatacatgacccagatgcacaaagggcaccagaggcacaagctgcccagggtttgaggtggggaaaatgtaagcagtttgctgttgccgtatatccyggttctccgttactgtgtaacaacccacccaagccagctgtgtggctttgttagtacctctggtggcttgttgggttgactgggccagacagagatcctt

SEQ ID NO: 482035 - DNA, 201 bp, Homo sapiens
ctgaggcgctgcagtgcagctcaggtggggctcaggaagcaccccacccaccccagagcactctgcatcctaataagcacatgctcgagtcactggaatcyggtgctgctggcagtgccagaaccctcccctagcacctcgaggggacagccagcatgctcctcgggtggaggatccaggaattcttggagccaacattgc

SEQ ID NO: 482036 - DNA, 201 bp, Homo sapiens
ctcagtctccgaagtcagtcaggcagaagggaagttggatcaagctggccagagttgagctcaggaagtcagtgcactttctcttgtctggttcctgcatygttttacttgtgtaaaatcatcaagatccctaaaccgatgtctgaacaccaggcttctaggcagagctccaccgtgtgaccttgggcgcatcacttattt

SEQ ID NO: 482037 - DNA, 201 bp, Homo sapiens
ctgcctccagctggtgggtctgccttcccctctgaccgcctcagtgccttctggaggactgtggctctctctcctgcccagtggctgtggtgccttcctayttctgtgtgggcagactgatttccctctctacctttacttgtggctgaggcgaagctcctgctcttgcaagataagaggtggggctgaggcgctgcagtg

SEQ ID NO: 482038 - DNA, 201 bp, Homo sapiens
ttgaacaaaatgacactgaacatccctgaacacaaatcttgacacacacacgtggatatattggtagaataaattcttataatagaactgtggggtcaaaytttcgattttgatactctccaaagaagtcataccagttcatgctctcactagtggtgcagcaactagtacgcgtttttgctgaaaatttttatgatgtgt

SEQ ID NO: 482039 - DNA, 201 bp, Homo sapiens
taagtgaccagcccaagctcccatggcctgtgagtggccaagtagagacgtgaaccccaggcctcaaaccctagatcgcacaccaagcagcttgtgggccrcagagcacctgagccgtgtctcactgtctgcccaagccctgatgcatgataccctcttgccggcagagtggaatacatggaaaagagcaagcatctgcag

SEQ ID NO: 482040 - DNA, 201 bp, Homo sapiens
agcttttgctgctttgggtccctcagggattaatacacaaaaagggccccttgggtattcagtggcagatttctcttgagagcagataaagtcgctaatawcaaattggatttgttcattggggtggacttggcctttcgttccacctctgtgtaggataagtgtgtggatagtgctcccactgtgcacatcaccatatgg

SEQ ID NO: 482041 - DNA, 201 bp, Homo sapiens
ttaattgtacagcttcctttctctcaccactgatagccaaagtagctctgtgtctcccccaaccttcccttgctttaggaacaagatgatcacaatgcagycttgtgaatcaattttctgtctgtgctgatgaaagtgtaattcattcttaatcaagcagccttgctgctgcaggctccgtgccggaatacatttagttac

SEQ ID NO: 482042 - DNA, 201 bp, Homo sapiens
aaaagtagatccatttcctctggggccatgcatattcaaaggggctgaggctgtagtcatccccagagctgctcttgacacttcttgagttcatagcgctstgtcacacagcctctgttgtaactacagagaccgtttttactcttcagcattgatcatgaagagaagagataaggggtttttatgcatagccgtcatacc

SEQ ID NO: 482043 - DNA, 201 bp, Homo sapiens
ttctccatgatttatgactttgattatgatttctttatattaaaaaaaaacttgtagtaaaaccagtcttatttaaaggaatactagccttttatcaaagrgcaaagtaatgatttaaaaaaaaaatcaacaacaaaatttcaagggaatgaatgtccctagaagctagccatctccccgagttaacttaagaggctagac

SEQ ID NO: 482044 - DNA, 201 bp, Homo sapiens
ttgtaccctttgtcagaaaattattaacaggctgctctggcagccctcattagaacgccgtgaggccatctgttgtgatcagcctacacacctcacttccmctcacagagtatcatgtctcccttgttgctcctttcaggtaaagaagcagattttagatgaaaagatctactgccctcctgaggcttctgtgctcctggc

SEQ ID NO: 482045 - DNA, 201 bp, Homo sapiens
tttgagattgcattttgtgcctccaatattctactttcctgaaaaattagtaattgagaaaacagaaaatgggccctcattcaactaaaacatatgcttcmttttatgctttgatcaagaatattagtaagaggaaaaatgtgtcctttcaatcagtatcaccccgacagtgatgaagcagtcattggcactttgattaaa

SEQ ID NO: 482046 - DNA, 201 bp, Homo sapiens
ggctgtgtgatggacagattggagtgagacaactttggaaacagggagacctattagaaggctgtgatagttgccctggtgagagaatattaggttcacayttcaggtggttggttggatgggggctgactgatttaaaaatatccaggagataaaaagttgattagatggtgctatactctgcatatccctttttttcat

SEQ ID NO: 482047 - DNA, 201 bp, Homo sapiens
aaggctgtgatagttgccctggtgagagaatattaggttcacacttcaggtggttggttggatgggggctgactgatttaaaaatatccaggagataaaargttgattagatggtgctatactctgcatatccctttttttcatatccttttacagaatggtatttttcttcccactcagcatctactttgagatgtatcc

SEQ ID NO: 482048 - DNA, 201 bp, Homo sapiens
gctggagtgcagtggtgcgatctcggctcactgtaacctccacctcctgggtgcaagcgattctcctgcctcagcctcctgagtagctgggattacaggcrcatgctatcacgcccagctaacttttgtatttttagtagagatggggtttcaccatgttggtcaggctggtctcgaactcctgacctcatgatccgccca

SEQ ID NO: 482049 - DNA, 201 bp, Homo sapiens
agagatcacgtgaagctgggcgctgtggcttatgcctataatcccagccctttgagaccaggggttcaaagccagcctgggcagcatagcaagatcctataaaaaaaaaaaagagtttacttgaattactgctccaagaagggttgagacaaggagattgttctgggttcccaggaagcttgtttcacgtatgtttttttt

SEQ ID NO: 482050 - DNA, 201 bp, Homo sapiens
attccctgaggaatgctgagcggccatccagtctgattaaccgaggttcctacttctctgccacttcctttctctataattcttactcgctcgctctctctttttttttttttattatactttaagttctagggtacatgtgcacaacgtgcaggtttgttacatatgtatacatgcagctataaaaaaggatgaattctt

SEQ ID NO: 482051 - DNA, 201 bp, Homo sapiens
tcttaccatgttggtcaggctggtcttgaactcctgacctcatgatctgcctggctcggcctcccaaagtgctgggattacaggcatgagccaccgtgccygacctctcccatgggttttaagtagtgcctatggatggcatgggtgccactactcaggtctaggacaggcaggggtgagtgatgagtgcgtgcgtgctga

SEQ ID NO: 482052 - DNA, 201 bp, Homo sapiens
aaatacaaaatttgccaggtgtggtggcgcatgcctgtaaacccagctacttgggaggctgaggcaggagaattgcttgaacctgggaggtgggggttgcrgtgagccaagatcgtgccattgcactccagcctgggcaacaagagcaagattccatctcataaataaataaataaatagccataattaacttcactgttt

SEQ ID NO: 482053 - DNA, 201 bp, Homo sapiens
ccgtcccccaactcccctttccgctcaggcagggtcctcgcggcccatgctggccgctggggacccgcgcagcccagaccgttcccgggccggccagccgsccaccatggtggccctgaggcctgtgcagcaactccaggggggctaaagggctcagagtgcaggccgtggggcgcgagggtcccgggcctgagccccgcg

SEQ ID NO: 482054 - DNA, 201 bp, Homo sapiens
tgctctcaagctgtctcattctgagcacactaatgctgtctgtcttctgatggtgaagtggtgggtttggagtctccctcccctgccctttatggagccgccgatagtaccgaggactcttcacatgcagactcgaggggtccagagaatgggccagaccatcttgcctgccccatggcaacctccagaggaaagaggctc

SEQ ID NO: 482055 - DNA, 201 bp, Homo sapiens
ctgtctcattctgagcacactaatgctgtctgtcttctgatggtgaagtggtgggtttggagtctccctcccctgccctttatggagccgccgatagtacsgaggactcttcacatgcagactcgaggggtccagagaatgggccagaccatcttgcctgccccatggcaacctccagaggaaagaggctcagagaggtca

SEQ ID NO: 482056 - DNA, 201 bp, Homo sapiens
ggaaagggaaggacctctttgatttggtgtgccggactctggggctccgagaaacctggttctttggactgcagtacacaatcaaggacacagtggcctgrctcaaaatggacaagaaggttgggctagaactcgatgaaactggtggggctgacgtgagctttccagtttttccctgagcaggcgcctagctcatcactg

SEQ ID NO: 482057 - DNA, 201 bp, Homo sapiens
atgacactgaacatccctgaacacaaatcttgacacacacacgtggatatattggtagaataaattcttataatagaactgtggggtcaaattttcgattytgatactctccaaagaagtcataccagttcatgctctcactagtggtgcagcaactagtacgcgtttttgctgaaaatttttatgatgtgtaacatacac

SEQ ID NO: 482058 - DNA, 201 bp, Homo sapiens
gctagaggacaaccacagtagctaccatgcattgagtgcctgtgtgtcaggggttttggcttttgtctcatttaattcctgctaacttacaaacatcaaamtgacatcaaaggtaggttttcatgttcccattttataagtgagaactcagatttagagagtttagtgaactccaccagcatcccacagctgatgcagagg

SEQ ID NO: 482059 - DNA, 201 bp, Homo sapiens
ttagtagagacgggtttctccatttggtcaggctgctctcaaactctcaacttcaggtgatctgcccgcctaggcctcccaaaagtgctgggattacaggygtgagccaccacgcccagccaagcatagttttaaaaactttgctggtcttatttaattaaatccctgtaagagtcctgcaagataaatactattattatt

SEQ ID NO: 482060 - DNA, 201 bp, Homo sapiens
gaggcagaagttgcagagagccaagatcacaccactgcactccagcctggacgacagagtgagactccatctcaaaataaataaataaataaataaataartaaagtaaaaaaattaaaaaaggtaggtgtctagaagaagaattgcatagaattgacagaagaggtgaaccccaatataaaaaaaatcttaagttgataa

SEQ ID NO: 482061 - DNA, 201 bp, Homo sapiens
gatcaaggactactttggacctaggttctgtaactgacttcatctttaagtggggaaacagaggctcagacaggatacatagcatgcttaaaggcttagtscagccactatctattctgaaagaggcagaataggacagggacaggtaggtagtgagagaatagggagaatagatgggcacaccctttaacttaatatcga

SEQ ID NO: 482062 - DNA, 201 bp, Homo sapiens
taaacttaagtgcaacatgcatatggaaaagtagacaaattataagtatacaacttgatcaattattgtaaggtgaaaacaccagaggaagaaataacctrtgtctccctacccccaattcccctttcttcctccccaaaggcaaccagtctcctgatttttaattccagattggcgttgcccatcttaaactttgcattc

SEQ ID NO: 482063 - DNA, 201 bp, Homo sapiens
tcagggcccgtcccccaactcccctttccgctcaggcagggtcctcgcggcccatgctggccgctggggacccgcgcagcccagaccgttcccgggccggscagccggccaccatggtggccctgaggcctgtgcagcaactccaggggggctaaagggctcagagtgcaggccgtggggcgcgagggtcccgggcctgag

SEQ ID NO: 482064 - DNA, 201 bp, Homo sapiens
cagagtgcaggccgtggggcgcgagggtcccgggcctgagccccgcgccatggccggggccatcgcttcccgcatgagcttcagctctctcaagaggaagyaacccaagacgttcaccgtgaggatcgtcaccatggacgccgagatggagttcaattgcgaggtaaccggccggcagccccgactgctgcggtgacagtc

SEQ ID NO: 482065 - DNA, 201 bp, Homo sapiens
tttcctgaacaagactttcagctgctcaaagccaaggatgctgtcttgttttctgcatctccagccccttgcacagggcctgggagtttcctaaatgaaaragcgagtgggagtttgtgtttgattcagctgagcatgaagaacggttagagatttgagggatgattttcctggatttgtagtctttgatattgtttacct

SEQ ID NO: 482066 - DNA, 201 bp, Homo sapiens
agatataaataaataaataaatagaaaatagctcttgttcatggatcataagacataacgttgtcaaattggcagtattttggaaattgatctacacgttygacataatccctgtcagaatcccagtttatttcattgtagaaattgacaagtctccaggcgtagtggctcatgcctgtaatcccagcactttgggaggcc

SEQ ID NO: 482067 - DNA, 201 bp, Homo sapiens
taaataaataaataaataaataaataaagtaaaaaaattaaaaaaggtaggtgtctagaagaagaattgcatagaattgacagaagaggtgaaccccaatrtaaaaaaaatcttaagttgataaaaagacaaatgctataaacagggcatgaaacatgcactttatagaagagaaaacaagaatggtcataaatacaaaaa

SEQ ID NO: 482068 - DNA, 201 bp, Homo sapiens
acacacatccttttcacttaaaactgtcacaacagatagacccacttcattttctttttctttttgagacagcagtctctctctgtcacccaggtggcacratctccacccactacaacttctgcctcccaggctcaagggatcctcccacctcagcctcagcgtatgccctgctaatttttgtgttttttgtagagacag

SEQ ID NO: 482069 - DNA, 201 bp, Homo sapiens
ctcacagtgtccttccccattggtttgttattgcagatgaagtggaaagggaaggacctctttgatttggtgtgccggactctggggctccgagaaacctrgttctttggactgcagtacacaatcaaggacacagtggcctggctcaaaatggacaagaaggttgggctagaactcgatgaaactggtggggctgacgtg

SEQ ID NO: 482070 - DNA, 201 bp, Homo sapiens
acatacatcaaggtggctttaatgttggaagcagagttagtccagtggagaagttctttcagcagggtctttgccacctctgcattgctcaaatgtgatgyatttgatcagtggactagctgagaacttggtataataatgggggttgttaatcttgcatgcctttggaacctgaatttacagctttaactttgcatatct

SEQ ID NO: 482071 - DNA, 201 bp, Homo sapiens
gtgtccttccccattggtttgttattgcagatgaagtggaaagggaaggacctctttgatttggtgtgccggactctggggctccgagaaacctggttctytggactgcagtacacaatcaaggacacagtggcctggctcaaaatggacaagaaggttgggctagaactcgatgaaactggtggggctgacgtgagcttt

SEQ ID NO: 482072 - DNA, 201 bp, Homo sapiens
tgcctttggaacctgaatttacagctttaactttgcatatctgcttgcttttgcattagagcttggtcagcactgttgagagatttgcaaatgcaactaasagggctttcttttagcatcctaccctttcaaaaatccaggaggcaaacaatgatcaatgttgtcataagtaatgcagaggatggcaataataataatacc

SEQ ID NO: 482073 - DNA, 201 bp, Homo sapiens
atgaccctcactctacagatgaggaagttgaggcttagagagaggatgccttactcaaggcctcagaaggggtacttcagcacccccccacttcccttcargatcctctaaggccagtgctctcatttgacaaatgaaagacagatttggagagacctgagatcttttggacatcaggtttatgtgtcaagcatagtttta

SEQ ID NO: 482074 - DNA, 201 bp, Homo sapiens
gtcttttgctctgcaattctgcaggtactggatcatgatgtttcaaaggaagaaccagtcacctttcacttcttggccaaattttatcctgagaatgctgragaggagctggttcaggagatcacacaacatttattcttcttacaggtacatcagtcaaggctaccccccagttctgagagaacttgcccaggagtggtt

SEQ ID NO: 482075 - DNA, 201 bp, Homo sapiens
ttaaaactactgcctgcattattcctggatccccctagtaatgggctccaattaccagtcacttataagaatttataggtaagactcttatcatatgttgytaatcacaactttcacagttgtgatttggtgttttaattcaaaagctactgttttggaagtgactgctttctttgagggttagaaaacatgcccacattt

SEQ ID NO: 482076 - DNA, 201 bp, Homo sapiens
gaaggacctctttgatttggtgtgccggactctggggctccgagaaacctggttctttggactgcagtacacaatcaaggacacagtggcctggctcaaartggacaagaaggttgggctagaactcgatgaaactggtggggctgacgtgagctttccagtttttccctgagcaggcgcctagctcatcactggggcgct

SEQ ID NO: 482077 - DNA, 201 bp, Homo sapiens
tattaaaaagcaaaggtttttggagttagtttggggtcaccaggactagcatggcctgtaaatgttttttctagcgtggttgttttttcagatgcagttgmgcatcattgattcccaaagaggaggctggagcagagtgtattcagcttggggaattgagctgtttgcagtggcgaggggcggatagaggagatgaggtag

SEQ ID NO: 482078 - DNA, 201 bp, Homo sapiens
ctcagctcactgcagccttgacctcctgggttcaagcaaacctcctgcctcagcacccccagtagctggcactacaggcacacgccaccatgcccagctartttttctatttttagtagagatggggtttcaacatgttacccaggctggtcttcaactcctgggctcaaagcaatctgcccacctcggcctcccaaagtg

SEQ ID NO: 482079 - DNA, 201 bp, Homo sapiens
aaaaatgatgcataattataaaagtggcaaacaataccaaatttacttcatgtgtaggttttttattttgctctattttttggtaggtaataaatctgtawcagatgactccggaaatgtgggaggagagaattactgcttggtacgcagagcaccgaggccgagccaggtgaggcccattcattgttggtttacattcct

SEQ ID NO: 482080 - DNA, 201 bp, Homo sapiens
aggttttttattttgctctattttttggtaggtaataaatctgtatcagatgactccggaaatgtgggaggagagaattactgcttggtacgcagagcacygaggccgagccaggtgaggcccattcattgttggtttacattcctttatgggcttttttttttttttttgccttaaagaactgcaaaactaggacatgct

SEQ ID NO: 482081 - DNA, 201 bp, Homo sapiens
ttttttattttgctctattttttggtaggtaataaatctgtatcagatgactccggaaatgtgggaggagagaattactgcttggtacgcagagcaccgakgccgagccaggtgaggcccattcattgttggtttacattcctttatgggcttttttttttttttttgccttaaagaactgcaaaactaggacatgcttgt

SEQ ID NO: 482082 - DNA, 201 bp, Homo sapiens
tccacagattatgcagcacttgccagggttctgggagacttaatctgtgtgtgtgtgtgtgtgtgtgtgtgtgtgtgtgtgtgtgtgtgtacacccttgcyttcaaggagtttgtgatctgcagaactggaggaaagacagaaaacttggggaaagacaagtacctcatttttcaatatgtgtaaagcccatactgattca

SEQ ID NO: 482083 - DNA, 201 bp, Homo sapiens
tttattttgctctattttttggtaggtaataaatctgtatcagatgactccggaaatgtgggaggagagaattactgcttggtacgcagagcaccgaggcygagccaggtgaggcccattcattgttggtttacattcctttatgggcttttttttttttttttgccttaaagaactgcaaaactaggacatgcttgttaa

SEQ ID NO: 482084 - DNA, 201 bp, Homo sapiens
gagtatccacagattatgcagcacttgccagggttctgggagacttaatctgtgtgtgtgtgtgtgtgtgtgtgtgtgtgtgtgtgtgtgtgtgtacaccyttgccttcaaggagtttgtgatctgcagaactggaggaaagacagaaaacttggggaaagacaagtacctcatttttcaatatgtgtaaagcccatactg

SEQ ID NO: 482085 - DNA, 201 bp, Homo sapiens
catctcacttagctccaatgacagtgtcttccgttctccccacagggatgaagctgaaatggaatatctgaagatagctcaggacctggagatgtacggtrtgaactactttgcaatccgggtgtgttgaaacctctctgagctccttgtgtagtagacagagactgagtgagggccagactgctaaaatggttacttctt

SEQ ID NO: 482086 - DNA, 201 bp, Homo sapiens
ctcagtgcagcctagaccttccaggcttaagtgatcctcctatatcagcctcccaagcagctcagaccacaggcatgcgcgatcatccctagctttttttktttgtttgtttgttttttaatttcttgtagagacagagtctccctgtgttacccaggctggtcttgaacctgacctcaagcaacctcccatgttggcccc

SEQ ID NO: 482087 - DNA, 201 bp, Homo sapiens
ctcacttagctccaatgacagtgtcttccgttctccccacagggatgaagctgaaatggaatatctgaagatagctcaggacctggagatgtacggtgtgwactactttgcaatccgggtgtgttgaaacctctctgagctccttgtgtagtagacagagactgagtgagggccagactgctaaaatggttacttcttcat

SEQ ID NO: 482088 - DNA, 201 bp, Homo sapiens
tggatattaacctttttgtctgcttctgtggccacagattctccagctatgtatcgggaaccatgatctatttatgaggagaaggaaagccgattctttgkaagttcagcagatgaaagcccaggccagggaggagaaggctagaaagcaggtgagcacaaccttgttttaactgatgatgtcactgtgtggtcagtcctg

SEQ ID NO: 482089 - DNA, 201 bp, Homo sapiens
ttagctccaatgacagtgtcttccgttctccccacagggatgaagctgaaatggaatatctgaagatagctcaggacctggagatgtacggtgtgaactastttgcaatccgggtgtgttgaaacctctctgagctccttgtgtagtagacagagactgagtgagggccagactgctaaaatggttacttcttcattccaa

SEQ ID NO: 482090 - DNA, 201 bp, Homo sapiens
aagtgcagtggtgcaatcatatctcagtgcagcctagaccttccaggcttaagtgatcctcctatatcagcctcccaagcagctcagaccacaggcatgcrcgatcatccctagctttttttttttgtttgtttgttttttaatttcttgtagagacagagtctccctgtgttacccaggctggtcttgaacctgacctca

SEQ ID NO: 482091 - DNA, 201 bp, Homo sapiens
agatattaaattagtaattgaggggactcgtggggtaacttgcccttgggaaccagtagtatggcatcgggctgcaagattggcctgtccatcctcaatgytacctggccaatttaggggcccagtgcctctggatgctagactctggggtcgattatctccaccggaatgtaatggatgaacatgcatgtgatggtgtcc

SEQ ID NO: 482092 - DNA, 201 bp, Homo sapiens
atgtatcgggaaccatgatctatttatgaggagaaggaaagccgattctttggaagttcagcagatgaaagcccaggccagggaggagaaggctagaaagyaggtgagcacaaccttgttttaactgatgatgtcactgtgtggtcagtcctggcctgggaggcgaggagtggtcatgggctggcaggagtcttttggccg

SEQ ID NO: 482093 - DNA, 201 bp, Homo sapiens
cctcgctcgagagaagcagatgagggaggaggctgaacgcacgagggatgagttggagaggaggctgctgcagatgaaagaagaagcaacaatggccaackaagcactggtgatttctgaggggctggggttccaggaggctacttggggacttccttggcttttctggagcttggtctcctgaaaaccatgagttagcag

SEQ ID NO: 482094 - DNA, 201 bp, Homo sapiens
ttaaaaaaacacccggggaagtgataaatcacagagagagattgcatatgcgggaaaggtgtctcccacaattaaaacaagtggccagagcctccctggcracctctggtctgcattgccagccctgaagatggctcctaaattacttaagtttaataggtagttaatatagccaaccctccttatgaccccagtgggctg

SEQ ID NO: 482095 - DNA, 201 bp, Homo sapiens
atgatttttgctcacagtgtccttccccattggtttgttattgcagatgaagtggaaagggaaggacctctttgatttggtgtgccggactctggggctcygagaaacctggttctttggactgcagtacacaatcaaggacacagtggcctggctcaaaatggacaagaaggttgggctagaactcgatgaaactggtgg

SEQ ID NO: 482096 - DNA, 201 bp, Homo sapiens
acacactcttgttgaattacttgagatgagtttactgtttaccaagggcaaggtgggaaactaaggccaagaaactccgtgatgagtctgttctctgactrtcttttgatggggatgggaaattctgcttgacctcagtgtgtttaatagactcagggccgggcagagctttgctggtgtctgctgtggcttttgtcttct

SEQ ID NO: 482097 - DNA, 201 bp, Homo sapiens
tttgtgcccctcccagcacaggcctgatgcaggtgtccactcacaggtggcgctcacctaggctgtcacaggacccacctccatgccaggcaacagagggycacagaaccacccccacggctcactccttggtctggggccaccttcttgccctttctttttttttttttttttttttttccgagatggagtctctctctg

SEQ ID NO: 482098 - DNA, 201 bp, Homo sapiens
taaggccaagaaactccgtgatgagtctgttctctgactatcttttgatggggatgggaaattctgcttgacctcagtgtgtttaatagactcagggccgrgcagagctttgctggtgtctgctgtggcttttgtcttctggcagcgacgtggctctagaggaatggcagggtcagaatgcttgatttggtgcccacccgc

SEQ ID NO: 482099 - DNA, 201 bp, Homo sapiens
taaatttcctgaaatctcaccattaactaaggaagatgtatgcttaaaacagtttaaaaggggctgcttgagtcctcacctctctctctgtttaatctctrggagtgttggagtcataatggtaggaggcagaaggctgaatctttttttaaaaatttaaactaaatagtcagaaactattttctgactattgaaacacaa

SEQ ID NO: 482100 - DNA, 201 bp, Homo sapiens
gtctcgaactcctgagctcaagtgatcttcctgccacagcctcccaaaatgctgggattacagacatgagccatcttgcctggccattgtatttgtcctcrttttcagtactcttctgcctcactgagaggtctcagagtctgctgtgtggtttcagcagtacccatgggggctgtgtaacattgaagctgattcaaggag

SEQ ID NO: 482101 - DNA, 201 bp, Homo sapiens
tggcatctgggcaaccacagatcaggtggacagacactgaccttggagccagatctgaaatttagaatgtgagtaagtcaatgacttaccttccagacctyagttttctcatccatcaggtgaaactaatgatataccttctccatctcagatgaagggacgtatattacaccttacagtctttgtatgcagtaaacttct

SEQ ID NO: 482102 - DNA, 201 bp, Homo sapiens
aagtctttacagaacagtattggcatcaataaccccactatgactaataggaaactgggaagctcaactggccagggagaaaccccaaagaatagtgaacraaaacagtaacattttcttattacttggctttctatttttgtcgatacattctctttgtatgttttcttttcttttttagagacaggatttcattatgca

SEQ ID NO: 482103 - DNA, 201 bp, Homo sapiens
ctatttgtagtgctctgcaaaattattctcagtatatcacacatttgtaatcattgccaatcactgaatatcaataacatgctaggtgataagaacttctrtttttcagcagcattatcattcccaattttactacatcagagagttcatcattatacagtcaactcatgattattaggagtaaggaacgtaatagcagac

SEQ ID NO: 482104 - DNA, 201 bp, Homo sapiens
tcagcctcctgagtagctactacaggtgtgcgccacagcacctggcttaaattctcttcgtattttaagtgtggtctttattgagctttctttctgtgtcyggtgcttgatacatgtggcagagaaatacatatacacacatatacacatatggacatatatgtgttttgtgtgtgtatctctcagtaattatataaataa

SEQ ID NO: 482105 - DNA, 201 bp, Homo sapiens
aagaactgttttcccttctactatagtccattttttccccatttgattctattaacagcttttaccaaattattcccatgttcagaaacctgtggtgagckcaggtatcctgtcacatcaaacctaaacccttcttttttttgagataggggtctgctctgttgcccagcctggagtgcagttgtgcaattacagctcact

SEQ ID NO: 482106 - DNA, 201 bp, Homo sapiens
tccctcctctgcaggggtggggtggtgtcttttcctgctacctgccctcttctgtgaagctgacatctcatcctttccttgcagggccaaagaggcagatyagctgaagcaggacctgcaggaagcacgcgaggcggagcgaagagccaagcagaagctcctggagattgccaccaagcccacgtacccggtgagcctggg

SEQ ID NO: 482107 - DNA, 201 bp, Homo sapiens
ccaaagaggcagatcagctgaagcaggacctgcaggaagcacgcgaggcggagcgaagagccaagcagaagctcctggagattgccaccaagcccacgtasccggtgagcctgggggccaccagctggggctgccttagtcctggtgatgttctctttcctcccggcccttcagttcatctggcggtgccttcagggtgac

SEQ ID NO: 482108 - DNA, 201 bp, Homo sapiens
tagatcgcacaccaagcagcttgtgggccacagagcacctgagccgtgtctcactgtctgcccaagccctgatgcatgataccctcttgccggcagagtgkaatacatggaaaagagcaagcatctgcaggagcagctcaatgaactcaagacagaaatcgaggccttgaaactgaaagagagggagacagctctggatat

SEQ ID NO: 482109 - DNA, 201 bp, Homo sapiens
cttgttgctcaaactggagtgcaatggtgtgatctcgcctcaccgcagcctctgcttcccgggttcaagcgattctcccacatcagcctcccaagtagctkggattgcaggcttgcgccaccatgtctggctaattttgtatttttagtagaggcagggtttctccatgttggtcaggctggtcttgaactccctacctca

SEQ ID NO: 482110 - DNA, 201 bp, Homo sapiens
atcttgacacacacacgtggatatattggtagaataaattcttataatagaactgtggggtcaaattttcgattttgatactctccaaagaagtcataccrgttcatgctctcactagtggtgcagcaactagtacgcgtttttgctgaaaatttttatgatgtgtaacatacacatagagaagtgcccaaattacaactg

SEQ ID NO: 482111 - DNA, 201 bp, Homo sapiens
atgtgtgatttgtttatatgcttggtaatatgagtctaatggaatttaaaaatataagtttgggtaggatagtatacccttaaaaaataaataaataattrgagagagagagagagagagagagacctgggcacagtggctgttgcctgtaatctcagcactttgggaggtcaaggcaggaggatcctttgaggccaggag

SEQ ID NO: 482112 - DNA, 201 bp, Homo sapiens
ctgaggcaggagaatggcgtgaatccaggaggtggagcttgcagtaagccgagatcgcactactgcactccggcctgggcgacagagggagactccatctaaaaaaaaaaaaaaaaattagctgggcatggtggcgggcacctgtaatcacagctacttgggaggctgaggcaggagaatcgcttgaacccaggggtgagc

SEQ ID NO: 482113 - DNA, 201 bp, Homo sapiens
gtaaagacagggtttctccatgttggtcatgctggtctcgaactcctgacctcaggtgatccacctgccttggcctcccaaagtgctgggattacaggcaygagccactacgcctggcctgttatctacctttttaccgctgtgctctcccatgggttttttttgtttgtttgtttgtttgtttgttttgagatggagtct

SEQ ID NO: 482114 - DNA, 201 bp, Homo sapiens
tcctgggttcaagcaattctcctgcctcaacctcctgagtagctggaattacaggtgcctgccatcatgccaggctaatttttgtatttttagtagagatggggtcttaccatgttggtcaggctggtcttgaactcctgacctcatgatctgcctggctcggcctcccaaagtgctgggattacaggcatgagccaccgt

SEQ ID NO: 482115 - DNA, 201 bp, Homo sapiens
tttgtgaatacttcaaactgtaaaatcacaactttcaggaaatgtgataaatttagtgggaaaaaaatttaatgcacgccttgcaaaggcttctttgaggrtagcacaggaggaagtgccaatatagtgtgtttgtcttttgctctgcaattctgcaggtactggatcatgatgtttcaaaggaagaaccagtcacctttc

SEQ ID NO: 482116 - DNA, 201 bp, Homo sapiens
caccttgcagagcgccaagtcccgagtggccttctttgaagagctctagcaggtgacccagccaccccaggacctgccacttctcctgctaccgggaccgmgggatggaccagatatcaagagagccatccatagggagctggctgggggtttccgtgggagctccagaactttccccagctgagtgaagagcccagcccc

SEQ ID NO: 482117 - DNA, 201 bp, Homo sapiens
aaaactctgtcccctccaccaaaaaaaaagaatgcctttttctatccgggtcaagactcaacaggtttttattgtttgttcatttgttcattcaccactasactgtttttcaagtggcacagctttcaactctgcaactggtttagaaggacggggtggggggcaataagaatgaccctggctacctaaaggaaagggaag

SEQ ID NO: 482118 - DNA, 201 bp, Homo sapiens
gcgcctgatggagcagaaggtgctggaagccgaggtgctggcactgaagatggctgaggagtcagagaggaggtgagggggcaccgggcaccagactggcraggaggctggcgaagggccgcagaccagcctgccctgaggctgagctctacagcagttgtcctcaagctgcttgcccatcttctgggccgtggggaggct

SEQ ID NO: 482119 - DNA, 201 bp, Homo sapiens
aagggtgatcactgttttgagttgagtattcatcatcctcttgcttttcaacagaattttatttcatatatggcaaaagaaaaataccattcaatgtcatrtgtttatgaaatttatctaaatgctgtcaagtatatatattcttttgtcattttccttttcctttttcattatttttttgagatatatctttgttgatgc

SEQ ID NO: 482120 - DNA, 201 bp, Homo sapiens
acctttttgtctgcttctgtggccacagattctccagctatgtatcgggaaccatgatctatttatgaggagaaggaaagccgattctttggaagttcagyagatgaaagcccaggccagggaggagaaggctagaaagcaggtgagcacaaccttgttttaactgatgatgtcactgtgtggtcagtcctggcctgggag

SEQ ID NO: 482121 - DNA, 201 bp, Homo sapiens
aaactcctgggctcaagcaatctgcctgcctccccttcccaaagtgctaggattacacttcccaaagtgctgagccaccaggtctggccaaatgttttgakttttttgtggagatggcgtctcactatgtcacccaggctggtcttgaactcctgggctcaaggatcctctcaccttggcctccgaaagtgctgggattac

SEQ ID NO: 482122 - DNA, 201 bp, Homo sapiens
ctttgtggtggtgcccatctcccaccccacctctccacactgcatggcagactcctggcaccctcactgggcactgccccacccattgccatacttcccgyccggcagaccttctcctggcactgccttggatcccagcaaaagcagcatctcttctagcctctgttcgctccctggctacagtgtttaccttttttaaca

SEQ ID NO: 482123 - DNA, 201 bp, Homo sapiens
tctgcagaaccacatcttgatgtaggagagtaaggtgcacccagaagacatggtgaagtgtcctccagtcctctcttgatttatgatttttacctcctggyatatctgaggcgccttcattttgcatgtttccagagctgacggcactagaggccactagtagggctttggtgtttcactctatgcattcatcttcacgtt

SEQ ID NO: 482124 - DNA, 201 bp, Homo sapiens
agcatatctaaaagaaacatctctagtaatttctacgcttggagaaattaagtgtgattaacaccagtttgggatgaaatagccaagagtgcatgcatctrtccgtccggctagctagcttgctttctttttttgcctgtctgcctccttgtgcagccttctccttttctaattagatggtgatagaatgccaggtggcat

SEQ ID NO: 482125 - DNA, 201 bp, Homo sapiens
ctcgagccctgtgattcaatgactgtttttcttcacccctcgcagatggagcggcagcgcctcgctcgagagaagcagatgagggaggaggctgaacgcaygagggatgagttggagaggaggctgctgcagatgaaagaagaagcaacaatggccaacgaagcactggtgatttctgaggggctggggttccaggaggct

SEQ ID NO: 482126 - DNA, 201 bp, Homo sapiens
aagggacgtatattacaccttacagtctttgtatgcagtaaacttcttttgtgaataggaggtcttttatattggggtagaggtctcagggaaagtacagkgccaggaactgaaggagattacctggcttttttttttaataaaagggtcttgttctgtcactgaggctggagtgcagtggtgccatcatagctcactgta

SEQ ID NO: 482127 - DNA, 201 bp, Homo sapiens
ggaggcaaaacttctggcccagaaggccgcagaggctgagcaggaaatgcagcgcatcaaggccacagcgattcgcacggaggaggagaagcgcctgatgkagcagaaggtgctggaagccgaggtgctggcactgaagatggctgaggagtcagagaggaggtgagggggcaccgggcaccagactggcgaggaggctgg

SEQ ID NO: 482128 - DNA, 201 bp, Homo sapiens
atctgggcgggagaacagcacatgatcccacttcagctaagagcactgtgccctccagatgcggtctgaggagacagctgacctgttggctgaaaaggccyagatcaccgaggaggaggcaaaacttctggcccagaaggccgcagaggctgagcaggaaatgcagcgcatcaaggccacagcgattcgcacggaggagga

SEQ ID NO: 482129 - DNA, 201 bp, Homo sapiens
ccagatgcggtctgaggagacagctgacctgttggctgaaaaggcccagatcaccgaggaggaggcaaaacttctggcccagaaggccgcagaggctgagyaggaaatgcagcgcatcaaggccacagcgattcgcacggaggaggagaagcgcctgatggagcagaaggtgctggaagccgaggtgctggcactgaagat

SEQ ID NO: 482130 - DNA, 201 bp, Homo sapiens
gaatgtaatcttcaactatcagtatataccatatatcataattatagttctgggaagggattggctgtacacctcagagtgaattactgccgtgcaagaaygagcagccactctcagtttggggacagagagtcagacttccattaaatggggtcacaaaatgaatagaagcctctttccttcctttcttctgtgcattca

SEQ ID NO: 482131 - DNA, 201 bp, Homo sapiens
tccctagaagctagccatctccccgagttaacttaagaggctagactctcctaaatgaggatgcttatttaccagctttcctaaattagcagctttggagmtgttaaaatccgtaaggaactgtccaagggatgtattgtgtatgctttgcagtgattaagccattaagctctaattggtattttcccactcatgggtttg

SEQ ID NO: 482132 - DNA, 201 bp, Homo sapiens
tttgtgctgggatgaaagtccaaaaaaaaaaaaaactacaccacccctgcttcaggccctactccggttccattgtccaagcccaagcccctcggtgggcmggtggggagccctttgtggtggtgcccatctcccaccccacctctccacactgcatggcagactcctggcaccctcactgggcactgccccacccattgc

SEQ ID NO: 482133 - DNA, 201 bp, Homo sapiens
cccaggagtccgagactctggtttgtcccatctcagtgttcaaggcagatctgggcgggagaacagcacatgatcccacttcagctaagagcactgtgccytccagatgcggtctgaggagacagctgacctgttggctgaaaaggcccagatcaccgaggaggaggcaaaacttctggcccagaaggccgcagaggctga

SEQ ID NO: 482134 - DNA, 201 bp, Homo sapiens
tgagatgagtttactgtttaccaagggcaaggtgggaaactaaggccaagaaactccgtgatgagtctgttctctgactatcttttgatggggatgggaarttctgcttgacctcagtgtgtttaatagactcagggccgggcagagctttgctggtgtctgctgtggcttttgtcttctggcagcgacgtggctctagag

SEQ ID NO: 482135 - DNA, 201 bp, Homo sapiens
gtcatttcttgtcagagggtcatggagggcactcagcagcagggccccaggagtccgagactctggtttgtcccatctcagtgttcaaggcagatctgggygggagaacagcacatgatcccacttcagctaagagcactgtgccctccagatgcggtctgaggagacagctgacctgttggctgaaaaggcccagatcac

SEQ ID NO: 482136 - DNA, 201 bp, Homo sapiens
ggattttgaaaagttagttaactgttcagacgacattgtttctttgacttttacaatccgcttccctctcactgacagttcagttttggaagaccctgtatttttttttttttttttttttttttttgagacagagactcgctctgtcgcccaggctggagtgcagtggcgtgatctctgctcactgcaacctccacctcc

SEQ ID NO: 482137 - DNA, 201 bp, Homo sapiens
ctctttctttctttctttctttctttctttctttctttctttctttctttctttctttctttctttctctttctctcctctttctgtctctctcttctttytctctctctctctctctctttctttctttctttctttctttttctttctttctcttttcttgctctattgccaggctggagtgcagtggtgagatctcgg

SEQ ID NO: 482138 - DNA, 201 bp, Homo sapiens
tgcatctccctacttgcttaatcatattgattttgagattaaatcagtctcataaatatgttagtcttcagcccacggtagttctcatccatctgcagactttttttttttttttttttgagatggagtctaactctgtcaccaggctggagtacagtggcgccatctcagctcatggcaatctctgcctcctgggttcaa

SEQ ID NO: 482139 - DNA, 201 bp, Homo sapiens
aagaaaattacttgctgtagttgattatggcagaaactgacagggcaagagattacagttgggattttttgcaaagaggagctttcaagtttgtgacatcttttttttttttttttttttttgagatagtcttgctctgtcaccctagctggagtgcagtggcgtgatcttggtttactgcaacctctgcctcccaagttc

SEQ ID NO: 482140 - DNA, 201 bp, Homo sapiens
ctgacagggcaagagattacagttgggattttttgcaaagaggagctttcaagtttgtgacatcttttttttttttttttttttttgagatagtcttgctytgtcaccctagctggagtgcagtggcgtgatcttggtttactgcaacctctgcctcccaagttcaagcgattctcctgcctcagcttcccaagtagctgg

SEQ ID NO: 482141 - DNA, 201 bp, Homo sapiens
agacacctgaacttcaaagtaagtcaatgtctaattcttaccccaaatgatgccccctccagttgcctacctgagcataataaataatgaaagcttcctattttttttttttttaccagtttgactcaaagcttaagtgttcgaattgtgttcacatatgtacacagtaatctaaataatcacatgggaatccctgctggt

SEQ ID NO: 482142 - DNA, 201 bp, Homo sapiens
tgaggcaggagaatcacttgaacccaggaggcggaggttgcagtgagccaaaattgagtcacttcactctagcctgggtgacagagtgagactctgtcttaaaaaaaaaaaaaaaaaaaaaaaaagaggacttcagagctctagtgacacttggtttgtcccccatatgtggtacttcagacatcgtgcttcatgctatgc

SEQ ID NO: 482143 - DNA, 201 bp, Homo sapiens
ggcaaaacttctggcccagaaggccgcagaggctgagcaggaaatgcagcgcatcaaggccacagcgattcgcacggaggaggagaagcgcctgatggagyagaaggtgctggaagccgaggtgctggcactgaagatggctgaggagtcagagaggaggtgagggggcaccgggcaccagactggcgaggaggctggcga

SEQ ID NO: 482144 - DNA, 201 bp, Homo sapiens
tgtctttgcattatctttttgagcttgtgtgtgtgtgtgtgtgtgtgtgtgtgtgtgtgtatttggcttaggatttagaaaaagcagcagtcttagaaacsttgtatgaccagagtgtgggataagattgaagcaagaagtaattaaatgtgctttaattatttaaggcagaaaatagtgcagtggtcacttctgggttct

SEQ ID NO: 482145 - DNA, 201 bp, Homo sapiens
gaggcaggagaatcacttgaacccaggaggcggaggttgcagtgagccaaaattgagtcacttcactctagcctgggtgacagagtgagactctgtcttaaaaaaaaaaaaaaaaaaaaaaaaagaggacttcagagctctagtgacacttggtttgtcccccatatgtggtacttcagacatcgtgcttcatgctatgct

SEQ ID NO: 482146 - DNA, 201 bp, Homo sapiens
cccaaagtgctagggttacaggcatgagctgctatgcctgcctggcctgactgggctttttctttctttctttcttagtttctttttttttaaaagaattrtagatatgtagtaagccaccttatggaaattgtaatatgatggaaattagagaacaaattggccaagcttttcattgacttacaaggagaaaattggaga

SEQ ID NO: 482147 - DNA, 201 bp, Homo sapiens
gtgttctccagcaactgggatctgtggtggttcccatgtctagaacaaacaaaggtgagagaagagactcaggctcgaggctaaggaaagctgacagctgktggggccactttgctgcagtgggtggcactgggcagggccccagcatggcctgatcatggcagcaattgctgagctgccctccgtcttccctttattgtg

SEQ ID NO: 482148 - DNA, 201 bp, Homo sapiens
ctacttgggagactgaggcaggggaatcacttgaacccgggaggtggaggttgcagtgagccgagattgcgccattgcactccagcctgggcaaccagagygaaactccttctcaaaagaaaagggatgttcttgcagtttttctatagcgttgctttttcccccctctctttggaaatgaaaccaagggattagaaagtt

SEQ ID NO: 482149 - DNA, 201 bp, Homo sapiens
aggctacttggggacttccttggcttttctggagcttggtctcctgaaaaccatgagttagcagcgtttgctttgaaatacttaatttcagctttgaaaawatcagtgccttttcttttcacctgtgttggcagaagcagatttaggttgagcttatgtgcagccaaactccactttcaccacgaggttgcctttatagca

SEQ ID NO: 482150 - DNA, 201 bp, Homo sapiens
ggttcccatgtctagaacaaacaaaggtgagagaagagactcaggctcgaggctaaggaaagctgacagctggtggggccactttgctgcagtgggtggcrctgggcagggccccagcatggcctgatcatggcagcaattgctgagctgccctccgtcttccctttattgtgggtagaagtggatcagagatggaaagga

SEQ ID NO: 482151 - DNA, 201 bp, Homo sapiens
aaacaatgcaatacaattctgctatttgaaagataattatgagattcaaaagaaatatgaattcatggggcttttacagttaaggtgatatgggaatgagrcatgatttaaagttaatgatgaatatcttctttcactcctgtgtctgtagttttaggccgcttcatttggagaacacaccagaagtcttaacttgaggct

SEQ ID NO: 482152 - DNA, 201 bp, Homo sapiens
ccgagattgcgccattgcactccagcctgggcaaccagagcgaaactccttctcaaaagaaaagggatgttcttgcagtttttctatagcgttgctttttcccccctctctttggaaatgaaaccaagggattagaaagttgcactgcttgagaaacatctcaggtttcattttctctctaagaatgtaaaatcactttta

SEQ ID NO: 482153 - DNA, 201 bp, Homo sapiens
tttcctgctacctgccctcttctgtgaagctgacatctcatcctttccttgcagggccaaagaggcagatcagctgaagcaggacctgcaggaagcacgckaggcggagcgaagagccaagcagaagctcctggagattgccaccaagcccacgtacccggtgagcctgggggccaccagctggggctgccttagtcctgg

SEQ ID NO: 482154 - DNA, 201 bp, Homo sapiens
agagctagcggtaagttggttaactgctgctgcttgctagaggacaaccacagtagctaccatgcattgagtgcctgtgtgtcaggggttttggcttttgyctcatttaattcctgctaacttacaaacatcaaaatgacatcaaaggtaggttttcatgttcccattttataagtgagaactcagatttagagagtttag

SEQ ID NO: 482155 - DNA, 201 bp, Homo sapiens
acctgccctcttctgtgaagctgacatctcatcctttccttgcagggccaaagaggcagatcagctgaagcaggacctgcaggaagcacgcgaggcggagygaagagccaagcagaagctcctggagattgccaccaagcccacgtacccggtgagcctgggggccaccagctggggctgccttagtcctggtgatgttct

SEQ ID NO: 482156 - DNA, 201 bp, Homo sapiens
ttagtagagatggggtttcaccatgttggtcaggctggtctcgaactcctgacctcatgatccgcccaccttggcctcccaaagtgttgggattacaggcrtgagccaccacacccagccggtgattaggtttccacatatgaattttgaagacacgaacattcagaccatagcacttcttacccttgcacatattggcag

SEQ ID NO: 482157 - DNA, 201 bp, Homo sapiens
tatctgttctcaggtgagggtggggatcttttcttccttgcgttgggtgagcttctgagtgagcttctgtcatctttagatgaagtctcagaacaagtggraatgtggatgtggcctatcaaaagagatcacgtgaagctgggcgctgtggcttatgcctataatcccagccctttgagaccaggggttcaaagccagcct

SEQ ID NO: 482158 - DNA, 201 bp, Homo sapiens
cgtgcatgagcttgcctgtctctgtcctcgggccacactgagcccttacgagggcaggtggtgcctgggtactggccgcagcatgctttgagtctaaaagyaggcacccaccctgtgaagccagaccagcctccagggccccagaagactgcctcgttccgaagagcatgtcatggggctgtaggaccagccattcttccc

SEQ ID NO: 482159 - DNA, 201 bp, Homo sapiens
aggctggtacattctcggctcactgcaacctccacctcacaggctcaagtgatcctcctgcctcagcctcccaagtagctgagactagaggtactagccamcacactcaactaatttttgtattttttatagagatggggtttcgccatgttgcccaggctggtctcgaactcctgagctcaaccaatctgcccgcctctg

SEQ ID NO: 482160 - DNA, 201 bp, Homo sapiens; identical to SEQ ID NO: 405915

SEQ ID NO: 482161 - DNA, 201 bp, Homo sapiens
tacagtgctcatagcagttgtatttgaattgtattttcagtgaaatttgttttacattgccatttaaaattggcctttaacagcttcccaactggcttatwtttttttttaatgaaaacataacccatgaggctcagatgctgttgaagaaataaatggtatgttgctgctgacagtagtgcttgcctattgtaacagcat

SEQ ID NO: 482162 - DNA, 201 bp, Homo sapiens; identical to SEQ ID NO: 406088

SEQ ID NO: 482163 - DNA, 201 bp, Homo sapiens
gggagatgaagagccaagatgctggtgaagcaggtgcagtgaggatccaaggcaaggaattgccctgagggaggtggctgcatatggagaaaggcagttckctgtgggcaaggccagcttgcttcaggctgtagagggaatttggtctgaagcaacagggcatgaactgtgactttgagctgccaggttgtcttcatctca

SEQ ID NO: 482164 - DNA, 201 bp, Homo sapiens
acagtgctcatagcagttgtatttgaattgtattttcagtgaaatttgttttacattgccatttaaaattggcctttaacagcttcccaactggcttatadttttttttaatgaaaacataacccatgaggctcagatgctgttgaagaaataaatggtatgttgctgctgacagtagtgcttgcctattgtaacagcatt

SEQ ID NO: 482165 - DNA, 201 bp, Homo sapiens
tgtgaaagccgtaagtgccacccagcaggcgtttgaaaacaagaaatcattcttctgtggaaggagaatgtgccatctcagctaccctcagtccgccaggsagcccagtctgtgtattcatatgaagttgtgaaaaccatgagtgtgtgccatggccatcgtgtctacacacagccactattgttcctgtgggctagtctc

SEQ ID NO: 482166 - DNA, 201 bp, Homo sapiens
ctgtccccagcacacaactgcactgaagccttgttcctctcggctggtgtagagctcatctgcatgttgtgtgcagataccagtagcctccctgcttgaayaggcctctcctaggctaggcaggtgttcagaggcatgaaggtctgggcaggggaagggcgtcttctgaaatgggagttaccaggtttttaaatgctgcta

SEQ ID NO: 482167 - DNA, 201 bp, Homo sapiens
tttgatgaagccattgctgaacttgatacattaagtgaagagtcatccaaagacagcacactaataatgcaattactgagagacaacttgacattgtggayatcggatacccgaggagacaaagctgaagcaggagaaggaggggaaaattaaccggccttccaacttttgtctgcctcgttctaaaatttacacagtaga

SEQ ID NO: 482168 - DNA, 201 bp, Homo sapiens
gccgacacaaggtgagaccactgctggaacatccagtaatggataaaaatgagctggttcagaaggccaaactggccgagcaggctgagtggtatgatgayatggcagcctgcatgaagtctgtaactgagcaaggagcttaattatccaatgaggagaggaatcttctctcagttgcttataaaaatgttgtaggagccc

SEQ ID NO: 482169 - DNA, 201 bp, Homo sapiens
gtgatgggaggcagggactgtcctccaccagcagggtgtgttagctctaagggtcagagagaaaccagagcaggagacagagccggggtggacttggaagwggtacgagtcatccctggggtctgggcaactccagagactgccagatgatctaatctgtgctggctcttctcctgctcgctgtagggcggtggcaccaga

SEQ ID NO: 482170 - DNA, 201 bp, Homo sapiens
gactccctctttgctggctttgatgaagtcagtgtcatgttggtgttggggggcccacatagcaaggaactgaggatggcctctggctgacagccagagasagcctgagaccctcagtctaacagactgcaaggaactgaatcctcccacagccacatgagcttggaagcatattcttccctagtggaacctcagatgaga

SEQ ID NO: 482171 - DNA, 201 bp, Homo sapiens
atggggcagaggctccgtgggtctgggcagtgccagagggcaccaggggcagcttaggaacctctgatcaggggcgggcagacagccacaggccttcctgktcagctcccagctcatccttgttcacagaaactctgtgtgttatctgagacgatgaaacgtggtgctttgtttacaggactaagcttggaattgcctgtc

SEQ ID NO: 482172 - DNA, 201 bp, Homo sapiens
ggcgggtggatcacttgaggccaggagttagagatcagcctggccaacatggtgaaaccctgtctctactaaaaatacaaaaattagccagatgtggtggygcacacctgtaatcccagctactcaggaggctgaggtgggagaattgcttgaacttgggaggtggaggttgcagtgagctgagattgcaccactgtactc

SEQ ID NO: 482173 - DNA, 201 bp, Homo sapiens
atgtggtggcgcacacctgtaatcccagctactcaggaggctgaggtgggagaattgcttgaacttgggaggtggaggttgcagtgagctgagattgcacyactgtactccagcctgggtgacagagtaagaccctgtctcaaaaaaaaaaaagaaagatcacataagaaaacaaaacacaagcacgaaagctgcagaggc

SEQ ID NO: 482174 - DNA, 201 bp, Homo sapiens
gggttggaggctctgacatttacacagggtttccattggatcagtgtagtcctgtttggttggggtggggagagtgctattagctccatttcacgggcagrtttcagatcatttgccttagaactctcagtagtctgcattgtgcctaggactcaaagtcaggtgttccttctgccttcaaagcctcatagtcttttcttg

SEQ ID NO: 482175 - DNA, 201 bp, Homo sapiens
tctgacatttacacagggtttccattggatcagtgtagtcctgtttggttggggtggggagagtgctattagctccatttcacgggcagatttcagatcayttgccttagaactctcagtagtctgcattgtgcctaggactcaaagtcaggtgttccttctgccttcaaagcctcatagtcttttcttgaccactaagtc

SEQ ID NO: 482176 - DNA, 201 bp, Homo sapiens
atggaaaagtggggaagggaactatccaaatggagccagggacatgaaagcacagacaggccaagtcccttgcttgcggtcacacagctaggcctcaaggmgggacaggcttaggcggcagcccttgttgccccaggcaatgtggactaaccctgcccgtgggaggcacgcaggctggcctctcttctcccattgtgtctc

SEQ ID NO: 482177 - DNA, 201 bp, Homo sapiens
ccctgccagccatgtgaactgggtgatctttggtctcctgaggcccgctttcctcatttataaaatggtgggaagagtggcaccctatagagaccccccgycccaatgttgcaggtagcagatgctcaatgcttggaagaggttttatgatcattaacttgatgccccccacccacagcagtgcagatgatgagaggagtt

SEQ ID NO: 482178 - DNA, 201 bp, Homo sapiens
catcagatctcatgaaatttattcactaccatggaaacagcatgggggaaaatggagctggctctgggtcttagtctggctttgggtgtcctgagagtttrgtgaacttcatgtggggagagtattggcatggccgtgagtcctgggtgtataggcttcccacagacagggctgcggggggaccatgtgggatggcctgca

SEQ ID NO: 482179 - DNA, 201 bp, Homo sapiens
caggtgcccactggaagcctttctggagttttctctgagcttggagaagggatggtgtcggggaggaaagcgagaatacagttctgcttgttctctgttcygggccttccagatcctgccttccagttctctctttaacaactatcggtcaccaaatagctattccatacaactttgtatgataatgtctacataaatgta

SEQ ID NO: 482180 - DNA, 201 bp, Homo sapiens
agtagtaaaactgaggcttgaggaaactttaggcagcttgcccagctgtataaagagtgagatgacgagctcaggcattccttgggcatctgtgtgcccarccctcaaaataatggaacaacaacaccagaaatctttccccagtagggattcattttcaattccttctttatgtgggttactgactgcctcagtaccttt

SEQ ID NO: 482181 - DNA, 201 bp, Homo sapiens
gtgtcagtttccctattggtatgaagagggagttggcctcattgaaagttaagcacccacccagagctgccctgtgtggtgcctcagttgtaggaggcaarccagggctctgtgccctgccagccatgtgaactgggtgatctttggtctcctgaggcccgctttcctcatttataaaatggtgggaagagtggcacccta

SEQ ID NO: 482182 - DNA, 201 bp, Homo sapiens
agagtgagatgacgagctcaggcattccttgggcatctgtgtgcccagccctcaaaataatggaacaacaacaccagaaatctttccccagtagggattcwttttcaattccttctttatgtgggttactgactgcctcagtaccttttattgaataggctcatctttcctcccggtgacctgcagtggtacttctgttat

SEQ ID NO: 482183 - DNA, 201 bp, Homo sapiens
tggctccttcctctctcctcactccaggccctctccagtgctcccagggcctgacaaacctcttccacctggctcggatccctgtcacctgaggaaccagrtgcccactggaagcctttctggagttttctctgagcttggagaagggatggtgtcggggaggaaagcgagaatacagttctgcttgttctctgttccggg

SEQ ID NO: 482184 - DNA, 201 bp, Homo sapiens
aggagcacgcccacgaaccagaagggcagcatcattcctaacaacattcgccacaagtttgggagcaatgtggtggaccagctggtctccgaggagcaggygtcatagcaggggccaggagggtgatgcagagtcttataatgaggacataagataaactcactcttgagtacagagtccctataataataccactagaaa

SEQ ID NO: 482185 - DNA, 201 bp, Homo sapiens
aacctcttccacctggctcggatccctgtcacctgaggaaccaggtgcccactggaagcctttctggagttttctctgagcttggagaagggatggtgtcrgggaggaaagcgagaatacagttctgcttgttctctgttccgggccttccagatcctgccttccagttctctctttaacaactatcggtcaccaaatagc

SEQ ID NO: 482186 - DNA, 201 bp, Homo sapiens
aagccttttgtgtgaattggatgttttccatgtgatcaagtctcccaaagaagacagcatttagtggatggatagcatttattgggaatcagaagacgtgsgtttgaatcctggacctgatcctaaatgctggatgactttggataagttacttaccctctctgggcttcagtctccacatctgtaaagcgaggcagttgc

SEQ ID NO: 482187 - DNA, 201 bp, Homo sapiens
ggcagaggctgcagaagtccaggaggcagcccctgtgccaggggtgatgagtgaatggggcagaggctccgtgggtctgggcagtgccagagggcaccagrggcagcttaggaacctctgatcaggggcgggcagacagccacaggccttcctgttcagctcccagctcatccttgttcacagaaactctgtgtgttatct

SEQ ID NO: 482188 - DNA, 201 bp, Homo sapiens
ttaaaccctgccagtcagaggctagagtttaaattcctaaacactaggcttttcttacctttatatcagcatctggctgacctctctaggacaatggtgtmtataagcaggaaaaacaggcatccttatctccttcttgattctaacattacatcattaaatataatatagtctgttttcatactgctgataaaaacatac

SEQ ID NO: 482189 - DNA, 201 bp, Homo sapiens
ataaggagaccgaggcttagaggagttaagtcagtcaaccaaattcacctaactgtgcgagacgagggtgcaaactgggtcggcagattctggaactctgrtccttaatgactttgcagttaaaagccttttgtgtgaattggatgttttccatgtgatcaagtctcccaaagaagacagcatttagtggatggatagcat

SEQ ID NO: 482190 - DNA, 201 bp, Homo sapiens
cttgtcttttttatttttattttttgttcaatggtatcttttcattttgtactgtctctatcccttttacccgaagttgccaacattttgctgatgttatyttctcaacagtaaaacttacaggggttcactccattgaacaaaagtcacacccctttttaactgaggctcctgttgaggagccttaagcttcctagaggt

SEQ ID NO: 482191 - DNA, 201 bp, Homo sapiens
aacatccctcatttttgccacattccattcatcactatgtccagtccacaccaaaggggagggaattataccaagaaacagggatcattgggagccatgtmaactgcctgccactctctgccctctggcccccaataatgtacatcccttccacatgcaaaatatagtcatcccctcctaagatctttaaaattctcatcc

SEQ ID NO: 482192 - DNA, 201 bp, Homo sapiens
tttcggagcctcattttctccatctgtgaaagaagataaattagtagtgtctccgaacaccttactgggtatttgtgaagaccagactaatttaccagatrtgagaatgcttgacatggacttgtgttagttatctcttgctgcacaacaaatcaccccaaaacttagtgggcttaagacaacatttactatctcacagtt

SEQ ID NO: 482193 - DNA, 201 bp, Homo sapiens
attccttctttatgtgggttactgactgcctcagtaccttttattgaataggctcatctttcctcccggtgacctgcagtggtacttctgttatccatcargttttgacacatgcatagatcagtttcaggctctattctgtccattggtctaatattacatttttaatcaccaaagtattataagtagcctgatatctgg

SEQ ID NO: 482194 - DNA, 201 bp, Homo sapiens
catctttctccttccccattgacctcgacctacatttatgctgttatacacatccatgcctttaatattctcatcccttcaaaactgttaagttcctaggyatccttcaagatccaactcaaatggctctttcataagtccttcctcctttttcctacacagagctagttcttctccctacttagtgctttgagctcccaa

SEQ ID NO: 482195 - DNA, 201 bp, Homo sapiens
aaaatatgtattagctatgtattgctgcgtaacaaatgaccataaagcttagaagtttgacactgtatgtttaaaacagtacaaatttatgatctcagaayttataggagtcaggatgctcacttggctgggtcctctggcccagggtatcccacaggctgtaatgaaagtgtcatccaggctgtgttctcatatcaaggc

SEQ ID NO: 482196 - DNA, 201 bp, Homo sapiens
atctgctctttctggatggtttcttactctttgcttatatttttattctctcttatggtttcaatcattaaatataggttttttgtttgtttgtttgtttkagacagagtctctctctgttgcccaggctggactgcagtggcacgatctcggctcactgcaacctccgcctcccgggttcaagcaattctcctacctcag

SEQ ID NO: 482197 - DNA, 201 bp, Homo sapiens
cctgtggaaatctcctccgtcttctcagactactatgacctcggctacaacatgcggtcaaacttgtttcgaggtcaagtcaaagggcaagggtggggccrtgaacacccatggtctcccaggcattgggcagggaaggcctttggggtttccactccatatggggtctaggaccccagggcacatcttcaaggacactta

SEQ ID NO: 482198 - DNA, 201 bp, Homo sapiens
gtggacctctccatagggcatctcacaacagggaaactggcttctgtcagagaagatgagctgaggagagctgcagagagtgtgtgaaaaagacagaagtygtagtctcttataagttcatcatggatgcaacatccctcatttttgccacattccattcatcactatgtccagtccacaccaaaggggagggaattatac

SEQ ID NO: 482199 - DNA, 201 bp, Homo sapiens
agctacccccctgcccccataagtagctgggaccacagatgcgcgccaccatacctggctaatttttttcttttctgttttttttttttttgtatttttgstagaggcaaggtttcaccatattgcccaggctggtctcaaactcctgggctcaagtgattcacccaccttggcctctcaaagtgctgggattacaggcat

SEQ ID NO: 482200 - DNA, 201 bp, Homo sapiens
tagggaatcctcatacatggccacatttagataaactctgcggaggtttatcatccaggggatatgatggtttagcttgggctcagaggcctgacggccamgatgcccagcccttatgtatcttttaagaggacttgaagttttggagggaagaccaccaaacatatttacagctgtaatctggggtggaggatgaggcca

SEQ ID NO: 482201 - DNA, 201 bp, Homo sapiens
atggttgccaggatgggagccggggcaatgggcttcacagccaggggcctgctagggtctcctagggtggtggtgatggggcagaagaggaggaggagatraaaggaaaaattatgaaggagtaaaatgagcccagggttccaaggctgcttgagataggtctttgaggactggtggggtggggtgggggtggccagggct

SEQ ID NO: 482202 - DNA, 201 bp, Homo sapiens
ttgctccatgggctgctccacagggcagctcaaaacacggcatttgctgtcatcagaatgagcaaaccaaggagaaccagggaaagagagcaaacaaaacygaagtcacaggccgggcacggtggctcacacctgtaatcccagcactttgggaggctgaggcgggtggatcacttgaggccaggagttagagatcagcct

SEQ ID NO: 482203 - DNA, 201 bp, Homo sapiens
ggcagaaacagggaaactggtaggaggcagctgcaaaactccagatgggacagatgatggtggcttggtgttggaagctgggctagtgcacctgcgctatkttggaaggcaccattgtgcaatatagcagctcagggaggtaatggtgaaggtggcctgatgtagtaggattctggatatttgtataaggcagagagaaaa

SEQ ID NO: 482204 - DNA, 201 bp, Homo sapiens
gggaggtttcaagatggaaaagtggggaagggaactatccaaatggagccagggacatgaaagcacagacaggccaagtcccttgcttgcggtcacacagmtaggcctcaaggcgggacaggcttaggcggcagcccttgttgccccaggcaatgtggactaaccctgcccgtgggaggcacgcaggctggcctctcttct

SEQ ID NO: 482205 - DNA, 201 bp, Homo sapiens
gacagaagttgtagtctcttataagttcatcatggatgcaacatccctcatttttgccacattccattcatcactatgtccagtccacaccaaaggggagrgaattataccaagaaacagggatcattgggagccatgtaaactgcctgccactctctgccctctggcccccaataatgtacatcccttccacatgcaaaa

SEQ ID NO: 482206 - DNA, 201 bp, Homo sapiens
gtatttaacatatgccaggtactgctctgagtactttatatatatattttattctgcacatgaatcccatgtggtaaatgctacaattcccatttttttttccagataaaaaataattgagtcatggaaaagttaaataacttaattaaggccacacagatagggacggtcagaattgggatttaaaccctgccagtcaga

SEQ ID NO: 482207 - DNA, 201 bp, Homo sapiens
tccagaagctttatgcagctcaccaattaattccagtaattagttattgattctttaggagtgcttttgaatagtaataatggctacatttatgcatagtatttaacatatgccaggtactgctctgagtactttatatatatattttattctgcacatgaatcccatgtggtaaatgctacaattcccatttttttttcc

SEQ ID NO: 482208 - DNA, 201 bp, Homo sapiens
gctttataatgaattttctaatatatgaatatggtatatacctccattaatttaagtcttccttcgatatctctcagtaacattttgtgatttttttttttctataaacatcatgcaggtttttttgttagacttactcaggagaatctctttttttgctgctgttgaaaatgatatctttttaaaattatattttctaac

SEQ ID NO: 482209 - DNA, 201 bp, Homo sapiens
gtgagatgagaaaccaagccgggattttaagcaggagaatggccctgtttggctcaggttaagggctcactccagttgctatggggagaatggacataggkagatggggcagaaacagggaaactggtaggaggcagctgcaaaactccagatgggacagatgatggtggcttggtgttggaagctgggctagtgcacctg

SEQ ID NO: 482210 - DNA, 201 bp, Homo sapiens
ctcccacctcagctacccccctgcccccataagtagctgggaccacagatgcgcgccaccatacctggctaatttttttcttttctgttttttttttttttgtatttttggtagaggcaaggtttcaccatattgcccaggctggtctcaaactcctgggctcaagtgattcacccaccttggcctctcaaagtgctggga

SEQ ID NO: 482211 - DNA, 201 bp, Homo sapiens
ccaacaggacttggacccctggaaagcggcctacagttccttggacacctccaagttcaagaaccagggtctgtcatccccacagcccctgcccctgggakccagcgctcaaggcagctccctagggcagtgccacttgaaggagattccccctccacccccgactgctgccagcagggattctctgggcatggacccaca

SEQ ID NO: 482212 - DNA, 201 bp, Homo sapiens
cttggttctccttcgtggtggctaagctgcttcccttccctgagcacgaacgaccattcagcaaatggatacaatcctatttgcaggaagacaaatggttkccaggatgggagccggggcaatgggcttcacagccaggggcctgctagggtctcctagggtggtggtgatggggcagaagaggaggaggagatgaaagga

SEQ ID NO: 482213 - DNA, 201 bp, Homo sapiens
ggacttggacccctggaaagcggcctacagttccttggacacctccaagttcaagaaccagggtctgtcatccccacagcccctgcccctgggagccagcrctcaaggcagctccctagggcagtgccacttgaaggagattccccctccacccccgactgctgccagcagggattctctgggcatggacccacagtccag

SEQ ID NO: 482214 - DNA, 201 bp, Homo sapiens
aattgcttgaacttgggaggtggaggttgcagtgagctgagattgcaccactgtactccagcctgggtgacagagtaagaccctgtctcaaaaaaaaaaaagaaagatcacataagaaaacaaaacacaagcacgaaagctgcagaggcttttgaatctacccctctaatttgaatccaaggccttagagagaagactgag

SEQ ID NO: 482215 - DNA, 201 bp, Homo sapiens
gaaagagagcaaacaaaaccgaagtcacaggccgggcacggtggctcacacctgtaatcccagcactttgggaggctgaggcgggtggatcacttgaggcyaggagttagagatcagcctggccaacatggtgaaaccctgtctctactaaaaatacaaaaattagccagatgtggtggcgcacacctgtaatcccagcta

SEQ ID NO: 482216 - DNA, 201 bp, Homo sapiens
cttccaactccagatttctgcttaaaaaaaaaaaaaaactgtttaaggtgatttaggctttttctatcatgcttctcaaaatccttatagactctgaccaycgcttggttccaagttcagtcccaaatttttaagtatttgttatagcaacaccccactgttagtaccaaaatatgtattagctatgtattgctgcgtaac

SEQ ID NO: 482217 - DNA, 201 bp, Homo sapiens
gctgtaatgaaagtgtcatccaggctgtgttctcatatcaaggctcaactggggaaggatccactttcaagctcattcaggtgtcaggattcattcagttmttcaaagactgttggactcagggcttctattctttatgagcttttggccagaagtcaccctcagtttcttgctccatgggctgctccacagggcagctca

SEQ ID NO: 482218 - DNA, 201 bp, Homo sapiens
tttctgcttaaaaaaaaaaaaaaactgtttaaggtgatttaggctttttctatcatgcttctcaaaatccttatagactctgaccaccgcttggttccaarttcagtcccaaatttttaagtatttgttatagcaacaccccactgttagtaccaaaatatgtattagctatgtattgctgcgtaacaaatgaccataaag

SEQ ID NO: 482219 - DNA, 201 bp, Homo sapiens
tctttcttccactatttctagtaatatattcctcacttccatttgggccctcactcactgcatcttccaactccagatttctgcttaaaaaaaaaaaaaaactgtttaaggtgatttaggctttttctatcatgcttctcaaaatccttatagactctgaccaccgcttggttccaagttcagtcccaaatttttaagtat

SEQ ID NO: 482220 - DNA, 201 bp, Homo sapiens; identical to SEQ ID NO: 404980

SEQ ID NO: 482221 - DNA, 201 bp, Homo sapiens; identical to SEQ ID NO: 404982

SEQ ID NO: 482222 - DNA, 201 bp, Homo sapiens
cccaaaaaacagcagagcctggcatggcagggacccagggagcacttgggaaagtgagaggagcagaggtcagagaaaaatggtggacaggttgggtaggrccttgcagataaatgggaggatgtcagcttttactgtggttgagctggaaggttttgtttagaggggtgacatatgatctaatataggtcttaacaggat

SEQ ID NO: 482223 - DNA, 201 bp, Homo sapiens
tatacacagtatgtcagatggcaataaggtgcaatggtagaaaaggttggaaaagaggagtagggagtgtggggtgggctgggatgctttttaagaaaagrtggtctgggaaggtgagcagagtcttgaaggaggtgaagaggcaagccatgtaggcatgtgggggaaggaagttgcaggagaggagagggaacagcccgt

SEQ ID NO: 482224 - DNA, 201 bp, Homo sapiens
ccagctcacatgtggctcagatcctactgtgggaagaagaagcaaatatacacagtatgtcagatggcaataaggtgcaatggtagaaaaggttggaaaakaggagtagggagtgtggggtgggctgggatgctttttaagaaaagatggtctgggaaggtgagcagagtcttgaaggaggtgaagaggcaagccatgtag

SEQ ID NO: 482225 - DNA, 201 bp, Homo sapiens
caccctcagtttcttgctccatgggctgctccacagggcagctcaaaacacggcatttgctgtcatcagaatgagcaaaccaaggagaaccagggaaagaragcaaacaaaaccgaagtcacaggccgggcacggtggctcacacctgtaatcccagcactttgggaggctgaggcgggtggatcacttgaggccaggagt

SEQ ID NO: 482226 - DNA, 201 bp, Homo sapiens
gcttgggggctcaggaccagaggagcacgcccacgaaccagaagggcagcatcattcctaacaacattcgccacaagtttgggagcaatgtggtggaccarctggtctccgaggagcaggtgtcatagcaggggccaggagggtgatgcagagtcttataatgaggacataagataaactcactcttgagtacagagtccc

SEQ ID NO: 482227 - DNA, 201 bp, Homo sapiens
gaagacactgaagctcagagaggttaaaaatttctctgaggctatactacccataaataatggagtctgggtttgaacccaaacgactttactttgaaacmcttcccactctccttccgttccacaatttaccatccgtagaggaaactgacacccaatataagccatggagtacccgactgccactgaattgggcacttg

SEQ ID NO: 482228 - DNA, 201 bp, Homo sapiens
agactgttggactcagggcttctattctttatgagcttttggccagaagtcaccctcagtttcttgctccatgggctgctccacagggcagctcaaaacayggcatttgctgtcatcagaatgagcaaaccaaggagaaccagggaaagagagcaaacaaaaccgaagtcacaggccgggcacggtggctcacacctgtaa

SEQ ID NO: 482229 - DNA, 201 bp, Homo sapiens
tgaaggcttcttacacaccagaggtcattgagaaatcagtgagggacttagaacactggcatggcaggaagacggatgatctgggtaagtgaggagctgckggtgatgggaggcagggactgtcctccaccagcagggtgtgttagctctaagggtcagagagaaaccagagcaggagacagagccggggtggacttggaa

SEQ ID NO: 482230 - DNA, 201 bp, Homo sapiens
aggagtcaggatgctcacttggctgggtcctctggcccagggtatcccacaggctgtaatgaaagtgtcatccaggctgtgttctcatatcaaggctcaaytggggaaggatccactttcaagctcattcaggtgtcaggattcattcagttcttcaaagactgttggactcagggcttctattctttatgagcttttggc

SEQ ID NO: 482231 - DNA, 201 bp, Homo sapiens
gacttagaacactggcatggcaggaagacggatgatctgggtaagtgaggagctgctggtgatgggaggcagggactgtcctccaccagcagggtgtgttrgctctaagggtcagagagaaaccagagcaggagacagagccggggtggacttggaagaggtacgagtcatccctggggtctgggcaactccagagactgc

SEQ ID NO: 482232 - DNA, 201 bp, Homo sapiens
cctctgatcaggggcgggcagacagccacaggccttcctgttcagctcccagctcatccttgttcacagaaactctgtgtgttatctgagacgatgaaacrtggtgctttgtttacaggactaagcttggaattgcctgtcccacagcaagaggctatggagctgggccacggagcaggtaggacaggcagaccagggatg

SEQ ID NO: 482233 - DNA, 201 bp, Homo sapiens
gcagatgacagtgtcactgtttctgccactacataacaagggtctttcttccactatttctagtaatatattcctcacttccatttgggccctcactcacwgcatcttccaactccagatttctgcttaaaaaaaaaaaaaaactgtttaaggtgatttaggctttttctatcatgcttctcaaaatccttatagactctg

SEQ ID NO: 482234 - DNA, 201 bp, Homo sapiens
taagtactggcatctttttgtttaacagtcccttcttcaattcatcaccttcctctcacatttcactacaagcagcaagaagaaagtaagaggcaactacmatcttttctttggaactctttagctaaatcattcagttcattagtcacataactgcagatgacagtgtcactgtttctgccactacataacaagggtctt

SEQ ID NO: 482235 - DNA, 201 bp, Homo sapiens
atgatctaatctgtgctggctcttctcctgctcgctgtagggcggtggcaccagaaaaatgctatgaacctgaacttgcagaaagcactggaagagaaatrtggagaaaacagcaaatccaagagctccaagtactagttttgacacagtagaggtgtcttctactcaaataaagtgctaacaataaggaaaggctcaggt

SEQ ID NO: 482236 - DNA, 201 bp, Homo sapiens
gtaatggtgaaggtggcctgatgtagtaggattctggatatttgtataaggcagagagaaaagaatatgctaatgaatagattttggggtgagagaggaaytaacgttgacttcaacgttttgacctgaacaactggaaggatgagatggctatttactgaattagagaagctgccagggggagcaggttgagggactcct

SEQ ID NO: 482237 - DNA, 201 bp, Homo sapiens
agatgagggtggcttggaccagggagtagggggagttgtggaggtggacgaaggcatccaaatctagtgtacttcgaaggacttgctgatgggttgcttgyggaagtagcttagagttttgtgatgtctctctctgtgcaaggcaatgtgctacattttgcaaaaaattgttttattcgcccatcacccttatccttagtg

SEQ ID NO: 482238 - DNA, 201 bp, Homo sapiens
ttgtttttgtttttcatcgtgccgttgccctacagtctatttcacctgatatagttagaccagactgcttttggttagtgtttgcctgggtatatcttttkctgttcttccatgtttatcctctctttgtgtccttttaaatatgccttcaatgatacatacctggaaaacattttctgtagtgtcatcatctggttttta

SEQ ID NO: 482239 - DNA, 201 bp, Homo sapiens
tccaaggccttagagagaagactgagtttacaccagagcaaagtgtgggttcctgctcttggttctccttcgtggtggctaagctgcttcccttccctgascacgaacgaccattcagcaaatggatacaatcctatttgcaggaagacaaatggttgccaggatgggagccggggcaatgggcttcacagccaggggcct

SEQ ID NO: 482240 - DNA, 201 bp, Homo sapiens
tgagcggagatcgcgccactgcactccagcctggtgacagagcaagactccctctcaaaataatgataataataataataataacaatctcttgggtaagrgattctgcatttgtctatagaacaggcttgttaataatttctgcacaaatcttctaatccttattaatatgctttgcttgatctattagttactaaaata

SEQ ID NO: 482241 - DNA, 201 bp, Homo sapiens
tttgggtgtcctgagagtttggtgaacttcatgtggggagagtattggcatggccgtgagtcctgggtgtataggcttcccacagacagggctgcgggggraccatgtgggatggcctgcaggaatatggccacggtgagtggccctttgtgtattttctgcctcccaactcaccgtggctccagcttcagaaggaggtca

SEQ ID NO: 482242 - DNA, 201 bp, Homo sapiens
tgagggctgcaggctacaggtgggatcggggtggggagggcagggtcaagggaggaggagttggagggagatatggggcttgaaactgcttttccatcccytgtctgtcatccctgcctccctgctcaggctcaaaaggctattgatgaagtcttcgagggccagaaaagggcaagctcatggcccagcaggacccagaat

SEQ ID NO: 482243 - DNA, 201 bp, Homo sapiens
tttgaatctcaatacggctgttgtggaggtttccttggatcgccccggtgtcaggtcgccaaggtaggacttgtcacccaaagtgctgcctgtttcagaarccaagttgtagcctccaacacaggccttggtgatggataagcttttgaaaaaattaactaattttcagttgatgacattttatgagcctaattgtactta

SEQ ID NO: 482244 - DNA, 201 bp, Homo sapiens
ccttgacgacacagtgctgcattggttgttcacaaattttcagatgaagccattaaagctgagaagagttagtgaattggttaagttcacgcacctagagygatggagccaggaactgtcctgagtgtcttattatcggtcaaatttctaaaatatacaaatagtggtaattctactcatcaaattgctgaaattatgtga

SEQ ID NO: 482245 - DNA, 201 bp, Homo sapiens
acaaattttcagatgaagccattaaagctgagaagagttagtgaattggttaagttcacgcacctagagtgatggagccaggaactgtcctgagtgtcttwttatcggtcaaatttctaaaatatacaaatagtggtaattctactcatcaaattgctgaaattatgtgagtgaaaaataatcagcataaaagctttaatg

SEQ ID NO: 482246 - DNA, 201 bp, Homo sapiens
atatacaaatagtggtaattctactcatcaaattgctgaaattatgtgagtgaaaaataatcagcataaaagctttaatgcttttggcaaaatcatttctrgagacaataaaatctttatagggacttatgttcctttacataagaatcagtgctaaaaagtggggaaaacagaatttggaattacaagacctggaaagtt

SEQ ID NO: 482247 - DNA, 201 bp, Homo sapiens
agaattgcttgaacctgggacacaggttgcagtgagctgagatcgcgccactgcactccagcctggtgacagagcaagattctgtctcaaaaaaaaaaagsgggggggggagtgggggaaggaacacaaaaatggtaagcttactgtaataatagtaataagccctgtaattgataccttaaggggaaagtaaccctggta

SEQ ID NO: 482248 - DNA, 201 bp, Homo sapiens
tggtctatatatctgttttggtaccagtaccatgctgttttgttactgtagccttgtagtatagtttgaagtcaggtagcgtgatgcctccacctttgttytccttgcccaggattgtcttggctatgcaggctctttttttggttccatatgaacgttaaagtagttttttccaattctgtgaagaaagtcagtggtagc

SEQ ID NO: 482249 - DNA, 201 bp, Homo sapiens
tcttaatcctgaattctaacttgattgcactgtggtctgagagactgttatgatttgcattcttttactttcaattatgtggtagattttagaataagtgygatgaggtgctgagaataatgtatattctgttgatatggtgtggagagttctatagatgtctattaggtgcacttggtccagagccgagatgaagtcctg

SEQ ID NO: 482250 - DNA, 201 bp, Homo sapiens
gttattctagttagcaattcgtctaaccttttttcaaggttcttagctttcttgcgttgggttagaacatgctcctttagctcagaggagttttttattamccacagttttgttcccttgctggtgaggagttgtgatcctttggaggagaagaggcattctggtttttggaattttcagcctttttgcgctggtttctcc

SEQ ID NO: 482251 - DNA, 201 bp, Homo sapiens
ctggaaagttctactagctgtgaccttctgagcaagtctcttagatgctctaagctgtaaattatggagtcagtaacaaccccatagtgactatgaaaatyagatatgctaaaatataggaaagtgctttgtacatgtcaaacatatgaatagtcatctttaataaaacataagataagtttttattccccattgtatatt

SEQ ID NO: 482252 - DNA, 201 bp, Homo sapiens
gacttctcccttgggattatcttcactattagcttttctcgttttgttttattttttcacatcccctcaatggaaggcaatacacttagcaggtaagaatrtggactctgaagggggaagtcaggcttcctaaaggctgttttctcagtgaagtgttattcaaggtctggatgctagataagtcatttaacccctcctacc

SEQ ID NO: 482253 - DNA, 201 bp, Homo sapiens
ttcccacaggatcaagcatgcaaaggcaagtctccacattggttcatttaccttttctctcccatctcatctggaataatcctacttcatgttttgtttcrgcacctaagaagctctgttgtcgatgtggaaaaatatatggtgtgactccctcaggttgacacagcagggtagaagaatgtaactaccaatttggcggag

SEQ ID NO: 482254 - DNA, 201 bp, Homo sapiens
tttgttcactcaataatggatggagattgtagttttctttgcagtaatgattctgtctcttttttggtctcagggttatattgacctcatagaataaattrgaaagtgttccctcctcttttattttttggtttataagacagccttagctttcacttcctgcttgtgcagggcctcaaggttggccactggtgaatgaat

SEQ ID NO: 482255 - DNA, 201 bp, Homo sapiens
agctagctgtgatattgccaggatattgctattgtttcagttgcaccctggagatagggttttttccctccatactctgaactctgagtcaaatcaaatayccacaacaccctaggaatagagatttttcagggaactggttttttgtttgaatattgatagtgctctagcaataatgcttttagtatggttctaaaaaag

SEQ ID NO: 482256 - DNA, 201 bp, Homo sapiens
gtatactaataataaaaaaaaataagtgccaagggataagattttattaggtaaggttgaattttgaagaaccatataccatcatagtatttaagattttyttcatccctcaagagtcaattttgctcccttgtgggcagtatcagttccatcaagaatgtatggcatgaattcaaataatatagaaaaacataaagagta

SEQ ID NO: 482257 - DNA, 201 bp, Homo sapiens
gaatatgataattttatatatacagtatgtctagctattttcactgaataaggtatcagaggccttgtcagttaatctagaatctgttaacatctggatcwatatcatgctttttataatggctacgatattctattatgtagaatctatacgatagatattcttttctatagaacttatactaaagatacaaaagttagc

SEQ ID NO: 482258 - DNA, 201 bp, Homo sapiens
gtatcagaggccttgtcagttaatctagaatctgttaacatctggatctatatcatgctttttataatggctacgatattctattatgtagaatctatackatagatattcttttctatagaacttatactaaagatacaaaagttagccgggcgtagtggtggcccaaacacatttggatatttggagtgcttacatttt

SEQ ID NO: 482259 - DNA, 201 bp, Homo sapiens
ttttctctgacttttgtagatgattatttcacatagaaaaaaatatttttctatatattctgtgataaatttaagtgtaacctctaacattttctcctacmtgatgatatgtatcctagcacaaattcctgtgcgcagaagcaagggtctgcgtgtttgaaactggtaaatattgctaactgcatccaaagagtttgccca

SEQ ID NO: 482260 - DNA, 201 bp, Homo sapiens
gcctcaagtggtccacccacctcggcctcccaaagtgctaggattacagacgtgagccaccatgcccggactatttttttttttcttcttaaaaaacaaayacaaaatggaaaataagttgcttttcattggtggcacagttttcccccattcattaagttacataaatattttgccatattcattatattgcaaatgaca

SEQ ID NO: 482261 - DNA, 201 bp, Homo sapiens
gtgtaacctctaacattttctcctacatgatgatatgtatcctagcacaaattcctgtgcgcagaagcaagggtctgcgtgtttgaaactggtaaatattrctaactgcatccaaagagtttgcccatttatattccccttcgataaagtagaagtatatgtgtttttctcacaccttgccaaagcttatcatttagcctc

SEQ ID NO: 482262 - DNA, 201 bp, Homo sapiens
gatccgctgctctcttcagggctgtcaggcagggacatttaaatcggctgaagctgcgcccacagccactccttacactaggtgctctgtcccagggagaygggggttttatctataagtcctaactggggctgctgcctttttttcagagatgatctgctgagagaggaggaatctagagaggcagtctggccgcagcgg

SEQ ID NO: 482263 - DNA, 201 bp, Homo sapiens
tttgtagagatggggttataccacattgcccaggcttggtctcgtgtgcctgagctcaagcagtcctcccacgtagacctcccaaagtgttgggattacgrgcataagccaccactactggcctgaagttagtcttttttaaaaaaatttattactggcagagttaaagcggttctttttttttctttctctctcttctgc

SEQ ID NO: 482264 - DNA, 201 bp, Homo sapiens
acatcttaaaaactacttgctaactgaggaacagctacacaaaaataactaccctagaccataccccaacaaaccaggaagtattcttttaaacctaggcrtgaaaaaaacttggaaatgatggtaagtagatggggcccacaattaccctttctacatgctaagactgaaacctagggggcccagtgttctgataaatat

SEQ ID NO: 482265 - DNA, 201 bp, Homo sapiens
gttatccctcccctagctccccacccaccaacaggccctgatgtgtgtttttcccctccctgtgtccatgtgttctcattgttcatatcccacttatgagkgagaacatgcggcgtttggttttctgttcttgtgatagtttcctgagaatgatggtttccagctttatccatgtccctgcaaaggacatgaactcatcat

SEQ ID NO: 482266 - DNA, 201 bp, Homo sapiens
ttataccacattgcccaggcttggtctcgtgtgcctgagctcaagcagtcctcccacgtagacctcccaaagtgttgggattacgggcataagccaccackactggcctgaagttagtcttttttaaaaaaatttattactggcagagttaaagcggttctttttttttctttctctctcttctgcatccctcctcccact

SEQ ID NO: 482267 - DNA, 201 bp, Homo sapiens
cttcagccccctttccaggggagtgaatggttctgtctcgctggcattccaggtgccactggggtatggaaaaaaaaaaaaaaaaaaaaaaactcctgcakctagcttggtgtccgcccagccacccagttttgtgcttgaaacccagggccctggtagggtaggcaccagagggaatctccgggtctgccggttgcaaag

SEQ ID NO: 482268 - DNA, 201 bp, Homo sapiens
aacttgattgcactgtggtctgagagactgttatgatttgcattcttttactttcaattatgtggtagattttagaataagtgcgatgaggtgctgagaakaatgtatattctgttgatatggtgtggagagttctatagatgtctattaggtgcacttggtccagagccgagatgaagtcctgaatatccttgttaattt

SEQ ID NO: 482269 - DNA, 201 bp, Homo sapiens
atgaccagtgatgatgagcattttttcatatgtctgttggctgcataaatgtcctcttttgagaagtgtctgttcatatcctttgcccattttttggtggttttttttttcttgtaaatttgttgaagtccttgtagattctggatattagccctttgtcagatggatagattgcaaaaattttctcccattctgcaggtt

SEQ ID NO: 482270 - DNA, 201 bp, Homo sapiens
gccactggggtatggaaaaaaaaaaaaaaaaaaaaaaactcctgcagctagcttggtgtccgcccagccacccagttttgtgcttgaaacccagggccctkgtagggtaggcaccagagggaatctccgggtctgccggttgcaaagactatgggaaaagcacagtatctcggctggagtgcaccgttcctccaggtgcag

SEQ ID NO: 482271 - DNA, 201 bp, Homo sapiens
cccgccaagccagaccacttggctccctggcttcagccccctttccaggggagtgaatggttctgtctcgctggcattccaggtgccactggggtatggaaaaaaaaaaaaaaaaaaaaaaactcctgcagctagcttggtgtccgcccagccacccagttttgtgcttgaaacccagggccctggtagggtaggcaccag

SEQ ID NO: 482272 - DNA, 201 bp, Homo sapiens
aacattgcatttcctcattccttggaatcgttctgtttcttccacccagaagactcatggattttcatacttttctctatttccaccatcaacttcttttmgagtcatcttatggaaacttcccttgtcccccaagctgagttttgtctgttccaacccctgtttcacctttccccactactctgaaaatccctgagagta

SEQ ID NO: 482273 - DNA, 201 bp, Homo sapiens
ccgccaagccagaccacttggctccctggcttcagccccctttccaggggagtgaatggttctgtctcgctggcattccaggtgccactggggtatggaaaaaaaaaaaaaaaaaaaaaaactcctgcagctagcttggtgtccgcccagccacccagttttgtgcttgaaacccagggccctggtagggtaggcaccaga

SEQ ID NO: 482274 - DNA, 201 bp, Homo sapiens
cgccaagccagaccacttggctccctggcttcagccccctttccaggggagtgaatggttctgtctcgctggcattccaggtgccactggggtatggaaaaaaaaaaaaaaaaaaaaaaactcctgcagctagcttggtgtccgcccagccacccagttttgtgcttgaaacccagggccctggtagggtaggcaccagag

SEQ ID NO: 482275 - DNA, 201 bp, Homo sapiens
gccaagccagaccacttggctccctggcttcagccccctttccaggggagtgaatggttctgtctcgctggcattccaggtgccactggggtatggaaaaaaaaaaaaaaaaaaaaaaactcctgcagctagcttggtgtccgcccagccacccagttttgtgcttgaaacccagggccctggtagggtaggcaccagagg

SEQ ID NO: 482276 - DNA, 201 bp, Homo sapiens
acagatggttgtagatgtgtggtgttattcctgagacctctgtcctgttccattggtctatatatctgttttggtaccagtaccatgctgttttgttactktagccttgtagtatagtttgaagtcaggtagcgtgatgcctccacctttgttttccttgcccaggattgtcttggctatgcaggctctttttttggttcc

SEQ ID NO: 482277 - DNA, 201 bp, Homo sapiens
tatatgtttatatatatgtttatgtataattattttagtggaaatgagattttttggtcagcatagttataccactgataaaaacatttttgcactgtgtwtcatttcccttttcatttcaattatctaggtgcttaattttatctaagtgatctactttattaagtcctcaaaacaaccatttcaggtaagcattgttat

SEQ ID NO: 482278 - DNA, 201 bp, Homo sapiens
acaaatctagccaccaattacctgttcgtggcattgctatatgcacagtttcaccagtgtctggcgtggaatggaggatacctgtatattcatgtatgccyatataggcccttcctgtgtacaaacagtagagcaagttaactttaaatatgttaaaattatattacgctgctttgtttctaaagattctcgagatatgga

SEQ ID NO: 482279 - DNA, 201 bp, Homo sapiens
atttcaggtaagcattgttattcccctgattacacaaatgaggaaactgatgttcagagaattcaaataacttgtcaaaggtcacagaaaataagtgggasagccaggatttgaagccaaggtgtccaactcctgagctcctactcttcatcactattcatttacatatacaatgccatgttttgaaaactataaattctc

SEQ ID NO: 482280 - DNA, 201 bp, Homo sapiens
aggaaactgatgttcagagaattcaaataacttgtcaaaggtcacagaaaataagtgggacagccaggatttgaagccaaggtgtccaactcctgagctcytactcttcatcactattcatttacatatacaatgccatgttttgaaaactataaattctcactgtgaattattatacaaagatttataattagtcttatt

SEQ ID NO: 482281 - DNA, 201 bp, Homo sapiens
tgcagttatacaaatattctacagtgactagaaaatatttgtcatcttctgcatctttaggacttctcccttgggattatcttcactattagcttttctcrttttgttttattttttcacatcccctcaatggaaggcaatacacttagcaggtaagaatatggactctgaagggggaagtcaggcttcctaaaggctgtt

SEQ ID NO: 482282 - DNA, 201 bp, Homo sapiens
attatgtactagagtagttgactggtcaagttggttacagtcaagttgtaacactaaaactacaattggctggcactgggctgactttggagctaggtagbggggagggggtgcctgtttaagcagcagcagccctggtgcaataagcaagccacttgcaaattctcccttgagtgatcctgtaacttctcctgttactct

SEQ ID NO: 482283 - DNA, 201 bp, Homo sapiens
gagtagttgactggtcaagttggttacagtcaagttgtaacactaaaactacaattggctggcactgggctgactttggagctaggtagcggggagggggygcctgtttaagcagcagcagccctggtgcaataagcaagccacttgcaaattctcccttgagtgatcctgtaacttctcctgttactctgtaatcacact

SEQ ID NO: 482284 - DNA, 201 bp, Homo sapiens
tgatgatgagcattttttcatgtgtcttttggctgcataacgtcttcttttgagaagtgtctgttcatatcctttggccacttttggatggggttgtttgtttttttcttgtaaatttgtttgagttcattgtagattctggatattagccctttgtcagatgagtagattgcaaaaattttctcccattctgtaggttgc

SEQ ID NO: 482285 - DNA, 201 bp, Homo sapiens
gttacagtcaagttgtaacactaaaactacaattggctggcactgggctgactttggagctaggtagcggggagggggtgcctgtttaagcagcagcagcyctggtgcaataagcaagccacttgcaaattctcccttgagtgatcctgtaacttctcctgttactctgtaatcacactgggtatgtgcttcccacaggat

SEQ ID NO: 482286 - DNA, 201 bp, Homo sapiens
ctttggagctaggtagcggggagggggtgcctgtttaagcagcagcagccctggtgcaataagcaagccacttgcaaattctcccttgagtgatcctgtarcttctcctgttactctgtaatcacactgggtatgtgcttcccacaggatcaagcatgcaaaggcaagtctccacattggttcatttaccttttctctccc

SEQ ID NO: 482287 - DNA, 201 bp, Homo sapiens
ctcccttgagtgatcctgtaacttctcctgttactctgtaatcacactgggtatgtgcttcccacaggatcaagcatgcaaaggcaagtctccacattggytcatttaccttttctctcccatctcatctggaataatcctacttcatgttttgtttcggcacctaagaagctctgttgtcgatgtggaaaaatatatggt

SEQ ID NO: 482288 - DNA, 201 bp, Homo sapiens
gctttgctgaatatccatctgcctgcctatgtgggtttccctcgggtaccacagcatcacctgcatgaagatgagcttgtgatcctctccccaccctgggrtcatctccagcaccctcaattccctatagtccacttaggtgtatttgttcccctgcttaaccaagaaacctggtgtcatcctcactgcctcctttttgta

SEQ ID NO: 482289 - DNA, 201 bp, Homo sapiens
tttgcattcttttactttcaattatgtggtagattttagaataagtgcgatgaggtgctgagaataatgtatattctgttgatatggtgtggagagttctrtagatgtctattaggtgcacttggtccagagccgagatgaagtcctgaatatccttgttaattttgtctcgttgatctgtctaatattgacaacggagtg

SEQ ID NO: 482290 - DNA, 201 bp, Homo sapiens
caacacagctctagaactttcgggacctttagctgagtgtttgtctcagccacccctaggactagccttcatgcagagaagggctagctcttcttcagtgyaaaaatatgagtaaggccatttaattttcatagatgaatatcagcctttttcttgatgaagctggtatccaaagtataggatatttgtttcaaagagtaa

SEQ ID NO: 482291 - DNA, 201 bp, Homo sapiens
gcctgcagagaatcgttcaggatgatggtaagagcccatttgctcatgactgatgtcaagaccctcagtctgacttgactgaacaacagtgaggttcatcrtaaaggtctactgtctaagatgcttaaggtaggagaccaggttcttttctgggggttctctcctctggtggagaatcctaaagcatctgcctgtgcttgt

SEQ ID NO: 482292 - DNA, 201 bp, Homo sapiens
tatacagctttatgttttgggtaaattttatctactttttaaaaccatataaacttgtgcctaaagttgttcttttatttagagagattactttttttttyctttttttaaccattcgacatttctggcttctaggcagatgtcttgctttggtgatccctccactttcttctcatacctccctgggaaggagatacacag

SEQ ID NO: 482293 - DNA, 201 bp, Homo sapiens
tttttaaaaccatataaacttgtgcctaaagttgttcttttatttagagagattacttttttttttctttttttaaccattcgacatttctggcttctagscagatgtcttgctttggtgatccctccactttcttctcatacctccctgggaaggagatacacagctgagggtaccgatgtgctagccaatcattgcaag

SEQ ID NO: 482294 - DNA, 201 bp, Homo sapiens
tttcgataggtgagcagtgttaactttgttagaaacataaattgaaggcttaattttgagaaatatgtaagtaacatcagagattatggttgtcttatgtmtaacactttaaaaaatattctgtactatttggaggtcacaatgctagtgaaaatgcaaaagcctgcatggatctggtcatttggaaggtaaaagaagacg

SEQ ID NO: 482295 - DNA, 201 bp, Homo sapiens
atttgagcaaatatcaagtcttgacatttttaatagttcagtagatttaacttttttcccagcttggaatttgttatgaagacatttggactcacatgttrgatacttgttttaagataaaaataaatattttaccatgcttatatcttttttaatgtgctatgtgtttttatggaacagacaagaataatcattaatttc

SEQ ID NO: 482296 - DNA, 201 bp, Homo sapiens
tgggggaaggaacacaaaaatggtaagcttactgtaataatagtaataagccctgtaattgataccttaaggggaaagtaaccctggtatagtacaaataytaaattattatgtttatgaagggtcaactgcatactatgcatttttgatatccttttaaaaaatcagtacaaatacaccatggaatactgtgcagccata

SEQ ID NO: 482297 - DNA, 201 bp, Homo sapiens
gttgtcgatgtggaaaaatatatggtgtgactccctcaggttgacacagcagggtagaagaatgtaactaccaatttggcggagtgttgagtcataaaggyaagtatttggtagttctgtttggtttgacaagccagctgttcagagaagtggaatgaagtattaagttcaatgttcagtacagtccaataaagaaaaaac

SEQ ID NO: 482298 - DNA, 201 bp, Homo sapiens
tactgtgcagccatagaaaagagtgagttcatgtcctttacagggacatggatgaagctggaaaccatcattgtcagcaaactaacacaggaacagaaaascaagcactgcgtgttctcactcataagtgggagttgaacaatgagaacacatggacacgagcagaacatcacacactggggcctgtcggggtgggaggca

SEQ ID NO: 482299 - DNA, 201 bp, Homo sapiens
aagatgtttcctttgttcaagcctagtttcatcatataaatcagtgatgacacccattctcatacagtcataatgaagattaaatgagaaaacatttaatrtgcttaaaacaaacctgcatatactaggtatataaattaataatatatttaatatttattatcataacactccatttgcttgtttctttcatatttcatt

SEQ ID NO: 482300 - DNA, 201 bp, Homo sapiens
catgtatgcccatataggcccttcctgtgtacaaacagtagagcaagttaactttaaatatgttaaaattatattacgctgctttgtttctaaagattctygagatatggatgttcctctgatcatatcattcattatacaaaatgatttcattttatgatgaacttacactcctctccagagaatcttttacatcctctg

SEQ ID NO: 482301 - DNA, 201 bp, Homo sapiens
ccattctggtatctctcatttgttgtagcaaactaaacctccatggtcccaggtctcttgctgcataactactctcatttctccgcctgttgcatatgctycatgcacaacaaagagttgtctatgctagctggctttactctccactcaccactgaagctcacatcagtgacctcgaggctgctggatctaatagacttg

SEQ ID NO: 482302 - DNA, 201 bp, Homo sapiens
ctctcatttctccgcctgttgcatatgcttcatgcacaacaaagagttgtctatgctagctggctttactctccactcaccactgaagctcacatcagtgrcctcgaggctgctggatctaatagacttgtttctgagtcacttgacttatcttttcagtactgtcttaccttatagtattctcctctctgcttttgtaac

SEQ ID NO: 482303 - DNA, 201 bp, Homo sapiens
ggctttcaacagcctctaactgctgttagcccctaaatgtgtatctctaaagaaacatttcccctggactcccagctttgctgaatatccatctgcctgcytatgtgggtttccctcgggtaccacagcatcacctgcatgaagatgagcttgtgatcctctccccaccctgggatcatctccagcaccctcaattcccta

SEQ ID NO: 482304 - DNA, 201 bp, Homo sapiens
ctccagcaccctcaattccctatagtccacttaggtgtatttgttcccctgcttaaccaagaaacctggtgtcatcctcactgcctcctttttgtacaccstttcatctggacagtgtgcgagtcccactgttctgtgtcaaaagcatatcccaaacctcctgcttctctgatctggcccctgccccctcttccacccttt

SEQ ID NO: 482305 - DNA, 201 bp, Homo sapiens
cattgtgttagattttgttaaatgcttttttcttcatctattgagctgtcacacaggttttatcctttattctattaatatgatacattgcattgactttytgtgttaaaccttacatttatttgataggtgttcttggtcatggcatataatctttttttatacgttgctaggttacatttcctagtattccattgagga

SEQ ID NO: 482306 - DNA, 201 bp, Homo sapiens
tggagccttcttgcctgctgcatcctcgacttttcacatggctaattccttcttaacctggaggtctctgcttaattgtcacatcctcaaggtcttttccygaccgtactttctaaatagggcctccctcttctgcagcaccctgtctctttcttctatagcagttaattatattttgtaatgagttagtaatctgtccac

SEQ ID NO: 482307 - DNA, 201 bp, Homo sapiens
ccatcttcaaaaaataagcttctggagggactgtccaacatttttttctccccatgttcccccagcacttagcacagtttctgacacacgcaagccatcartaaacatttggatgggtgaacaggtaaattatttatgtagatgtggacataactatggataatattgtaataaatcctataaaaaggaaatagaggggaa

SEQ ID NO: 482308 - DNA, 201 bp, Homo sapiens
aaaagccgaaggcatcaggactttgaaggtccagccaaggttggagccaacatctgtattgtggtctcagtctgcataactgggtgatttttcttgggttrgataaaaatctggatacaggaatggagaaggtggtagttggaactagtcatacagaaggttctagcagaaagaaaaggtcagggagtaagagtagatgtt

SEQ ID NO: 482309 - DNA, 201 bp, Homo sapiens
tggcccgtgagaactctgcttatcggaatagatttttgtctattatgcaatatctaaaaaagtaactgaagagaggtgacttaaaaatatttgcacagtasagtccttaaagctctttaagggtcaaagaaaatgcatgttcatgagagttagtcactctgccttgtaaagcttgttttgatttttattttttcggttggt

SEQ ID NO: 482310 - DNA, 201 bp, Homo sapiens
tattccattgaggatttttgtgtctatatttatcacagatattgttctgtagcgttttttgttagtgtcaatgactttttaaaattgctataaaatacacrtaacataaaattaccattctaaccatttaagtgtacaattcagtggtatgatgtgtattcacaatgttatgaaactatcactactatccatttccagagc

SEQ ID NO: 482311 - DNA, 201 bp, Homo sapiens
tttttgttagtgtcaatgactttttaaaattgctataaaatacacgtaacataaaattaccattctaaccatttaagtgtacaattcagtggtatgatgtrtattcacaatgttatgaaactatcactactatccatttccagagcttttttatcatttcaaacagaaattctgtactcattaaataactccccattcctc

SEQ ID NO: 482312 - DNA, 201 bp, Homo sapiens
aagccctgtaattgataccttaaggggaaagtaaccctggtatagtacaaatattaaattattatgtttatgaagggtcaactgcatactatgcatttttkatatccttttaaaaaatcagtacaaatacaccatggaatactgtgcagccatagaaaagagtgagttcatgtcctttacagggacatggatgaagctgga

SEQ ID NO: 482313 - DNA, 201 bp, Homo sapiens
acggggttttgtcatgttgttcttgaactcctggtctcaagcgatcttctgcccacctcggcctcccaaagtgctgggattacaagtgtgcgccacctagscttgtttttttttgttattgttgttgagaagtctcgctctgtcgctcaggctggagtgcgatggcatgatcttggctcactgtgacctccgcctcctggg

SEQ ID NO: 482314 - DNA, 201 bp, Homo sapiens
ggaccgtttccccttcccctgaacccatctggaccatgttcagcttccccactcccgtgtgagcctcaccaccaccccacaaagcaggcagaccatccccrttgtaaaaatgagaaactgaggctcagacttcctcctggacttatggtgagtttgtggggctacaggggagggagcagggcagaaggagggcacccagca

SEQ ID NO: 482315 - DNA, 201 bp, Homo sapiens
tatataaatgactaatccatcaaagctgcattttcagtaatatttcttaggatacagtggcaaggccaggctcaagcccagggtcccagggtccgtgaccycagctgggctctggctctgcggcaggctggggaggcgggctcgggctcacctgaggttgctgaggttctcggggggtaggcggctgcacacctcttggag

SEQ ID NO: 482316 - DNA, 201 bp, Homo sapiens
aggcagaagaatcgcttgaacccgggaggcggaggttgcagtgagccgagattgcgccactgtactccagcctgggcaacaagagcaagactccatctcaaaaaaaaaaaaaaaaaaaagaacccgatctctgggctcccagctcccccatgccactaaacacctcatcaccaccactggccaaaatgccagaattgcctc

SEQ ID NO: 482317 - DNA, 201 bp, Homo sapiens
gaggcagaagaatcgcttgaacccgggaggcggaggttgcagtgagccgagattgcgccactgtactccagcctgggcaacaagagcaagactccatctcaaaaaaaaaaaaaaaaaaaagaacccgatctctgggctcccagctcccccatgccactaaacacctcatcaccaccactggccaaaatgccagaattgcct

SEQ ID NO: 482318 - DNA, 201 bp, Homo sapiens
gcccccacgctcccccttaacctgctccccctcccttagcagcgcctctccacctgacactatagagagaacgcactggtggctgtgcttgatgctgtctstctctctccctgtgccctgaaatgtgagcatttgtcttgctcatcaggaaattcaaggtgtgagccgcagtgctctgtggtatcctgaatagtagctgct

SEQ ID NO: 482319 - DNA, 201 bp, Homo sapiens
tctcaaactcctgacttcaagtgatccacctgcttcagcctcccaaagtgctgggattacaggtgtgagccaccacacccggccatttctttttctttttytttttttttttgagatggagtttcactcttgttgctcaggctggagtgcaatggcacgatcttggctcactgcaacctctgcctccccggttcaagccat

SEQ ID NO: 482320 - DNA, 201 bp, Homo sapiens
ctcactgcagcctccacctccaaagttcaagcaattatcctgcctcagcctctggagtagctgggattataggcacacaccaccatgcccagatttttttkttgttgtttttttgtagtagagacggggttttgtcatgttgttcttgaactcctggtctcaagcgatcttctgcccacctcggcctcccaaagtgctggg

SEQ ID NO: 482321 - DNA, 201 bp, Homo sapiens
accaccaccccacaaagcaggcagaccatccccgttgtaaaaatgagaaactgaggctcagacttcctcctggacttatggtgagtttgtggggctacagsggagggagcagggcagaaggagggcacccagcagggcgtccatgcaggcaggagcttcacctccagggaagagggtgtctgcgctctggatcagcgcctc

SEQ ID NO: 482322 - DNA, 201 bp, Homo sapiens
gctcagacttcctcctggacttatggtgagtttgtggggctacaggggagggagcagggcagaaggagggcacccagcagggcgtccatgcaggcaggagyttcacctccagggaagagggtgtctgcgctctggatcagcgcctcgacgacgcccaccacctggatggaagacacggaggctgcatccagctgggcctgg

SEQ ID NO: 482323 - DNA, 201 bp, Homo sapiens
tgagaattctccagcccagggtttccaaagagtgtgaaagacaccgcccagaatggtcttaacattgtcacagttaaatcagcttatccactgagtgccarccctgcagtgggcactgagccaagctgagtcctcagcagccaccctacagggtagagattgttacagtctgcattttccagatgatgacgctgagtggcc

SEQ ID NO: 482324 - DNA, 201 bp, Homo sapiens
ttcagcttccagctctgagacatggcgcctcaggcaggctgattgtgggagtaccacaggagccattcaagcccctcagtcctcacctttccttggtagcygctgaagccaaggctggggccggagctggagctggagccggagccggagccggggtggtggctggggtgggcacggcagtggacggaagttcctcagagg

SEQ ID NO: 482325 - DNA, 201 bp, Homo sapiens
ggcgatgttgctgggtgtcatcttgttcacctcctgctcctcggccagccgtgccaggaacttcatcaggtacctaagggcggaggcaggcttaggccagkggcagaacgcacccagccctgagaattctccagcccagggtttccaaagagtgtgaaagacaccgcccagaatggtcttaacattgtcacagttaaatca

SEQ ID NO: 482326 - DNA, 201 bp, Homo sapiens
actggaaacaaagcctggcatatagtaggtgctcaggaaattgctacatgatgaatagggcacacatcagtggctgagacaaattccgcctctgagtctcygccccaccctctccaaactaggagatccggtctttgggatgaaaacactaataattacatttccaaaaattcagcttccagctctgagacatggcgcctc

SEQ ID NO: 482327 - DNA, 201 bp, Homo sapiens
atttcttctttttttttgagacagagtcttgctctctcacccaggctggggtgcagtggcccgatcttggctcaccgcatcctccacctcccaggttcaaragattctcctgcctcagcctcccgagtagctgggattacaggcgcgtaccaccacgcccagataatttttgtatttttagtagagacggagtttcaccat

SEQ ID NO: 482328 - DNA, 201 bp, Homo sapiens
accacaggagccattcaagcccctcagtcctcacctttccttggtagctgctgaagccaaggctggggccggagctggagctggagccggagccggagccrgggtggtggctggggtgggcacggcagtggacggaagttcctcagaggccagcctgtcactgactgtgtcctggagggtaacagctgagaagaggcctga

SEQ ID NO: 482329 - DNA, 201 bp, Homo sapiens
gagttcaaaaccagcctggccaacatggggtaaccctgtctctactgaaaatacaaaaattagccggctatggtggtgcacgcctgaagtcacagctattygggaggctaaggcaggagaattgcttgaacccgggaggctgcaagtgagccaagatctcgccattgcactccagcctaagcaacagagtgaactccatct

SEQ ID NO: 482330 - DNA, 201 bp, Homo sapiens
cgtgttagccaggatggtctcgatctcgcctgcctcggcctcccaaagtgctgggattacaggcgtgagccaccgtgccgggccacgtgatctttatgagmtgctttggccactggaagccagagagtgggtgagaagcagagggggtcctaggctcattcctcactgccttcgggtctctgcttggtcgtttcttcctta

SEQ ID NO: 482331 - DNA, 201 bp, Homo sapiens
ggcgcctcaggcaggctgattgtgggagtaccacaggagccattcaagcccctcagtcctcacctttccttggtagctgctgaagccaaggctggggccgkagctggagctggagccggagccggagccggggtggtggctggggtgggcacggcagtggacggaagttcctcagaggccagcctgtcactgactgtgtcc

SEQ ID NO: 482332 - DNA, 201 bp, Homo sapiens
ttttagagacagggtctcattgtgtcacacaggctggaatgcagtggctccatcatggctcactgcagccttgactccctgggcccaagcagtcctcccayctcagccttctgagtagctgagacttcaggtgtgcaccatgcctggctaatctttttaattttttgtagagacagggtctcattaagttgcccaggctgg

SEQ ID NO: 482333 - DNA, 201 bp, Homo sapiens
agacggctctcagagaccgcgccaggctcctcactccactggccgggaccgtttccccttcccctgaacccatctggaccatgttcagcttccccactccygtgtgagcctcaccaccaccccacaaagcaggcagaccatccccgttgtaaaaatgagaaactgaggctcagacttcctcctggacttatggtgagtttg

SEQ ID NO: 482334 - DNA, 201 bp, Homo sapiens
actctgggatcttagtgcaactcaagatgggaaccctaataatgacagagtccttgcaggttggagcaaagtaaattgaaagaaaaactaaaacatatgcygattgtttaaaaatagatacagagactaaaaataagagtccaagctggaaggtgtttccatgtaaaataacctctcttgaggtttcctttaacctgatca

SEQ ID NO: 482335 - DNA, 201 bp, Homo sapiens; identical to SEQ ID NO: 276549

SEQ ID NO: 482336 - DNA, 201 bp, Homo sapiens; identical to SEQ ID NO: 276550

SEQ ID NO: 482337 - DNA, 201 bp, Homo sapiens; identical to SEQ ID NO: 276595

SEQ ID NO: 482338 - DNA, 201 bp, Homo sapiens; identical to SEQ ID NO: 276597

SEQ ID NO: 482339 - DNA, 201 bp, Homo sapiens; identical to SEQ ID NO: 276598

SEQ ID NO: 482340 - DNA, 201 bp, Homo sapiens; identical to SEQ ID NO: 276521

SEQ ID NO: 482341 - DNA, 201 bp, Homo sapiens; identical to SEQ ID NO: 276635

SEQ ID NO: 482342 - DNA, 201 bp, Homo sapiens; identical to SEQ ID NO: 276638

SEQ ID NO: 482343 - DNA, 201 bp, Homo sapiens; identical to SEQ ID NO: 276637

SEQ ID NO: 482344 - DNA, 201 bp, Homo sapiens; identical to SEQ ID NO: 276524

SEQ ID NO: 482345 - DNA, 201 bp, Homo sapiens; identical to SEQ ID NO: 276639

SEQ ID NO: 482346 - DNA, 201 bp, Homo sapiens; identical to SEQ ID NO: 276605

SEQ ID NO: 482347 - DNA, 201 bp, Homo sapiens; identical to SEQ ID NO: 276640

SEQ ID NO: 482348 - DNA, 201 bp, Homo sapiens; identical to SEQ ID NO: 276641

SEQ ID NO: 482349 - DNA, 201 bp, Homo sapiens; identical to SEQ ID NO: 276642

SEQ ID NO: 482350 - DNA, 201 bp, Homo sapiens; identical to SEQ ID NO: 276644

SEQ ID NO: 482351 - DNA, 201 bp, Homo sapiens; identical to SEQ ID NO: 276646

SEQ ID NO: 482352 - DNA, 201 bp, Homo sapiens; identical to SEQ ID NO: 276647

SEQ ID NO: 482353 - DNA, 201 bp, Homo sapiens; identical to SEQ ID NO: 276648

SEQ ID NO: 482354 - DNA, 201 bp, Homo sapiens; identical to SEQ ID NO: 276555

SEQ ID NO: 482355 - DNA, 201 bp, Homo sapiens; identical to SEQ ID NO: 276558

SEQ ID NO: 482356 - DNA, 201 bp, Homo sapiens; identical to SEQ ID NO: 276561

SEQ ID NO: 482357 - DNA, 201 bp, Homo sapiens; identical to SEQ ID NO: 276617

SEQ ID NO: 482358 - DNA, 201 bp, Homo sapiens; identical to SEQ ID NO: 276564

SEQ ID NO: 482359 - DNA, 201 bp, Homo sapiens; identical to SEQ ID NO: 276656

SEQ ID NO: 482360 - DNA, 201 bp, Homo sapiens; identical to SEQ ID NO: 276567

SEQ ID NO: 482361 - DNA, 201 bp, Homo sapiens; identical to SEQ ID NO: 276657

SEQ ID NO: 482362 - DNA, 201 bp, Homo sapiens; identical to SEQ ID NO: 276566

SEQ ID NO: 482363 - DNA, 201 bp, Homo sapiens; identical to SEQ ID NO: 276658

SEQ ID NO: 482364 - DNA, 201 bp, Homo sapiens; identical to SEQ ID NO: 276570

SEQ ID NO: 482365 - DNA, 201 bp, Homo sapiens; identical to SEQ ID NO: 276569

SEQ ID NO: 482366 - DNA, 201 bp, Homo sapiens; identical to SEQ ID NO: 276573

SEQ ID NO: 482367 - DNA, 201 bp, Homo sapiens; identical to SEQ ID NO: 276660

SEQ ID NO: 482368 - DNA, 201 bp, Homo sapiens; identical to SEQ ID NO: 276577

SEQ ID NO: 482369 - DNA, 201 bp, Homo sapiens; identical to SEQ ID NO: 276529

SEQ ID NO: 482370 - DNA, 201 bp, Homo sapiens; identical to SEQ ID NO: 276528

SEQ ID NO: 482371 - DNA, 201 bp, Homo sapiens; identical to SEQ ID NO: 276625

SEQ ID NO: 482372 - DNA, 201 bp, Homo sapiens; identical to SEQ ID NO: 276580

SEQ ID NO: 482373 - DNA, 201 bp, Homo sapiens; identical to SEQ ID NO: 276627

SEQ ID NO: 482374 - DNA, 201 bp, Homo sapiens; identical to SEQ ID NO: 276664

SEQ ID NO: 482375 - DNA, 201 bp, Homo sapiens; identical to SEQ ID NO: 276665

SEQ ID NO: 482376 - DNA, 201 bp, Homo sapiens; identical to SEQ ID NO: 276667

SEQ ID NO: 482377 - DNA, 201 bp, Homo sapiens; identical to SEQ ID NO: 55632

SEQ ID NO: 482378 - DNA, 201 bp, Homo sapiens; identical to SEQ ID NO: 276537

SEQ ID NO: 482379 - DNA, 201 bp, Homo sapiens; identical to SEQ ID NO: 276539

SEQ ID NO: 482380 - DNA, 201 bp, Homo sapiens; identical to SEQ ID NO: 276590

SEQ ID NO: 482381 - DNA, 201 bp, Homo sapiens; identical to SEQ ID NO: 276548

SEQ ID NO: 482382 - DNA, 201 bp, Homo sapiens
ttaaatgtaaatagtctaaacacacaaatttaaagacagttggcatattggatataaaaacataatccaactatgtgagtgatacattcaacaacttggcrttatgctgagtggaaaaaaaacaatctcataaggtcatattctgtgtgattctctgggtataacattctgcaaatgacaaaatgatggagatggagagca

SEQ ID NO: 482383 - DNA, 201 bp, Homo sapiens
attaatcttcctaaggcaacatctaaattgtgaagcatattgtgttggcaaaggtgtgagggaatatgcacttgtacgttgctggtgggatgggagtatamattggcataatctctaaggaaggtaattggcaaaatttatcaaaattacaaatatatatataccctttaagtcctcaacaccacttacaggaatgtatcc

SEQ ID NO: 482384 - DNA, 201 bp, Homo sapiens
aaggagagatgtgaaatgggaatacatgcagtttctgtctcttggttcttggcctagttatttctagtaaaaagaatcagcttcatctttatcccaagtcytctgactcgtccttctggttcctcctagtctggggaagcacaatgcttttaaattccaggcccacagactagatgtaggtggtggcctttcctgaaaatg

SEQ ID NO: 482385 - DNA, 201 bp, Homo sapiens
aggggtaggggataagaaatttggtcagataccaagcatagacagatactaagggtgaaagatgaggaatttgatcagaaatcaagggtgggaattttcaytaaaatgacctggctggattcttgttaaaactggactaaatgagccaatgtcaagggcctactcagaaagaggactcagaggagcctgacttatgtttcg

SEQ ID NO: 482386 - DNA, 201 bp, Homo sapiens
caggccttacatttcttttgttaaatctattctaagaatttaatattttggggggatgctgttgtacatagcattttttaaacaggaagaaatacatatamattttattattacatgcacatgtgcgcatgggagtcaagcaagatataaatattcagagaaagataagatggttcatgcttgtataccatcttttggggg

SEQ ID NO: 482387 - DNA, 201 bp, Homo sapiens
aaccaggtttatcctgtggttttctgcagagtattggaaagaagcggggtaccgtgaaagggtcaggtggagagggagaaaagctctcatcttctgtaggytggggccttgatactttgttttttgtaccttgaggaggattgaacctcacacaaaatggaaatgggctgcttccagccaggatcaaagtgagcaggtgaa

SEQ ID NO: 482388 - DNA, 201 bp, Homo sapiens
cagagataaaagaaattagaaccctttcaaaagctgataaatactacagccaacaaaaacaaccaaagtataagaacaggaaaaagataccacctcagagmcaacaaacagaattctctactgagtttaaggttgaaacttctgttttctccaggtatgctcagaaatatgatacactagatagaagaagaaaaaagaaat

SEQ ID NO: 482389 - DNA, 201 bp, Homo sapiens
tggaaggctgaggcatgtgcatagcttgagcacaggattttgagaccagcctgggcaacgtgacaaaaccctatctctacaaaaaatataaaaattagctgggtgtggtggtgcatgcctgcagtcccagctttttggaaggctgaggtgggaggatcacttgagcctgggagattgaggctgcagtgagccatgatcaca

SEQ ID NO: 482390 - DNA, 201 bp, Homo sapiens
ctctgcccttgatggatcagctggctctgcctagattgataaactggcttatctgatttttggcccttccccgggaactaacttagcacaagacacccacygttgtaaaatggcagagactaaaacaaagtattgccacgtggttacacgtcatgtttccaagtacatgaaacaagatggaggcctgtagccaagtttgtt

SEQ ID NO: 482391 - DNA, 201 bp, Homo sapiens; identical to SEQ ID NO: 157907

SEQ ID NO: 482392 - DNA, 201 bp, Homo sapiens
agattgataaactggcttatctgatttttggcccttccccgggaactaacttagcacaagacacccaccgttgtaaaatggcagagactaaaacaaagtaytgccacgtggttacacgtcatgtttccaagtacatgaaacaagatggaggcctgtagccaagtttgttactgaccattttgttggactggcttgaacagc

SEQ ID NO: 482393 - DNA, 201 bp, Homo sapiens
cagtgaaggccaggctgaggagttttcagatggagatgaggaacttactgggaactggagcaaagtcagttttgttatgtgttagcaaagaggttggaggyattatgtctctgccctggggacctagggactgtttttattattattattatactttaagttctagggtacatgtgcacaacgtgcaggtttgttacatat

SEQ ID NO: 482394 - DNA, 201 bp, Homo sapiens
gaagatggagccactattttgaacatgattggcacacctgccagcatgtatgtctgcagcttgattttacaggctgctctttgttagaaaatgatttgggsctgcttcttattaaaaggaaaaccttaccaaggacttctgtacccttattatctgcctaagtgagttcttcttaactcctgtatcagtgtgccccctttc

SEQ ID NO: 482395 - DNA, 201 bp, Homo sapiens
gagacagagtctcgctctgtcacccagggtggagtgcagtggcgtgatctcagctcactgcaagctctgcctcccaggttcacgccattctcctgcctcakcctcctgagtagctgggacaacaggcgcctgccaacgtgcccggctaattttttgtatttttagtagagacgggttttcaccatgttagccaggatggtc

SEQ ID NO: 482396 - DNA, 201 bp, Homo sapiens
ctgagtagctgggactacaggtgtgcaccaccaccacgcttggctaattaaaaaaaaatatttttttctatgaactctgcagagaagaaattaatttttawttatttatttatttatttatttatttatttatttagtagagatggggatctccctgtgttacccaggctagtcacgaactcctgggcccaagtgatcctc

SEQ ID NO: 482397 - DNA, 201 bp, Homo sapiens
tcatagtagttttgatttgcattttgctgatgatcattgatgtttaacaccttttcatgtacttgtttgccatttgtgtgtctgtcttttaaatttttatytatttatttattttgagacgttatctcactctgtcacccaggctggagtgcggtggagcaaattcagctcactgcgaactctgcctcccgatctcaagtg

SEQ ID NO: 482398 - DNA, 201 bp, Homo sapiens
ctcaaatgattttcctgcctcagcctcctgagtaactgggactacagatgcatgccaccatgtctagctaattaaaaaaaatttttctgggagacactagrttttgccatgttgtccaggctggtctcaaactcctgggctccagtgatcttcccacctcagcctcccaacatactgagattacaggcatgagccattgca

SEQ ID NO: 482399 - DNA, 201 bp, Homo sapiens
actacctctgacttgcctgtcctcattcagtgcatgatgggaaaggtattagatttactgctaatgaggacattcgtccggaaaagggtatgttgtacacygtgcagatatggatctaacatgggctaacactgacccctgggagctagaatgagcaactcgtgctgggggtgggggaacaagctgtcaaggtttaggagc

SEQ ID NO: 482400 - DNA, 201 bp, Homo sapiens
atgcaaagttatgaccttgattatccagagcggcgggctatcaggtgggtattgagcacaaagtactttctcttcctaatatccaggtctcatgatgcaaytggcaagaagaatttggatgctttaacctgaagaggtagcgtaagtgtagcagtatcaccggccaaactacagtcattttgtgtagattattagtctttt

SEQ ID NO: 482401 - DNA, 201 bp, Homo sapiens
ttctggaagatttttagtgactaagtgtctgctttgatcttgcttctgtttcctaaatgaatgcttttggatgttatatctataaagaacacactgaactmataagctcctagcctttaggttctttctccatccctaccttggtacacagaagaaggcagtctttaatctaagtgaaagaaagttcaggctatcttcagt

SEQ ID NO: 482402 - DNA, 201 bp, Homo sapiens
atctgaaactaagactaactacaaaagtacatattctaatactgaaaattgtaccctttgccatactgaaaagaaacaaaatatggggtacccagttttgyacccctacaaaaatggatttgtggttaagagtggcatgcagcgcattaagttggaaagtcatgattatgatctgtccagttgtttaaggcactgtgaaaa

SEQ ID NO: 482403 - DNA, 201 bp, Homo sapiens
gtgggttcaggcacaaagcatctaacaaactctgtggaaaagttggtttccttagttccagaaaaaacagaaactcttaatcaaatagaggcaattaattygggatctaaacccagagccatggcagtattggggaaggatctttccatgcaatctccattatcctctcaaaaagatgataatgtgaatatagacagacat

SEQ ID NO: 482404 - DNA, 201 bp, Homo sapiens
aagctacagacacggaggcatcgttagaagcagagaactttgcgctgccagcacagttgcatccagatcctacctgcattgccgaagagcttcctcctccmattcagccacctcttcctcttgagccagagccagctattcaaactgcctccacaaaccaagacttactggagctgcatccagccagttcactagaaactg

SEQ ID NO: 482405 - DNA, 201 bp, Homo sapiens
taggtgctcctcaccacccagacggggcggcggggcagaggcgctcctcacctcccagacggggcagccaggcagaggcgctcctcacttcccggacgtgkcggtcaggcagaggcgctcctcacatcccagacgatgggcggccgagcagaggcactcctcacatcccagacgatgggcagccaggcagtgacactcctc

SEQ ID NO: 482406 - DNA, 201 bp, Homo sapiens
tgtctgagtgctctatagaagagataaccccttcctctattgaggagcccaaggaggaccgtattgatacaatggatgagcttcagtgtttggtagaaacrgtgtcagaatatttagcagagaaggaagaggagattaatagatttggttcactttcaaaaactaaaaaatcacataaacaaaatagtactcttgatgcag

SEQ ID NO: 482407 - DNA, 201 bp, Homo sapiens
ttggacaataaccacgctactctagccacatgccatggaaagaccatggctcctccccttcgctaactcctgttaacccctgttaatgatagataaaaggkgtagaaatttgaaaaatatttaatccacaggaaggcaggaaaaagaaaacggaaaatagaaaataaaatgtcagacttaagccctaacattttaataatt

SEQ ID NO: 482408 - DNA, 201 bp, Homo sapiens
tctatgaactctgcagagaagaaattaatttttatttatttatttatttatttatttatttatttatttagtagagatggggatctccctgtgttacccasgctagtcacgaactcctgggcccaagtgatcctcccacctaggccacccaaagtgctgggcttacaggtgtaagccactatgcctggcctcattggccat

SEQ ID NO: 482409 - DNA, 201 bp, Homo sapiens
tatttatttatttatttatttagtagagatggggatctccctgtgttacccaggctagtcacgaactcctgggcccaagtgatcctcccacctaggccacycaaagtgctgggcttacaggtgtaagccactatgcctggcctcattggccatttgtatatcttctttggggaaatatttattcagatcctttgcccattt

SEQ ID NO: 482410 - DNA, 201 bp, Homo sapiens
atccagtgaaaagtcccttcagaaatccattttcttcctataggctaccactattaatactttcttgtgtatctttccagagtcagtttctgaatataagcacacacacacacacacacacacacacacacacacaccaccatcttctttttaaaacgcaaatagtagcatattctaacacattccctgtgccttgctgtt

SEQ ID NO: 482411 - DNA, 201 bp, Homo sapiens
tctgtgggtgttcctgaacagcctattctcacagtcctcttcttgcttctctgaggacaatgttggggagctgctttctgtaaggggatgaagcagtcacrggtgctcttttatcttgcagcaatacttccatgcaggaggcaatgggctgaagaaaaccttcctggagaagagcccagatctgcagtctctacgctatgc

SEQ ID NO: 482412 - DNA, 201 bp, Homo sapiens
tccagtgaaaagtcccttcagaaatccattttcttcctataggctaccactattaatactttcttgtgtatctttccagagtcagtttctgaatataagcacacacacacacacacacacacacacacacacacaccaccatcttctttttaaaacgcaaatagtagcatattctaacacattccctgtgccttgctgttt

SEQ ID NO: 482413 - DNA, 201 bp, Homo sapiens
cacacacacacacacacacacacacaccaccatcttctttttaaaacgcaaatagtagcatattctaacacattccctgtgccttgctgttttgcacttastatatcttggtgaatcatcccacatcagagcatatagacctgcagcagcagcagctcctctgccaccttgcacttcccactctccttctttgtaacaggt

SEQ ID NO: 482414 - DNA, 201 bp, Homo sapiens
ccttagacatagaattctgagaaacaaaggagactgagaaagggcaaccttaaagagagagaataagataaccaggaaagattaatggaacaaagaaaaamagagattcaaggcagaaattcttgacagtatcacatgttaaatcaagtgaattatgaaatagagctattggatttggtgattgatgacgagtatacatcc

SEQ ID NO: 482415 - DNA, 201 bp, Homo sapiens
gttgttttttttttcttgtaaatttgtttgagttcattgtagattctggatattagccctttgtcagaggagtagattgcaaaaattttctcccattctgyaggttgcctgttgactctgatggtagtttcttttgctgtgcagaagctctttagtttaattagatcccatttgtcaattttggcttttgttgctattgct

SEQ ID NO: 482416 - DNA, 201 bp, Homo sapiens
ccattagccactcttgctggtcagagccttttcaaactctacaagcttgggaaaagatagcagctgtggatggtgaccctgtgtgtggtcttccttagttscagcagacatcagagcatgcactcttttcctgctctgtggtggatgtcttcacacaactcaatcagagctttgagatcatccggaagctggaatgcccag

SEQ ID NO: 482417 - DNA, 201 bp, Homo sapiens
aagacattattcctccttcaccagaatttcaggcacaggctgaaacattcctcactggcccagagaaccttgggatagctccccatgaagaagaggctttsaaccacaaagccttccccagtgactcactgtccaactctttttcacatgctaaacagttaattgaaaaattcaatgatttagacacttgtactaactgcc

SEQ ID NO: 482418 - DNA, 201 bp, Homo sapiens
gggtttgtcatagatagctcttattattttgagatacgtcccatcagtacctaatttattgagagtttttagcatgaagggctgttcaattttgtcaaagrccttttctgcatctattgagataatcatgtggtttttgtctttggttctgtttatatgctgaattagatttattgatttgtgtatgttgaaccagtcttg

SEQ ID NO: 482419 - DNA, 201 bp, Homo sapiens
aaaatccacagtggatttgctgaccagcattactttcttcagaatgaaggtaagaaatggactggggcttgggtggtgctgggctggagacctggctacargaacgtgaagaatgagaatcattgggcagagtctgaggctacaggattcatcacctctaagcttacatttctgtgtacctgttccctgggttacttctga

SEQ ID NO: 482420 - DNA, 201 bp, Homo sapiens
aagaagcatattgagaagctaggttatcttaagaggggagtgattagaataatgaaacatgtaggaaccgaaccatttgaagaatatgggaaatttagttstagaagatttaagaggaagaggatcacgatagtacatgaagactgtttaaaaaactgtcttgtagaagttatgtcaccttttttgttgtcattccagagg

SEQ ID NO: 482421 - DNA, 201 bp, Homo sapiens
acacattgctttgaatgtgtcccagagattctggttcgttgtgtctttgttctcgttggtttcaaagaacatctttatttctgccttcatttcattatgtrcccagtagtcattcaggagcaggttgttgagtttccatgtagttgagcggttttgaatgagtttattactcctgagttctagtttgattgcactgtggtc

SEQ ID NO: 482422 - DNA, 201 bp, Homo sapiens
gatccacagaggtacttagttttagagtatggtactccagacattctgtcctcgttagacctgcagagctgagcacagtgaaagctgctctccccaccaargagggaaaacagaagccacatgcagtggaggcaggtggtgatagtggtgtgtttgccttatcaggatgtgaatggccctcagaagctcaaacaaggaact

SEQ ID NO: 482423 - DNA, 201 bp, Homo sapiens
accagcattactttcttcagaatgaaggtaagaaatggactggggcttgggtggtgctgggctggagacctggctacaggaacgtgaagaatgagaatcaytgggcagagtctgaggctacaggattcatcacctctaagcttacatttctgtgtacctgttccctgggttacttctgagagagcacatagactatggatc

SEQ ID NO: 482424 - DNA, 201 bp, Homo sapiens
gtatataatatataatatacatatattaatataatatatattaatatatgtatataatataatatattatattatatattaatatatgtatatattatatwatattatatattaatatatgtatatataatataatatatattatatataatataatatatattatgtataatataatatatatattatatatatattata

SEQ ID NO: 482425 - DNA, 201 bp, Homo sapiens
tatattgtaaggtaatttataagcattagaatgctcaggggtatccctagtagaaatgacattgaagcagatgccagacagagaactgtcatacttttccwaatttttcctgtgaagctttgagacttcagcattacagaaaagaaatccagagccctgaagtacaaaggagcttatccattatagagcttttcattttct

SEQ ID NO: 482426 - DNA, 201 bp, Homo sapiens
atatataatatacatatattaatataatatatattaatatatgtatataatataatatattatattatatattaatatatgtatatattatattatattatatattaatatatgtatatataatataatatatattatatataatataatatatattatgtataatataatatatatattatatatatattatatatattt

SEQ ID NO: 482427 - DNA, 201 bp, Homo sapiens
ggagagatgtgaaatgggaatacatgcagtttctgtctcttggttcttggcctagttatttctagtaaaaagaatcagcttcatctttatcccaagtcctmtgactcgtccttctggttcctcctagtctggggaagcacaatgcttttaaattccaggcccacagactagatgtaggtggtggcctttcctgaaaatggg

SEQ ID NO: 482428 - DNA, 201 bp, Homo sapiens
catatattaatataatatatattaatatatgtatataatataatatattatattatatattaatatatgtatatattatattatattatatattaatatawgtatatataatataatatatattatatataatataatatatattatgtataatataatatatatattatatatatattatatatattttttcttagacag

SEQ ID NO: 482429 - DNA, 201 bp, Homo sapiens
aaaggcagcagtggatgccagagatatttaggaggtaaaaagtacagggctgagtgattggatagggacagagtgcagagagggagagatccattgtctgsctggggacaggaggagacgtttagagatggaagatagaagtttagtgtttggatatgttgaatttgaactaagcatgcgatatctaggtgatacacacta

SEQ ID NO: 482430 - DNA, 201 bp, Homo sapiens
aagctccttgttgatttgtctattatcttctcacagagcagtggttatactgtaatattttaatggaatgtggaaagataacataagaacatagggaaagkaagagcacattttgccagttacaacttttgggtgaaacaacagatcccagaaagcaactgttggagaggagagcttgagacaagacctgggaaaactcct

SEQ ID NO: 482431 - DNA, 201 bp, Homo sapiens
gatatgataggctaatatagaagttcaccaagcacatagttaggcagatgagagagttagatagaaagccaaacagttataaccctatgggcctaccatgracatgtctagcacctttactgacttcatgtcctgggctctgaggatggagctagcagttgcttcctggagctccgtggcatgtctagctattttcctctt

SEQ ID NO: 482432 - DNA, 201 bp, Homo sapiens
ttcttggctggtcctatagagttacttgatgtgcttaaaattcagatagctaccattttgatagatgaatcttgtttcctgtttccttatgggtatgcggrctatactaatagcctctcctcacacacagataaagaagagaaggtggttgggggtggtaccacctgggcttggccagaacccctctgggccaacaacttg

SEQ ID NO: 482433 - DNA, 201 bp, Homo sapiens
actggggccacaggaggaactgagcaatgactggaaggacagaatttctgtgggaccttgtgcacattcttctgggctttaccaccaagtttgtttttgtytttcatatgtgtttaacccattccctttctctgctctgtctcctgcagaatcttttccattacctcacagacattcagggcagtggaggagtccgcatcc

SEQ ID NO: 482434 - DNA, 201 bp, Homo sapiens
cttattttgccaaaatgactcaaaaggcaaaaaccttctattaacctttactattacatgaaaatcctattcaaagtcaaaatttacccttgcattagttwattaatgttagccccagtttgttgaaatgaaaccttatagatgattccatctaattttaaccaatttgaccatgaggtgcaatctttacaaaccttttat

SEQ ID NO: 482435 - DNA, 201 bp, Homo sapiens
cctgttctcctacccagctagttcaagggtacttgtggaatatgtggtcactggagtgattcaccctatttggtgagtccttgggttggccccttcttttycttgggttggccccttctcttccttgggttaagccagaatggaactatctatgctgtctagttgcattggtgtcaatctccagtcttctttccttcctag

SEQ ID NO: 482436 - DNA, 201 bp, Homo sapiens
tgtaatgactctatgcaaagttatgaccttgattatccagagcggcgggctatcaggtgggtattgagcacaaagtactttctcttcctaatatccaggtytcatgatgcaactggcaagaagaatttggatgctttaacctgaagaggtagcgtaagtgtagcagtatcaccggccaaactacagtcattttgtgtagat

SEQ ID NO: 482437 - DNA, 201 bp, Homo sapiens
cctgcttatttggttcaatccatatgtttaaaagtctgaaaacaccaagacaacgttaaataaaagttttggggtttttttccccaagatatgaaaaagckaacttttttaaacctctgctcctttcccctttctttaataacaggggaccagactgtatttgtgacatttaaaagcagtttttaattatggttatgatag

SEQ ID NO: 482438 - DNA, 201 bp, Homo sapiens
atgagttgttctaatgcagggtagtgtttctgtctcaaaggtattttgttatgtgtattgttcattttactgaggttgttctagaagcagctcaaggaacmagatcatggcagtaaaagggctgtgtgttttttttcttttctttcttggcacttttcatgtaaaaaggaatgggtaagccttctaaaatacttagtggag

SEQ ID NO: 482439 - DNA, 201 bp, Homo sapiens
atacccagtaatgggattgctgggttgaatgctagctctgttttaattaaagtggagcagtatgacatacttttaaagagatagagaaggatatttgtcartggctttaatgcctacccccaaaagtatatgcttcccatagggagtgtaccaatttatactcccactagtaatgtcttaagagtggttttctctttccta

SEQ ID NO: 482440 - DNA, 201 bp, Homo sapiens
catgattactggtatgagccatcacactcggcttcaggggtatatatatattttaagacttctgtcaaacttcttaatttattttcagaaaagcttttccrgtttgtactttcagtatttgagtgtgctgtaccaacattaagtattcttattttagaaaatttttgccaatttgacagaagaatggtataccattgttta

SEQ ID NO: 482441 - DNA, 201 bp, Homo sapiens
ttgtcacctgttagggcggttgctgtgagtgacaataaaaatagaaagtactgtagtaagctatagtcaagtggctttggtcactgaagctccctcccccrgactttgccagcccttggcagtggtcagggctaacagcagatcttccctgacagtcactggtccagtctcggaaggcaggaatcacttctgcaatggcta

SEQ ID NO: 482442 - DNA, 201 bp, Homo sapiens
gcttgctttagatatgggtttccctactttgttgactcagggacttgccacatcagtagcaataacaacaggacagtgctttacagtttagtaagtacagwtctctcattttagctttatataataacattcctgtaattatctcccccactttacagatgaggaaactaattcacatagaggtcaagtgtttaatccaag

SEQ ID NO: 482443 - DNA, 201 bp, Homo sapiens
attctgccaagttgttctctgggtgctgcacctcattgcatccaaagagaatccccctgatttatttagcaagaatgttcttccaaccccgagcttcactytgggctcttgctacagcttttctcaaatcccgctagtttgcagctgttaaaagaactctctataatccgaaaataaaattctaggctgggcatgctggct

SEQ ID NO: 482444 - DNA, 201 bp, Homo sapiens
aagagctgggttctattgtacaaaaagtacaggtcctggacctcagtttggtctgtagtgtggctccacttatattccaggatatacagttagattgtaaytttcgaagaactcactgttggtgtgtaagaatcttcatccaagaaaaaagcatgtgtgtaagtttgtgtgtgcctgtgtgttcctttgtacaagtgctta

SEQ ID NO: 482445 - DNA, 201 bp, Homo sapiens
taatctgtaaattgtaaattacatactctacaacagtgttttttaaaattgtagcagtgtttgtttttgtttttgcttttgttcattagttctgaaatcarttaagtgggtgaccagcgttaggggaaaaagatacagagttttggccaggcagagtggtttacgcctgtaatcccagcactctgggaagccaaggtggga

SEQ ID NO: 482446 - DNA, 201 bp, Homo sapiens
ggcaatttcatcacagggaaaagtctagggacccagacagggatgaaagaatctagagtaggtttggggtagtgctaggagaatatcccacccaggtgagmaggtccttgggcccatatttcttcttttaattggcaggtacaagaactgcaaagccctccaagagccagccaggtggtaaaggattgtgtgaaggcctgt

SEQ ID NO: 482447 - DNA, 201 bp, Homo sapiens
ctgttccacttcagctggagattttaagatagtgagagacaggggcaagttaaatctaggcatgatgaaatgttccatccgaagcttatataggccaggcrtgggggctcacgcctgtaatcccagcactttatgggcctgaggcgggtggatcacctgagttcaggagttcatgaccagcctggccaacatggtgaaacc

SEQ ID NO: 482448 - DNA, 201 bp, Homo sapiens
tgggaccaaatagctggtgccgctccagggacagtgtgtgtttggggagggaaaggctacactgcgggcacatgtgtagtttccaggtacggattgatgaktgtgttcgacaaatggccgacatcctgggccaggttcggggcacagggaatgcatctccagacgccagggcctcagcggctcaggatgcagatagcgtac

SEQ ID NO: 482449 - DNA, 201 bp, Homo sapiens
atatattaatataatatatattaatatatgtatataatataatatattatattatatattaatatatgtatatattatattatattatatattaatatatgtatatataatataatatatattatatataatataatatatattatgtataatataatatatatattatatatatattatatatattttttcttagacaga

SEQ ID NO: 482450 - DNA, 201 bp, Homo sapiens
cactgccttctagccgtcctccaccttgcagaaagaatctagcctttggtctctctctctctcatcggggtcatttgctattcccctctgatattcaaccmtatagaaggagcctggactctgatccctctgtacaggctggatggaaggggccctccacacttcctgggaggtcagagacaaactgtttcagagagtcag

SEQ ID NO: 482451 - DNA, 201 bp, Homo sapiens
tttatattttaaaaaattttatttattttttaatttttatgggtacatagtaggtatttatggaatacatgagtattttgatacgggcatacaatatgtartaatcacatcaaggtaaatggggtatccatcacctcaagcatttatcatttctttgtgttacaaatattccagttatactcttttagttatttaaaaatg

SEQ ID NO: 482452 - DNA, 201 bp, Homo sapiens
gtctccctgcctcactcctctaggcaggggagtgatgcttcaggacgtgacaggctgttctaacatgtgtctacctgagggctagttgaaggatccaggartattttcttcttgggtgggccctgaacaaagccaaaaattgtagaaaccagtctagaaaaagtcctgctcatctgtggccactgccttctagccgtcctc

SEQ ID NO: 482453 - DNA, 201 bp, Homo sapiens
ttatatattcacattagaaagtggatatactttcttttaggatatgttcttcagatgtggcctcagctgggagttggtagcagatgccaggagacgcatgyggctttttgcatgcttgagcctcagtacatcatgtttacttttgcaggtcttattgctcctcaatttatagagctgttctgaggctgtgcaatctgattt

SEQ ID NO: 482454 - DNA, 201 bp, Homo sapiens
taaaaatgtgtaataaattattgttgaccatagtcaccctattgtgctagcaaatactagatcttactcattctagataactatttttgtacgcattaacygtccctaatctcctcttacccctaactccccttcccagcctctgttaatcatccttctattctctgtctccatgaattcaattgttttaatttttagctc

SEQ ID NO: 482455 - DNA, 201 bp, Homo sapiens
ataataggaacattttcatggaacttggtaaaaaaaaaaaaagtattacagttatccctcagtatacttgggggattgcttccaggacccctgcacgtacyaaaatccgtgcatactcaaattcctcacttggccctgaggaacccacctatatgaaaacttggccctctgtatatgcaggtttcacatcctgcattttct

SEQ ID NO: 482456 - DNA, 201 bp, Homo sapiens
tgaagcgggaggatcacttcagcccaggaagttgagactgcaatgagccaagattatgccactgcactccagcctgggtgacagagtgagagcctgtctcaaaaaaaaaaaaaaaaaaaggcatagggaatagatggtttattttattttccctgttgctttccatagcaaagatctgtttcccaaaatcctggccttgag

SEQ ID NO: 482457 - DNA, 201 bp, Homo sapiens
tcaatgtcctctatttctccttctcatttttaaaatcccagaaggcataggtccccaggtcatatacttcttttgccaccttcttctacctttttgccactttttttttttgtctgagccttctatattggctcttgcattaaagcatcctaatcattctggagttccataggtagctgattcttgtttatcttataagta

SEQ ID NO: 482458 - DNA, 201 bp, Homo sapiens
ctgaggcaggggaattgcttgaacctgggagacggaggttgcggtgagccgagatcacgccactgcactccagcctggtgacagagcaagactctatctcaaaaaaaaaaaaaaaaaattagctgggcatggtggcactttcctgtaatcgcagctactcgagaggcagaggtaggagaattgcttgaacgctaggggcag

SEQ ID NO: 482459 - DNA, 201 bp, Homo sapiens
taattaatagtggatttttgattttgaaaaatgaataaaaaatattttcaattttctcctgtccttcaaagcttctgtgttttagtggattttattaaaartttataggtaattcagaagaagtggctctctttaaggacccaataggctagagtggtttattacatattgttttaagcccctttctgatctaggtctctc

SEQ ID NO: 482460 - DNA, 201 bp, Homo sapiens
gcacccgccaccgtgcccggctaattttttgtatttttagtagagacggggtttcactgtgttagccaggatggtctcgatctcctgacctcgtgattcayccacctcggcctcccaaagtgctgggattacaggcgtgagccaccgcgcccggcccctactttgtcttattattggtgatgtttagtttgatctcatggt

SEQ ID NO: 482461 - DNA, 201 bp, Homo sapiens
tgatagataccctgaagaaagtgctgttctaacatagttagagcagccccctgagggccttgggttttgcatcttaacctgggacacttgtcacctgttarggcggttgctgtgagtgacaataaaaatagaaagtactgtagtaagctatagtcaagtggctttggtcactgaagctccctcccccagactttgccagcc

SEQ ID NO: 482462 - DNA, 201 bp, Homo sapiens
gtcactttctagggtggggagtattaacccctgcttttggcaagagcctgtttgcatcaatagaaaaaagagaaggagacctgtaactttacagtgttttyggccagctcaactagagaaaaacccagtaggtaacaattagggaagcttttgatatcatcacttttggcagggaaggttttcatagtcctctgttccttt

SEQ ID NO: 482463 - DNA, 201 bp, Homo sapiens
cccatgggcagggatgtgtctccaacccaatgcctcccgactctttctactcatccaggggtggttctgtttctgttatagtttaggggactcagacacargttctctttttcttcccctttatttgtttctcaccctcagaaagagagatttgtaaaactgctggaccagctacacaactcactgaggatcgacctctct

SEQ ID NO: 482464 - DNA, 201 bp, Homo sapiens
tacatacagggtgagtgaagacacggctgtgggcaggataatagatatcaagcacggtcccagagagactgtaggccaatcttggctataaagattgaggycagggaaaactggtctgtgtcatcacatccacccaaatggccaatgctactgacacctgtggttcttttaactccagggaccatgtggtgtataaatagc

SEQ ID NO: 482465 - DNA, 201 bp, Homo sapiens
actcagaaaatcatttagccagtttttgctcacttcccctgagacttgttcaaaggaaagtttgtcagaacctgtgaaaattcgccaggtggaggaagatrgtttagaaaggggctctaagaaagatggtcattccttttcctttagtggaaaactaaatcttccattttttagaagtcttggtcattctgaaaagcaaca

SEQ ID NO: 482466 - DNA, 201 bp, Homo sapiens
acttcccctgagacttgttcaaaggaaagtttgtcagaacctgtgaaaattcgccaggtggaggaagatggtttagaaaggggctctaagaaagatggtcrttccttttcctttagtggaaaactaaatcttccattttttagaagtcttggtcattctgaaaagcaacaggagttaaaagagaaaggaagcatttttcct

SEQ ID NO: 482467 - DNA, 201 bp, Homo sapiens
aaacagaaacatctgggttatgggcaccctattcactttcattacctggcagatgttgcaggataattgcccagaactagcatattgatccagctttttayattgcccattcctttttgtttcttccaggcttcaggagatcaccacttgattcacaggaataagcgggattagtctaaaatgtagtcaaaaaaacttaaa

SEQ ID NO: 482468 - DNA, 201 bp, Homo sapiens
attccttttcctttagtggaaaactaaatcttccattttttagaagtcttggtcattctgaaaagcaacaggagttaaaagagaaaggaagcatttttccyttgtttaaattttctttcactgacagcaaggttactgttaatgaccagagtttacgtggctcagcagtaaccactgatgaggagagcaaaaaaaattgcc

SEQ ID NO: 482469 - DNA, 201 bp, Homo sapiens
tttttaataaaagtatttagggaaagatggctgttatgcattgttggctgtgaatcagagtctcactatagctgtggtttctgtttgcttaggatatattygtggacagcattatagcaggtgtttcatagactggagagttcattatggctctagtttaatattttcataaaaaataaaaggagtttaataaaatccctt

SEQ ID NO: 482470 - DNA, 201 bp, Homo sapiens
atcttggagtggagaacaaatccaaacagtgtcatttggtgtgacttaccatatgaatcattcaatcagttagcatttaatgaagattacttattaagagrtgatgtgtgggcagctaactcattatatggaaactctggtcctcttccaattaatgaggctaataattcactagaagaattacccattgacttaagttct

SEQ ID NO: 482471 - DNA, 201 bp, Homo sapiens
tcacctgaatctcccaatttctaagaagagcttcttttgacttgaatgagaggagagaaatgcaagagaatgaggagagaaagaaagaaagtgaccagggkagatacattgggaccttgtgtctgctttctgtgttagggcactggtgaagcagcaggagtcaaagaggggatggctaggtgttgtgtcttaggcagatgg

SEQ ID NO: 482472 - DNA, 201 bp, Homo sapiens
ctaaaaatacaaaaattagctgggcctagtcgtgggtgcctgtagacccagctactcgggaggctgaggcaggagaattgcttgaacccaggaggcggacrttgcaatgagctgagaatgtgccattgcactccagcctgggcaacaagagcaaaactccgtctcaaaaaaaaattataaggccttaaataatttgttatt

SEQ ID NO: 482473 - DNA, 201 bp, Homo sapiens
ttcatcctgaaaatatgactaaaggctcacaacaagcagaagagacatcattagtgaacaaagtggcttcagtattttctgttttgggtgcctcagttggwagtactttgaagtttgataagagtgaatccttagaggctttggccatgcagaaagtgaatcagcagtcagatttagcagagctcacaaatgatggctttc

SEQ ID NO: 482474 - DNA, 201 bp, Homo sapiens
atttccctctcctctcctacttaaatatcgggagacaatgacctgtggtggaatgttatatcctttcaggctggtttcttgacgactttgtgtgtgtttaygtgtgttacaaatttcaaaccaaagtcccagtcataatcctgacaagatctcctaatttttattccccagaggcaagtagtagcatcagccccctagtgt

SEQ ID NO: 482475 - DNA, 201 bp, Homo sapiens
ggtcatagagatagcatagcccaagaagtagttcatgaacagcaaatggcaccttgtatttccattaacaacaccattgaggttacctcccttgcagatgrgctcagtgtagacaaggactgtcaggaaaaactgagttccaatattgtaccagggacatcagtggatttccagatgaatgaattgcaaaaagacattatt

SEQ ID NO: 482476 - DNA, 201 bp, Homo sapiens
aagggaactgatcgttttaagaagtgcagtgagaggggttgaaaggcttattccacccctctctgcatggtttctatactacgtattgactcagggctctygccattgcctctagagtcctgatcccagactgttccagggagctaccacattgggtaaatgacaaaaacgagtaggaaaagagggaacagatgaaaagct

SEQ ID NO: 482477 - DNA, 201 bp, Homo sapiens
gaggtgggaggattgcctgagcccaggagattaaggctgcagtgagccgtgatcatgccacagcacttcagccgaggcaacagggtgagaccctgtctcaaaataaataaataaataaataaataaataaataaataaataaataaataaataaaagagggaacagatgagaagctaaaaggagttatcgttttagagagg

SEQ ID NO: 482478 - DNA, 201 bp, Homo sapiens
cagctttgaactcctaggctcaagcaatcctcctacctgtgcctctttagtagcagggtctacaggcatgcaccaccatgcctggctaatttaaaaaaaawtttttttttttttttttgtagatgcagggtcttgctgtattgcccaggctggtcttgaactcctggcctgaagtgatcctcccactttggccttccaaag

SEQ ID NO: 482479 - DNA, 201 bp, Homo sapiens
aggtgggaggattgcctgagcccaggagattaaggctgcagtgagccgtgatcatgccacagcacttcagccgaggcaacagggtgagaccctgtctcaaaataaataaataaataaataaataaataaataaataaataaataaataaataaaagagggaacagatgagaagctaaaaggagttatcgttttagagagga

SEQ ID NO: 482480 - DNA, 201 bp, Homo sapiens
attttgattaacatgtttgtcagattcttccacttgatgtgtgtggcagttagttcattgattttcgttgctatgtagtatcttgttagatgcatatactrttgtttatttatttaatgtatttcttaatctcatgacagtgtagattagattatgtggggagaaattggaggcacttgaattatagcaggagtgatttag

SEQ ID NO: 482481 - DNA, 201 bp, Homo sapiens
ggtgggaggattgcctgagcccaggagattaaggctgcagtgagccgtgatcatgccacagcacttcagccgaggcaacagggtgagaccctgtctcaaaataaataaataaataaataaataaataaataaataaataaataaataaataaaagagggaacagatgagaagctaaaaggagttatcgttttagagaggaa

SEQ ID NO: 482482 - DNA, 201 bp, Homo sapiens
tgaggtcagtcattgcattttctgtttggaagtatggttcccagcccatgcttctccccatgctagctccactttagctaatattcatccatgcatcttgrattattcttccccctttctaattagagggcatgcaacctgcctgttcctaacttcacctgaaggttcagatgattttatttatgtctggcctaccctgtg

SEQ ID NO: 482483 - DNA, 201 bp, Homo sapiens
gtgggaggattgcctgagcccaggagattaaggctgcagtgagccgtgatcatgccacagcacttcagccgaggcaacagggtgagaccctgtctcaaaataaataaataaataaataaataaataaataaataaataaataaataaataaaagagggaacagatgagaagctaaaaggagttatcgttttagagaggaat

SEQ ID NO: 482484 - DNA, 201 bp, Homo sapiens
tgggaggattgcctgagcccaggagattaaggctgcagtgagccgtgatcatgccacagcacttcagccgaggcaacagggtgagaccctgtctcaaaatwaataaataaataaataaataaataaataaataaataaataaataaataaaagagggaacagatgagaagctaaaaggagttatcgttttagagaggaatt

SEQ ID NO: 482485 - DNA, 201 bp, Homo sapiens
ggttcaggccctgggactcttacagaaagagagtggaagacatttgaatccttgcttttgaagctgtcctcagaattgagggttggggtgacactcctgawgcctgattcccaccatggctttgcttcagatccatgccacaaaattacgagaacttgacagagttcctgtgagtctcatttggtacattatcctctgcta

SEQ ID NO: 482486 - DNA, 201 bp, Homo sapiens
tataggcgtgagccactgcatctggctaaagaagcttttttttttttttttttttttaagacagagcctcactctgttgcccaggctggaatgcagtggtrtgatctcggctgattgtaatctccgcctcccaggttcaagcagttctcatgtctcagcctccctagtagctgggactacaggcgtgggccaccatgcctg

SEQ ID NO: 482487 - DNA, 201 bp, Homo sapiens
aggttcaggccctgggactcttacagaaagagagtggaagacatttgaatccttgcttttgaagctgtcctcagaattgagggttggggtgacactcctgwtgcctgattcccaccatggctttgcttcagatccatgccacaaaattacgagaacttgacagagttcctgtgagtctcatttggtacattatcctctgct

SEQ ID NO: 482488 - DNA, 201 bp, Homo sapiens
tagagatggggttttaccatgttggccaggctggtctcaaactcctgacctcaagtgatccacctggctcagcctcccaaaatgctgggattacaggcatragccaccacgcctggcctaaacaagcatttaaaatgaacatttatggaatgaatgtcataatacttactgattttttatttctaagttttttaaaagtaa

SEQ ID NO: 482489 - DNA, 201 bp, Homo sapiens
atccatgtaaaaggaaagctctgaattagaaaaataagaatatattggagaagacacagtttaagttatggccttttctttttcagaagtataataattcrgtctctcaaaaagactagctgaaaacagttgccaaagcttggaatcatacagacagaggcatggtttacctaagagtaactaagaacttaattgaataag

SEQ ID NO: 482490 - DNA, 201 bp, Homo sapiens
ctctgggcttggcatatacatcgggccctgtgcaagagtgtggctagcaaggcagccccagctctcagacttaactctctgggcttggcagatacatggggcccctgtgcaagagtgtggctagcaaggcagccccagctctcagacttaactctctgggcttggcagatacatggggccccctatgcaagagtgtggcta

SEQ ID NO: 482491 - DNA, 201 bp, Homo sapiens
ttcctcccttccttccctttcttcccttccttctgttccttcctttccttcttttcttttcctttcttttccttccctttccctttcctttctttttgacrgagtctggctctgtcgcccaggctggagtgcagtagtgtgatctctgctcactgcaagctccgcctcctgggttcacgccattctcctgcctcagcctcc

SEQ ID NO: 482492 - DNA, 201 bp, Homo sapiens
agttagacacatacataccaatcattagaagaacaagtttagaaggtgtggaacttgtgcctggctggctgggtagtcagctgagcctgttgctgagcccrgtggtctggattggagtatggccagggcaggagtacacagaatagaatttagactgtcccttgagtagaatccactgattttctgtggctccagtgagaa

SEQ ID NO: 482493 - DNA, 201 bp, Homo sapiens
cagcttcccagcccaacgcttctgtgcaccagttccctgtgccggtgcgatcgccacagcagctgctacttcaaggcagttcccgggactcttgtaatgamtctatgcaaagttatgaccttgattatccagagcggcgggctatcaggtgggtattgagcacaaagtactttctcttcctaatatccaggtctcatgatg

SEQ ID NO: 482494 - DNA, 201 bp, Homo sapiens
gatttgtaaaactgctggaccagctacacaactcactgaggatcgacctctctacatacagggtgagtgaagacacggctgtgggcaggataatagatatyaagcacggtcccagagagactgtaggccaatcttggctataaagattgaggccagggaaaactggtctgtgtcatcacatccacccaaatggccaatgct

SEQ ID NO: 482495 - DNA, 201 bp, Homo sapiens
gtttgtttgtttgtttgcttatttgagacagggtcttgctgtgtcacccagggtggagtacagtggcacaatcacggctcactgcagtctccgcctcacgrgttcaagcgattctcctgcttcagcctcctgagtagctgggattacaggcatataccaccgcaccggctaatttttgtatttttagtagagatggggttt

SEQ ID NO: 482496 - DNA, 201 bp, Homo sapiens
tgttgcccaggctggagtacagtggcgtggtctcggctcactgcaacttctacctcctgggttcaagcgattctcctttctcagcctcctgagtagctggrattacaggcacccgccaccacgcccggataatttttgtgcttttagtagagatgggggttttgccatgttggccaggctggtctggaactcctgacctca

SEQ ID NO: 482497 - DNA, 201 bp, Homo sapiens
ggccccttcttttccttgggttggccccttctcttccttgggttaagccagaatggaactatctatgctgtctagttgcattggtgtcaatctccagtctyctttccttcctagagaagaggacagacaaatcagccgtctcaggggctatccgactacaaatcagtgtggagatcaagggggaggagaaagtagccccat

SEQ ID NO: 482498 - DNA, 201 bp, Homo sapiens
acaataacaacactattatcaagaccctatccatattttgccaaccatcccaacaatgtctctttttcctttctaatccagaatccaatccagaatgacaygttgcatttagtcgtgatatctctttagcttcgttcggtgtttcccatccttagcagttttaaatggtataggcttttcattttgtagcatgttcttcag

SEQ ID NO: 482499 - DNA, 201 bp, Homo sapiens
catcccagacgatgggcggccgagcagaggcactcctcacatcccagacgatgggcagccaggcagtgacactcctcacttcgcagacagggtggcggccwggcagaggcgcccctcacttcccagacagggcggccgggcagaggcgctcctcacttcccagacggggcggctgggcagagggcctccccacatcccaga

SEQ ID NO: 482500 - DNA, 201 bp, Homo sapiens
atatgttacagaattgcccactatggaggctgtactatttatattcccacttacaaagtatgagagtgcttcatctttccttagcttttaggaatagtcamccttcctacaaaattatattgcagagatggcacactgaggatagccataggcaaacagttcctgtgccatgattcactgagtctcctttctgcttgcctg

SEQ ID NO: 482501 - DNA, 201 bp, Homo sapiens
ttaacttaaaatagattaaattactgagttgaagggtataagtttttaaatttaaattttattttttatttttaattttattttttaaaatagagaccagktctcactacattgcctaggctggtcttgaactcttagcctcaggtgatcgtcctgtctgggcctcctgcaatgccatgattactggtatgagccatcaca

SEQ ID NO: 482502 - DNA, 201 bp, Homo sapiens
gtttaatttgttaattttagagacaggatctcactctgtcctgcaggctggaatgcagtggttcactgcagccttgaatcctgggctcaagcagtccttcyacctcagcttcctgagtagcttggactataggcatgcaccaccacacctggctaagtttctattttttagttttttgtagagacaagagctgtgttgccc

SEQ ID NO: 482503 - DNA, 201 bp, Homo sapiens
cctaggttgatttgatgtctctgctattgtgaataatgctgcgatgaatatatgagggtatgtgtttttttggtagaacaatttgttttcttttcattatrtacccagtaatgggattgctgggttgaatgctagctctgttttaattaaagtggagcagtatgacatacttttaaagagatagagaaggatatttgtcaa

SEQ ID NO: 482504 - DNA, 201 bp, Homo sapiens
tagatttcaagaacttagtataggaaacaaatgcaagtatatgattaataattttttatattgattatatgttgaaataatactttggctattgggttagwtaaaatatattaaaattaattctacctgtttcttttttatgtggcgattagaaattttaaaatgacacatgtggttcacattatatttctgttagtcagt

SEQ ID NO: 482505 - DNA, 201 bp, Homo sapiens
tacttttagtttcttcagcttgtcctttttggatcaaaaaaaggagacctctggggaaaaacaaagcatttcaactgttgttccagtgacctcccagcccygtaagaagacaaatgtttttgtagagagtggtagcacaatgaccagagaaagttccagtggtcatagagatagcatagcccaagaagtagttcatgaaca

SEQ ID NO: 482506 - DNA, 201 bp, Homo sapiens
atgtacatcgagtcctggccttttcccagaggtcccctggttgtttcctctaagccagatttgggttagaagcagtttttacaaggaatagttacattccyaatcacatttatttgataagtcagagagaaggataaaagaatcagccatttcaaaaaactgaggtgttttcctttctctttttcgttggtaggctggtgg

SEQ ID NO: 482507 - DNA, 201 bp, Homo sapiens
tgtgatctctgctcactgcaagctccgcctcctgggttcacgccattctcctgcctcagcctcccgagtagctgggactacaggcgcctgccaccatgccyggctaattttttttttgtatttttagtagagatggggtttcactgtgttagctaagatggtctcgatctcctgaccttgtgatccgcccacctcggcctc

SEQ ID NO: 482508 - DNA, 201 bp, Homo sapiens
aaactgaaactctatacctattaaatagtaactcctcatcccatctcaccccagtccctggcaaccactactctactttctgtctctatgaatttgattgmtctaagtacctcatgtaagtggaatcaaataacatttgtccttttatgactggcttattccacttagcgtaatgtcctcaaggttcatctatgttgtaat

SEQ ID NO: 482509 - DNA, 201 bp, Homo sapiens
tggagttctggttatattgttttcttgatctagattctgtttacatggatgtaaaagtacacttttgacttgtttatgttataattataatgtatattatmattcaataaaaagtttaaataaaagctaaatgaaaaatagcattaaaatacagagtagagaaaatgtctgactttatatccctgatgcctggcacccact

SEQ ID NO: 482510 - DNA, 201 bp, Homo sapiens
gaggctgaggcgggtggatcacgaggtcaggagatcgagaccatcctgaccaacatggtgaaaccctgtctctactaaaaaatacaaaaaattagctgggygtggtggcgtgcgcctgtagtcccagctactcaggaggctgaggcaggggaattgcttgaacctgggagacggaggttgcggtgagccgagatcacgcca

SEQ ID NO: 482511 - DNA, 201 bp, Homo sapiens
tggaaattcagattttgtccttgtgggaagagagaaggaagaatttggcatcctctagactttggagcgtggtctacctaggcagctgggcaccaagcccragacccagaaattctggttgtgcaggtagtgcatcctcgcaggctagactgagttggccagattaggggcatggctgttcctggccccatgagaccttga

SEQ ID NO: 482512 - DNA, 201 bp, Homo sapiens
tgttggccaggctggtctcaaactcctgacctcaggtgacccacccgccttggcctcccaaagtgctgggattacaggtgtgagccaccatgcctggtctsaagtatagttttttaaagaaagaagtctcactctgttgcccagactggagtgcagtgatgtgatcatagctcactgtagcctcaaactcctgggctcaag

SEQ ID NO: 482513 - DNA, 201 bp, Homo sapiens
tcatgctaaatgccacctacgtctggacagtgtgtgcgtactgtgccactttattctagaattaggtaaagaaatatttttcctgctaagtttaaaatacktaaaccattgtcctttctccaagtgaacggttgccatcactcaacaaagggaaaatactttgtgctataagcacaggcaggggtaaacttttgagtaagt

SEQ ID NO: 482514 - DNA, 201 bp, Homo sapiens
atgctaaatgccacctacgtctggacagtgtgtgcgtactgtgccactttattctagaattaggtaaagaaatatttttcctgctaagtttaaaatacgtaaaccattgtcctttctccaagtgaacggttgccatcactcaacaaagggaaaatactttgtgctataagcacaggcaggggtaaacttttgagtaagtgg

SEQ ID NO: 482515 - DNA, 201 bp, Homo sapiens
gctctgtcacaagcaaccactgtcattcatatacgaaaagtcctctttctgggtggtaagaacatttagttgtccttttgcctctagtcttacaccttttycctcttctcctgctcactgcttcatagaagagactgcaaatgcaactttaggttgagacagtgctgcctgcagtgccagggaatgaaattcctgggactt

SEQ ID NO: 482516 - DNA, 201 bp, Homo sapiens
tgctaaatgccacctacgtctggacagtgtgtgcgtactgtgccactttattctagaattaggtaaagaaatatttttcctgctaagtttaaaatacgtaaaccattgtcctttctccaagtgaacggttgccatcactcaacaaagggaaaatactttgtgctataagcacaggcaggggtaaacttttgagtaagtgga

SEQ ID NO: 482517 - DNA, 201 bp, Homo sapiens
tactttaccactggattaatagatgagtcgcaaacctttctgaagatattaacttattttctctcttcttcccttttttggtttttggtcatctctggtarctcatctaatagatgggacatccaggaggtgagctgtggaccaggcttcttattgggttgatgactcactgaaaaactgactctggctctccatagacct

SEQ ID NO: 482518 - DNA, 201 bp, Homo sapiens
aagaaagaaagaaagaaacattccatgtcttgtctttcactgtgtatgtgatttgagccttggtggttaagcatttgtttgtttatttctgagccagactyctagtactgaattttgtgaaagttcaaataaggacttactcattgaccttacttcatctacctcccagcagcttgtctcaatatcgttgactttgggtac

SEQ ID NO: 482519 - DNA, 201 bp, Homo sapiens
cagcacttgtaacatttttcatttgccagtttctttttttctgttttttgagacagagtttcactcttgttgtccaggctggagtgcaaaggcgtgatccyggctcaccgcaacctccgcctcccaggttcaagcgattctcctgcctcagcctcctgagtagctgggattacaagcatgcaccaccacacccggataatt

SEQ ID NO: 482520 - DNA, 201 bp, Homo sapiens
cttgaggtcaggagtttgagacaagcctggccaacatggtgaaatcccatctctactaaaaatacaaaaattagccaggcgtggtggcatgcgactgtagsctgtagtccagctacttgggaggctgaggcaggagaattgcctgaacccgggaggcagaggttacagtgagctgagatcatgtcactgcactccagcctg

SEQ ID NO: 482521 - DNA, 201 bp, Homo sapiens
catgcaattttggaacatatattagtattcaccaaaatataacttaaagaatatcggacatcattttggcaatcttatgtgacaaaacatgccaaataatmctgtgtacctcttctctggatttttcaggggcctctgaaccatccagaaagccaggcatcaggaaagacaattttgaaacttgaagtttgattttgggac

SEQ ID NO: 482522 - DNA, 201 bp, Homo sapiens
attattgggtatactgaggggagtgctgatgaggaggtatgtcacttccttataaaatggactgtctggaacagtgagagagatcattcttagggggtcarggattttcctgcaaagcagttgttttgtagacatttataacttaacctgcaaactaaatctaagtggaaaaatcctaaggcattttagggagttgggaag

SEQ ID NO: 482523 - DNA, 201 bp, Homo sapiens
accctatttggtgagtccttgggttggccccttcttttccttgggttggccccttctcttccttgggttaagccagaatggaactatctatgctgtctagytgcattggtgtcaatctccagtcttctttccttcctagagaagaggacagacaaatcagccgtctcaggggctatccgactacaaatcagtgtggagatc

SEQ ID NO: 482524 - DNA, 201 bp, Homo sapiens
agcgagagtctgatgatttccttggccaaaccatcattgaggttcggaccctaagtggcgagatggacgtctggtacaacttgggtgaggaaactggaccygagaaagttgcttggaagggaaagcatgaaggggacctgggaatagtccttctaccaaaaccaccatctgtccccaaagcatacctctatacagagcctg

SEQ ID NO: 482525 - DNA, 201 bp, Homo sapiens
tctgcccctaacagagcctgcctaattctctcacagtgagtgccacaactcctctgaccgcattaaggtgcgtgtatgggatgaggatgatgacatcaagkcaagagtaaagcaacgcctaaagcgagagtctgatgatttccttggccaaaccatcattgaggttcggaccctaagtggcgagatggacgtctggtacaa

SEQ ID NO: 482526 - DNA, 201 bp, Homo sapiens
cagccaagatcaccattactggtgagcaggccacagtttgaggggacaggaaggcctgggctatggggaggagactggggaagaaacatcctgagcgtgasggagcaagggattagggagaaagaaaaaggaaatcactgggaaggaaaggcctctttattaatcacttctccttacctagaccctggtgccggagaggca

SEQ ID NO: 482527 - DNA, 201 bp, Homo sapiens
ttgactctcaataatggagttaagattgtattattgggtatactgaggggagtgctgatgaggaggtatgtcacttccttataaaatggactgtctggaasagtgagagagatcattcttagggggtcagggattttcctgcaaagcagttgttttgtagacatttataacttaacctgcaaactaaatctaagtggaaaa

SEQ ID NO: 482528 - DNA, 201 bp, Homo sapiens
agctcttagtgctgagggagaaacctatgtcatatgtgaagtccctgtggcttttgtgagagagggagggaacctaggctaatgggtcctatgctgaaagragccaagactcaacagctacatctgtccccaaagccctgcatcctgatgaacaacgtgcagcaactgagggtccagctggagaaaatgtttgaggccatg

SEQ ID NO: 482529 - DNA, 201 bp, Homo sapiens
aaagtcatggggaccaggcatgttggcttatgcctgtaatcccagcactttgggaggccaaggcaggtggatcacttgaggtcaggagttcgagacaagcytgaccaacatggtgaaaccctgtctctactaaaaatacaaaaattagctgggcatggtagcatgtgcatgtaatcccagctacttgggggccaaggcagg

SEQ ID NO: 482530 - DNA, 201 bp, Homo sapiens
cccggacgtggcggtcaggcagaggcgctcctcacatcccagacgatgggcggccgagcagaggcactcctcacatcccagacgatgggcagccaggcagwgacactcctcacttcgcagacagggtggcggccaggcagaggcgcccctcacttcccagacagggcggccgggcagaggcgctcctcacttcccagacgg

SEQ ID NO: 482531 - DNA, 201 bp, Homo sapiens
catgagagttggtggaggagcagttgttaatgacgtgttactcctagtggaatagcctcccaccccctaataaatagcccagctaatttatgccattacayacacctagattttagttccagaccttgagctgtgggaccttgggcaaggcctctttgaattccaggtttctcacctgcaaaatggggaaacaatagtacc

SEQ ID NO: 482532 - DNA, 201 bp, Homo sapiens
atttctcattcttgttttaaaggttattatctagatctggcctgttatgctcttcttttggtgtgaacagaatagaggggatttctatgctaggttttaawtaaggaacatttgtaacttaaactttcagaagatatctcacatgaaactggctgcctgccacaggagtaacttagatctctccaccttgttgtcaggagc

SEQ ID NO: 482533 - DNA, 201 bp, Homo sapiens
gtttcttgatctgtgtgctggttacctgagtgtgttcacagtattcattgagcagtacaggccgggcgtggtgtttcacgcctgtaatcccagaactttgrgaggctgaggccgggggatcacttgaggtcaggagtttgagacaagcctggccaacatggtgaaatcccatctctactaaaaatacaaaaattagccagg

SEQ ID NO: 482534 - DNA, 201 bp, Homo sapiens
ggaggctgaggcaggagaatggtgtgaacccaggaggtggagcttgcagtgagccgagatcgcaccactgcactctagcctgggcaatagagcgagactcygtctcaaaaaaaaaaaaaaaaaaaatctgcatctatttgctctggttctcatctgtacaatggtgggacttgtcaaggcattatgtgttaaataccaatg

SEQ ID NO: 482535 - DNA, 201 bp, Homo sapiens
aaaagcgaggagcccttcaggttgtgcctatgaccctttgggtcgtccttttttgtctatttccctcccctccttcccaagcactgtatgtgtgtgtgtakgtgtgtgtgtgtgtgtacatgcacatgtgcgtgcatgatctgtgcctctgagctttggctcatgcagtctatttttctgaaaagcagtttgtgtgcatgc

SEQ ID NO: 482536 - DNA, 201 bp, Homo sapiens
gagtttcagacctgtgtgattgtaccagagtcattttaagctgctcagtgtagcctgtaactgactgttcttaaagagagaagagagttcaagtaccttcycattccccactccttcccacaaataccaccaattagttatctagaccttccttttccctttttcctacaaaggcttctgacatcagaagtctcagtagtt

SEQ ID NO: 482537 - DNA, 201 bp, Homo sapiens
agatgatctactatatttttacatgctcctttcccttgcaatttgtcatctttaaaaaaaaattttttttaacttttgttttaggttcaggggtacatgtrcaggtttgttatatagttaaactcgtgtcacagggatttgttgtacagattatttcatcacccaagtactataacaatagttattttttctgctcctctc

SEQ ID NO: 482538 - DNA, 201 bp, Homo sapiens
ctgtgtttttcaggcactttgcatgtttatcatccaagtacatgtgtcctggtgtgccagcagtgatgagcaccttactggccaacatcaacgcctactaygcccacacaactgcctctaccaatgtctctgcatctgatcgctttgcagcctccaactttggggtaagtatcatgtaaacacatatgtctgcatttgtta

SEQ ID NO: 482539 - DNA, 201 bp, Homo sapiens
aaagttgtggcatcagttgcttcttcagtgatctttagtttttttcttctaataattgtaaaatacacacatgtcaatgggacatatccagactacttctraatgtagctatgtagtagttttctaaatgattccctattgtctttcttccttttctttcaccttcgtccttagaagctgtcctaagtatagaacttccct

SEQ ID NO: 482540 - DNA, 201 bp, Homo sapiens
ttcttgaaagtttttttttaaccttagaatataaactcacataagattacaaaaccaccagcacaccaaaaatttaacaaaattttataatgtcatcagtrtctatcctatattcaaatatccccagttttcccccaaactttcttgtcctttttgcaccattgtagaagttaatcaaggttcacacattgcatttgtatg

SEQ ID NO: 482541 - DNA, 201 bp, Homo sapiens
caaaaaaaaaaaaaaaaaagtaaagacattgttttctttaaattttcaaacttctaaaaaagaacagagaataatatattgcatacccatgtagttgccamcttaatttaacaaatgttaatgatttgttacattagtcaagattaaaaaaatggtgtacagtggataaagttgaaattttctttactgtctcaatctctc

SEQ ID NO: 482542 - DNA, 201 bp, Homo sapiens
tctgggcttggcatatacatcgggccctgtgcaagagtgtggctagcaaggcagccccagctctcagacttaactctctgggcttggcagatacatggggcccctgtgcaagagtgtggctagcaaggcagccccagctctcagacttaactctctgggcttggcagatacatggggccccctatgcaagagtgtggctag

SEQ ID NO: 482543 - DNA, 201 bp, Homo sapiens
aggcagaaaaaacttctgcatgagctagtacagaaggcaaaccgtctctcagtagaagacatacactcaggtattctgagtcactatttaacagggtcccwgctggctaaagtatgacctccatctggccagcatgagacctggtgtggtggccagtttaataaggtgttggttgacgtccatagcttgaatcaggctaaa

SEQ ID NO: 482544 - DNA, 201 bp, Homo sapiens
ttctgtctgttggcttgagatgctatttgggagttgatttgggaatattatatatgtatccccaagcaaatttctttttttctttattttgtgggacaggrtctcactctgttgcccaggctggagtgcagtggcagcatcttggctcactgcagccttgatctcctgggctcaaatgattttcctgcctcagcctcctga

SEQ ID NO: 482545 - DNA, 201 bp, Homo sapiens
tgaatttgattgatctaagtacctcatgtaagtggaatcaaataacatttgtccttttatgactggcttattccacttagcgtaatgtcctcaaggttcayctatgttgtaatgtgtcagaatttcactctgaaatttcactctggaatttttaaggctgcatcgtattccattgtacacatgtatcacattttatttatc

SEQ ID NO: 482546 - DNA, 201 bp, Homo sapiens
attagctttagggagacgtttttcggttttgtatggggggagtagggctcatctttttttctacatttgttagcttctacccctggaggaatgatttaacyccctctatccctgtttacctgttattattctttaaggctcagtttaaatatcatcacttctgggtaatctttgtgctgttttctccttctcccaagtcta

SEQ ID NO: 482547 - DNA, 201 bp, Homo sapiens
cccagctaatttttgtatttttagtagagatggggtttcccatgttggccaagctggtctcgaattccttaagtgatccacccactttggcctcccaaagygctgggattacaggtgtgagccaccatgcccggctgaatgtttcttttcttcttatattgatatttgtgtatgtgttataacaattccttcttttaatgt

SEQ ID NO: 482548 - DNA, 201 bp, Homo sapiens
tgcagtgcaccagcatggcacatgtatacatatgtaactaacctgcacattgtgcacatgtaccctaaaacttaaagtataataaaaaataaaataaaataaagaaaagggtgaaacattaaaaaaaagaaaagaaaagaaaatgctgtccgtcaccaaatattttgtaagtcaacattattaaggtatcatttatagaca

SEQ ID NO: 482549 - DNA, 201 bp, Homo sapiens
tttggctatgtaccccaaagtggattgatcaaattttatggtaattctaattttttgaagaatcaccataccattttccatggtggctgcaccgttttacrttcccaccatcagggcacaagggttccttccaatttctctacattttcttcaacacttgttattttctgttttgttttttttaagtaatagccattgtaa

SEQ ID NO: 482550 - DNA, 201 bp, Homo sapiens
atgcccagcctgataaatcttgtaaagtagacttacctttcctaaaagtttcctgtatacgatgtgtagtttaagttgaagcagtgttagttaacaataamacatataaaactgttgcctatgggtggaaattggcaggcaggcctggcaataatgtccttattacttggcctcatattgtgtgaaactgcattagtctaa

SEQ ID NO: 482551 - DNA, 201 bp, Homo sapiens
gcagtgcaccagcatggcacatgtatacatatgtaactaacctgcacattgtgcacatgtaccctaaaacttaaagtataataaaaaataaaataaaataaagaaaagggtgaaacattaaaaaaaagaaaagaaaagaaaatgctgtccgtcaccaaatattttgtaagtcaacattattaaggtatcatttatagacaa

SEQ ID NO: 482552 - DNA, 201 bp, Homo sapiens
gggattataggcatgagccaccatgaccagcccttagtataataggttcttaagaaatgaatccttgcaataaccctgggaggtagttgttcatatacctrtctttttatagttaaggaaatgtaggctcaaataagttgaacgtctcaagtcttttgactctcaataatggagttaagattgtattattgggtatactga

SEQ ID NO: 482553 - DNA, 201 bp, Homo sapiens
taaataccaatgagaaggatgaatgtaacttaggtgcactaggatggccttattaactcttgcttgggtgggcatcagagaaggcttcccagaactatgcyttggaggaagagttggattttcctctatggaaaggaggtgtgagatgctatttcaggctaatggaacagaatgagtaaataaaaatttggggttttgagt

SEQ ID NO: 482554 - DNA, 201 bp, Homo sapiens
ttcaccttcgtccttagaagctgtcctaagtatagaacttccctcagtctggtagtctcattaaaaacaaagcctactgcctatgttcagggagctgtttyattagaaatcagcatattgagtggcctgtttcaactcctggacttgacccaatttgtggttccattctttgcctagatagctacaagtacctactttttc

SEQ ID NO: 482555 - DNA, 201 bp, Homo sapiens
agctagaaatcgggtgtaaggattcagttaaatgtgaacccttttcccttattaccattttctgtttctgttttcttttttctctctattctatctattgkttttcctaaccacccctcttccctcttccccatttcctgctccactagtttctccctccttagttgaccgaatgaaagtatcatctgccattttctcttc

SEQ ID NO: 482556 - DNA, 201 bp, Homo sapiens
cagagggtgtaaagatcaatatagagataagtggtcagttagggcttgggtagggagatgggatgcttgggctttaagggaaaggctggtggcccaggacraagaataaatatggaggaatgggattacggtatctgtgcaaggagcatagactgctctaagatggaaagcatatgagtagtgttgtggggggcttctgaa

SEQ ID NO: 482557 - DNA, 201 bp, Homo sapiens
tcttcttcattgccagaggagacacgaaatcaaggtcctgattgtcccacagggtctcagttctggtatctccctgcagaacccaaaagtcatggggaccrggcatgttggcttatgcctgtaatcccagcactttgggaggccaaggcaggtggatcacttgaggtcaggagttcgagacaagcctgaccaacatggtga

SEQ ID NO: 482558 - DNA, 201 bp, Homo sapiens
gggtatgtgtctttcagaaatcccacgtgtataagaaaaccctgcaggccttaatctaccccatttcgtgcaccactcctcataactttgaggtctggacrgccactaccccaacctactgctatgagtgtgaaggcctgctctggggcattgcccggcagggcatgcgctgcagcgaatgtggagtcaagtgccatgaga

SEQ ID NO: 482559 - DNA, 201 bp, Homo sapiens; identical to SEQ ID NO: 157941

SEQ ID NO: 482560 - DNA, 201 bp, Homo sapiens
actgggaaagactctaagcaagtctagatcagagagtaagcccaagtctcatgttgaagggtgtgaccactgaactcaaggttttatgatggacctagtaycttctgttttcttagaaagcgtgaatgctggaacaaggctcggatccagcatcaggtccaacctgtgttggacaaccagaagcacactatattgtgggcc

SEQ ID NO: 482561 - DNA, 201 bp, Homo sapiens
gtgttagttttccacactgggaaagactctaagcaagtctagatcagagagtaagcccaagtctcatgttgaagggtgtgaccactgaactcaaggttttrtgatggacctagtaccttctgttttcttagaaagcgtgaatgctggaacaaggctcggatccagcatcaggtccaacctgtgttggacaaccagaagcac

SEQ ID NO: 482562 - DNA, 201 bp, Homo sapiens
gttatgggcaccctattcactttcattacctggcagatgttgcaggataattgcccagaactagcatattgatccagctttttatattgcccattcctttytgtttcttccaggcttcaggagatcaccacttgattcacaggaataagcgggattagtctaaaatgtagtcaaaaaaacttaaaaacaatcattgagact

SEQ ID NO: 482563 - DNA, 201 bp, Homo sapiens
gtaattattgtgatttattatgtccatctgttttttatcccccattttattaccatttctagcatttaggctgacttgtgcccatttcttgaaagaaaggwaaggcagagagcagaagaagtgatctttgtggttttaacttcccaaagcctaagattttaggagagtatgcaaagtgttctggacaaatattatgagagg

SEQ ID NO: 482564 - DNA, 201 bp, Homo sapiens
catgtatcaacttttgtctttgccttaaaatgtataaaaccagtctgtaacccaaaaaccttgggcacatgttctcaggacctcctgaggctgtgtcacargccatgggtccttaaccttggcaaaagtaacctctaaattgattgagatctgtctcagatacttttttgtttacatcctcatagctgttttgttaaatct

SEQ ID NO: 482565 - DNA, 201 bp, Homo sapiens
ggcctgggctatggggaggagactggggaagaaacatcctgagcgtgagggagcaagggattagggagaaagaaaaaggaaatcactgggaaggaaaggcytctttattaatcacttctccttacctagaccctggtgccggagaggcaagattgctatctgcaaacaacatgaaccataatacaaggatttgctaacaac

SEQ ID NO: 482566 - DNA, 201 bp, Homo sapiens
gcctctcccaggccccattcctcagctcaacccttggtctggtaggtgacctgttgtgttcctggccaccttcaggggctgcagaaaagagctgtaaacayggagctgaggaccggacccagaacattatcatggccatgaaggaccgcatgaagatccgagagcgaaataagccagagatctttgaagttatccgggacg

SEQ ID NO: 482567 - DNA, 201 bp, Homo sapiens
cttctgtttctagaaaatctcaaagacgccttcccttgagctatatcccctacaacgtttcctgatcttgccaaacaaaataactgaactgtaaaacttcrctcacatagcatacacagagagaataggagatatgacagtcgcagacaggaaaggaggaaattatgatagaaaagttggagatcctgttgccaacacccc

SEQ ID NO: 482568 - DNA, 201 bp, Homo sapiens
ttaatatgcttatctgtgtatccatagtacctttgcccaataaatattagttgaataaatgcatttctataagtggaatcattgggttaaagaatatatayatttataattttgttagacactatcaaattgtataaaaatattttacctatttatatttctgctgctggtacttattttcacatttagcctcactggccc

SEQ ID NO: 482569 - DNA, 201 bp, Homo sapiens
cagtgcaccagcatggcacatgtatacatatgtaactaacctgcacattgtgcacatgtaccctaaaacttaaagtataataaaaaataaaataaaataaagaaaagggtgaaacattaaaaaaaagaaaagaaaagaaaatgctgtccgtcaccaaatattttgtaagtcaacattattaaggtatcatttatagacaat

SEQ ID NO: 482570 - DNA, 201 bp, Homo sapiens
agtgcaccagcatggcacatgtatacatatgtaactaacctgcacattgtgcacatgtaccctaaaacttaaagtataataaaaaataaaataaaataaagaaaagggtgaaacattaaaaaaaagaaaagaaaagaaaatgctgtccgtcaccaaatattttgtaagtcaacattattaaggtatcatttatagacaata

SEQ ID NO: 482571 - DNA, 201 bp, Homo sapiens
gtgcaccagcatggcacatgtatacatatgtaactaacctgcacattgtgcacatgtaccctaaaacttaaagtataataaaaaataaaataaaataaagaaaagggtgaaacattaaaaaaaagaaaagaaaagaaaatgctgtccgtcaccaaatattttgtaagtcaacattattaaggtatcatttatagacaatac

SEQ ID NO: 482572 - DNA, 201 bp, Homo sapiens
tccttcagtaagtttgcagtctcataaacatatatataactctaatcaaaagagtctgtttgaagggccttgaaaaagggataagattaaaggaattccarggaggaagagtcttttcgcactcttgatcagataccaggaaaagctacataaaacaaggaacatttgagatagaccttaaaaggcagtgggatttggaca

SEQ ID NO: 482573 - DNA, 201 bp, Homo sapiens
ttttcttctaataattgtaaaatacacacatgtcaatgggacatatccagactacttctgaatgtagctatgtagtagttttctaaatgattccctattgkctttcttccttttctttcaccttcgtccttagaagctgtcctaagtatagaacttccctcagtctggtagtctcattaaaaacaaagcctactgcctatg

SEQ ID NO: 482574 - DNA, 201 bp, Homo sapiens
cagcagtgtgcctacatattttataatctttttaagggaattgcattggatgaaacaattagaagattttgtgtatttttgagatttataaaatgtactgrcactgttaaatactgttttgaaaactgtggagttatagaaataagtgaggttcatggtacatgaagcacaactgcagttttgttttctcatggattcgta

SEQ ID NO: 482575 - DNA, 201 bp, Homo sapiens
gtgctttcgtaagtccactggcctcaggactggtgatcatctctgtagccatgctattaataattgggaattctgggaattcaagagtgctggacacacaytgctgatgaaaaagatagatagcatcaggtgttagttttccacactgggaaagactctaagcaagtctagatcagagagtaagcccaagtctcatgttga

SEQ ID NO: 482576 - DNA, 201 bp, Homo sapiens
gtcactgtattttccctttattcctgagctccttggccatagaactccaccctctcttaactaggtgtaggccaggaatttagcttggggtctgggctggyttaatctgaggtaggcattcgggtaaggccctgcgagggaggaataggcactggggtaagccctgcaaggaagtagtaggggtgtggcagggtagaagag

SEQ ID NO: 482577 - DNA, 201 bp, Homo sapiens
tatataagcatacataatttaaacagttttatattgatgatattcaggatatttttcttttcactattacaaacagtgctacaatgaacatctttgtaggtttttttttttttttttttgagatggagtctcacactgttgctcaggctggagtgcagtggcgccctctctgctcactgcaacctctgcctcctgggttca

SEQ ID NO: 482578 - DNA, 201 bp, Homo sapiens
ggcaagtagtagcatcagccccctagtgtggccttctcctttggtccctttggctaaggagtgcagtgaccagaaggagaaggttcattctaggatgaacyagagtcaaggtgattggtgtgcattctgatttggctgattttcttgactaggaggatatgcagaacagactgctgtcttgggtttattggtctagcaaat

SEQ ID NO: 482579 - DNA, 201 bp, Homo sapiens
tacaggtgagcacctgttccctggccaaggtgtgtgagggtgaaaaggcccaggaaccccacgtggacagacccagtgaggaagccattctgtatttgtayggacttcctgaacaagatggagaaaatactatggaactggtggaaagctttctagccaagcacctttgtgttaatggcatgcagtgcaacaggtacatta

SEQ ID NO: 482580 - DNA, 201 bp, Homo sapiens
tcaggcttggtgccaggaggtttactttttaggaaaactggaggtgattgcctctcactacttttttctgtttctctcctttgtctcactttattccttastatattctctctcttgccctctcctgcttttcatattctcttctactcccaacctcttctttccatggatgctttgtttcttaatatttgccctttattt

SEQ ID NO: 482581 - DNA, 201 bp, Homo sapiens
gtccagggttccgtggatgaagtctctagctgtgtagactcagtactgagtgaaatagaaggcttacaggtgagcacctgttccctggccaaggtgtgtgwgggtgaaaaggcccaggaaccccacgtggacagacccagtgaggaagccattctgtatttgtacggacttcctgaacaagatggagaaaatactatggaa

SEQ ID NO: 482582 - DNA, 201 bp, Homo sapiens
ttgaacattagcttctttctcatgttgatatttttcctcccggagttctaatccctctcctctccttttttatgttcacatgtaaccataaactcaaatargaaaagctcataagatcatcttacccctgtctcccatctgtacccacaaatgttattgagagtccaatgctcagattttcttccttacctataaaaccca

SEQ ID NO: 482583 - DNA, 201 bp, Homo sapiens
cccaaagcatcagccagcaataattgctagaaacaaactgaaaagagcaggacaggctgttgccttccaaggtaatctctattaagcatcctgaccagaartaagaggaagaagcagagaacccctcaaaccctgagggagaaaatgaagcgattgttgcaagagtcagaggaagaaatcatggttaccttgggaccctcc

SEQ ID NO: 482584 - DNA, 201 bp, Homo sapiens
gaaagaagcggggtaccgtgaaagggtcaggtggagagggagaaaagctctcatcttctgtaggctggggccttgatactttgttttttgtaccttgaggmggattgaacctcacacaaaatggaaatgggctgcttccagccaggatcaaagtgagcaggtgaaaagatgagtgaaagaacgtaacattcgactgcctct

SEQ ID NO: 482585 - DNA, 201 bp, Homo sapiens
ttgccttaagagatacatattgtagtttctagaattagctacaaagttgtggcatcagttgcttcttcagtgatctttagtttttttcttctaataattgkaaaatacacacatgtcaatgggacatatccagactacttctgaatgtagctatgtagtagttttctaaatgattccctattgtctttcttccttttcttt

SEQ ID NO: 482586 - DNA, 201 bp, Homo sapiens
gaggtgtgagatgctatttcaggctaatggaacagaatgagtaaataaaaatttggggttttgagtatgtgacgtctttgtgaaacaagacaattagattstaggaatgtatatggggtcaagaaagagggcagaggagaggaatttggggatttgggccagatcatggagagccgtgacggctctgtcaatggattgatt

SEQ ID NO: 482587 - DNA, 201 bp, Homo sapiens
tataacagctttattgagttataattcatgtgccataaaattcaccttaaagtcccttaaaaagtattgaatcgaatggtttttagtttattcatagttaygcagacatcatcaccatctaatttcagaacatttccatcaccccataagaaacctcttacccattggcagtcactccccacttctctttgcccccagcct

SEQ ID NO: 482588 - DNA, 201 bp, Homo sapiens
tgtctcccaatcaaaccagccaaactctccactctggccagatggttctcaatctcgactgcacatggaataacctaaggagctttaaaaacactgacgckaaacacatagatcaatggaagagaattgagagtcaagaaataaaccacacagttatggctaatttcctcaatgaggaaagcataatcattgcaacaaatg

SEQ ID NO: 482589 - DNA, 201 bp, Homo sapiens
tccaagagtaccttgggaagagcaattctgtggatgaaccgcagtgcaggtgcacaggcttctaatggtctcgcctggcagacctagcgtcaccccagctrgcctgaccataagactcacctgaacagttcattaaatacacaggttcctgaaggttatggtgaacttgcaactggtaggaaatgtccatatggaagagcc

SEQ ID NO: 482590 - DNA, 201 bp, Homo sapiens
ataagactcacctgaacagttcattaaatacacaggttcctgaaggttatggtgaacttgcaactggtaggaaatgtccatatggaagagcccagaatcayagtccacacacaaagctgatccctccctaccctccaccaggccctgtactccccagttcatagaggccagaaatctatgttgttaacaagaatccctggc

SEQ ID NO: 482591 - DNA, 201 bp, Homo sapiens
tctgaagaaggctaattcccagggaggacttctgggaccttgcttaccgacgaccgaggttcacctgggtgtactgggccccgcactaagtagcctgtgtmatctcagtttatttaatgctctcaactctgtaaagtaggtggtattaccttcatttaacagatgaagaaactaagatgagggctctggcccgaagctggt

SEQ ID NO: 482592 - DNA, 201 bp, Homo sapiens; identical to SEQ ID NO: 145248

SEQ ID NO: 482593 - DNA, 201 bp, Homo sapiens; identical to SEQ ID NO: 145252

SEQ ID NO: 482594 - DNA, 201 bp, Homo sapiens; identical to SEQ ID NO: 145253

SEQ ID NO: 482595 - DNA, 201 bp, Homo sapiens; identical to SEQ ID NO: 145255

SEQ ID NO: 482596 - DNA, 201 bp, Homo sapiens; identical to SEQ ID NO: 145256

SEQ ID NO: 482597 - DNA, 201 bp, Homo sapiens; identical to SEQ ID NO: 145258

SEQ ID NO: 482598 - DNA, 201 bp, Homo sapiens; identical to SEQ ID NO: 145259

SEQ ID NO: 482599 - DNA, 201 bp, Homo sapiens; identical to SEQ ID NO: 145260

SEQ ID NO: 482600 - DNA, 201 bp, Homo sapiens; identical to SEQ ID NO: 145261

SEQ ID NO: 482601 - DNA, 201 bp, Homo sapiens; identical to SEQ ID NO: 145262

SEQ ID NO: 482602 - DNA, 201 bp, Homo sapiens; identical to SEQ ID NO: 145263

SEQ ID NO: 482603 - DNA, 201 bp, Homo sapiens; identical to SEQ ID NO: 145264

SEQ ID NO: 482604 - DNA, 201 bp, Homo sapiens; identical to SEQ ID NO: 145265

SEQ ID NO: 482605 - DNA, 201 bp, Homo sapiens; identical to SEQ ID NO: 145266

SEQ ID NO: 482606 - DNA, 201 bp, Homo sapiens; identical to SEQ ID NO: 145268

SEQ ID NO: 482607 - DNA, 201 bp, Homo sapiens; identical to SEQ ID NO: 145269

SEQ ID NO: 482608 - DNA, 201 bp, Homo sapiens; identical to SEQ ID NO: 145270

SEQ ID NO: 482609 - DNA, 201 bp, Homo sapiens; identical to SEQ ID NO: 145271

SEQ ID NO: 482610 - DNA, 201 bp, Homo sapiens; identical to SEQ ID NO: 145272

SEQ ID NO: 482611 - DNA, 201 bp, Homo sapiens; identical to SEQ ID NO: 145273

SEQ ID NO: 482612 - DNA, 201 bp, Homo sapiens; identical to SEQ ID NO: 145274

SEQ ID NO: 482613 - DNA, 201 bp, Homo sapiens; identical to SEQ ID NO: 145275

SEQ ID NO: 482614 - DNA, 201 bp, Homo sapiens; identical to SEQ ID NO: 145276

SEQ ID NO: 482615 - DNA, 201 bp, Homo sapiens; identical to SEQ ID NO: 145278

SEQ ID NO: 482616 - DNA, 201 bp, Homo sapiens; identical to SEQ ID NO: 145280

SEQ ID NO: 482617 - DNA, 201 bp, Homo sapiens; identical to SEQ ID NO: 145282

SEQ ID NO: 482618 - DNA, 201 bp, Homo sapiens; identical to SEQ ID NO: 145284

SEQ ID NO: 482619 - DNA, 201 bp, Homo sapiens; identical to SEQ ID NO: 145285

SEQ ID NO: 482620 - DNA, 201 bp, Homo sapiens; identical to SEQ ID NO: 145286

SEQ ID NO: 482621 - DNA, 201 bp, Homo sapiens; identical to SEQ ID NO: 145287

SEQ ID NO: 482622 - DNA, 201 bp, Homo sapiens; identical to SEQ ID NO: 145288

SEQ ID NO: 482623 - DNA, 201 bp, Homo sapiens; identical to SEQ ID NO: 145289

SEQ ID NO: 482624 - DNA, 201 bp, Homo sapiens; identical to SEQ ID NO: 145290

SEQ ID NO: 482625 - DNA, 201 bp, Homo sapiens; identical to SEQ ID NO: 145291

SEQ ID NO: 482626 - DNA, 201 bp, Homo sapiens; identical to SEQ ID NO: 145292

SEQ ID NO: 482627 - DNA, 201 bp, Homo sapiens; identical to SEQ ID NO: 145293

SEQ ID NO: 482628 - DNA, 201 bp, Homo sapiens; identical to SEQ ID NO: 145294

SEQ ID NO: 482629 - DNA, 201 bp, Homo sapiens; identical to SEQ ID NO: 145295

SEQ ID NO: 482630 - DNA, 201 bp, Homo sapiens; identical to SEQ ID NO: 145296

SEQ ID NO: 482631 - DNA, 201 bp, Homo sapiens; identical to SEQ ID NO: 145297

SEQ ID NO: 482632 - DNA, 201 bp, Homo sapiens; identical to SEQ ID NO: 145298

SEQ ID NO: 482633 - DNA, 201 bp, Homo sapiens; identical to SEQ ID NO: 145299

SEQ ID NO: 482634 - DNA, 201 bp, Homo sapiens; identical to SEQ ID NO: 145302

SEQ ID NO: 482635 - DNA, 201 bp, Homo sapiens; identical to SEQ ID NO: 145304

SEQ ID NO: 482636 - DNA, 201 bp, Homo sapiens; identical to SEQ ID NO: 145305

SEQ ID NO: 482637 - DNA, 201 bp, Homo sapiens; identical to SEQ ID NO: 145306

SEQ ID NO: 482638 - DNA, 201 bp, Homo sapiens; identical to SEQ ID NO: 145307

SEQ ID NO: 482639 - DNA, 201 bp, Homo sapiens; identical to SEQ ID NO: 145308

SEQ ID NO: 482640 - DNA, 201 bp, Homo sapiens; identical to SEQ ID NO: 145309

SEQ ID NO: 482641 - DNA, 201 bp, Homo sapiens; identical to SEQ ID NO: 145310

SEQ ID NO: 482642 - DNA, 201 bp, Homo sapiens; identical to SEQ ID NO: 145312

SEQ ID NO: 482643 - DNA, 201 bp, Homo sapiens; identical to SEQ ID NO: 145311

SEQ ID NO: 482644 - DNA, 201 bp, Homo sapiens; identical to SEQ ID NO: 145313

SEQ ID NO: 482645 - DNA, 201 bp, Homo sapiens; identical to SEQ ID NO: 145316

SEQ ID NO: 482646 - DNA, 201 bp, Homo sapiens; identical to SEQ ID NO: 145318

SEQ ID NO: 482647 - DNA, 201 bp, Homo sapiens; identical to SEQ ID NO: 145319

SEQ ID NO: 482648 - DNA, 201 bp, Homo sapiens; identical to SEQ ID NO: 145326

SEQ ID NO: 482649 - DNA, 201 bp, Homo sapiens; identical to SEQ ID NO: 145327

SEQ ID NO: 482650 - DNA, 201 bp, Homo sapiens; identical to SEQ ID NO: 145328

SEQ ID NO: 482651 - DNA, 201 bp, Homo sapiens; identical to SEQ ID NO: 145329

SEQ ID NO: 482652 - DNA, 201 bp, Homo sapiens; identical to SEQ ID NO: 145330

SEQ ID NO: 482653 - DNA, 201 bp, Homo sapiens; identical to SEQ ID NO: 145331

SEQ ID NO: 482654 - DNA, 201 bp, Homo sapiens; identical to SEQ ID NO: 145332

SEQ ID NO: 482655 - DNA, 201 bp, Homo sapiens; identical to SEQ ID NO: 145334

SEQ ID NO: 482656 - DNA, 201 bp, Homo sapiens; identical to SEQ ID NO: 145337

SEQ ID NO: 482657 - DNA, 201 bp, Homo sapiens; identical to SEQ ID NO: 145339

SEQ ID NO: 482658 - DNA, 201 bp, Homo sapiens; identical to SEQ ID NO: 145338

SEQ ID NO: 482659 - DNA, 201 bp, Homo sapiens; identical to SEQ ID NO: 145340

SEQ ID NO: 482660 - DNA, 201 bp, Homo sapiens; identical to SEQ ID NO: 145344

SEQ ID NO: 482661 - DNA, 201 bp, Homo sapiens; identical to SEQ ID NO: 145343

SEQ ID NO: 482662 - DNA, 201 bp, Homo sapiens; identical to SEQ ID NO: 145342

SEQ ID NO: 482663 - DNA, 201 bp, Homo sapiens; identical to SEQ ID NO: 145347

SEQ ID NO: 482664 - DNA, 201 bp, Homo sapiens; identical to SEQ ID NO: 145346

SEQ ID NO: 482665 - DNA, 201 bp, Homo sapiens; identical to SEQ ID NO: 145345

SEQ ID NO: 482666 - DNA, 201 bp, Homo sapiens; identical to SEQ ID NO: 145349

SEQ ID NO: 482667 - DNA, 201 bp, Homo sapiens; identical to SEQ ID NO: 145348

SEQ ID NO: 482668 - DNA, 201 bp, Homo sapiens; identical to SEQ ID NO: 145351

SEQ ID NO: 482669 - DNA, 201 bp, Homo sapiens; identical to SEQ ID NO: 145354

SEQ ID NO: 482670 - DNA, 201 bp, Homo sapiens; identical to SEQ ID NO: 145358

SEQ ID NO: 482671 - DNA, 201 bp, Homo sapiens; identical to SEQ ID NO: 145359

SEQ ID NO: 482672 - DNA, 201 bp, Homo sapiens
ctttcaggaaccagacactggaacatgtcgtctgatgtacatcacaccagtaagtactttcttatgttgatattgagtcattctttcagtgaacattttcygcgtgcctattgtgtgccagtcatggtaccacacgctgggaatccaatggggagtaagagaaagtcccttttcaaggagcttacagtgcagtggaagaga

SEQ ID NO: 482673 - DNA, 201 bp, Homo sapiens
aggcacatgctaggccagagatgcaaaaaatcaaaagaatcaagtcaaacacaagcacagaaaggtgcaaatgtgtctttccaccgataatggtctcaacrttggtgatttggcttctgaaaaacaaagtatcctcatattaatagcattaattcaaatgttattgattttttctagtttttaacttaatttgtatgtctt

SEQ ID NO: 482674 - DNA, 201 bp, Homo sapiens
tcaggccctggtctgcggcttggaagtttcctgtgaataagaaaaacatcatcgcttcttgagtcacaaggatgataggatgagaaaaagaaaggacaaakgcaccagaggaggtatgccaaatgggaaacttttcatcactttccagataaaaactagcagtctgtgaaggcaactggtctgatttttcaggtaagaaca

SEQ ID NO: 482675 - DNA, 201 bp, Homo sapiens
tctacatgggtacgtttatctctctgtgccccttagagtacattctagcacttttatgggtacaccttctgatttggctagtgaggtacaacttaaattcyttttgaaacataagtttcttcagggcaaaagcccttgctcctttatctttttttttttgagatggagtctcactgtgtcacccaggctggagtgaagaga

SEQ ID NO: 482676 - DNA, 201 bp, Homo sapiens
agtaaaatacaaagcagggacatgattaatttaggccaaaataacgtatgtggctcctaacaatttccacccggtgtttggaataaacaatcttgctatcttttttttttctttttttcctgtggcagagaaataaaaaaagaattggaaagccaatgtccaattatttactaaaacagaatccactggagagaaatgcaa

SEQ ID NO: 482677 - DNA, 201 bp, Homo sapiens
agtggcacattcacaaataaacgttttcaaaaactgccctcaggcagttctagagaaatgctttgacttgcctaatggtataatgtcaagaaaggaagacsagcactgatcattcatactcattattacagtcacagggcactgtctgacttgacagatacagccgagcagttaaaaggttatgggaatttaagtccatta

SEQ ID NO: 482678 - DNA, 201 bp, Homo sapiens
cactggtgagcacagggtggggaccatggcttcttgctccctccttccttcccctttcctgctcttctctgcctttttttccctttcttcttctttccctycctcaacctccttttttctgccttctcccaccccttgtcttcctgttcttaccttcttctctttatttccctagcctccttctcaccttcccaccttata

SEQ ID NO: 482679 - DNA, 201 bp, Homo sapiens
taggtgtagcaaaccaccatggcacatgtatacctatgtaacaaacctgcacgttctgcacatgtgtcccagaacttaaagtaaaataaaaaataaaataaatatatataatatatatatatatatatatatataattttataatttgtccctagataaggcatttctagtcttccctgtttgacttctagccactccttc

SEQ ID NO: 482680 - DNA, 201 bp, Homo sapiens
tcatacctgagcctgtggtgctgaggtcctgtgactatcagactcaggaggtgagctggctatttgtccccaaagctcagaaccagagaccattaggaggygggatttactcctccagctgatattcattttatcatagcacctcagctgagcagcagctccatggcttatctctcctttagtattgcaatggcttctact

SEQ ID NO: 482681 - DNA, 201 bp, Homo sapiens
aatagctaaaatgtgaaaacaaccaacagcccattgacaaatgagcaaatatgcaaaatatatgtatatacatacatacacacaacgaaatatcattcagycttaaagaggaaggacaatctgacacatgatacaacacggacgaaccttaaggacattatgctaagtgaaataagccagtcacaaaaagacaaatatgag

SEQ ID NO: 482682 - DNA, 201 bp, Homo sapiens
catggagaaactctgtctctactgaaaatacaaaagttagctgggtgtggtggtgggcacttgtaatcctagctgctcaggaggctgaggcaggagaatcrcttgaacctaggaggtggaggttgcagtgagccaagatcacgccactgcactccagcctggacaactgagcgagactctgtctcaaaaaaaaaaaaaaga

SEQ ID NO: 482683 - DNA, 201 bp, Homo sapiens
caaaccaccatggcacatgtatacctatgtaacaaacctgcacgttctgcacatgtgtcccagaacttaaagtaaaataaaaaataaaataaatatatataatatatatatatatatatatatataattttataatttgtccctagataaggcatttctagtcttccctgtttgacttctagccactccttcatctctctg

SEQ ID NO: 482684 - DNA, 201 bp, Homo sapiens
ttggttttgttctacatcatggatgacaagtccatggcctttgtgcttaattgatggtgacaatctttcccatgaatccttcccaagcccacctcccaggyggtcactaccaatttattggggttaaaggaaagttacccttatgttacccttatttcctatccttgctctggattctggagactagctggtcccagagga

SEQ ID NO: 482685 - DNA, 201 bp, Homo sapiens
atgtgcttactgagtgtccattcaatgccaagcgtggcgctgggtcctaaggatatagtggggagcaaaatggtgaaacctcttcccagggagcttccacktaagcagctcttcagaaaaaataatccaaagaacccaaactgcaatgctttctaccccctctacagctaccctagaaaggcagtgtgggatgtggttaag

SEQ ID NO: 482686 - DNA, 201 bp, Homo sapiens
ccaccatggcacatgtatacctatgtaacaaacctgcacgttctgcacatgtgtcccagaacttaaagtaaaataaaaaataaaataaatatatataatatatatatatatatatatatataattttataatttgtccctagataaggcatttctagtcttccctgtttgacttctagccactccttcatctctctgccct

SEQ ID NO: 482687 - DNA, 201 bp, Homo sapiens
ggaggctgagacagaagaattgcttgaacccgggaggcggaggttgccgtgagctgagatcgcagcactgtactccagcctgggcgacagagtgagactcygtctcaaaaacaaaacaaaactaaagaaaaaaaaaagaaaaaaaaaacaaagaacagcaaatccaatggccaaatgcacatgtcaggagtgggcctggca

SEQ ID NO: 482688 - DNA, 201 bp, Homo sapiens
caccatggcacatgtatacctatgtaacaaacctgcacgttctgcacatgtgtcccagaacttaaagtaaaataaaaaataaaataaatatatataatatatatatatatatatatatataattttataatttgtccctagataaggcatttctagtcttccctgtttgacttctagccactccttcatctctctgccctt

SEQ ID NO: 482689 - DNA, 201 bp, Homo sapiens
aagcaccagggagcatgtgaccacaggtaacatctctgctgagagctgggcctctgggctcaggcaagctggcctctccagcatttggtcagagcacttarcattaggtctgcttcctccatccagactacccttccaaggtgacttgcttcatttagactgttgcttctgtgtggggttcgcaggccagagatggggtta

SEQ ID NO: 482690 - DNA, 201 bp, Homo sapiens
gttctgggggcttcaccattgatacctgtgtcatacttgtaaatgacctgtttggggttgtgggctccagaaaggctgcatgccagtgcctgtctgtctgmtgagtcatggctgtcttcagcccccagcactgggcctgaaacagtagaggatcctgagagtggtggactgatggttgagaatttgatcccagtccagctc

SEQ ID NO: 482691 - DNA, 201 bp, Homo sapiens
agcctttcccagacttgctttcacagaacatcttaggagctgctgttccatggcacccagtttgggaattgctgacctggtcccttctccaagttcacacrtggtgaatacccttctctgctggggttttcaggtagaaccttcgcttctctagagttggctttcagtggtgttcttgttaaggaaaaaataatccttggc

SEQ ID NO: 482692 - DNA, 201 bp, Homo sapiens
cacacagttagctccatttggctagcagcagtgtctgagatctggaatcactgtttttctggccagcggacccaagtttcccctatcagccctaggctgckggaggtctactacacttacacagacagacatggtactcaccattctgcccatccagcagagagcaggaggcctgcccatgtagtttgctgggtttctgag

SEQ ID NO: 482693 - DNA, 201 bp, Homo sapiens
ctgcaccaagtagatttcccattgcttccagtgttccacctgcagaagggcctgtctatctggggaaacctgctgctgccaaggcccctggggctgggggsccttcaaggccagagatgccagtaggggctgcacgggaagagcctcttcccacaaccacccctgctgccatcaaggaggctgcaggagccccagctcctg

SEQ ID NO: 482694 - DNA, 201 bp, Homo sapiens
gggattacaggtgtgagccactgtgtctggaacattgattgatttttggatgttcaatcaaccttgcattccagaaataaagcccaatagaaggatgtacratacttctaatatgctgctgaattcagtgtgctagtattttcttaaggatgtttgcatctcttttcataaggaaaattgatctgtagttttcttgtagta

SEQ ID NO: 482695 - DNA, 201 bp, Homo sapiens
agtccagtcttcggctggttcagtacccagagctgcaatgttcccttctctgaatgtgggaggagaaaaaggagggacactgtgcacagagcccctaccayggggccaacacagtaggggtccccagcaaaggaggggccaaagccagggccagtgccctggctttcaaaccatctgccatcccctgcagggctctcacag

SEQ ID NO: 482696 - DNA, 201 bp, Homo sapiens
atcccatagccctcggaccctcctcttctccctccttgccccttcagggtgcttctcacggtgcacaagcatgtatgtgttatccatggcggggcctggckgtcagtgagcaggtcacttcaagggagccctggggctggcagatgctgggcccgggccagcactggttgtgggagggaaggagctaggtgtgatacctca

SEQ ID NO: 482697 - DNA, 201 bp, Homo sapiens
gtgagtatccctctcctgaaattctttacggcaatttcagagatgggcttggagaggtttgccatttcaaaccaaatcccttctccatcactcttaagccaaaaaaaaaaaaaaaaaaggaacttttgttacattaaaagaagtgtcccttcctggctgacctgattcttctttcttgctgtcctctctgtgacctccaac

SEQ ID NO: 482698 - DNA, 201 bp, Homo sapiens
tttgtagttttggtagagatggggtttctccatgttggccaggctggtctcaaactcctgacttcaagtgatccacctgccttggcctcccaaagtgctgrgattacaggcatgaaccgccatgcccagctgtagttcaagtgtaaaggtcatgaagatgcgttcagacattcaagaactcaggaaacgtggtttctatga

SEQ ID NO: 482699 - DNA, 201 bp, Homo sapiens
gcatctgcactgtgcctcaccatgtggatatgccatggtttatctatggacattgggctgtgtccagtcttttgctcttacaaaaagaagcacagtgaggmatctggaaaatgtggcattttgtaattttaccagtgtgtctgtgcgatagtttcctagaagtaggattgctgaagcaaaatggtaaatgtataagttgtt

SEQ ID NO: 482700 - DNA, 201 bp, Homo sapiens
ggtactgccagtcccagcgcagatgcactgcagacactggcaactggagagtgtcctggggatcctgtgtgggctgggtagtatgcctggagctgctagtrtagtcacgctgagcctggttgaggaggtccagcagcctgggtgctgtgtccagggcgtgtcggcaggatgcgttgttcctcagcttcccagtggacagag

SEQ ID NO: 482701 - DNA, 201 bp, Homo sapiens
agtggaaaagctgaaacccacacagaatgctttaaacagaacatatctgattaaatactgtgaaaccagtttgttttaaatgtatgccaacccaggtcctscaaaaacagtcaagtggcaatgaaggctgtaagggaatgccaatatataataagtcagtagactgaaaactcaggaaaactactaagagatgacacgata

SEQ ID NO: 482702 - DNA, 201 bp, Homo sapiens
acagcaattaattattccagtcggtgagctttgagaagtggtctgcagctcagccccatgtgggttgcaggtcatctggagtgaccatggaagtcatttakcaggagtttaagaggcgagggccaaggacttgcaggccaggataaaggggcctggagggagggcagcagaagccaggaggggaagctgggcatgaaccaa

SEQ ID NO: 482703 - DNA, 201 bp, Homo sapiens
ggtattacaggcacccaccaccagacccagctaatttttgtatttttagtagagacggggtttcaccatgttggccaggctggtctcaaactcctgagctsaggtgatctgcccgcctcagcctcccaaagtgctgggattacaggcatgagccactgtgcctggccgagaaatgctatcttaaacattttttttttacta

SEQ ID NO: 482704 - DNA, 201 bp, Homo sapiens
agtcagacctggcgtcctaccccccacctgcagtcagcagcagcctggtctctcggggcaggaagttccaggatgaaatcacctatgggctcaagaagaaygtgtatgagcagcaaaaatactatgggatgtccagccgggacgcagtggaggacgaccgcatttatggcgggagcagccggtcccgggcaccttctgcat

SEQ ID NO: 482705 - DNA, 201 bp, Homo sapiens
attttgagcattgtatccaacccccaacaaatgccagaatgtctgctgtcatactctgtaggggctacagctctcccttggtgtgaacacccaagatcagyggcctttggttcttctcaggcagatgattctactgctggagagttcttttttcctgtttgtctgaatcaggtttccttacacctcctatctgctggtctt

SEQ ID NO: 482706 - DNA, 201 bp, Homo sapiens
gctggacagtgcaggggtgacagggccacatccacccagcccctccgagatccacaaggtggggagcagcatgcggcctttgctgcaggcccagggcctgrccccaagtgagcggagcaagccactctccagcggtactggcgaggagcagaagcagcggccccactccttgtccatcacgcctgaggcctttgactctga

SEQ ID NO: 482707 - DNA, 201 bp, Homo sapiens; identical to SEQ ID NO: 153750

SEQ ID NO: 482708 - DNA, 201 bp, Homo sapiens
aaatgagcaaatatgcaaaatatatgtatatacatacatacacacaacgaaatatcattcagccttaaagaggaaggacaatctgacacatgatacaacayggacgaaccttaaggacattatgctaagtgaaataagccagtcacaaaaagacaaatatgaggtggtcagagtagtcaaagtcacagagacagaaagtag

SEQ ID NO: 482709 - DNA, 201 bp, Homo sapiens
acgcataattttttattctttggctgcccgactgtgcctcttgtgtgtttatttcctcagaagtcatttcttagacaactaacagtaatgaaaggctgttrgtagcttgaaacctgcggcagacaggtcagcctgtgagcatcctttttagaggtgggatttgtccattttatactagctataatagtaatgcagttggat

SEQ ID NO: 482710 - DNA, 201 bp, Homo sapiens; identical to SEQ ID NO: 153754

SEQ ID NO: 482711 - DNA, 201 bp, Homo sapiens
tcttacctcatccattccaaggtctggactttgctgaggccaagccaaggatatttaacccataccatccccaactcctacccaatggcaaaccatgagcytacgcagtttcccagggtgggcggcgtggagaagggagggagacagtgcagtggctccgagcctctctctcccctgcctgcatcccactgctttccggca

SEQ ID NO: 482712 - DNA, 201 bp, Homo sapiens
agccgcagctgcaaggtcggcaggcagctccaggaccacagcagtcacagtcaccatcatccaggcaaataccctctggggcagcatcacgccagccacasacacagcagcagcagcaaggtcttgggctgcagcccccacagcaggctctgacacaggctcggctgcagcaacagagccagccaaccacccggggctcag

SEQ ID NO: 482713 - DNA, 201 bp, Homo sapiens
ttaggttcagcctccactccccagatcctgacctcagatgttgggcaggttcccaagaccttcctcagggctctgatagattggcacaggcctcccctggstggtccagctctggatcagtgtgaccctgcccactgggaccctgtggtacctgcttcctaagcctgaggtcagctagctgacagtaaggtgctagatggg

SEQ ID NO: 482714 - DNA, 201 bp, Homo sapiens
acaggtgtgagccaccgcacctggccaaaggagagcattttagattgtgtggccagaggaggtcctggtgggaaagtgttacctcatctgaaatctgtacwacaagctgggccagggggcagagggaataaggagtacaaaggccctggtacagaaatgagctcaggggaccacttggcagagcagacagcctagagtgtc

SEQ ID NO: 482715 - DNA, 201 bp, Homo sapiens
cttctagccaggacatcctcctgctatgattgctgggactggttgttctgtctttcctgtcccctctaactcctccccagctttttcctctgggctccaayaggagctcactgcccctccctgctttggggttgtttgtccagctagttgctcctgccactatgagagggcaccaaaatagttgttgcccccatgaggaga

SEQ ID NO: 482716 - DNA, 201 bp, Homo sapiens
gcatgagctgttagaagttggggtcagatgaggagcctcaggtatccctgccaacggcactgcaggaagaggaaaaactgcctggataggaggagccacayggtagagtgctttgaaggctgtgggcaagggtgtccagggtcgggtggtaaccctgcatatgctgctgtgcctgacatgcatatggtgggattaggtggg

SEQ ID NO: 482717 - DNA, 201 bp, Homo sapiens
cgcccggctaattttttgtatttttagtagagacagggtttcaccatgttagccaggatggtcttgatctcctgaccttgtgatccgcccgcctaagcctyccaaggtgctgggattacaggcatgagccaccgcgcccagccaccttgcattttcatgggctcctcagatccctcagctgtgtgtgcagaagaaaggagg

SEQ ID NO: 482718 - DNA, 201 bp, Homo sapiens
gtttgtccagctagttgctcctgccactatgagagggcaccaaaatagttgttgcccccatgaggagaggtagagaggtagcagcagtactttctctctgktttttttttttttttttgagacggagttttgctcttgttgcccaggctggagtgcaatggcgcaatcttggctcaccacaacctctgcctcctaagttca

SEQ ID NO: 482719 - DNA, 201 bp, Homo sapiens
ctcctcagatccctcagctgtgtgtgcagaagaaaggaggaaggccggtgaataggcagcctctgccaagtacctcttttggggatgactctcaggtactycgagactgggggaggccaagtctcagagtacctgagggacccaggctcatggagacttctccactccgtctttcctaggtgcaatgccagggtcttggat

SEQ ID NO: 482720 - DNA, 201 bp, Homo sapiens
tcagcctcccgggctcaagcaatcctctcacctcatcctcccaagtagctgggactagaggtgtgcgtcgccacatctggctaatttttgtatttttgtattttttttttttttttttgtagagatggggtttcgccatgttgcccagactggtcttgaactcctgggctaaagcgatctgcctgcctcagcctcccaaag

SEQ ID NO: 482721 - DNA, 201 bp, Homo sapiens
gagctggcatgggctgagtgaggcagagtacgagagggctgtgcaatgaatggatggctgaatgaggaatgaacactgaaattgcggaatggaaacgagcrgaagaataagggaatgaatgattgggatggaggtaggggtatgttggggttggagaaaatgagaatagaatgaataaaggaattgggaccccagctgtcc

SEQ ID NO: 482722 - DNA, 201 bp, Homo sapiens
tgggattacaggcatgagccactgcgcccagcctttctgtttttgagatggggtcttgctccgttgcccaggctggagtgcagtggtgcagtcacagcccrttgcagcctcagcctcccgggctcaagcaatcctctcacctcatcctcccaagtagctgggactagaggtgtgcgtcgccacatctggctaatttttgta

SEQ ID NO: 482723 - DNA, 201 bp, Homo sapiens
tatatatgcgtatatatatatttgagacagagtcaaatatatatacatatatatgtgtatatatatagtatatatatgtatatatatgtgtgtgtgtgtgtatatatatatatatatatacaagtaagacacagacacattcttggagtaatattcaaacaattcagtcatatattgaagtacaacgtccactgccccttt

SEQ ID NO: 482724 - DNA, 201 bp, Homo sapiens
ggtgagatgctctgatttacatgtgggtttttggagaaaaattattgggtcatgtaactggaagtccaagggtagacttggggcatagccagatccagggratggaatgaagtcatcagatctactcctttctcctttcgttgactcctaccatctatggacatcattcttagcatctctctgtatgttgggaaagaagac

SEQ ID NO: 482725 - DNA, 201 bp, Homo sapiens; identical to SEQ ID NO: 153769

SEQ ID NO: 482726 - DNA, 201 bp, Homo sapiens
gagtttgagaccagcttgggcaacatggtgaagccccatctctactaaaaataaaaaaataagccagacgtggtggtgggcacctgtgctcccagctgctygggtggctgaggcaggagaatcgcttgagcccaggaggcggaggttgcagtgaatcaagatcgcactactgggtgacagagccagactgtgtctaaaaaa

SEQ ID NO: 482727 - DNA, 201 bp, Homo sapiens
acaactcattctgactgaattcgccccagggcaactggcagtgcctcaggtcaggaagggtcatggagcatgaaacaatacaagggaaagggcaccagctkggggaaggagagacctaggtaccaatccttgctctgccttgctctgccttatatgtgtcacttcctctctttaaatttttttttttttttttttagccag

SEQ ID NO: 482728 - DNA, 201 bp, Homo sapiens
tgcagtgggtcctctgtgttctatgcccagtgtgccagccaccgctaccacacagagcctctgcttctctgatcaatcacccgagcccgtgggtcattcawtccacaaacattcactgagccctgctctgggccaggccctgtgccaaactctgaggactctgtggtcactgtgtgtagaggaaagccagatggcccactt

SEQ ID NO: 482729 - DNA, 201 bp, Homo sapiens
ttgtttaggatgggagaagcttgtttgtatgataattgaaatgatccaatagagagggggaaatggatgatgaaggataggggagaatttgtgaaggtgasaagtgggccttgggattgggaggcaggtgaacactgggggacaggagtagggaggctgaggttgtgcaggtttcttctggtgggtcccactttttttgtg

SEQ ID NO: 482730 - DNA, 201 bp, Homo sapiens
gcagttggggtgggcagtggggatgggagtgagttgctggggaatatgaaccgtggcctggggcaggcatagcctgcttctataggcttctcagggacttmcatgccccactcagagcagccccagaagcacatcctggcctggagctcctgcagatgccagtctgtcctcatcctcagaacagcatcccaggagtgactg

SEQ ID NO: 482731 - DNA, 201 bp, Homo sapiens
ctaagggtttggttttgttctacatcatggatgacaagtccatggcctttgtgcttaattgatggtgacaatctttcccatgaatccttcccaagcccacytcccaggtggtcactaccaatttattggggttaaaggaaagttacccttatgttacccttatttcctatccttgctctggattctggagactagctggtc

SEQ ID NO: 482732 - DNA, 201 bp, Homo sapiens
cctgccggagggcccctccctcccggcggggatacctgcccacagttctgctccagccactccatgcctgatgtccaggaacatgtcaaggacggacctcrggcccacgcatataagcgtgaggagggctacatcctggatgattcccattgcgtggtttccgacagcgaaggtaatggcagccaggggtgatttctgcgg

SEQ ID NO: 482733 - DNA, 201 bp, Homo sapiens
gttttgttttttgtttttttttttttttgagatggagtctcgctctatcgcccaggctggagtgcggtggcgtgatcttggctcactgcaaactccgcctyccaggttcacgccattctcttgcctcagcctcctgagtagctgggactacaggcacccgccaccacgccttcctaattttttgtatttttagtagagaca

SEQ ID NO: 482734 - DNA, 201 bp, Homo sapiens
cagccttcccgggcatattcctactttgcaagctccagcccacctctctccccgtcttccccctcagagagtcccacattctcccctggcaagatgggccyaagggccacagcagagttctctacacagacgccaagtccagcccctgcctcagacatgccacggagccctggtgcccccactccatcacctatggtagcc

SEQ ID NO: 482735 - DNA, 201 bp, Homo sapiens
gagccctgaccccttccacctcccccttttgtatttggatctgtattcacatcctccatcccaggtaccccactctgttctctggaactatcaagctaccytgagtccccagcaccttccccagacattccttctgctgggtaaaaacctgaccatgccaaaatattatttgcaggctgggcacggtggctcacacctgta

SEQ ID NO: 482736 - DNA, 201 bp, Homo sapiens
tgatctttgcttatatcctgcaccataaggcaagtcctatgaattgagtggccttgtgtgccttgctcactacgaggtagccagcatctgcagtgcagccyagtgccagggaccgtgaagctcccagtgaggacctgacatgcagtaaagccacacacttgtggtgctctggccaccattggagccctgaccccttccacc

SEQ ID NO: 482737 - DNA, 201 bp, Homo sapiens
tactttaaaatttcttttgtgatttcttctctgacccatgagttatttaggaatgtgttgttcaatttacacttatttgtgaattctgcaaatttatttckgttattgatttctaatttaattatattgtgttcagaaaacattcattgtatgatttcaagtcttttcaattttttgaggtttgttttgtggcctagttta

SEQ ID NO: 482738 - DNA, 201 bp, Homo sapiens
atatatgcgtatatatatatttgagacagagtcaaatatatatacatatatatgtgtatatatatagtatatatatgtatatatatgtgtgtgtgtgtgtatatatatatatatatatacaagtaagacacagacacattcttggagtaatattcaaacaattcagtcatatattgaagtacaacgtccactgcccctttt

SEQ ID NO: 482739 - DNA, 201 bp, Homo sapiens
tcatcaaatgtgggaacttttcagacatgatttcttcaaacattttttatgttcctaatttatgtcttttccttgtattcccatatgttgatatacttaayggtgtcccacatttctttgaggccctgttcatttttctttattcttttttctctctgttcttcagattgcccagtcttactgatctatatttgagttctc

SEQ ID NO: 482740 - DNA, 201 bp, Homo sapiens
cgtaaggtagatttgcccattttcagggtgtgacacagagacgagaaaagtggagccttagaatggggtttgtggaggtgataatcttgggtagtgaagtsttggtgtatgcaggccatataggggtgtgggtgggatcaggactctaggctggcagggagggcaggtcagagaggcagggtggtcctggctgcaggcaca

SEQ ID NO: 482741 - DNA, 201 bp, Homo sapiens
caaccatcaccactatctatttctaaaatttttaatcaccccaaactctgaccattaaccagcacctccccattgacccctttcttcagcgcctgttaacttttttttttttttctttttgagacagggttttgctctcatcactcaggctggagtgcagtggtgtaatcttggctcactgcaacctctgcctcccgggct

SEQ ID NO: 482742 - DNA, 201 bp, Homo sapiens
ccacagcaccacagccacatctaaataagataatgatctcttcttaaactcagcaaatattcagtcaggattctacttttctgattgtcttatgaatttayttttattattggtttgaattgtgatctaaacagggtctacacattgaatttgtctgatgcatctgtctagtttctttatgtattttctctcctttttgct

SEQ ID NO: 482743 - DNA, 201 bp, Homo sapiens
aggtcagagaggcagggtggtcctggctgcaggcacagaggtcccatgggctggccatgtgagaccaggccatgataggcactcatgatgcgtggccaaartaagaaaagagacaacagagtgaggggttcaaaaggctaaatttattccataaaaggcccaccctgaaattttgagggcacactataatttttattatga

SEQ ID NO: 482744 - DNA, 201 bp, Homo sapiens
ctaaacttggctatgcacgttgggtatgtccttggttttttcatctgtaaaatgagagatttaactagatgatctccacagtcccttccagctctgacagytgatttctgtgaaatgtgtaaaaaggaagggtgatgcttcccatttttcttcagctctattgagcatagaaaacaaggtctaaatcaaaagtacattgtg

SEQ ID NO: 482745 - DNA, 201 bp, Homo sapiens
cgtgggtgaggaggtggccgctagcacaggcagatggctgagaggaatgtgagggtgagaagcagctatctacaattcttgacagaatcctttcttttctyctttccttcctccctccctccttttctctttcaagcatctacaatctggcaaacccttggcccaaagactcaccaggtgggacgtggcaggcaggcctca

SEQ ID NO: 482746 - DNA, 201 bp, Homo sapiens
tataaagccagagaagcagagctatggaagcagtggggtctgctctagacaaagtgctcagagcagaagatatgtgagggaagcttgagggaggaggacgrctgcggtgggatgaaaaaaggggagggaacagcactgacggatgatcggatgctgggatgggaccagggacagggcaaaggccagtatagccagggccac

SEQ ID NO: 482747 - DNA, 201 bp, Homo sapiens
atccttttaatttatttaagattggtagtaacatcctttcttttatttctgattttagtcatttgaatctttttttctttgttaaaagaaggcttattgatttttttttttatcttttgaaagaaccatcttttggttttattgtctttctctattttctattctgtatttcacctctaatctttattattttcttcatta

SEQ ID NO: 482748 - DNA, 201 bp, Homo sapiens
tagagaactatgacatttgtcctgtggtttctcatattcaggattatgctgattgcatccctgtggtgtcatttaagatgttcctctgtcccatgtttttsttgtaaactgagaattctgtctagaagctaatcagattcaaattttattcttttggtcaagaaattctagctttttaaaaaagagtttattgaaggcttc

SEQ ID NO: 482749 - DNA, 201 bp, Homo sapiens
ggacagtgctgccgtgagtatccctctcctgaaattctttacggcaatttcagagatgggcttggagaggtttgccatttcaaaccaaatcccttctccawcactcttaagccaaaaaaaaaaaaaaaaaaggaacttttgttacattaaaagaagtgtcccttcctggctgacctgattcttctttcttgctgtcctctc

SEQ ID NO: 482750 - DNA, 201 bp, Homo sapiens
aacctctccttcaggagcacttctagctgacttctgcacaagctagtgaggacctgccagaattgttgcctgagcgtgccaggctgcagggcaggcagtaraaggcccccacataccctgcagttttctctgtccaggacagcaggtaaaaaggaatccccagagcagacgcaatggtaggagcctgcacaggatgtgtgt

SEQ ID NO: 482751 - DNA, 201 bp, Homo sapiens
ccacgcactgcaagctccgcctcccgcgtttacgccattctcctgcctcagcctcccgagtagctgggactacaggcgcctgccaccacgcctggctaaattttttttttttttttttttgtattttttagtagagacggggtttcaggatggtctcgatctcctgaccttgtgatccgcccgcctcggcctcccaaagtg

SEQ ID NO: 482752 - DNA, 201 bp, Homo sapiens
aattgggccctttcctcttgttagttgtgggggtgtggaaggccagacctactatgtgtgggctatgtgaggggaacctgttgctggagcctgtgggccaygtgcagtaagttggggctaactgtgaaggtaggttggcaacactgtaatagcagttatgactaccattactgaatgactgcctcatcacagacattctgc

SEQ ID NO: 482753 - DNA, 201 bp, Homo sapiens; identical to SEQ ID NO: 153781

SEQ ID NO: 482754 - DNA, 201 bp, Homo sapiens
gattcttccagctttgttctttttgcttaggatagctttggctgttctgggtcttttgtggtttcatataaattttaggatttttttttattctgtgaagmatgtcattgatagtttgatagggattgcttttaatttgtagattgctttgggtagtatggacatttaaacaatattgattcttccaatccatgaatatgg

SEQ ID NO: 482755 - DNA, 201 bp, Homo sapiens
agttttgcatcatgaattttggggctctgttcttaggtctatgtatgtgtatatgtttacaaatgttatatctttctaatggattgacctctttatcaatyttcaatcttcattttctttttctttctttctttcttttttttttttgagatggagtctcactctgtcgcccaggctggagtgcagttgcgcaatctcagc

SEQ ID NO: 482756 - DNA, 201 bp, Homo sapiens; identical to SEQ ID NO: 153784

SEQ ID NO: 482757 - DNA, 201 bp, Homo sapiens
ctataacccaatacccagtccatatttaatttttctttattgttccaaaaatgacattttattttatttaatgtatttttttttgagacggagtctcgccytattgcctaggctagagtgcagcggcgccatcttgactcactgtaacctccacctcacgggttcaagcaattctccctgcctcagcctctcgagtagctg

SEQ ID NO: 482758 - DNA, 201 bp, Homo sapiens
gaaatgtgaagagggctggcactggggccaaagctccttagaagtctgtggaaaggtggttgagaatttacctgtccagttagacgttccctcagaaagcygagcctagtaggggaacacatggagatacctggttggcctagaacactcttaaaaagtgccccagtcactgtagactggaaaggccaggaaggtcttagt

SEQ ID NO: 482759 - DNA, 201 bp, Homo sapiens
cctaagaccctgtcatttcttcctctgggatgtccttcccagggccttggcatggcctctcccaatatattaatatttgcaggctgggcgcggtagctcaygcctgtaatcccagcactttgggaggctgaggtgggcagatcacctgaggtcaggagtttgagaccagcttggccaacatggtgaaaccccatctctact

SEQ ID NO: 482760 - DNA, 201 bp, Homo sapiens
ttttattagagatggggtttcactctgttagccaggatggtctcgatctcctgacctcgtgatccacctgccttggcctcccaaagtgctgggattacagrcgtgagccaccacgcccagcctcattattgtacttttcaacaacagaatttctagtttatttttataatttctctttattgataatctgtatctgataag

SEQ ID NO: 482761 - DNA, 201 bp, Homo sapiens
tttcttagcagtggcctcaactaggacacatatgccaaggggttgaggaatacgggagggacaaggcagaacatatggaaatttctgtttatatttattgkctatctcatcttttaaaacttttccacttggggaggtgggttttataaaaaatatgcatttatataattggtagatgaatattcatatgttggagatgct

SEQ ID NO: 482762 - DNA, 201 bp, Homo sapiens
aaacgccacatgaaccactactgtatacctactggtctctttctagaatttggcctgaggtgggcctggtgcaattcttagtgagacactacaagaatatrgatgtcacttgaggcaggtctaagggtttggttttgttctacatcatggatgacaagtccatggcctttgtgcttaattgatggtgacaatctttcccat

SEQ ID NO: 482763 - DNA, 201 bp, Homo sapiens
agccctgactctggaggaggctactgggagacatgcccctgtcagcctcagacctgctgcaggaatcacccatttaggcctcagagatgcccaaaccctaygcctgtacaaagcagctggggctgggagacatggacttcgcttcttgtgttctgggggcttcaccattgatacctgtgtcatacttgtaaatgacctgtt

SEQ ID NO: 482764 - DNA, 201 bp, Homo sapiens
ccgctcaagagcgctgaggaggcttatgaggagatgatgcgcaaagctgagctgctccagaggcagcaaggccaggcagcaggggcccggggaccccatgrcggcccctctcagcccacaggcccccggggcctgggctccttcgaatatcaagacactacagaccgtgagtatggccaggctgctcagcctgccgcagag

SEQ ID NO: 482765 - DNA, 201 bp, Homo sapiens
ggcaccctgggggtaccaggcttccaaggctgccagaggcagcatgtgaagtgagggtactgaggttgtcagccttcctgggggtggcaagggccaaaggycacctccttttccagtcctctggctctgtgaccttgtggttcttatggtccacctcggtggcagagttgctggtgggagcctgtatgtccaggcacctgg

SEQ ID NO: 482766 - DNA, 201 bp, Homo sapiens
gatccaacagcctttggcctcctgaagtgctgggattacaggcatgagccaccatgcctggccaatcttcattttatttttccttctttctttttctttgttttttttttttgagatggagtctcactctgtcgccaggctggagtgcagtggcgcaatctcagctcactgcaacctccgcctcccaggttcaagtgattc

SEQ ID NO: 482767 - DNA, 201 bp, Homo sapiens
cttcagtgtgtctgttcatgttttttgctgttttctaaatttttttcttctgttgagttttgagggttctttatatattctagatactagttttttttttkttttgttttgttttttgtttttttttttttttgagatggagtctcgctctatcgcccaggctggagtgcggtggcgtgatcttggctcactgcaaactcc

SEQ ID NO: 482768 - DNA, 201 bp, Homo sapiens
tggccaggatggtctcgatctcctgaccttgtgatctgcctgccttgacctcccaaagtgctgggattacaggcgtgagccactgcgcctggccacaattyttttttttttttttgagatggagttttgctcttgttgcccaggctggagtgcaatggcacgatctcggctcactgcaatctccacctcctaggttcaagc

SEQ ID NO: 482769 - DNA, 201 bp, Homo sapiens
agaacagccagctagcagactttagcaaaccaaaatgccgaatgctgtggagaactgtgtcacttccccgcctcctcctctgtgaagatgggagatttagcaagatgatgggaaaggctttgaggagtgggaaagggtcagaaagtaggacatttgagcaaagggcagggtaggatgatgtggaggaagaagaatagtgga

SEQ ID NO: 482770 - DNA, 201 bp, Homo sapiens
gtgtcccacatttctttgaggccctgttcatttttctttattcttttttctctctgttcttcagattgcccagtcttactgatctatatttgagttctctrtttctttctcctaccagctcaaatgtaggatttttttcatttccattaatgtacttttcttttctgtttttagagacagggtcttgctctgtcacctggg

SEQ ID NO: 482771 - DNA, 201 bp, Homo sapiens
tcaagccaaactccatggctggagcacaggattttgggaccagcataggcaacacagtaagaccctgtctccacaaaggtaaaaataaaaataaaaaaaattagtcggttgtggtgaagcgtgcctgtaatctcagctgctctgtaggctgagacaggaggattgcttgagccagggaggtcgaggctctagtgagctgca

SEQ ID NO: 482772 - DNA, 201 bp, Homo sapiens
caagccaaactccatggctggagcacaggattttgggaccagcataggcaacacagtaagaccctgtctccacaaaggtaaaaataaaaataaaaaaaattagtcggttgtggtgaagcgtgcctgtaatctcagctgctctgtaggctgagacaggaggattgcttgagccagggaggtcgaggctctagtgagctgcag

SEQ ID NO: 482773 - DNA, 201 bp, Homo sapiens
agtctgcaggaaggcatagcagatttctgggaactgaggaatctggtgagggcccatagacggcaggatgcttaaaccaggttttgaaggttaaattgacttttttttttttttttttttttgagacagggtctcactctgtcacatagactggattgcagagcacagtggtgcaatcatagcttactgcaacctcaacct

SEQ ID NO: 482774 - DNA, 201 bp, Homo sapiens
ctgataagaaacagtttttatcagatttttcccactgtttctttttgcaaatttaagggaaaaatatatttgtttacctttcttttttatgtaaaaggtarcagactctaagtactcttctgtactttgcttttttccatgtaatcaatcttgaagatcaccctgtagcagaatatagaaatcctcctgattcctttttgc

SEQ ID NO: 482775 - DNA, 201 bp, Homo sapiens
aaattgcaaggcaaaggtagagttcagagggtttcattcttattttactacctgttatttctaggcgggtggatcacctgagatcaggagttcaagatctkcctggccaacatggcaaaaccccatctctactaaaaatacaaaaaattagctgggtgtggtcgctcaggcctgtaatcccagctactcaggaggctgagt

SEQ ID NO: 482776 - DNA, 201 bp, Homo sapiens
  misc_feature (1)...(201): n = A,T,C or G
ttcttgttttaattttttatcctaggggtcacccctgggtgagagatcaaaggtcaacaattgatgaaatcttgtgcttaagcctctttgaccagtcaganttttgcccttgaacttttggcctcaagcaatcctcctgccttggcctcccaaagtgctgggattacaggtgtgaggcaccatgcctggcctttttgtaaa

SEQ ID NO: 482777 - DNA, 201 bp, Homo sapiens
tcactgcaacctccacctcctgagttcaagcgattcttctgcctcaacctcccaagtagctgggactacaggtgtgtgccaccaggcctggctaattttctttttttttttttgtagttttggtagagatggggtttctccatgttggccaggctggtctcaaactcctgacttcaagtgatccacctgccttggcctccc

SEQ ID NO: 482778 - DNA, 201 bp, Homo sapiens
agggccctcatgtatgaggagtgctgagtagaccctatgggtcaggaagaggatgaaggtctgcaggtttgtgggtgtgttaggtgaagcctacctcatgrtaggaacaaggtgaggatctctgcagtccattagaagggttctctgatcttacacggggattctctctttctctgtgaattcacatcatataaaattaac

SEQ ID NO: 482779 - DNA, 201 bp, Homo sapiens
ttaaaggagtagtaacctcaccactacttacttgccctcagatgagccgtcattcacacagtgcttgtcaccggcaccatggtgcaagagacattcagtcttttttttttttttttttttttttgtgagacggagtctcgctctgtcgcccaggccagagtgcagtggcttgatctcggctcactgcaagctctgcctccc

SEQ ID NO: 482780 - DNA, 201 bp, Homo sapiens
cccttctgcacactgaatagtttgagtaaggaagcagctaaaaaagactcttctcagggagaaagtcctctcagagctacagagcccacagggtcctatgwttccaagtccctagcagacaggtggcagtggctccctgcaaagcctgtaggaaggcttcctgcagcttctgcttcccccacctcttaaaccacctcttga

SEQ ID NO: 482781 - DNA, 201 bp, Homo sapiens
acctcttgaccttgtactgcactgagccttcccatccttactgccacttaggcccccactgggtcggggtgcacgggcttccatggaggtccctaccagtscttggagatggcaagatgggcttccttgctagcaagaagagtcagctcattcaaagctaatgtctgacagagctgtccaccttagggtagccccaggaag

SEQ ID NO: 482782 - DNA, 201 bp, Homo sapiens
ctgaggccttggatggtggccctagccggctttacaagtcaggcagtgagtacaacctgcccaccttcatgtccctctactcaccaaccgagacaccctcbggcagctccaccactcccagttccggacggccgctcaagagcgctgaggaggcttatgaggagatgatgcgcaaagctgagctgctccagaggcagcaag

SEQ ID NO: 482783 - DNA, 201 bp, Homo sapiens
ctacagaccgtgagtatggccaggctgctcagcctgccgcagagggcacgccagccagcctgggagcagccgtgtacgaagaaatccttcagacatcacaragcatagtccgcatgcggcaggcctcctcacgagacctggcttttgctgaggacaaaaagaaggagaagcagtttctaaatgctgagagtgcatacatgg

SEQ ID NO: 482784 - DNA, 201 bp, Homo sapiens
gatcgggcagctcttccagggtcctggacgagactcggctatggacctcagctcactgaagcactcctacagcctgggctttgcggatggacgctacctakggcagggcttgcagtatggctcagtcacggacctgcgtcatcctacagaccttttggctcacccgcttcccatgcggcgctatagctcagtgtcgaacat

SEQ ID NO: 482785 - DNA, 201 bp, Homo sapiens
tcgaggactcctcagaggaggaggagctgcgggaggaagaggagctgcttcgtgagcaagagaagatgcgggaggtggagcagcagcgcatccgcagcacrgcccgcaagacccggcgggacaaggaagaactgcgggcccagcggaggcgagagcgctccaagacaccacccagtaacttgtcacccatcgaggatgcct

SEQ ID NO: 482786 - DNA, 201 bp, Homo sapiens
agctataggttctgtgttgcagccacgggcagaacagacaaatggctctaaagggacagccaaagcaccgcaacaggggagggctcctcaggcccagccarcaccaggacctggacctgcaggtgagcctatcctttgacacccttggctgtggcccagagcacccaggctgttctctctctataccacctgtgccctgag

SEQ ID NO: 482787 - DNA, 201 bp, Homo sapiens
agcacatatcattttgagaatattgtttctttgtccattcattcaacaagcatttagcccctgctgtgtatcagagtctgcgcaggctctgagttcacagsggaaacacaacagtcagcaggttggatcccacagactgtatgagcacaacacagtctgaatatagcattgaatactgaaacagtgttgaccattggactt

SEQ ID NO: 482788 - DNA, 201 bp, Homo sapiens
gaaccccaggggctcccgccggccagccaggtgccgatggggagagcgtgttctccaagatcctccctggcggggcagccgagcaagctggcaaactgacrgaaggtatgcactgcctgcaactggtctgtggtgggtggctactctggtacaggctgggtctgtgagatgattccagactcagtcacccaggcagaggcc

SEQ ID NO: 482789 - DNA, 201 bp, Homo sapiens
cgatagtttcctagaagtaggattgctgaagcaaaatggtaaatgtataagttgtttttctctgtgttgctaagactgagagccaaaggcagaagcaatartattcaggcatgagaggatgatcatggtggggtgcggggttttgcaggacagggaggtgggaaggggctgagtagtaagagtgatgaaaagtgctcaact

SEQ ID NO: 482790 - DNA, 201 bp, Homo sapiens
agaaggagatagggtgggtggcgggccctaaacccttgggaaatggacagactcttccccagggtcctgggattgacagggaggattgggttcccaccacragctttgccatggggagtcagtgtctgcttttcaccctgctgcaggacctggtgggcaagccttactctcaggatgcgtctcggagcccacagagcctca

SEQ ID NO: 482791 - DNA, 201 bp, Homo sapiens
cagggcccgggcctgggccagcacctggagccaaaactgagcctggggctagaatgggtcctggatctggacctggagccctgccgaaaactgggggaacmaccagtccaaagcatggcagagcagaacatcaggcagcatcgaaggctgctgccaagccaaagaccatgccgaaggaaagggccatctgcccactgtgcc

SEQ ID NO: 482792 - DNA, 201 bp, Homo sapiens
tgggaaaccaacagagactattttaaggactggcgattaagagtgtaagaattttcttagcagtggcctcaactaggacacatatgccaaggggttgaggratacgggagggacaaggcagaacatatggaaatttctgtttatatttattgtctatctcatcttttaaaacttttccacttggggaggtgggttttataa

SEQ ID NO: 482793 - DNA, 201 bp, Homo sapiens
gtttgtgccaggcactgtggtaggccctgggacacagctgtgaggaaagcacacggagactgtgcccacacagaactggcagtttaatgcagggatcccaraggatatacaaaagcaataaatttgttatatgatgggtcagaaggtgctcagtgccacagagaacaaagaggcaggggagacaagcacagttttaaatag

SEQ ID NO: 482794 - DNA, 201 bp, Homo sapiens
aggacatttgagcaaagggcagggtaggatgatgtggaggaagaagaatagtggaagcatgctggctgggggtcagaaattcaggttttaatcaatcctgrcattgcctaaacttggctatgcacgttgggtatgtccttggttttttcatctgtaaaatgagagatttaactagatgatctccacagtcccttccagctc

SEQ ID NO: 482795 - DNA, 201 bp, Homo sapiens
tactagctcaatagtggttgaatttaaatgtttttcaagcctgccaggagtgaagaaagctttgggcaaatatggtcctgccgatgtggaagacactacargaagtggagctacagatagtaaagatgatgatgacattgacctctttggatctgatgatgaggaggtatggcgtcttctataaagaacatatcggccagg

SEQ ID NO: 482796 - DNA, 201 bp, Homo sapiens
ttgaagccgtgtccagcccaccgcctgccgacttgtgtcatgccctacgttggtataatcacatcaagtcttacgaaaaggaaaaggccaggtaaaatcayctttgtatagagctgaagaataagactgctctcgaagtttatcaggatgttcacatgacaaaactggacccaggctactttagttttgttgggatattgt

SEQ ID NO: 482797 - DNA, 201 bp, Homo sapiens
cggctaaggcagagaattgcttgaacctaggaagcggaggttgcagtgagccaagatcgtgccactgcatccagcctgggcgacagagcgagactccgtcycaaaaaaaaaaaaaaagaatacatcgatcagcaattgtatcaatgtggttaagccaaattgcctggatttgaatcctggctttaatttatatgccttttt

SEQ ID NO: 482798 - DNA, 201 bp, Homo sapiens
gaaaccctgtctgtactaaaaatacaaaaaaatgtggcaggcatctgtaatcccagctactcaggcggctaaggcagagaattgcttgaacctaggaagcrgaggttgcagtgagccaagatcgtgccactgcatccagcctgggcgacagagcgagactccgtcccaaaaaaaaaaaaaaagaatacatcgatcagcaat

SEQ ID NO: 482799 - DNA, 201 bp, Homo sapiens
tgtaatcccagctactcaggcggctaaggcagagaattgcttgaacctaggaagcggaggttgcagtgagccaagatcgtgccactgcatccagcctgggygacagagcgagactccgtcccaaaaaaaaaaaaaaagaatacatcgatcagcaattgtatcaatgtggttaagccaaattgcctggatttgaatcctggc

SEQ ID NO: 482800 - DNA, 201 bp, Homo sapiens
gtttattgtttttagaacctgcacttgttgccaagtcttccatcttactagatgtgaaaccttgggatgatgagacagatatggcgaaattagaggagtgygtcagaagcattcaagcagacggcttagtctggggctcatgtgagtttaggctttgcctttttttttttgaaactaacatctggaatttgcctacagttt

SEQ ID NO: 482801 - DNA, 201 bp, Homo sapiens
gctaaggcagagaattgcttgaacctaggaagcggaggttgcagtgagccaagatcgtgccactgcatccagcctgggcgacagagcgagactccgtcccaaaaaaaaaaaaaaagaatacatcgatcagcaattgtatcaatgtggttaagccaaattgcctggatttgaatcctggctttaatttatatgcctttttca

SEQ ID NO: 482802 - DNA, 201 bp, Homo sapiens
ggatgagatcaacacacactggggcctgatgcaggggccgtagcggggagagcatcaggataactagctaatgcatgtggggcttaatacctaggtgatasgttgataggtgcagcaaaccaccatgggacacgtttacctatgtaacaaacccgcacatcctgcacttgtatccagaacttaaaatattttaaaaatctt

SEQ ID NO: 482803 - DNA, 201 bp, Homo sapiens; identical to SEQ ID NO: 425466

SEQ ID NO: 482804 - DNA, 201 bp, Homo sapiens
cctcactgcacgtccctcaccaggtgtgcaacaaggccccggcccagcatcagtacagcagccagaatctgatggagatggtgcactgcttcgtagccctyggtgaggctctgcggcagggtgctccctgcctgccccgaggcctgcaggaggcctctaggagtcccggcccctctgagcgctgggcctgggactgccttg

SEQ ID NO: 482805 - DNA, 201 bp, Homo sapiens
aggccagcaagctcagctggacaagggcattctctgggtggatcagcaggaagctggcggcgggaggtggcctggcccacaactcactcgcgtgcttcctktatcctgatggggtatgaggctgtggtgcccatgcagccccaggtatggtcagctgggctgcccctgcacctgtgtccctgtgatctcctccagcctcac

SEQ ID NO: 482806 - DNA, 201 bp, Homo sapiens
gtgaacaaggataatttgacttcttcctttctattttgtatgccctttgtttctttctcttgcctaactgctctggccaggacttccagtattatgttgargagcagtggtaaaagtgggcatttttatcttgttccagattttaggaacaaggctttcgatttcttccatctggtacaatgttagctgtgggtttgtcat

SEQ ID NO: 482807 - DNA, 201 bp, Homo sapiens
acaaaaccttattgatggacactggaatttaaacttcatggaattttcatgtgccatagaattttcttttctatatttcttttccccaacacttaaaaatgggaaaatgagttttggcagtgggctgtacaaaagctcctggaagtacaagaccagtctgggaggtactcaccaagcttttataggttcttcaggcccctc

SEQ ID NO: 482808 - DNA, 201 bp, Homo sapiens
tttctattttgtatgccctttgtttctttctcttgcctaactgctctggccaggacttccagtattatgttgaagagcagtggtaaaagtgggcatttttrtcttgttccagattttaggaacaaggctttcgatttcttccatctggtacaatgttagctgtgggtttgtcatatatggcttttattatcgtgaggtatg

SEQ ID NO: 482809 - DNA, 201 bp, Homo sapiens
ttgtcatatatggcttttattatcgtgaggtatgctctttctatgcccagcttgttgagtttttaaaaaatcataaagggctgctgaatttatcaaatactttttttagcatatattgaaatgatcatatgattgttgttcttggctctgttaatgtgatgtatcacatttattgatttgtgtgtattggaccatccttac

SEQ ID NO: 482810 - DNA, 201 bp, Homo sapiens
ggtatgaggctgtggtgcccatgcagccccaggtatggtcagctgggctgcccctgcacctgtgtccctgtgatctcctccagcctcactgcacgtccctyaccaggtgtgcaacaaggccccggcccagcatcagtacagcagccagaatctgatggagatggtgcactgcttcgtagcccttggtgaggctctgcggca

SEQ ID NO: 482811 - DNA, 201 bp, Homo sapiens
ttgtgacttcattcaaccctaattacctttcgaagggctcatctccaaatactatcccactgggggttagggcttcaacataggaatttttagggtacatkattcaatctgtaacagttgttttgtacttaaaaagcatgctgatggacaacttgttactatctctaggaactggctagctctgggaggagtagtctctct

SEQ ID NO: 482812 - DNA, 201 bp, Homo sapiens
cataattcccacatgttgtgggacggaacaattgggagataattgaatcatggggtggtttccctcatactgttctcatagtagtgaataagtctcacgaratctgatggttttataaggggtttcccctttctcttggctctcattctctcttgcttgctgccatgtagaacatgactgtgttccccctttgtctcctac

SEQ ID NO: 482813 - DNA, 201 bp, Homo sapiens
tactctagcctgggtgacagagcgagactttgtctcaaaaaaaaaaaaaaaaaaaggagaaaagacagtttgttacattcccaagagagggggccaaccaygccatgcagggtcacacaggggaagcactagggtctgtgaggaggcagagggagtcaggggaaattataggcaacaggctttattgtggtttctgtagaa

SEQ ID NO: 482814 - DNA, 201 bp, Homo sapiens
gcagcacgtggagggccacaggcagaggctggccgagctggtgctcaggggcatggactcagaagtcctgagctgccgcatcagcagcacagcggtctgcrtggaagtgaggcaccgggtgtgggcggggtgcaagcggaggggatggggtccctggattcttctggggatggcttgtctccaaggcatgggagtcggggg

SEQ ID NO: 482815 - DNA, 201 bp, Homo sapiens
cttccctgttatactgcttttgctgtatccaatagatttttgtatgttatatttctatttccattcatttcagtaaaattttaaatttccttcttaatttmtttattgaaccagtggtcatccagcaatatattacataatttctatgtgtttgtgtattttccaaagtttttttgtggttgatttctagttttattccat

SEQ ID NO: 482816 - DNA, 201 bp, Homo sapiens
tttagctgcgatgaggtggtctcgctcatccagaagctctgcgagaacactggggccatgaacctgcagcatgacaaggcctctgtcacctggatagcctycttcctccagatgcgggccaaggagctggaggacaaggtggcagagccgcggcagggccaccagagagaggggctggggctgcctggtgtgcccagatga

SEQ ID NO: 482817 - DNA, 201 bp, Homo sapiens
atccagaaaagtgcagaggtgaaactaattttcatgtattttatttcactcaaataactaaaacatgatcatttcaacatgtaatcagtataaaaactatkattgtgatattttacaatttttggggtaccatcttaaaacccagggggcactttaccttaattcagaccagccacacttgaagtgctgcagggttacaca

SEQ ID NO: 482818 - DNA, 201 bp, Homo sapiens
attaatttttctatcagtgagcatgaaatagctttccattttttggtgtcttcttcaattcttttcatcagtgttttatagtttcccttgcatagatcttycacttctttggttaaatttattcctaggtattttatatttttgtggctattgtaaatgaaatggatttcttggtttctttttcaaaatgggtgaagtgtt

SEQ ID NO: 482819 - DNA, 201 bp, Homo sapiens
cacgaagggggggtggctgggccttttgtccctgctggtcatttctgaagttgtattcccgacagcaagccagacctgctccttgtggggcccttccaagsagaaggagcttgagaaatgtaagggggacctccagagcacagatgtggagaagatcttctgtgcatcctccagaatcgccaaggtgacagccggggagcc

SEQ ID NO: 482820 - DNA, 201 bp, Homo sapiens
cagtgagagcaaaggtcagaacgcctgggacgttcacatgctggagggtggctcaggcctgcaaagccagggcaggaggtagccacgaagggggggtggckgggccttttgtccctgctggtcatttctgaagttgtattcccgacagcaagccagacctgctccttgtggggcccttccaagcagaaggagcttgagaaa

SEQ ID NO: 482821 - DNA, 201 bp, Homo sapiens
tattttctagtagtttcatagtttcaggtcttggatttaagtctttaatccattttgatttgatttttgcgtatggtgagagataggggtttagtttcatycttctgcatatggttatccagttttcccagcaccatttattgaagagactgtcctttcaccattatatgtgcctagcacctttgtcaaaaatgagttgac

SEQ ID NO: 482822 - DNA, 201 bp, Homo sapiens
ccgaatcagggtaattagtatatccaacactgcaaacatttatcatttctttgtgttgcaagcattcaaaactgtttcttctagttttttgaaaatatacratcaatcattgttgactatattcacaacctacagtgctatagaacacaagagcttattccttctctccagctgtaattttgtatcttttaatcaacttct

SEQ ID NO: 482823 - DNA, 201 bp, Homo sapiens
accaatttcctggagcatttccccaatgattattttctagtagtttcatagtttcaggtcttggatttaagtctttaatccattttgatttgatttttgcrtatggtgagagataggggtttagtttcattcttctgcatatggttatccagttttcccagcaccatttattgaagagactgtcctttcaccattatatgt

SEQ ID NO: 482824 - DNA, 201 bp, Homo sapiens
tgcaaagaaaccaagaaagacgagggaaaagaggtaaattttatagatattaacattttttgtgtgcttctactacttcctgtttgttttctcatctccaraaacaataatatttaccttatggagtcgtggtgaggatttaatgaaatatggatggttgctcttattatgtctccaaatataaaacaaaattcttacaaa

SEQ ID NO: 482825 - DNA, 201 bp, Homo sapiens
catgctgtttgactgtcttgtcctcaggatggctgtggcaggaggatgatggagtcagggtctggggcgcagggatggtcgtctggtgcagggagagaagygggctgggcaggaggaccctggtcctgggcacctggatggaggtggggatgaaggctcagcaaaatgaggcaggggccaagtccaacactcagtaacatg

SEQ ID NO: 482826 - DNA, 201 bp, Homo sapiens
gggcccctgagtagcgagggtctagagtttgaccttgagttggtagaaggtcacctgccaccatttgccaatccactgcaggtcttgaggcagatcctggractgtcagtcaccaccaacacccctgtcccccaaatgcagctacacaccattttcacagaactgcacgtccaggtgaggccagcaagctcagctggacaa

SEQ ID NO: 482827 - DNA, 201 bp, Homo sapiens
gaaggcttttgctatgctcaggccatcagaatagtctaggtgtccccagagcaggtaaaccaggacttccaaactgttcccagtccaactgccaaaggaawtcaccatccggggtcccatcaacaggagagagctgctatgctgtccaaaatccaacccgtgctaaagccttctctggaacagtggtcttcaaactgtttt

SEQ ID NO: 482828 - DNA, 201 bp, Homo sapiens
atcagatatgtgatttgcaaatattttcttctagtctgtggcctttttattgatttcccaatatcttttaatgagcagaagtttttggttttgacgaagtmgaatttatctttttttcttttatggatcatgcttttggtgtcaaatctaagaaaccgtccaaagattttctcctatgttttcttccagaagttttgtatt

SEQ ID NO: 482829 - DNA, 201 bp, Homo sapiens
gtggaaagggatgtgactgatttaggagccatctgtagatcattctggctaaataatgggattcacttttaagtgaaggaggccttgaatgccacactcakgggcctagcgcagcacttcccaagccttgctgtggttaggaacaacctgggggctgggtgaaatgcaggcttggattcagcaggaccggggtagggcctg

SEQ ID NO: 482830 - DNA, 201 bp, Homo sapiens
gcagagctccaggctttgtggggcctgtggcttctgtagcggtgagagccctttttaagaaaaaagatacatagttatgaaccccacattggctaggaaartgaatatttactttgagaaaatcaagtgctgcaaaatcataaattttgcaaagcttgacaagtaccgcaacccttaaaatgtctagaacgacgtagtgtt

SEQ ID NO: 482831 - DNA, 201 bp, Homo sapiens
tgcagggtgcggctccaaggcatgagcaagccctggatatattccaggctgtccctatttctttcaaaatgtgtcctaagaggggaagcgacttgtcccaktctccaaggggagaatggcccaacctccagccccagaggtggccatgagtgatgcagagccaccccatctttattggtgtttctctgcagacagtgcaga

SEQ ID NO: 482832 - DNA, 201 bp, Homo sapiens
cctcttccagcttctggtggccccacatgttctgtgactgtggcagcatcactccaatttctcccttcctcattgcgtggcctttccctgtgtgtccctcygtgtcctcttcttacaaggacacctacccaaaatccaggatgatctcacttcgaaatcctgaactaattccatcacaaagaccctatttccaaataaggt

SEQ ID NO: 482833 - DNA, 201 bp, Homo sapiens
acagaggggttaagtacctgctcaaggtcatgtggctgctaagtgggagggactcaaacccggccgcctgtgcaggaaagaccttgctctgcttctgaggygccttctgtcctgtgtccttggattctgtggctggggctgaggtcactggccttgctggagggtggtgagacaatgcgtcccagagctggtttctggtgg

SEQ ID NO: 482834 - DNA, 201 bp, Homo sapiens
tgccaaggggtccagtgagataaggctggagaaggcgggaggtggaagagcttcacggcttgctggggataaaggcctggatggagtgggaggggaggaasggaaggcaggcctggaaagaggacaagggacagcagcgagggggattattatgaagtctgaagatgggggtgcactcagggtgggtgaagtggaggggcc

SEQ ID NO: 482835 - DNA, 201 bp, Homo sapiens
ccagcccggaggggtcctggcattggcaaggctcgggaggagtcgtaagagacagcgtggaatgtgaggcctggcacagggagaacaatctcaaggggtgmaggcccccgtgatgcccatcctgccaaggggtccagtgagataaggctggagaaggcgggaggtggaagagcttcacggcttgctggggataaaggcctg

SEQ ID NO: 482836 - DNA, 201 bp, Homo sapiens
attagttcaaccattgtggaagacggtgtggtgattcctcaaagatctagaaccaaaaataccatctgacccagcaatcccattactgggcatatacccaraggaatataatcattctattacaaagatatatgcatgtgtatgttcattgtagcactattcacaataacaaagacatggaatcaacccaaatgcccatca

SEQ ID NO: 482837 - DNA, 201 bp, Homo sapiens
taatgcctacctggatattaatgcctacctgatcatatctaggtcatgttagaattgtgtaaacttcctttggatagctcactcctcatgtcctgtccccycagcccacagccctggtccagatcccatccttgggagctcctggcccagcctttcccatgcatgaccttactgggcctctgctctgcctggcttctctga

SEQ ID NO: 482838 - DNA, 201 bp, Homo sapiens
accagctccatggccaggatgtggatgtcagcgtggctggcaagagcaggcaaggtgggcaaagttcctgtccagctgattggattgggcaggtgggctgkctccttgtctgggaatgcccacccctctccacattcctcccaccctcattcccccttctcctggaaacatccaagtccaaattaatactattaatgccta

SEQ ID NO: 482839 - DNA, 201 bp, Homo sapiens
agcagccagaatctgatggagatggtgcactgcttcgtagcccttggtgaggctctgcggcagggtgctccctgcctgccccgaggcctgcaggaggcctstaggagtcccggcccctctgagcgctgggcctgggactgccttgctgggcctgctctggacccggtgagcatgactaaagctgtccttccaccctgcagc

SEQ ID NO: 482840 - DNA, 201 bp, Homo sapiens
atttctgccagtctcagttatgtatcctttcatttctgattttatttatttgggtcttcactcttttttttttatttatttactctagctaaatatttatyaattttgtttgttttttcaaaaactcaacttttcttttgttctcctgtattgttttattactcttgattttgtttatgtctgcactgatctcttgccctt

SEQ ID NO: 482841 - DNA, 201 bp, Homo sapiens
cttaccaacaatgtgtgaggtttcccctttctccacatccttgctagcatctgttattttctatattttggataaaagtctttttaactggagtgagatartatctcattgtggttttgatttgcatttctctgatgattagtgaggttgagcatttttttatatccctgttggccacttgtatgccttcttttgagaaat

SEQ ID NO: 482842 - DNA, 201 bp, Homo sapiens
cctaggtggtccaaacataagacgtaaactgtcttcttagtgccaaatgcaagccctttttaatttagtttgtaagaagtttagtttgtaggaaaaacacyattgtaaaataactagtatccttttgtttccttccgttgaaataaacctccactgtcgttggagtagacttgtgactgtaaggtggtgacagcccagaac

SEQ ID NO: 482843 - DNA, 201 bp, Homo sapiens
ttcccaggtgatgccaaggctgatctggagagcctactttgagaactgttggattttagactacccttttgtcttggagtgggtagcaaaggggtgctatragcagaggagcttatttataaaaagttttattatttttgttggatttggatttgcatttgcgttttcccccttttatttttagttgacacataacaattg

SEQ ID NO: 482844 - DNA, 201 bp, Homo sapiens
catccattgattatctcacggttccactggccaggagtctaggcatggctttccttggtcctttgtttagggtctcagagactgcagtcctttctggagtycagcttcctcttccaagctcatgtgcttattggagaattcagtttcttatggttgtaggactgaggccctcagttccttgctacgtggccctcaccacag

SEQ ID NO: 482845 - DNA, 201 bp, Homo sapiens
gagagtgttagatgttgagtccacgactcaccaactcactaggggagcttagagaaactgcttcaagggaagagccagaggaccctttgctgtggggtttygggggggtgggagtgcaaccagggcagagagatgcacctggggaggcctttccaggacgacagctattgatgggtggagtccctttcattccctgggctg

SEQ ID NO: 482846 - DNA, 201 bp, Homo sapiens
atgttgagagaaccccttaaaggagttatgagagatactgatatgaatttctcattagccattaattatcagtgtgtagaagagagggcgagagggctctwttaaactaaggatattatctattgctgtgtaacaaattatcataaactcagtggcttaaaagaacatccattgattatctcacggttccactggccagga

SEQ ID NO: 482847 - DNA, 201 bp, Homo sapiens
ttggtgttctgggctctacccatagctcctggaaaagtggatcttgtcggagaaagaatgggagcgggaaaaggccgtgagcctccatctctatctcatgyggatttatgtccacagcactgctgtctgtgtgagtccaggagtccccagcccccagcctgctgctctgacatgcacagaaaaattcctgtgtctatctgg

SEQ ID NO: 482848 - DNA, 201 bp, Homo sapiens
gcaggtgagcagagagacgtctcctgactcaagatagactttgaaggccctctagtccaccccggcactcgggggaagggtggatcatgagtgggaggcaygtggcaagctgagaccagagctcaggtctaagccctgcactgtgctttctatcccgttttgattttggcttcctccctgccaacgtgggctcaacaaaat

SEQ ID NO: 482849 - DNA, 201 bp, Homo sapiens
acttgtcaagaatcagaatcgctgcttgcaacttggcaggtgagcagagagacgtctcctgactcaagatagactttgaaggccctctagtccaccccggsactcgggggaagggtggatcatgagtgggaggcatgtggcaagctgagaccagagctcaggtctaagccctgcactgtgctttctatcccgttttgattt

SEQ ID NO: 482850 - DNA, 201 bp, Homo sapiens
tctggatacaacccatcagatatgtgatttgcaaatattttcttctagtctgtggcctttttattgatttcccaatatcttttaatgagcagaagtttttrgttttgacgaagtcgaatttatctttttttcttttatggatcatgcttttggtgtcaaatctaagaaaccgtccaaagattttctcctatgttttcttcc

SEQ ID NO: 482851 - DNA, 201 bp, Homo sapiens
taacttgtcaagaatcagaatcgctgcttgcaacttggcaggtgagcagagagacgtctcctgactcaagatagactttgaaggccctctagtccaccccrgcactcgggggaagggtggatcatgagtgggaggcatgtggcaagctgagaccagagctcaggtctaagccctgcactgtgctttctatcccgttttgat

SEQ ID NO: 482852 - DNA, 201 bp, Homo sapiens
actaaggggtactcctctacccatcctcaaaaggctgaaaaccacagtcccaggctccatggcagccacatccaccttggagtggagcttggttctggccrtgggctggggaagggaggtccggcatagtgaggggtctgcacagcagttttgaggaacatcagagagggaatggaggagaatgggggctagagatttagg

SEQ ID NO: 482853 - DNA, 201 bp, Homo sapiens
tgtgacgctgggatgggcgcttgccctctctgatgcatcttggtgatgggaacacgcttggtgaatgacagcccattgtcagggtctcatcctccaaagcwaaaagtgtgtatcacttactttttgcagactcggaaaaagccggctgttctctaccgcttcttgctagaaacaatggcctatgttaaaaataacttgtca

SEQ ID NO: 482854 - DNA, 201 bp, Homo sapiens
ctacagtgctatagaacacaagagcttattccttctctccagctgtaattttgtatcttttaatcaacttctccctatcctcccctgcccttacctttccyataccctaataccgaaattctactcttgacttctatgagctcaccatttttatagctcccatatatgagtgagaacatgtggtatttatctatctgtgcc

SEQ ID NO: 482855 - DNA, 201 bp, Homo sapiens
tggctaccaggagagaatcaaaggctggggcctgaagtacctgtctgtgcagctgaccttatccacctacaaactggtgagtggccctgatacgcagaccrcagagcagctggacttggaaatggtttccacagtgctgaggggagaatgccactcagcgtacctgtgttcaaacctgcgtatccattcatgacaggagtt

SEQ ID NO: 482856 - DNA, 201 bp, Homo sapiens
gtggccagtggtccttcacttgccagctactcacctgctgtgtgacgctgggatgggcgcttgccctctctgatgcatcttggtgatgggaacacgcttgrtgaatgacagcccattgtcagggtctcatcctccaaagcaaaaagtgtgtatcacttactttttgcagactcggaaaaagccggctgttctctaccgctt

SEQ ID NO: 482857 - DNA, 201 bp, Homo sapiens
tatccacctacaaactggtgagtggccctgatacgcagaccgcagagcagctggacttggaaatggtttccacagtgctgaggggagaatgccactcagcrtacctgtgttcaaacctgcgtatccattcatgacaggagttcatagacacagtgaacctgcaggtgacaatgtgtggggtcctagatataggcacagctc

SEQ ID NO: 482858 - DNA, 201 bp, Homo sapiens
gggtcgagattgccacagctctttcttggggccctatgtttaccttccacacatgccatgtcgagaccggcactgtgcagcagaaatagaaggcaagtcaygtgcctatttcagctgtctgatgtttcttttagtaggcacatccagaaaagtgcagaggtgaaactaattttcatgtattttatttcactcaaataacta

SEQ ID NO: 482859 - DNA, 201 bp, Homo sapiens
ccactcagcgtacctgtgttcaaacctgcgtatccattcatgacaggagttcatagacacagtgaacctgcaggtgacaatgtgtggggtcctagatatakgcacagctctgagcattctgtagactcagtatctgggcatggagcccctggggagtgaggagaccacacctgagaccacgacaaacctctgctaggccac

SEQ ID NO: 482860 - DNA, 201 bp, Homo sapiens
gagtattaggactcaaaataccccaaagtggtcttgtccactgcctgcaggcccatgttgggatgggagcgggcctggcttctccctctccacagcccagytcctctgttgctttggggcaggaggagagggagagacagatttgttagtaaatgtgccttctcatttgagttgctgcctctcaggctaaccccggctggc

SEQ ID NO: 482861 - DNA, 201 bp, Homo sapiens
agcccgtcccaggtggccacacgctggcttggagctggggggtcgagattgccacagctctttcttggggccctatgtttaccttccacacatgccatgtygagaccggcactgtgcagcagaaatagaaggcaagtcatgtgcctatttcagctgtctgatgtttcttttagtaggcacatccagaaaagtgcagaggtg

SEQ ID NO: 482862 - DNA, 201 bp, Homo sapiens
catcttaaggtgtgtgtcacaccccgtattttacaaattctgttgatctcaaaagagcttgaggaagagatgactgaagccattacagaagcagcagtagmctcaagtgaggaggtgtcagaggaaagagacgacctggggcctcttgaattacatgacagtggtaagaatgtcatccacatttctgctttcctgccccat

SEQ ID NO: 482863 - DNA, 201 bp, Homo sapiens
tgctgggcaccacccccagagtttctgattcagtaagtctggggtggagcctgagaatcagcatttctaacaagttcccaggtgatgccaaggctgatctrgagagcctactttgagaactgttggattttagactacccttttgtcttggagtgggtagcaaaggggtgctatgagcagaggagcttatttataaaaagt

SEQ ID NO: 482864 - DNA, 201 bp, Homo sapiens
tggagagcctactttgagaactgttggattttagactacccttttgtcttggagtgggtagcaaaggggtgctatgagcagaggagcttatttataaaaakttttattatttttgttggatttggatttgcatttgcgttttcccccttttatttttagttgacacataacaattgtacatatttatagaatacaaagtga

SEQ ID NO: 482865 - DNA, 201 bp, Homo sapiens
tggggtcacaggacaagtactgtcactatgagggcagcagtttccaggtggggtggagcgggtggcccagatggcctgggtggcccaggtgggatggcccwggtggcccaggtgggatggccctggtggcccaggtgggatggcccaggtggcccttacaggcagtgagggggattgagatgcacactccctagacctggg

SEQ ID NO: 482866 - DNA, 201 bp, Homo sapiens
tttgggaggccgaggccggcagatcacgaggtcaggagatggagaccatcttggctaacacggtgaaaccccgtctctactaaaaatacaaaaaaaattasccgggcgtggtggcgggcgcctgtagtcccagctactcgggaggctgaggcaggagaatggcgtgaacccgggaggcagagcttgcagtgaggcgaaatc

SEQ ID NO: 482867 - DNA, 201 bp, Homo sapiens
gggcagtgcacgacctcagcatggctggcagtatcagtctgtatcatttgagcaagtacctgaaatgtgtccattactttaaggcccgtgtgtgtgtgtatgtgtgtgtgtgtgtgtgtgtgtgtgtctgtgtgtagaccaatgattttcatggtttaattttgtaaacattcattgagttctaactctgtgaaagacagg

SEQ ID NO: 482868 - DNA, 201 bp, Homo sapiens
ggcagtgcacgacctcagcatggctggcagtatcagtctgtatcatttgagcaagtacctgaaatgtgtccattactttaaggcccgtgtgtgtgtgtatgtgtgtgtgtgtgtgtgtgtgtgtgtctgtgtgtagaccaatgattttcatggtttaattttgtaaacattcattgagttctaactctgtgaaagacagga

SEQ ID NO: 482869 - DNA, 201 bp, Homo sapiens
aatactatgttgagtaggagtggtgagagagggcatccttgtcttgtgccgattttcaaagggaatgcttccggcttttgcccattcagtatgatattggytgtgggtttgtcataaatggctcttattattttgaggtacttcaatacctagtttgttgggagtttttaacatgaagggatgttgaattttattgaaggc

SEQ ID NO: 482870 - DNA, 201 bp, Homo sapiens
cctagtaagccttgggacgcagctggcctaacatgaaagaaatgcaatggtcattttcagcaggtgccttggactccagctctggggtcacaggacaagtmctgtcactatgagggcagcagtttccaggtggggtggagcgggtggcccagatggcctgggtggcccaggtgggatggcccaggtggcccaggtgggatg

SEQ ID NO: 482871 - DNA, 201 bp, Homo sapiens
ggcctgggtggcccaggtgggatggcccaggtggcccaggtgggatggccctggtggcccaggtgggatggcccaggtggcccttacaggcagtgaggggkattgagatgcacactccctagacctgggctttgcactcaccaccccagcttctggactttgccacatccctctgccacaccatccctggccaccctgggc

SEQ ID NO: 482872 - DNA, 201 bp, Homo sapiens
ctttcccacacaggagtttccccgtctgcccctgcccaccttctgcggcccttgcctgccatcactgcccagggcatgcagcatgtggtcctgactgggcrgggcctgaaccttccctctttgtgttctctctcagccctccaggaactacagctggacccggatcccggggtcaggagggcagccctggagacgctcaca

SEQ ID NO: 482873 - DNA, 201 bp, Homo sapiens
aggtgaggacacgtgcccagtcttgcctgctcaagcccggctcccgcctctgatcccatggagggctgggtcccaggcagggctgctgagggcacgaaggkgctggctgagggggcgggtggggctgcatctgcccccaaggggctttctataaatgtacctgcagccatgttcaagctggcaggggcccaggtcccaggt

SEQ ID NO: 482874 - DNA, 201 bp, Homo sapiens
gtgacgctgggatgggcgcttgccctctctgatgcatcttggtgatgggaacacgcttggtgaatgacagcccattgtcagggtctcatcctccaaagcaaaaagtgtgtatcacttactttttgcagactcggaaaaagccggctgttctctaccgcttcttgctagaaacaatggcctatgttaaaaataacttgtcaa

SEQ ID NO: 482875 - DNA, 201 bp, Homo sapiens
cagtgtgcccttctggtctctgcctctctctgcccctcccatctatccctatgttcacctcttcctcttacctttcatttctctctttttccctctaaaaytgattcattttgtgtctgcagtccttttgtctcttagctgttaagattctgtgtgttctgtctctcatccttcttccccctctctcctgctcccctccac

SEQ ID NO: 482876 - DNA, 201 bp, Homo sapiens
ggtagtctgtatatgtccaagaatttatctgtttcctataggttttcaaatttgttggcatgtagttgtttgtaactctaataactctaataattctttgwatttatttatttattttggtgacaagagtctcacactgttgcccaggctggagtgaagtggcacaatcttggctcactgcaacctctgcctcccgggttc

SEQ ID NO: 482877 - DNA, 201 bp, Homo sapiens
gcacaaagaccagagcaatgcccagccccttgagggctacgtgatccctgccaaaggagagactacaccctgacggaatgatccagaaggctctgcagggrccaaggcattgggtattccttggagaatggctggggttttgctgggcttcctgctgcctgcatgtcagcctgtgtccatcctggccacaggagagcgagc

SEQ ID NO: 482878 - DNA, 201 bp, Homo sapiens
tattcttctaagttccagagaatcagtgctgtcaagtgacggctcctgggcctctgcagccctgctaggagggaagggtctcccccttttattccttgcasctacaaatacccccagggcacctgtgtcaccctgggcctctgctaggcagggctgtgcactcagatcctgcacaagccctcacccagggaagaggcgggc

SEQ ID NO: 482879 - DNA, 201 bp, Homo sapiens
gttgggagtggggtgggggaagagagagtattaggaaaaacagctaatgcatgctgggcttaataactcggtgatgggtcgataggtgcagcaaaccactrtgacacacgtctacctatgtaacaagcttgcacttcctgcacatgtaccccagaactaaaaataaaaattaaaaaaaaaattaggttcaggtttaagaag

SEQ ID NO: 482880 - DNA, 201 bp, Homo sapiens
gggagcttagagaaactgcttcaagggaagagccagaggaccctttgctgtggggtttcgggggggtgggagtgcaaccagggcagagagatgcacctggrgaggcctttccaggacgacagctattgatgggtggagtccctttcattccctgggctgtttctcccattcatagcttcttatgaaatgcttttggcctga

SEQ ID NO: 482881 - DNA, 201 bp, Homo sapiens
ccatagtctacacatctgattccaattcctaagcccaaactctaaacctagccctgagatttaaagagaacccctgtccctaaccaaggcactagctcacrctctgcctttgtgtgaatttgaagaaggcccctgttgacagcatgcagccctacaggtacataatggttagaagagcatgggcagctcccgctcagccct

SEQ ID NO: 482882 - DNA, 201 bp, Homo sapiens
gcacctggaggagagcgtgtaccccgtgatgactgaggaggagtttgccctgaaggtgttccccatgtatcgctacttcgtgacagtgtggctgaggcacyacaaccccgaggtgagatgcacccctcttaggagggcctggtggtccccaggccacagctccccagcctgtggggccgggaggtgctgagggaccgtcgg

SEQ ID NO: 482883 - DNA, 201 bp, Homo sapiens
tgaaggcctttggcccttctcaccaacgtcttgtgcctccccagtttctgcgaaactccctcaagaagacccgggggtctagctggagcctgcgcttgagyaaagagctgaacaaccagattgcgagctttgacagcccctctctggagaaggtttgtcttcatagggacaggagagtttggacaaggagtagactccagg

SEQ ID NO: 482884 - DNA, 201 bp, Homo sapiens
gctgaacaaccagattgcgagctttgacagcccctctctggagaaggtttgtcttcatagggacaggagagtttggacaaggagtagactccaggggtgakggagtggagaggataacaccgtgtgtgtgagatcagctggacctgtggctgtttacagggtcctgggaggagaggagcgtggtctggattggtggtttta

SEQ ID NO: 482885 - DNA, 201 bp, Homo sapiens
ggatccccctcatgctgcactcccaggacccctgctccaatgcagcccaagtaagatacatcctgggctttgtgtcccagtctggggcccgctgttccccraggaaacaggtccttgggtctgctggctcggtgagctgcaagcttttctctgcctcagttggttttctctgagatcccagaggccacagcctgctccctg

SEQ ID NO: 482886 - DNA, 201 bp, Homo sapiens
tttttgtgcctttctgttcagatgcaggtgggcgtggctcttgcatttggcagtggctgttatgttacctgaaaaaataaatgacgaatttatatatataygtaacacttatctagcattccccccatatttccttattaaatccccacacagaccctgaggcaggtactagcatcacccgctttttatagagaggaaacg

SEQ ID NO: 482887 - DNA, 201 bp, Homo sapiens
gagggctgggtcccaggcagggctgctgagggcacgaaggtgctggctgagggggcgggtggggctgcatctgcccccaaggggctttctataaatgtacmtgcagccatgttcaagctggcaggggcccaggtcccaggtggcctcccaggagccaccagccctgcctttctttggcttggtgaggcttttctggggctg

SEQ ID NO: 482888 - DNA, 201 bp, Homo sapiens
ccgtcctgtgtccctgcaggcctgtatggctaccatgtttcagtgtgtgcacttctggggctggaagtccctggagcatccctcagggccaagtgataccrctactgatgacaagatgaccgttttccagacaaccatgtgctccatcctggtgaggaagccaaagggggaaccagcccgtcccaggtggccacacgctgg

SEQ ID NO: 482889 - DNA, 201 bp, Homo sapiens
atgcccctctcactcttgactctggttgagtcctctccaggtcccctgcactggcatcttctcagcaggcctggccgtgcccttgtccatttgtttgtgcsctgttggtttgcttttcctgggctcattggctcccaaagcctgtggagagagtcaggagtgggtagaatggcagtgtctaattacttttggctcaacaga

SEQ ID NO: 482890 - DNA, 201 bp, Homo sapiens
ttctcctggaaacatccaagtccaaattaatactattaatgcctacctggatattaatgcctacctgatcatatctaggtcatgttagaattgtgtaaacytcctttggatagctcactcctcatgtcctgtccccccagcccacagccctggtccagatcccatccttgggagctcctggcccagcctttcccatgcatg

SEQ ID NO: 482891 - DNA, 201 bp, Homo sapiens
aaagtgtgtagtcaatccactttttgtggaaaagctgccctctttctattgagtgtattaagtgtagcaatacaacgtggggcagtatttatagcatgacyttagtgatgtggaagaaatctatgttcatttatgcataaacaggtctgaaggacaaaatctattaaaaagtggttattttttattttaattttgcaatga

SEQ ID NO: 482892 - DNA, 201 bp, Homo sapiens
tgtggaataaacaatatatctgcataatggaatattatgcagctattaaaaagtgtgtagtcaatccactttttgtggaaaagctgccctctttctattgrgtgtattaagtgtagcaatacaacgtggggcagtatttatagcatgaccttagtgatgtggaagaaatctatgttcatttatgcataaacaggtctgaag

SEQ ID NO: 482893 - DNA, 201 bp, Homo sapiens
cccaaggggtagggaaaagttcaagaccattcctcggtgctccttcaggggttgtgcctcctttttcctctcctccctctgtagcaggggtctcacttggmggctccccagggcaatgggccagcctagatgatgggggtcggcctcagccactcttttctataattctcagccagatttcaagttgggtgcttctccttg

SEQ ID NO: 482894 - DNA, 201 bp, Homo sapiens
ctgtatggctaccatgtttcagtgtgtgcacttctggggctggaagtccctggagcatccctcagggccaagtgataccgctactgatgacaagatgaccrttttccagacaaccatgtgctccatcctggtgaggaagccaaagggggaaccagcccgtcccaggtggccacacgctggcttggagctggggggtcgaga

SEQ ID NO: 482895 - DNA, 201 bp, Homo sapiens
cccaggtggccacacgctggcttggagctggggggtcgagattgccacagctctttcttggggccctatgtttaccttccacacatgccatgtcgagaccrgcactgtgcagcagaaatagaaggcaagtcatgtgcctatttcagctgtctgatgtttcttttagtaggcacatccagaaaagtgcagaggtgaaactaa

SEQ ID NO: 482896 - DNA, 201 bp, Homo sapiens
tgacgctgggatgggcgcttgccctctctgatgcatcttggtgatgggaacacgcttggtgaatgacagcccattgtcagggtctcatcctccaaagcaaaaagtgtgtatcacttactttttgcagactcggaaaaagccggctgttctctaccgcttcttgctagaaacaatggcctatgttaaaaataacttgtcaag

SEQ ID NO: 482897 - DNA, 201 bp, Homo sapiens
aatgccacactcaggggcctagcgcagcacttcccaagccttgctgtggttaggaacaacctgggggctgggtgaaatgcaggcttggattcagcaggacyggggtagggcctgagagtctgcatttctaatcagctcccagggaatgctggtgctcagtgggtcagtgggcccctgagtagcgagggtctagagtttgac

SEQ ID NO: 482898 - DNA, 201 bp, Homo sapiens
gacgctgggatgggcgcttgccctctctgatgcatcttggtgatgggaacacgcttggtgaatgacagcccattgtcagggtctcatcctccaaagcaaaaagtgtgtatcacttactttttgcagactcggaaaaagccggctgttctctaccgcttcttgctagaaacaatggcctatgttaaaaataacttgtcaaga

SEQ ID NO: 482899 - DNA, 201 bp, Homo sapiens
aaaaattaggttcagcttttttggttccatatgaattttaaaataatttttttctaattctgtgaagaatgtcaatggtagtttaatgggaatagcattgmatctatacattactttgggcagtatggtcatttgcatgatactgattcttcctatccatgagcatggaatatttttccatttgtttgtgtactctctggt

SEQ ID NO: 482900 - DNA, 201 bp, Homo sapiens
acgctgggatgggcgcttgccctctctgatgcatcttggtgatgggaacacgcttggtgaatgacagcccattgtcagggtctcatcctccaaagcaaaaagtgtgtatcacttactttttgcagactcggaaaaagccggctgttctctaccgcttcttgctagaaacaatggcctatgttaaaaataacttgtcaagaa

SEQ ID NO: 482901 - DNA, 201 bp, Homo sapiens
taaatgctagctaattatggcagtttaaaaattaggttcagcttttttggttccatatgaattttaaaataatttttttctaattctgtgaagaatgtcamtggtagtttaatgggaatagcattgcatctatacattactttgggcagtatggtcatttgcatgatactgattcttcctatccatgagcatggaatattt

SEQ ID NO: 482902 - DNA, 201 bp, Homo sapiens
agttcatccacacgcatgctgacagcgtgcctaaggccaggcactgtgccaagcggtgaggggaggcctagagtgtcccatctgtctccagggactcttcttttttttttttttttttttttgagatggagtcttgccctgtcgcccaggctggagtgtagtggcgcaatctcggctcattgcaacctccacctcctgggt

SEQ ID NO: 482903 - DNA, 201 bp, Homo sapiens
atcactgcccagggcatgcagcatgtggtcctgactgggcggggcctgaaccttccctctttgtgttctctctcagccctccaggaactacagctggaccyggatcccggggtcaggagggcagccctggagacgctcacagtcttggatagctgtagtcagcatgggtttctggcttcaccccaaggaatgtcctaggtg

SEQ ID NO: 482904 - DNA, 201 bp, Homo sapiens
tgcccaatgcaccctaggaaccaaccacagcccaggccagaggccggccagtgttttctgtaaaggactgcagagtaaatttttggctttgtggccaactmagctgtagcaggaaaacagccacagccaataagtcaaccagtgggcatgacggtgtcaacaaaaccttattgatggacactggaatttaaacttcatgga

SEQ ID NO: 482905 - DNA, 201 bp, Homo sapiens
cactgtttggttttctgttcctgggctaatttgctgaagatgatggtttccagcttagactggataaagaaaatgtggcacttatacaccttggaatactrtgcagccatatactatttttataatcagaaacagtttgcatcttcaagatgaaaactctcaattgtctcatgctcacttggtgcctgactgccaccttgt

SEQ ID NO: 482906 - DNA, 201 bp, Homo sapiens
cgtggagggccacaggcagaggctggccgagctggtgctcaggggcatggactcagaagtcctgagctgccgcatcagcagcacagcggtctgcgtggaartgaggcaccgggtgtgggcggggtgcaagcggaggggatggggtccctggattcttctggggatggcttgtctccaaggcatgggagtcggggggacagg

SEQ ID NO: 482907 - DNA, 201 bp, Homo sapiens
aacagaggggagggagatggccagggagagcatggccagggaggctcctaagaaagtgcccctgagcttggagaatgtgggaggagacagaacgtgaggcmctgatgtgggacgagccacctgacctctccctgagccacagccctccagcccacccagttttcctctttcagagcccaggatgagtatcagggccatcta

SEQ ID NO: 482908 - DNA, 201 bp, Homo sapiens
ctatgggagaaacaaatgtgtcaacttttaattgcaacaaaatgtgacgtagcaataagaggaaaaatgtaccatgagaacatcaaggagggaatgattaytcactgaggctgcaggctagatgatccctgtccagcgacagctttttttaattgcagaaataataataatcatcatcatcatcatagctacagtccatgt

SEQ ID NO: 482909 - DNA, 201 bp, Homo sapiens
gcccagagcacccccaattcctagctctctatgtcacaggattgggtgccttggagcccaccccaacccccagcatgtccacggtcctgtcccctcaggtraggatggctattctccacatcattgggcagttggctctctgtggctaccaggagagaatcaaaggctggggcctgaagtacctgtctgtgcagctgacct

SEQ ID NO: 482910 - DNA, 201 bp, Homo sapiens
gagggaagcgagaagaggctcgttctgcatctccttcacatagtgattctcatcaatggagcaagccccagggggtccaggataacagatgggctccccayggcaagggctgctagaatggagcagccgaggttggaagggagggagggagctttgtgtctctccaaggctcaattaggctcccaggtgggcatgctgcag

SEQ ID NO: 482911 - DNA, 201 bp, Homo sapiens
ggaaacaacagaggggagggagatggccagggagagcatggccagggaggctcctaagaaagtgcccctgagcttggagaatgtgggaggagacagaacgygaggccctgatgtgggacgagccacctgacctctccctgagccacagccctccagcccacccagttttcctctttcagagcccaggatgagtatcagggc

SEQ ID NO: 482912 - DNA, 201 bp, Homo sapiens
cgcccagagcccgaggctttcaacacaggcttcaccacactgctgggctgtgccgtgggccttgtgctcgtgctgctctacctgttcgccccaccctgccrctgctgccgccgtgcctgccgctgccgccgctggccccaaacacccagcccgctccaagagctgagcgcacagtcctcagtactcagcaccacaccgcca

SEQ ID NO: 482913 - DNA, 201 bp, Homo sapiens; identical to SEQ ID NO: 250143

SEQ ID NO: 482914 - DNA, 201 bp, Homo sapiens
caggtgatccacctgccttggcttcccaaagtgctgggattacaggcgtgagccaccgcgcccggcctggggtaccactttaagaaggctcaggcgaaccmccttaagatagtgagagtctgcctgccccataatattatcagtccttcaaagtcacttcaaataaacactaacagcagcttggagacattcttccagact

SEQ ID NO: 482915 - DNA, 201 bp, Homo sapiens; identical to SEQ ID NO: 250145

SEQ ID NO: 482916 - DNA, 201 bp, Homo sapiens; identical to SEQ ID NO: 250179

SEQ ID NO: 482917 - DNA, 201 bp, Homo sapiens; identical to SEQ ID NO: 249097

SEQ ID NO: 482918 - DNA, 201 bp, Homo sapiens; identical to SEQ ID NO: 249616

SEQ ID NO: 482919 - DNA, 201 bp, Homo sapiens; identical to SEQ ID NO: 249907

SEQ ID NO: 482920 - DNA, 201 bp, Homo sapiens
tgcgaactcgtcactggtcaggggtccagacagcagcatccctgagggcccagagaggtggccagtcctgtggtgaggttgagaggtgtcaacgtgctggyggtcctcgctcgctctcagcgcctcctcggcctcagcttctgctctgaccacacttgaggagcccttcagcccagcgctgcactgtgggagcccctctct

SEQ ID NO: 482921 - DNA, 201 bp, Homo sapiens
gaattgtcgccaggcctcagtcacctccccgcggggcagggctcaggacttgcagcctgccatgcccaagcctccctacggtgggctccctgcgaggcccragcctcccggatgggtgcctcccactgctccacggcacctggtcccgtccactgcccaagggctgaggagtacaggtgcccggtgtgggactagcaggca

SEQ ID NO: 482922 - DNA, 201 bp, Homo sapiens
gccaaacaagtgtcctcctccagcgccagcctggccctgagtgcgaactcgtcactggtcaggggtccagacagcagcatccctgagggcccagagaggtrgccagtcctgtggtgaggttgagaggtgtcaacgtgctggtggtcctcgctcgctctcagcgcctcctcggcctcagcttctgctctgaccacacttgag

SEQ ID NO: 482923 - DNA, 201 bp, Homo sapiens
gaggatggtacctagggttggagccaaacaagtgtcctcctccagcgccagcctggccctgagtgcgaactcgtcactggtcaggggtccagacagcagcrtccctgagggcccagagaggtggccagtcctgtggtgaggttgagaggtgtcaacgtgctggtggtcctcgctcgctctcagcgcctcctcggcctcagc

SEQ ID NO: 482924 - DNA, 201 bp, Homo sapiens
tttagtgcacagtggccccatcatagcctgcagcctcatcatttcccatctggacctggtacaaatgcacgtcacaggctcagctcctccccactagcatyttctctaccttcaagaaccaggcagccctgccatgtcacaataggccaggggagtttccaaagatgtgggtggcaaatgcccctatagaaacaccagtac

SEQ ID NO: 482925 - DNA, 201 bp, Homo sapiens
tgggaatgtgggtctgcaccttgtcccctcataggatggtaccaagcatttagtgcacagtggccccatcatagcctgcagcctcatcatttcccatctgracctggtacaaatgcacgtcacaggctcagctcctccccactagcatcttctctaccttcaagaaccaggcagccctgccatgtcacaataggccagggg

SEQ ID NO: 482926 - DNA, 201 bp, Homo sapiens
tggctgcctttgcttaagccatctttgtggtagaggggccctggaattgcagctgtactgaggatgatgttattcacagcccctggcccacccactaataytactgcacagagtcaggatctcacatttcaccccaggctcaactgaggatgtggcttattaaacacggaagtgcatcggttgttgtggttattcagacag

SEQ ID NO: 482927 - DNA, 201 bp, Homo sapiens
cctggcaataccattagtcccttaggaccctcaccagacttcaccaaacaataccagtggtctctaacctgacctgggctgatgcctgctcagattcccaycccagccttctgcagctctggatgtgtttctgcctccaggtctgggtggtcagaatggatccacgcctgatggctccacgcatttcccttcgtggtgagt

SEQ ID NO: 482928 - DNA, 201 bp, Homo sapiens
tggacagtccatcatcatgctgttcagcagcctgtaggataggtggtggtattgtcataatttcagagagatgaaatgacaggtttgttggattccactcygcacaatcccctcagttgggaaggcagtaatctctgtcctgagcacattgacctcatcagggtcagcctcctcttctgcaaaacatgcgctcactaatca

SEQ ID NO: 482929 - DNA, 201 bp, Homo sapiens
cgcctgtaatcccaacactttgggaggctgaggcaggcagatcacgaggtcaggagttcgagaccagcctgaccaacatggtgaaaaccccatctctactraaaatacaaaaattagccgggtgtggtggcacacaccagtaatcccagctactcaggaggctgaagcaggagatttgcttgaacctgggaggcagaggtt

SEQ ID NO: 482930 - DNA, 201 bp, Homo sapiens
agacaaagccaattttccggaagaaggctaagaccacaaagaagattgtgctaaggctggaatgtgttgagcctaactgcagatccaagaggatgctggcyattaagagatgcaagcattttgaactgggaggagataagaagagaaagggccaagtgatccagttctaaactttgggatatttttcttcaattttgaaga

SEQ ID NO: 482931 - DNA, 201 bp, Homo sapiens
ccagttctaaactttgggatatttttcttcaattttgaagagaaaatggtgaagccatagaaaagttacccgagggaaaataaatacagtgatattcttamgcaaactttttgtggtttttacttataaatagaattccatgtttagtgtagtcccacctcaaactttactaacaagtttatatatgtatgaagggaaaat

SEQ ID NO: 482932 - DNA, 201 bp, Homo sapiens
agatggtcaacgtacctaaaacccgaagaaccttctgtaagaagtgtggcaagcatcagcctcacaaagtgacacagtataagaagggcaaggattctttktatgcccagggaaggaggcgctatgatcggaagcagagtggctatggtgggcagacaaagccaattttccggaagaaggctaagaccacaaagaagattg

SEQ ID NO: 482933 - DNA, 201 bp, Homo sapiens
gttggtgctttccagacgcgaccgaaggcgcctgaccgccgtggccggctgcctattggtttgcagtactgtcgctcaggtgcagttcccacttccgcctstttcttccctttcctgttaggcgagagctgcgaaaggcgagagctgcgaagggccaggtgtcgggcgctgtttctcggtaagctaagaacgaggctgtag

SEQ ID NO: 482934 - DNA, 201 bp, Homo sapiens
tctatatgagaaaagaagaatggctcggagcattgttaattatttgagatgtgcaaaatttgccgggcccagagagacagcagtatgggacttcagacacytccccacttaatgcctggcattttattcctgactagctgcttcacccattatgtccgcgttcctggaatttgtcataaaaagaatgatgtatagccaatc

SEQ ID NO: 482935 - DNA, 201 bp, Homo sapiens
cagcagtatgggacttcagacacctccccacttaatgcctggcattttattcctgactagctgcttcacccattatgtccgcgttcctggaatttgtcatraaaagaatgatgtatagccaatcaatcgcttgtgttattttaatgtaaattcttggtagacaatttaggaactgccattttttcctctaaaaacccactt

SEQ ID NO: 482936 - DNA, 201 bp, Homo sapiens
aattgtgcctcagttcttttttttttttgagacgtaattccgctgttgttgcccaggctggagtgcaatggtgcgatctcggctcacggcaacctccgccyctccccaccccgcccaagcgattctccttacaggtatgcaccaccaccacgccaggctaattttgtatttttagtagagacggggtttctccatgttggt

SEQ ID NO: 482937 - DNA, 201 bp, Homo sapiens
atattttactacagttttcatcatatagacaaaacagccctgctgcaaagatggtcaacgtacctaaaacccgaagaaccttctgtaagaagtgtggcaarcatcagcctcacaaagtgacacagtataagaagggcaaggattctttgtatgcccagggaaggaggcgctatgatcggaagcagagtggctatggtgggc

SEQ ID NO: 482938 - DNA, 201 bp, Homo sapiens; identical to SEQ ID NO: 293453

SEQ ID NO: 482939 - DNA, 201 bp, Homo sapiens; identical to SEQ ID NO: 293475

SEQ ID NO: 482940 - DNA, 201 bp, Homo sapiens; identical to SEQ ID NO: 293934

SEQ ID NO: 482941 - DNA, 201 bp, Homo sapiens
cctctttctttcctgtaagctgcagaggtgtctcagccatccaatctggcatcaactgaccacacgccatcaggatgccctcctccctcacctttaaatcycatctggctctggggatcaatcccatctggctcctctccccacctccacccccgcaccctgggtgtcttcaccactttcatctcccgtgtcagcccgcac

SEQ ID NO: 482942 - DNA, 201 bp, Homo sapiens
aggaaggagataaagaccgaggaggggctgctgtgcacactctgccatgtggaaagaggggaagcagagcccgagtcccagataaatcttaattccagcaytaattaatccccatgtgacctcaggcaggacactagggatttcaatttcctttccttcatcctgggaaagggaggccctgccttgcctaccttacagagt

SEQ ID NO: 482943 - DNA, 201 bp, Homo sapiens
gcggggcccgcgttccccgctcgcccactagaggctgggcggcccgcaggccacgcctcccgggagggtaagcggcccccccgaggggcggagcctggcckggtaccctccccaagctgcgcgggggtccctcacctgtcccgctgggattaagagtcgcgattcgggctttaaccattctttcctcgttttgagcagaca

SEQ ID NO: 482944 - DNA, 201 bp, Homo sapiens
agaggtatgggtttacagctagaggccccccccccacttgattaattatttgctttgagtatgaacagctagaattcatagaaccctttccctctttcttycctgtaagctgcagaggtgtctcagccatccaatctggcatcaactgaccacacgccatcaggatgccctcctccctcacctttaaatcccatctggctc

SEQ ID NO: 482945 - DNA, 201 bp, Homo sapiens
gggttggggagggaggatgcaaaaccctcgcacctcctggagacccggaacgcccggtggaggtccccgagcatgcctggaagaagtgtcccccaaaggasaggggcaattaggggacaggcgcgaccccggccgggccgcactcaccatggtgagtccgggcggtgcgtctcacgttgagtcggggtgacaggtctcagt

SEQ ID NO: 482946 - DNA, 201 bp, Homo sapiens
tctcagccatccaatctggcatcaactgaccacacgccatcaggatgccctcctccctcacctttaaatcccatctggctctggggatcaatcccatctgrctcctctccccacctccacccccgcaccctgggtgtcttcaccactttcatctcccgtgtcagcccgcacggaaatagcggcggtaatgcttgtaagctc

SEQ ID NO: 482947 - DNA, 201 bp, Homo sapiens
atttttgtatttttagtagagacagggtttcaccatgttggccaggctggtctcaaactcctgacctcaggtgatcctccagacttcaggtgatcctcccrcctcggcctcccaaagtgctgggattataggcctgagccattgagcccagcctatgttttaaataattttgtgcatgaaacagtttgtgtatataaggtc

SEQ ID NO: 482948 - DNA, 201 bp, Homo sapiens; identical to SEQ ID NO: 106097

SEQ ID NO: 482949 - DNA, 201 bp, Homo sapiens
ctatgacatctgccaccgcaacctagacatcgagcgcccaacctacaccaacctcaatcgcctcattagccaaattgtctcctccatcacagcttctctgygctttgacggggccctcaatgtggacctgacagagttccagaccaacctggtgtcctacctcacatccacttccccctggccacctatgcaccagtcatc

SEQ ID NO: 482950 - DNA, 201 bp, Homo sapiens
gagactgagtgaggcaggagaatcgcttgagaccaggaggcagaatttgcagtgagctgagatagtgccactgtactccagcctaggtgacagagccagaytccatctcaaaaaaataaacataaataaataaaaaaatacaatacaataatatttttgtaaggacaggatctcactatgttgccctggctggtctcgaac

SEQ ID NO: 482951 - DNA, 201 bp, Homo sapiens
ttcctagaggtatgggtttacagctagaggccccccccccacttgattaattatttgctttgagtatgaacagctagaattcatagaaccctttccctctktctttcctgtaagctgcagaggtgtctcagccatccaatctggcatcaactgaccacacgccatcaggatgccctcctccctcacctttaaatcccatct

SEQ ID NO: 482952 - DNA, 201 bp, Homo sapiens
caaccttgacctcctgcgctcaagtgagcctccctcctcagcctcccaagtagctggggccacaggcatgtgccaccacacccagctaattaaaaaaaaawttttttttttgtggaggcagagtcgcattatgttgcccaggctagaatgtaagcttcttaagagcataaacttgccaggcacagtggctcacacatgtaa

SEQ ID NO: 482953 - DNA, 201 bp, Homo sapiens
ggcggatagtactgaaccttatgtactgttttttcctatacatgcatacatatgaccaagtttaattcataaattaggcacagtaagaggttaagaacaayaataggccaggtgcagtggctcatggctgtaatcccagaactttgggaagtcaaggcaggcagatcacttgaggtcaggagttcgagaccagcttggcca

SEQ ID NO: 482954 - DNA, 201 bp, Homo sapiens
gtcggtatgggccatttcggatctcatctggaagggcaaaaaccacaaagctatgctcagcagggaccttcctcccccagggtggtagctgtggccagatkcatggaaggactcatcctcctgccagcctgagataccagagtgtgagagaaacccagaccagctgcccaggccagtctcagatcagcttgccttctgcag

SEQ ID NO: 482955 - DNA, 201 bp, Homo sapiens
cctgcctcagcctcccaagtagctgagattacaggcatgcaccaccaggcctggctaattttatgtttttagtcgagacagggtttcaccatgttggtcargctggtctccaactcctgaccttgggtgatccaccagcctcagcctcccaaagtgctgggattacaggggtgagtcaccatgcccagccctgacactcac

SEQ ID NO: 482956 - DNA, 201 bp, Homo sapiens
tgggtgagggcatggaggagggtgagttctccaaggcccatgaggatatgactgccctggagaaggattacaaggaggtgggcatggatagtgtggagtgkggggaagaaaagataggggggatgaatactaggggaatactgtgtgtctgtcctacataaagtgctgtggccttattgtctcacgaatgtctttttctct

SEQ ID NO: 482957 - DNA, 201 bp, Homo sapiens
gtggacctgacagagttccagaccaacctggtgtcctacctcacatccacttccccctggccacctatgcaccagtcatctctgcagaaaaggtataccaygagcagctgtcggtggcagagattaccaatgcctgctttgagcctgccaaccagatggtgaagtgtgatccccggcacggcaagtacatggcctgctgcc

SEQ ID NO: 482958 - DNA, 201 bp, Homo sapiens
agagttccagaccaacctggtgtcctacctcacatccacttccccctggccacctatgcaccagtcatctctgcagaaaaggtataccacgagcagctgtyggtggcagagattaccaatgcctgctttgagcctgccaaccagatggtgaagtgtgatccccggcacggcaagtacatggcctgctgcctgctataccat

SEQ ID NO: 482959 - DNA, 201 bp, Homo sapiens
gggtcttactgtgtcacccaggctggagtgcaagtggcatgatcacggctcactgcaaccttgacctcctgcgctcaagtgagcctccctcctcagcctcycaagtagctggggccacaggcatgtgccaccacacccagctaattaaaaaaaaatttttttttttgtggaggcagagtcgcattatgttgcccaggctag

SEQ ID NO: 482960 - DNA, 201 bp, Homo sapiens
agccattctccttccaaggcccctccacctctatgatctcatcttgtagagctctctcctttcctcactctgggtttttggacacactgggctagttcctrcctatgattgtttgcacttattattctgtctgtctggagaactggtttccagatcttgcctcgctgactcctcaccattcagccctcagttcaagtgtca

SEQ ID NO: 482961 - DNA, 201 bp, Homo sapiens
tgccagagagcaccattattccaaatttggagttaatgtctcctgtgctttatctttgtactattttcccttgcttccctcaccaatggctcctaatttcyttctggacactggtgggtagattatcttgcacttctagattcattcgattccttcaatgttgctcattgagacaggcactgagcaagagtctataatctc

SEQ ID NO: 482962 - DNA, 201 bp, Homo sapiens
cagaggtgcagcaccaggcaggtgattggtgagccaaggcagccccaggattggacctgggatttctcctgtccttgaggtctcagctcaactcattatcyttttttttttttttttttttgagatggagtctcactctgttgccctggctggagtgcagtgatgcaatctcggctcactgcaacctccaccttctgggtt

SEQ ID NO: 482963 - DNA, 201 bp, Homo sapiens
gcctgtctgccggggccgaccccggaatctgccgcggctcgccggccgcccgcgggtcagtggcgctgtcatcagcgcagtcactatgatgccctcgctgmgggcacctgcccactcccctgctgccagaactgcgggagcgctgaccgggggacctcaggacctggattctcctccaggctaccctgtgtgaccttgagc

SEQ ID NO: 482964 - DNA, 201 bp, Homo sapiens
tacttggaaaggagctgaagactcatccttcaacagtttgtgcctggattttggtcctcatttcctccctatactgagtaaccctaggacttcaatttaargtccctggggttatgcttcctgggcctggcaagaacccctttgcaggtctcaccttcagcgatggaagggataagggtcatgaacagcaaacagagcagc

SEQ ID NO: 482965 - DNA, 201 bp, Homo sapiens
ttgtgaggtagtctggacaccagattggggaaggacagcttcagcctctgggagaaacacacaggatcaggaccaatgaggagaggccctgcactctgatyggggggccaactgtaggttccagcctggagctggtgtcccctgtatctccgaagtggctggcctgatgctaggcagggtgtccattaaggcaaacatgtt

SEQ ID NO: 482966 - DNA, 201 bp, Homo sapiens
tcccatctggctctggggatcaatcccatctggctcctctccccacctccacccccgcaccctgggtgtcttcaccactttcatctcccgtgtcagcccgmacggaaatagcggcggtaatgcttgtaagctcagacagcaggggccagcaataaggtttgagggtactggggcgctcactgccttaggctccgtccctgt

SEQ ID NO: 482967 - DNA, 201 bp, Homo sapiens
gcattcacgctgagggatagagagaggggacacagcatgagccccacatccacaagtcctcaccttgcgagtctctcttccaccctatcatctaccagctrggatgactcagttggcaagagtggagggttggggctgggcagaggtgagaagagagtagcagcctgcccgggctcccaggtacaggactccccacctgga

SEQ ID NO: 482968 - DNA, 201 bp, Homo sapiens
ttgcccttggagagcaacagctgttttggactaagcacttaagaaaggttaccttgttagtacctcgtaatactacctctccccattctccagagagagaraaaaaaagaagttttaattgctagtagctattagaggtgggattaaaaccaagctctaggtcgcttgttctatgatattctgagtttccaggcaggatgt

SEQ ID NO: 482969 - DNA, 201 bp, Homo sapiens
atcctgaccacccacaccaccctggagcactcagactgtgccttcatggtggacaacaaagcaatctatgacatctgccaccgcaacctagacatcgagcrcccaacctacaccaacctcaatcgcctcattagccaaattgtctcctccatcacagcttctctgcgctttgacggggccctcaatgtggacctgacagag

SEQ ID NO: 482970 - DNA, 201 bp, Homo sapiens; identical to SEQ ID NO: 106124

SEQ ID NO: 482971 - DNA, 201 bp, Homo sapiens
cctagggcaggggagtgcaggggtttgatgggtgggggcggtgctggagctcagggtcttgatttctaaatcatcttccacctgtgaagtgcaggctgtgccaccaggaaatgggattgcgtgactgacaacagataccatgtacccagaggcctggatacctgtgtggagttactagccctggcccctcctctgcccacc

SEQ ID NO: 482972 - DNA, 201 bp, Homo sapiens
cattagccaaattgtctcctccatcacagcttctctgcgctttgacggggccctcaatgtggacctgacagagttccagaccaacctggtgtcctacctcrcatccacttccccctggccacctatgcaccagtcatctctgcagaaaaggtataccacgagcagctgtcggtggcagagattaccaatgcctgctttgag

SEQ ID NO: 482973 - DNA, 201 bp, Homo sapiens
gctccatgcccaggaactctgggccagcccagccccactcccaaaccctcataatgcacagaggagcctgggccaagccttgcttccagagttggtaaatktagaggcagcaggaagaacagggtagcagtctaactttcaaagacagaaaccactggattatactcctacttggaaaggagctgaagactcatccttcaa

SEQ ID NO: 482974 - DNA, 201 bp, Homo sapiens
ttcctggtgttccacagccttggtcggggcactggctctgacgtcacctcattcctgatggagtggctttctgttaactatggcaagaaatccaagctggrattctccatctacccagccccccaggtgtctacagccatggtccagccctacaactctatcctgaccacccacaccaccctggagcactcagactgtgcc

SEQ ID NO: 482975 - DNA, 201 bp, Homo sapiens
atggtccagccctacaactctatcctgaccacccacaccaccctggagcactcagactgtgccttcatggtggacaacaaagcaatctatgacatctgccrccgcaacctagacatcgagcgcccaacctacaccaacctcaatcgcctcattagccaaattgtctcctccatcacagcttctctgcgctttgacggggcc

SEQ ID NO: 482976 - DNA, 201 bp, Homo sapiens
gccctcaatgtggacctgacagagttccagaccaacctggtgtcctacctcacatccacttccccctggccacctatgcaccagtcatctctgcagaaaargtataccacgagcagctgtcggtggcagagattaccaatgcctgctttgagcctgccaaccagatggtgaagtgtgatccccggcacggcaagtacatgg

SEQ ID NO: 482977 - DNA, 201 bp, Homo sapiens
ggtagtgtcaacagtgtggatacgctgcacacagggatgttctagacatgatggagtaggatggcactagatttcatcacactactcagaatggcgtgcartttaaaacgtatacattgtgtttttctggaaccttctctttaatattttcagactgtggttggctgcaggcaactgaaactgcagaaagtggctaatggg

SEQ ID NO: 482978 - DNA, 201 bp, Homo sapiens
atctgataagggatccggctactcagtggctaatgggtaggtagtgtcaacagtgtggatacgctgcacacagggatgttctagacatgatggagtaggayggcactagatttcatcacactactcagaatggcgtgcagtttaaaacgtatacattgtgtttttctggaaccttctctttaatattttcagactgtggtt

SEQ ID NO: 482979 - DNA, 201 bp, Homo sapiens
tgggtgacagagtgaggccctgtctcaaaaaaaaaaaaaaaaagaacaataatgatatagagaaataaagcaatgatagtaatatgccagcatcactgctyttgagcggtggggctgttatgaggtagaataagggttacatgagcagaagcatcgccacagtcgatctgataagggatccggctactcagtggctaatgg

SEQ ID NO: 482980 - DNA, 201 bp, Homo sapiens
tataatattccatcgtatagcataccaacacttgttttaccagtctgctattaacgggtatttagattgtttccaatcttttgctattaaaaagaatgctrcaacccttgtatgtattttttttgcacatatatatgaccatacattcttagaattgagatttctgggtcaaagattatgcattttaaatcttgctctctt

SEQ ID NO: 482981 - DNA, 201 bp, Homo sapiens
gctactcaggaggctgaggtgggagaattgcttgaacccaagaggcagaggttgcagtgagctgagatcatgccactgcactccagcctgggtgacagagkgaggccctgtctcaaaaaaaaaaaaaaaaagaacaataatgatatagagaaataaagcaatgatagtaatatgccagcatcactgctcttgagcggtggg

SEQ ID NO: 482982 - DNA, 201 bp, Homo sapiens
agcagacacgctgggctcccgagggcctccgcggagatgcagggtgctgtggcagggcgagtctcacctgcacctgcgtcctggaggcaccggtcatccakgtgttctgacttaggtcgggagcaggcgaggcggtccttcccaagcggccacagctggccttcacccctgcccttccagccctgcctcccaggagactcg

SEQ ID NO: 482983 - DNA, 201 bp, Homo sapiens
cacctcattcctgatggagtggctttctgttaactatggcaagaaatccaagctgggattctccatctacccagccccccaggtgtctacagccatggtcmagccctacaactctatcctgaccacccacaccaccctggagcactcagactgtgccttcatggtggacaacaaagcaatctatgacatctgccaccgcaa

SEQ ID NO: 482984 - DNA, 201 bp, Homo sapiens
gacatctgaacgtcctgaatatagagacagaagttttttgttgttgttgttgttgttttaacatgtttaaccaacagaagttatttacagaaattcatatrtccaggcaacacaaaactcctttattcaaaatcactgctatctttgggactaaacacaggctactttctgtttactcctaacaaaataaagcaagcaaat

SEQ ID NO: 482985 - DNA, 201 bp, Homo sapiens
aataacatttgtggctatgacgttctatagcaaaaatatatttcaacttgcaatggtaggctggagctagctggctgagcagatagttaaatatagaagayttctgtgagccagttattaaactactgatggctcaaaaggggctatggtaggtattttcacaccaaagaaattggcaaacatacaaaccagggttttttt

SEQ ID NO: 482986 - DNA, 201 bp, Homo sapiens
atttttggagttttctatactcatcattgaagctgtgatactcagttaaaactcttctaccactgctgtttatgggacacttttgatgggaagggaatttwtacaacatttgaaattttcagactaatttggggatgggcgggacatttcaaagcagggcacctgggcattgccttctctctccaaccattcatttctctg

SEQ ID NO: 482987 - DNA, 201 bp, Homo sapiens
tctttgcttggatttatcctgtatggtccattagatttggcagtttacaatggcattgctgatttcaggcaacaagcagagaaaagccaaactgtagtggkttgaaaagtgaatggatgactagtttaatcatgaggaataccagacaaaaccaatttaagggtttatacttaccaaaatgttcaaagttatgaaagttat

SEQ ID NO: 482988 - DNA, 201 bp, Homo sapiens
tgcttagggggaaaagcctaaagaaatacagaaaaatataagtattatgtgcagttaccttttaatgatgcgatttcacttgttggaatttgtcccgagamtagattgttttcaaaagggaaaaaaatgcatccatgaagatgattattttaagaatgtctctaatagcattatcattatgatgataagtatcatggccaa

SEQ ID NO: 482989 - DNA, 201 bp, Homo sapiens
ttttctaatgtgctgttatacatggaggtttccctgtcataaaatatttctccatttataatctgcattgaatttctcaatgcagagggaagaaaactgcrtacctataagtatagtcaacctcaagagtatctgtactttataactgagtaaatgaggcttatacatccttacatctctaaagtgttttgttttgttttg

SEQ ID NO: 482990 - DNA, 201 bp, Homo sapiens
ttttgagatgaaactgttccacctcagatcatcaggcattagagtcttataaggagcagcaacctagatcccttgcaggtgcacttcacagtatggttcgygctgctatgagaatctaatgctgtgggtggtctgacaggaggcggagctcaggtggtaattcttgctggccctctgcccacctcctgctgtgcagcctgg

SEQ ID NO: 482991 - DNA, 201 bp, Homo sapiens
ttaggcgggaatttcctcatcctaataagcctgggagtgctacgggagactggggcttatttcatccccacagcttcgaccataaaagtcagccgcccccygaagcggccatttcagaggcctaccctcagggacgcattctctttctcagggatgttccttgctgagaaaaagaattcagcgatatttctcccatttgct

SEQ ID NO: 482992 - DNA, 201 bp, Homo sapiens
aagtcattcattaaattaatgctgacttgtctaagattattagttttacttttatctgatattaacatcttcttagaatagtatgtactccacaatggacratccataaaaactcctgaatgaataaaacattaagactactggtactaagctatggcaaatggaaagtattacgaactcatctgtagcctaccgaagtct

SEQ ID NO: 482993 - DNA, 201 bp, Homo sapiens
aaaaagggtatagacagagctaaagacagaattgcgttgaaagatcaagcttaataaaattacacaaaagacagcacagagagaaataataaatggaaaayatgaaaaaattaataaaaataaaggttagaggagaaagtctaacttaggtctccagaagctggcttctgcaaccactattaccctgaagctctggcagga

SEQ ID NO: 482994 - DNA, 201 bp, Homo sapiens
aaaaagtgagccagatgtgttgatgcatgtggtctcagctgcttgggacgctgaggtgggaggattgcttggtcccaggaggtcagggctgcagtgagccrtgaccatgccactgcactccagcctaggtgacagagcaagatcctgtctcaaaaaaaaaaaaataaaataaaaaataaaaaaaggaacaggagtgaactt

SEQ ID NO: 482995 - DNA, 201 bp, Homo sapiens
ttatgcaggaaatattctcattttaaaacacttgtactaaaataagggcagtaagtaaacgcatacatatatatatttactacacacacacacacacacastaactgggaaccaaaacaggaaaaaaaaaaaaaaagaacttggaagatatacagaaaatactaacagaagtaaacttctaatcaatatcctgagagatat

SEQ ID NO: 482996 - DNA, 201 bp, Homo sapiens
tacttgggtgcatgacaccatacccagctaatttttaaatttttttgtagagatggggtctcactatattgcccaggctggtcttgaacttctagcctcamgtgatcctcccacctcaacctcccaaaaatgctaggattactctaggtggttttaaattttcagttcttgatttttgtggaacctttacactcttgtcta

SEQ ID NO: 482997 - DNA, 201 bp, Homo sapiens
acatcagggaatcagtgatggttttggtgtggaggagtgaaatgataaaagtattacttttgaaagattaatttggttccttttacagtgcaatttgcagyggggagagaatggaggaacagaaattagctaagagaggctgtgcacgatggctaggcgaaggttcccaaacctcagttcttgacttctacacaggctcaa

SEQ ID NO: 482998 - DNA, 201 bp, Homo sapiens
ttggattcattgggtgagtatttccttttatgcatgtctttcctagaatacatagcagatcaggcatatctgccaattcttctgacaattgacaggatttyggcctttggatttttagccttgaagttaccccttttcaccttgccactagtgtcagccttcttgccttcaggcttcttctccttagtatccggcttctca

SEQ ID NO: 482999 - DNA, 201 bp, Homo sapiens
tccatatgttgaactctaaaatagctttaaaaataaaaacacctgattttgaaaataatttatattttgctaatctataacagccttactagcacatattaacagacatttataactatcttgttagaaaacaatatatttgattcatacaacttatttttaactatgaagctaaaagttcattaatatttggttatagct

SEQ ID NO: 483000 - DNA, 201 bp, Homo sapiens
gaataaatataaaattatgctcttttcatgtgtagcttaggtgatctatttcattattttatagttgttgtttctgtaacattggaaatttttaaaaaatsctaaaatgtagtagggttacagctctgtttcaaaattcactgaaatgttattaatatgtagtgcttatataagagcaactaatagccaggtgcagtggct

SEQ ID NO: 483001 - DNA, 201 bp, Homo sapiens
tgctcttttggatgtaataattttgttagcctaaatcaagagaactggtaaatagagagaaattactgtactcaatgtgtcttagtgacttcaaaccctamcctagaaactatatggaaagaggtatccgtgacagtaagatgattgtggattccacttaagttccaaaaactttttcaattaaactgtttgggaagaatt

SEQ ID NO: 483002 - DNA, 201 bp, Homo sapiens
ccatatgttgaactctaaaatagctttaaaaataaaaacacctgattttgaaaataatttatattttgctaatctataacagccttactagcacatattaacagacatttataactatcttgttagaaaacaatatatttgattcatacaacttatttttaactatgaagctaaaagttcattaatatttggttatagctt

SEQ ID NO: 483003 - DNA, 201 bp, Homo sapiens
catctaatctttaatacttttactattttatttatgttgagttatgtatccattgttctattgtgggaacagttctattggttttgctttattttttctcractttatattcattcctcatatcagtgataaaacatgttgaacgtaaagattcttacatattgtataggataactatgatattttcatttatgagaacgt

SEQ ID NO: 483004 - DNA, 201 bp, Homo sapiens
catatgttgaactctaaaatagctttaaaaataaaaacacctgattttgaaaataatttatattttgctaatctataacagccttactagcacatattaacagacatttataactatcttgttagaaaacaatatatttgattcatacaacttatttttaactatgaagctaaaagttcattaatatttggttatagcttc

SEQ ID NO: 483005 - DNA, 201 bp, Homo sapiens
atatgttgaactctaaaatagctttaaaaataaaaacacctgattttgaaaataatttatattttgctaatctataacagccttactagcacatattaacagacatttataactatcttgttagaaaacaatatatttgattcatacaacttatttttaactatgaagctaaaagttcattaatatttggttatagcttct

SEQ ID NO: 483006 - DNA, 201 bp, Homo sapiens
taaaaataaaaacacctgattttgaaaataatttatattttgctaatctataacagccttactagcacatattaacagacatttataactatcttgttagaaaacaatatatttgattcatacaacttatttttaactatgaagctaaaagttcattaatatttggttatagcttctttttatgtgttaaaaatttaaaca

SEQ ID NO: 483007 - DNA, 201 bp, Homo sapiens
aaaaataaaaacacctgattttgaaaataatttatattttgctaatctataacagccttactagcacatattaacagacatttataactatcttgttagaaaacaatatatttgattcatacaacttatttttaactatgaagctaaaagttcattaatatttggttatagcttctttttatgtgttaaaaatttaaacat

SEQ ID NO: 483008 - DNA, 201 bp, Homo sapiens
aaagacaggatatatgagaaatgctatgaaagtgtgatcttaggatgaactctaggagaggattgggagagcaagaactgaaaggctgggaggtttatcartagaacaggtgaagaggatgtgtagaattgtcatacatttcctacggtttcaagggtccatgaaaaccttacaagacagtaacgaattagaaggaaaata

SEQ ID NO: 483009 - DNA, 201 bp, Homo sapiens
ttcccttgggccattgtacatgctattctcctccttcccctagctatcagctatttctgttcatatttggagtctgtcacttcatctggggaagcctttcstagagctcttactagcactcttatacattctcagtaacatcatgtagtttcacaactgaaatgaatattttcctatcacattacaattgcattccttaac

SEQ ID NO: 483010 - DNA, 201 bp, Homo sapiens
aatcagcaatgaagaaaagaagaaaaaggctaccttctagaggtgtgttgatattaaataagaaaatacatttgaaagatacttaactgaggcctggcacratggctcatggctgtaatccaatctttgggaggctaaagcaggcagatcacttgaggtcaggagttcgagagcagcctggccaacatggtgaaactctat

SEQ ID NO: 483011 - DNA, 201 bp, Homo sapiens
aagagtggtatttgaaaataccttttttattttatttttccagatgtgcctcttcattttcactttgaaacactgttaaaaaagactgaaataaaaggcartcttgctgaaaataaatttgtagatgaatatatcatatctccatcacctggtatgtcacatttacagttcttgtactctatatgcctttttatgtcttta

SEQ ID NO: 483012 - DNA, 201 bp, Homo sapiens
ggtatttgaaaataccttttttattttatttttccagatgtgcctcttcattttcactttgaaacactgttaaaaaagactgaaataaaaggcaatcttgmtgaaaataaatttgtagatgaatatatcatatctccatcacctggtatgtcacatttacagttcttgtactctatatgcctttttatgtctttatactta

SEQ ID NO: 483013 - DNA, 201 bp, Homo sapiens
ctgttaaaaaagactgaaataaaaggcaatcttgctgaaaataaatttgtagatgaatatatcatatctccatcacctggtatgtcacatttacagttctkgtactctatatgcctttttatgtctttatacttactatttttgcattctaagaaaaataaaatctaagaaaagaatacatgaaaatccttaatttttaat

SEQ ID NO: 483014 - DNA, 201 bp, Homo sapiens
tgtattgcagcattttgtgtccactactaactataatcaccttgtgtaacaagtcaatacgaacttccaagtacttatttatctattagagagtggaagtrctatcaaagtttcattacgaaacaaacctgattaatgaagaatagcacctgctacatggccaaagttagctgctatttctttctcctcatatcttaagat

SEQ ID NO: 483015 - DNA, 201 bp, Homo sapiens
tcttttagagattcctcagaaattctgctttacaggttccactttttgcttgcaaatgtggatttatatgtgcctatctgtgcatgtacctatgtaaaacrtatttgtctatcatgtttagggtcatttgccatcttgaaaccagacactccttgtcagctggtaggccatgccctttatttcagtgtgagtttggcactt

SEQ ID NO: 483016 - DNA, 201 bp, Homo sapiens
tgttgtagggtggcagggcaggtatgacaggatcagattgttctttccaaataattggtatagaagggactagaggggaaaatgtggatgagggagaccastttcaaggctattgagtaaccctggtacaagatagcttggattagggaggaggccagggaaatatagaaaggtataagcctgaaacccactctcactact

SEQ ID NO: 483017 - DNA, 201 bp, Homo sapiens
gagcaaagcaagtggcacagaagaaacagcaggcaggttacaaatttaaaaccccaagccatagaatccatgtgaaatgaacaaaacctctgcatgaattytgggtgagaccagtaaaaaggaaaacatgctgttgtaacatcagctattgtgcaccagaagtaaaatactacatagaatgagcttgtattcaaaatatat

SEQ ID NO: 483018 - DNA, 201 bp, Homo sapiens
acatgcctcttgaagcctaggctccagatctttttttttttttttttttgagacggagtctcgctctgtcacccaggctggagtgcagtgacgtggtctcrggtcactgcaagctccacctcctgggtatgggggaaattcagccagatattgggcaaaattcacccccgatatttcatgtaggttcttttctgttttccc

SEQ ID NO: 483019 - DNA, 201 bp, Homo sapiens
ctttctcagaacacagagaacaagggaaagcatcatgcaagatgagacaagggaaagcatcatgcaagatgaggcaagagaactatggaagaggccagacytatcagggccttttaaaagattaaggatttaagtctttcaagagcaatgggaggatgttggaagattttaagcagtgtgtgtgtgtgtgtgtgtgtgtgt

SEQ ID NO: 483020 - DNA, 201 bp, Homo sapiens
cagaaaaaagtatgttatgttttcagagaataggggctgtatctttttatttccagatctgcagggccttgaagagtacctgtctgatagaatgtgctcartaaataattgtttaatgtgttaaagaattaacgaagtggaacataggaaaatatttaaaaggcaatagagaattggaactgtgtgtgtgtgtgtgtgtgt

SEQ ID NO: 483021 - DNA, 201 bp, Homo sapiens
aataaaaacacctgattttgaaaataatttatattttgctaatctataacagccttactagcacatattaacagacatttataactatcttgttagaaaacaatatatttgattcatacaacttatttttaactatgaagctaaaagttcattaatatttggttatagcttctttttatgtgttaaaaatttaaacattat

SEQ ID NO: 483022 - DNA, 201 bp, Homo sapiens
gacttttcattgattttgtaaactattcaaataaacatcattatatgtgtatcttcctggcatatgtgttattaaactaggccatctggcattaaatacarttaaaatatttgacatatgaccagtctccattataataccaatataatttaaattatttaaatataatatgtaaagtaatggaattggtatggctatagg

SEQ ID NO: 483023 - DNA, 201 bp, Homo sapiens
tctgcttcctcttgaatgctttgccacttagaaatttcttccaccagatactctagatcatctttctcaagttcaaagttccacagatctcttggccaggrgtaaaatgttgccagtctcttttctaacacagggcaagaatcacctttattccagttgtcaacaagttcctcatctccatctgagatcacctcagcctgg

SEQ ID NO: 483024 - DNA, 201 bp, Homo sapiens
tggtatatatattgttatagcaccctgttttaaccttgctgagctggaatttattatactattttataatcatttcttttctgacttttcagaaaaaagtrtgttatgttttcagagaataggggctgtatctttttatttccagatctgcagggccttgaagagtacctgtctgatagaatgtgctcagtaaataattgt

SEQ ID NO: 483025 - DNA, 201 bp, Homo sapiens
acctttacactcttgtctatattggaactaaagtaaatatttaggggagaaagaaaacatccctcacattggttatctccggttcttctttactgggggayatctcaacttagcttttgttccattttccgcttatggttctgatggtcttttaaattctcaaaatcaagggactgatttatttgtaaagcactatgtttt

SEQ ID NO: 483026 - DNA, 201 bp, Homo sapiens
atatgacactaaaaggtactttagtgacataaaaactatagcaacaaataatccttgcccttgaagatacaggtgtgacataagttgcaaagagttctacrttttcatggggtattcacactgtaagacagtaatacctgtgaccaaaaaaaaaaaaaaaaaaaaaagattttgatgcattgccaagtcagcaataaacac

SEQ ID NO: 483027 - DNA, 201 bp, Homo sapiens
aatgacatggattcccttgacatatgtgagaatcccacaaagattttgagaattttatacctgaagcaacactaccagcttaaaccaaaaggggcaaagaygagacaaaatgaaaaaggttgtcagacccccaaaattttacaggcaggaaatgcactgatagaacaactcagttgcaaacacttattacccgccaataaa

SEQ ID NO: 483028 - DNA, 201 bp, Homo sapiens
tagaaaaatgttttattttttggttttcttaacattttttagtcagactttataacaatgtatttacaaaaattatgtaacgtgtactgccatatttacayaactgatgaaaggagggtatcattacaagtaactagacagtactgtaaatctactgtaatcctgttttgcagaatactgcacgacggagattgagaagtg

SEQ ID NO: 483029 - DNA, 201 bp, Homo sapiens
ctaaaaagatacatgacaactaaatgaatatatgatctagagcagaattcttttcaagggaaaaaaaattattgggacaattgaggaaactagactattgrtggtagattagacaaaatattttattaatgttgaattccctgaatattattgtttttgcagttatgtaagaaaatatccttattctatgaaatacacatt

SEQ ID NO: 483030 - DNA, 201 bp, Homo sapiens
attcttcataattttaagtattaatggtaatgatctgtcctcacagtgcatttaaagtaaacttacctggttaattatttcccagggcatgtttgcacacytgctatttattgattactaactcctatcttttatttaataacaatatcgcctagaaaagtgtcaagagttttttttttttttagctttattaatcttggc

SEQ ID NO: 483031 - DNA, 201 bp, Homo sapiens
ctatctttgtgatataaagtctagttgtgaaaaaaaaatgacaccacctaaatgatcacacaaatgtataattttaaaccttgatcaagtgctatgaagawaatttttattgttaagaatattactttggaattagatcacggttcaatcccaaattgaccaattggtagtattgatcctgcacggcaatctgaattagat

SEQ ID NO: 483032 - DNA, 201 bp, Homo sapiens
ctgctgttatcttagagaatatgtatatcatcatgaacagaatttgctagaaacatgaatgttaaaggtgccttcagtgaagtttcagaaggaaatggggracacgttattagaaactggagggaaggctatccttgttataaagtggcagaaaacttggctgaattatattctactgtgaggtggaaaatagaactttta

SEQ ID NO: 483033 - DNA, 201 bp, Homo sapiens
acaaaccagggtttttttccttctctgttactttttggccaggccagtttatcagcgtaccactgacttcagtcagtacataattattatgtataaaatgyagctatacagaacagactattcaccataaggccaaaaataaagtctcattttctcttttgtccttttctcataatacaaatgtttttcttttaaaaaatt

SEQ ID NO: 483034 - DNA, 201 bp, Homo sapiens
atgacagatagttctgtaataattggtattttcccccatctactcttattgtggaaaacttcagacatatagaaagcatagtaaagtgaacccacatattytcagctttaacagttttcaaaattttgctaattcttttgttattccttttcctgacacactttctttttctaggcatttgtaaagcagtttctagtgatt

SEQ ID NO: 483035 - DNA, 201 bp, Homo sapiens
tgcacaactgttacagggaagaaagaaaagacatttgagtgaaacagcattaggtaggttaaagtgaggatataagcagtagtgataaatattaaaaattwaaaattctgattttaaaataacctctcatgggagtttataatccagaacagccactaataacacaaaacatctatgagtctacaaacatgaaacagcata

SEQ ID NO: 483036 - DNA, 201 bp, Homo sapiens
gaggattgcttggtcccaggaggtcagggctgcagtgagccatgaccatgccactgcactccagcctaggtgacagagcaagatcctgtctcaaaaaaaawaaaataaaataaaaaataaaaaaaggaacaggagtgaactttcatgcataaacttactgagatctctttttgttatttaaaggccttttaaacatttcag

SEQ ID NO: 483037 - DNA, 201 bp, Homo sapiens
atagccatttcaaaatgtattagacatcctaataaaagagaaaaaaaaaggctgggcatggtggcttatgcctgtaatcccagcactttgggaggccgagrcgggtggatcatgaggtcaagagatcgagaccatcctggccaacatggtgaaaccccatctctactaaaaacaaaaattacctcggcgtggtggcacata

SEQ ID NO: 483038 - DNA, 201 bp, Homo sapiens
agaaagcatagtaaagtgaacccacatattctcagctttaacagttttcaaaattttgctaattcttttgttattccttttcctgacacactttctttttytaggcatttgtaaagcagtttctagtgattgttattttaactataaatagttctttatatttcattgataagccttttaacatacctaccactttattat

SEQ ID NO: 483039 - DNA, 201 bp, Homo sapiens
gtagtgcataatcaattacgtatttgttgaatgtatgatagtcaccaaatgccatatttaattattttatttagttttaccaacacaagccattcagacayctttatttctggtttcttattactatgtaaagcattcttgaattatttactttatccacaagctaatataatattttatagtagccataaatatgattca

SEQ ID NO: 483040 - DNA, 201 bp, Homo sapiens
tgagttttttttttcttttccatttttttttttagacatctcgctatgttgcccaggctggtcttgaactcctgggctcaagtgatcctcctgccttagcmtcccaaagtgctgggattacaggtgtgagctactgtgcccatcctgaatatttaatttattttgtttttattttaatttaagtagccacacatgggtaat

SEQ ID NO: 483041 - DNA, 201 bp, Homo sapiens
ggagatctagaccatcctggctaacatggtgaaaccccatctctactaaaaaatacaaaaaattagctgggcgttgtggcgggcgcctgtagtcccagctrctcgggggctgaggcaggagaatggcatgaacccgggaggcggagcttgcagtgagcggagatcgcgccactgcactccagcctgggtgacagattgaga

SEQ ID NO: 483042 - DNA, 201 bp, Homo sapiens
ctccatctgcgctcagcctggtgcacaggttacatgcccatgaagctggtcctgggtatcattttaggtctcattgctgatgaaactgtcagggcctttgrtagtatagggaaccaagagttgtgagagcagtaatggctctatgtaaagagagcagaagtaaaagatgcagaaagggcagcagcaattacttgtagaggt

SEQ ID NO: 483043 - DNA, 201 bp, Homo sapiens
tcctgtgagaaaatatgctttatataattgcagataaatttggaagctaccaaattaaagagtctagaagttattttttgtagggaagcagcacattttastggtttcatactggattgtaatccttgttctacttaatagtgtgcagtactgtgcaaattacttactactttgttttcctcatccataaaaataggacta

SEQ ID NO: 483044 - DNA, 201 bp, Homo sapiens
ttgagacacagagaaggctatatgaagatgaaggcagagatttgagttatgcttccacaagttaaagaatgtcaggggccaagcagacacagtggctcacrcctgtaatctcagcactttgggaggctgaggaaggcggatcatttgaggtcaggagttccaaaccagcctgaccaacatggtgaaaccctgtctctacta

SEQ ID NO: 483045 - DNA, 201 bp, Homo sapiens
ccgggcgtggtggtgcgcatctgtaatcccagctacttgggaggctgaggcaggagaatcccttgaacctgggaggcggaggttgccgtgagccgagatcrtgccactgcactctagcctggatggcagagcaaaactctgtatcaaaaaaaaaaaaaaaaaaaaaaaatcatgtccaggcacctcaattgagaggtagac

SEQ ID NO: 483046 - DNA, 201 bp, Homo sapiens
cattgttatttcatagattctcaaatcataatgctgagtggtttaataaaataatccagtggtacgaattaaggtacatataataatttcatttgaaagtkttcatttcctttttaaaatgtgaatgattaggtatgtaaactttatgtgaatgcaggccacttttttgaacaaataatagaagattttaaagaaaaataa

SEQ ID NO: 483047 - DNA, 201 bp, Homo sapiens
gagacggagtctcgctctgtctcccaggctggagtgcagtggcgcgatctcagctcactgcaaattgcgcctcccgggttcacaccattctcctgcctcarcctcccgagtagctgggactacaggcgcccgccaccacgcccggctaattttttaaaaatatttttagtagagacggggtttcaccatgttagccaggat

SEQ ID NO: 483048 - DNA, 201 bp, Homo sapiens
aaataggaatgtggattctgacaaattagctttcattgaaagacttttcctgcccggcacggtggcttattcctgtaatcccagtactttgggaggccaargcagagggatcacttgaggtcaagagttcgagactggcctggccaacatggcgaaaccccatctctactaaaaatacaaaaattagcccagcgtgaaaaa

SEQ ID NO: 483049 - DNA, 201 bp, Homo sapiens
aaattgctaatgaagtttcgggcacgcattgtcattgataacatcttatcaggagacagggtttgagagcagacaaccagtcggaccaaaatttattaggygggaatttcctcatcctaataagcctgggagtgctacgggagactggggcttatttcatccccacagcttcgaccataaaagtcagccgccccccgaagc

SEQ ID NO: 483050 - DNA, 201 bp, Homo sapiens
ctgcagtgagctacaattgttctactgccttccagcctgggcaacagaaggaaaccctgtctgtaaaaaagaaagaaagatttttaaaaagagataaaccytatttttttttaaaagaatgtcgtgtgatgatggtttcttatattgatttattaatgatatccttgtcttacagatatcattaggttcctattttagtca

SEQ ID NO: 483051 - DNA, 201 bp, Homo sapiens
ttttcctgtgcttgacatcgagtgctgaatgtagtttagtacatgtcttagattccaaatgtctaaaagcatttttatcacatatcattaagtagcagcawtttccaaagcagtcatctatcatgttgtaatctttctgattggatggtaaatgcatccttacaaattatcagcattacagtatttcatcaaaatggaata

SEQ ID NO: 483052 - DNA, 201 bp, Homo sapiens
tggcattctgttctgcaaatgacagctgcctcgtccttccccaactcaaacatctgtctctgccagtcagctagactgctactccctacttgagccacctyctttgtgccaaagtctgggtatataccaccatgcaacaaactggtagatttagaggatcacctcatttgttgttcatttcccagagataacactcatgtg

SEQ ID NO: 483053 - DNA, 201 bp, Homo sapiens
atccccactcccctggtggcctgactcccactccctggtggccccatcccccagttcctcacgatatggtttttacttctgtggatttaataaaaacttcmccagttcctcaggcgttggctggttgggggactgtggtcctggggcctggtttattgactgtatctactagtcagccttatcaagcactggtggcacaag

SEQ ID NO: 483054 - DNA, 201 bp, Homo sapiens
ctgtgttcttccctggccacaccctctacatcttcccaataaatggcccagtgtcacagaacaggccggaaatgaggccccaactcattctgcttcctgarttgggggtggtgaagggcaaggtccagccttatgattcccactccccagggccagccaagtctcgggatggtgaacgtactgtctattgcaacgtacaca

SEQ ID NO: 483055 - DNA, 201 bp, Homo sapiens
actgaggggcagcaggagcgcctggagcggcagcactggaccatgaccaagatccagaagcaccaggagcacattctgcgctttgcctcttgggctctggrgagtgacaacaacacagcccttttgctttctaagaagttggtgtgtactggtgggctcctggctggtgggttccaggcaggtggttcccaatacctcaaa

SEQ ID NO: 483056 - DNA, 201 bp, Homo sapiens
ctctgctgtgctggtggagcccccgccgatgagcctgcctggtgctggcctgagttcccaggagctgtctggtggccctggtgatggcccctgaggctggwgcccccatggccagcccagcctggctctgttctctgtcctgtcaccccatccccactcccctggtggcctgactcccactccctggtggccccatccccc

SEQ ID NO: 483057 - DNA, 201 bp, Homo sapiens
caggagcgcctggagcggcagcactggaccatgaccaagatccagaagcaccaggagcacattctgcgctttgcctcttgggctctggagagtgacaacamcacagcccttttgctttctaagaagttggtgtgtactggtgggctcctggctggtgggttccaggcaggtggttcccaatacctcaaatccctatttgtt

SEQ ID NO: 483058 - DNA, 201 bp, Homo sapiens
ggcagagggttctgctttgttcacagcccatggaggtgcaggaaggctatggctttgggtcaggtgagtgggtctgcctagtgggtggggaagggccccaktgctgtttctaccccaacctgccagtcttctttctccattttctaaggagatgatccctactcaagtgcagagccccatgtgtcaggtgtgaaacggtaa

SEQ ID NO: 483059 - DNA, 201 bp, Homo sapiens
gcctgcctggtgctggcctgagttcccaggagctgtctggtggccctggtgatggcccctgaggctggagcccccatggccagcccagcctggctctgttytctgtcctgtcaccccatccccactcccctggtggcctgactcccactccctggtggccccatcccccagttcctcacgatatggtttttacttctgtgg

SEQ ID NO: 483060 - DNA, 201 bp, Homo sapiens
atctgcagaaggtgactgaggggcagcaggagcgcctggagcggcagcactggaccatgaccaagatccagaagcaccaggagcacattctgcgctttgcytcttgggctctggagagtgacaacaacacagcccttttgctttctaagaagttggtgtgtactggtgggctcctggctggtgggttccaggcaggtggtt

SEQ ID NO: 483061 - DNA, 201 bp, Homo sapiens
ctcattctttcctccctttcactcccaaccagatctacttccagctgcaccgggccctcaagatgattgtggatcccgtggagccacatggcgagatgaartttcagtgggacctcaatgcctggaccaagagtgccgaggcctttggtgggtccccagctttacctcactctgttattaccccacgtgctgcacctactt

SEQ ID NO: 483062 - DNA, 201 bp, Homo sapiens
atcagttttctaatggggagacaggctttggaggttattaatgggttggtctttgggtgggattatgctgagcaccaagattctgctctagagggggtgtraccaccattctgagggtcctggtttgacatttcatctctcccagtatgagaacctctacaaggtttcctctgggcccttggattgtaagagaccctggtg

SEQ ID NO: 483063 - DNA, 201 bp, Homo sapiens
cgtcccaggcaaaggtcagggtgcaggaatgagtggcattggggaagtcagtttccccaatgagccctgatgctacatattttggatttggttggtatgtkggaccagtgtgtttgatcagttttctaatggggagacaggctttggaggttattaatgggttggtctttgggtgggattatgctgagcaccaagattctg

SEQ ID NO: 483064 - DNA, 201 bp, Homo sapiens
agaagagcaccaaggaggttcgcagctcgtaagtgtgggttctggggctgtgggggtggcccagggcagcaagaccctacctagcctgacctgctgtgtcycctagaatccgccaggtgtctgacgtacagaagcgtgtgcaagtggatgtcaagatggccatcctgcagatcatgaaggagctgaataagcggggccgtg

SEQ ID NO: 483065 - DNA, 201 bp, Homo sapiens
gcaagcagggctctggcagcagccaggtgagcaggagagaggacccaggaaggggtgggcagggaatggggtccagtagcaggagagaggacccaggcagsgggggtgggcagggaatggggtccagtagggttcctgtcccactgaggcagagggttctgctttgttcacagcccatggaggtgcaggaaggctatggct

SEQ ID NO: 483066 - DNA, 201 bp, Homo sapiens
ttggagaaaagaaggctcggggaggggaggggctggttcgctgcgggataatggtcgggggcccacccagcaggggaatggtgggggccataacctgggtsggaacttgtaacagtctcccacatccctgcttctcgaagtggtggactgtcccgtgtgcaagcaacagtgcttctccaaagacatcgtggagaattattt

SEQ ID NO: 483067 - DNA, 201 bp, Homo sapiens
gcccagagaggctttataggtgctgcccagagctgtgacatcccttacaatgtttgtagaaatgtgagcgtgtactgctggccctattctgtcacgaaccytgccgccccctgcatcagctggctaccgactccaccttctccctggtgagtcctaggatgggaaaggggaagggggtggtggctgctgggtctcgccctc

SEQ ID NO: 483068 - DNA, 201 bp, Homo sapiens
cttctctgcttacctcatacaccttctatctgcagaaggtgactgaggggcagcaggagcgcctggagcggcagcactggaccatgaccaagatccagaarcaccaggagcacattctgcgctttgcctcttgggctctggagagtgacaacaacacagcccttttgctttctaagaagttggtgtgtactggtgggctcc

SEQ ID NO: 483069 - DNA, 201 bp, Homo sapiens
gagcgtgtactgctggccctattctgtcacgaaccctgccgccccctgcatcagctggctaccgactccaccttctccctggtgagtcctaggatgggaarggggaagggggtggtggctgctgggtctcgccctcaacctgtgcatgtatatgtgtgtctttgtgtgtgtatgtgtgatctctgcctgcaggaccagccc

SEQ ID NO: 483070 - DNA, 201 bp, Homo sapiens
gggagatgtgaaggaaagaactaggacccattcatccactgcattcctgcttggcccaggacaaggcagacgtgcagtccatcatcggcctgcagcgcttyttcgagacgcgcatgaacgaggccttcggtgacaccaagttctctgctgtgctggtggagcccccgccgatgagcctgcctggtgctggcctgagttccc

SEQ ID NO: 483071 - DNA, 201 bp, Homo sapiens
gacatcccttacaatgtttgtagaaatgtgagcgtgtactgctggccctattctgtcacgaaccctgccgccccctgcatcagctggctaccgactccacyttctccctggtgagtcctaggatgggaaaggggaagggggtggtggctgctgggtctcgccctcaacctgtgcatgtatatgtgtgtctttgtgtgtgta

SEQ ID NO: 483072 - DNA, 201 bp, Homo sapiens
aggatgcgaaccaggtgcgtcctatctcagcaaccacaaggaggtttctggggagggggcatctgcgcaggaggagcttggcaccagctccaggctgttaytccactttcccaaggctctgggtgggctgcctaggttgggtcaagggaccaatcttaaatctccggttgtattttctgggatgtaaacgtggatctatca

SEQ ID NO: 483073 - DNA, 201 bp, Homo sapiens
caggtgcgtcctatctcagcaaccacaaggaggtttctggggagggggcatctgcgcaggaggagcttggcaccagctccaggctgttactccactttccyaaggctctgggtgggctgcctaggttgggtcaagggaccaatcttaaatctccggttgtattttctgggatgtaaacgtggatctatcaagttgtcttgc

SEQ ID NO: 483074 - DNA, 201 bp, Homo sapiens
ccgggcgcagtagctcagagacctgtaatcccagcactttgggaggcagaggtggttggatcacctgaggtcaggacttcgagaccagcctgaccaacacrgagtaaccccgtctctactgaaaataaaaaaaactagccaggcatggtggcgcacgcctgtaatcccagctactcagcagggctgaggcaggacaatctc

SEQ ID NO: 483075 - DNA, 201 bp, Homo sapiens
tcacctgttcttggtacttagcgtttccgcccatcctgtcctcctctatcagaacccccacaattgctctgtcctcggtgcccacagtctccaaaacaccrgtgcaccggcccgcgtcatcccccgctctcagtcgtatcaaggactccagggcctcacccatagttctggagagggaagctgaacttgcaagccataact

SEQ ID NO: 483076 - DNA, 201 bp, Homo sapiens
agttaactataaggataagctggcccggcatgatggctcaagcctgtaatcccagcactttgggaggctgaggtgggtggatcacctgaggtcaggatttygagaccagcctggccaacatggcaaaaccccactctaccaaaaattagccgggcatggtggtgcatacttgttatcccagctattcgagaggctgaggca

SEQ ID NO: 483077 - DNA, 201 bp, Homo sapiens
gtaagggtaagctataagctatggccaagaggctggtaagagacagccggaaccagtagggagagcatgaagaaggaacacagcctttgatgggtgagagrgttttggcctgaacaggtaggcagagaagataccatttcttgggatgggcaagaaagatgtttggagaggaaatcaaaagctgagcctcagataggtctg

SEQ ID NO: 483078 - DNA, 201 bp, Homo sapiens; identical to SEQ ID NO: 241252

SEQ ID NO: 483079 - DNA, 201 bp, Homo sapiens
cctggaccccatttcccacccaaggcccagccacagctccaagccctccctttccctgcattactcccctccgctgcctgaccccacctgctcaaaccccyactttctctgcagacctcccctcaactgggggctcgcttagtgtggctgctggtgggaaaaaagcagaggccgcagcctcagccctagctgatgctgatg

SEQ ID NO: 483080 - DNA, 201 bp, Homo sapiens
cagctactcaggaggctgaggcaggagaattgcttgaacctgggaggcagaggttgcagtgagccgagatcgcatcactgcactccagcctaggtgacagrgtgagactcttgtctcaaaaaaaaaaaaaaaaaaagtttgaaaatttattcaccaaaagtggcgacagtcaatttattcaaattctatgtacctcaaact

SEQ ID NO: 483081 - DNA, 201 bp, Homo sapiens
cgctgaaagcgcgcgtggctgtcggagttgaaatgggaaagaaactctttacaactccattttgctttttacgtttaacgagaaacgacaatcactgtttyatattgattaaagtccagttacactttgggtaggttttcttttaatgcagacttgttggagactgtgtaagtaagtaaaagattgtattgaacgcttagg

SEQ ID NO: 483082 - DNA, 201 bp, Homo sapiens; identical to SEQ ID NO: 250042

SEQ ID NO: 483083 - DNA, 201 bp, Homo sapiens
gcactctagcctgggcgacagagcaagactacatctcaaaaaaaaaaaaaaaaaagaaaaaagaaaaaatgtaaatactcctgtgttttactgttttagaycgtctgccatttcagtggtctgccatttcaatgtactatggtaagtgtcactttttctaaaagtgggtggggggattaaccttgcactcttgtggttgtt

SEQ ID NO: 483084 - DNA, 201 bp, Homo sapiens
accgctcccggccaaaagtcactcttcagccatttgaaataccagtaaaccccatagggtagaagttatgctgagagttgatgaacaagttagaaaaagarcatgtggaccctgggtcagctgctgccctagaatggggaccccttctgtaagctatgtcagaatcatctaccagcagtgacagatgtcctgtaaagtgcc

SEQ ID NO: 483085 - DNA, 201 bp, Homo sapiens; identical to SEQ ID NO: 250043

SEQ ID NO: 483086 - DNA, 201 bp, Homo sapiens; identical to SEQ ID NO: 250044

SEQ ID NO: 483087 - DNA, 201 bp, Homo sapiens
catgtttattagagattttatgtttggtagggggtagttaccatatgtcagtttaaaaatttcataagtttagcagtttgttgttttttttttttgttttkttttttttgagaaggagcctcactgtgtcgccaggctggagtgctgtggcacgatcttggctcaactgcaacctccgcctcccagatttaagcgattccc

SEQ ID NO: 483088 - DNA, 201 bp, Homo sapiens; identical to SEQ ID NO: 250046

SEQ ID NO: 483089 - DNA, 201 bp, Homo sapiens; identical to SEQ ID NO: 250047

SEQ ID NO: 483090 - DNA, 201 bp, Homo sapiens
ttgagcatttcagttatttctggcttcttcatgaccaccacttcctttgtgttggtggcactctttggctagatcactgcccctctccattccatacactrgaagactatgctgtttttacctgtaataacagcttacctgggcactgatatttttcagctgactgtggggaaatgtttgtgaggtttggaaaacgcctcc

SEQ ID NO: 483091 - DNA, 201 bp, Homo sapiens; identical to SEQ ID NO: 250051

SEQ ID NO: 483092 - DNA, 201 bp, Homo sapiens; identical to SEQ ID NO: 250053

SEQ ID NO: 483093 - DNA, 201 bp, Homo sapiens; identical to SEQ ID NO: 250054

SEQ ID NO: 483094 - DNA, 201 bp, Homo sapiens
cgacagagcaagactacatctcaaaaaaaaaaaaaaaaaagaaaaaagaaaaaatgtaaatactcctgtgttttactgttttagaccgtctgccatttcartggtctgccatttcaatgtactatggtaagtgtcactttttctaaaagtgggtggggggattaaccttgcactcttgtggttgtttttcccattacaggt

SEQ ID NO: 483095 - DNA, 201 bp, Homo sapiens
tgtgagccactgtgcctggcctctgttagactctttatttttattttttgagacacagttttgcttttgtcacccaggctggaatgcagtgatgctatctyggctgcaacctcagcctccaaggtttaagtgattctcctgcctcagcctcccaagttgctgggattacaggcatgtgccaccacgcctggctaatttttg

SEQ ID NO: 483096 - DNA, 201 bp, Homo sapiens
cattttttaaattcccgttttgtcactttttctgataaaagatggccatattaccccttttcggccccatgtatctcagtaccccatggagctgggctaaktaaataggaattggtttcacgcctgaggcaattagacactttggaagatggcataacctgtctcacctggacttaagcgtctggctctaattcacagtgc

SEQ ID NO: 483097 - DNA, 201 bp, Homo sapiens; identical to SEQ ID NO: 235339

SEQ ID NO: 483098 - DNA, 201 bp, Homo sapiens
tgttccttgcctgtctttccccaaagaacttgagtttgaagtgattttcacttggcagtaaattgaaggttttcttcattgcttaccaccatgtgccttaytcctgctgctcttgatctccaagtgcccttactgctacagaaaggaaagctcttgaactaagagcttggcagccacttgatcaggatggccaaataatgg

SEQ ID NO: 483099 - DNA, 201 bp, Homo sapiens
gaaatatatatacttggtaaaagtaaactcctgcaataaggtttacaataagcatatataaattcttagccagctcactgggaggtacctaatggttcatwtttctttgtcagttttactagatacgcattgtcttagaggcaatgtaagtttggaattaggccaaacaaagtcaaatcctgattctgtgcatccattgaa

SEQ ID NO: 483100 - DNA, 201 bp, Homo sapiens; identical to SEQ ID NO: 250045

SEQ ID NO: 483101 - DNA, 201 bp, Homo sapiens; identical to SEQ ID NO: 250055

SEQ ID NO: 483102 - DNA, 201 bp, Homo sapiens
acatggagcttagattctaaatggggggcgggggagataagaaagaggaaaataatgaagtgccagatgatgatgagtacaggtgaaaaattaagcaggakaagtaaggggtgagagatgtcaggacaagtattcaaaaagtaatgattgcatcttaaatgaaagctgctcattctatgccatgatgccagtgaagggaat

SEQ ID NO: 483103 - DNA, 201 bp, Homo sapiens
tgggcactgggaatacaaagataaataaaatactcaatgctttgagatattcatgattaagctgagcaaaccacagaaaattataatgctgtaattgttakgttaaataaatgacatcatcatgcatagagttctgtagggtcacagagaaagaagatcaccaaaggccaggcacggtggctcaggcctgtaatcccagca

SEQ ID NO: 483104 - DNA, 201 bp, Homo sapiens
tcttatttatttatttatttatttgagatggagtttcgctcttattgtccaggttggagtgcaatgatgcaaccttggctcattgcaacctctgcctcccrggtccaaactattcttctctactcccgagtagctgggattacaggcacccgccaccatacctggctaattttttgtgtttttagtagagacgggatttca

SEQ ID NO: 483105 - DNA, 201 bp, Homo sapiens
ggctcaggcctgtaatcccagcactttgggaggccgaggcagacggatcacgaggtcaggagttcgagaccagcctggccaatatggtgaaaccccgtctytactaaaaatacaaaagttagctgagcgtggtggtgtcgcctgtagtcccagctactcaggaggctgaggcagaagaatctcttgaactcaggaggtgga

SEQ ID NO: 483106 - DNA, 201 bp, Homo sapiens
atttatttatttatttatttgagatggagtttcgctcttattgtccaggttggagtgcaatgatgcaaccttggctcattgcaacctctgcctcccgggtycaaactattcttctctactcccgagtagctgggattacaggcacccgccaccatacctggctaattttttgtgtttttagtagagacgggatttcaccct

SEQ ID NO: 483107 - DNA, 201 bp, Homo sapiens
gaaatacgcaggtatttagagggctctacccactccatctcaatttctgaggcactgaaccagtattttctttgttctatctgagtcatgggaatgtcagraacaaagatggacttatctgaacctaaaatactgtagaccagaaaacccccaacagagtttgtaacattgcaaattttggcagcatgatcagaacattag

SEQ ID NO: 483108 - DNA, 201 bp, Homo sapiens
ctcccgggtccaaactattcttctctactcccgagtagctgggattacaggcacccgccaccatacctggctaattttttgtgtttttagtagagacgggrtttcaccctgttggtcaggctggtcttgaactcctgacctcaggtgatccacctgcctcggcctccctaagtgctgggattacaggcgtgagccaccatg

SEQ ID NO: 483109 - DNA, 201 bp, Homo sapiens
ctgcctccaagcagaaaagccagttacctactatcaagactgcatttaagggatatattaggaacttctaagccggaaaaccaatgtatttgaaatgacartttatttctgcctgaacctacactgtctaggaatctgttcctggaatcctcagggtatacagatttcttctcaaatcagagctgtaaaaactacccattc

SEQ ID NO: 483110 - DNA, 201 bp, Homo sapiens
tatgttggtgattggattgtgttgttcaggaccaatgtagatttggtgctggataaattcttgttggagcttgctgctgtggaaccaagaatgaggtatctttttttttttttttaagaaacggaatcttgctgtgtttcccaggctggtctcgaactgggctcaagcagtcttaccacctcagcctcctgagtaaggatg

SEQ ID NO: 483111 - DNA, 201 bp, Homo sapiens
ctgggagacagagcgagaccctgtctcaaaaaaaaattaccactgccactgtgtcataatttagaaggattcatgttctctgcctccaagcagaaaagccrgttacctactatcaagactgcatttaagggatatattaggaacttctaagccggaaaaccaatgtatttgaaatgacagtttatttctgcctgaacctac

SEQ ID NO: 483112 - DNA, 201 bp, Homo sapiens
taaggcacagagttggctcggcgtccctggcagttaggaagacaggtccctggaggggccttggcgggtctccgctcgcgggagttccgcggtgtctttcycagtgctatctgcaggctggccagcttcctctgcgctccggaaagctgcggcccagcgcggactagtgaggacctccacagctcctgacattgccaggag

SEQ ID NO: 483113 - DNA, 201 bp, Homo sapiens
tgtgttgttcaggaccaatgtagatttggtgctggataaattcttgttggagcttgctgctgtggaaccaagaatgaggtatctttttttttttttttaaraaacggaatcttgctgtgtttcccaggctggtctcgaactgggctcaagcagtcttaccacctcagcctcctgagtaaggatgccattgtgcctggcaac

SEQ ID NO: 483114 - DNA, 201 bp, Homo sapiens
ccgagatcgtgccactgcactccagcctgggtgacagagctgagactgtctcaaaagaaaaaaaaaaaaaaaagatcacgaaagggtatgaggtagatacyacttgcattgagacctgaaggctgagtagggtaagaagaagagcatttctgaaagttgaatagcctatatagaagccggaaagagtagatgtgaaaatgt

SEQ ID NO: 483115 - DNA, 201 bp, Homo sapiens
ataggaaaacggatacgaatgtaaggcacagagttggctcggcgtccctggcagttaggaagacaggtccctggaggggccttggcgggtctccgctcgckggagttccgcggtgtctttcccagtgctatctgcaggctggccagcttcctctgcgctccggaaagctgcggcccagcgcggactagtgaggacctccac

SEQ ID NO: 483116 - DNA, 201 bp, Homo sapiens
attctctaggacacttaggtccccaaccctccctcgggctgtttatcgttgtgccagatgcacagcacattgtgtgacactgacttaagattctaactatrtgcaagagggaaaaaaacagtggagaaggctgggctggaccacgggaaagagataggaaaacggatacgaatgtaaggcacagagttggctcggcgtccc

SEQ ID NO: 483117 - DNA, 201 bp, Homo sapiens
tttcgtatagctcagtatattcatgtagcacagtactggtccatatcatgtgctgggtaaattcatttagaaggtattcattgaatatctctgtgtgccasatgctgttctagatagtagagatgcagcatggagcaaaacaaaaatccctgtctacatggagcttagattctaaatggggggcgggggagataagaaaga

SEQ ID NO: 483118 - DNA, 201 bp, Homo sapiens
ccacgggaaagagataggaaaacggatacgaatgtaaggcacagagttggctcggcgtccctggcagttaggaagacaggtccctggaggggccttggcgkgtctccgctcgcgggagttccgcggtgtctttcccagtgctatctgcaggctggccagcttcctctgcgctccggaaagctgcggcccagcgcggactag

SEQ ID NO: 483119 - DNA, 201 bp, Homo sapiens
taattctctaggacacttaggtccccaaccctccctcgggctgtttatcgttgtgccagatgcacagcacattgtgtgacactgacttaagattctaactmtgtgcaagagggaaaaaaacagtggagaaggctgggctggaccacgggaaagagataggaaaacggatacgaatgtaaggcacagagttggctcggcgtc

SEQ ID NO: 483120 - DNA, 201 bp, Homo sapiens
atatattaacaaaatttgggacgggctttggagggtgagaagccagctgactgtaggcttagtgcctcgtacgcttattcccacatagaggcaagaagctrgttgagctgccatacactgtaaaggggatggacgtctcattctcagggatcctgtctttcattgaggtgagtgtgagaggtgatgagacgggcactttca

SEQ ID NO: 483121 - DNA, 201 bp, Homo sapiens
ggggcttcagggatttccccatatacggtatatattaacaaaatttgggacgggctttggagggtgagaagccagctgactgtaggcttagtgcctcgtaygcttattcccacatagaggcaagaagctggttgagctgccatacactgtaaaggggatggacgtctcattctcagggatcctgtctttcattgaggtgag

SEQ ID NO: 483122 - DNA, 201 bp, Homo sapiens
ggccacaggcgagtgtactcctgaggatctgtgtttctccctgcaggtaatgcagtaaaaaactgggacagaaagttggggctgaaggttttatattgtasagcagaactaatctgggatgcccctctaatattttctccttatctgtccctgacaggaaactgtgtttgcaatgctggtagagatcacagagcgagccat

SEQ ID NO: 483123 - DNA, 201 bp, Homo sapiens
tttgaagcttattttttctataaatcttagcaattgaaactaacagttgctgggtatggcaactcatgcctgtaattccagcactttgggaggtcgaggcrggtggatcatctgaggtcaggagtttgagcccagcctggccaacgtggcaaaaccccatctgtactaaaaataacaaaaattaatttgatgtggtggcag

SEQ ID NO: 483124 - DNA, 201 bp, Homo sapiens
tccacttcttattggaagccctggtggtcatgttgatcctctgctatgtttttctcccaaagccaaataatcctctttacagacttggggtttcatggacwtcctcatcacccttaggtgattgcatactcggaacatcgttaccgtatctttggggaaaccatcgatattgcagtgggtaattgtctggatcgttttgct

SEQ ID NO: 483125 - DNA, 201 bp, Homo sapiens
agttgatgaaaggagcagtgacggttttgtcttcctcttctcttttaatgtttgcttaggtgtaagaaacagggagggtgattaggtggagaggagtggakagcagaagcagaaaggcaggatttttccttcgcctttgttactgtctttttgacagcagattaagatctgtatcagaaagggaagaaatccctaacagca

SEQ ID NO: 483126 - DNA, 201 bp, Homo sapiens
gttgctgggtatggcaactcatgcctgtaattccagcactttgggaggtcgaggcgggtggatcatctgaggtcaggagtttgagcccagcctggccaacrtggcaaaaccccatctgtactaaaaataacaaaaattaatttgatgtggtggcaggtgcctgtaatcctagcaactccggaggctgggcaggagaatcac

SEQ ID NO: 483127 - DNA, 201 bp, Homo sapiens
ggctaggtcaaaatagccaacaccttacctctgccaccatcactacccctaccccacctcacatcccttatgtcccccactattgtttttttccaatctcyaggattataacttccatttctatctccctaggccctggcatgggtgccccactggtttctgtggctgttgtggcccgtactgtggcccaactgtggaata

SEQ ID NO: 483128 - DNA, 201 bp, Homo sapiens
ggtagatactacttgcattgagacctgaaggctgagtagggtaagaagaagagcatttctgaaagttgaatagcctatatagaagccggaaagagtagatstgaaaatgtggaagataggatgcttggggaaagtgaaaggactcttactacatcactaaaactcctgttgctttctttaacttcctacctacctttgcta

SEQ ID NO: 483129 - DNA, 201 bp, Homo sapiens
tttttccctttaattgtaggatgtagcccatcggatgctggccacaggcgagtgtactcctgaggatctgtgtttctccctgcaggtaatgcagtaaaaarctgggacagaaagttggggctgaaggttttatattgtagagcagaactaatctgggatgcccctctaatattttctccttatctgtccctgacaggaaac

SEQ ID NO: 483130 - DNA, 201 bp, Homo sapiens
cagcccaaccgtgttgtatgtgagtggaggaaatacgcaggtatttagagggctctacccactccatctcaatttctgaggcactgaaccagtattttctktgttctatctgagtcatgggaatgtcaggaacaaagatggacttatctgaacctaaaatactgtagaccagaaaacccccaacagagtttgtaacattgc

SEQ ID NO: 483131 - DNA, 201 bp, Homo sapiens
ttcacctcttggtgagggtagattattgggacatagacaaaaacagcagggaagagtccaggaacatgagggcagagaagaatgaaggatgttaagggctygctctccaccatgtttcttctgtttttccacaggtatcggacagatgaagtagaggtgacctggagggactaataagatcaacagaatcagagtagatag

SEQ ID NO: 483132 - DNA, 201 bp, Homo sapiens
ttccaatctctaggattataacttccatttctatctccctaggccctggcatgggtgccccactggtttctgtggctgttgtggcccgtactgtggcccarctgtggaataagccattggtgggtgtgaaccactgtataggccacattgagatgggccgcctcatcactggagccaccagcccaaccgtgttgtatgtga

SEQ ID NO: 483133 - DNA, 201 bp, Homo sapiens
ctaatatggcccgaatctgctccttaaagagagagacttggtaaattatctttaccaggtgttacccaagcctgtcagcactccccaccagtaagccttgkgtcctcattttacagcgcgagtcatggctggggccttagtggcaacaagtgctgagatcagcgggctcagtagcaggaacacaagcacccccttgcggtg

SEQ ID NO: 483134 - DNA, 201 bp, Homo sapiens
ggaggaagcggcgcggacagtctcccgctccaccgtgtcgggcctgaagaggccgctgaacgctcgcgattactgaggcatctggtaggatcgcaaggccrtcaacctacaggtgaagctcgaggcgctgtggcgctttgaagccggagagaagctcagtagaatcgggaaggcgctggggctgtccaactccaccttggc

SEQ ID NO: 483135 - DNA, 201 bp, Homo sapiens
tatcacctgaggtcgggagttcgagaccagcctggccaacatggtgaaaccccatctctacttaaaatacaaaaattagccgggcgtggtggtacgcaccwataatcccagctactcgggaggctgaggcaggagaaatcacttgaacccgggaggcagaggttgcagtgagccgagattgccccattgcactccagcctg

SEQ ID NO: 483136 - DNA, 201 bp, Homo sapiens
cgatggctcacgcctgtaatcctagcactttgggaggctgaggtaggtggatcacctgcggtcaggagttcaagaccagcctggcctatatggtgaaaccytgtctctactaaaaatacaaaaattagccaggcattgctgggcgcggtggcttgcgcctgtaatcccagcaatttgggaggctgaggcgggcgtatcacc

SEQ ID NO: 483137 - DNA, 201 bp, Homo sapiens
gaggacgttcattttcctgtggaagatgagtcggcccctgggtcaaagccgccggagacctcctgaccctattgctcggtggcaacgcagccggcgacttyaagctgaaggccctgctggggtacccctcggagaacccgtgtttcctcaagggctccttcaagcccaacctgcccttggtgtggtgctcgcacaagaaag

SEQ ID NO: 483138 - DNA, 201 bp, Homo sapiens
tgacgcatttggagacttctgcagcctctgagccccccaaaggcatgagcttgaggttgatgtgacttctcctctcttggggtagaccaggcttcctttcycatccttctttccttccccgcaaggtcactaagtgcctgccatatgccaggccctattggtccagcagggaaagacacttggcattcatggagcctagtc

SEQ ID NO: 483139 - DNA, 201 bp, Homo sapiens
tctagaatcagagttggatgagaaatcaactttgaacaccacctttggggtggctgcattggctcacacctgtaatctcagcactttaggaggctgaggcrggaggatagcttgaggccaggagttcgagactaaccggagcaacatagtaaggccacatctgtacaaaaaaaagaaagaaaaaattacccaggtttggtg

SEQ ID NO: 483140 - DNA, 201 bp, Homo sapiens
ggaagcctctatatgagcctacctccctcctgcaggaccagagaggggttgttatgaacagcccaggggattggttgcactaagcttgtcttgaagctttkgctggggagtccaggtgcccatgtctctcacctgctccccatacacatctctgcacacctggctgaggcattcccagacctaacctcagataatgtgcat

SEQ ID NO: 483141 - DNA, 201 bp, Homo sapiens
atcaccaccatttaataccagaatgtaatcacaaccaaaagaaaccccatgcccattagtagtcacccatcagccccctcctctaagctcccggcaatcastaatctgctttgtgtctctatggatttgcttattctggacatttcattaaatggaatcatactttatgtggccttttatgtctggcttctctcagagcat

SEQ ID NO: 483142 - DNA, 201 bp, Homo sapiens
ggaagatgagtcggcccctgggtcaaagccgccggagacctcctgaccctattgctcggtggcaacgcagccggcgacttcaagctgaaggccctgctggkgtacccctcggagaacccgtgtttcctcaagggctccttcaagcccaacctgcccttggtgtggtgctcgcacaagaaagcctgggtacagcctgggtga

SEQ ID NO: 483143 - DNA, 201 bp, Homo sapiens
cctttaattcccccaatatttttttatctgcattaatttattatttcaagtgaacttccatctcaaatacatggttctcagacgcttccatgaactctcargtgtgacttattacagcctggggctccttggagcacagtgtgccagtgacctagtggaaggccatgagaaagccaggttcactgttcactgtgcagcatc

SEQ ID NO: 483144 - DNA, 201 bp, Homo sapiens
atcctggcatttgttcctctgttcactcgattgctcatgcatgactgtgcagtgtcttctgcctacgcgattctctgtcaggaggtagaaactatatcacytttttttaaaagcacacctttaccaagttataattgacataccaaaaaagtatacaattcaggtatttttagtatattcacaaggttgtacagctatcac

SEQ ID NO: 483145 - DNA, 201 bp, Homo sapiens
gaccttcaatcctgtagactgcaaagattgagccagctgagcccccaaagagactcagcagtgcagaatgtgggcctgagtgggaggactgcccagccgcmcaccttccagctctgttcttcccgggccctggatgcttcttgccacgctgtcctctgaaatgacgctctgccccagcagacctgtggtaggtgagctagt

SEQ ID NO: 483146 - DNA, 201 bp, Homo sapiens
gagagcttcggggccggtcgagggtgattcgctggctttaaggcgcgccacagcttgagcagcatcggggccagcggcccaagaacgcagcgtgcaagaayccagcgttaatgcgcagggtgatcccggagggcggctacacactctggctggtgttcaccatgaataagctctggctggtgttcaccatgaataagccca

SEQ ID NO: 483147 - DNA, 201 bp, Homo sapiens
ggctgaggcaggaggatagcttgaggccaggagttcgagactaaccggagcaacatagtaaggccacatctgtacaaaaaaaagaaagaaaaaattacccrggtttggtggcatgcacttgtagtcccagttgtgggctgaggattatgcaggtgacaaggcaagagactgaaggcacaaactgtttcagtataataaaga

SEQ ID NO: 483148 - DNA, 201 bp, Homo sapiens
agcacctcacatttgagggtctgtgctattcagtctagaatcagagttggatgagaaatcaactttgaacaccacctttggggtggctgcattggctcacrcctgtaatctcagcactttaggaggctgaggcaggaggatagcttgaggccaggagttcgagactaaccggagcaacatagtaaggccacatctgtacaa

SEQ ID NO: 483149 - DNA, 201 bp, Homo sapiens
ctgtgctattcagtctagaatcagagttggatgagaaatcaactttgaacaccacctttggggtggctgcattggctcacacctgtaatctcagcactttrggaggctgaggcaggaggatagcttgaggccaggagttcgagactaaccggagcaacatagtaaggccacatctgtacaaaaaaaagaaagaaaaaatta

SEQ ID NO: 483150 - DNA, 201 bp, Homo sapiens
taagactgccactcagttactttggattcctcatgcctctgaatcaacaggcaaaaaagggagttactgtgctagctggggtgatttattctgactaacarggggaaatttggactgctgcttcacaacggaggtaagaaagaataggtctggaatacaggagatcccttagggagtctcttagcattactatgcctagtg

SEQ ID NO: 483151 - DNA, 201 bp, Homo sapiens
ttggtttattctgccattaatacttgtgattgcattgtgaaattcttgcattctgttattcagctctgtagatacattagattcttttttatacaggctaytttgtctttcagctcctgcattgctttattgtgatttttattttccttggattgggttttgccatcctcctcctgaatcttgatgatttttgttcctgtc

SEQ ID NO: 483152 - DNA, 201 bp, Homo sapiens
gggagttcctgagttggtgctggctcaatagctctggtaggtggtggctggaggcccaggcctagaggacctgcctggtgaggagatatgggaacaggtamccacataacagctgaccacttttctgtacggctgctgcggtatgcttggggcccactccagtctctggtcacgttggattttccagaacccagaggtgtc

SEQ ID NO: 483153 - DNA, 201 bp, Homo sapiens
atcccatgcaaagtaataaaaaaaaaaacttggactaaaacatgaaagttactattatacatttatatgtattgtgtttatatacacctgtaaatccagtwggaaatagtctactactaaatcttttcttcttgtttacacttctacagcctatggctaaacggatttttcactttttgtttggacaatgtggaagtacca

SEQ ID NO: 483154 - DNA, 201 bp, Homo sapiens
tgactgcagattgttggaggtgtggataagacacaaagggcctttgcgcctttgttagtccaaaggtggcaagggcagttcttctgcagaggcaggggccragaggctttcagttgcccttggatgctctgtccagggagttcctgagttggtgctggctcaatagctctggtaggtggtggctggaggcccaggcctaga

SEQ ID NO: 483155 - DNA, 201 bp, Homo sapiens
atgggacctaattacactaaagagcttctgcacagcaaaacaaactattaacagaggaaacagacaacctatagaatggtagaaaatatttgtaaaccatrcaccttaaaaaggtctgatatgcagaatctataaggaaattaaatcaacaagcaaaaaacaaacacattaaaaaatgggcaaaggacatgtacaggcagt

SEQ ID NO: 483156 - DNA, 201 bp, Homo sapiens
gggtcttagagaaagacagtggattatcataaacttagccaagtggtgactttaattgcagctgctatactagatgtggttttattgctttagcaaattawcatagccccgatacctggtatgtagctgttgatctggcaaatgcctttttatccatacttgctgataagacacaccagaagtaatttgctttaagctggc

SEQ ID NO: 483157 - DNA, 201 bp, Homo sapiens
agcagctgtgctgtgctggggaatcccttcctccctgggttggctccaattctccaaagcctgaaggctggaatggctaaagtgcctggactgcaaagatsgctgcctgcccctccccctgggagctccttcttagggaggtgcaatggtgctcctgatagctggctggaattctaagccagtgggtcttaccttgtgagg

SEQ ID NO: 483158 - DNA, 201 bp, Homo sapiens
tgaaggcatgaaataagcagacagtggatttctccacgtttgaaattttggaaatgatgtataacaagagggagagacaagtaagagtggtgagggaatgyatacaaggcactaattatgatgatggatcgtgtcatccaagctgagtagaatggagtgaggacaagaattaggttggaggagtgaggtgcaaaaataaga

SEQ ID NO: 483159 - DNA, 201 bp, Homo sapiens
ttatttgtattgcctgtcagcgttgaggcccagtctggttttaaacttaatataaggcctctgagctccattctatctctcattagctgctcgaatgaagkcatgaaataagcagacagtggatttctccacgtttgaaattttggaaatgatgtataacaagagggagagacaagtaagagtggtgagggaatgcataca

SEQ ID NO: 483160 - DNA, 201 bp, Homo sapiens
accaggttgagactccaacgactcaagcagaatgtctagaatttagtcttctaaacctgcaatcaatgtatttttttaattttccgaagtaatataattamgctaaaagctctcaaagacttactgcttagactccatgaatgaagcatcatttgaaaagctacaataaagaaaataaagagatcataagtatcatgacaa

SEQ ID NO: 483161 - DNA, 201 bp, Homo sapiens
ctcttgcttttaagtatttggaatctgattgctctctcgtacaccagggaactcttttatttattttttcttcctcttcattcattgctactaaggaaagrattagactaaaatagttcttcttcagaagtgtacaagagcctatttaattttgtttttgtcctaaaagttagtaggtaatcataacaaaatgatataaac

SEQ ID NO: 483162 - DNA, 201 bp, Homo sapiens
taattttatgccaaatttgatgataatgaacacatgcccctcctcttcctcctctcctcttgctgtggtctgaatgtttgtgtccttcaaacttcatatgwagaaatcctagtccccagtgtgatggtactaggaggtggcctatggaaggtgattagatcacaagggagaacccctcatgaatgagattagcgcccttat

SEQ ID NO: 483163 - DNA, 201 bp, Homo sapiens
tattgaggacttgaaagacacagggtggtgatttccaccacatccccattcagctcttcagtttgacctgtgtaaaacacagatgggtcttagagaaagasagtggattatcataaacttagccaagtggtgactttaattgcagctgctatactagatgtggttttattgctttagcaaattaacatagccccgatacct

SEQ ID NO: 483164 - DNA, 201 bp, Homo sapiens
caaatttgatgataatgaacacatgcccctcctcttcctcctctcctcttgctgtggtctgaatgtttgtgtccttcaaacttcatatgaagaaatcctastccccagtgtgatggtactaggaggtggcctatggaaggtgattagatcacaagggagaacccctcatgaatgagattagcgcccttataaaagaagcct

SEQ ID NO: 483165 - DNA, 201 bp, Homo sapiens
cagtccaatccaggtctgtaatgacccagacctttcagaatgaaggtttggtttacaccaccaggtaaagaactacgatcagctgaagtatttgctgaaarcaaagtgaatacaaaatgaataatgaaagaaagtagttatgaatacctgctgtgcccatgtaaacaattacagaagtgagaaatataattgtcatgagca

SEQ ID NO: 483166 - DNA, 201 bp, Homo sapiens
atgattcagtcacctcccaccaggacccacctccaatactggggattacaattcgacatgagatttaggtggggatagaaatccaaaccatgtcattccayctctggcccctcccgaatctcatttccttctcacattgcaaaatgcagtcattccttctcaacagtccctcaaagtctgaactaattttagcattaactc

SEQ ID NO: 483167 - DNA, 201 bp, Homo sapiens
ttctgtactttgcctttctgaatatcctgaaatataatggtcattgaccttggtcttattttaattttatgccaaatttgatgataatgaacacatgcccytcctcttcctcctctcctcttgctgtggtctgaatgtttgtgtccttcaaacttcatatgaagaaatcctagtccccagtgtgatggtactaggaggtgg

SEQ ID NO: 483168 - DNA, 201 bp, Homo sapiens
agtgtttatgttccttccccagcttagaggcagcaaagcaagggaccttagtagtggctgtggccaagggtcatttccttgactcctgggggccccacccmagagagatgcagatcatcaatcactcagtgcagtcagtccaggatagagggtttgtgctatggacccaagccagggtttccctgtctggtgatgagccat

SEQ ID NO: 483169 - DNA, 201 bp, Homo sapiens
gaaaataaaataaataaataaataaataaataaataaataaataaatctttatgaaattatttctatctcaacagccttaatttcagttgacagtaactaktggatccccaggaatatgtttgcatatttggggagaaaatactattggaggggaacagaaatgctactaaggtaagtttttgtgatatacacatatacat

SEQ ID NO: 483170 - DNA, 201 bp, Homo sapiens
ccaactctactggaccttgatctggggcctctagcctccagaacagtgagaaaaaaaaattactgttgtttaagccactcaatctatggtatttttgttakggcagcctgagccgactaatacaataaggtaggtaatcaaggtgtcgtgtcagacttgcttgttttttattcctagagcattcctagtgtctgcttctgt

SEQ ID NO: 483171 - DNA, 201 bp, Homo sapiens
agaccattttgaatagctaacttcagccactcaccttttctattttgagttttgatctcattaaactatgtgggtgcaggttgacccctaacagaattccytaacattaagatacccatattatctcaaatatgtaatttgtgtggtaaagtcaaaaatctggaatttattttatcttcatatggtacccatgttaaggta

SEQ ID NO: 483172 - DNA, 201 bp, Homo sapiens
cataaggtaattctatcagctttgacaatactacgttttaggataagaagctagctaaaaacgtgaaaaaagaagagaacgagaaagaaggaacaggatgyggatgatgcactgtttaatctgtcatatacttaaagctaaaaatcttgaagtcacaacccttcctgtcaggcctctgagcccaagctaagccatcatatc

SEQ ID NO: 483173 - DNA, 201 bp, Homo sapiens
agagctgtagaattcaatacagtaaccactagctacgtgtgataacttcattttaaattagtcaaaattaaatagaatttaagatttagctcctcaggtasactacctctagtccagctgttcagctaccacatatgtttagcggacattaaatagtgcaaatgacatttgtcattacataatattctggatagaagtggt

SEQ ID NO: 483174 - DNA, 201 bp, Homo sapiens
tccaatttcctcctagtctcataaggagaataagaaatgcagtggtgttaagaagagtattctataatgcctagtaaatgccaggcatgcagatgtagccragtttgaaaacattttaatgggttgtttaaaagttttgttctgatacagccacagcttggggttatgaagctcttccactaatcagattatatcaaaaac

SEQ ID NO: 483175 - DNA, 201 bp, Homo sapiens
attaaattttaaatctccaaaataatctcttttgactctgtgtctcacatccagggcataccggtgcaagggatgagctcccaatgccttgggaagctctstccctgaagtttttcagggtacagcttccacagctgctctcaagtgctagtgcctgtggcttttccaggttcatggtacaggctgtcagtgtatctacca

SEQ ID NO: 483176 - DNA, 201 bp, Homo sapiens
atctgttttgtttaaaattaggattgtaatacctgattttttgttttccatttttatccatccctttattttgagcctgtgaacgtcactatatgtgagaygggtttcttgaagaccattggatcctgctttttcatccagcttgccactctgtcccttaagtgggtcatttagtccatttacattcaagtttagtattga

SEQ ID NO: 483177 - DNA, 201 bp, Homo sapiens
tttatatgtattgtgtttatatacacctgtaaatccagtaggaaatagtctactactaaatcttttcttcttgtttacacttctacagcctatggctaaayggatttttcactttttgtttggacaatgtggaagtaccaggtaccaggactctcccttgtcataactcccatgtaggtgaatgaattgagcatggttagt

SEQ ID NO: 483178 - DNA, 201 bp, Homo sapiens
attgtaatacctgattttttgttttccatttttatccatccctttattttgagcctgtgaacgtcactatatgtgagacgggtttcttgaagaccattggwtcctgctttttcatccagcttgccactctgtcccttaagtgggtcatttagtccatttacattcaagtttagtattgatatgtatggatttgatcctgtc

SEQ ID NO: 483179 - DNA, 201 bp, Homo sapiens
gtcccacccagtaaggaggactgggattgggcacctgcttaaagcagcagtctggctacattttggtagagtctgtgctatgctgggggatcccttccacyccaggttaactcagacactccaaagcctaaaggttggaatggctaagtcacccaaacagcaaagatggtggcccacccctctgtctgggagtgctgtccc

SEQ ID NO: 483180 - DNA, 201 bp, Homo sapiens
ggtgtcaccagtgaagtctaaaaaacaacaaagaaggcagcctgtccctccctctgggagttttgtcccaggaaggtatgaacctgttgccagcccaaagrcacctgtaggaagtgtctggagaccctggttgggaggtcccacccagtaaggaggactgggattgggcacctgcttaaagcagcagtctggctacatttt

SEQ ID NO: 483181 - DNA, 201 bp, Homo sapiens
gcccactccagtctctggtcacgttggattttccagaacccagaggtgtcaccagtgaagtctaaaaaacaacaaagaaggcagcctgtccctccctctgrgagttttgtcccaggaaggtatgaacctgttgccagcccaaagacacctgtaggaagtgtctggagaccctggttgggaggtcccacccagtaaggagga

SEQ ID NO: 483182 - DNA, 201 bp, Homo sapiens
gtggaaaaccatagcaactgtccagtccaatccaggtctgtaatgacccagacctttcagaatgaaggtttggtttacaccaccaggtaaagaactacgaycagctgaagtatttgctgaaaacaaagtgaatacaaaatgaataatgaaagaaagtagttatgaatacctgctgtgcccatgtaaacaattacagaagtg

SEQ ID NO: 483183 - DNA, 201 bp, Homo sapiens
ccagccccaggccaccaggaatctactttctgtctcaatacatttgcccattctggacatttcatataaacagaatcatacaatgtgtgtgctcttttgcractggcttccttttcactgctggataatattccattgcttggatacaccacattgtatttactcgtttactcgatgtatttactcagatgttagctgatg

SEQ ID NO: 483184 - DNA, 201 bp, Homo sapiens
attctcctgcctcagcctcccaagtgctgggattacaggtgtgcgccaccatgcccagctaatttttgtatttttagtagagacagggtttcaccatgttrgccagggtggtctcgaactcctgacctcaggtgatccacctgcctcggcctcccaaagtgctggcattacaggcatgagccaccacgcccggtcctggct

SEQ ID NO: 483185 - DNA, 201 bp, Homo sapiens
agctggctgtgaggggaccacagcttagaacaggaccccaaaagatgggctctgaggtccctgcagccaagagccaggattctgggtgagcctaggtttgyagatgggccccccaaagtctggggcttctcactgggctgggggtgccctgtccctgacgcctggtgacttgactccatccgtggttccttctcgctcccc

SEQ ID NO: 483186 - DNA, 201 bp, Homo sapiens
cggtggccagacatccacttgccatgggaacctgtcacctcccaggcccatctgagacctcaacagcttctgagtgtttttgctgggctgtgccctgcccrtggtgctgaggacacagaggtgagccatggccatagcagctccaaggggctatgcatggggccctggccataaattctgtatacaactggaggaatggac

SEQ ID NO: 483187 - DNA, 201 bp, Homo sapiens
gctcattcaaggtcacggagggaggaagaggtgctgctgggatttgaaccgagacccaagtccaagtccaggcccaagtccaggcccgtcttcaccatccrgggagctctctgcccggccccagcccgaggaggcccacactaatccagccacagccttgcccatggggggctgttctcggaggagggcgagagctgccct

SEQ ID NO: 483188 - DNA, 201 bp, Homo sapiens
agctactggcaggacaagggattggacaggccccaacccctttccttccccctcctttctctggacttaggtcctacccactccggggcagccacagcctygatgacctcctggaccggccgggcaactccatagcaccctcggagtactgggatggccagtcccgctcccgcaccccaagccgggtgccaagccgtgccc

SEQ ID NO: 483189 - DNA, 201 bp, Homo sapiens
tgatatgttactgaaaccagctttttcttggtgatgagttgcaaatacaatagccagtttgccattatcatttgcctgtgttatgattggttttgctatayaaaaacattatttttatttagtaaaatgtatcggtcttttcaagtttatgggtttggtgtcatacttagaatggctgtttcacttcgtaaatatattttt

SEQ ID NO: 483190 - DNA, 201 bp, Homo sapiens
taaagcaggcggaatggggggacaggacaatttctccccctccaggggctccaggactctccctggggggcccacctcttgccccctaacctctttcccccttttctgcccccgtggggaggagccccttgtacctgctccgtgcccaacacatgccctctctgtacatcttttgtaaatgatgagaaataaaggaagtgg

SEQ ID NO: 483191 - DNA, 201 bp, Homo sapiens
aagaaagaccctccctctctctctctgtctctccctctctctctctctctctctctctctctccctctctctctccctctctctgtctctctctctctctstctctctctctctctgtctctctctctctctctgtctctctctctctctctctctctctctctctctctctctctctctctctctctctctctctctctc

SEQ ID NO: 483192 - DNA, 201 bp, Homo sapiens
ttcaaggcagaaatcattgaaagtgtagtcgtagggggcatcttcaaggacagaccaacacagaccccttcaacgcttactgaatgtgacaccttgagccrgtcacttaacttctctgaccctcagtatcttcttttataaactggagataataattgcacctaccacccagggctattgcgagaatcaagtaagataatg

SEQ ID NO: 483193 - DNA, 201 bp, Homo sapiens
gtttgcttgtatcactgtatattcactcatttattcactcgtgatattgtttgtttttaatgcattcacgaattcatgcatttatttattcatgtgtggaycattttttaattcctgtttgtatattctcacaattcacaaattcattgataggtgtgctcagttatcgtctattaattttatcatattatttatttattt

SEQ ID NO: 483194 - DNA, 201 bp, Homo sapiens
agtggccgtacatagaggtttccctcccttcttccctcttccctccctgcctgcctgtctgtagaaattcattttattttgctatctccatccatttcttyctttgtttctgggtttgcttgtatcactgtatattcactcatttattcactcgtgatattgtttgtttttaatgcattcacgaattcatgcatttattta

SEQ ID NO: 483195 - DNA, 201 bp, Homo sapiens
ctccgggttccccttccgtctgtttcttttccttacactttgtctgttggagaccctgggaccatctgctctgactttcccatagtctggaagttgctgakgatgctctcctagtatgttcagctggtttctctgtcctctggatccggagccttgcccttggcaagaccagaggggctactgagttcttccaccaggagg

SEQ ID NO: 483196 - DNA, 201 bp, Homo sapiens; identical to SEQ ID NO: 406907

SEQ ID NO: 483197 - DNA, 201 bp, Homo sapiens
cagtgagccgagatcgcgccactgcactccagcctgggcgacagagcaatactccgtctcaaaaaaaaaaaaaaaaagaaatttgagtctcttcgaacctmcgggttccccttccgtctgtttcttttccttacactttgtctgttggagaccctgggaccatctgctctgactttcccatagtctggaagttgctgagga

SEQ ID NO: 483198 - DNA, 201 bp, Homo sapiens
caggagcggttggttccccgaggcgtacgtgaaggctctggaggaggggcccgtgaatcccatgacccccgtgacccccatgacctccatgacctccatgwcccccatgacacccatgaaccccgggaacgagctgccttccaggtacctgagtcatcaggggtggggcgggggtgaggacgccggcaagggtgtcactgc

SEQ ID NO: 483199 - DNA, 201 bp, Homo sapiens
gggaggatgtcttcttttggtcattgtccccaggcctggcttcttttggtcattgtcctctgcctctaccccacaggagcggttggttccccgaggcgtaygtgaaggctctggaggaggggcccgtgaatcccatgacccccgtgacccccatgacctccatgacctccatgtcccccatgacacccatgaaccccggga

SEQ ID NO: 483200 - DNA, 201 bp, Homo sapiens
tcgtgccactgcactccagcctgggcaacagagcgagactctgtctcaacaacaacaacaagaaagatatgcagaacctaatgctctcactttgcttatgyctctgaaacttctgcacaaaggccttcgggttttatctttgtgctattctgctaattagttactgcagggaaacagaggggctgtccacttagtgaccag

SEQ ID NO: 483201 - DNA, 201 bp, Homo sapiens
tctccaactcctgggctcaaatgatcttcctgcctcagcctcccaagtagctgggactataagaaaatgccaccgtgcctggctaatttttttttttttttaattttgagatggagtgtcactctgtctcccaggctggagtgcagtggtgtgatatcggctcactgcaagctccgcctcccaggttcacgccattctcct

SEQ ID NO: 483202 - DNA, 201 bp, Homo sapiens
aaatatatttttaaaatttttcccatggcctctctgatggttttgaaaccgtatgcagtgtttcttctcacccaccatttattttaatttttgtggtacayagtaggtgtatatatttatggggtacatgaggtgttttgatacaggcatgcaatgtgtaatcatgacatgctggagaatgggtatccatcccctcaagca

SEQ ID NO: 483203 - DNA, 201 bp, Homo sapiens
accatatcacatagggagcaagtaacatgttgtctgacccagctggactttaaaacatccaagatctaactcctaagatagctaagcatatatatttactwcttgttctatttataagtagaaggcacatttggggtgggcgtggtggctcatgtctgtaatcccagcactttgggaggtcgaggtgggtggatcacctga

SEQ ID NO: 483204 - DNA, 201 bp, Homo sapiens
cgcagagccttccttcctctccgtagctccagggccttccgccaagcagggcttcagtgacacaggggaaagaaaagagctgagggagtcagcttggctasatggagagaagagagggctttccaagggagcatggcagcgggctgcgcacagccatgagcgggcagcaggcaggcatgagccagggcttgggcgcagggg

SEQ ID NO: 483205 - DNA, 201 bp, Homo sapiens
aatattgatttccggttcccagatggctagtgatgttaaacatgttttcctgtgcttcttagctatttatagatcttctttggaaggaaactctttttcamctgtgttaaactcctttttgcctgtaaatagttaaccatcaacattaagagaagagctgaccccctccttgactgcctcctcgtgggtgagggtccctca

SEQ ID NO: 483206 - DNA, 201 bp, Homo sapiens
taaaccgtttgccctggcccctacttactgcccctggataccttagctatgataaccagaagttaactcacctgcccctatccctcccaagactgggagcrccgcagagccttccttcctctccgtagctccagggccttccgccaagcagggcttcagtgacacaggggaaagaaaagagctgagggagtcagcttggct

SEQ ID NO: 483207 - DNA, 201 bp, Homo sapiens
gaagagaaaggtcctttcactgcagccctcctcactgcagcctcccagggagcagccacatggacctgaccatgtcactcccaggagcagaaccgttccayggccccactgcccgtagaactgaacacaggcttctcagtgaggggtccctggctctgtcgatccagcagcttctcctgacacccccaacacagcccagcc

SEQ ID NO: 483208 - DNA, 201 bp, Homo sapiens
gaggcggggtccgaggtcgtaccccacagtgcacctgcccaggggctgttcagagctggcaatggcagcgacagcagcaacagcagcagatccaagaagcrggtccctgagacggggggtggctgccctccccagaccaccccggcagcctgagcagctccaaagcactggcttggggtccgagaccttcaaagtaaagca

SEQ ID NO: 483209 - DNA, 201 bp, Homo sapiens
tttaaccccgccctggagaacctggtgtacctgggcaacaactacctgcgtgccttccacggtgagtgcctgcccgggccaccgagccccagccctgggcytctgctgttcccacccacccaggcccctcccagattctctgcatcccacacctgttcatcctcaaccctacaccctcctacccaccaccctcaccctcac

SEQ ID NO: 483210 - DNA, 201 bp, Homo sapiens
ccatgacccccgtgacccccatgacctccatgacctccatgtcccccatgacacccatgaaccccgggaacgagctgccttccaggtacctgagtcatcargggtggggcgggggtgaggacgccggcaagggtgtcactgcccagcggagaggatctgcaaggtgcaggcttgtttttttgtttttttgttttgttttgt

SEQ ID NO: 483211 - DNA, 201 bp, Homo sapiens
tgaggggaccacagcttagaacaggaccccaaaagatgggctctgaggtccctgcagccaagagccaggattctgggtgagcctaggtttgtagatgggcyccccaaagtctggggcttctcactgggctgggggtgccctgtccctgacgcctggtgacttgactccatccgtggttccttctcgctcccccatctctac

SEQ ID NO: 483212 - DNA, 201 bp, Homo sapiens
cctcccaggttcacgccattctcctgcctcagcctcccgagtagctgggaccacaggcgcctgccaccatgccgggctaattttttttttttggtatgttyagtagagacgggatttcaccgtgttagccaggatggtcttgatatcctgacctcgtgatccacccgccttggtctcccagagtgctgggattacaggtgt

SEQ ID NO: 483213 - DNA, 201 bp, Homo sapiens
gtgcctggctaatttttttttttttttaattttgagatggagtgtcactctgtctcccaggctggagtgcagtggtgtgatatcggctcactgcaagctcygcctcccaggttcacgccattctcctgcctcagcctcccgagtagctgggaccacaggcgcctgccaccatgccgggctaattttttttttttggtatgt

SEQ ID NO: 483214 - DNA, 201 bp, Homo sapiens
ccatctttactaaaaatacaaaacaattagccgggcatggtggtgggcgcctgtagtcccagctactcgggaggctgaggcaggagaatggcgtgaacccrggaggcggagcttgcagtgagccgagatcgcgccactgcactccagcctgggcgacagagcaatactccgtctcaaaaaaaaaaaaaaaaagaaatttga

SEQ ID NO: 483215 - DNA, 201 bp, Homo sapiens
acagagcgagactctgtctcaacaacaacaacaagaaagatatgcagaacctaatgctctcactttgcttatgtctctgaaacttctgcacaaaggccttygggttttatctttgtgctattctgctaattagttactgcagggaaacagaggggctgtccacttagtgaccagctagactagttgctccagtgatgggag

SEQ ID NO: 483216 - DNA, 201 bp, Homo sapiens
tcgcttgaacctgggaagcggaggttgcagtgagcagagatcgcaccacagcactccagcctgggtgacggtgagactctgtctcaaaaaaaaaaaaaaaraaaagaaaagaaaaagggctgaaggaggtaagggcattagccaggaatacatctgggggaagggcaatctggacagaaaggacagcttgtggaaagaccg

SEQ ID NO: 483217 - DNA, 201 bp, Homo sapiens
ctggagtgcagtggcgtgatctccgctcactacaacctccgcctccctggttcaagtgattctcctgcctcagcctcctgagtagctgggattacaggcaygcaccaccatgcctggctgatttttgcatttttagtagagatggggtttcaccatgttggccaggctggtctcgaactcctggcctcaggtgatccaccc

SEQ ID NO: 483218 - DNA, 201 bp, Homo sapiens
ggatagaaccttctagatggaggctgtcacaccctcctgggatgttctgggaccatcgttccatccttgactcacatagcctgttagggaaaaggatagcrtgtgttattatcagtaggcacttgcaggtgaaaacagaagtaaacatacggaattgattgtagtctgtcaattcgaggtgaagtagcttccagtgaccct

SEQ ID NO: 483219 - DNA, 201 bp, Homo sapiens
cctccaccccggagtcgctgccccgccccctgccagttgcacttctttaaatggcccggggcgctagggaggggtgggcggatccggcgtctcggggcacrggcggatggctccgcccagccaatcgacgccccgcggcgggcgggactccagccaatcgcggctcgcggctcggctccggggcggggctggtgggccaga

SEQ ID NO: 483220 - DNA, 201 bp, Homo sapiens; identical to SEQ ID NO: 250578

SEQ ID NO: 483221 - DNA, 201 bp, Homo sapiens
gaaactgaggccctgagaattgactcattcagatcacttcccatgatcacgcagctgagcagtttccaatacagaattcagatttggggttccctacttcsaatccaggtctctgtgctccacacttgtctttcgtgctccatgtttgaagaaattaatattgtggaagaacagttttaaggcttagaggaacttgagtta

SEQ ID NO: 483222 - DNA, 201 bp, Homo sapiens
gaaccccacttcctcggcaggaccccagtctcagcagcctcctgatttcataaccaggccggaccacgtgcaatagggtggaaaccaaactgctccatgcygggttatttaaaagaaaggcagagtttgtggtggctttttttttttttttttggattgtttgtaatttttttaaataaaagtattttggaaggagggatg

SEQ ID NO: 483223 - DNA, 201 bp, Homo sapiens; identical to SEQ ID NO: 250579

SEQ ID NO: 483224 - DNA, 201 bp, Homo sapiens
accaggccggaccacgtgcaatagggtggaaaccaaactgctccatgccgggttatttaaaagaaaggcagagtttgtggtggctttttttttttttttttggattgtttgtaatttttttaaataaaagtattttggaaggagggatgttgtctaatgtttctaaacttcactgggtcagtgggagggacctggtaagtt

SEQ ID NO: 483225 - DNA, 201 bp, Homo sapiens
ggcagctggacgtccaggttcccttcccccacccgcctgtgcccctgtgcgcatgccctgagggagagcggggtgaggggggtggctcgtcccctggacgkgcggagccctctggggattgtagtgcgtgctcgacgtcaattcgtgtacctggcggctgttggcccccgtttcccagaagcccctgggccaaattggggc

SEQ ID NO: 483226 - DNA, 201 bp, Homo sapiens
  misc_feature (1)...(201): n = A,T,C or G
ctcctcacaacctcttctgtgccccaggttcttgggagtggaatgaactggatcacatcatggaaatcattctggggtcctaaaactgtgatagagggganccttcctcatgtcatcttcggtggcctggatccctgaatgcaactctgggtgtgtgtttttgtgggggctcgaagcagtgactatggcctcctttgttcc

SEQ ID NO: 483227 - DNA, 201 bp, Homo sapiens
tctggggtcctaaaactgtgatagaggggatccttcctcatgtcatcttcggtggcctggatccctgaatgcaactctgggtgtgtgtttttgtgggggcwcgaagcagtgactatggcctcctttgttcccatttcagggttccacaaactgtcttgcatgtgtgtgtgtgtctggttaccccgaccttctgtgaaggtg

SEQ ID NO: 483228 - DNA, 201 bp, Homo sapiens
gaaagctgggcctgtcgaaggatgacagggatgtgctgccaggttgctatagaaacccaggctctgcctcttgcaccttgagggggtgggaggggctggtstcctccctccaggctgaaccccacttcctcggcaggaccccagtctcagcagcctcctgatttcataaccaggccggaccacgtgcaatagggtggaaac

SEQ ID NO: 483229 - DNA, 201 bp, Homo sapiens
gcccccgagcacccagcctccgcaggcatgtcctcatccataacaccctccaacagctgcaggctgcacttcgcctggctcccgcccctgccctgcccccygagcccctcttcctgggcgaggaggatttctccctgtcagccaccattggctctatcctcagggagctggacacctccatggatgggactgagccccctc

SEQ ID NO: 483230 - DNA, 201 bp, Homo sapiens; identical to SEQ ID NO: 250571

SEQ ID NO: 483231 - DNA, 201 bp, Homo sapiens
ggatccgtacttggcagatgaggaaattgattctcatggatgtaaattcactgtttgaggccacaacaggcaagtaagtgagatttaaatctagctgtacktaacgccagatcttattttcttaatcgtatatgtactcaccttcttaaacttgtaggattcagacagccttcattttatacatcagtaaactgagattcc

SEQ ID NO: 483232 - DNA, 201 bp, Homo sapiens
tggatgacttctttctggacattgacacatctgcggtagaaaaggagcctgcacgggccccaccagagcctcctcacaacctcttctgtgccccaggttcytgggagtggaatgaactggatcacatcatggaaatcattctggggtcctaaaactgtgatagaggggatccttcctcatgtcatcttcggtggcctggat

SEQ ID NO: 483233 - DNA, 201 bp, Homo sapiens
agccatcatagtattcctatcttactgaaagcgaagggttatttgtctaatctaaggcaaaaatgagggtggaaattgagtacaaagaaagatatctgggmcctaagcatgctctaaaatcccaccatccaataaatcctgcaacttcattttccaatttcattatcactctcttaagtatttcaaaagatcagcatcgtc

SEQ ID NO: 483234 - DNA, 201 bp, Homo sapiens; identical to SEQ ID NO: 100703

SEQ ID NO: 483235 - DNA, 201 bp, Homo sapiens; identical to SEQ ID NO: 100721

SEQ ID NO: 483236 - DNA, 201 bp, Homo sapiens; identical to SEQ ID NO: 100725

SEQ ID NO: 483237 - DNA, 201 bp, Homo sapiens; identical to SEQ ID NO: 100553

SEQ ID NO: 483238 - DNA, 201 bp, Homo sapiens; identical to SEQ ID NO: 100701

SEQ ID NO: 483239 - DNA, 201 bp, Homo sapiens
ttgtttgtttttcagacagggtctcactctgttacccaggctggagtgcaatggcataatcacagctaactgcaaccttgaactcctaggttcaagcaatsctccttcctcaagccccccaagtagctcagactacaggtgcatgccgccacaccctgttaaatttttttaaattattttttgtagagacaggatctcact

SEQ ID NO: 483240 - DNA, 201 bp, Homo sapiens
aataaatgataatatgtgaggaggattctcattgtaccctctgccatacaaccttattccaagccccttctaccccattccctaccccaatcccagagacytttgtacctctaagacacacagacttatcctttggcccttttagagcagttttttcttcaaagtataatatgcataccactgggtggttctaggtggtac

SEQ ID NO: 483241 - DNA, 201 bp, Homo sapiens
atgtgtcaatgaggttagggtcatgtagggaaagtcgtgtcttactatctttgtacgaccaaagaatatgtcattaaattgtatggcaaagaaccagaaaygtgaatagggaaaagataggaaagaaagcaagtacaagaagaagcaagatttcacctaaaccattgttctcgcttggatgtgggatcatccgacagtatc

SEQ ID NO: 483242 - DNA, 201 bp, Homo sapiens
gaaggccatggaatgggatgttgtgaagtaataattataccattactaaaggtcatagaatcaaagtctttcagaaagaatcttaagtcatccagtctgtytgtctgtccctcctagcccttccataatctcactatcaagtgctcaatctttctttacctaaaaaaaaaaagatttcacctttgatcagccaatagatat

SEQ ID NO: 483243 - DNA, 201 bp, Homo sapiens
aagtattaactaaatgatttaaaggtgacattctaattccatgatagtgatgagatttaactataaaaagatctgaaataaaattaattcacatatgtccrtagaaggctaaaggtggagaagcagccatcttccaattttctcctcctgtcaacaaagccatgctcattcatagattaggcctgagaagctgggaaaagt

SEQ ID NO: 483244 - DNA, 201 bp, Homo sapiens
ggtctaagtcactagaattaagcttcattagagcaaagactgggtcttagtcattaatatatccctagcacccgtaatagtgcctggcacatagtagatgwtcaataaatatttgttgaatgaataaatgaccaaactaattaattaacatattgagcttttgctatcagaatcttaaagactttttgtctttaatacttg

SEQ ID NO: 483245 - DNA, 201 bp, Homo sapiens
ttcccttcgctcttgaaatcattgtcagtggaaaaccttaacaaagaaagttctttgtttagtagatcctagggcagggggattcatggaactattcactttattttattttattttattttattttattttattttattttatgtatttattttgagacacaagtcttgttctgtcacccaagctggagtgcagtggcat

SEQ ID NO: 483246 - DNA, 201 bp, Homo sapiens
ggagagttaaacaagtgggacctttggatgactcagtgacatccattgagttggtttcttctaaaataaggattttagaccattcacagaagtgctctaaygactgcttaaggaaattattttgggaagttagatcctcacaatacccttaaaaaccacctactattttgaatacttacctgcctattcttcttccacatg

SEQ ID NO: 483247 - DNA, 201 bp, Homo sapiens
tcccttcgctcttgaaatcattgtcagtggaaaaccttaacaaagaaagttctttgtttagtagatcctagggcagggggattcatggaactattcactttattttattttattttattttattttattttattttattttatgtatttattttgagacacaagtcttgttctgtcacccaagctggagtgcagtggcatg

SEQ ID NO: 483248 - DNA, 201 bp, Homo sapiens
taccttccatctgttgctggccaccagttgcaccattaactcaggtcagaggtcttaaaaacggtcccaacagagtaggtgacccatgatggagagaccamaattcatcccaacttaacatcttaaagtttgtgccctttcattaagttatctaataattagtaatacagtataatatttattgtagcacttttcaaaatg

SEQ ID NO: 483249 - DNA, 201 bp, Homo sapiens
cccttcgctcttgaaatcattgtcagtggaaaaccttaacaaagaaagttctttgtttagtagatcctagggcagggggattcatggaactattcactttattttattttattttattttattttattttattttattttatgtatttattttgagacacaagtcttgttctgtcacccaagctggagtgcagtggcatga

SEQ ID NO: 483250 - DNA, 201 bp, Homo sapiens
ccttcgctcttgaaatcattgtcagtggaaaaccttaacaaagaaagttctttgtttagtagatcctagggcagggggattcatggaactattcactttattttattttattttattttattttattttattttattttatgtatttattttgagacacaagtcttgttctgtcacccaagctggagtgcagtggcatgat

SEQ ID NO: 483251 - DNA, 201 bp, Homo sapiens
cttcgctcttgaaatcattgtcagtggaaaaccttaacaaagaaagttctttgtttagtagatcctagggcagggggattcatggaactattcactttatwttattttattttattttattttattttattttattttatgtatttattttgagacacaagtcttgttctgtcacccaagctggagtgcagtggcatgatc

SEQ ID NO: 483252 - DNA, 201 bp, Homo sapiens
ccgggagcccacgcccgcagcagcaggaatgtggttttatttgggtggcgacttctgcggacccctcagtctcaagagagcgaggcgggaggactgagggrtctgtgttcacccgatgaccgtggcctttttgataatccactgcggggccctcccgttgcggaaggcgctctccccgggcgcggttctggtgggcatgtc

SEQ ID NO: 483253 - DNA, 201 bp, Homo sapiens
tcgctgacttcttggaagctacgacaaagcacaggcaccctggtgaatgtggcttttcagaagtactcgaaggatacttaatgtgagatgtaaaggagacscacttggagggaccagaggctggtctttagagggtagattttggaccgtgtaataccattcccaacctattttataatttttggattccttcatttcatc

SEQ ID NO: 483254 - DNA, 201 bp, Homo sapiens
tgcggggccctcccgttgcggaaggcgctctccccgggcgcggttctggtgggcatgtcttccaagagcgatgcgagtgtcagtggttcccgaatcacttkggaaattggcctttcactcgctgacttcttggaagctacgacaaagcacaggcaccctggtgaatgtggcttttcagaagtactcgaaggatacttaatg

SEQ ID NO: 483255 - DNA, 201 bp, Homo sapiens
ggtgttctgtgttggagacagagaatgaaaaggccaaaacttaaaggcatatttaaacaaaatctgccaatctcttattttgccagcctatgacttctctacacacacacacacacacacacacacacacacacacacacacacatcttcaccatctcttaatctacctctacctaagccaatgttttcactgcattcttc

SEQ ID NO: 483256 - DNA, 201 bp, Homo sapiens
ctaaatagtccacgttctgcaggggttcaattcaatccaaatattctttccttagcacacagtgtgtactcatgccccattcttgagcctgtatgggaaamaagaaaagactgataggtgctattgtagatgtagaaaatgcacaagacatgatgatgcttgctcttagaagttaaatttatttcacaaacgggggaggtg

SEQ ID NO: 483257 - DNA, 201 bp, Homo sapiens
gtgttctgtgttggagacagagaatgaaaaggccaaaacttaaaggcatatttaaacaaaatctgccaatctcttattttgccagcctatgacttctctacacacacacacacacacacacacacacacacacacacacacacatcttcaccatctcttaatctacctctacctaagccaatgttttcactgcattcttca

SEQ ID NO: 483258 - DNA, 201 bp, Homo sapiens
aggcaggagaatagcatgaacccagggggcggagcttgcagtgagccgagatcgcaccactgcactccagcctgggcaacagagcgagactccatctcagaaaaaaaaaaaaaaaagtaaaagcagccacaaaagatagcatgtcacttaaggtgtgggtgaggaagggacggtcccactaaatttgcctttctctcaata

SEQ ID NO: 483259 - DNA, 201 bp, Homo sapiens
ttgtaaatgattctaggtttacaaaagattatcacatttgtccagcaagggaaggaaaggatgctgcatgaatattaaagaggcattgtagatatcacacrtttcaatcttcttgggcttgttccagtctgatagccccataaaattaccatggtgccagtctttgagccttaactttatccattagtacaatttaactgg

SEQ ID NO: 483260 - DNA, 201 bp, Homo sapiens
tgttctgtgttggagacagagaatgaaaaggccaaaacttaaaggcatatttaaacaaaatctgccaatctcttattttgccagcctatgacttctctacacacacacacacacacacacacacacacacacacacacacacatcttcaccatctcttaatctacctctacctaagccaatgttttcactgcattcttcaa

SEQ ID NO: 483261 - DNA, 201 bp, Homo sapiens
gttctgtgttggagacagagaatgaaaaggccaaaacttaaaggcatatttaaacaaaatctgccaatctcttattttgccagcctatgacttctctacacacacacacacacacacacacacacacacacacacacacacatcttcaccatctcttaatctacctctacctaagccaatgttttcactgcattcttcaaa

SEQ ID NO: 483262 - DNA, 201 bp, Homo sapiens
agactccatctcagaaaaaaaaaaaaaaaagtaaaagcagccacaaaagatagcatgtcacttaaggtgtgggtgaggaagggacggtcccactaaatttkcctttctctcaataggagaaaggcagagggttggggggaaggaagtgaaagggagaaaatggattacaaatatatttttttcctgatcataaatatgttt

SEQ ID NO: 483263 - DNA, 201 bp, Homo sapiens
taaaggcatatttaaacaaaatctgccaatctcttattttgccagcctatgacttctctacacacacacacacacacacacacacacacacacacacacamacatcttcaccatctcttaatctacctctacctaagccaatgttttcactgcattcttcaaatacagtgagcattttttcttattccccatacttaaaat

SEQ ID NO: 483264 - DNA, 201 bp, Homo sapiens
ttagtagagacggggtttcaccatgttggccaggatggtctcgatctcttgaccttgtgatccacccacctcagcctcccaaagtgctgggattacaggcrtgagccaccatgcccagccctgaatcttctttctttatgttactactcaggtcattcctttaaagagaagattttctagattaatgcaatcccaaactct

SEQ ID NO: 483265 - DNA, 201 bp, Homo sapiens
ccattcttgagcctgtatgggaaacaagaaaagactgataggtgctattgtagatgtagaaaatgcacaagacatgatgatgcttgctcttagaagttaawtttatttcacaaacgggggaggtgggagaaagcgattatccaatgtaaaacaatagtgacaaatacatgctaatatattaggtaagtcactttatctctt

SEQ ID NO: 483266 - DNA, 201 bp, Homo sapiens
ttaactcaggtcagaggtcttaaaaacggtcccaacagagtaggtgacccatgatggagagaccaaaattcatcccaacttaacatcttaaagtttgtgcyctttcattaagttatctaataattagtaatacagtataatatttattgtagcacttttcaaaatgattctttgatacctaaaaggaagcacagaatcccg

SEQ ID NO: 483267 - DNA, 201 bp, Homo sapiens
cacacaaacactaaaactacattcaaaataagaatgtaaaaacctggtgtacactacctttaagaacatcacgaaatcatagtttggtgaagaaggcaaastctttggcatgggaactttccattttgaaaatatcgtaattattcttttctggattctggaggagacagagggaatttgtgatgaataggcaatctagaa

SEQ ID NO: 483268 - DNA, 201 bp, Homo sapiens
taggcagagacagtgtagataataggcccagaggttctcaaggtgggtaatgccccggagacctgctgagaagtagaaggacctgagttcagatttggggstgaccctaagactagccccttgtaaagcaagatcaatcattctctgctgttcttcagcttttctgtatatctatgaagttttgtttaataccacaggttg

SEQ ID NO: 483269 - DNA, 201 bp, Homo sapiens
cttcccttcgctcttgaaatcattgtcagtggaaaaccttaacaaagaaagttctttgtttagtagatcctagggcagggggattcatggaactattcactttattttattttattttattttattttattttattttattttatgtatttattttgagacacaagtcttgttctgtcacccaagctggagtgcagtggca

SEQ ID NO: 483270 - DNA, 201 bp, Homo sapiens
tgcgccaggccggtttgagtcttctagccttactcttatgtgtccttttagctttcattcctactgcttcaatcttttcatttctcaattcagagacctgraaacaagaatctgattagctcagggattctggatgttggtaggttggttggtttttgttttgatttgttttttgtttgttttggttttagggtaccaatc

SEQ ID NO: 483271 - DNA, 201 bp, Homo sapiens
acacagtgtgtactcatgccccattcttgagcctgtatgggaaacaagaaaagactgataggtgctattgtagatgtagaaaatgcacaagacatgatgakgcttgctcttagaagttaaatttatttcacaaacgggggaggtgggagaaagcgattatccaatgtaaaacaatagtgacaaatacatgctaatatatta

SEQ ID NO: 483272 - DNA, 201 bp, Homo sapiens
ctacacataggctgctcttgtaagtagtttcacataaaacctcttttgtctaatgtgttctcatagcacatggttcctgtgatatagcgcctaacttgtaytgagggtacttttttttttttcctgtttcttcaaagcacagaccttggaatatttcccctcaatcttgaaaccattgccagtgcaaaaccttagttttgc

SEQ ID NO: 483273 - DNA, 201 bp, Homo sapiens
gaccagcacctttggggacctctccccatttatgatcacttaggtgtctacacattactaagagttaaagtttctgagaaaactggaatgaggtccctacygtacatacctccccacattcacttctctgtccacctgggccaggtgagaagccatttgaatgcgatatatgtgatatgcgtttcatccagaagtaccacc

SEQ ID NO: 483274 - DNA, 201 bp, Homo sapiens
accagcacctttggggacctctccccatttatgatcacttaggtgtctacacattactaagagttaaagtttctgagaaaactggaatgaggtccctactrtacatacctccccacattcacttctctgtccacctgggccaggtgagaagccatttgaatgcgatatatgtgatatgcgtttcatccagaagtaccacct

SEQ ID NO: 483275 - DNA, 201 bp, Homo sapiens
agcatgagatcccagatcccgaggcatgggagcaggcaggctccagctcaagtcatactcagactgctgggtttgacaggatagacagcttacccactccrcctccttccccaaagggtctcttacctccatggagtacaggagatggcagcacctttagacagcatcagagaggttcctttctccaacagctggaagtgg

SEQ ID NO: 483276 - DNA, 201 bp, Homo sapiens
tgcactttggaggaagagatacaatctttgccctgggggtcagtatctgatctgatgagaatgtaagagctggggccaaaacaagacaagaacaagagatkagaaatgataatagctaacacttcctggatgcattgctaggtcccaagctttgctctgcactcttacactgaatcttcagacgctagaataaaagctcca

SEQ ID NO: 483277 - DNA, 201 bp, Homo sapiens
ccagaggcataagagtcctggtccaaagtagggactatagctggtccagctctccccaaaaattgggtttttagttgcagtagctcctcagtgtttcacartcctgcacttcgcctcctttttgaggaagaataaggtcaggaatggcagctgagcttactttggcttccttatacactgtagggacaaaaggaaaaacgg

SEQ ID NO: 483278 - DNA, 201 bp, Homo sapiens
tcttctcagtgtttttctcggacagatcgattactcagacacaaacggatgtgccaagggtgccagtccaagacttccgacgggcagttttctctataggygcaaggggccccgggtggtgggagtgatcagaagaacctgccgaagagcacaccccctctggtctgatggtcccaccaccgccccatgtgaacctgtccc

SEQ ID NO: 483279 - DNA, 201 bp, Homo sapiens; identical to SEQ ID NO: 304282

SEQ ID NO: 483280 - DNA, 201 bp, Homo sapiens; identical to SEQ ID NO: 304307

SEQ ID NO: 483281 - DNA, 201 bp, Homo sapiens; identical to SEQ ID NO: 304287

SEQ ID NO: 483282 - DNA, 201 bp, Homo sapiens; identical to SEQ ID NO: 304286

SEQ ID NO: 483283 - DNA, 201 bp, Homo sapiens
acttgggggcacaggtggaggattgcttgagccagggaggtcaaggctgcagggggctatgagtgtgcgactgcattccagcctgggcaacaaagtgagascctgtctcaaggcaaaaaaaagaaaaaaaggggggcgggggctgggtgtggtggtggctcacgcctgtaatcccagcactttgggaggccaaagcaggtg

SEQ ID NO: 483284 - DNA, 201 bp, Homo sapiens
cctgtaatagatgtgtatgttttctatttgagagttaaaacatttgagagttaaaacatttagttttaatacaacctatgtatatatacttctgtgttaawttttgctttgtcattaataaaatttaaaaatattcactaattgtgtttgtcacacaaagtaattctcaagaatgcatttaactggaattataagtacatg

SEQ ID NO: 483285 - DNA, 201 bp, Homo sapiens
tttgggaggccagggcaggtggatagcttgaggtcaggagttcaagaccagtctggccaacatggtaaaaccccatctctaccaaaaatacaaaaattagyccggcatggtggcagtcgcctgtaatcccagctactcggtagtctggggcaggagaattgcttgaacctgggaggcggaggttgcagtgagccgagattg

SEQ ID NO: 483286 - DNA, 201 bp, Homo sapiens
gctcataggaataacattaaaataaacattttaaaaagtgtaaccctgaacaatgtgagaatttttgtgagctgctttgagatacaactgttgtcaagtgkgacttattaggcagaatattttttccctttttattttaggaaaggttatttgtcaatgaagaaaatgttaatgagtttcttgaagaggtcctgagctctc

SEQ ID NO: 483287 - DNA, 201 bp, Homo sapiens
gttgcagtgagctgagatcacgcagttgtactccagcctggtgacagagtgagactctttctcaaaaaaaaaaaaagtgtgtgtgtgtgtgtagagagttkgtgtgtgtgtgtgtgtgtgtagagagtttatgtgtgtgtgtgtgtgtgtgtgtgtgtgtgtggagagagagtttatttgggccaaaatagaggactgcaa

SEQ ID NO: 483288 - DNA, 201 bp, Homo sapiens
taatgcaaaggtaaggaagttgatgggctctatagaggagtaatgaagcacagagttaaaacctaacaaattattgatttcttaatatcataactttaaayaaaatttacataatggttgggcagagtgatgttaagagaagaaaagtttttcttttttttttttttgagatggagtctccctctgtcacccaggctgaag

SEQ ID NO: 483289 - DNA, 201 bp, Homo sapiens
atgccctgaatatatgctctctacttcattcttttaataactatacagtttgctaatgttacactggagtatcccagtgcttaaaaatataatacacttgsctgggtgcagtggctcacgcccgtaatcccagcactttggtaggccaaggtaggaggacagcttgaatccaggagttggagaccagcctggacaacaaag

SEQ ID NO: 483290 - DNA, 201 bp, Homo sapiens
gacctcgtgatccacccgcctcggcctcccaaagtgctgggattacaggcatgagccaccgcgcccggctgcaaatcttctgtattttaatcataaccatktccactatatattccttcggataactaaaaattaaaatatttggtgtattatttgcaaggagtcaaagatgatgtcttttcccagaggcatgaaccttag

SEQ ID NO: 483291 - DNA, 201 bp, Homo sapiens
ggctggactcactgcaatctccgcctcacgggttcacgtgattgcagttttagtagagacagggtttcactatgttggccaggctggtctcgaattcctgrcctgaagtgatccacccaccttggcctcccaaagtgctggaattacaggcgttagctgccacaccaggccccaaaaatgtaaaaattagctgggcattat

SEQ ID NO: 483292 - DNA, 201 bp, Homo sapiens
gaattctttgctatatgatttggattaattctatataattttggacttttaaatattaaggttaaaaaatacctgtatctaaaattgattctgttaactgktgtcttaaaactaaaggtattaaagtataaaattaaaatttgcaattttttttaaaaaattgcaattttgattctcatgggggaaattggagataatttt

SEQ ID NO: 483293 - DNA, 201 bp, Homo sapiens
tgagcggagaggaggtccagcggctcacctccgccttccaggacccggagttccggcgaatgttctcccagtacgccgaggagctcaccgacccggagaamcggcggcgctacgaggcggagatcaccgcgctagagcgtgaccgcggggtggaagtgcggttcgtgcacccggagcccggccatgtgctgcgcaccagcc

SEQ ID NO: 483294 - DNA, 201 bp, Homo sapiens
acccggagttccggcgaatgttctcccagtacgccgaggagctcaccgacccggagaaccggcggcgctacgaggcggagatcaccgcgctagagcgtgascgcggggtggaagtgcggttcgtgcacccggagcccggccatgtgctgcgcaccagcctggacggggcgcggcgctgctttgtgaatgtctgcagcaacg

SEQ ID NO: 483295 - DNA, 201 bp, Homo sapiens
gccgccgccgcgccggaagagtccgcggaccggtccggaactgacggccaggcctgcgcttccgctcgcgagggggaggcgggaccgcgaggagtcgcgcsgaggacggaggccacgatacctgcgtggctggggctgcgggctccggggtcaccaccctgggcgacccggaggtggcgcctccgccggccgcagctggag

SEQ ID NO: 483296 - DNA, 201 bp, Homo sapiens
tcataggaataacattaaaataaacattttaaaaagtgtaaccctgaacaatgtgagaatttttgtgagctgctttgagatacaactgttgtcaagtgggrcttattaggcagaatattttttccctttttattttaggaaaggttatttgtcaatgaagaaaatgttaatgagtttcttgaagaggtcctgagctctcca

SEQ ID NO: 483297 - DNA, 201 bp, Homo sapiens
gaggctccccttgtttgtcctcccggagcctggcgtggggttcttctgcgggaagagagagtgcgcgcggagatagcagtgtggaaacgcgcgaggagtcrgagggcacgggcggccagcgctcagcctgcgccatgggtggtcccgggaccaagagcggggagcctttgtgtcctccgttactgtgtaatcaggacaaag

SEQ ID NO: 483298 - DNA, 201 bp, Homo sapiens
tgaccaattgtgcattcagttttcagaattctttgctatatgatttggattaattctatataattttggacttttaaatattaaggttaaaaaatacctgkatctaaaattgattctgttaactgttgtcttaaaactaaaggtattaaagtataaaattaaaatttgcaattttttttaaaaaattgcaattttgattct

SEQ ID NO: 483299 - DNA, 201 bp, Homo sapiens
ttgcagtgagctgagatcacgcagttgtactccagcctggtgacagagtgagactctttctcaaaaaaaaaaaaagtgtgtgtgtgtgtgtagagagtttrtgtgtgtgtgtgtgtgtgtagagagtttatgtgtgtgtgtgtgtgtgtgtgtgtgtgtgtggagagagagtttatttgggccaaaatagaggactgcaac

SEQ ID NO: 483300 - DNA, 201 bp, Homo sapiens
gcagtgagctgagatcacgcagttgtactccagcctggtgacagagtgagactctttctcaaaaaaaaaaaaagtgtgtgtgtgtgtgtagagagtttgtktgtgtgtgtgtgtgtgtagagagtttatgtgtgtgtgtgtgtgtgtgtgtgtgtgtgtggagagagagtttatttgggccaaaatagaggactgcaacct

SEQ ID NO: 483301 - DNA, 201 bp, Homo sapiens
ccactgtgcccagcctaatttttttcataatttactttttctctggagcatagattcaaaatgccctgaatatatgctctctacttcattcttttaataaytatacagtttgctaatgttacactggagtatcccagtgcttaaaaatataatacacttggctgggtgcagtggctcacgcccgtaatcccagcactttgg

SEQ ID NO: 483302 - DNA, 201 bp, Homo sapiens
ttttattttaggaaaggttatttgtcaatgaagaaaatgttaatgagtttcttgaagaggtcctgagctctccattcaaacagtctatgtccttgaccccrccattaattgaagttcttcaagttactgataataagattcaaattaatgcaaaggtaaggaagttgatgggctctatagaggagtaatgaagcacagagt

SEQ ID NO: 483303 - DNA, 201 bp, Homo sapiens
ggcgcagcagcagccgctacatggtctacgacgtggtcttccatccagacgcgcttgcgctggcccggcggcacgagggcttccgccagatgctggacgcyacggccctggaggccgtcgagaagcagttcggcgtgaagctggaccgcaggaatgccaagaccctgaaggccaagtataaggggaccccagaggctgcgg

SEQ ID NO: 483304 - DNA, 201 bp, Homo sapiens
cacctggtggcggaggctccccttgtttgtcctcccggagcctggcgtggggttcttctgcgggaagagagagtgcgcgcggagatagcagtgtggaaacrcgcgaggagtcggagggcacgggcggccagcgctcagcctgcgccatgggtggtcccgggaccaagagcggggagcctttgtgtcctccgttactgtgta

SEQ ID NO: 483305 - DNA, 201 bp, Homo sapiens
aactcctgacctcaagtgatctgcctgccttggcatcccaaagtgctgggattacaggcatgagccactgtgcccagcctggaggatgaattttgacaggraagcctggatgtatacctgcaggtctgtaagggctattacctcacaactgttaaaaattttatttccagagggtagtacaatttaattttgtattattta

SEQ ID NO: 483306 - DNA, 201 bp, Homo sapiens
atttaaaatatggttaatatggttattctccccacaccctaactatacacctgtattcacttgacatgaacaaactgctttgtgtttgggattcaggtaaraggtgatttttgcattttctagtaatagtttagaaatcttttcatgtcagcatcttgaaatctacctcattatttatttatttatttatttatttgggag

SEQ ID NO: 483307 - DNA, 201 bp, Homo sapiens
ggcgtggtggcgggcacccgtaatcccagctacttgggaggctgaggcaggagaatcacttgaacgcaggaggtggaggttgcagtgagccgatatcatgytactgcactccagcctgggcaacaagagcgaaactctgtatcaaaaaaaaaaaaaaagaaaaattaagtattagactttgggctttaacttacgagaaaa

SEQ ID NO: 483308 - DNA, 201 bp, Homo sapiens
gtttctcaaatgatacttggaaaatctcagcaacctgagtcaaaaatgcaatctgaatttataaaagaaaaaagtgctacttgttcaaatgaggaaaaagrtaacttaaacgagtcagtaataactgaagagaaagaaacagatggagatcacctatcttcattactgaacaaaactacggttcacaatatacctggattc

SEQ ID NO: 483309 - DNA, 201 bp, Homo sapiens
tttcataatttactttttctctggagcatagattcaaaatgccctgaatatatgctctctacttcattcttttaataactatacagtttgctaatgttacrctggagtatcccagtgcttaaaaatataatacacttggctgggtgcagtggctcacgcccgtaatcccagcactttggtaggccaaggtaggaggacagc

SEQ ID NO: 483310 - DNA, 201 bp, Homo sapiens
tagctaaggtagtttgttagaatataaaatatgaaactgagtatctgtttttgtcatcagaagtgggacatttaggaaagggcagttgttttcctgtaacwgttttagtaaatatgaaaataacccacaatgtgggaagaaaactttgtagacaagcaattaagaaaatattcaataatacattttaatccgattttcaag

SEQ ID NO: 483311 - DNA, 201 bp, Homo sapiens
tattaaggttaaaaaatacctgtatctaaaattgattctgttaactgttgtcttaaaactaaaggtattaaagtataaaattaaaatttgcaatttttttwaaaaaattgcaattttgattctcatgggggaaattggagataatttttttttttttgcctctggagtttaaagtttccttatggagataagttttgtgat

SEQ ID NO: 483312 - DNA, 201 bp, Homo sapiens
ccatgggtggtcccgggaccaagagcggggagcctttgtgtcctccgttactgtgtaatcaggacaaagaaaccttgactctgctcattcaggtgcctcgsatccagccgcaaagtcttcaaggagatttgaatcccctctggtacaaattacgcttctccgcacaagacttagtttattccttctttttgcaatttgctc

SEQ ID NO: 483313 - DNA, 201 bp, Homo sapiens
agggctggtccacaggccgaattgcccacatcccgctgtactttgtcaatgcccagtttccacgttttagcccagtgcttgggcgggcccaggaacccccygctgggggtggaggctctattcatgacctgcccctctttactgagacatccccaacctctgccccttgggaccctctcccagggccaccacctgttctgc

SEQ ID NO: 483314 - DNA, 201 bp, Homo sapiens
acaaaggatcccctaaagacccctggaaggctggaccatggcacaagaactgccttcatccatcaccgggagcaagtgtggaagagatgcatcaacatttrgtgaggcatggcaaagggtttcctgggtcacagtctgcagatcctggaaaatgagtcaccacccctttaccttggggtgttcttcaaaagacttttattc

SEQ ID NO: 483315 - DNA, 201 bp, Homo sapiens
gagggaggcagcaacctttggtaagatgcagctctgagggataaagggaaatatagaagcttaggagatttcgaggtgttgatgcctttggtgagctggcrggggaccagtgagaggcctgtttcttgcaagaacctctctgctcttatttgtccacaggtgagggaaaggggtgcgttggaggtgcaaagtcagcaacga

SEQ ID NO: 483316 - DNA, 201 bp, Homo sapiens
catgggggcggagtcggggactactggggaaaggaggcagtgtgacaggggcagggtcacagagtctggcggagtggaaacagcttggccccggcaggagrctagaagggctggaatctgttttaggactgggattggagtataacgggggaacggttaaggagctgtggaggaggcctagagggaatggagagaatgagg

SEQ ID NO: 483317 - DNA, 201 bp, Homo sapiens
actgtgagatgatggggtgcttgagttttcccttatctcctgccccactctcctaggtatgggatgtctcaacagagacctgtgtcccccttccctggttycgaggaggtggggtgaccaacctgctctggtccccagacggcagcaaaatcctggctaccactccttcagctgtctttcggtgagtgggacaaggatgga

SEQ ID NO: 483318 - DNA, 201 bp, Homo sapiens
gcgggcccaggaaccccctgctgggggtggaggctctattcatgacctgcccctctttactgagacatccccaacctctgccccttgggaccctctcccarggccaccacctgttctgccccactccccacattcccacctctaagaataaataagttttccttttgttttccactcagttaccagtctgtcttttccagg

SEQ ID NO: 483319 - DNA, 201 bp, Homo sapiens
tcctgggactctgccttcagagttcctcccctatccctggatccatttcttacaggaaagccaagggtacaggatggtaaaccagtcatcctcctttttcrcactcgaaacagccctgtgtttgagctccttccctggtaagtgccatgtgggcccttaggtctggacttctcaccagccttcctgcacaaacaaacccac

SEQ ID NO: 483320 - DNA, 201 bp, Homo sapiens
cggccgccagggggcgcaggaagaagctttggaggtctgtcccgggaccgcgtactcgtccttctttcccgttagtcttttcttcacttccgttgagttcygcctcgccgtttgtcccttgcggtacccgtccgcatacgaatctagcccgggaaccgagttgcgggagtgcggtctgtgccgttccggccaggagtttgc

SEQ ID NO: 483321 - DNA, 201 bp, Homo sapiens
ggactgggattggagtataacgggggaacggttaaggagctgtggaggaggcctagagggaatggagagaatgagggagaatctagggagtgtgaggatgygggagaactatctaaaagttggggacagtatctggggaggatcagaaggatacaacatggaacttttttccatggtgttcctgggaaggacaaggaaggg

SEQ ID NO: 483322 - DNA, 201 bp, Homo sapiens
aggagtggtccagctcccctgttggaatattgaggagatggactccttttgccccagtgtgtcctgtgtctatcttgttcttacagctcaggagcgaagayctgatcgctgaatttgcccaagtcacaaattggtgagtgcacaagccctggagctttgtggaaaggaagtcctgaacctcaaaactccctttggggagaa

SEQ ID NO: 483323 - DNA, 201 bp, Homo sapiens
ttagcaggaggcaaagaaatagaattttggggatggcttcttgtcatcttctgactccacatcctctgtgttcccctccagaccctcttctggctgtgccyaagtgctgtctcaccctgggcatacacctgttaccagcttggcctgggcccccagtggggggcggctgctctcagcttcacccgtggatgctgctatccg

SEQ ID NO: 483324 - DNA, 201 bp, Homo sapiens
ctcccaagtagctgggactacaggcacgcactagctaatttttgtatttttagtagagatagggtttcaccatattggccaggctggtcttgaactcctgwccttgtgatccgcccgccttggcttcccaaagtgctgggattatagaagtgagccaccgtgccctgtggaaatgtttgattttctagcaaaatataagtt

SEQ ID NO: 483325 - DNA, 201 bp, Homo sapiens
tagctttgtggaaatgggaaacagacctctggaatctcttatacttagcccagcggtgggttggagatggcacggaattaaagatttgggaagagactgamtcaccgtcacacccctcacttttgtgctatagtggatcaatcttcctgtcctacaactgacaaaggatcccctaaagacccctggaaggctggaccatgg

SEQ ID NO: 483326 - DNA, 201 bp, Homo sapiens
cccttatctcctgccccactctcctaggtatgggatgtctcaacagagacctgtgtcccccttccctggtttcgaggaggtggggtgaccaacctgctctrgtccccagacggcagcaaaatcctggctaccactccttcagctgtctttcggtgagtgggacaaggatggagggagggcaaggacctagagaaaggcact

SEQ ID NO: 483327 - DNA, 201 bp, Homo sapiens
atgggaaacagacctctggaatctcttatacttagcccagcggtgggttggagatggcacggaattaaagatttgggaagagactgactcaccgtcacacycctcacttttgtgctatagtggatcaatcttcctgtcctacaactgacaaaggatcccctaaagacccctggaaggctggaccatggcacaagaactgcc

SEQ ID NO: 483328 - DNA, 201 bp, Homo sapiens
ctgtgagatgatggggtgcttgagttttcccttatctcctgccccactctcctaggtatgggatgtctcaacagagacctgtgtcccccttccctggtttygaggaggtggggtgaccaacctgctctggtccccagacggcagcaaaatcctggctaccactccttcagctgtctttcggtgagtgggacaaggatggag

SEQ ID NO: 483329 - DNA, 201 bp, Homo sapiens
ggtctgtgccgttccggccaggagtttgccgactgcagacgtcctgcgaaccggcaagatgtgctctctggggttgttccctcctccaccgcctcggggtmaagtcaccctatatgagcacaataacgagctggtgacgggcagtagctatgagagcccgccccccgacttccggggccaggtggccagggcgaggaggga

SEQ ID NO: 483330 - DNA, 201 bp, Homo sapiens
ccatcaccgggagcaagtgtggaagagatgcatcaacatttggtgaggcatggcaaagggtttcctgggtcacagtctgcagatcctggaaaatgagtcamcacccctttaccttggggtgttcttcaaaagacttttattcaggctgtctccacgagagctgtatatcctaaatcatatgaaatttttagtccttattat

SEQ ID NO: 483331 - DNA, 201 bp, Homo sapiens
tgctcacaaagccccaaaagtcctctgagccttggttgtctcatccgtaaatgggtagaatctcgttcagatttgtgagatatgtaaatgaaaggacagcmcgtagagtgcctggtacatagttggcactcattaaatgtgagtgcccatatttttaatacatgtatattgaatgaatgaaactggtagagagggacagag

SEQ ID NO: 483332 - DNA, 201 bp, Homo sapiens
ctgtgtcccccttccctggtttcgaggaggtggggtgaccaacctgctctggtccccagacggcagcaaaatcctggctaccactccttcagctgtctttyggtgagtgggacaaggatggagggagggcaaggacctagagaaaggcacttagctcctggaagctctgtcaagggaggtaggtccaacttttagaactta

SEQ ID NO: 483333 - DNA, 201 bp, Homo sapiens
ctgagggccttggctgctgtatggctctgccaggtggcccttctttgggcccagactctgatccttttctttcccttctctgcagggctggtccacaggcygaattgcccacatcccgctgtactttgtcaatgcccagtttccacgttttagcccagtgcttgggcgggcccaggaaccccctgctgggggtggaggctc

SEQ ID NO: 483334 - DNA, 201 bp, Homo sapiens
caggtgtgtgtggggacaccaggtgggctctgacttgtcaatatcaccttcccttgccagccttggttccggggagtcctgtagttcttgaacctgattcrtggggctccttccagaactggggtcagggaagctccataactggatgcgtgcttcttctagacctaacctttatcccctcctgtcctatggtgcccctgg

SEQ ID NO: 483335 - DNA, 201 bp, Homo sapiens
ctcacttattatacttttttctatttcttttccttgccaagagctttagaaaagtttaagtggtaatacaaatttgtaaaagtggaagtggtgtgaaggaraatgaatattagatacctgtttctatggcttgggcttcgttggtcttccactgctccgctacatcatttgctaatggatcatctggattgggagcactta

SEQ ID NO: 483336 - DNA, 201 bp, Homo sapiens
caactctggctaataagccaagtttctgttttttgtttttttgagatggagtctctgtcacccatgctggagtatggtggcacgatctcggttcattgcarcctccacctcctgggttcaagcgattctcctgcttcagcctcccaagtagctgggactataggcgcccgccaccatgcctggctaatttttttagtagag

SEQ ID NO: 483337 - DNA, 201 bp, Homo sapiens
tgttaattctgatttcagaaagatggtgtttaacaaaggttgtcaattgcatttttgtggtgtaatgcgtaccccctaattttaattaaattttaaaataktttaatctagaatagagttataaccttgcagaggtttgagaatgttgtttatatacgaagtgcttctcaggctggaagtatacagttatggttcacctta

SEQ ID NO: 483338 - DNA, 201 bp, Homo sapiens
gttaattctgatttcagaaagatggtgtttaacaaaggttgtcaattgcatttttgtggtgtaatgcgtaccccctaattttaattaaattttaaaatatwttaatctagaatagagttataaccttgcagaggtttgagaatgttgtttatatacgaagtgcttctcaggctggaagtatacagttatggttcaccttac

SEQ ID NO: 483339 - DNA, 201 bp, Homo sapiens
agtcagtccaggattaggtagggagggaagtaaaagccactttttcatatgccaccacttttatttatttatttttaattaattttttttaagacagagtytcgctctgtcgccaggctggagttcagtggtgcaatcttggcttactacaacctctgcctcccagattcaagcaattctcctgcctcgtcctcccaagta

SEQ ID NO: 483340 - DNA, 201 bp, Homo sapiens
gaaaccctgtctctactaaaaatacaaaaattagccgggcatggtgacgcacgcctgtagtcccagctacttgggaggctgaggcagaatggcttgaaccygggaggtggaggttgcagagcggcactccatctcaaaaaacaaagagaaaagtcgttcaagtagaattcagtcttttccagaattcagcagttgcttcac

SEQ ID NO: 483341 - DNA, 201 bp, Homo sapiens
cctggttaaactgaaaaacatactgaggtttttacaaataacacatttgtcaatatgctgacaaggtgtttgaagaaaatgtctcacattataaataaagyttaaataatatgggaaggtaacagtattaagtgctttacaaatactgtttaacagcacacgtcaatcaaaaaatacctttccccttagaaaatataaggg

SEQ ID NO: 483342 - DNA, 201 bp, Homo sapiens
tgtcaccaacttcttcatctgtgcctccagctctcccagaaggtttcccgtcattaaaccaggcattaacgtagaatttgcattggattttttttttttttcttagggtcttggtatagctcaagcttttctctaattgaaaaaaagcttataccccgtcactttaaaacattgacctgctaggtaaaaaatccatggtca

SEQ ID NO: 483343 - DNA, 201 bp, Homo sapiens
tcttcagagttaagtccttgaaggtatttctttcaaatggagaccactttcatcaaaaataagtactatccaaaggtagccttttttttttttttttttttgagacagagtctcgctctgtcctccaggctggagtgcagtggcgcgatgtcagcttactgcaagctccgccttccaggttcacgccattctcaagtagct

SEQ ID NO: 483344 - DNA, 201 bp, Homo sapiens
gtaaaaacccactgttttgagtagatttttcaggttgtttgtggccaaaatcaggacaattatctaaagtcgtggactatggcaaagaaggctaactttartcaggatgaaggaaggccaacttgtttaatttttaacccagaaacaagctcagttgcctgttttatttaatttatgttttttttttttagatggggtatc

SEQ ID NO: 483345 - DNA, 201 bp, Homo sapiens
tacctccccagctagttatttctgtggggaagcaccctcagttttggccgctgggcttctagacaggcccacagctaattgccctgtagagtagctgggtmctgtgcttgtacagtgaaagatgacaatgcttttacaaataggtaatcagaaatggattctgttgaatgtatttgcatatatgatagtttaaaaggggat

SEQ ID NO: 483346 - DNA, 201 bp, Homo sapiens
tgcagagcataagtaccttcccaaatgacacaattaggaagtggtagagtcaggattcagggtccagtccttactcctgatgttgggctctgtttgttgartgagtgagatttttgtgaggctaagtttggaagcctatctgaaagtggtgactgaagtgttgccataatgtgaacttggaattcaggctttgtaaaaata

SEQ ID NO: 483347 - DNA, 201 bp, Homo sapiens
ctcagtgcatacaactctggctaataagccaagtttctgttttttgtttttttgagatggagtctctgtcacccatgctggagtatggtggcacgatctcrgttcattgcaacctccacctcctgggttcaagcgattctcctgcttcagcctcccaagtagctgggactataggcgcccgccaccatgcctggctaattt

SEQ ID NO: 483348 - DNA, 201 bp, Homo sapiens
ggcagagaactacaacctacaggccaaaccccaccccactgcctgtttgtacggccaacaagtttaaaatttttttaatgttttaggtttttttttttttwaaaaaaatactatgcccatttgtttacaaatcgtctgtgggtgctttctcactacaatggcagaattcagtagttgagacagacctatggtccacaaagg

SEQ ID NO: 483349 - DNA, 201 bp, Homo sapiens
gcagagaactacaacctacaggccaaaccccaccccactgcctgtttgtacggccaacaagtttaaaatttttttaatgttttaggtttttttttttttawaaaaaatactatgcccatttgtttacaaatcgtctgtgggtgctttctcactacaatggcagaattcagtagttgagacagacctatggtccacaaaggc

SEQ ID NO: 483350 - DNA, 201 bp, Homo sapiens
tgaaataaacacagtaaaataaactgtacaaaggcaaagtagaataacaaaaaatattttactaaaacataagatttacagaagtttccagacaagccatwcaaaatggtcacaagctttttttgaaggggggaatctacacttgacagcaatgttattagtgagggctgtgatgtttgtttaatgttcccattttggttc

SEQ ID NO: 483351 - DNA, 201 bp, Homo sapiens
cagtttcaattttaaaatacgattgtcaaattgggaaaatgaaataaacacagtaaaataaactgtacaaaggcaaagtagaataacaaaaaatattttaytaaaacataagatttacagaagtttccagacaagccatacaaaatggtcacaagctttttttgaaggggggaatctacacttgacagcaatgttattagt

SEQ ID NO: 483352 - DNA, 201 bp, Homo sapiens
gttccatcagtttcaattttaaaatacgattgtcaaattgggaaaatgaaataaacacagtaaaataaactgtacaaaggcaaagtagaataacaaaaaawattttactaaaacataagatttacagaagtttccagacaagccatacaaaatggtcacaagctttttttgaaggggggaatctacacttgacagcaatgt

SEQ ID NO: 483353 - DNA, 201 bp, Homo sapiens
tcctgaattcaagcaattcttgtgcctcagcctcctgagtagctgggactacaggaatgtgctaccacacccagctaatttttgtatttttagtagagatrgggtttcaccatgttggccaggttggtcttgaacccctgacctcagatgtccacccacttcagcctcccaaagtgctgggattataggcatgagccacca

SEQ ID NO: 483354 - DNA, 201 bp, Homo sapiens
gattataggcatgagccaccacgctcaccttgagttgattttaacttaagtgaagttcaacctaagctagcccacaaatattcctttgtttcccccccccccttttttttttcctttttttgagacagaatctagctctgttgcccaggctggagtgtagtggcatgatctcggctcactgcaacctccgcctcccaggtt

SEQ ID NO: 483355 - DNA, 201 bp, Homo sapiens
aatacaaaaaaaatgagccgagcatggtggtgtgtacctgtaatcccagctactcaggaggcttacgcacgagaattgcttgaacccaggaggcaaaggtkgcagtgagccgagatcacgccattgcactccaacctgggtgacagagtgagaccctgtttcaaaaaaaaaaaagaagctattaatagttgagttttccca

SEQ ID NO: 483356 - DNA, 201 bp, Homo sapiens
attataggcatgagccaccacgctcaccttgagttgattttaacttaagtgaagttcaacctaagctagcccacaaatattcctttgtttcccccccccccttttttttttcctttttttgagacagaatctagctctgttgcccaggctggagtgtagtggcatgatctcggctcactgcaacctccgcctcccaggttc

SEQ ID NO: 483357 - DNA, 201 bp, Homo sapiens
tgctgggattataggcatgagccaccacgctcaccttgagttgattttaacttaagtgaagttcaacctaagctagcccacaaatattcctttgtttcccycccccccttttttttttcctttttttgagacagaatctagctctgttgcccaggctggagtgtagtggcatgatctcggctcactgcaacctccgcctcc

SEQ ID NO: 483358 - DNA, 201 bp, Homo sapiens
ttgtccatttctagatacacaattctccccactaattttcttaaaatctgtagcagaagcttcttgactccaaattccgtagccataaacagctgaatacyttaatcaaatgggttacaaaaacagttcaagttttccagtattctttacatataactagataaatggtatgcactcagtatttgttaaaccaggtgtagt

SEQ ID NO: 483359 - DNA, 201 bp, Homo sapiens
catgattattacagaataaactctgttagctttcctggagattctattgtttctctatgaatttgccttcactctgttgaaattgcattgccagacttcccaggacagtctagaaaaccagcttgagcccacctctctagttaataggtgagaaatgtttccctctactggatgaaaaacacctagatcctggttagaaga

SEQ ID NO: 483360 - DNA, 201 bp, Homo sapiens
cggagcagcagcagcagcagcaggagcccgcctctatgatgaagttcaagcccaaccagacgcggacctacgaccgcgagggcttcaagaagcgggcggcktgcctgtgcttccggagcgagcaggaggacgaggtagggcgcccggcgccgcacgctgccctccggggcgccggggtctagggcccgggtgcttcccctc

SEQ ID NO: 483361 - DNA, 201 bp, Homo sapiens
aggcgtggtggcgtgcacctgtaattccagctactcgggaggctgaggcaggagaatcacttgaacctgggaggcagagattgtgggggagctgagatcaygccactgtactcctgggcaacaaagcgagactccctgtctcaaaaaaaaaaaaaaaaaaaaagaaaagaacatcagatatatagaaataagtgtttaaag

SEQ ID NO: 483362 - DNA, 201 bp, Homo sapiens
tctagatacacaattctccccactaattttcttaaaatctgtagcagaagcttcttgactccaaattccgtagccataaacagctgaatactttaatcaawtgggttacaaaaacagttcaagttttccagtattctttacatataactagataaatggtatgcactcagtatttgttaaaccaggtgtagttacaagaga

SEQ ID NO: 483363 - DNA, 201 bp, Homo sapiens
cactgcaacctccgcctcccaggttcaagtgattctcatgcctcagtctcccgattagctgggattacaggcatgcaccaccacacctggctaatttttgyatttttagtaaagacggggtttcaccatgttttgtccaggctggtgtggaactcctgacctcaggtgatcgcccacctcggcctcctaaagtgctgggat

SEQ ID NO: 483364 - DNA, 201 bp, Homo sapiens
ctagatacacaattctccccactaattttcttaaaatctgtagcagaagcttcttgactccaaattccgtagccataaacagctgaatactttaatcaaakgggttacaaaaacagttcaagttttccagtattctttacatataactagataaatggtatgcactcagtatttgttaaaccaggtgtagttacaagagac

SEQ ID NO: 483365 - DNA, 201 bp, Homo sapiens
atgtgagctcttgacttactctagaattctaatacagatactttctgcactagtatcacttttattattgcagttccatttaaaagcataactggctaagkcaccgccccacccgccgcattacatttcctaaaacatactgctgccaaagaccaactgtagaatccttaagtcctgttcaagtgtcacttcattttttat

SEQ ID NO: 483366 - DNA, 201 bp, Homo sapiens
gctgcctgttagaagaatgaagtgacttttgcctatgtatgcaggtttaaaatgtgaaggatgcttcttgccacctaatcataacagtaacaagcactctktatcaagaatcgtctttatgtgcatttccctatttctttctcacacatctgttatcttcttagtattcttattttttaggtgaggaaacaaggtaaccta

SEQ ID NO: 483367 - DNA, 201 bp, Homo sapiens
tatacatttccacagtgatctcatgtaatgcaatgaatttaaatactaaacacactctataagctgaagcctcccctaattcatatctagcccagacctcwcccctcatcgtgcctcttgcctctataactacctgcttgatatacactcttgaatgtctaataagcatcccaaacttaacatgacctccctatccccaac

SEQ ID NO: 483368 - DNA, 201 bp, Homo sapiens
cccgcaccgactagcgctcccgggcgctcctgcgcccgactcgccctcgcccccactccccggcggggtggcggcggccgggcccccacggcggcggccgkagcagcagcagcagcagcaggagcccgcctctatgatgaagttcaagcccaaccagacgcggacctacgaccgcgagggcttcaagaagcgggcggcgtg

SEQ ID NO: 483369 - DNA, 201 bp, Homo sapiens
tactgctgccaaagaccaactgtagaatccttaagtcctgttcaagtgtcacttcattttttattaggggtttcttagttggagggcatgagaaacttggycctttccaatgttgtcttcacattggagtataagaattctctataggactctttaatttttttttttttttggtagagatggggtcttgctgtgttgccc

SEQ ID NO: 483370 - DNA, 201 bp, Homo sapiens
tcttagggtgtctgctactcagatcctctcagttaagtcccgtgcacaaaggtgggtcaggtctactgttgccagatcttcagatcattcaaaagttaccygaattctggattttcatgcaaatctcccaatttttaaaaatgttggcatcaaattcagaatgttttaaccagccacactgtgtgggccagggaaaacagg

SEQ ID NO: 483371 - DNA, 201 bp, Homo sapiens
ctgcagtgagccaagatcatgccacagcactccagcctaaactacagagctagaaagtggctagagcagccaaaaaaaaaaaaaaaaaaaaaaaaaaaaarggttcctgaaccattcaacagaaaaatgaggcctattcctatcatttcctcgatccaatttagttccacttaggtcactgtgtttataatgtcttttagg

SEQ ID NO: 483372 - DNA, 201 bp, Homo sapiens
tgtggtggcaggtgtctgtagtcccagctcctcaggaggctgaggcaggagaatcgcttgaacgcgggaggcagaacctgcagtgagccaagatcatgccmcagcactccagcctaaactacagagctagaaagtggctagagcagccaaaaaaaaaaaaaaaaaaaaaaaaaaaaaaggttcctgaaccattcaacagaa

SEQ ID NO: 483373 - DNA, 201 bp, Homo sapiens
gagaatcgcttgaacgcgggaggcagaacctgcagtgagccaagatcatgccacagcactccagcctaaactacagagctagaaagtggctagagcagccmaaaaaaaaaaaaaaaaaaaaaaaaaaaaaggttcctgaaccattcaacagaaaaatgaggcctattcctatcatttcctcgatccaatttagttccactt

SEQ ID NO: 483374 - DNA, 201 bp, Homo sapiens
gatgctatcaaagttctccagtgtcataaacctgtacatgcagagtatctggaaaagctaaagctgggttgttccccagccaatggaaattctacagtccsttcccttccggataataatgccttgtttgtaaccgctgcacagacctctgggttgccatctagtgtaagatagagagaactgggtaggcctctcccacca

SEQ ID NO: 483375 - DNA, 201 bp, Homo sapiens
tccccaacctttgctcctcccataaagtcttccccacatcagttactggcaaacccatctttccaaatgatccaccttttccttcatatgccacacacatytagcctgattggcaaattggttttttttatacttcaaattctactcatgattggactgtttctcaccattccactgctacacctctgatccaagcaacca

SEQ ID NO: 483376 - DNA, 201 bp, Homo sapiens
ggtgtaatgcgtaccccctaattttaattaaattttaaaatattttaatctagaatagagttataaccttgcagaggtttgagaatgttgtttatatacgwagtgcttctcaggctggaagtatacagttatggttcaccttacaggtgctgctggtgagtagcagccggtacccagaccagtggattgtcccaggaggag

SEQ ID NO: 483377 - DNA, 201 bp, Homo sapiens
gtagacagaaacaaacatacgattattattttacttagttcaatatgttactttccaaactataaatggcaaacaaccactattaattatggaaatgtcaygctgtaatctgttaaattcacgcctttttctataaattggatcagggctgaaagattttgtaaatgtccaattaccaaaacactacaataaaattaagaa

SEQ ID NO: 483378 - DNA, 201 bp, Homo sapiens
ttattattttacttagttcaatatgttactttccaaactataaatggcaaacaaccactattaattatggaaatgtcatgctgtaatctgttaaattcacrcctttttctataaattggatcagggctgaaagattttgtaaatgtccaattaccaaaacactacaataaaattaagaagttctagaaaattcaagaggat

SEQ ID NO: 483379 - DNA, 201 bp, Homo sapiens
tgagctcttgacttactctagaattctaatacagatactttctgcactagtatcacttttattattgcagttccatttaaaagcataactggctaagtcaccgccccacccgccgcattacatttcctaaaacatactgctgccaaagaccaactgtagaatccttaagtcctgttcaagtgtcacttcattttttattag

SEQ ID NO: 483380 - DNA, 201 bp, Homo sapiens
agctcttgacttactctagaattctaatacagatactttctgcactagtatcacttttattattgcagttccatttaaaagcataactggctaagtcaccsccccacccgccgcattacatttcctaaaacatactgctgccaaagaccaactgtagaatccttaagtcctgttcaagtgtcacttcattttttattaggg

SEQ ID NO: 483381 - DNA, 201 bp, Homo sapiens
ctctagaattctaatacagatactttctgcactagtatcacttttattattgcagttccatttaaaagcataactggctaagtcaccgccccacccgccgcattacatttcctaaaacatactgctgccaaagaccaactgtagaatccttaagtcctgttcaagtgtcacttcattttttattaggggtttcttagttgg

SEQ ID NO: 483382 - DNA, 201 bp, Homo sapiens
tatgcaactagcaaaaatctgcataatgcaacaacacagttttcacacttcaaattttacatgaggggttcttcacgattctcctggaacccagtctagcmaaatgagaggaaaggccctagggagatttatttctgttaaatagttaactctgctgagtatgacaaatagtgtctactatctcaaccctccaaaatttgc

SEQ ID NO: 483383 - DNA, 201 bp, Homo sapiens
cgctctgtcctccaggctggagtgcagtggcgcgatgtcagcttactgcaagctccgccttccaggttcacgccattctcaagtagctgggactacaggcrgccgccaccatacctggctaattttttgtatttttagtagagaaggggtttcactgtgttagccaggatggtcttgatctcctgaccttgtgatttaccc

SEQ ID NO: 483384 - DNA, 201 bp, Homo sapiens
gcatacaactctggctaataagccaagtttctgttttttgtttttttgagatggagtctctgtcacccatgctggagtatggtggcacgatctcggttcaytgcaacctccacctcctgggttcaagcgattctcctgcttcagcctcccaagtagctgggactataggcgcccgccaccatgcctggctaatttttttag

SEQ ID NO: 483385 - DNA, 201 bp, Homo sapiens
tcctagcggtacatttgtatgatccttactactggaattaccgggttaaaaggaaatgcttaccactaagatgtcagtattctcctcatggatattttcartctcaatgttgccagtctaatagtatagtatgtggttgctttactgctgttctccccacccccgtggagttgtgtcattattttaatgaatgtgagctct

SEQ ID NO: 483386 - DNA, 201 bp, Homo sapiens
taaaatacgattgtcaaattgggaaaatgaaataaacacagtaaaataaactgtacaaaggcaaagtagaataacaaaaaatattttactaaaacataagwtttacagaagtttccagacaagccatacaaaatggtcacaagctttttttgaaggggggaatctacacttgacagcaatgttattagtgagggctgtgat

SEQ ID NO: 483387 - DNA, 201 bp, Homo sapiens
tcacaaattaatgctgtcaaaggaatgagtaaagcagaaaaacttttaaccagcaacatttcaagtacgtagtgtgatcaaacatgatcatccagaatttktatatttttttctttgtacagaggttacatattctgggtgttcttttataaaggaaacattttaaatcccacaaattgacactttctatcttcaatggac

SEQ ID NO: 483388 - DNA, 201 bp, Homo sapiens
ttagtgccattttggaaatgagatcttgtgccataaatacagctgaactgaatataaatgttcacaaattaatgctgtcaaaggaatgagtaaagcagaaraacttttaaccagcaacatttcaagtacgtagtgtgatcaaacatgatcatccagaatttgtatatttttttctttgtacagaggttacatattctgggt

SEQ ID NO: 483389 - DNA, 201 bp, Homo sapiens
acttattttgtcacagggcttaatttgccatttttggggatttgtcgactcattttgtctgaattttcacaactggtattatgtcactagctacctgatayggctatttcccttataactcaatagtaccttaacacaaagtataactctgtagagttggtgaatattttagggaaatattagcaaaatgcatgtagtaaa

SEQ ID NO: 483390 - DNA, 201 bp, Homo sapiens
ggtattgtatttaattagatttaagtaaatagccagagtgtaacttgtatttatatacattttgttataaaaaggtaaacattttatatttcatctttttytaataggctggagtcaaaggaaaactaggcagacttctgggcatatttgaggtgagttaaaaagtaatcttcactttgctgataatagaattaatgattt

SEQ ID NO: 483391 - DNA, 201 bp, Homo sapiens
gttattagtgagggctgtgatgtttgtttaatgttcccattttggttccaacaatcaagcttgtccatctacagcgtctaaataaagttagacttggctaragcatattctaaagacctggttagctgcttttaaccaatgcaattagatcaccaaaaaagggggaaaggagcccataaaattaaactacctcccccctca

SEQ ID NO: 483392 - DNA, 201 bp, Homo sapiens
ccgaaagcacagaacatatgtttatgttctaacagtcactgaaatattagaagattgggaagattctgttaatattggtaagttcccttttgttatctgartactctgttctaacagaagattgggaagattctgttaatataggtaagttcccttttgttatctgaatactctttgcttatattcctgtgtccagtttcc

SEQ ID NO: 483393 - DNA, 201 bp, Homo sapiens
tgtctacaaatatgttaataaaattagcttaataaaactgattttttactcaagtaaaataaagtaacattaggattacataagtaaggcaacttgctctaaactcaaccaaaaccaagctatttaaaaagtaaaattagcttttttggtggttttttttggcttgtttgtttgtttttgagacaagatctcactttgtca

SEQ ID NO: 483394 - DNA, 201 bp, Homo sapiens
gctgaagattgtaaagacaaaagtgaatggatttagtttggataccatgtgcatgatgcttctttcctgctagcccattttcatgattctgattttctttygaaaagcattttaaagtggtaaggttttgcatgaaaatttaagtggataaataactaacagttacatattttacctgttctgaaaaggatataccattaa

SEQ ID NO: 483395 - DNA, 201 bp, Homo sapiens
ctcttatctggagtgtatccctcagttcttgctcactcttagtcactgccttctccccaccaccacccccccagatgtggccttgccctcatttgaacacycaaatgaactattcaagatgagtaggcaagtacttaatgaaacagacagactttcaaatctgtcaccatgacatctgtgtgagacctcttttcataagct

SEQ ID NO: 483396 - DNA, 201 bp, Homo sapiens
cgatcattttatggaaagataatttgaagttattggtctgaccaaatttattcttcctgagatgtcaagggactcttggatgataagttactggattaggmtaaatcgtttgtccacaatttataatgatatagatttatatagatgtatgtgttcttgcagtttttagacacaaaatattgagcattctatgtgactgta

SEQ ID NO: 483397 - DNA, 201 bp, Homo sapiens
cgcgcggtcgccgcggtgctgctgctcagtgggagcgggtcttcgcaactgtctccgcgtggcgcgcgcctctagccgcccttcccctggcggctacggcyggagggagcggaggcgagcgggagtcgggctccatggagagcggcggacaactgggcagaggcggagctttcatctcggcaccctggttccagtgacccg

SEQ ID NO: 483398 - DNA, 201 bp, Homo sapiens
ctcaatagtaccttaacacaaagtataactctgtagagttggtgaatattttagggaaatattagcaaaatgcatgtagtaaagacatcttatgaaaactstattcatggaatttgatttagcatgctcagttgccagttcccattatcgatactctttctatgcagaataccttagaaccgttatttccctcagtgtaga

SEQ ID NO: 483399 - DNA, 201 bp, Homo sapiens
atgagcacttgaaatatgactggactaaggaattgaattttaaattttatttaatcttaaatttagccatatgatgctagtggtgactgtgttagctgtaraccctcaaaagcatgaaaggttcaaaagtagcagagtttaggacagactggaattaattggcagatcaagggcccagaggagcccaattctatctgcagg

SEQ ID NO: 483400 - DNA, 201 bp, Homo sapiens
gattacttgtgggtatacctaccccaaaattgttttctcattcacagcattagcatattcagcaaatccatctgtggtgggaattaaaaatattattggtwttaaagaaatccattcaccccaaaacttgttttacaggattacaattttaattcaaaatttccagatttgggctatttctgtatgatccaataacttatt

SEQ ID NO: 483401 - DNA, 201 bp, Homo sapiens
gcttttacaaataggtaatcagaaatggattctgttgaatgtatttgcatatatgatagtttaaaaggggatgaagagatgaggtcttagctcctaagaawcattctgtagggaaaggttggacaagggatcaatggaaagggaaataaagtaagggaaaagtgcggtcgggtattctggggttcagatccaatgtgagtc

SEQ ID NO: 483402 - DNA, 201 bp, Homo sapiens
gagtaagacttcatctcaaaaaaaaaaaaaaaaaaaagaaagaaagaaaagaaaatacacaaagagaaatatgtaaaagataatattttcccctaatggamtctttttcattaatttttattagtgaataatgtgtacaatgttatcaatcaattgctaatgtaccttccataatcaacaaatgaatgcactatgcttctg

SEQ ID NO: 483403 - DNA, 201 bp, Homo sapiens
tatcaacagagaaatactgtatttcaccctattaagaatttgttaaatgttgttaaacctatcaatgtctctgtctctctctctctctctctctctctctcacacacacacacacacacacacacgcacacactttttcagagagagtctcactctgtcacccaggatggagtgtagtggcgtgatctgggctcactgcaa

SEQ ID NO: 483404 - DNA, 201 bp, Homo sapiens
actaacttgtgtatatgtacatatatacacacacaaacttgtgtatatgtacacatatacacaccggtgtatgtacaataaacacataaaaattaataatrtaagttaccagttcgatttcacagtgtctagaaaattgtagcctcccaataaatgaatgaacatgaatatatttgctcagcaacaatttgaacatgtttt

SEQ ID NO: 483405 - DNA, 201 bp, Homo sapiens
acagagccccttcttcaagcttctaaatttgaataactcctccagcgttagggctggtgacttatccctgcagttgctaccttgatcataccatgggtatrtgtatgataaacacataaaaataactaataatataagttaccagtttgatttcacagtgtctagaaaattgtagcttcccaataagtgaatgaacatgaa

SEQ ID NO: 483406 - DNA, 201 bp, Homo sapiens
ttttggagcattttggattttcagattaggtgtgcttaagctgtactctttttttttgccctttcagtttttaatacttaatgtttttgtattaaattctstgtattgtatcatatttttgtgataatggcagagtagtttcaagtggaccaactcctctgtagataacagccagaaaattaaaaaatgtaaagaaaccaa

SEQ ID NO: 483407 - DNA, 201 bp, Homo sapiens
gagagggagaagagttagaaggcggagaacgctggggaagtttgctgtttttccaacttgctaccctgaatccagccagctctacagtaattggctaaaartgggctgaaaccacagtcttaactggcctgaagaaccagaaaacaagattcagagctaccacagcactggaaaggggagaaatctggttaaaaaacaaaa

SEQ ID NO: 483408 - DNA, 201 bp, Homo sapiens
ggtatatatccaaaaggaaatacataattctgccaaaaatacacatgcacttgtatgttcactgcagcactgttcacaatagcaaagacgtggaatcaatytaggtgcccatcaatggtggattgaatgaagagagtgtggtacatataccacgaaatactatgcagccataaaaaagaatgaaatcatgtcctttgcagc

SEQ ID NO: 483409 - DNA, 201 bp, Homo sapiens
tttctcttgctttttttattcccatgccttacacatattttcattcatgcaacaaatatttttgaggacagaccatgtactacaaacgtgcccaagaatayaaaagccagaatcattaggccagtgaagcctttaaaccttaaaattattaagcacagaagataaaataactacagatatacttaatgtggttagagaaat

SEQ ID NO: 483410 - DNA, 201 bp, Homo sapiens
tggaggaaagaccctccaccagcaaagagattacaactcactgagggctcagatgattgttagccttttttagcaacaaagtgttttttaattaaggtgtrtacattgtattttacatataatgctactgcacattagtagactgtagtatggtgtaaacataacttctacatgcagtgggagaccagaaaatatgtgtga

SEQ ID NO: 483411 - DNA, 201 bp, Homo sapiens
gcaatttccctgtcttgacaaactggctctatctgggcagcaggcaagaagaacccattgggtagttacatcgtttttctttgaatgtccgagtatcccaytgtgtatatataccacgttttctttatctagtcatctgtgatggacaattaggttgattccaaagctttgctattgtgaataatgcttcagtaaacacgg

SEQ ID NO: 483412 - DNA, 201 bp, Homo sapiens
cttatccaaaagctcttgaatagtcatttgcagtttgaggtcttaccacaattttcactaatgcttaacccatttgaggtacagagcatgaaagaatgaarttctcttctgtttcaaatgaactaatatctaaatctgaaattatcaaaggtgacatctttcccttttaaaaaataaaccacccaaatgaaagtattagtt

SEQ ID NO: 483413 - DNA, 201 bp, Homo sapiens
caacagagaaatactgtatttcaccctattaagaatttgttaaatgttgttaaacctatcaatgtctctgtctctctctctctctctctctctctctcacwcacacacacacacacacacacgcacacactttttcagagagagtctcactctgtcacccaggatggagtgtagtggcgtgatctgggctcactgcaacct

SEQ ID NO: 483414 - DNA, 201 bp, Homo sapiens
cgaagttccctcttattcatagtttgcttaaattttttaaagattgtaaatgagtgtagaattttgccaaatgcttttctgcatgaatcaagataattttwtcatttccatctgattctgttaatatggtagattacagttacagattttcaaatgtcaaaccaaccttataattcggggaaaaatcccacttggtcatga

SEQ ID NO: 483415 - DNA, 201 bp, Homo sapiens
tatctctatctgtttctatggaaacaactgagaccaaaaacatcacaacctcattgttgaatctcctcaaacaggaaaagagtaaggtcttttgaggtgawgaaaagctgcaaatagccttattcattagcaaatctaataataaaaatcctgggcagtatatatagagaaaacagatcatgtcagtcataaatttaaagt

SEQ ID NO: 483416 - DNA, 201 bp, Homo sapiens
aaatgtaacaatatgtgtggagtgttataacaaatgtaaatatagtttaaacgactatagcagcagtccccaagctttttggcaccagggactggttttgwggaagacaatttttccacagaacagggtgtggtggggatggtttggggatgaaactgttttacctcagatcatgtggcattagattctcataaggagtgt

SEQ ID NO: 483417 - DNA, 201 bp, Homo sapiens
agaccctgtctctaataaaaataaatacatttaaaaagctttatatttatatgagttggttagcactattatatgtaagaaccaataaaactactacttaktctttgaaaaattcataaaaattattattttactagtaaactttaaagtagaaagcataattatataatagaggatttagtaactgagagccaataacct

SEQ ID NO: 483418 - DNA, 201 bp, Homo sapiens
atcaacagagaaatactgtatttcaccctattaagaatttgttaaatgttgttaaacctatcaatgtctctgtctctctctctctctctctctctctctcwcacacacacacacacacacacacgcacacactttttcagagagagtctcactctgtcacccaggatggagtgtagtggcgtgatctgggctcactgcaac

SEQ ID NO: 483419 - DNA, 201 bp, Homo sapiens
aatactgtatttcaccctattaagaatttgttaaatgttgttaaacctatcaatgtctctgtctctctctctctctctctctctctctcacacacacacasacacacacacacgcacacactttttcagagagagtctcactctgtcacccaggatggagtgtagtggcgtgatctgggctcactgcaacctccgcctccc

SEQ ID NO: 483420 - DNA, 201 bp, Homo sapiens
caaacaactcattagcaaaaaaagatatgattaaaaatgggcaaaagatcttaataaacatttctcaaaagaagacagacacatggccaacaggtatatgaaaaaaaatgctcaacatcactaaacactcgagaaatgtaaatcaaaactacaatgagatatcatctcactccagttaaaatggctgttatccaaagacgg

SEQ ID NO: 483421 - DNA, 201 bp, Homo sapiens
gtctatgtgtctgtttttataccaataccatgctgtttggttactacagccttgtaatatattttgaagtcaggtagtgaaatgtctctcctggtttgttytctttgctcaggatcacttcggctatttggactcttgtttggtttcatgtgattttaggattgtcttttccatttctgtaaaaaatgacactgatatttt

SEQ ID NO: 483422 - DNA, 201 bp, Homo sapiens
cttgtgacacttacattgtagttggttgaaacagccaataatcataaacaagataatttcagataaatgctctaaaggaaataaagaagggtgatgtgccrgactttaattttgggtgtggtcacggaaagtcttgcagaagaggtaacatggctgagtcttgaatagtaagaagcagccagctctgcacagacattaggg

SEQ ID NO: 483423 - DNA, 201 bp, Homo sapiens
aatctataagcgttggatgtctttccatttgtttgtgtcctcttcaacttctttcatcagtgttttgtagttttccttgtagaggtttttcaccgccttgrttaaaatactcctaggtattttattttatttgtagctacggtaaacgggattgtcttcatgatttctttttaagctatttcattattggtgtatagaaat

SEQ ID NO: 483424 - DNA, 201 bp, Homo sapiens
atttttaaaatctaacgctaagaaagtcagccaatgaaatcagcaatctatgtaagacctcaaactataagaatcccagaagaaaagctagaaaacaccaygctggacattgaacttgggaaataatttatgagtaagtcctcaaaagcaactgcaataaaacccaaaaattgaccagtggcacctaattcagctaacgag

SEQ ID NO: 483425 - DNA, 201 bp, Homo sapiens
caacctcctgggcttaaacaaccctcctgcctcagcctcccgtgtagttgggaccaccatgcccagctaatttttaaatttttttgtagagatggtggagrtggggtctcactttgttgcccagactgatctcaagctcctgggctcaagcaatcctcctactttggcttcccaaagtgctgaattacaggtgagccacca

SEQ ID NO: 483426 - DNA, 201 bp, Homo sapiens
cacagtgcaaccccgtctctactaaaaatacaaaaaattagccgggtgtggtggtgggcgcctgtagtcccagctactcgggaggctgaggcaggaggatsctgtgaacccgggaggcgcagcttgcagtgagccgagatcaagtcactgcactccagcctgggcgacacagtgagaccccatctcataaaaaacaaaaac

SEQ ID NO: 483427 - DNA, 201 bp, Homo sapiens
ttgcagtgagccgagatcaagtcactgcactccagcctgggcgacacagtgagaccccatctcataaaaaacaaaaacaaaaacaaacaaacaaacaaacaaaaaaaaaaccgacatagatgaaaccagtcctgaagcccatgtaaacaatgcaagcaggtggctcatactccatggagcatgatcccactctttcactgc

SEQ ID NO: 483428 - DNA, 201 bp, Homo sapiens
cttgaggttgtctagtccaccacactgctgaaaatgtaaggagtcagtagtatagtttttaccctggcgacaatgaaatgccattaaaggctgtttgaagrggaagtgacatgatcagatagataggagtgaggctcagatgaggaggtcactaacaaaggtattctaacagcccgggcaggggatgataagggtccaaag

SEQ ID NO: 483429 - DNA, 201 bp, Homo sapiens
atctagtcatctgtgatggacaattaggttgattccaaagctttgctattgtgaataatgcttcagtaaacacgggggtgcaggtatcattttgatataaygattttcttgcttttggataaatacccagaagagggtttgctggatcatatagtaggcctatttttagttttctgagaaatctccctataattttccata

SEQ ID NO: 483430 - DNA, 201 bp, Homo sapiens
atggtagtgggcatgttaatgacgatagccatgagaagtaaaagttttgagaacctgcatgtctgaaaatgtctgtactctgcttttaggcttaatgatcrtttggttaaagaattctaggtcagaaatccttctttcagaattttgaaggccacatttcactgtcttcttgtttctagtattgctgtgcaggggttggag

SEQ ID NO: 483431 - DNA, 201 bp, Homo sapiens
ctcagcctcccgtgtagttgggaccaccatgcccagctaatttttaaatttttttgtagagatggtggaggtggggtctcactttgttgcccagactgatmtcaagctcctgggctcaagcaatcctcctactttggcttcccaaagtgctgaattacaggtgagccaccatgcctggctggtatattgtatttctatttt

SEQ ID NO: 483432 - DNA, 201 bp, Homo sapiens
aggcaaacctgcctttggattcatttacattcatagctccctgctccaatcaggtttcagctttgggtttatttggtttgtgcaatttttgttctgtttcrcccttagagatttcctttagctcccatggatgcagcaatgcattaaaagatatctttcatccagaatctaggtttgctttttaatggcatgagaaccttg

SEQ ID NO: 483433 - DNA, 201 bp, Homo sapiens
atcattgcttcatgaagctccttgtttatttccttcatagcacatgttacaatctataattgttttgtttattatctatcttcaccagaacagaagctccytgaaggcagagtctgccatgtttactgccataaatccatgctgattacagtgcctgagagaaactcattaagtatctactgaattaaaatctaatttctc

SEQ ID NO: 483434 - DNA, 201 bp, Homo sapiens
acttctcatcagtatcaaaattaacagaaggctttattaacaaattatatggctttattgaatggaagtgtttcaacaaagaatcaatgatctggtcaggkgcggtggctcatgcttgtaatcctagcactttgggaggctgaagcaggagggtcacttgagcccaagagtatgagaccagtgtaaacaacatagtgagac

SEQ ID NO: 483435 - DNA, 201 bp, Homo sapiens
cttgaccctaggagttactgcactcagcctgggtgacaaagactctgtctcaaaaaaaaaaaaaaaaaaaaaattgataatcctgagcacttctcaatatyccatttccctctttaacctcaggacatccccaaccttttgctcttttctcttcaatacattaccaatttctgattcatccaatattcagttcaacaaaaa

SEQ ID NO: 483436 - DNA, 201 bp, Homo sapiens
aggatggaagaaatagaacggaagtaggagttgggagggtgtgggaagggaatatctgcatcagtcactcaaagtcccttactatgtgagatgtgtgagakactagcagtttttgcgcattagagaattagctgagcgagggtggcagaagtgaaagggcctcaggttggggacatggaagatgcagagtgcatggcttaa

SEQ ID NO: 483437 - DNA, 201 bp, Homo sapiens
gggcagaaacacagctgcacaattaaaaacaatgggatcagtttccccttagcagaagtcagtgtgaagagatgcccaacaacccacggaccagatatttyccccatccccaaagttatgatgccaagcaggtccccagaactttgaggtcgttctcaagagcaagagggagaaaacaggaaatcctgaattgactgagtt

SEQ ID NO: 483438 - DNA, 201 bp, Homo sapiens
ccaactagcacttctttgagcatgatgtttgagcatcacgtagtgctaaacaatttttggattttggagcattttggattttcagattaggtgtgcttaasctgtactctttttttttgccctttcagtttttaatacttaatgtttttgtattaaattctctgtattgtatcatatttttgtgataatggcagagtagtt

SEQ ID NO: 483439 - DNA, 201 bp, Homo sapiens
atgtgctggctgtggtgatagtggcaggctgggtgggctcatcctcaggcccccagagggaatgcacagatgccagctatgatggacagggcaagataatmcccaggcccctaggtggtgtgtctgggccctggaggtcactggtgctaggccacgcaggcttgttctcaggccctctggttttatactcaggcactggct

SEQ ID NO: 483440 - DNA, 201 bp, Homo sapiens
aaaatgagacatataaaatcaataaaatataccataaaaagcactgctttgatattatgaataaagtactacagcaattaattctgcccattgagggaaasagtagttggggatagagggaaaaaggattctgagctaggatttggagactaagtaggagttcaaaacatggacagcgataaaaaaatattccaaggggaa

SEQ ID NO: 483441 - DNA, 201 bp, Homo sapiens
actcgacaactaggaatagaagagaacttccccaccctgataaaggacatctatgaaaaaacccatagctaacatcatacttgatgacgggaagctttccyccaaagagcaggaacaagacaggatgtctgctctcaacacttctttctagccaaggaatctagattggagaggaagaagtgaaactatttgtatatgaca

SEQ ID NO: 483442 - DNA, 201 bp, Homo sapiens
aaatagctagagaaaaaaatgggtgtaacagagtaaataaaggtgcttacacttcaatgggcatgaaagctacagtttgacactgaattgggcgaaggatstaaagcttgaaggcatctctcccccacaggaataggatacatacctcaactaggtagaatgagcaggacctcgtataagagactcaaaaacagaacagag

SEQ ID NO: 483443 - DNA, 201 bp, Homo sapiens
cttgagtccagtagttcaaggctgcagtgagtcattatcacaccactgcgctcctgccggggtgacagagcaagaccctgtctcaaaaaaaaaaaaaaaaraaagaaagaaaaggaaaagaaaaagcacacagtacatcacaagctatagcctccaatagagcagaaatacagtcaatttacttaacaggcttagaacaat

SEQ ID NO: 483444 - DNA, 201 bp, Homo sapiens
tcacacaggacatcctggaagacaagatacctaatgggtattggccggggacttagaaagagtaacaaggaggcatgtggatggacttttcaggatgtgcrcacaatgtgaagatatttatttcactataaatgcttgctaggggacgttcactgtggaagaggtctcaaaaatcaggtgggaaaaatgctcgacttagtg

SEQ ID NO: 483445 - DNA, 201 bp, Homo sapiens
gaggcaggagaatcgcctgaaccctggaggcagaggttgcagtgagccgagatggtgccattgctctccagcctggacagcaagagtgaaactccgtctcaaaaaaaaaaaaaaaaaaaaaaaaaaaagcaatctgtgactacaaaacaataaactagaatttcttgcatgaatcataaaatcagagttgggttacttctg

SEQ ID NO: 483446 - DNA, 201 bp, Homo sapiens
cctcaagtgagccgccaacctcagcctcccaaagtgctgggattataggtgtgagacactgtgcccggcccagtgctttgtcttcacagggagagacacaytgtgggtgcagcttcgccttcccttcctgcagccctctgccagcaccaccgtttgtacacttagagaacaccttatttattttcacagcaccttacaaac

SEQ ID NO: 483447 - DNA, 201 bp, Homo sapiens
atgtgaagcacctcattcctaaattaggtgactgaaaatgaaaatgaaaagctacaatggcaagaatatcaccaatgaatgctacttctagtaaaatcacttttttttttttttttagagacagggtagagtgcagtggcacaatcatagctcactgcaacctcaaactcttgggctcaagctatctttccacctcagccc

SEQ ID NO: 483448 - DNA, 201 bp, Homo sapiens
tgtgagcctgtagtcccagctacttgggaggctgaggtgggagaatcacctgagcccaggaagttgaggctgcagtgaaccgcaattgtgccactgcattscagcatgggcgacagagtgagaccttgtctcagggaaaaaaaaagaaagccaaaacattcctgatgaaagaaaagtcatcaagaattattacaaaggtgg

SEQ ID NO: 483449 - DNA, 201 bp, Homo sapiens
acagtactaaggaattctcccaaaatacagcacagagaggcaacaagattaaaaagattaattaaaagtcataaagaacagattataggccctaatattcstctagaggaagtttcaaaagaaaattaaggtaatagaaaaaaagcaatattcagagacaagagttgagaattttacagaaaagacataaattttcatgtc

SEQ ID NO: 483450 - DNA, 201 bp, Homo sapiens; identical to SEQ ID NO: 19718

SEQ ID NO: 483451 - DNA, 201 bp, Homo sapiens
gaggtgggtggatcacaaggtcaggagatcaagaccatcctggctaacacggtgaaaccccgactctactaaaaatacaaaaattagccaggcatggtggygggtgcctgtagtcccagctacttgggagactgaggcaggagaatcgcttgaacccgggaggtggaaggtgcggtgagccgagatcgcgccactgtactc

SEQ ID NO: 483452 - DNA, 201 bp, Homo sapiens
cccaaatatttgcttcctgctttgcgtcagggacgcagattctgcaaggtcattgttgggatgaagtaaaattaacgggtcatctaaaaaaaaaaaaaaaraaaagaaattcaaaaagtagttgcctctggagaggagggaaagcaagcagggatgaaggaactggatgaggtgattaaaatgttctttattgtgctatgg

SEQ ID NO: 483453 - DNA, 201 bp, Homo sapiens
gattttggctattacaaataaagctgctgtgaacatttgtgtacaggtttttgtatgatatacattttctttttctttttgagacagagtctcagtctgtygcccaggctggagtgcagtggcgccatcttggctcacagcagcctcaacttcccaggctcaagtgatcctcccacttcagcctcccaagtagctgggact

SEQ ID NO: 483454 - DNA, 201 bp, Homo sapiens
ccaccacgcctggctaatttttgtattttgcattttttatagacacatggtttcaccatgttggccaggctggtctcaaactcctggcctcaagtgatccrcctgcctcggcctcccaaagtgctgggattatgagcatgcctggcccgtaagtataaagttgttgatagtaatcccttactatccttttagagctgaagc

SEQ ID NO: 483455 - DNA, 201 bp, Homo sapiens
attaattctgcccattgagggaaagagtagttggggatagagggaaaaaggattctgagctaggatttggagactaagtaggagttcaaaacatggacagygataaaaaaatattccaaggggaaagacaaatcttaagcataagcacagaaatgtctaagcatacaatatattaggaatgattgttaatgcaatgtgcta

SEQ ID NO: 483456 - DNA, 201 bp, Homo sapiens
ttctctgttgttttcctgttttcaatttcattaatttgttctttatgatttcctttcttctattccttgtgcatttatttcacttttctgagtttcctgargaaagaacttagattattgatttcaaacctttcctcttttctactgtaagcgtttaaaaaaatgtttacattataaatgtaagtgctgaaaagttcccgc

SEQ ID NO: 483457 - DNA, 201 bp, Homo sapiens
gatgcataaagttgtctgtatggctgccattttaaggtttagtaaaaaagtttaaaatgaaacaaatgaacaaatccttaaaattcaatgaagcaaaccagacagaagtcattccatttctacccaccccctttcccaatagcccgggaagaataggctgcaatcttttggttgcttggacttttgctaaagttgctaact

SEQ ID NO: 483458 - DNA, 201 bp, Homo sapiens
aaacaacccaagagtccatcaacagatgagtaaattttttaaaatgtgtaatgtacatacaatagaatattattcagacataaaaggaataaagttctgayacatcctacaacatgacaacgctgaggacattatggtaagtgaaataagcgacacaaaataacaaatactgtatgattccacttataagagatacctaga

SEQ ID NO: 483459 - DNA, 201 bp, Homo sapiens
tcagaaatgcaagaacttctgaaattaattggaaaataatctttaaaatgaaaaaaacttaagacatgaaagacttgtaccctgaaaactacacagcactrttgaaagaaatggaaaaaagatctaaataaaaagaaagacatcctgtgtacaaagattggagaaattagtattgttaaaatgacaatataccccaaattg

SEQ ID NO: 483460 - DNA, 201 bp, Homo sapiens
ctgaggcaggagaatggcgtgaacctgggaggcggagcttgcagtggctgagatcatgccactgcactccagcctggatgacagagcaaggctctgtcccmcaaaaaaaaaaaaaaaaaaaagacaattccatttactagagcttcaaaaagaataaaatgcttagaaataactttcagaaatgcaagaacttctgaaatt

SEQ ID NO: 483461 - DNA, 201 bp, Homo sapiens
agtgatctgcctgcctccacctcccaaagggctgggattataggcgtgagtcaccgcgcctggccctagccatctttttaacaaaattcgtaagctggtaytaaacttcaaatgaaaatgcaagagactcagaatagaaaaaaaaaaaagcttatgaaagaacaatgttggagactcacactccttaattttaaaacttac

SEQ ID NO: 483462 - DNA, 201 bp, Homo sapiens
gtgaaaccctatctctactaaaaacacaaaaaattagccaggcttggtggcacacacctgtaatcccagctacttgggagactgaggcataagaatcactrgaacctgggaggcagaggttgcactgagccgagattaggccactgcgctatagcctgggagatagagtgagactctgtctcaaaaataaataaataaata

SEQ ID NO: 483463 - DNA, 201 bp, Homo sapiens
aaatgcagaagaaaatgtagctcaagaaacagaaggaaaattcctcacaatatggcattcatttttgaagttattgtaaattatatctttcataaaattcrtaattgtttcttgtcactacataatacaaagctaagcatttaaaaaatgtttcttggccttacatgtttcctgtttttctagaaatgattttcatatttg

SEQ ID NO: 483464 - DNA, 201 bp, Homo sapiens
taaaacaacaaccatttattatctcgcagttctgtagtcagaagtgcaggcaggttaaatgggttctctgtttctggtttcacaaagccaaagtcaaggcrttggccaagctgaactgtcatctggaaaccctagggaagaatccacttccaagttcaatccagctgttggcagaattctgctccttgcaactgtgggact

SEQ ID NO: 483465 - DNA, 201 bp, Homo sapiens
ttcatctgaattctaacaggaaatgatttatcagctggcattaaactattggtccacgatcttttatcccaatcctttgaggccagatgatttgtggaaaytctcttttgggtgcggtggtaggggtggaattttcaagagtagtgccatgtctataccatatattacatgatacccacagtaaggtgtggagctgctctg

SEQ ID NO: 483466 - DNA, 201 bp, Homo sapiens
tgtctgcagacttttttgattcaatacaacagaaagggatgtttgctaatagcatccagtgggtacaggccaggtatgatgctaactaccctacaatgcayagctcccacaacaaagaatgatctgtttcaaaatatcaatagtaccaaggctgagaaaccctccactaaatctagacaatttggagagaactgacatgtt

SEQ ID NO: 483467 - DNA, 201 bp, Homo sapiens
acaccaaagaagacatacaaattgccaacaacgacatgaaaagatgttcagcatcattagtctttagggaaatgtaaatcaaaaccacaatgagataccarttcacaaccagtaggatagctataatcaacaacaacaaaaaaggataataacaagtgttggcaggaatacagaaaaactgggacatttttaaactgccag

SEQ ID NO: 483468 - DNA, 201 bp, Homo sapiens
tgcaggtctcatggttgtaaactctcttcgtttttttattcatctataaataactatttcaccctcacccttaaatcatagtcttgctggtacacaattayaggctgttattttccttcagcatttctaagatactatgtcactgtcgtcaggcttctactgtagaagatgagaagctttctggtacagtaattaattgtc

SEQ ID NO: 483469 - DNA, 201 bp, Homo sapiens
aattttctaacccagaaaaatatcaaaataatagccttctaatccaatagagtagtttaaaatgaatttacatgacaccatatcagaattaaatacaaccycaaccattagaaaaatcgcaaggaaaaaggtctagagaagtgaattcttatcacttactaatgtacaatgacttgaactttaccttgtgatatgaacgta

SEQ ID NO: 483470 - DNA, 201 bp, Homo sapiens; identical to SEQ ID NO: 19717

SEQ ID NO: 483471 - DNA, 201 bp, Homo sapiens
aacagatgagtaaattttttaaaatgtgtaatgtacatacaatagaatattattcagacataaaaggaataaagttctgatacatcctacaacatgacaaygctgaggacattatggtaagtgaaataagcgacacaaaataacaaatactgtatgattccacttataagagatacctagaacaggaaaatttagagacag

SEQ ID NO: 483472 - DNA, 201 bp, Homo sapiens
ctccccctaaggctacttcttcttggggtattaagaattaattcataacttgaggcattgatccttagggtgagaaatgatcagcttaggtcttatggggrtgaaggggaagaaatactcttcactctagagtccatttccttcacctcccacttaagctgatagggagcagacagattaagctctagcctttagcaatac

SEQ ID NO: 483473 - DNA, 201 bp, Homo sapiens
taaaaactatggccagggcaggcagcttctattttttgcttcaaagctttccatggcctatctccacttctcaggaaaaattccaatcacaaaactttttkggggatgaaatatattctcagccgatgcagcagcagggacatgaaaaggaaagcaggaacttcatcagcacatggtcaagaaaagccaagaacagttagg

SEQ ID NO: 483474 - DNA, 201 bp, Homo sapiens
atgcatttaaggtggaactatgagaaaagaacagctcttgtgtttgtacaggttctgcctatagacatgagtttgactcgtaaggaaatgagctctggccragaatgctacgggaaaatggttatagagactaccatgccattaggaggtgttactgttttgatgaaaagaatactgtcagaggcagagaatctaatcttt

SEQ ID NO: 483475 - DNA, 201 bp, Homo sapiens
tattaagaattaattcataacttgaggcattgatccttagggtgagaaatgatcagcttaggtcttatgggggtgaaggggaagaaatactcttcactctmgagtccatttccttcacctcccacttaagctgatagggagcagacagattaagctctagcctttagcaatacttaaaaaaagcagccattacctctaaag

SEQ ID NO: 483476 - DNA, 201 bp, Homo sapiens
gtttggttaaagaattctaggtcagaaatccttctttcagaattttgaaggccacatttcactgtcttcttgtttctagtattgctgtgcaggggttggarccattcgaattcttattcattgcatgtaacctgttttatctctgaagcattacagaatttcctctttgtttcagagggtttggaaacttctcagtgatgt

SEQ ID NO: 483477 - DNA, 201 bp, Homo sapiens
aatgtaacactgaggggtcctgtcctcgggaccggtgataggttagctgggaacaggaggaggcaaccatgccgcctagggagttaccctggctgagcgargggttccagggctgggcactgggttgatctcacacccctcagtgaggtcatcgttactgcctgtggcctgcaagctaaggtgtgcgagcagacaccaggt

SEQ ID NO: 483478 - DNA, 201 bp, Homo sapiens
acaagagtatgtggccatcaggcaatgacaataaaaccctacaggtgattatagaagactgaaaatgtaagctaaattgggtcagaggtttaattctgacrtgaattaaatatatggaatgcttgaaaaggtgcctggcacacagcaaactctatttagtcatggttattggtatcatgaaacagtctgaagaagtgggat

SEQ ID NO: 483479 - DNA, 201 bp, Homo sapiens; identical to SEQ ID NO: 186563

SEQ ID NO: 483480 - DNA, 201 bp, Homo sapiens; identical to SEQ ID NO: 186564

SEQ ID NO: 483481 - DNA, 201 bp, Homo sapiens; identical to SEQ ID NO: 186528

SEQ ID NO: 483482 - DNA, 201 bp, Homo sapiens; identical to SEQ ID NO: 186604

SEQ ID NO: 483483 - DNA, 201 bp, Homo sapiens; identical to SEQ ID NO: 186559

SEQ ID NO: 483484 - DNA, 201 bp, Homo sapiens; identical to SEQ ID NO: 186560

SEQ ID NO: 483485 - DNA, 201 bp, Homo sapiens; identical to SEQ ID NO: 186561

SEQ ID NO: 483486 - DNA, 201 bp, Homo sapiens; identical to SEQ ID NO: 186562

SEQ ID NO: 483487 - DNA, 201 bp, Homo sapiens; identical to SEQ ID NO: 251329

SEQ ID NO: 483488 - DNA, 201 bp, Homo sapiens; identical to SEQ ID NO: 251439

SEQ ID NO: 483489 - DNA, 201 bp, Homo sapiens
caaaatagcaccacagtctccatctggtttatagcaacagaggtactttatttaatgaagcaatggttctaatcctggatactgccacggactacaattcyatccctcccagagggagtggaggaagtcttgggtggtgtggacagaaggaagagaggagagggtgagtggggtatagggcccagggtggctccctactcc

SEQ ID NO: 483490 - DNA, 201 bp, Homo sapiens
taaaaaaaaaatacaaaatagcaccacagtctccatctggtttatagcaacagaggtactttatttaatgaagcaatggttctaatcctggatactgccayggactacaattctatccctcccagagggagtggaggaagtcttgggtggtgtggacagaaggaagagaggagagggtgagtggggtatagggcccagggt

SEQ ID NO: 483491 - DNA, 201 bp, Homo sapiens
cccacagagctagggttccaccgagtatactttgcttaggttgacttagcatatctgaggtcttcaaggataaaaactgccaccccaacacccttccattaaaaaaaaaatacaaaatagcaccacagtctccatctggtttatagcaacagaggtactttatttaatgaagcaatggttctaatcctggatactgccacg

SEQ ID NO: 483492 - DNA, 201 bp, Homo sapiens; identical to SEQ ID NO: 251547

SEQ ID NO: 483493 - DNA, 201 bp, Homo sapiens
tatctgaggtcttcaaggataaaaactgccaccccaacacccttccattaaaaaaaaaatacaaaatagcaccacagtctccatctggtttatagcaacaraggtactttatttaatgaagcaatggttctaatcctggatactgccacggactacaattctatccctcccagagggagtggaggaagtcttgggtggtgt

SEQ ID NO: 483494 - DNA, 201 bp, Homo sapiens; identical to SEQ ID NO: 251548

SEQ ID NO: 483495 - DNA, 201 bp, Homo sapiens
gaccctgaagtccaagagaggggtgttgccccctggggacattgggcaatgtctgatgacatacttgattgttaccgttggcaggacactgctacaggtaycttgtggatggaggccaggaatgctgctcagcttcctacagtacccaagacggcccccacaagaaagaattacccagccccaaatgccaatagtgctaag

SEQ ID NO: 483496 - DNA, 201 bp, Homo sapiens
cctgaagtccaagagaggggtgttgccccctggggacattgggcaatgtctgatgacatacttgattgttaccgttggcaggacactgctacaggtatctygtggatggaggccaggaatgctgctcagcttcctacagtacccaagacggcccccacaagaaagaattacccagccccaaatgccaatagtgctaaggtt

SEQ ID NO: 483497 - DNA, 201 bp, Homo sapiens
atggaggcagatttgttcccgcctgccagggccatctcgttaataacggactgtgttttgggccagacgggcatagccccgcttgaccagaactgtttggrtattttagaacaaaacaaactcatataaacatactaaggcatattgacagctgaccacctccctcgcacatggctttgataagtattaataggaaacaga

SEQ ID NO: 483498 - DNA, 201 bp, Homo sapiens
agggactggcagtgggccaaggatagggagtgtgagataaagggcagaggccaggccaggttggcctccaaagtcaaatccctgttcatggggaacatctrtgttgactccctgggaggcaggccccttccctcagaccctcagacctgtgtttccttaatcccagcacctggtctttcattttaattttttttagagaca

SEQ ID NO: 483499 - DNA, 201 bp, Homo sapiens
gggcagcgggtagggaaatatacaaggaaacatggctggtttaaaacacaggctagaagtccacagatttcctaatggcaagaatgaaaaggctgcattakgcgctggtgctgtcggagtgaaggggctcaggcatctggattgcccatcctattaggaccatttgccctatgagctaggtcaggacacctctcacttgtt

SEQ ID NO: 483500 - DNA, 201 bp, Homo sapiens
aagtgctgggattacagacatgagctaccgcgcccagcctgcaagatgctttaatttctcctttattctcaccctctacaatggatggggtgccaggtacrctgattcagttcctggagtctctttatcactacatccgcctcttccctcactcaagccttggttgcagcaataacccccccaacagctcaacgggccatg

SEQ ID NO: 483501 - DNA, 201 bp, Homo sapiens
aagagtgtgtggctcagttctgggggttcctgccatcacctcccttttgccttcctcacttacttcacagaacagcagctgaggctcagagaggtgaggcrgccagtgcaaagtcacagagctatgttgtgggcagcaggagaagccctgaagtccccaacctgccattctcaaaccttcgagctccaagaaatttgcatt

SEQ ID NO: 483502 - DNA, 201 bp, Homo sapiens
gacactaatatttctgtgagtatcctgagtattactggggcatctgggggtgtctaggaccatttggaccaaagttcagtaatcctagaggttaggattaytacagaggtgtgttgagattataagtcatacacataccaataacattacagatttcctttttccagtggtgagtcacagctttttcaggtactgatataa

SEQ ID NO: 483503 - DNA, 201 bp, Homo sapiens
ttgttgtttggctggaaaaaagaaaaaatctaatcttttcccattgtttgaaagttacaaggcatctttacatccattatctaatttgatttccttaaaamcatcatgaaatagggcaaagattatttttattttataaagaaactgaccattgtggagggattcttccaaggtcctacagctgatacatgtagtagctct

SEQ ID NO: 483504 - DNA, 201 bp, Homo sapiens
ttattcttttccagatattggttaagaactaacgttgttgggaggagctggtaaatacatgtccaagatgatacagaaaaggagaatgggtttatacgttkttttttacaccaggggatacaatggcttaggaatctgggaaattattcatatgatactatgattgccacttgttttttagattcagtcttctaaaaggaa

SEQ ID NO: 483505 - DNA, 201 bp, Homo sapiens
cgcaggcggccatgccccggggaaggagcacaagatcatggtggggagtacggacgaccccagcgtgttcagcctccctgactccaaggtaagcgtcccaygcccgcagttggtgtcagtactgcagcgggttgatttctgggctcctcttccctttcttggttcttttctaccgcgccgaaccgggctatggttttttga

SEQ ID NO: 483506 - DNA, 201 bp, Homo sapiens
tttcatttttttttcctctgaagaaagactcagaagcatatcataattgcctgcctatgagttaaactagtggtagggagttatttttttctttttttttkaagggagagtctaaggctctggaagggtaagtgacacaggtagactcaaaagttaggctatgatttaggcagtgcttgagcataggccatttgaccattt

SEQ ID NO: 483507 - DNA, 201 bp, Homo sapiens
tggtaaatacatgtccaagatgatacagaaaaggagaatgggtttatacgttgttttttacaccaggggatacaatggcttaggaatctgggaaattattyatatgatactatgattgccacttgttttttagattcagtcttctaaaaggaacttggcctgtttgcctttcttttttcttctgtagccataatgactttg

SEQ ID NO: 483508 - DNA, 201 bp, Homo sapiens
ggaagagatggatttgaaagagagattcaataattttttctattcactgtttcagcctgtggttaccagtcagcttggcacaattaacaatttgatccatrtcaagaaatctgattttgaggtgttcgatgctttaaagttagattctatggaaagttctgagacatcttgtagaggtaattttgtattatttactctctc

SEQ ID NO: 483509 - DNA, 201 bp, Homo sapiens
tacacatcactacactaaacactgctctagataaactgctcaagttcatttaactcatttgatgcacctaaaggggttcctcattttaaagatttgttagrccaagaagcaagagagtattcctagtattcccaaccatgaaaagtatcattctttgcaccaaatgttaacaaaatcattttgttctcctgcctcttcttt

SEQ ID NO: 483510 - DNA, 201 bp, Homo sapiens
gtttgtttggtttgccccatcttaatcctgccagtttgagacctcagttagcagtttcatgattttatgaggtccaaaaaatgtggggaaaaaaatggttwaaaaaaccaacagcctgggcaatatggcaagacccatctctacaaaaaatttttaaaaattagccgagcgtaatggcacatgcctgtggtcccaacaatt

SEQ ID NO: 483511 - DNA, 201 bp, Homo sapiens
aaatctgattttgaggtgttcgatgctttaaagttagattctatggaaagttctgagacatcttgtagaggtaattttgtattatttactctctcttgctktgtctttcttgtagttccttcctaaaagttgtttatgtgtgtatatacatatagagggagagagagagcagggggttggggggaggagagagagagacag

SEQ ID NO: 483512 - DNA, 201 bp, Homo sapiens
tctttcagacctttccagctcacccccagggccttatggtcaagaaatgtatgcgtttcgatctgaggaaagattcaaatccccacccatccttcctcctyatctacttcaagttattcttaacaaagacactaatatttctgtgagtatcctgagtattactggggcatctgggggtgtctaggaccatttggaccaaag

SEQ ID NO: 483513 - DNA, 201 bp, Homo sapiens
tatttttttctggtgaaaaggcaataaaaactattctgtgcacttcccaagggtattttgtggatcatgtgacgaaataacaaagcataatactttgtaargtttcaagttccatatgttttaaagatattatttaatatcagagtattacttctgcttttttcttttgccttatatgtattttttatttttaattgacac

SEQ ID NO: 483514 - DNA, 201 bp, Homo sapiens
atttaagtctaaaattttatagttctcaatgtagcctctttacttctaaactcaacattttacttaaacatcaaactgtagttctgattgtcgttttgccwcttttcctggtagttttgctgagtaacttggagtaaacaatctttctgctagtcagttgcattcattcctactacagaaatgtcatgtcataagtggaag

SEQ ID NO: 483515 - DNA, 201 bp, Homo sapiens
aactttaggcaaataaccaatttgtatttatttttttctggtgaaaaggcaataaaaactattctgtgcacttcccaagggtattttgtggatcatgtgaygaaataacaaagcataatactttgtaaggtttcaagttccatatgttttaaagatattatttaatatcagagtattacttctgcttttttcttttgcctt

SEQ ID NO: 483516 - DNA, 201 bp, Homo sapiens
tgaattgtttacctgccttgcttctgtcgtatttaggctttgtgtcagcatgactctggagtgttaacccgagaagcattcatggtggataatacagtacrggggaaggtagaaggatacacttgttcttaatcggatttgcttgggttctttgggatctgatggattttgcctcctgtaactgctccttggatgtcattt

SEQ ID NO: 483517 - DNA, 201 bp, Homo sapiens
ggcagcaggatttggaggactccgtaaagcccacacagcaggcccggcccactgttatccgctggtctgaaggaggcaaggaggtcttcatctctgggtcyttcaacaattggagcaccaagattccactgattaagaggtgacaagtgtcttggttgaatctaagggtccaggaatagagacctgatttcttttctcaga

SEQ ID NO: 483518 - DNA, 201 bp, Homo sapiens
gagtaggatgctctgcttttgcatttgattgcagatgagagctttatgagttcacggaatttattttaagaaaaaaaaatatacatatgagaagaaggtaratggaagcctcctagccccagctagaagtattgtttctgcctgtgggttttcaccaagacctgtttgggggcgctgcaggaataactatataggaagatt

SEQ ID NO: 483519 - DNA, 201 bp, Homo sapiens
aagaggattttgacatctactttgttcaaggatagagagggattcctaggttccctctaaatcagagagatcttttggaagtcatccctggttttaaatgraaattagacctgctttgggacttggaaatagtttttcagaaggattgtttctttttttcctcattgtctttaagactttcttctagaaatggatgccaga

SEQ ID NO: 483520 - DNA, 201 bp, Homo sapiens
aaattaactcttaaattgtacaactcagtaatttttagtatattcagagttatgtgattatcacaactatctaattccagagcatttttatcacccgcagwataaaccctgtacccattagcagtcacatcccattccctcctcccctccgtccctggcaaccacaagtcttgctgtcttaaggatttgcctgttctggac

SEQ ID NO: 483521 - DNA, 201 bp, Homo sapiens
gcgccaaggctgcacgctccgagggcgcaggcggccatgccccggggaaggagcacaagatcatggtggggagtacggacgaccccagcgtgttcagcctycctgactccaaggtaagcgtcccatgcccgcagttggtgtcagtactgcagcgggttgatttctgggctcctcttccctttcttggttcttttctaccgc

SEQ ID NO: 483522 - DNA, 201 bp, Homo sapiens
tactactctgctatacaagcccatttgaagggatcccttcttgcctctaaggattcaggagaagcatctcccttgcatttctggactgaaccagtcttacmtgagactggaaggctgatttgctttgaggctgatatgtgtgtttcagagcctctgagtaggatgctctgcttttgcatttgattgcagatgagagcttta

SEQ ID NO: 483523 - DNA, 201 bp, Homo sapiens
ccagactcggtgacacagagcaagaccctctctcaaaaaagaaacaataacatttaaataaaatatattataatatatttctcttcatttttgtatattgkattcttgtctgcatactttttttcatttttttgagatgtaatttatacatcataaaattaactcttaaattgtacaactcagtaatttttagtatattca

SEQ ID NO: 483524 - DNA, 201 bp, Homo sapiens
gatataaaaattcatagttgtctcctcatcctaataaaatcaggatcagagctatggacttcttttgagcacaacataaaggagtagttatcatttggggktgtacaaaagaactatgaaagcttttttgtatataattcatgtctctattcaatctacttgattcctactatgattgtttttgccttgtaacacaactct

SEQ ID NO: 483525 - DNA, 201 bp, Homo sapiens
tttcaggtactgatataaaaattcatagttgtctcctcatcctaataaaatcaggatcagagctatggacttcttttgagcacaacataaaggagtagttrtcatttgggggtgtacaaaagaactatgaaagcttttttgtatataattcatgtctctattcaatctacttgattcctactatgattgtttttgccttgt

SEQ ID NO: 483526 - DNA, 201 bp, Homo sapiens
tgagtagctgggactacaggaacccaccaccacacctggctattttttttttttttttttttttgtattttttggtagagacgggatttcactatgttggycaggctggtctcgaactcccgaccgcaagtgatccacccgccttggcctcccaaagtgctgggattacaagcttgagccactgcacccagcctggaaagt

SEQ ID NO: 483527 - DNA, 201 bp, Homo sapiens
tttttggatgtcctgtttaactcagtatccattactttataagtgtattgcttatttttttgtagctgtaaaagagactatgctgagctcagattaaaaawttttttttttttcagaactcaactgcttctattaagatatgaagctcagctagtaaactcattaagtaaagaccctaggcagttctccagtgctgagcct

SEQ ID NO: 483528 - DNA, 201 bp, Homo sapiens
tccaacttcaactctttttcttttggcttctaccaaaatcaagctatggaaattgcttccttctaagttactagttaccttacaatcaccacatctaatgscttcatctttcttgaccacgttgtaacatttgacactactgactaagccccttcctcttgaaattatctcatttttgtctctgtgacactggtgacaagg

SEQ ID NO: 483529 - DNA, 201 bp, Homo sapiens
cacgcgcgggtaggcgggaaacagcccagtcctgaacaaaaggccggggaagcgggtccccgccggtaactgcaggcctgtgctggccgccgcgagcgggkaagggcgaggacactccctcctcggggacccggtccccgtcgcgcacacggtgtcaccagcacacctggcccagtacccaaagcaccctcgaagtgggta

SEQ ID NO: 483530 - DNA, 201 bp, Homo sapiens
ggaaggttccaacatggccgaataggagcagctccagtctgcagctcccagcgtgagcgacacagaagatgggtgatttctgcatttccaactgaggtacygggttcatctcactggggcttgtcagacagtgggtgcagcccatggagcagggcgaggcatcgcctcacccgggaagcacaaggggttggggaattccct

SEQ ID NO: 483531 - DNA, 201 bp, Homo sapiens
ttaccctcttacagcatcttaatcatcactgctttaaacgaaagagtgagagtttgaacccataatcacatgatggcattgccagcccatgggactatccytcatggaccttctaagttaaatgaaccagtgccatgtttgaattccaggtacagatgctccatcattttgcagttaacatagagcagttccagagaaggc

SEQ ID NO: 483532 - DNA, 201 bp, Homo sapiens
ggctttttcaggatagttggacttcttagctgtggtcttcattctctagagcacatagttcaagagaccaacatggcagctgaagggcttcttataacctstccttggaaatcatgcattctcttggtcaaagtgagtctcaggaccagccaagattcaaaggcaggaaaccacacaagtgcatgtgtatctggtttgttg

SEQ ID NO: 483533 - DNA, 201 bp, Homo sapiens
tttatttgattttttatgagagaaaaaaatcactattttttataatgatatatgttcactataaaaaattcaaatgcaaaagagggattaaaaagttaccyctcaaataaccacaatacattagataaccagaaatagaattttcttccctttctaattcttcgctccttcccttccttctttccccccattgatctgctg

SEQ ID NO: 483534 - DNA, 201 bp, Homo sapiens
ggtgtggtggtgtgcaccagtaatttcagctactcgggaggctgaggcaggagaatcacttgaacctgggaagcagacattgcagtgagctgagatcacaycactggactccagcctggacgacagagcaagactccatgtccaacaataacaacaacaacaacaacaaaacaacagcaacaacaaaaagtctttatagat

SEQ ID NO: 483535 - DNA, 201 bp, Homo sapiens
acattttattgttaatattgttgttgggtttttttttttttttttttttgagactgagtctcgctctgtcactcaggctggggtacagtggtgctatctcrgctcactgcaacctccgcctcctgggttcaagcagttctctgcctcagcctcccgagtagctgggattgcaggcgcccaccaccacgccctgctaatttt

SEQ ID NO: 483536 - DNA, 201 bp, Homo sapiens
ctgtcttctccactatacagatactccttgacttacaatgggaatacatcctgataaacccatcgtaagttgaaaatatctgaagtagaaaatgcatttcrtacacctaatctactaaacatgaaagcttagcctaacctaccttaaatgtgctcgggacacttacattagcctacagttggacaaaatcatctaacacaa

SEQ ID NO: 483537 - DNA, 201 bp, Homo sapiens
tttttccttactgattccttcaacaaacatgtttttggctatcttttgagcatcgggtaccgtgctgaaggatacaggcataaaacactaggaaatagtgrcacacttctcaggagagtttggaaaatacaagtatttttactggtattttctgatttgtaataagtttcttaggtcttcttcattatgggtattgaatgt

SEQ ID NO: 483538 - DNA, 201 bp, Homo sapiens
agaaaactcctactcatttaatatacttttgataaatcagaaagaaattttttttctgttttgaacacaggttttataataagtagttacatatgttgggktaaataaacatgagcatctcttcaagctttgaaattctgtggtttggggatgtgtatgtattatccttgctgttagatcatttcttcctttataagtctc

SEQ ID NO: 483539 - DNA, 201 bp, Homo sapiens
agattctcattcctccatctctttttttttcctggtaattttttgttgaagaaacaggttgtttgttctgtagtgttttgcagtcttgattttttttttcyaattgtatttctgtggtgtttactatgttcctccctgtgtttttttataaactggtagttagatcttgaggcttgatcaaattcaggctcgattttttgg

SEQ ID NO: 483540 - DNA, 201 bp, Homo sapiens
ggacagactcatatataaataatgaaaatacaataaaataattcctctcagtaagatatgtactagtacgatgtttgtgtgggagaagcagtgtccaagtwtcctaaaaagtatttgaaaggttttctagtggaggcagggtttgagttgaacaagaaggatgagtaggcattttctaggtgggaatttgatgggagctct

SEQ ID NO: 483541 - DNA, 201 bp, Homo sapiens
tttattttattgcatttttattataaaatttttaatattttataattcactttatgatttttaaatttgacccatgggttatttagaagtatattgttttrttttaaaatatttagggtttttctaaatatcttatggtcacttatttctaatttaatttattttggtcagagatagtttgtgtgatttcagttcttttaa

SEQ ID NO: 483542 - DNA, 201 bp, Homo sapiens
tggcctttcctcagtacagtaggcaattacccacaggctgtgttccaaagggtgccagagaagccattgtcactgccccacagactgcaggctctgtaacrgaaactgcatgatcagtgactcattaagatttccatgttcagagaacctcttcctaaaagccaaagaatcttagtaggattaatatatccagattgtaac

SEQ ID NO: 483543 - DNA, 201 bp, Homo sapiens
tagacggatttaatgtaattcctatcaaagtctaataaaattcattgtagatgtaaacaatattgtcctaaaatttatatgaaaaggcaaaggaaccagawtatttagaaccttttttaaagaaagaataaaatgggaggaattagtttacctgattccaagacttactatatagctacagtaataaagattgtgtggtat

SEQ ID NO: 483544 - DNA, 201 bp, Homo sapiens
gtttgggtaaaataataatgccttatctcataagcttgcttatcatattggcaaccagggcagccctggttgcccccagtggtaagctgtttactaatatrccccgtatttacttttatctagttctaccccagtggtaagctgtttactaatataccagtattttctttctgtctcacttccctattcccttacttgtgc

SEQ ID NO: 483545 - DNA, 201 bp, Homo sapiens
tgctaggctaaaaaagaaatattaataataataatggctaacacaatgatttttaggatatgctagatgctgttctaagagttttagatacagtaagacaytggatttttgcagcattcctatgtgctaagtactattattttgcccaatttacagaggaggaagttacagaacagaggagttaagccactcaaacaaggt

SEQ ID NO: 483546 - DNA, 201 bp, Homo sapiens
gcagagtgtctttcttgtgtgtgtgtgtgtgtgtatatatatatacacacaaatatacatataatatatacatatatatacaaatatacatataatatatrtacatatatatatatatatatgtatgtatatattccctagcacctgacccagtgtctggctatattaatgttctcaactaatagttgttgatcaaccaac

SEQ ID NO: 483547 - DNA, 201 bp, Homo sapiens
tttcacccaattttaatgcttgtagtttgaggaatcctaacttgatcctcagatgaaatggttaactaatataatatgcactgtgttgaactgaattgagytatgttttctaaagatgacaatttattttttttagggtggagattagtttaaaaaaaggggacttgattatttgtctttttccttccatcttcccaactc

SEQ ID NO: 483548 - DNA, 201 bp, Homo sapiens
aactggtcagattacatctggtggattgcattgagctgtattctgaaacatttaagaaggattctgagtagcttcaacctgtatagaagaggatgactcaratggtgaggaagctgaaaatgttatttttaaagtagagaggttataggtaaaatgtgttgttgcttttcaaatattaaaaacttatccatagtctcagta

SEQ ID NO: 483549 - DNA, 201 bp, Homo sapiens
tagcacagtgcctggcacataaatgccagaaactgatatcgcttgtctcttgatttttctgggttagaactatctagaatttcttctctcctcaatatacygcgaacttaactaaaagtcagcaatattagtataaatattttgtcattatcagtttattatctattttattaaaggatacttattaaataaagtggccag

SEQ ID NO: 483550 - DNA, 201 bp, Homo sapiens
agaaattaatgacccaaatccttcgattaagtatgcacttaagaattgcacagtgatggcctaagaagagaaatagctcaatagagaagattagagaatamacacacacacacacacacacacacacacacacacacacagaggtatggtgacatttaaagtcaatggaagaaagatgaactattgaaatcatctaggaaa

SEQ ID NO: 483551 - DNA, 201 bp, Homo sapiens
ccctggaatttatactaaacttctggaccctaaccgataatatctaccccaggggctctgtttcaggtctgtgctgcctctttctcctcatctctgtcacyctcgctgtctctctcatcaaacctttgctttctaggaccacatcctgacttttgtgggccttagatacatttaccttaacggactcctttctccataaaa

SEQ ID NO: 483552 - DNA, 201 bp, Homo sapiens
atgagaggcttgaattggataaacttgaaggttccctttgtttttaaatcctctcatgcttgtccaggatgttttcagactctttctggatcaggttgttrtgtgggatggaatctggatcctgtaaagaccttgtcatcccttagaggatggaggcctaggccctgagcttatgatctagtgggagaaataaaactaaca

SEQ ID NO: 483553 - DNA, 201 bp, Homo sapiens
tttttccttcctcatctcttgcttttagaggtctttccctttctctttttctttttaaaattgggaacatagagtagataattcctcggtttgatttccayattcctagtgtaagtccattacaggagcaagctttccctcttcctgtttatggtagttcccctcttttcttatgcaagagcttcttaaaggtcttgtgtt

SEQ ID NO: 483554 - DNA, 201 bp, Homo sapiens
ggcaacagatccagaccttgtctctaaattaaaacaaaacaaaaccaaacaaaaaaacagctgcataaggaaggttataacagaacactgttctctctttacacacacacacacacacacacacacacacacacacacacacacatcacacgtacaggaattattttaacctatcagttacatggtggtttcacaggtttc

SEQ ID NO: 483555 - DNA, 201 bp, Homo sapiens
attttctctaatagtatttgttgtaattataattttatagctctttgtgtgattattttttaatgtatttccttatattaggacataatatctattattgktatctcttctattcccaggccccaggacagtgtctagagcagacgatggcaactgtggcctgctgcctatttttttttttttttctctttagagacaggg

SEQ ID NO: 483556 - DNA, 201 bp, Homo sapiens
aattttgaaagaggattggtgaggacctaattatttcagcacaaaagaagaaatcactagtgtttgaattctgagcatcctggggaaatgaaagaggtgamtttttttgtgtgtgtgcaggaagaactgtttctcagaacatgttaaatcaggcccatttgccaatcagacatcagcccccttgcctgtatatgatgctgg

SEQ ID NO: 483557 - DNA, 201 bp, Homo sapiens
gcaacagatccagaccttgtctctaaattaaaacaaaacaaaaccaaacaaaaaaacagctgcataaggaaggttataacagaacactgttctctctttacacacacacacacacacacacacacacacacacacacacacacatcacacgtacaggaattattttaacctatcagttacatggtggtttcacaggtttca

SEQ ID NO: 483558 - DNA, 201 bp, Homo sapiens
gtaatagtaatacagattattagtgatagaagaaaagtttttcttccttctctgtaggctaaatagagatatggatctcatttccaaggcccaatacactrtttgggtttgctttcaataaaatagctgtgaagtgtcttcagcatgatccctatttaatgggatttagttgtaaagcttaattcgtatcagattttttaa

SEQ ID NO: 483559 - DNA, 201 bp, Homo sapiens
caacagatccagaccttgtctctaaattaaaacaaaacaaaaccaaacaaaaaaacagctgcataaggaaggttataacagaacactgttctctctttacacacacacacacacacacacacacacacacacacacacacacatcacacgtacaggaattattttaacctatcagttacatggtggtttcacaggtttcaa

SEQ ID NO: 483560 - DNA, 201 bp, Homo sapiens
aacagatccagaccttgtctctaaattaaaacaaaacaaaaccaaacaaaaaaacagctgcataaggaaggttataacagaacactgttctctctttacacacacacacacacacacacacacacacacacacacacacacatcacacgtacaggaattattttaacctatcagttacatggtggtttcacaggtttcaac

SEQ ID NO: 483561 - DNA, 201 bp, Homo sapiens
attgccctttcaacacatttcttcctttaataacccagaagcagtctattatctgttaatttaaactgaaaaataaaaatttctgacttctgattatcccwggaatatattgttccttcgtttatattatatttgtgtggctccaattttaaaatgtgcctctgaggtcttgtttaccctcttacagcatcttaatcatca

SEQ ID NO: 483562 - DNA, 201 bp, Homo sapiens
tttcattcatattcataagagaaattagcctgcaattttttttcttataatgtccttgtcaattttagagatcaagcatatgttaccttcataaaatgagytgggaagggatcttttttttttcctttcctctgcaggagtttatgttttgctgatgttatttcttctttaaatgtttgggaaaattaatcagtgaagcca

SEQ ID NO: 483563 - DNA, 201 bp, Homo sapiens
ggtcagcccagaggagatcttggaggggtttgtatgggaaggcaaagactatgtttatcacgagtttacgtgtgctcccattccttcctcctctcagttgytggcaaccactaatttaacttttttctctgtagagttgcttattctggagattttatatcaatgaaatcaaacaatatgtggccttttgcttatagcttc

SEQ ID NO: 483564 - DNA, 201 bp, Homo sapiens
gctctctcttgccaacatttgctttgatattggttccctatgttacttgaaaaaaattcctcctgtctttttctggcttgcaaacaatactctatccccaracttggcaggacctctctaatcataccaaactctttttagccagaattggacagagactaaagaaatctgaagtatagcataaccaaccagtcactgaga

SEQ ID NO: 483565 - DNA, 201 bp, Homo sapiens
gctagagggcacatcgcctagatgttatttgaaagattgtcaagttaaaggcaggcagctgacactgacttgggtttggacaaagggaattttagtattamgatatgaacttaaatattccggattcaacaggtctatattttaagagagttatcgggaatatgtaagtccattttgtttcttaaaagttgctcagaaaaa

SEQ ID NO: 483566 - DNA, 201 bp, Homo sapiens
aatatttattaagcaagacttttaaaccatctatttgtgctatattagatgtgtacccctggttgcaaataatttgataagcaggaaaaggcttattgaarggtagatcgtagagtcaactgaaggtggtagaatgacaaggcaagggaatatctgcctccctttagctttggtggtagaaatggggctctgcctcctact

SEQ ID NO: 483567 - DNA, 201 bp, Homo sapiens
gtcagcagggctgcatttgaatagaggaggaatcttttcctccattcagcaaaggaatggctgtcctttatggagaccattctattattggcccaggaaawaagggtatagaattaaaaatgtagcctaaatatttcatgtgaaagatttgtccacttgttgtaggcctgaaggatgctcatggagaaacagggcaaaaga

SEQ ID NO: 483568 - DNA, 201 bp, Homo sapiens
gctctcatcaaaatactactggcaagaaaatgtctgcaccattactaaataaaataagtttagttttctgtagcattttattttctgaatagatttacatrtttggaacccagggctctttgacttggtgcagattaggacagggttctttatgaagagaaaggaaattacctctggctctttagagtctactttgaatta

SEQ ID NO: 483569 - DNA, 201 bp, Homo sapiens
aggtgatagataggtttgtgacatagattgtggtgatggttttatgggtgtatacttatttccaaacttatcaagttgtaaaatatgtacagctttttgtwtaccaattataccttaagaaagtgatttagaaacaaaaataaggaagcaaagagataaataaataaaaagaaagaaaatggttggtgttgactcatttca

SEQ ID NO: 483570 - DNA, 201 bp, Homo sapiens
cagtaaaaggtgtttgattgactttttcaccaaattaccatttcccattatttactaattaaattctcaacctttattgaataaatactgtattcttagtwtagagaaaaaataatcaagacattatccttactttcaaaaaatgttttaaaagctacatattttaataaacaattgagtggattctacaaagagaaaatg

SEQ ID NO: 483571 - DNA, 201 bp, Homo sapiens
cagccttggtcattactcaatatttacagaactcattcattatttttgtggttacatactatcccattatttggacataaaataatttatttagccaatcytcactgatggaaatttaggttgtttccaaccttatactattaaaataatatgttaataatcatttgtatgaattttatttactacatatgtgactatatc

SEQ ID NO: 483572 - DNA, 201 bp, Homo sapiens
attggtctattcaggaatttgaatttttcctggtttagccttcagagagtgtatttgtctaggaaattatccatttcttctagattttctagtttatttgyatagaggtgtttatagtattctctgatgttagtttgtatttctgtgggattggtggtgatctcccctttatcattttttattgtgtctatttgattcttc

SEQ ID NO: 483573 - DNA, 201 bp, Homo sapiens
tggcctgaaatttcctttttctgttgtgtctccgccaggttttggtatcagggtgatgctggcctcataaaatgagttagggaggagtccctctttttctrttgtttggagtagtttcagaaggaatggtaccagctcctctttgtacctctggtagaattaggctgtgaatccgtctgatcctgggctttttttggttga

SEQ ID NO: 483574 - DNA, 201 bp, Homo sapiens
tgtcttggctatgagggctctttttttggttccatatgaaatttaaagtagttttttctaagtctgtgaagaaagtcactggtagcttgatgggaatagcrttgaatctataaatttgggcagtatggccattttcacgatactgattctaactatccatgagcatggaatgtttttccatttgttcgtgtcctctcttat

SEQ ID NO: 483575 - DNA, 201 bp, Homo sapiens
atgtgtggtgttatttctgaggcctctgttctgttccattggtctatatatctgttttgatacaagtaccatactgttgtagttaccgtagccttgtagtrtagtttgaagtcaggtagtgtgatgcctccagctttgttctttttgctgaggattgtcttggctatgagggctctttttttggttccatatgaaatttaa

SEQ ID NO: 483576 - DNA, 201 bp, Homo sapiens
ccttgagttaatttttgcataacgtgtaaggaaagcgtccagtttcagttttctgcatatggctagccagtttcccaacaccatttatggaatagggaatsttttccctattgcttgtttttgtcaggtttgtcaaagatcagatggttgtagatgtgtggtgttatttctgaggcctctgttctgttccattggtctata

SEQ ID NO: 483577 - DNA, 201 bp, Homo sapiens
tccaccttgagttaatttttgcataacgtgtaaggaaagcgtccagtttcagttttctgcatatggctagccagtttcccaacaccatttatggaataggraatcttttccctattgcttgtttttgtcaggtttgtcaaagatcagatggttgtagatgtgtggtgttatttctgaggcctctgttctgttccattggtc

SEQ ID NO: 483578 - DNA, 201 bp, Homo sapiens
gccaatagctgttcagatggcttctgaattatgtggaagaataaaggcctggaaggagaaataaattatactaacattttatatctcactcatgggtatasatcaaagtaagttaactcttggaacctattttttgtgaaaaaatactcactagcaattactttgtactaggatctatttgcctatattctctgagcttat

SEQ ID NO: 483579 - DNA, 201 bp, Homo sapiens
tcccacctcagcctcctgagtagctgggaccacaaatgtgcatcaccatgcctggctaattttttttttaaatcgagacagggtctcgctctgttgtccasactggggtgcaatggcatgatcatggctcactgcagccttgatctcctgggcttaagtgatcctttcacctcagctctctaagtagctgggccacagaca

SEQ ID NO: 483580 - DNA, 201 bp, Homo sapiens
aagtgctgggattacaggtgtgaatcaccatgcccagccagtactcttttttttttttttttttaaagaggaaagtccattttcaaagcaccattaactgkgctgttatttacatatatctcatttaatttaaccccacaatatctctgtgagttagccattattatttctactttagacaggcatataggcttagagaaa

SEQ ID NO: 483581 - DNA, 201 bp, Homo sapiens
aactgtgtaacaaacctgcacattctgcattctgcacatgtatcccagaacttaaagtatatatataattcttatctgaaaaaaaaaaagacacttaatarattgttgggggtttcaaactttaggtggctcttttttcatgaagaatttctgaggaagatatgttgactttataaccgaatctaaacttaaatatatata

SEQ ID NO: 483582 - DNA, 201 bp, Homo sapiens
aaatttcaacttaaagtatatatatatataattcttatctgaaaaaaaagacaataggttgttgggggtttcaaactttaggtggctcttttttcatgaaraatttctgaggaagatatgttgactttataatcgaatctaaaataaatgaaagtgaaaccactacttagaactcttttctgcccctttgatttttttttt

SEQ ID NO: 483583 - DNA, 201 bp, Homo sapiens
ttcaaactttaggtggctcttttttcatgaagaatttctgaggaagatatgttgactttataatcgaatctaaaataaatgaaagtgaaaccactacttaraactcttttctgcccctttgatttttttttttttgaagccagtagaaactccatatgtggagggagatacgttacttagaacatattacagtaagatttg

SEQ ID NO: 483584 - DNA, 201 bp, Homo sapiens
gctgcagaacagcaaagattgcttcctgttccttcatctggaagcttcatcccaggggggcatctgccagatgccagctgaagctctcctttatgaggtgyctgtcaatccctgctgtgaggtatttcccagtcaggagtcaggggggtcagggagccacttgaggaggcggtctgtcccttggcagagctcaagggctgc

SEQ ID NO: 483585 - DNA, 201 bp, Homo sapiens
ttccatcacaactgtgtccttagcatttagcacagtgcctggcacataaatgccagaaactgatatcgcttgtctcttgatttttctgggttagaactatmtagaatttcttctctcctcaatatactgcgaacttaactaaaagtcagcaatattagtataaatattttgtcattatcagtttattatctattttattaa

SEQ ID NO: 483586 - DNA, 201 bp, Homo sapiens
accaggatatacatatggacaacacaaataactagcttaatctaatgaaacatgtagaacagtgtagccaacactgaagattacatatactttatgtatarccttttaagtacttatggaaatataaaaaattaagaaaaacaaaataagcccaaacaaaaatatatggaagcaaataataaaggtaaatgcagaaattag

SEQ ID NO: 483587 - DNA, 201 bp, Homo sapiens
tgcttaaagttttaataaaacactttttaaaaataagaagttgtcattcttgtccatatgtatcagtttatttgtctcccctaataccttacttgcaaaayaccataatacaatggttgtctgaaaagctctattactatgtttatttgtaggagcgtatgatttctcaatacggcagcctattagtagcatagttttttg

SEQ ID NO: 483588 - DNA, 201 bp, Homo sapiens
gctgtgcaaacaagcaattgcaaaacagtaggagagccactgtaaaggtatctaaggagttaggaaggaacaagtgcagtttttctgcctgggagaataarcaaaggcctcatagatggagtaatccaccaactgaatcagcatttgttggtcatgcacatggggaagggaataagagggagtgagcagtgcgtgcagggt

SEQ ID NO: 483589 - DNA, 201 bp, Homo sapiens
ttgtagctagtgagactttcacatgccacaagactgtgctgaggcttatatgttgcttaggagtcagactaggagcctaaaaccaatacagctgcaccatyctggcaaggactgttgggccaatcaccagcaacaccttcacatccattagctgctgcccacctggccacagagagaagactcacctcacattcattacta

SEQ ID NO: 483590 - DNA, 201 bp, Homo sapiens
tgggtattcttatctcatttccttcagagggagaaccttcaatattttaagtgtgaggtttgcattagattttctgctagatattttttatccaattaaakaagttttatcctattcctagttgagtcagtgtgtttgagatgttgatgttttaaaaagatcaaatgctttattggcatcttttgagataatcaaatgatt

SEQ ID NO: 483591 - DNA, 201 bp, Homo sapiens
acaaatttgaggtatgagttctttgatggatgtatatatagcaaatagctttttcagcatggtagcctgacttttcatttcctttgtagtgtcttgataascagaagtttttaattttaatgtggtctaatttaagaatcatatcctgtattttttatgctttttgtagttgtttgagatcattgtctaccccaagatcat

SEQ ID NO: 483592 - DNA, 201 bp, Homo sapiens
ggtttatcttttagcacctagtaaatatttagtgagtgaaatggagattgtgatcacagattttaaaggatacgctgaggccctagagttaaattctctakactttgttaattccttacctacttcccagtatttctcaaagggagctctactggcatttttacagacaactcttcactgtgtgggattgtcctgtacatt

SEQ ID NO: 483593 - DNA, 201 bp, Homo sapiens
gggattttaggtgtccaccaccatgcctggctaatttttgtatttttagtagagacaaggtttggccatgttggccaggctggtcttgaactcctgacctyaagccaccctgcctcagcctcccaaagagctgggattacaagcatgagccaccacacttggcctctgtcaaaagctttttagagttccttgaaatccctt

SEQ ID NO: 483594 - DNA, 201 bp, Homo sapiens
tgaatcataaatataatcagggaaccttaagaaaaaaaaagccatggagatcatttggtgattatctattgaaaacaaatgttttcaggggacaagcagcytgagtataataaagcaattagaaagttggggaatggagaataggagaataagctgtacctgaaggaatcttaattagggaatggttgctgaaaactgcag

SEQ ID NO: 483595 - DNA, 201 bp, Homo sapiens
gtgagtttgatctcaaccaaatcatttagaatgctttcagaggtgggcagtcatgtgagtaaggactccagaaatcatatcaaatttgaagaacctgacartattgaatgtggagaaaaatagactattttagatattcgaaggactgtgttgaatgagcagtgttgatcagaaggaaaatttattatattgggagcaaat

SEQ ID NO: 483596 - DNA, 201 bp, Homo sapiens
tgtatgggaaggcaaagactatgtttatcacgagtttacgtgtgctcccattccttcctcctctcagttgttggcaaccactaatttaacttttttctctrtagagttgcttattctggagattttatatcaatgaaatcaaacaatatgtggccttttgcttatagcttctttcatttggcatgttttcaaggttcaccc

SEQ ID NO: 483597 - DNA, 201 bp, Homo sapiens
aactggggttctcttttaacagagatcttcttaaacactgttaatttgcttttttggtagcgagatcagatttaatcttactattatagtgatttccataraatatcctcttgcagatttcactgtaaaggaccaaaactcccaggagacctgtatgttgacaaagtcatacctggaatttaatgagatctatttttcccc

SEQ ID NO: 483598 - DNA, 201 bp, Homo sapiens
ccaaattctattccactgtttcatatgcctatcctttgtcagcgtcacactgtcttgtttactgtggctttataacagtcattttttgaaattgggaaacrtaagcccaccaactttgttcttctttttgaagattgttttcgctagctttggttctatgcatttccatatgaatcttagcatcagtttctcaatttctgc

SEQ ID NO: 483599 - DNA, 201 bp, Homo sapiens
gaatgtttaaatttccctcaggaagaaaatagtaattcatatagcactctcttgatatataaatagcatgtgcactgaagatctttctaaaagtcatgatwttcttccaggagttttagattgacaccaagcaccattgtgtcacatgaattactaactcagtctttaccatgcactttcacagatgggagacctttaact

SEQ ID NO: 483600 - DNA, 201 bp, Homo sapiens
aactgtgtccttagcatttagcacagtgcctggcacataaatgccagaaactgatatcgcttgtctcttgatttttctgggttagaactatctagaatttyttctctcctcaatatactgcgaacttaactaaaagtcagcaatattagtataaatattttgtcattatcagtttattatctattttattaaaggatactt

SEQ ID NO: 483601 - DNA, 201 bp, Homo sapiens
ctggcacataaatgccagaaactgatatcgcttgtctcttgatttttctgggttagaactatctagaatttcttctctcctcaatatactgcgaacttaamtaaaagtcagcaatattagtataaatattttgtcattatcagtttattatctattttattaaaggatacttattaaataaagtggccaggaataatttgt

SEQ ID NO: 483602 - DNA, 201 bp, Homo sapiens
gttagaactatctagaatttcttctctcctcaatatactgcgaacttaactaaaagtcagcaatattagtataaatattttgtcattatcagtttattatmtattttattaaaggatacttattaaataaagtggccaggaataatttgttaaagtttatttctgaatttatgtgcttaagggcaaataataattttacct

SEQ ID NO: 483603 - DNA, 201 bp, Homo sapiens
aacaatattgtttttgattgcataaatgtgatatgggaacttcaataatgctcttccatatggtgcctgcgaatttgctgttttggattgtttgctcttakcaagtataagtcttacgtatttgtgataagcattgagagaagcttcatgcagttcaagctaacctcataggagccttaggatagagattacatgtttgtc

SEQ ID NO: 483604 - DNA, 201 bp, Homo sapiens
atccaaagaagacaccagaagtctgagaagataaaatgattattttacctgattggagttacttgggcatttcctgcaaaagaagctatcagacaaaggcrcaatcattcctatgactgctgtaacactcctataggaaaagtggggaaagcttcagcattttggctctggaaaatgtgtgtgccaggtgtggtggcacgc

SEQ ID NO: 483605 - DNA, 201 bp, Homo sapiens
aagcgtccagtttcagttttctgcatatggctagccagtttcccaacaccatttatggaatagggaatcttttccctattgcttgtttttgtcaggtttgycaaagatcagatggttgtagatgtgtggtgttatttctgaggcctctgttctgttccattggtctatatatctgttttgatacaagtaccatactgttgt

SEQ ID NO: 483606 - DNA, 201 bp, Homo sapiens
gtgcaggaaagacctgcctccataattcagttaccttccactgggttcctcccatgacacatgggaattgtgggagttacaattccagatgagatttgggsggggggacacagccaaaccatttcagcaatcattcagttttcttgatagactttagctcctgccctctaaacatctgtcatatgaagataaaagggtaaa

SEQ ID NO: 483607 - DNA, 201 bp, Homo sapiens
tagttcccctcttttcttatgcaagagcttcttaaaggtcttgtgttgttattaatgtttttggtttacttaccttgacaaaagaggggcatgttgactgrtcagagtgaccaagtgttccttcgtctctctcactacacttggaagctggaggaatcttcctctttatgttagcttggaaagcagatgaatgggtacaac

SEQ ID NO: 483608 - DNA, 201 bp, Homo sapiens
aagcagatgaatgggtacaacgaaatttatgaaggatagatcattttctatacttaggagaggtcttcctttcctagtgttgaatctttcggtcctgtaamtataatgaggggagtgtttttgtgtgatttgaaataatttatagtttttttttttttagttttttggggtgttagtggtgagactgtactatgctgagag

SEQ ID NO: 483609 - DNA, 201 bp, Homo sapiens
tagactgggtggctcaagaaccaacacttatttctcccagttctgaaggctacaggatccaggatgagggcactggaagatccagtgtctggtgaggaccygtttcctatttcatagatgccatcttctcactgtatccccacatgataggaaaagagtgagagttacacctcttagggtgtaaccctaagagggatacac

SEQ ID NO: 483610 - DNA, 201 bp, Homo sapiens
gagagttacacctcttagggtgtaaccctaagagggatacacacattcagtccattgtattacctcttccttcaggccttccctttccaagtctaatgtcaccacaatccctccagaatcatgttaccctgttgtgtttcctttgtagggcttataattatctggattatcttatttattcgttctgtgtgtttattggct

SEQ ID NO: 483611 - DNA, 201 bp, Homo sapiens
ggctcacacctgtaatccaagcactttgggaggccaaggtgggagcatcacttgatcctgggagttcgagaccagcctgggcaacatggtgaaaccctgtyggtacaaaaaaatacaaaaatttgcctgtttatggtggtgtgttcctgtagtcccagctccccaggaggctgaggtgggaggttggctttaacccaggag

SEQ ID NO: 483612 - DNA, 201 bp, Homo sapiens
gtgcatatttaaggtctttaacatttgcagtcttggtttttctgaaggcctaagctaaaagacattcatttcaaatctgaaaagcagcataatcagtcttytgaacctactgcaatcaatatctatgcaaatggggtggttatggaatttacactgctttgtcaatcaatcactagtcaagttcccaccttacactcaatg

SEQ ID NO: 483613 - DNA, 201 bp, Homo sapiens
gacagtttacctcccaatcaacataagaatccttagcatcttgtaagtggttctttaacaatgaccattttctaggttttaattgaggacaaaactagctytaggtatttgtatctttcacactgcccctcaaattaatcttttctcttcccactgtcaccctcctagatcaagccctctgacctcacgtggaacaattag

SEQ ID NO: 483614 - DNA, 201 bp, Homo sapiens
tctatgcctaattgatcaccagtttcacatacctggtgtcaaccccagcacattcctgagtgcttaattcgagtttgggtgaaggatattttttctaaaamttgtatcttaactagcagcactgggtctcaggcagtctatttctgcacttttctatagaaattaatgacccaaatccttcgattaagtatgcacttaaga

SEQ ID NO: 483615 - DNA, 201 bp, Homo sapiens
agaatacaggtaatagcatgttgtctgaaaaagaaattgttcaagaactaaaattctctaaccctaaccagcttatctatctatctatctatctgtctathtacctacctacctacctacctacctacctacctacctgcctatctacctatctgtctgtctgtctgtctttcttgggaatatgacctgtgcctgtgtcca

SEQ ID NO: 483616 - DNA, 201 bp, Homo sapiens
cataagcccaccaactttgttcttctttttgaagattgttttcgctagctttggttctatgcatttccatatgaatcttagcatcagtttctcaatttctrcgaaaatgtcagttggaattttgatatggattgcactggagctatacttcaatttgaggagaattgccatcttaacaagattctatcttccaattcatca

SEQ ID NO: 483617 - DNA, 201 bp, Homo sapiens
tctttaaccattatgttttaccttctcccacaataacaatcttattctcaaaacggtattgtattattattttaaagcagaactgatgaagttttaggtcrtgaaccccttttgagaatatcaggaaagctctggactctttccccagacacacaaactattgcagccctaatcaggagtcccctaggactcgtcaggaca

SEQ ID NO: 483618 - DNA, 201 bp, Homo sapiens
tggaatcttacagattctcattcctccatctctttttttttcctggtaattttttgttgaagaaacaggttgtttgttctgtagtgttttgcagtcttgattttttttttctaattgtatttctgtggtgtttactatgttcctccctgtgtttttttataaactggtagttagatcttgaggcttgatcaaattcaggct

SEQ ID NO: 483619 - DNA, 201 bp, Homo sapiens
ttgggctgaatctacctctgagttatgccaaagcaatgtctcaggatgaacgaaatgtccattaacaaggtaaaagaaaagcctggatttaatgttttgcygttacaaagatcaatgtctccattgcatttagactcatcccaccaaatgcaaaatttgctttcatctttagtgggcaaaccctgacttaatttttagttt

SEQ ID NO: 483620 - DNA, 201 bp, Homo sapiens
ctgtgtaagtataatctcaagattaaaagtttaattagaaaatgattttaaagctgataactaggaggatgaaggtgctttttaatataattaggaaaatktccctccttcaatgcaggtgattttaataatccattgaaaaaatccaatgaaataattaattcacacaaccatgatggtgtttgataagcttctacacat

SEQ ID NO: 483621 - DNA, 201 bp, Homo sapiens
caatggactcaaacaaatttacaagaaaaaaacaaacaaccccatcaaaaagtgggcgaaggacatgaacagacacttctcaaaagaagacatttatgcarccaaaagcacatgaaacaatgctcaccatcactggccatcagagaaatgcaaatcaaaaccacagtgagataccatctcacaccagttagaatggcaatc

SEQ ID NO: 483622 - DNA, 201 bp, Homo sapiens
ttacttacctttaactttaaaaaatggatggatattggtttaatgtccgacctacctagtataaacttttctacttagcagtagtttctagtttcttcttwttaccccaaggttaatcagttttgaacagctactgatagtattggtttgatcttctacagcagcaaagaacagtcacttgagatctgtggcctaggtttg

SEQ ID NO: 483623 - DNA, 201 bp, Homo sapiens
ctctaaggaaccattcccttctcaatcaggagaattgaggagcaattgttccttagaggagcaatgactactgctccaaaagaaggaagaatggatgtttkatgtgaaacagtggcaatgacaacagtcattacatatatctttctcagtttaagccaatgttaaatttacatttttctaaatacgaaggtttcaatggta

SEQ ID NO: 483624 - DNA, 201 bp, Homo sapiens
accccatggaggtaagatgactcaatgagtatctgttatttgactaaaccttcaggtttaattacccatagaactagctcacttaacaaatcagatgcctstgtattttgatataaactggataatctagtgaattacttagaattgattaattatatgtgtattatacatatatactacatatacataatgtattatata

SEQ ID NO: 483625 - DNA, 201 bp, Homo sapiens
tgtaagtttttctgcatcaaaaagaaaaaccagaagacattacaaaaaaactaactattaatgtgaaaggacaaattacaataggtaaaatatttacagcrtgatagatgatggatatttgtgttcatatatctgttttgttcatggtgaaactaacactacaaaagaaaagtggttaaagggcatacagggacaattcac

SEQ ID NO: 483626 - DNA, 201 bp, Homo sapiens
atgtttggattataaattgtttttaaaaatagaaaataaacctgtatattaattcaataacttggaatttgagacaaacctttattttaaaggagtaaacyagataaattattttagccttttcaaagtaactcacactgatcctggaccaattctgattcttacaggaacatccaatacttgggcaacccttttttgtac

SEQ ID NO: 483627 - DNA, 201 bp, Homo sapiens
tcagctctctaagtagctgggccacagacacatgctgccacacccagctaattttttaatttttgtagagatgggggtctcactatgttgcccaggctggkcttgaactcctgggctcaagctgtcctcctaccttggcctctgaaagtgttgggattacaggtgtgagccaccatgcctgaccaaggctcctttagagtg

SEQ ID NO: 483628 - DNA, 201 bp, Homo sapiens
actataaaaactctggatgatagcctaggaaatattattttggacgtagaactgggcaaagattttatgatgaagatgccaaaagcaattgcaacaaaaasaaaaattgacaaatgggaactaattaaacaagagtttctgtacagcaaaagaaactatcaacagagtaaacagacaatctacagaatgggagaaaatgtt

SEQ ID NO: 483629 - DNA, 201 bp, Homo sapiens
tcctgacatgaggtgatcctcctgcctcagcatcccaaagtgctgggattacaggtgtgaatcaccatgcccagccagtactcttttttttttttttttttaaagaggaaagtccattttcaaagcaccattaactgtgctgttatttacatatatctcatttaatttaaccccacaatatctctgtgagttagccattat

SEQ ID NO: 483630 - DNA, 201 bp, Homo sapiens
tctgctggtgtatttagctggcattatccccttaggtcacctgctttgtcttcataggtatttgagtttgcagtgttggtataatggttaatccacaatayaaataatcaataaatgtatcatcaataatagtgtttttgttggtagaacttgtgcacagattacccactacatagaaacctcctagggctccccattgct

SEQ ID NO: 483631 - DNA, 201 bp, Homo sapiens
ttgggaccttgtcagctaacagctcaaaggagacgcggcccaagggctcgccatcgacggcaatgtcgaagaacacggtggggttgaccatggctaatagyacacagttttcctcggcggcgtcatctgcaaagccgctttcttatatttcttgtcctcaaggtcttggagaatgtttccaagtacagacaaaattctgat

SEQ ID NO: 483632 - DNA, 201 bp, Homo sapiens
gaacttctcttctccaattagactcaccttgtagatcttattcagttacttggctgtaaatactatacaaacacacacacacacacacacacacacacacatatgtgtgtatatatacgtgtatgtttgtactatatgtgtatagatacacatatgtatatatctgtactatatgtatatctatacataggtatagatgta

SEQ ID NO: 483633 - DNA, 201 bp, Homo sapiens
catgtgccaccatgcctggttaatttttgtattctttaattagagacagggtttcaccatgatggccaagctggtcttgaactcctgacctcaagcgatcygccttccgtggcttcccatagtgttaggattacaggggtgatccattgtatcattctttcattcttttttttttttttttgagatggagtctcgccctgt

SEQ ID NO: 483634 - DNA, 201 bp, Homo sapiens
ccttatgatttctcactttgtattccctttgagccctatacttcttaagtgtcatcactttcatttcctgttttctactcattaaaaaaagggggaaaatrtgctaaagtattcacataattatataaacactaaagtacagacaaaaatggtggctgaggtgaaaatgatctgctggcaggcaatgccaccctgtagaag

SEQ ID NO: 483635 - DNA, 201 bp, Homo sapiens
tgaacttctcttctccaattagactcaccttgtagatcttattcagttacttggctgtaaatactatacaaacacacacacacacacacacacacacacacatatgtgtgtatatatacgtgtatgtttgtactatatgtgtatagatacacatatgtatatatctgtactatatgtatatctatacataggtatagatgt

SEQ ID NO: 483636 - DNA, 201 bp, Homo sapiens
agcaagttcttaaagacctacaaagagacttagataaccacacaataatagcaggagactttaacaccccattgacagtattagattgttgaggcagaaamctaccaaatatttgggacctgaactcaacacttgacaaagcagaccaaaagacatctacagaatgctgtacccagaaacaacagactatacattcttctg

SEQ ID NO: 483637 - DNA, 201 bp, Homo sapiens
ttgaacttctcttctccaattagactcaccttgtagatcttattcagttacttggctgtaaatactatacaaacacacacacacacacacacacacacacacatatgtgtgtatatatacgtgtatgtttgtactatatgtgtatagatacacatatgtatatatctgtactatatgtatatctatacataggtatagatg

SEQ ID NO: 483638 - DNA, 201 bp, Homo sapiens
tggtaccggttgttcctttccatgtttagtgcttccttcaggagctcttttagggcaggcctggtggtgacaaaatctctcagcatttgcttgtctgtaargtatttatttctccttcacttatgaagcttagtttggctggatatgtgattctgggttggaaattctcttctttaagaatgttgaatattggcctccact

SEQ ID NO: 483639 - DNA, 201 bp, Homo sapiens
cttatctccacaggaaaccttatttcatattgataaagtatgaaatctttccttagttatttctgattgttcattgttgttactgttttaatgagaggtasaaatgagctaaaccaacctgcttcattccttctagtactaatttaatttcaaaggaaattcttcaaccccaataaataagtgaaagtggatggaaccagg

SEQ ID NO: 483640 - DNA, 201 bp, Homo sapiens
tcggctcactgcaggctccggcccccgagttcacgccattctcctgcctcagcctcccgagtagctgggagtacaggcgcccgccaccttgcccggctaatttttttttttttttgtatttttagtagagacggggtttcaccgtgttagccaagatggtctcgatctcctgacctcgtgatccgcccgcctcggcctccc

SEQ ID NO: 483641 - DNA, 201 bp, Homo sapiens
tttgaacttctcttctccaattagactcaccttgtagatcttattcagttacttggctgtaaatactatacaaacacacacacacacacacacacacacacacatatgtgtgtatatatacgtgtatgtttgtactatatgtgtatagatacacatatgtatatatctgtactatatgtatatctatacataggtatagat

SEQ ID NO: 483642 - DNA, 201 bp, Homo sapiens
ggtgtcctttccccactttattttgtttgctttgttggagatcagttgactctaagtatttggctttatttctgggttctctgtgctgttctgttggtctrtaggcttattttttacgagttccatgctgttttggtgactatggctttatagtatagtttgaagtcaagaaatgtaatgcctccagatttgttctttctg

SEQ ID NO: 483643 - DNA, 201 bp, Homo sapiens
actgtggctcatgcctgtaatctcagcactctgggaagctgaggctggtggatcgcttgaggtcaagagtttaggaccagcctggccaacatggtggaacsctgtctttactaagaatacaaaaattagccagcgtggtggcttgcaactgtaatccccgctcctcgagaggctgaggtgggacaatcacttgaacctgga

SEQ ID NO: 483644 - DNA, 201 bp, Homo sapiens
acgcccggccaatttttgtgttttttagtaaagacgggttttcaccatattggccaggctggtcttgggtgtgatctgcccgccttggcctcccaaagtgytgggagtacatgggtgagccaccgcatccggcccattgtatcattcttatgcctttgactcctcataccttagctcccacttgtgagtgagaacatacga

SEQ ID NO: 483645 - DNA, 201 bp, Homo sapiens
actgttacgtgtttgaatttccttccagttttttcttatccagtttcctttttcatctcagctgtttttccttcctcatctcttgcttttagaggtctttmcctttctctttttctttttaaaattgggaacatagagtagataattcctcggtttgatttccacattcctagtgtaagtccattacaggagcaagctttc

SEQ ID NO: 483646 - DNA, 201 bp, Homo sapiens
atctgcccgccttggcctcccaaagtgctgggagtacatgggtgagccaccgcatccggcccattgtatcattcttatgcctttgactcctcataccttakctcccacttgtgagtgagaacatacgatgtttggttttgcatttctgagttacttcacttataataatggtctccaattccacccagcttgctgcaaatg

SEQ ID NO: 483647 - DNA, 201 bp, Homo sapiens
tcagttgactctaagtatttggctttatttctgggttctctgtgctgttctgttggtctgtaggcttattttttacgagttccatgctgttttggtgactrtggctttatagtatagtttgaagtcaagaaatgtaatgcctccagatttgttctttctgtttagtcttgctttagctatgtaggctcttttttggttcca

SEQ ID NO: 483648 - DNA, 201 bp, Homo sapiens
aactatatcacatcatggctgagcattgtagggccagttgttgggctgaatctacctctgagttatgccaaagcaatgtctcaggatgaacgaaatgtccmttaacaaggtaaaagaaaagcctggatttaatgttttgctgttacaaagatcaatgtctccattgcatttagactcatcccaccaaatgcaaaatttgct

SEQ ID NO: 483649 - DNA, 201 bp, Homo sapiens
tttcacttgtttcctaggaatgtcaactatatcacatcatggctgagcattgtagggccagttgttgggctgaatctacctctgagttatgccaaagcaaygtctcaggatgaacgaaatgtccattaacaaggtaaaagaaaagcctggatttaatgttttgctgttacaaagatcaatgtctccattgcatttagactc

SEQ ID NO: 483650 - DNA, 201 bp, Homo sapiens
tagataaattctttactatctgaccttttgctacttgctaccagaaactcaagatcccgataaattaggattatgttgtaagcttgctatgtaaatttggygactatacttgcactatcctaactcagaaatacaatagctttatcactgactttaagcaatttgattatgcttggtgtagttttcttcatgtttcttgtt

SEQ ID NO: 483651 - DNA, 201 bp, Homo sapiens
ccagttccatgtttttaaatatctttaatataccagtgactctaaagttagccttcagctgagaaactcctctgcactccaggctagtttatctaaaccascaatacgataattttatggtatctcaaactttcaggtagtccaaataggattgatttttttcctctccaaatcgttaccaagcctttttcatttcaacaa

SEQ ID NO: 483652 - DNA, 201 bp, Homo sapiens
gagccgatctgtacttagctgaagatttgagggacttatttttctatgctgctctctccagtttcagcacctcatcgcgggaagccttatggactttgccycggttataccttcttgcactgtggcctgaaaactgtccaggcaataatctggataatttgggcttgccttgcttttttctcatatctcaggaatcactgc

SEQ ID NO: 483653 - DNA, 201 bp, Homo sapiens
aaaaccaaagcaatattgtaaaattggggtgtcatttaccgtaccccaaaagcaatgtgtctgaaagaaataattcactatggtgtgtgcttcagagggawctggaatatggagcttgaaaactagaaggaagagaatggacatcttaaaactattttaacaacaacaaaaaacgagcaataaacatgacattttaaaaaa

SEQ ID NO: 483654 - DNA, 201 bp, Homo sapiens
agttctatacttatgttaaagagaaaaaagactgaaatatacaaggcagggaaagtctggtgtaacagcacttccaatacacaaaacaaaacaagaactakttttttttttttttttttttttggctgcctgtaaccacagcatgagtcttcagtctagaggactgttgaagaggctaatgcataaggctgtcttggtatg

SEQ ID NO: 483655 - DNA, 201 bp, Homo sapiens
tacagctcacaagctaagaatggtttttatatttttatatggttaaaaaaagaatttaaaaagaataatattctatgacattaaaataatatgaaatttamattttagtgttcattaatgatgcactattggaacaaacccacactcattaatttacatattatctaggctgttttcatgctgcagtggcaaagttgagtg

SEQ ID NO: 483656 - DNA, 201 bp, Homo sapiens
ggtgaatgaagtaggtgaactccatactggaattttctcatcttctctcttgaaaattaactgtcagtttttaggtcatgctaaaatacttttttttttcmgttttagatgaaattttgtgcaattataagttattaatataaaaaattgatacaactaatttgtttttctgaacactattcaaacaactgatttaacatc

SEQ ID NO: 483657 - DNA, 201 bp, Homo sapiens
ttccaagctatgcagaatggactaaaaatacaattttgactttcaaatacctgatttcaataacaatttttagtgtctaaaaattaagaatagaattaatwttgttatacattgtttgaaagtaactataatcaaatcaaatatattgactatttttcctatttggcttcttctgactaaactgttgcatttaatattaca

SEQ ID NO: 483658 - DNA, 201 bp, Homo sapiens
tcactgaatcatctaattcctgggctcaagtgatcctctcacctctgcctcccaagtagctgggactgcaggcatgcaccaccatgcctagctgatttaaraatttttttagagatgtggatcttgctctgttgcccgggcttgtctcaaagtcctggcctcaagtgttcctctctcctcagcttcccaaagtgctgagat

SEQ ID NO: 483659 - DNA, 201 bp, Homo sapiens
atctagtaatcatttagtctatgatttttttctttgttgagatttgaaagacctgcatcaaccctacattatataaattttccttccttgtgcgactgtgwtgtaagagggagtaatcaggcaaaggctttatgttgcttagcttaaataaattataaggaattgcctttgttggactgtggttcttatttataatgactt

SEQ ID NO: 483660 - DNA, 201 bp, Homo sapiens
ggatcaagaaaaataactaatgggtaataggcttaatatctgggtgatgaaataatctgcacaacagactcccatgacacaaatttacctgtgtaacaaacctgaacatgtaccctgaactgaaaagttaaaaaaattgaataagcaaatttcatgaaagggattgattgtgctcatgatagatgaactcaaagaataatc

SEQ ID NO: 483661 - DNA, 201 bp, Homo sapiens
tcttctctactgtgaggaacacttttatgcacatagaaattatactatgcgtactaaaccaattatttggtttcctgccctgcccacaatagcaataatawtttttcctagtgttcattgtataaaattacagctatattttgagtcaattgaggctttaagggtagcttgggaacctaaataaaattatttcaagattaa

SEQ ID NO: 483662 - DNA, 201 bp, Homo sapiens
ggattgtttgctcttagcaagtataagtcttacgtatttgtgataagcattgagagaagcttcatgcagttcaagctaacctcataggagccttaggatakagattacatgtttgtctcagctacagttcagaatgcattgaaaagacccaggaaggctgtcaagttggcaatggcacctaaaggctgtcccgatggatgc

SEQ ID NO: 483663 - DNA, 201 bp, Homo sapiens
atgattttatttattaataaagatgtatgaaacacaattttgaattatatttacacttaagtttctagtctcagggctattgttgagcaagaatttctccmatcagtaaatgcaccatcgcatattatacattttatatgtatattgcaaatgtctatgttgtatattttatttcaggagtgagggaggggaaatttcagc

SEQ ID NO: 483664 - DNA, 201 bp, Homo sapiens
tgttgtttcctgactttttaatgattaccattctaactggtgtgagatggtatctcattgtggttttgatttgcatttatctgatggccagtgatgatgarcattttttcatgtgtctgttggctgcataaatgtcttcttttgagaagcatctgttcatacccttctcccactttttgatggggttgtttttttcttgta

SEQ ID NO: 483665 - DNA, 201 bp, Homo sapiens
ttttgtctttgaatcctggttggtactgatccattttagatgattgaccttacttgagctatctcctggcactctcaaagtacactattcttgtaactacsccgtccttgacctatttcagcttaaagcaagaggagtttcattcatatgatctggccaggactccagaatcctatttcaatcaggattccagtgtcttca

SEQ ID NO: 483666 - DNA, 201 bp, Homo sapiens
gtcttagaaactatgtttgtaaactagataaacaactatagtagaaaattaaaaaatactggggggaaggttccaacatggccgaataggagcagctccaktctgcagctcccagcgtgagcgacacagaagatgggtgatttctgcatttccaactgaggtaccgggttcatctcactggggcttgtcagacagtgggtg

SEQ ID NO: 483667 - DNA, 201 bp, Homo sapiens
atcaaaatactttgccttcctctggcccagggtgagcacatgactaactttagagtggtacagggctgatatccttaaaaatttgctgagagggtagatcwtatgttaaggatgatgataatgatatcatcattataaataaagagggcaggaagaaacttttgcaggtgatagataggtttgtgacatagattgtggtga

SEQ ID NO: 483668 - DNA, 201 bp, Homo sapiens
ctccacccctgcagcagacttctgcctggacatataggcatttccatacatcctctgaaatctaggtgtaggttcccaaacctcaattcttgccttctgcrcacctgcaggcccaataccacatggaagctgccaaggcttgggatttgcaccctctgaagccgtggccctagctgtaccatggccccttttagccacagc

SEQ ID NO: 483669 - DNA, 201 bp, Homo sapiens
ttattttaatacctaaagagatagactatatggcaatagtgaacttaattatttaattgaacttagctttaaacattttattgttaatattgttgttgggtttttttttttttttttttttgagactgagtctcgctctgtcactcaggctggggtacagtggtgctatctcagctcactgcaacctccgcctcctgggtt

SEQ ID NO: 483670 - DNA, 201 bp, Homo sapiens
tgttagacatatgttgaacccgctgatatgtaccatatacaacatttacagttgctaaaagaattacgttgcttgcaaaggttcttgtgacagtcacttaytcagaagccacagggattgtggaaaaagtcattctgggaattaagatagtgaaaagaccactccactgtatgataatgagccttgaaacaaacaaaacaa

SEQ ID NO: 483671 - DNA, 201 bp, Homo sapiens
gtgtgtgtatatatatatacacacaaatatacatataatatatacatatatatacaaatatacatataatatatgtacatatatatatatatatatgtatrtatatattccctagcacctgacccagtgtctggctatattaatgttctcaactaatagttgttgatcaaccaactagtttcatttgtttactaaattttg

SEQ ID NO: 483672 - DNA, 201 bp, Homo sapiens
ttggtatggggtaaaaaaggaagttaataattcccctgttctttgaactggtcagattacatctggtggattgcattgagctgtattctgaaacatttaaraaggattctgagtagcttcaacctgtatagaagaggatgactcagatggtgaggaagctgaaaatgttatttttaaagtagagaggttataggtaaaatg

SEQ ID NO: 483673 - DNA, 201 bp, Homo sapiens
gtgtgtgtgtgtatatatatatacacacaaatatacatataatatatacatatatatacaaatatacatataatatatgtacatatatatatatatatatrtatgtatatattccctagcacctgacccagtgtctggctatattaatgttctcaactaatagttgttgatcaaccaactagtttcatttgtttactaaat

SEQ ID NO: 483674 - DNA, 201 bp, Homo sapiens
gcatgtgtctttatagcagcatgatttatattcctttgggtatatacccagtaatgggatggctgggtcaaatggtatttctagttctagatccctgaggmattgccacactgtcttccacaatggttgaactagtttacagtcccaccaccagtgtaaaagcattcctatttctccacatcctctccagcacctgttgtt

SEQ ID NO: 483675 - DNA, 201 bp, Homo sapiens
tcattcaggggacagggcatgagtatttcacctttaggagtctttcttctagaggtgcaattcaagacttgtagtattgcaggtgcagctggactgtaaamcccatgaattaagataattagctgctgttttatgtatttctagtacctaaaactagaatgtaaattctatgagaacaaattttgcgtctgtatttagtgt

SEQ ID NO: 483676 - DNA, 201 bp, Homo sapiens
taagctgaaccccacaagagcagagtgtctttcttgtgtgtgtgtgtgtgtgtatatatatatacacacaaatatacatataatatatacatatatatacraatatacatataatatatgtacatatatatatatatatatgtatgtatatattccctagcacctgacccagtgtctggctatattaatgttctcaactaa

SEQ ID NO: 483677 - DNA, 201 bp, Homo sapiens
aattacacgtgtaattatttaatggctgtcttcttcactaagctgaaccccacaagagcagagtgtctttcttgtgtgtgtgtgtgtgtgtatatatatayacacacaaatatacatataatatatacatatatatacaaatatacatataatatatgtacatatatatatatatatatgtatgtatatattccctagcac

SEQ ID NO: 483678 - DNA, 201 bp, Homo sapiens
agtaagaatagggagctaattggaaattgatggtaaaggaaagaaaaatattgatgttatttttgacttttctggtttgggtgattggacaggttatattkcctttgtaattacatgtgtaattaatagaaaaaattaattacacgtgtaattatttaatggctgtcttcttcactaagctgaaccccacaagagcagagt

SEQ ID NO: 483679 - DNA, 201 bp, Homo sapiens
aatccccagacattgcagacattgctctatcatctggcatttgttgcagtgggtgaagatggcagaggctaccctgatttttgctaattgtaggtaaacctttttttttttttttttgcctgcatctttttttctttctagtctttaaattaagatattcctgtaggctatgtttaggcataagtttctttccagcagctt

SEQ ID NO: 483680 - DNA, 201 bp, Homo sapiens
agaggagggtgaggatccggaaaccactcattgggtactgtgcttataacctgggtgatgaaataatctgtgtaccaaacccctgtgacatgctatttacktatataaaaaaacctacacaggtacccctgaacctaaagtaaaagtatttttaaaaaagtaaaactacctatcggatactatgcttatcactttggtggc

SEQ ID NO: 483681 - DNA, 201 bp, Homo sapiens
catggttgaactaggatgagatttacccagatgattgtctaagaatgtgctgagcctgggggagataggaggctgataagggagaaagctgaaagttgggratgagatcagagcttcttaattactgtgccgtgacatgttactgtgccacaaataggctataggtggactcagtatgccggtagtcataattaacagtgt

SEQ ID NO: 483682 - DNA, 201 bp, Homo sapiens
gagttcgagaccaccctggccaagatggtgaaaccctgtccctactaaaaatacaaaaattagccgagcatggtggtgggtacctgtaattccagctactygagaggctgaggcaggagaatcgcttgaacccaggaggcggagtttgcagtgagccgagatcacaccactgcactctagcctgggcaacagagcaagact

SEQ ID NO: 483683 - DNA, 201 bp, Homo sapiens
ggcagtttgtccttagagtctgtgaagtctgtagtgacactaaccaccagtctccttctaaattcccaccactggtctcaaggcaggctgttcttatggcstgaggcttcttctgtgtaggatgtggcctacaatggatgctacatacagtagggcctcctcacggactgtgacttgggtgtttctgggcttcatcgcagt

SEQ ID NO: 483684 - DNA, 201 bp, Homo sapiens
tcctctcgtctttcttctctaatctttgtcttctatcattctcccactcctttattctgctccagccatcctaatatccctgctgtttctgtggcgcctckgcccttcctgttcccactatctgttgtgttcttcccctagatagctttatgacttgcccccttactttcttcatatctgtgctcaaatggcaccttatca

SEQ ID NO: 483685 - DNA, 201 bp, Homo sapiens
tatcctccctctttccttccttgtcttcccttcttgtccctcctctctgctaactatgtgagtttgccgtgtgtctggtactgatccaagaagtgaatatygaatattctttttggcaagcagaatgacctcagtaaagttttcaatctcaccatatccaggctccatggataaaaagcagtgattgtactaccgtgcagc

SEQ ID NO: 483686 - DNA, 201 bp, Homo sapiens
ctccattggaaaataatggcttttggagaatattatccacattgattgtctgcaccgttaacatgcctcaaattacttgtaaattctctactctactttcygtgaatacaaattgctgggcttgcagaatcagctgattgaatgtgactgaaaaaatagtattggctcaggttactatgctaactttgaattctgtgattt

SEQ ID NO: 483687 - DNA, 201 bp, Homo sapiens
tgcctgcaattaatacagtaacatgctgtacaggtttgcagcctaggagcaagcaactatgtctatagcctacgtatgtaggaggccataccatttgggtytgtgtaagcacagtctatgatgtttgtacaatgacagaatagcccaatgacgtgtttctcagaaggtattcctgccgttaagtgatgcatgactgtatat

SEQ ID NO: 483688 - DNA, 201 bp, Homo sapiens
gttattgggcctgtacctaaacctacagcttcccattgaaatacagatgtatcttagtatgtcctacagttcatctagaattggatagtgtcagtattgtrctcaattttttaaaccacttgttggtgaaaggagttaaattgaatacatgtctaagtagcttcctctcatcaataggctcattttctgacagattttctc

SEQ ID NO: 483689 - DNA, 201 bp, Homo sapiens
ttgggtttgtgtaagcacagtctatgatgtttgtacaatgacagaatagcccaatgacgtgtttctcagaaggtattcctgccgttaagtgatgcatgacygtatatggtaaatcttttatataatcaactattgattatctatctcaagattgacaatacaatagaaatcttctatttttaaactaataaacacaaattt

SEQ ID NO: 483690 - DNA, 201 bp, Homo sapiens
tatattttttggtgatgaaacacaggactgttctgatggctacatgtgcaaaatacactttcaaattaagaatgggtctgtgatgtcacatctaggagcayctacccatggacagacatgtcttcccatggaggtgagtagtttaatgcatcatgttcttttcagtctccgtaaagtatacatttaaaaatgtatacttta

SEQ ID NO: 483691 - DNA, 201 bp, Homo sapiens
gtccaattctaggaatttagcctcataaaatataatttttttcaacatttttcatttccaacattttccaataaatttgaaacatatggaaaaattgaaakaattttgcagtgaatatctatatacttaccacctaaagtctaccattaacattttgctgtgcttgctttattatatgttgatccctctgtctattaatac

SEQ ID NO: 483692 - DNA, 201 bp, Homo sapiens
taagatgttggtgtggtatgtattttggatttgtattcacagtcctctaattaagagatctagacatattagagttatgactttttaaattttaggctatygtgtccttccctgcctcatgagtctgtagtaagtagactgaaagtactccagtacatacatctaggtctgtgctcattcttactgacacagataatatta

SEQ ID NO: 483693 - DNA, 201 bp, Homo sapiens
cttttgatcctaaatatatgatgatcaaaagtctaaatttttttttttttacatttttcttctaaattagttgtatttgtagatagttgaacaaccatacsaaagatatgtagatatgtgaatggatatcaaacttgagggaagggtttttgtggagttagagagtactatttgcttagctcccgatgtttttattggatg

SEQ ID NO: 483694 - DNA, 201 bp, Homo sapiens
gcaggtagaatattatagaaagtgaggccctcgacaaaaaacaacctatcataaatttcctgaagcataaaactgagaatcagtaacaggagatgatctcmattgccaaggaacatattcaaagaatgatgatcttctgaggtaaccaggccttgaaatacactcatttgccctaaggattttattaggtggcttctagga

SEQ ID NO: 483695 - DNA, 201 bp, Homo sapiens
atactttctcccagtgtatgacttctttttattcttttaacagtttttcacagagtgagagtttttaatttgtatgaagtccaatttatttaaaaatacattatttatttatttatttatttatttatttatttatttatttattttgagacagagtctctctctgtcacccaggctggagtgcagtggcgtgatctcact

SEQ ID NO: 483696 - DNA, 201 bp, Homo sapiens
tggagaaaaaacattccaacgttattgtgcagaattcattaaacattcacaacagataggtgatagttgggaatggagaccatcaaaggtaagaatggaartgtttgttttctgtctcaaaagaggattttttgttttgttttgttttggtttgttgacaggtaaaacctccataattgaaattaaggtatgaaaactggt

SEQ ID NO: 483697 - DNA, 201 bp, Homo sapiens
attagcctagcaggcagtttcagagcctgctatacatgaaaaaagtcacaaatagatggatttgaacatgtatttaggactagtcaggcagggaaaaactrtagaaagaattgttcagatttttgatttaggcaaatcttacctgaagtaggatggaagtgacttgattaagtggaattgagctaatagctttttccctga

SEQ ID NO: 483698 - DNA, 201 bp, Homo sapiens
tactttctcccagtgtatgacttctttttattcttttaacagtttttcacagagtgagagtttttaatttgtatgaagtccaatttatttaaaaatacattatttatttatttatttatttatttatttatttatttatttattttgagacagagtctctctctgtcacccaggctggagtgcagtggcgtgatctcactg

SEQ ID NO: 483699 - DNA, 201 bp, Homo sapiens
tgcagaattcattaaacattcacaacagataggtgatagttgggaatggagaccatcaaaggtaagaatggaaatgtttgttttctgtctcaaaagaggaytttttgttttgttttgttttggtttgttgacaggtaaaacctccataattgaaattaaggtatgaaaactggtttgatttagtaaaagtcttaaattgaa

SEQ ID NO: 483700 - DNA, 201 bp, Homo sapiens
attcccaggccccaggacagtgtctagagcagacgatggcaactgtggcctgctgcctatttttttttttttttctctttagagacagggtgtcactctgwtacccaggctggagtgcagtgtgcaaccttgaactcctgggctcaagcaatcctcctgcctcagcctcccaaagcgctgggattgcagacatgagccaca

SEQ ID NO: 483701 - DNA, 201 bp, Homo sapiens
actttctcccagtgtatgacttctttttattcttttaacagtttttcacagagtgagagtttttaatttgtatgaagtccaatttatttaaaaatacattatttatttatttatttatttatttatttatttatttatttattttgagacagagtctctctctgtcacccaggctggagtgcagtggcgtgatctcactgc

SEQ ID NO: 483702 - DNA, 201 bp, Homo sapiens
tttgttgacaggtaaaacctccataattgaaattaaggtatgaaaactggtttgatttagtaaaagtcttaaattgaagaatgtcttacaacagatgtccwttttcttacttcaactatatatattgattattatcaggctaatgaagtattattttgaaaagtccttacgtaacctgcttaatttaatagataaaaatta

SEQ ID NO: 483703 - DNA, 201 bp, Homo sapiens
cattttttcatgtgtctgttggctgcataaatgtcttcttttgagaaatgtctgttcatatcctttgcccactttttgatggggttgtttgtttttttctkgtaaatttgtttgagttcattgtagattctggatattagccctttgtcagatgagttgattgcaaaaattttctcccattttgtaggttgcctgttcact

SEQ ID NO: 483704 - DNA, 201 bp, Homo sapiens
tgtaaatctttttatgtgactctaaatgctaggctaaaaaagaaatattaataataataatggctaacacaatgatttttaggatatgctagatgctgttmtaagagttttagatacagtaagacattggatttttgcagcattcctatgtgctaagtactattattttgcccaatttacagaggaggaagttacagaaca

SEQ ID NO: 483705 - DNA, 201 bp, Homo sapiens
ctttctcccagtgtatgacttctttttattcttttaacagtttttcacagagtgagagtttttaatttgtatgaagtccaatttatttaaaaatacattatttatttatttatttatttatttatttatttatttatttattttgagacagagtctctctctgtcacccaggctggagtgcagtggcgtgatctcactgca

SEQ ID NO: 483706 - DNA, 201 bp, Homo sapiens
gattacagatgtgagccaccacgcctggccaaaaccattttttagtggccttgaggccattctacatcccaaattttggtttattgacagaaataaatcarttggcagaattcctttcaatataattctaaagttgatgctaatacttagtttttgtattgcagttatcatttaacatggaagaagatgagttcattggag

SEQ ID NO: 483707 - DNA, 201 bp, Homo sapiens
aagaaagaactaaaaaagagacaaaacaacaacaacaaacccttttctttggaaataaaaacacttgaagaattatttggctgtaggagtccaccatttaktgtgtgtgtgtgtgtgtgtgtgtgtgtgtgtgtgtacgcacgcacatacccgtgaagatctgttttgtagctctgaatttacaaattggaagggttgcta

SEQ ID NO: 483708 - DNA, 201 bp, Homo sapiens
agtatggggaggagagaggagataccaaatttcatttgactcaagatctctcatagctcatgaaaatatacatcctgctatacagacttatgtttccaacygtagccacacaacacagtgttacagaaagcatacgattgaagccatacagcaagcattagatctgccttaagaaaatagtgattaagtttcaggcaagca

SEQ ID NO: 483709 - DNA, 201 bp, Homo sapiens
ctccacccatcaacccatcatctacattaggtatttctcctaatgttatccctcccattgtcccccacccccaaacaggacctggtgtgtgatgttccccwccctgtgccgtgcattctgattgttcaactctcatttataagcgagaacatgtggtgtttggttttctgttcttgtgttagtttggtaagaatgatggtt

SEQ ID NO: 483710 - DNA, 201 bp, Homo sapiens
taccgtagccttgtagtatagtttgaagtcaggtagtgtgatgcctccagctttgttctttttgctgaggattgtcttggctatgagggctctttttttgsttccatatgaaatttaaagtagttttttctaagtctgtgaagaaagtcactggtagcttgatgggaatagcgttgaatctataaattagtttgggcagta

SEQ ID NO: 483711 - DNA, 201 bp, Homo sapiens
aagctgccattgcagtgcaggtctatgacagggactactctttgggcaggggtatgagagaagaaagaaagaaagacaaaagaagtaatggggggctgggygtggtggctcatgcctgtaatcccagcgctttggaggccgaggcagatggatcacctgaggtcaggagtttgagaccagcctagccaatgtggcaaaacc

SEQ ID NO: 483712 - DNA, 201 bp, Homo sapiens
cggggcgcgctggctcggctcttcctccgccctcgaggcccccgcagtcccatcattcagttccgtagggtcaccggcgcggcagtggcctcgcagggcgytgggtccctctccccagctctcctccccctggccccgtcgccccgccctcgccgggctgggctgcggggtcaggggccgagcggagaggggtgagtattc

SEQ ID NO: 483713 - DNA, 201 bp, Homo sapiens
ttgtgaaaagagagccatttcaataaatggtgctgagcaattggacatccctaggcaaacaaacacaaacaaagaaacaaacataccctgacctcagtctyacacattttacaaaaattatctcaaagtggattgtggatttaaaggtaaaatataaaactgtaaaacttttaggaagagaaaaaaatagagaaccttggg

SEQ ID NO: 483714 - DNA, 201 bp, Homo sapiens
atttttagattatcagtctgtacatgcattgtgacttttaatgtttattaaatgttgatgctatgggtaccatacatggtcagggtactttccatattcattttttttttttttttttcagacagagtcttgctctgtcacccaggctggagtgcagtgacatgatctcggctcactgcaaccctcgcctcccaggtcaag

SEQ ID NO: 483715 - DNA, 201 bp, Homo sapiens
tttttttttcagacagagtcttgctctgtcacccaggctggagtgcagtgacatgatctcggctcactgcaaccctcgcctcccaggtcaagtgattcttrtgcctcagcttcccaagtagctgcgattatagtcatgcgccaccatgcgtgtatttttagtagagaaaaggtttctccccattagcttggctggtcttga

SEQ ID NO: 483716 - DNA, 201 bp, Homo sapiens
taaatttggtgactatacttgcactatcctaactcagaaatacaatagctttatcactgactttaagcaatttgattatgcttggtgtagttttcttcatrtttcttgttcttgaggttcattgaacttgttacatatgtggttttataattttaaacatatttatctctctccccatttctcttctttggggactccaat

SEQ ID NO: 483717 - DNA, 201 bp, Homo sapiens
gtcttactaatgtggaacagtccatattagctccagagagtgtcaaacccagagacatgtgtgcaaaaatgatactcttttctgcattagccccaccattktgttcaccaatgcttggaacactgcctgaaggcactcattttttaatttttattttatttttaattttttatatctttatgagacgatctcactctgtca

SEQ ID NO: 483718 - DNA, 201 bp, Homo sapiens
cttcaactcacagacgacctcagatgtagctgctctctcaggccttcaatgtacgtctccacccaaatgagtaatatttgcattacaaggaggaaaggagrgagggaaccatcgggtacctgctgtaccaggcacattatatgctattgtccctgttttccagatgaagccagatactcctctatgaagttaaatgactgg

SEQ ID NO: 483719 - DNA, 201 bp, Homo sapiens
cctacatcatgtgttgatgtcacagatgctgtaccaggcatttgactccttgatctaaagccaggattcctagccaacatggcgaaaccctgtctctactraaaataacaaaaattagctgggcatggtgataggcacctgtaatcccagctacttgggaggctgaggcaggagaattacttgaacccaggaagcgaaggc

SEQ ID NO: 483720 - DNA, 201 bp, Homo sapiens; identical to SEQ ID NO: 49827

SEQ ID NO: 483721 - DNA, 201 bp, Homo sapiens
actgatggggtccctttctcctgttgcaacccccactcaccccggccttgcctgcaaaaccgtctttcagactcctacgcccaccccctgttcgatccccracaacccaaccaaaacctctgggcccaagggtgccatgaggtgctgctggagcacttgcaggacttggcaggcacactgggtagcatgctggctgtcacc

SEQ ID NO: 483722 - DNA, 201 bp, Homo sapiens
gctgctggcgctggctggtggcgtcatcctcctctgtagtgggcacctcctggtccagctaaggcaccttggcaccttcctggctccctcctgtcagttcmctgtcctgccccaggctgccctggcagcgggcgcggtggctctgggcacaggactagtgggtgtaggagccagccgggcaagtctgaatgcagctctata

SEQ ID NO: 483723 - DNA, 201 bp, Homo sapiens
cgggcaagtctgaatgcagctctataccctccctggcgaggggtcctgggcccgctgctggtggctggcacggctggtgggggggggctcctggtcgtcgscctcgggctagccctggctttgcctgggagtctggatgaggcgctggaggagggcctggtgactgccttggctcactacaaggacacagaggtgcctggg

SEQ ID NO: 483724 - DNA, 201 bp, Homo sapiens
gcacatagtacagcagtcagtaaatgttttactattctttttcccttctgaacacctgtgcccttcagtccctcccccaggcctctatctccagacatcctaacccctctgtccctccctttgcagccggatccagagcaatgtagaaggcctatacctgactgatggggtccctttctcctgttgcaacccccactcacc

SEQ ID NO: 483725 - DNA, 201 bp, Homo sapiens
ccctctgtccctccctttgcagccggatccagagcaatgtagaaggcctatacctgactgatggggtccctttctcctgttgcaacccccactcaccccgsccttgcctgcaaaaccgtctttcagactcctacgcccaccccctgttcgatccccgacaacccaaccaaaacctctgggcccaagggtgccatgaggtgc

SEQ ID NO: 483726 - DNA, 201 bp, Homo sapiens
cactcaccccggccttgcctgcaaaaccgtctttcagactcctacgcccaccccctgttcgatccccgacaacccaaccaaaacctctgggcccaagggtrccatgaggtgctgctggagcacttgcaggacttggcaggcacactgggtagcatgctggctgtcaccttcctactgcaggtgagtcagcaaagcatctga

SEQ ID NO: 483727 - DNA, 201 bp, Homo sapiens
ggcacaggactagtgggtgtaggagccagccgggcaagtctgaatgcagctctataccctccctggcgaggggtcctgggcccgctgctggtggctggcayggctggtgggggggggctcctggtcgtcggcctcgggctagccctggctttgcctgggagtctggatgaggcgctggaggagggcctggtgactgccttg

SEQ ID NO: 483728 - DNA, 201 bp, Homo sapiens
ggtgtaggagccagccgggcaagtctgaatgcagctctataccctccctggcgaggggtcctgggcccgctgctggtggctggcacggctggtgggggggrgctcctggtcgtcggcctcgggctagccctggctttgcctgggagtctggatgaggcgctggaggagggcctggtgactgccttggctcactacaaggac

SEQ ID NO: 483729 - DNA, 201 bp, Homo sapiens
ctcagggtattggggtcagggtggcattagcccagctcaagccgggccgggctgactcagcatcctgccccagccagcttccatccctgacacctctgcaytcccttgggcagagatgggagatggcgccggtgttgcccctggtgctgcccctgcagccccgcatccgcctggcacaagggctctggctcctctcctggc

SEQ ID NO: 483730 - DNA, 201 bp, Homo sapiens
ctcctggtccagctaaggcaccttggcaccttcctggctccctcctgtcagttccctgtcctgccccaggctgccctggcagcgggcgcggtggctctggrcacaggactagtgggtgtaggagccagccgggcaagtctgaatgcagctctataccctccctggcgaggggtcctgggcccgctgctggtggctggcacg

SEQ ID NO: 483731 - DNA, 201 bp, Homo sapiens
ctgaggcatgagaatcgcttgaacctagcaggcagaggttgtggtgagctgagattgcactccagcctgggcaacagagcaagaccctgtctcaaaaaaaraaaaaaaaaaaaaaaaggccgggcacaggagcttacacctaaaatcccagcactttgggaggtggaggccggcggatcacgaagtcaggagtttgagacc

SEQ ID NO: 483732 - DNA, 201 bp, Homo sapiens
aggagaatggtgtaaaacctgggaggtggagcttgcagtgagccaagatcgtgccactgggcgacagagcgagactcggtctcaaaaaaaaaaaaaaaaawgttggacattcaggttgtattcagggccatatgcaggtatatgtgaatgagtttctgtaggttacatttatagaaatagaattgctagatcaaagaatat

SEQ ID NO: 483733 - DNA, 201 bp, Homo sapiens; identical to SEQ ID NO: 252869

SEQ ID NO: 483734 - DNA, 201 bp, Homo sapiens
tgagtttctgtaggttacatttatagaaatagaattgctagatcaaagaatatgaacattaaaattgtaaaacatgaataaggtgatacactgtcttccaraagaataccgcattcatgttttacaattttctggtggatccaatgcagtctgggcccttccttttaggttgcactccaggacttgcagacgaactccaag

SEQ ID NO: 483735 - DNA, 201 bp, Homo sapiens
ctccccccgcgcaccccctccccgatctgggctgggctaggccgggtgggaggatgcgcgttgccgaggcccggcccgcggaggtcagttcccacgcctcstctccagcgtgactagtggctgaggatgcggaggagaggaggctgaggagcgggagactttggtcacagtctagatttcgtgtacggtcatataataggg

SEQ ID NO: 483736 - DNA, 201 bp, Homo sapiens
gcgattctcctgcttcagcctcccgagtagctgggattacaggcgctcaccaccatacctggctaattttttgtatttttagtagagacggggtttcactrtgctggccagggctcgtctcgaactcctgacctcctgatccgcctgccttggcctcccaaagtgctgggattacaggcgtgagccacagcgcccggctgg

SEQ ID NO: 483737 - DNA, 201 bp, Homo sapiens
aatccatataaagcacttagctgtgtctcaggcatagtacagtgctattcgtggccgggcgcggtggctcacgcctgtaatcctagcactttgggaggccraggcacctggattgcctgagctcaggagttcgaggccagcctgggcaacacggtgaaacctcgtctctactaaaaatacaaaaaattagctgggcatggc

SEQ ID NO: 483738 - DNA, 201 bp, Homo sapiens
gaggagtgctgcacagaagccacatagctgtccattggatgtagggacctggacgtcactggtgacccattgatcccctgccagaggagtagtgggggcartgcctgggtgggtcatcctggatctgggccttcctgtctgaggtgtggatgcatcactttggcgcacgggagcctaccttctggtgctgtgcgttgttgg

SEQ ID NO: 483739 - DNA, 201 bp, Homo sapiens
ccaaacacataggcagaaagcccagctactatccagcctggccaacatggcgaaatcttgtttctactaaaaatacaaaaattagctgggcgtggtggcaygtgcctgtaatcccagctacttgggaggctgaggcaggagagttgggggcaacaagaacaaaactccgtctcaaaaaaaaaaaaaaaaaaaattagccag

SEQ ID NO: 483740 - DNA, 201 bp, Homo sapiens
ggcagtagaacgagtcctgtacccacacctgtccacctactggacaaacttgcaggctgtgctggatgattattcagtatctaatgcccaggtcaaagcasatggacacaaagtctatggagccattctggtgagtaccgtccccttccagcctcccttccctgcatgagcttagcagccaagcaggcttactttggaata

SEQ ID NO: 483741 - DNA, 201 bp, Homo sapiens
caggaaactgaggcatgagaatcgcttgaacctagcaggcagaggttgtggtgagctgagattgcactccagcctgggcaacagagcaagaccctgtctcmaaaaaagaaaaaaaaaaaaaaaaggccgggcacaggagcttacacctaaaatcccagcactttgggaggtggaggccggcggatcacgaagtcaggagtt

SEQ ID NO: 483742 - DNA, 201 bp, Homo sapiens
tttcccttgacccagggagccccggatgctccaggcaagtccccagtggtggctctgagtcccaggcttccaccacttttcttgggacttctggacttccytcaaacgtgggctctctgctctggtcagtggagcctcatcctggatcctgacgcctgctccctccctggattcaggctgctctccaattccctttttcct

SEQ ID NO: 483743 - DNA, 201 bp, Homo sapiens
ctggtcttgaactcctgacctcaggtgattcgcccgccttggcctccgaaagtgctgggattagaggcgtgagccactgggtccagctacaaattcttacractggtttggaggcagaatgcaaggacattggaggatctaggaagacatccctgagcaagtgacatttgaactgaaatctgaaggagtgagtagcagttc

SEQ ID NO: 483744 - DNA, 201 bp, Homo sapiens
aaacatgtttcctctcatgtactgtccttgtctggttttagaatcagggttatactggccttacagaatgatgtggggagtatttcttttttatatttacyttaataagatttagatcatctttttcttttctttttttatttaatagagatgaggtcttcctacattgcccaggctggtctcaaactccttggtttaagt

SEQ ID NO: 483745 - DNA, 201 bp, Homo sapiens
ccgccccgcccgccggtgggcgctctcggactactcgctgtacttgccgctctgagtcagtggccccttcgttccttgtaaataaatcccgcccccggaartgacgtctccaccttcgtgggtcgcgccggataaggtgggctttgggcggggtgctgctgcagcggcgcttcctggtggtcagggcgccatggcgctgtc

SEQ ID NO: 483746 - DNA, 201 bp, Homo sapiens
ttgtttgaactgagtctcagtttacatctaagtgaagccagtacttgcctgattgtatagggtagcagtatgcaaactaaattttggagttgtcagtaatragcattatttagcacacagggcagtgatattgggtatattttttattgtctccctttgtaccttatctttattcccaatgcctagcttaggtatacagta

SEQ ID NO: 483747 - DNA, 201 bp, Homo sapiens
gtttccttctctgagcctcactttcctcatctgggtactcagagctccttgtttagaaactccagagcacgagcagcaaggctggtgtggagggtgttggrtcacactcctgggctctccgggaggctgggcagcttttccagtcttcattctccactcccagctccactggggccatgtcagagcgagaagagcggcggt

SEQ ID NO: 483748 - DNA, 201 bp, Homo sapiens
gctctcagttcatgaagcacaccaaacgccggaagctgacggttgaggacttcaacagggccctcagatggagcagcgtggaggtgagtggggtgcaggcyacagagggctcaggtggcatgaggccacttccatgtccagttcagggctggcgatgtggtgagacattaagaccaaacgctgccgggcatggtggctcat

SEQ ID NO: 483749 - DNA, 201 bp, Homo sapiens
gccactgggtccagctacaaattcttacgactggtttggaggcagaatgcaaggacattggaggatctaggaagacatccctgagcaagtgacatttgaastgaaatctgaaggagtgagtagcagttcactagacaaagggattgggggtggaggacagggaggagagagttccaagtggaggaagcagtgttcaaaggt

SEQ ID NO: 483750 - DNA, 201 bp, Homo sapiens
accatgcggggaactagggcagaggccggtgagaagggtgggctcgggtcgtggggggattgtggcaggaggagggcagctcagcacagggagggaggatytgagcccagcagccctactgtgtgcttcagagcagggttccctaagcccttgggcctcggtttcctcatctataaaatagaggtggcaggaggggcagtc

SEQ ID NO: 483751 - DNA, 201 bp, Homo sapiens
tcctcacaaagccaagcccgctgcagctgccacatccctggacacactcgtttcctcacaaagccaagcccgctgcagctgccacatccctggacacactyggttcctcaaaaagccaagccggctgcagctgccacatccctgggtttatgatgcagcaggtgcttttttcaagacaggaatcaaagtgttaggaacatg

SEQ ID NO: 483752 - DNA, 201 bp, Homo sapiens
aggctctgcttgcatgggagagccagagaattaacaaataaatgaataaacaagaaaagaccagatgagagtggctttaaagccaataaaacagggaaatrgtgaatggagcaactggggagaagagtcaccaaagtcggggaatcagggaagccttccccaaagaggtggcatttgaactggggcctgagtggtgaagca

SEQ ID NO: 483753 - DNA, 201 bp, Homo sapiens
atgcccgcgctgcatgctaacttgggctcaccctcaacacccacgaggtgggtactattattatcactcacatttaaccagagggattgtttgattagggkgcagtagttgagagttcacacccaggagacagcctgcctgcttcgaatcctggcccaagccctggccctgtgtgaccttgggcaagtgactgcatctctc

SEQ ID NO: 483754 - DNA, 201 bp, Homo sapiens
cagcctgcctgcttcgaatcctggcccaagccctggccctgtgtgaccttgggcaagtgactgcatctctctgtgctgttgttttcttattaataaaatgrgggatataatgatacctacctcttagggttgtcgtcagggttgagtacaaaagcctgtggatcagtgcctggctcatgataaatgcatgtcggtgttagc

SEQ ID NO: 483755 - DNA, 201 bp, Homo sapiens
ggacatgatggggcttccagaagagttactctgggcctccagggtgacatcaaaggacaggggtgcctcttaagctgaccttcaagccacagccctcttgktggagacaggcatactcccgttacagtcgtcaccacatggctctgtcccagagccatgcctgtgtgtttcagagaccacaggaggaaaacaaccacttct

SEQ ID NO: 483756 - DNA, 201 bp, Homo sapiens
tttcctcacaaagccaagcccgctgcagctgccacatccctggacacactcggttcctcaaaaagccaagccggctgcagctgccacatccctgggtttaygatgcagcaggtgcttttttcaagacaggaatcaaagtgttaggaacatggcagaaaggtgacacctggagaccaaatgcagggtaaggagtactgcaga

SEQ ID NO: 483757 - DNA, 201 bp, Homo sapiens
catctgtatgtcgagcactgcacagaattagctcatgcgctgaggctttcacacctgtgatggaagagacagagaagggggtggcctctcctctccctggrgacctgccattctcagcacaggcccatggcaggcagcagcctcccttctgccagtagaggggcttaatgcacctggccccatttgtaattcatgtgcggt

SEQ ID NO: 483758 - DNA, 201 bp, Homo sapiens
gaattagctcatgcgctgaggctttcacacctgtgatggaagagacagagaagggggtggcctctcctctccctggagacctgccattctcagcacaggcscatggcaggcagcagcctcccttctgccagtagaggggcttaatgcacctggccccatttgtaattcatgtgcggtgagctcactgggatgagtcagttt

SEQ ID NO: 483759 - DNA, 201 bp, Homo sapiens
cacctccaacagctccagctctttcattttctatctaagacttagacaaagatatcagaatatacaaaattctgcatgagaggggggaatctagggaaagytttttaaaccccccacagcaaaaacagagatgacaggtgcaaaacagcttctaacatttggtagatgctcagagactttcttttttgcattcgtgaggcc

SEQ ID NO: 483760 - DNA, 201 bp, Homo sapiens
aaaaccacaaaggaaaaacatagcatattgaatcatcacaaggcagccaccccttcatagccacacccggcccctggccacaactgacctgtgctccatcrccagaattccattgtctcaggaatgttcaatgaatggaatcctgtgtggcctgagatgagtgtctttcatgccacgtgacacccttgaggcctgtgcaag

SEQ ID NO: 483761 - DNA, 201 bp, Homo sapiens
aaaaacaaaaattagctgggcgtggtggtgcacgcctatagtcccagctactcgggaggctgaggcaggagaatcgcttgaacccaggaggcagaggctgyggtgagccaagattgggccactgcactccagcctgggcaacagagcgagactctgtgtcagaaaaaatgaaaaaccagcaccagcctgaagagcctgtgt

SEQ ID NO: 483762 - DNA, 201 bp, Homo sapiens
ccaccccttcatagccacacccggcccctggccacaactgacctgtgctccatcgccagaattccattgtctcaggaatgttcaatgaatggaatcctgtrtggcctgagatgagtgtctttcatgccacgtgacacccttgaggcctgtgcaagctgttggcatgtcaacagttagctgcttctcattgctgagtggcga

SEQ ID NO: 483763 - DNA, 201 bp, Homo sapiens
caaagccaagcccgctgcagctgccacatccctggacacactcgtttcctcacaaagccaagcccgctgcagctgccacatccctggacacactcggttcytcaaaaagccaagccggctgcagctgccacatccctgggtttatgatgcagcaggtgcttttttcaagacaggaatcaaagtgttaggaacatggcagaa

SEQ ID NO: 483764 - DNA, 201 bp, Homo sapiens
gccacaactgacctgtgctccatcgccagaattccattgtctcaggaatgttcaatgaatggaatcctgtgtggcctgagatgagtgtctttcatgccacrtgacacccttgaggcctgtgcaagctgttggcatgtcaacagttagctgcttctcattgctgagtggcgatttgtcctgtcatggtttattcagccatgt

SEQ ID NO: 483765 - DNA, 201 bp, Homo sapiens
tcctgtccccagggacacacgctgaaagagagcagttgccgagtgggccttccctcctcttccatagagccagacagttggcgactgtctttactgcaaaygctggttcacactggctcccctgggagggaggtggtttgggcccacctgccctgtgttcctgctcagaatgggcattagaaatgctgccatagcctgtgc

SEQ ID NO: 483766 - DNA, 201 bp, Homo sapiens
gccaagcccgctgcagctgccacatccctggacacactcgtttcctcacaaagccaagcccgctgcagctgccacatccctggacacactcggttcctcamaaagccaagccggctgcagctgccacatccctgggtttatgatgcagcaggtgcttttttcaagacaggaatcaaagtgttaggaacatggcagaaaggt

SEQ ID NO: 483767 - DNA, 201 bp, Homo sapiens
gcaagatgtgccacccccgggcatacatcttcagggactgtcacagctgggtcctctagcagctctgagggaatgtccttctcaatggcctctcattaggkgcagatatcactgccaacttagacagccccagggtgacagtggcccagctggactgggacgtcgcgacggtctgtcagctctctgccatccagccagatg

SEQ ID NO: 483768 - DNA, 201 bp, Homo sapiens
gcctcagtgttctcatctgtatgtcgagcactgcacagaattagctcatgcgctgaggctttcacacctgtgatggaagagacagagaagggggtggcctytcctctccctggagacctgccattctcagcacaggcccatggcaggcagcagcctcccttctgccagtagaggggcttaatgcacctggccccatttgta

SEQ ID NO: 483769 - DNA, 201 bp, Homo sapiens
aagggggtggcctctcctctccctggagacctgccattctcagcacaggcccatggcaggcagcagcctcccttctgccagtagaggggcttaatgcaccyggccccatttgtaattcatgtgcggtgagctcactgggatgagtcagtttggatatatattcctccctgggtctgccccattttatgggtgttgcttaat

SEQ ID NO: 483770 - DNA, 201 bp, Homo sapiens
cagctgccacatccctggacacactcgtttcctcacaaagccaagcccgctgcagctgccacatccctggacacactcggttcctcaaaaagccaagccgrctgcagctgccacatccctgggtttatgatgcagcaggtgcttttttcaagacaggaatcaaagtgttaggaacatggcagaaaggtgacacctggagac

SEQ ID NO: 483771 - DNA, 201 bp, Homo sapiens
tcccgcaggttcttccagaactggtttagcttgcctgcaggatcaggaaagtttgagaaaagcatctgcaaaatactaaagagcagagcttacttcattgyctgtccccaccccatcccaggtcaccacctggctgaacccaggtccccgacccaacaacaacccctcccaagtccctaactccctcacttggacttgaga

SEQ ID NO: 483772 - DNA, 201 bp, Homo sapiens
aggcaactggctgcagccgcgtgtgacccatgggagacagtgcagggcgggaagaagggaaggccagcgtctctccctcactctgcctcctggggtttccrcagcagctgcttctctggggccccagctcctagcatatggattctcattcctaccaggctggcccagcccacagcactggaaccctcactcacaccctct

SEQ ID NO: 483773 - DNA, 201 bp, Homo sapiens
ggtgtccttgcagctctaaccagctcttggctctgggaaaagggaacaatggatgctgttgggcatggacatgatggggcttccagaagagttactctggrcctccagggtgacatcaaaggacaggggtgcctcttaagctgaccttcaagccacagccctcttgttggagacaggcatactcccgttacagtcgtcacc

SEQ ID NO: 483774 - DNA, 201 bp, Homo sapiens
ttagcactcagagatcatttctggtcaggagaaatttgtgcatttttaacccaaaatagaaaccttcataaaagcatcataggtctccattcaatattgaytataattgttcacatgcccgcgctgcatgctaacttgggctcaccctcaacacccacgaggtgggtactattattatcactcacatttaaccagagggat

SEQ ID NO: 483775 - DNA, 201 bp, Homo sapiens
ccagcgtctctccctcactctgcctcctggggtttccgcagcagctgcttctctggggccccagctcctagcatatggattctcattcctaccaggctggyccagcccacagcactggaaccctcactcacaccctctgtcctgcccgccgaagggtttggagtttcctgctcttgtccatctctgggttgccccacgggc

SEQ ID NO: 483776 - DNA, 201 bp, Homo sapiens
gaaaacccctcacccctgccagcacgctcagtctcctctctggtcgaacagagctctgcctgtggtcctgggtcccagccctgaaaatcacaggtccagcrgtggccagggacacaggcccacccctgcaagccagcagacaaatccgcagacacctgaaacacgaagttcatcgcagggtcaggctttgtgtcattcaca

SEQ ID NO: 483777 - DNA, 201 bp, Homo sapiens
taccctttaaaaacacccctgttcaaggaacaaaaccattgagtcagcactgcaggtgggtgtcggcacctccaacagctccagctctttcattttctatmtaagacttagacaaagatatcagaatatacaaaattctgcatgagaggggggaatctagggaaagttttttaaaccccccacagcaaaaacagagatgac

SEQ ID NO: 483778 - DNA, 201 bp, Homo sapiens
taaatgaataaacaagaaaagaccagatgagagtggctttaaagccaataaaacagggaaatggtgaatggagcaactggggagaagagtcaccaaagtcrgggaatcagggaagccttccccaaagaggtggcatttgaactggggcctgagtggtgaagcagccagccatgggaagggcttggggaacaggatatgcaa

SEQ ID NO: 483779 - DNA, 201 bp, Homo sapiens
ttttacagattagaacgaaagcaaacaagctctcactctgtctgcccccagcacgaggctgtccacacagagcctttggatgagctgtacgaggtgctggyggagaccctgatggccaaggagtccacccagggccaccggagctatttgctggtatgagaaggacaccctcctccccctcacagcccagatacccttccc

SEQ ID NO: 483780 - DNA, 201 bp, Homo sapiens
gaaaagcatctgcaaaatactaaagagcagagcttacttcattgcctgtccccaccccatcccaggtcaccacctggctgaacccaggtccccgacccaamaacaacccctcccaagtccctaactccctcacttggacttgagacccttcacaacccagcagcgctccgcctccaacttgacatcatgctttctggaaac

SEQ ID NO: 483781 - DNA, 201 bp, Homo sapiens
gagccagagaattaacaaataaatgaataaacaagaaaagaccagatgagagtggctttaaagccaataaaacagggaaatggtgaatggagcaactgggragaagagtcaccaaagtcggggaatcagggaagccttccccaaagaggtggcatttgaactggggcctgagtggtgaagcagccagccatgggaagggct

SEQ ID NO: 483782 - DNA, 201 bp, Homo sapiens
aagccagcagacaaatccgcagacacctgaaacacgaagttcatcgcagggtcaggctttgtgtcattcacagccctctagataggccgagaaccagagcwcgttttttaaggaacaccagtgagtctggagatttttttcttttgcttcagtcttttgcagctttctctattaagggttctcctttttcacccaagtaat

SEQ ID NO: 483783 - DNA, 201 bp, Homo sapiens
ctcaccctcaacacccacgaggtgggtactattattatcactcacatttaaccagagggattgtttgattagggtgcagtagttgagagttcacacccagsagacagcctgcctgcttcgaatcctggcccaagccctggccctgtgtgaccttgggcaagtgactgcatctctctgtgctgttgttttcttattaataaa

SEQ ID NO: 483784 - DNA, 201 bp, Homo sapiens
agtttgagaccagcctggccaacatggtgaaactctgcctttactaaaaatacaaaaattagcttggtgtggtagtgggcgcctgtaatcccagctactcrggaggatgaggcaggagaatctcttgaacccaggaggtggaggttgtagtgagccaagatcgcgctattgcactcccacctgggcaacgagagtgaaact

SEQ ID NO: 483785 - DNA, 201 bp, Homo sapiens
ctctacatgctgtacgttcccctgtgagcaccctcctctcagcctctggccaacacagtcccacccatctgtgggtaacaagggggtgtgggtgttctttkcagccttgctaaactgtctgaatcaaggatcacaaactacagcctgcaggccaaatccagcccacagcctgtgtttgtaaataaagctttattggaacaa

SEQ ID NO: 483786 - DNA, 201 bp, Homo sapiens
ttgcctttccatctaatggcccaaatgatcaaatggcatctactagtctcatatgaccgctgcctctctggcctcgcccttctgctgaggtcagcatgacmtggaactgtccgctggtccctttcagtaacctgaagctttcaccgtagacgtgctgtattgcccagaagccatcgtgtcgctggtcggggtcctgcggag

SEQ ID NO: 483787 - DNA, 201 bp, Homo sapiens
cttggtgtggtagtgggcgcctgtaatcccagctactcaggaggatgaggcaggagaatctcttgaacccaggaggtggaggttgtagtgagccaagatcrcgctattgcactcccacctgggcaacgagagtgaaactgtcaaaaagaagtagaaaaattagccagacatggtgacacatgcctgtagtcgcacctactt

SEQ ID NO: 483788 - DNA, 201 bp, Homo sapiens
attttccaaccacgtagatcaatatttactcatcatgaccataaaatgcagtttagccatatagaaaactatgattacttttctttataatttcccttcasttaatacttattttattttctgtttttatcatctagtcaactcgcaaacttccagcatttgtctaaatctactcaatatattccagtacatcagataata

SEQ ID NO: 483789 - DNA, 201 bp, Homo sapiens
acggagtttcactgtgttggccaggatggtcttgatctcctgacctcgtgatcctccggcctcggcctcccaaagtgctgggattacaggcatgagccacygcgctatggacactgtttctgagaaaatgagtaacagggcctttggtacctcctctgcatctgctctgccccttgtacttctgctttcctgattgggtgg

SEQ ID NO: 483790 - DNA, 201 bp, Homo sapiens
tctaagcaccaggcaaatgctcttcattgtgtaacaactagtaagtagagaaagaaaaaatattttctatctcttttgtcatggtttatgtcgtagcttayttaaaaatttcaattagaatcttttatcatgttattccaggattgttccataattataaaatgaaatgattatgtaataagtgtctggtggtagatttac

SEQ ID NO: 483791 - DNA, 201 bp, Homo sapiens
gtgatctcggctcactgcaagctccaccccccgggttcacaccattctcctgcctcagcctcctgagtagctgggactacaggcacctgccaccatgcccractaattgttttttctatttttagtaaagacggagtttcactgtgttggccaggatggtcttgatctcctgacctcgtgatcctccggcctcggcctccc

SEQ ID NO: 483792 - DNA, 201 bp, Homo sapiens
ttgatacattctaaacaggctgttgttgccaaatttacctaacgcttggtaagattttataaaggttggctgaagatcaagacacgctaaaacagattttkgttttttgtttttttttttttttgcttccttaatatttctttactcttttccttgttacatttatctaattgcacttcactattgagaacatgttcaaga

SEQ ID NO: 483793 - DNA, 201 bp, Homo sapiens
ggggcagcccccgcatagaggagatgcgagctctgcgctctgccagggccccgagcccgtcagaggccgccccgcgccgcccggaagccaccgcggccccyctcactcctagaggaagggagcaccgcgaggctcacggcagggccctggcgccgggcagggcgagcctcggaagccgcctggaggtaactgggcgagggc

SEQ ID NO: 483794 - DNA, 201 bp, Homo sapiens
ataagtttttaaactataggtctgttcaggacctctcatgtgccagtgtggactatgaaacatactgtttgggaaatgctacatacagttaaccccctttyccccccttttttttttctcaggatggagtctcactctgttacccaggccggagtgcagtggcgcagtctcggctcactgcaacctccacctcccaggttc

SEQ ID NO: 483795 - DNA, 201 bp, Homo sapiens
aagtgtttttcccaaataaaatttacagccttcttttttcttcataagactagataagaataccagtccttgtaaacagggaggactgctttgctgttgayatatggttacatggctatgatagttcagtttttgcctcttccctatatgctacccttttggtgtcagggagacttttttgttgttcattgttttgttttt

SEQ ID NO: 483796 - DNA, 201 bp, Homo sapiens
cttgttcagaggatttctaatgtacctaatctgtcaactctgggcctttacaaaggtgagtaagggagcaatgatacctctgaactactgtggaagagaartgcttcataatgaactgagaaaatccacataaaattccttagaaaaagttaaaacgcatacaaatgcaagatgtaatagtattaggcctaggaagctggc

SEQ ID NO: 483797 - DNA, 201 bp, Homo sapiens
tgatacattctaaacaggctgttgttgccaaatttacctaacgcttggtaagattttataaaggttggctgaagatcaagacacgctaaaacagatttttkttttttgtttttttttttttttgcttccttaatatttctttactcttttccttgttacatttatctaattgcacttcactattgagaacatgttcaagat

SEQ ID NO: 483798 - DNA, 201 bp, Homo sapiens
cagaatccaaagtgaaaatgaattatgtcaagaaaagacctaacatatgcttaagtccaattaatttattttttctttttttgagacagggtctcagtctkttcaacccagatgccatcatagctcactgcagccttggtctcctgggctcaagtcattttcccacctcagcctctcgagtagctagtagctaggaccaca

SEQ ID NO: 483799 - DNA, 201 bp, Homo sapiens
gccaaatttacctaacgcttggtaagattttataaaggttggctgaagatcaagacacgctaaaacagatttttgttttttgtttttttttttttttgctyccttaatatttctttactcttttccttgttacatttatctaattgcacttcactattgagaacatgttcaagatttgatgtgacagaaggggatggaaag

SEQ ID NO: 483800 - DNA, 201 bp, Homo sapiens
aagattttataaaggttggctgaagatcaagacacgctaaaacagatttttgttttttgtttttttttttttttgcttccttaatatttctttactctttyccttgttacatttatctaattgcacttcactattgagaacatgttcaagatttgatgtgacagaaggggatggaaaggacagaagtggtttttaccaacc

SEQ ID NO: 483801 - DNA, 201 bp, Homo sapiens
gaagaggggatactgtattttttcttgagtagactttatggctagccatttaatacattctgaaaaatggtcagatgacatcacatagaaaaattacctcmaaatggatcaaagaactaaagctataaaactcttagaaaagaaagaaaggtttaaatcttcatgaccttggattaggcaatgttttcttggatatgacat

SEQ ID NO: 483802 - DNA, 201 bp, Homo sapiens
atcacatagaaaaattacctcaaaatggatcaaagaactaaagctataaaactcttagaaaagaaagaaaggtttaaatcttcatgaccttggattaggcmatgttttcttggatatgacatttaaagcacaagcaacgaaaggaaaagtagagaaattggatttaatcaatattaaaaactcttatgcttcaaaagatga

SEQ ID NO: 483803 - DNA, 201 bp, Homo sapiens
gattaggcaatgttttcttggatatgacatttaaagcacaagcaacgaaaggaaaagtagagaaattggatttaatcaatattaaaaactcttatgcttcmaaagatgatactaagaaagtgaaaagatcaattatacctaaaaaaaaaaaagctggaaaatgaaggtctctagttccaaaactcagaaaaaaaaggtgaa

SEQ ID NO: 483804 - DNA, 201 bp, Homo sapiens
tgtcttatctgggggaccaggtgatgaatgaagggtgtgcaaggctaccagagaggcccagagcttcatatctcaatgcgggtagttccttgataagaccmatttcaagataggagaaagatttatctatgacacgagattttccaagctaaagccaaaaaaaaaaccaagttctgtctcaagataaaaatatttagaaaa

SEQ ID NO: 483805 - DNA, 201 bp, Homo sapiens
gtttgtcagtccttccccctgcctttctggcctttgtccctcagtggctactccattctttaaaaaatctacccagtctctgcctcctgcttcatacttayggatctcttttctcagtaaactcacccaacttgcaccctcccactgcagaacctcatcagtgtggggacccatttcctccaggctcacagtgggatcgtc

SEQ ID NO: 483806 - DNA, 201 bp, Homo sapiens
cttaaaatattgtgtgtagtctttactgcattagaacttagaaataatagctaatatctgttaagcatttgctatttgccaagtactgtgttaagcatttkgcacatatttttatttaatttttttttttttttagtagagatggggcctcactatgtttccagggctcaagcgattctcccaccttggcctcccaaagtg

SEQ ID NO: 483807 - DNA, 201 bp, Homo sapiens
ttttaggccatttgtgattcatgggccccctcacacaatgctgacctttgaatgaatttggaaatttgctcagaaccaaagattaattttagtggaggaartatacttgagaataagaaacaggctggtcatgatatctcacacctgtagtcccagcactttgggaggccaaggcagaaagattgcttgaggccaggagtt

SEQ ID NO: 483808 - DNA, 201 bp, Homo sapiens
catagattatttattttactggtttaagttaaaattgctcagaaacaatcttatttttctcttgattttaatctactttgtcacagctaaattatattacmttgagctttacctactttttttttcccaagtctaaattttggcagtagcaaaaaaaaaaaaaaaaaaggaaaaatgatgaatggtgcatactgtgattag

SEQ ID NO: 483809 - DNA, 201 bp, Homo sapiens
gagctttacctactttttttttcccaagtctaaattttggcagtagcaaaaaaaaaaaaaaaaaaggaaaaatgatgaatggtgcatactgtgattagttkgaaaatatctcttccatttggctttcatgcttttatcatttttgcctgttgtctttgagggaaacctgatgcagtgagtggctctgaagcatgaattttc

SEQ ID NO: 483810 - DNA, 201 bp, Homo sapiens
ccacttcagcctcctgagtggctaggactacaggtgtacaccaccatacctggctaattttgcatgtgtgtgtgtgacatatcttgctatcattttctatrttcttcatatttcttttttttgagatggagtctcactctgttgcccaggctggagtgcagtggtgtgatctcagcttactgcaacctctgcctcctgagt

SEQ ID NO: 483811 - DNA, 201 bp, Homo sapiens
ctccagcctacggctcagaaagctgcggcgtttgccgagcaccggcggacacccaggggcagagcctgacgcagcctcggaggtgcctgccggagcccagmgccttccatgcaccgggtgctgggagggggcgcggaaagaaggaaaggaatggggcaagccctggcgttgcggggcggggtggggggagtcggggcgcca

SEQ ID NO: 483812 - DNA, 201 bp, Homo sapiens
aagcaaagtttgaaaattttactagaaaactgaaactgtaaaatatgaaataccttttaacaagaacaaaacagaaattgtagaatcaagaaatataatamccaatgttgaataaaattcagtacactggtttaacagcagattaagtacaacttaagtgaatttgtaaactaaaagctaaagatagcaagaacttagcaa

SEQ ID NO: 483813 - DNA, 201 bp, Homo sapiens
aacactaatctactttctgtctctgtcgatttgcttattttggacatctcatataaatggaatcatacaatatgtagcatttagtgtgtgggttctttaarcattatattttcaaggcctatccatgttgtttcatgtaacagtacttcatttctttttatggctgaatactccccatttggttaagccattcatcatttg

SEQ ID NO: 483814 - DNA, 201 bp, Homo sapiens
tcttctgaagttccgtgtaatagatactctaacccaagaagtgatggctatttagattttcttttgcatacaattctcattcccaaagatgtctccctttsgttgtccaaaaagctttctgaggtatagttacttttagaagaggaaataccgttttaattcatttgtgctcttgagattgtgtatgtgtggtaggtgttt

SEQ ID NO: 483815 - DNA, 201 bp, Homo sapiens
cacagctgttaccttggaatcttcccttcatcattattcagagtgtttctgtagtttttctcttgcattggattttgtgcttcctgaatccctctctctctttttttttttttttttacttggcttactccttgctttgatggatctcaggctccagtagcttccttggaaagagtgtttggaaggtaaatttcttgagac

SEQ ID NO: 483816 - DNA, 201 bp, Homo sapiens
ggccaagcatggtggctctgactaaaatcccagcactgtgggagactgaggtaggcagattgctcgagccttgggcagcatgatgaaaccccatctctacmaaaaatacaaaaatcagccaggcatgtgaaaatcagctaggtgtgcctggggtcccagctactagggggctgaggcaggagatccatttgagcccaggag

SEQ ID NO: 483817 - DNA, 201 bp, Homo sapiens
gaggcaggagatccatttgagcccaggaggtcaagtctgcagtgagctgtgattgcgccactgcactacagccttggtgacagagtgagatcttgtctccmaaaaaaaaaagctatataaatggagtatattattagcactagggaggagataggagcattccttgcaaaataaacccacacttaatgtgcttgtacaagg

SEQ ID NO: 483818 - DNA, 201 bp, Homo sapiens
caccacggccagctaatttttatatttttagtagagatgggatttcaccatgttggccaggcctgtctcgaactcctaacctcaggtgatccacccgcctyggcctcccaaagtgctgggattacaggcgtaagccactgtgcctggcctagttattcttactaattagtaacaaaaattactcagtgaacctcacaaagg

SEQ ID NO: 483819 - DNA, 201 bp, Homo sapiens
ctgtgtacttttggtaacacatttcttacctcatatggcccccttttcagggaaaaaacaaccacactaagagagcagaactaaaagcttttttttttttycccaaatagtgtgtctgttttcttgatcattgtcctattgcttgtcttctctgatgtgtctgtgtcagtaagtcacctctgtgaaatgcaagaacatttt

SEQ ID NO: 483820 - DNA, 201 bp, Homo sapiens
tagctccctggtttatgcaccattaattatgccttttttactattattatttagaatttctgacactattaagctaatagcaaactgctttaaattggtcmatttactgatctttacactgtttagttagcttcatcagggagtctctggcagctggattcattactcatcagttttctagatgctaaaaaattgtgtatc

SEQ ID NO: 483821 - DNA, 201 bp, Homo sapiens
catgggcagccctgctgaagaaaatcaccaaactgtgtgttgatgccaccatccattggtggtccactcactcaggagcctttggtttgtcagtccttccmcctgcctttctggcctttgtccctcagtggctactccattctttaaaaaatctacccagtctctgcctcctgcttcatacttacggatctcttttctcag

SEQ ID NO: 483822 - DNA, 201 bp, Homo sapiens
ttacaccaccactttctctccttacctgattttctacatccatccatcctgtgtacttttggtaacacatttcttacctcatatggcccccttttcagggraaaaacaaccacactaagagagcagaactaaaagctttttttttttttcccaaatagtgtgtctgttttcttgatcattgtcctattgcttgtcttctct

SEQ ID NO: 483823 - DNA, 201 bp, Homo sapiens
tatgctacccttttggtgtcagggagacttttttgttgttcattgttttgttttttggaggcagggtcttgctctgtttcccaggctgaagtgcagtggcrtgaccacagctcattgcagccttgacctcttgggctcaagggatcctcccatttatagccttctgagtaactgggaccacaggtgtgtaccaccatgccc

SEQ ID NO: 483824 - DNA, 201 bp, Homo sapiens
ttaatctactttgtcacagctaaattatattacattgagctttacctactttttttttcccaagtctaaattttggcagtagcaaaaaaaaaaaaaaaaarggaaaaatgatgaatggtgcatactgtgattagtttgaaaatatctcttccatttggctttcatgcttttatcatttttgcctgttgtctttgagggaaa

SEQ ID NO: 483825 - DNA, 201 bp, Homo sapiens
ggtgcctgccggagcccagcgccttccatgcaccgggtgctgggagggggcgcggaaagaaggaaaggaatggggcaagccctggcgttgcggggcggggkggggggagtcggggcgccaggacagaggcaaggagggacccagtgcagactgggagcgagggagagtttttttaggccccggtgcaggtgcaggtttctg

SEQ ID NO: 483826 - DNA, 201 bp, Homo sapiens
tgtaatctcagcactttgggagggcaaggcaggtggatcacttgaggtcaggagtttgaaacctgcctggcaaacatggcaaaattccgtctctactaaarataaaaaaattagccaggcctgttggcacacccttgtagtcccagctactcaggagggtgagacatgagaatcgcttgaatctagggggcggaggttgca

SEQ ID NO: 483827 - DNA, 201 bp, Homo sapiens
ccccgcatagaggagatgcgagctctgcgctctgccagggccccgagcccgtcagaggccgccccgcgccgcccggaagccaccgcggcccccctcactcytagaggaagggagcaccgcgaggctcacggcagggccctggcgccgggcagggcgagcctcggaagccgcctggaggtaactgggcgagggccgcgcagg

SEQ ID NO: 483828 - DNA, 201 bp, Homo sapiens
cagcctcccgagtagctgggactataggtgcctgccaccacgcccggctaattttttgtatttttagtagagacgggttttcaccgtgttagccaggatgktctctatctcctgacctcgtgatccacctgccttggcctcccaaagtgctggcattacaggcgtgagccaccgcgcccggccatgtttttatgtttttta

SEQ ID NO: 483829 - DNA, 201 bp, Homo sapiens
tagattttcttttgcatacaattctcattcccaaagatgtctccctttggttgtccaaaaagctttctgaggtatagttacttttagaagaggaaatacckttttaattcatttgtgctcttgagattgtgtatgtgtggtaggtgtttttgttgtattattacaggttgatgaaaagcccagaaccttgatgacagattg

SEQ ID NO: 483830 - DNA, 201 bp, Homo sapiens
attacaagcatgagccaccgttcccggcctctctgtaagcttttagaatcttctctttatccttgtattaattacagtaaataagggtaggtgctataacraaccctaaaatctcagtggcttggccaggcgcggtggctcacgcctataatgctagcactttgggagggtgaggccagcggattgcctgagctcaggagt

SEQ ID NO: 483831 - DNA, 201 bp, Homo sapiens
agggcctgcagtatctcagtcgttgtactcagtattggatttaaaagaaattcatcagtgtattagtaaacaagtgtcttaaatcttacacatctggtaattttttttttttttttttgagacggagtctcactctgtcacccaggctggagcgcagtggcacaatcttggctcactgcaagctccgcctcccgggttcac

SEQ ID NO: 483832 - DNA, 201 bp, Homo sapiens
gtaaattcagagaaataactattttttttaaagggatctcactctgttgcccaggctaaagtgcagttgtgcgatcatagctcactgcaacctcgaacttytggggttaagcagtcctcctacctcagcctctcctgagtagctgggactacaagcatgcaccatcatgcctggctaatttttttatttttattttttgta

SEQ ID NO: 483833 - DNA, 201 bp, Homo sapiens
cattaggatggtggagttattcttaccaacttcagtctgaattacttttaaatttgtccccaaaggtggttttgacattatgggttttactctgatctttrttctcgtgtcttctgaagttccgtgtaatagatactctaacccaagaagtgatggctatttagattttcttttgcatacaattctcattcccaaagatgt

SEQ ID NO: 483834 - DNA, 201 bp, Homo sapiens
ataggttgctggttatccattaaactgtgagagactacacttaattttaagcttttgatacattctaaacaggctgttgttgccaaatttacctaacgctkggtaagattttataaaggttggctgaagatcaagacacgctaaaacagatttttgttttttgtttttttttttttttgcttccttaatatttctttactc

SEQ ID NO: 483835 - DNA, 201 bp, Homo sapiens
ccaaccaggacttagtcttattgccacagccctgcagttgcaaggaagactgaaaaacgtagtcagattatgtgttcaggaagaaggagaatggggtattkgtttgcgagcaccagcagtctctgctgtggtctccattgtcacaatgatgcacctgggtgtgggtgtgttttcaaacattgtgctcagcactcagcaaga

SEQ ID NO: 483836 - DNA, 201 bp, Homo sapiens
caggctgttgttgccaaatttacctaacgcttggtaagattttataaaggttggctgaagatcaagacacgctaaaacagatttttgttttttgttttttkttttttttgcttccttaatatttctttactcttttccttgttacatttatctaattgcacttcactattgagaacatgttcaagatttgatgtgacagaa

SEQ ID NO: 483837 - DNA, 201 bp, Homo sapiens
aactaaagctataaaactcttagaaaagaaagaaaggtttaaatcttcatgaccttggattaggcaatgttttcttggatatgacatttaaagcacaagcmacgaaaggaaaagtagagaaattggatttaatcaatattaaaaactcttatgcttcaaaagatgatactaagaaagtgaaaagatcaattatacctaaaa

SEQ ID NO: 483838 - DNA, 201 bp, Homo sapiens
ttagtagaaatggggtttcactgtgttagccaggatggtctcaaactcctgaccttgtgatccgcctgcctcggcctcccaaagtgctgggattacaggcrtgagccaccacggctggcctgagattagcagttttataagaagaggaagggagagagagattattctctttttccctctccctcccttgtatccaccaag

SEQ ID NO: 483839 - DNA, 201 bp, Homo sapiens
acagggtctcactgtgttgcccaggctggtctggaactcctgggctcaagcgatcctcttgcctcagcctcctaaagtgctgggattataggcacgtaccmctgcacctggccttttttttttttcctgagtgagcatgggtaatttgtgtcaaggaatttgtccattttatctaagttattgggttattgacataaaatt

SEQ ID NO: 483840 - DNA, 201 bp, Homo sapiens
ttatccttgttattttgggtttcactgtgatgtgttaactatgtggcttttttaatttttgcttttgccttgttttttcgaaatttagcctgcttgacgtktggtaaaactgttcagatagcacttacatctgtctttgttttatatttctcagtcattatttcttctggatctatttttaatgtctcttgccttttcttt

SEQ ID NO: 483841 - DNA, 201 bp, Homo sapiens
ggaagtatattgttggattcttaaactttatatgaattgttataatatcatttgaaggtagactgtgataagttaaagttgtatactaataaagcctggcratccctggtttaatgcaacagttataactaataacttaaaaaggagataaaatggagttataaaaaattcctggcaggcatggtggctctcacctgtagt

SEQ ID NO: 483842 - DNA, 201 bp, Homo sapiens
tctaaattatgacaactccatcttttccttttcaatccttatatggcttctttttttttttgagacagagtctcactctgtcacccaggctggagtgcagkggcgtgatctcggctcactgcaacctccacctcccgggttcaagtgattctcttacctcagcctcctgagtagctgagactacaggcatgcaccaccatg

SEQ ID NO: 483843 - DNA, 201 bp, Homo sapiens
gcacaccttcatcgacagtatggtttttattactaaagcattatctgtggggcatctcagctagacaccagcagttttaacaaggtctccccatttctagstaggcctgaaggccaacatttttcagcactggaaaatcttgctagtgtcttgttacattctcaactccatagcacctgctctgtgggaaatcatatgtag

SEQ ID NO: 483844 - DNA, 201 bp, Homo sapiens
tatctgagatgattcatctatcagaagccaagagataattagttttttccatcagtaattattgaaggctttaacaaatatgattttcatgatgtttcccmaaatgtatgccacagaatatttatatgagttataagaaaggagttatgtagtcatttaaatttgggaaatgttagttaaaataagtttttaaactatagg

SEQ ID NO: 483845 - DNA, 201 bp, Homo sapiens
aggggaacatcacacaccagggcctgttgtggggtggggggagggggagggatagcattaggagatatacctaatgttaaatggcgagttactgggtgcarcacaccaacatggcacatgtatacatatgtaacaaacctgcacgttgtgcacatgtaccctaaaactttcataaaaaaaaaagaaactgtggtattggca

SEQ ID NO: 483846 - DNA, 201 bp, Homo sapiens
atttaggcatgagaagagaagactatgaatttaaaactttacttgaattcttggctagagagatagtatgaatacaaaggaattcagtgtacattattttytgtgcatcagcattttgcataggtttggaaatcatctctctgcccatctccatcttcttcagactccaagaaagtaaatctggccaggcgcagtggctca

SEQ ID NO: 483847 - DNA, 201 bp, Homo sapiens
gatagcattaggagatatacctaatgttaaatggcgagttactgggtgcaacacaccaacatggcacatgtatacatatgtaacaaacctgcacgttgtgyacatgtaccctaaaactttcataaaaaaaaaagaaactgtggtattggcaaaagaataggtaaatagtgtttttttgctcaattttgagtatttttaaat

SEQ ID NO: 483848 - DNA, 201 bp, Homo sapiens
ggcaaacaggtgtcaaacaggcaagctctttcagagcttgttttggcattgcatgtttttttttgttgcttgtttttgtttttgttttgtttgagacagaktcttgctctgttgcccaggctggagtgcagtggtatgatcttggctggctgcaacctccgcctcccgggttcaagtgatcctcctgcctcacccttccga

SEQ ID NO: 483849 - DNA, 201 bp, Homo sapiens
gttaaaaatcttggtttttatggtggggtttctccttttttgtttcctcattatgtaattgatttttcgttaattctgcctttataatataaaattcttaytaatttaaacatagcttacattcttcccttaatgattccttatttattattatattaggtctaagtacttcagaccagagttaaggccttctctcaagag

SEQ ID NO: 483850 - DNA, 201 bp, Homo sapiens
atctggcttgatagttttctccttttcaacattttgaaagatgttgtcaattgtcttctgcgctttattgtttttatttatttattttattttattttttkggagacagagtctcactctctcacccaggccggagtgcagtggcgtgatcttggctcactgcaacctctgcctcctgggttcaagtgattcttgtgcttc

SEQ ID NO: 483851 - DNA, 201 bp, Homo sapiens
gccttatgcccacctaccttgtcatggtaacttttctgtgattaactcattttttttttcttgtgactaactcattattttccccaatgtcaaaagcattkggtggtcaaaagttttaggaatgaactttgacttttaaattaaatgtctgctttcaaaagagatctgatttcttgaagctgttcttaaaaccaaactatg

SEQ ID NO: 483852 - DNA, 201 bp, Homo sapiens
agtgccagctgggagattcatttgctcactaggcagctcctcgtggaggtcccattggtacctcagtttcctctctcctgactaaagagacttttagtctstttcatgattaatccaatttatcacatctgaaatcttggattcattcaagaggcctctcattttttttttttttttttttttttgagacagagtctccct

SEQ ID NO: 483853 - DNA, 201 bp, Homo sapiens
tcctcccgccttggcctcccaaagtgctgggactataggcatgagccactgcttcctgcctgtataactgttatcactatccaattccagtacattttcayccagaaaaagaaaccgtgtactcattagcagtcactctgcttactttcattctctatgccttggcaaacactaatctactttctgtctctgtcgatttgc

SEQ ID NO: 483854 - DNA, 201 bp, Homo sapiens
tgttgccaaatttacctaacgcttggtaagattttataaaggttggctgaagatcaagacacgctaaaacagatttttgttttttgttttttttttttttkgcttccttaatatttctttactcttttccttgttacatttatctaattgcacttcactattgagaacatgttcaagatttgatgtgacagaaggggatgg

SEQ ID NO: 483855 - DNA, 201 bp, Homo sapiens
ttcacttatggttctgcaacctcttaactggcttctggagttctcacaaaagataatttgatattgctgttgagttggtttttctgtgggggaaacgaggrcctggggcttcctatcccgccatcttgctgatggcattcctatttagatcttttatgttaacactttaaaattcttttcataatggtcttagatatcttt

SEQ ID NO: 483856 - DNA, 201 bp, Homo sapiens
cctgacactcaataaatgtctttaccttctatttttctgaaaaggttgaggttatccaaatggcacttcttctggatttctttttttcttttttttttttwagagatgaggtcttgctatgttgcccaagctggtcttgaactcttaggctcaagcaatcctcccacctcggcctcccaaagtgctgggattacaggcatg

SEQ ID NO: 483857 - DNA, 201 bp, Homo sapiens
taatgtataaggtttataacatctatggaaataaaacctgtgacaatagcacaaaggccaagaggagagaagtggaagtatattgttggattcttaaactwtatatgaattgttataatatcatttgaaggtagactgtgataagttaaagttgtatactaataaagcctggcaatccctggtttaatgcaacagttataa

SEQ ID NO: 483858 - DNA, 201 bp, Homo sapiens
tacgcctggtgctccggggctgtgcgaagctccaccaactcatctgcaaaaatgttgtccaccccttggtccgcaaggaaatccattaggtggtcatatarggcccagtccagggaatctgtgttgagtgtatagttagtatccttccattcaaactcgctggtggaccaaaagctaacttccctgatagagaagatgtca

SEQ ID NO: 483859 - DNA, 201 bp, Homo sapiens
taaagcctggcaatccctggtttaatgcaacagttataactaataacttaaaaaggagataaaatggagttataaaaaattcctggcaggcatggtggctstcacctgtagtcccaactaccttggaggctgatgcagagagaggctcgcttgagcacaggaatttgaggctgcagtgagctatgatcacatcattgcact

SEQ ID NO: 483860 - DNA, 201 bp, Homo sapiens
tggaaatctggggtaagtataagagaatggggttgccagctggggtgtgccaaatgctaagagagagggaaactttgtgtaatgcacacatctaaattagrtatatttctgtagaataaataagttcagtgaaaaaccttgcttaataaaatgaacatatcctatagaaaagattcatatattgatgcatcgcttaaatga

SEQ ID NO: 483861 - DNA, 201 bp, Homo sapiens
tcaggctccataaaaaataatgatggattatatattaccccattcagatagctacctgtatacacagaaaatgaacatttttggagaggcagcattggatrgtagaatgtggactttggagttagtcagctctaggtttgaatcccagtgctgccacttaactagctgtgtatgaccttggacaaattaattagcttattg

SEQ ID NO: 483862 - DNA, 201 bp, Homo sapiens
aggtagaatagctgacctcttgagtaacagggaagaaaaccatctattatatgctttattgagaaactgaaaaaatgagggagtgtgtattcagagtgaayatattcagggaaaggtcatgcaggaatggagaaggtattatttttgtttttatttttttagaaacaggttcccgctatgttgcccgggctggagtgcagt

SEQ ID NO: 483863 - DNA, 201 bp, Homo sapiens
aagagaatggggttgccagctggggtgtgccaaatgctaagagagagggaaactttgtgtaatgcacacatctaaattagatatatttctgtagaataaakaagttcagtgaaaaaccttgcttaataaaatgaacatatcctatagaaaagattcatatattgatgcatcgcttaaatgatgacatttctagtctggttg

SEQ ID NO: 483864 - DNA, 201 bp, Homo sapiens
ggcctctcccacatccaggcgctcacaaaggcctatcacttaggcctgatgaacacttctgattcctggtgacgcctctatctccactgtctttacttgtyattgggctcttaaggtcttcctgtctctagtttgatctaagccacacctttgaaagaacgatctttctgaagtacaaaattaccaatatatttcaccagt

SEQ ID NO: 483865 - DNA, 201 bp, Homo sapiens
gatgaggccgggagttcaaagctgcagtgagctacaatcacgccactgcactccagcctaggtgacaggcgagacctcatctttaaaaagtaaaaatttayataggaagttgttttatgcctttgcataaggtttgtgttaactttcagcaagaaattccctttctctcccttgtctggcatatcactcttcatccttcaa

SEQ ID NO: 483866 - DNA, 201 bp, Homo sapiens
caaatactttttcaaataattttttctttttttgttttttttttttttttttttagacagagtctttctctgtcacctagcctggagtacagtggtgtgaycttggctcactgcaacctccgccttccaggttcaagcagttctctgcctcagcctcccgagtagctgggatcacaggtgcccgtcaccactccaggctaa

SEQ ID NO: 483867 - DNA, 201 bp, Homo sapiens
gcactttgggaggctgaagtgggcggatcacgaggtcaggagatcgagaccatcctggctaacacggtgaaaccccgtctctactaaaaatactaaaaatyagccgggcgtggtggcgggcgcctgtagtcccagctactccagaggctgaggcaggagaatggggtgaacccgggaggcggagcttgcagtgagccgaga

SEQ ID NO: 483868 - DNA, 201 bp, Homo sapiens
aggccgtggtgtgtgggtggatggctggggtagtgggatcttgatctcctgtttcaggggatgagggtcactagccctggaagggccagaggaggtggtarggctgctccctgagctgctgtctcttttccccaggacacctgattgggccggttctctgccattccttctgcaattacatgggtttcccagctgtttgcg

SEQ ID NO: 483869 - DNA, 201 bp, Homo sapiens
gatgcccttgcctcagctaatgccttccattcaggtcatctcaagacattgggtttatgttgggtccacacccccgtcctcagcagtattgatgcctaacytgagtttggccagggtaaagttgtgggagaggagcccttggagcctctggggtctcactgtctgacagcccgtcactcacagcttgtcctgaattccctc

SEQ ID NO: 483870 - DNA, 201 bp, Homo sapiens
tcacagacatgcgttggctgcggaaccaagtgatcgccccgctgacagaggagctggtgttccgggcctgtatgctgcccatgttagcaccgtgcatgggyctgggccctgctgtgttcacctgcccgctcttttttggagttggtgagtctggccagattagtcctggtgtgttttcagcatgagagctcagaagggggc

SEQ ID NO: 483871 - DNA, 201 bp, Homo sapiens
ggctgatgggtatgtagtgtgggggcaggaagggcgtgcaggtgtggtcactcgtggcctccccgtctccagcgttccagttctcctacacagctgtcttyggtgcctacactgctttcctcttcatccgcacaggttggtcctcagtccctcatgggtccctgggggcccacaggagcgggtgggagaatgggaatactg

SEQ ID NO: 483872 - DNA, 201 bp, Homo sapiens
tgggcttcaggctggagggcattttcccagcggcgctgctgcccctgttgctgaccatggtgagtgctcctgctgtattttttcttctggtctttgttatyagcctgatgggcagtgccgtggactcttgtttttggtttttggttgatgggagacaggacttttgagatggccccagggtcctccggtatgcatggtctg

SEQ ID NO: 483873 - DNA, 201 bp, Homo sapiens
acacccccgtcctcagcagtattgatgcctaacctgagtttggccagggtaaagttgtgggagaggagcccttggagcctctggggtctcactgtctgacrgcccgtcactcacagcttgtcctgaattccctctgcagccccccgctcctgggcccgctgcctcacagacatgcgttggctgcggaaccaagtgatcgcc

SEQ ID NO: 483874 - DNA, 201 bp, Homo sapiens
aggtcatctcaagacattgggtttatgttgggtccacacccccgtcctcagcagtattgatgcctaacctgagtttggccagggtaaagttgtgggagagsagcccttggagcctctggggtctcactgtctgacagcccgtcactcacagcttgtcctgaattccctctgcagccccccgctcctgggcccgctgcctca

SEQ ID NO: 483875 - DNA, 201 bp, Homo sapiens
ggcagcctctacgtctggaagagcgaactgcccaggtgcgggggctgcgcgcgaccggaatccgcgccctgcgggcggagcttgggcgagccgggggcggstccgtgctcatgggcagccgcgggccccctgaacttactgtcccctccgtagggaccatcccgcggtcatcaagcgacgcttcaccagcgtcctggtggt

SEQ ID NO: 483876 - DNA, 201 bp, Homo sapiens
gctacctgcgtagagagaaaggcccaaatactcattgatgggagggtctcctggagcctagaacgaggctctggacaatgactgggaagttcccctgagargaccaagagacacatggggttcactcagtcttgtggggccctagagacagctggacaggaagcagccagcttccagcttcttagcctgtgcctggttcta

SEQ ID NO: 483877 - DNA, 201 bp, Homo sapiens
taaggctttctgtgggctggggcttggggcgggggctacctgcgtagagagaaaggcccaaatactcattgatgggagggtctcctggagcctagaacgargctctggacaatgactgggaagttcccctgagaggaccaagagacacatggggttcactcagtcttgtggggccctagagacagctggacaggaagcagc

SEQ ID NO: 483878 - DNA, 201 bp, Homo sapiens
agtcccagccccagcaccaaccgctcaggtaaggctttctgtgggctggggcttggggcgggggctacctgcgtagagagaaaggcccaaatactcattgrtgggagggtctcctggagcctagaacgaggctctggacaatgactgggaagttcccctgagaggaccaagagacacatggggttcactcagtcttgtggg

SEQ ID NO: 483879 - DNA, 201 bp, Homo sapiens
ctcaggtaaggctttctgtgggctggggcttggggcgggggctacctgcgtagagagaaaggcccaaatactcattgatgggagggtctcctggagcctaraacgaggctctggacaatgactgggaagttcccctgagaggaccaagagacacatggggttcactcagtcttgtggggccctagagacagctggacagga

SEQ ID NO: 483880 - DNA, 201 bp, Homo sapiens
gaggccaagccaagctgccaggccaggtggggctttggtgggcagtcccaggtcagagagccatgagactgtcttctctaaaggagttcatccttagcctsttagcctgctggggtgctgtggggatccagggagggcctccttggagggtgggcagcctttcccagtccctgctgacgctgatgtttctgtctggcctgt

SEQ ID NO: 483881 - DNA, 201 bp, Homo sapiens
agagaatgttgtctgaggagtttgcagccctgtactagaatcctctccgggactcagtttccatttctcaggagtgggggcagccgcattggtggtttgargatgcaggggtgtggtgtgggaaatggttttggaacccagcaggtaggaggaaccgatgttccaggcccggctctggggcctcaggggagtgccctcacc

SEQ ID NO: 483882 - DNA, 201 bp, Homo sapiens
tggaggccaagccaagctgccaggccaggtggggctttggtgggcagtcccaggtcagagagccatgagactgtcttctctaaaggagttcatccttagcytcttagcctgctggggtgctgtggggatccagggagggcctccttggagggtgggcagcctttcccagtccctgctgacgctgatgtttctgtctggcct

SEQ ID NO: 483883 - DNA, 201 bp, Homo sapiens
aagaggaggatgtagcttgggagatcaggcagctgaggtctcggtgaggtgggcctttctgcctcttcccctctggggtgacccattttgtaggcatcacstgggagcccagcctcaggagcaaggaccacagccttgtcctagagagagggcactggatggtggctccagctctaacggtcacccttttctgtggctcca

SEQ ID NO: 483884 - DNA, 201 bp, Homo sapiens
gtcagctgcccatgggctcaggcctgggggaagaggaggatgtagcttgggagatcaggcagctgaggtctcggtgaggtgggcctttctgcctcttcccytctggggtgacccattttgtaggcatcacctgggagcccagcctcaggagcaaggaccacagccttgtcctagagagagggcactggatggtggctccag

SEQ ID NO: 483885 - DNA, 201 bp, Homo sapiens
ccagtggagtcagctgcccatgggctcaggcctgggggaagaggaggatgtagcttgggagatcaggcagctgaggtctcggtgaggtgggcctttctgcmtcttcccctctggggtgacccattttgtaggcatcacctgggagcccagcctcaggagcaaggaccacagccttgtcctagagagagggcactggatggt

SEQ ID NO: 483886 - DNA, 201 bp, Homo sapiens
atcgtccgtggttccggaccaggcctgcatcagccagcgcttcctgcagggaaccatcattgccctggtggtggtcatggccttcaggtgacttgtccccygggctctcatggtggctgactaggggagtggagctgcccagtggagtcagctgcccatgggctcaggcctgggggaagaggaggatgtagcttgggagat

SEQ ID NO: 483887 - DNA, 201 bp, Homo sapiens
ctggcttgcagttctccagcctcactgcctctggtgcttccctctccttgtgactctgtagccctcccagccccgtttctctttcttctccctttgccccyggggaaatggggcacccccttaaccgctcctccgacctccagcagagcccactggggacagcctcagcctggccctctttgcatttgcacttttcctctt

SEQ ID NO: 483888 - DNA, 201 bp, Homo sapiens
gctccgacagtcccccttgaccacggggctaccaggcatacagccctctttgctgctgggtgcgtgtctgggcaggtctgggtaggacagggaggttgctrtgttctgtctttggggcttctctggctcatacagcctctggcctcctcagtgaccaccagcctcaccagctcggccccaggttctgctgtccgcaccttg

SEQ ID NO: 483889 - DNA, 201 bp, Homo sapiens
gtgcttccctctccttgtgactctgtagccctcccagccccgtttctctttcttctccctttgcccccggggaaatggggcacccccttaaccgctcctcygacctccagcagagcccactggggacagcctcagcctggccctctttgcatttgcacttttcctcttggtcctcagtcatcgtccgtggttccggaccag

SEQ ID NO: 483890 - DNA, 201 bp, Homo sapiens
gcaggtgggacagcccaggtgaaggtgcagaggtggaggtgttgctcggagacaggcacaggagctgtgggagccgaggctggattggaggggcccgcccrggtagggagactttgagggcctcccagtggccaaggacagtggccgcccctcctgccccctgatgtctggcagcctggggctcccggggctgactgggcc

SEQ ID NO: 483891 - DNA, 201 bp, Homo sapiens
gctaacaacatgcgtaagaagggcaagcccaacccggaccagaggtgagcaggtgggggccctgccccggagcccctccatttctgaggcaggaagacacygccctgggtggcacaccaggcacagagtcctacaggctgagccatttcacagatgagagacctgagatttagagcccttcattgacttaaggatgggaag

SEQ ID NO: 483892 - DNA, 201 bp, Homo sapiens
accaggtgcctcagctccaggtcccaaactaaactccctgcacacttgcctcccaccctgggctcccctctcagggaatggggcgcagggccttggttacmtgagccgcaaatctgggtcagggccctctttccccaacctcatcatgcatctggccttgctattgccctggaagatccctctacctggtccggtcctcgc

SEQ ID NO: 483893 - DNA, 201 bp, Homo sapiens
taggccagccccaggcctccctgagaaggtgatgactgccagggaggggcagctgggaaccaagtcagggagaagtgggcagatgggtgttttttcccccrgttcctccttccccacctcctccctctgcattccaggaaggtagccggaagctgagcccaagctgggccctcccggcagccccctccctagagggaggga

SEQ ID NO: 483894 - DNA, 201 bp, Homo sapiens
agcgccctctgcaccccacagggaaggggtgagtgttcaaggagatgagtgggtagggatttggcccctggagcctgtgtgatcaagggcaagagaaaccstgtggagggccatggccttccacccccggtaaaatgagggcggtaatagaactgcacagacatcctcgtatggttacctccaggctgaaatacgtggttt

SEQ ID NO: 483895 - DNA, 201 bp, Homo sapiens
ggccttgggcaaagctcccaccctctctgggctgcagggtctccacagtaaagcagggaggtggacgaagcctggtagcttctgggatcccacaagtgacmaaaagttgtcacagtgggagggacagttcaagttgggcttggtgcagtgagaaaccctggctggaaggggaggggctgctgtggagtttccccctgctcc

SEQ ID NO: 483896 - DNA, 201 bp, Homo sapiens
atgctcatcctgctaggcactggctgtgtggccttgggcaaagctcccaccctctctgggctgcagggtctccacagtaaagcagggaggtggacgaagcmtggtagcttctgggatcccacaagtgacaaaaagttgtcacagtgggagggacagttcaagttgggcttggtgcagtgagaaaccctggctggaagggga

SEQ ID NO: 483897 - DNA, 201 bp, Homo sapiens
gctgagggctgggtgctgccctgtttcctggtgagctctagttgggccaggcctggctgagagggggcaggagggcaggaccagccgggtagccccatccygaggtgccactggcttcactccccacagctggaggccctgaaccagtccattaacatcgagcagtcccagtcagaccggagcaagcggcccttcaacccg

SEQ ID NO: 483898 - DNA, 201 bp, Homo sapiens
gagtgtgtgtgtgtgtctgtgtgtgagtgcatacatgcagaggtggggggagcgtgtgggtgtggaatgggggtgtgggtgtttggggagtgactgcatgmgtagctgtgcagaagttgggggagtggtatgctgtgaggggtgaggagggtgtgggtgtgaagtagggtgtgggggggtgtgaccatgcagaaggcatct

SEQ ID NO: 483899 - DNA, 201 bp, Homo sapiens
gggctgtgagtgtgtgtgtgtgtctgtgtgtgagtgcatacatgcagaggtggggggagcgtgtgggtgtggaatgggggtgtgggtgtttggggagtgamtgcatgcgtagctgtgcagaagttgggggagtggtatgctgtgaggggtgaggagggtgtgggtgtgaagtagggtgtgggggggtgtgaccatgcagaa

SEQ ID NO: 483900 - DNA, 201 bp, Homo sapiens
gccctccaccctgtggctccctttgccttggatgcccttcccaacacccatccctcctctccaggcagactccatgctggtcccctccccaggggcccctyccctaagacccattgggaggcaccacagcacaaccccagtagtggctgattttgagtctatgagctccctgtgggcatggctgggtctgtcggcttcggt

SEQ ID NO: 483901 - DNA, 201 bp, Homo sapiens
gggcaccttaccctgactctgtgcctccttgcctccctgcctccctctcgccccgtttcctgctccagcctgtgattcccaagtctgcaaccccagtcaaracccatctcctgggccctctaccaggtgcctcagctccaggtcccaaactaaactccctgcacacttgcctcccaccctgggctcccctctcagggaatg

SEQ ID NO: 483902 - DNA, 201 bp, Homo sapiens
cagcctccttgacctctctagacctcagagccctcactcacatggtcaaggttgggtgatgttagcagttagatcccacgagtgccaaggcctggagtgagggggggaggggcaaagcccctgggtggggagtacagttgggtccggagccccctgccggcctagagtatggagggggctcccggacattctgtcctccct

SEQ ID NO: 483903 - DNA, 201 bp, Homo sapiens
acggggcaggggagggggtgggcagggcacaagcctcccactgtgccgtgtccccaccctcccccgttccccgggacaatggccgagactcagccaacggmcacagctggtgggggggggggcacataagcacaaggaggggcggaagggaggggtcctgggtggagggaccacctgggcccctgcctgctctcatcctgc

SEQ ID NO: 483904 - DNA, 201 bp, Homo sapiens
tggccttaaggagacgaggagagaagagcggagcggaggggagggggctgccttcccatagtctggatcgcagcctgcctgggaaggggcagtgtctggtycctgttccaggcaggtaataaagggcctaattaatgaggagcagctgaggcacacagctcagcagggcaggggcaggacctggaggggccccaggtagcc

SEQ ID NO: 483905 - DNA, 201 bp, Homo sapiens
acggagggggacctttagatttgggttggattctcctggtccagcctgggggcaggaggtggctaggatgaggtgaaaggctgcccctccttgggcaggtktgtgcctccctgcccaggcctctagtaggtggctgaccaacggccctcccacctagggtaggtggggggcagcccccgggcttggctcaggacggggtgg

SEQ ID NO: 483906 - DNA, 201 bp, Homo sapiens
acgcacccttcggcggtaagtgggtggctggggaaggccgtgggtgcagcctgggtgcaggcttcccaggccgggcccacctcaccttagagggtgctcakgggtgccctggcccccaggtggccaagagcagaaccaccgcgggagcaggctccccgcagtccggattggggtcaagagttctgtttatcttaccaaaaa

SEQ ID NO: 483907 - DNA, 201 bp, Homo sapiens
actgccccccaagtgccctgtaggtctgaggggatcctgggcggtcccctacccacaattcggccccaggccctgccaggcaccccaatgtgggtggtgcrgagaaatgcccctaagggtggatgtgacgaaacctcagtgtcgccagcttctggggggctgtgggaccctaccacgcagagaagctgcccagctggaagg

SEQ ID NO: 483908 - DNA, 201 bp, Homo sapiens
acctgctgaatgccctgaggcccagccccctagggccctgtgtttccaggaagctgtggggcttcagtgggtgcaggaagagagaagaagtcctggccttyggtctggggcgggagtctttgagtccctgtgccatcatcaaggacactagtaactgccccccaagtgccctgtaggtctgaggggatcctgggcggtccc

SEQ ID NO: 483909 - DNA, 201 bp, Homo sapiens
ccagcactttggaaggccaaggtaggcatattgcttgagcccaggagttcaagaccagtctgcaacatgatgaaaccccatctctacaaaaaatacaaaamttagctgggtgtggtggcgtgtgcctatagtcccagctactcgagaggctgaggtgagagaatagtttgagccagggaggtcgaggctacagtgagctgt

SEQ ID NO: 483910 - DNA, 201 bp, Homo sapiens
ggcccctgcctgctctcatcctgcacctggcttgggtgccctccgttcctttcctggccagctggggtggccttaaggagacgaggagagaagagcggagsggaggggagggggctgccttcccatagtctggatcgcagcctgcctgggaaggggcagtgtctggttcctgttccaggcaggtaataaagggcctaatta

SEQ ID NO: 483911 - DNA, 201 bp, Homo sapiens
gtgcccactgctgtatcatgtgcctatgattgcgtgagctcatcagccttcctgggtatccagctcctgggagaccccacaaggagccctggccactgctmccgtcaggattttaatggcacactgaggctcagagagggaaaggggcttgtccagagccacacagggactctgtgggcagggccactccaggaagggacc

SEQ ID NO: 483912 - DNA, 201 bp, Homo sapiens
agcatgggagtgatgagggctgacgtaagtgctagaaaaatctcgatgctgtgtggagagtggacaggaagcggcgggactggaggctgtgactgtttacyttcatgggaacacctgcatacccgtgcacgcgcgccaagcccacccacttacgcatccagctgacgtgtactgtggccacaggagctggcccatggctca

SEQ ID NO: 483913 - DNA, 201 bp, Homo sapiens
gactggctgtgcgtgggcaggtgagggaagggaggatgagtccaggtcaaggggggactcctgggctttgttctgaggcagtgggcagccacaaagcttcyaagcatgggagtgatgagggctgacgtaagtgctagaaaaatctcgatgctgtgtggagagtggacaggaagcggcgggactggaggctgtgactgttta

SEQ ID NO: 483914 - DNA, 201 bp, Homo sapiens
gccatactctttgggccacccttgccaccccaggccccaaggccaggaagcttggcagctgcagccccggaagtggcccaggcacttcctgggtgctttgmtaggtcaggcaggtgggtggagctccaggagggaagaggtggtgagcccaggcctttggcaacactggccaggcccagaggcctcttcccacaagtttgg

SEQ ID NO: 483915 - DNA, 201 bp, Homo sapiens
tccggtcagaggctgcctgagcattcctagcaccccctcaacacccagatggctccatctttccaggccgcaggccgggagccctgtggggaccactcccstggctcacccagaaggccagtgggcaggtgacagggtaactgtggatattgccaggcctgggccagtggattagaccagctgcatggagttgggtgctcc

SEQ ID NO: 483916 - DNA, 201 bp, Homo sapiens
ggaggggctggggaggatccggtcagaggctgcctgagcattcctagcaccccctcaacacccagatggctccatctttccaggccgcaggccgggagccmtgtggggaccactcccctggctcacccagaaggccagtgggcaggtgacagggtaactgtggatattgccaggcctgggccagtggattagaccagctgc

SEQ ID NO: 483917 - DNA, 201 bp, Homo sapiens
catcaaggtcctggagcagggcctgggagcactcatttcacagaagagcaaacaggctcagggaagagccaggactggcagtcagggctcctgactcctakgccagccccaggcctccctgagaaggtgatgactgccagggaggggcagctgggaaccaagtcagggagaagtgggcagatgggtgttttttcccccggt

SEQ ID NO: 483918 - DNA, 201 bp, Homo sapiens
ccaggcctcctgcaggacagtgacagcctcagtggctcctacctggaccccaactaccagtccatcaagtggcagcctcatcagcagaacaagtgggcgamcctgtacgatgctaactacaaggagctgtgagtgccctacaacactccccactcctccaggcccccccaccttgggacgccccagcccaggaccccatca

SEQ ID NO: 483919 - DNA, 201 bp, Homo sapiens
tcttgcctgaggctgtgaaagacaccggagacatggtctttgccaatgggaaaaccatagagaacttcctggtggtgaacaaggtctgtgggtgggggaawgggagggagcccagaggcaagtggggagccagctggggaacactcatcacctccatagatactgggggcactgcaaagcagaggcaggagcaccctcggc

SEQ ID NO: 483920 - DNA, 201 bp, Homo sapiens
agaggagatggggacggagggggacctttagatttgggttggattctcctggtccagcctgggggcaggaggtggctaggatgaggtgaaaggctgccccyccttgggcaggtttgtgcctccctgcccaggcctctagtaggtggctgaccaacggccctcccacctagggtaggtggggggcagcccccgggcttggct

SEQ ID NO: 483921 - DNA, 201 bp, Homo sapiens
agcctgggcggaggtgtgcaggcaggaaaggagatgggagtcctaagagagatggaaacagggcggttcaccctgactgcggaatggcctcctgggggtcwcctcgtttaaggttcactccatggcagggattcgtgctccatctgatggagaaggaagccagggctcaggtcacttgctgagggtcatagccatcaagtg

SEQ ID NO: 483922 - DNA, 201 bp, Homo sapiens
cccgctcaggctggggggctggcccctgagagcccagaagagggactgcctgccggagaggggaacactgggcaggcctgggctgggggtctccggagackccttcctgaggcccagaggaggagcaggcctcagaggagatggggacggagggggacctttagatttgggttggattctcctggtccagcctgggggcag

SEQ ID NO: 483923 - DNA, 201 bp, Homo sapiens
caagtatccccgcggtgatgccacccgcctgcccgcctgcgccatcatggacgcacccttcggcggtaagtgggtggctggggaaggccgtgggtgcagcmtgggtgcaggcttcccaggccgggcccacctcaccttagagggtgctcaggggtgccctggcccccaggtggccaagagcagaaccaccgcgggagcagg

SEQ ID NO: 483924 - DNA, 201 bp, Homo sapiens
accagaaggggaaggagtgccgtgcggaagctccccttccctggtttttgtggcccaggccctctgtggcttgtttctgatcacagggcctgctctccatrgagcccccactataaagggtgaccttgagtgtgacactgcaggcagggacaaactcattcattcctcaagcgattgctgtgattctgtaagccagccctg

SEQ ID NO: 483925 - DNA, 201 bp, Homo sapiens
ggaggggctcggggagagccagcccccacggcgcacacttctgtttccccaggctccctacacacccctccaagaagaggaagcactctgaatcccccccsagcaccctcaatgcccagatgctgaatggaatgatcaaacaggagcctgggaccgtgacagccctgcctctgcaccccactcgagccccatcgccaccct

SEQ ID NO: 483926 - DNA, 201 bp, Homo sapiens
ggcacagggcctgcagagaggggacccaccgggcaggatgcactggcttccagcaggtaaccgggccatggtataagggggctttggactccagagccagkgcaggcacgggacagggcagtgtctgagaatcctgccaggacctcagagttctggtgcaggctggaccactgagagtggggtgaccgtctgtgcctggca

SEQ ID NO: 483927 - DNA, 201 bp, Homo sapiens
agtaagggcagggagtagggggatacagcggcataggggcaggcagggagcagggctgtggccgtgacctgggaggtgctagacactggcctggcatgggwtgggctgggtgactggctgtgcgtgggcaggtgagggaagggaggatgagtccaggtcaaggggggactcctgggctttgttctgaggcagtgggcagcc

SEQ ID NO: 483928 - DNA, 201 bp, Homo sapiens
gtcctccattatcggggttgacgcatctcccacgtcagcccccttatcaccccgccctctggctccccctgcaaggtgaccctgggaggggaaaggccggyacctcccccgtcctccctcatgatgcccaagagccctggctgcctttcctctaggggcccctccccttggtggggccggggccagcgcagagggcccagg

SEQ ID NO: 483929 - DNA, 201 bp, Homo sapiens
aaaagaaataaagtaaagaaactcctgtgattattaatgtatttgattcacaaaatgcctggcacacagtaggcactcagtaaatgggacccgtggttacrgcagggtggggcttgagcagaggcagggtcctggaacccaggcacacagactggccacgcccagctcgagaagctgctcttgccccggccacaccgccct

SEQ ID NO: 483930 - DNA, 201 bp, Homo sapiens
ttgacctctctgaacaggggatggtgattatgttacctatctgaacatccccactgtttagagagggaaaatgcataaagcacttagaatcgtccctggcstggtaggcagtcagtgtgagctgcagtcactgtcaccaccactgtctttgtcatcatcgccatgatgagttgagaagcactgggagatactcactatgag

SEQ ID NO: 483931 - DNA, 201 bp, Homo sapiens
gtaggggtgcggggtgggggaaggtgagacccttcttcccagggacacccctgatcctggccctcttgctgcagccatgcagggagccagttcagtcgggsgggcagcgtcccccacaagaagaggccccccaaggtggccagcaaggtaggggtgagcagggatggcaggcgggttggaaagggggcctcccttgtggcc

SEQ ID NO: 483932 - DNA, 201 bp, Homo sapiens
ggtcagcgttcctcaggaggccctccgagcccccaaccctcaaacttcttccccacccactggcctccccgcaacgctgccccatcagttccctcctcccrcctccttcctccatcctccgtccgcccggaccctggcacgggagggtccctcctcccccaaagcacatctggttctcgttagggtctcccaggatgcctc

SEQ ID NO: 483933 - DNA, 201 bp, Homo sapiens
ggggtgggggaaggtgagacccttcttcccagggacacccctgatcctggccctcttgctgcagccatgcagggagccagttcagtcgggcgggcagcgtyccccacaagaagaggccccccaaggtggccagcaaggtaggggtgagcagggatggcaggcgggttggaaagggggcctcccttgtggcctccctttctg

SEQ ID NO: 483934 - DNA, 201 bp, Homo sapiens
tgagacccttcttcccagggacacccctgatcctggccctcttgctgcagccatgcagggagccagttcagtcgggcgggcagcgtcccccacaagaagargccccccaaggtggccagcaaggtaggggtgagcagggatggcaggcgggttggaaagggggcctcccttgtggcctccctttctggcttgcagttctcc

SEQ ID NO: 483935 - DNA, 201 bp, Homo sapiens
tatatcccagagagacagaacagggcagcgctcatagcccagtgcctgcccctgtaagctatgggcacatgcccatcctttctgagcctcagtttcctcakctataaaatgaagaaaaagaaaatcacctaccttgtaggttgggatgagaattcaatatgagccatgtaaagtgcatggcacagggctgggcacagagtg

SEQ ID NO: 483936 - DNA, 201 bp, Homo sapiens
gaggggtctctgtaggcagcctgtgggggctcttctgcatttttggtaagaagctgggagagaacaaagactactgtgactcagatcgaagaacctgataraaaaacggctcaagagccccatctttgtcaggtgtggctgctgggcccaagctaactgagatttgatgcggagaggcaaagggttgcttgcacaagcaaa

SEQ ID NO: 483937 - DNA, 201 bp, Homo sapiens
tcccagctccttgggaggctgaggtgggagaatcacttgaactcaggaggcggaagttgcagtgagccaagattgtgccactgcactccagcctgggcaayagagtgaaactttgtctcaaaaagaaaggtaaaaaaaaaagagaggggtctctgtaggcagcctgtgggggctcttctgcatttttggtaagaagctggg

SEQ ID NO: 483938 - DNA, 201 bp, Homo sapiens
gcaccccaatgtgggtggtgcggagaaatgcccctaagggtggatgtgacgaaacctcagtgtcgccagcttctggggggctgtgggaccctaccacgcaragaagctgcccagctggaaggcagaagctcagctgctcaccccccggccccttcccctggctctcgcagcacactgccggactctcccccagactcgggc

SEQ ID NO: 483939 - DNA, 201 bp, Homo sapiens
agtatggagggggctcccggacattctgtcctccctgtgccccaggtcgcatcagtgagggaagttctccctccagctgaccggggtccgtgcagccgccrgagtgcacaaccacagcctctgtctctcctttgtggagtttgaggatcctatctccctccggcctccctcactcccctctcttctccctccatggctggg

SEQ ID NO: 483940 - DNA, 201 bp, Homo sapiens
aggagatcttgcctgaggctgtgaaagacaccggagacatggtctttgccaatgggaaaaccatagagaacttcctggtggtgaacaaggtctgtgggtgsgggaatgggagggagcccagaggcaagtggggagccagctggggaacactcatcacctccatagatactgggggcactgcaaagcagaggcaggagcacc

SEQ ID NO: 483941 - DNA, 201 bp, Homo sapiens
ggggatcctgggcggtcccctacccacaattcggccccaggccctgccaggcaccccaatgtgggtggtgcggagaaatgcccctaagggtggatgtgacsaaacctcagtgtcgccagcttctggggggctgtgggaccctaccacgcagagaagctgcccagctggaaggcagaagctcagctgctcaccccccggccc

SEQ ID NO: 483942 - DNA, 201 bp, Homo sapiens
agactggaaggctggacagagtgctccttggggtcttaagtagagccaaggagggcatttgagggcagaatggccttttccctgggggcctgactccccamttaccaactcccaaggggttacagactggagggccctggcagcagaggctgctgggtaacagcccagcagagctgctcattggctgccacccttggactt

SEQ ID NO: 483943 - DNA, 201 bp, Homo sapiens
agccccccatgacctgctgaatgccctgaggcccagccccctagggccctgtgtttccaggaagctgtggggcttcagtgggtgcaggaagagagaagaastcctggcctttggtctggggcgggagtctttgagtccctgtgccatcatcaaggacactagtaactgccccccaagtgccctgtaggtctgaggggatcc

SEQ ID NO: 483944 - DNA, 201 bp, Homo sapiens
agcacagggttcacgcaggacgtgttgacctcttgggttgagtttgttctttttcctgaacactgataaaagtgaaacctgcaagaaaaaaataaacccasgcccggtggtgctggctcccttcccagtccacacctgcctctggtggggcagccccccatgacctgctgaatgccctgaggcccagccccctagggccct

SEQ ID NO: 483945 - DNA, 201 bp, Homo sapiens
gggaagtacaggacggagtggcagcccagggggcctgaggctgtggcgaggagtatgggtttgagtccccatacacgtttttgtatcattcacacaaaacytgcagggtctgtgttcttgaatcgttgtataggtttctacatgaggccccgaaggtgggtgggtggctggcacagggatgcagggggactctggagccag

SEQ ID NO: 483946 - DNA, 201 bp, Homo sapiens
cagccacccggccagccagactccagggcagctcccggggcacatgctcacagcgggaggctgggagcatgggtctgcaggggagctcagggcaaatgtakgggcccctgtctctgggtggaagagcattaaaacactaggtgcatgaactctgtgttcagacagcctggctccaacttcagcttccccatttatcagccg

SEQ ID NO: 483947 - DNA, 201 bp, Homo sapiens
tccaagcatgggagtgatgagggctgacgtaagtgctagaaaaatctcgatgctgtgtggagagtggacaggaagcggcgggactggaggctgtgactgtytaccttcatgggaacacctgcatacccgtgcacgcgcgccaagcccacccacttacgcatccagctgacgtgtactgtggccacaggagctggcccatgg

SEQ ID NO: 483948 - DNA, 201 bp, Homo sapiens
ctagaaagaggcatggcaggatcggcctctctgtacccagatccatgccctgggcccctctcctcctctgagactcaaggtggccttgtggtggggcgggkgggcattatcagtgcttcctggaggggtgccaggcagtggagggtgagagccggcccccacatggatacctgggtgggaaggagcaggggcatctgtttt

SEQ ID NO: 483949 - DNA, 201 bp, Homo sapiens
gcgttcctggagctgggccatctggactgacccctggaggacacggcaggacagtgcctgttgggtccgagccatcccatcgagggcagtgggcacccackgggctctcgactcagtaagcacctcatttgtgcctcacagcaccccataagacagaggcacagtgaccccatttgacagattagtggaaaggacttgttc

SEQ ID NO: 483950 - DNA, 201 bp, Homo sapiens
gcagggagtggctgagccaggatttgttcctggacctgtctgagctcaacaggagagggcagaccccagactcaggctccagaggcctgtgggaggggccytcctgcctcagtggggctggccagcccgggtcagccgtgtgggtggggctgtcctccattatcggggttgacgcatctcccacgtcagcccccttatcac

SEQ ID NO: 483951 - DNA, 201 bp, Homo sapiens
ggcatggggtataggagagaatgttgtctgaggagtttgcagccctgtactagaatcctctccgggactcagtttccatttctcaggagtgggggcagccrcattggtggtttgaggatgcaggggtgtggtgtgggaaatggttttggaacccagcaggtaggaggaaccgatgttccaggcccggctctggggcctcag

SEQ ID NO: 483952 - DNA, 201 bp, Homo sapiens
tgagggggcttcaggcagccttctgggaaggagccgagtgtggggagggcagtcaagccctcccccactcaggagttccctccagtctggtgggcctcagrgtctggccctgcttcccccatcaccagggcggggcggtggcctaaggcatggggtataggagagaatgttgtctgaggagtttgcagccctgtactagaa

SEQ ID NO: 483953 - DNA, 201 bp, Homo sapiens; identical to SEQ ID NO: 401262

SEQ ID NO: 483954 - DNA, 201 bp, Homo sapiens; identical to SEQ ID NO: 401264

SEQ ID NO: 483955 - DNA, 201 bp, Homo sapiens
ccaggcaggggaggaaatggtagtagggggtctgactcatccccatgtccccagcacccagtgcagggcaggggtggggggtgggcaggaagtgctctccrggtcaatggtgacaacaatgggtatgtgaacagaggcggcgggggtgggggacgcaccccagaaagcacctctctggagggcctggggtcagtgcagggg

SEQ ID NO: 483956 - DNA, 201 bp, Homo sapiens; identical to SEQ ID NO: 401265

SEQ ID NO: 483957 - DNA, 201 bp, Homo sapiens
tgaaagccacccttcccggctgtgggatgggtaaggggaggggaatggcgctggctgaggctcagagagaagggagttggccagagttagccagagtggayacctagcccccagctccctactctgccaccagtaccttggggttgagggggctacctgtcagggaccaacatctctgcctccagagggcaggaggaggtc

SEQ ID NO: 483958 - DNA, 201 bp, Homo sapiens
catgtgtgaacctatcagggctacagggcagggaaccaaggcccaagtttcaagccccagattcctgtggagtcctgtggaggagagaagcaggtcttccrgtgcctcagtttctctccctctgtgacttgggaggcaggaacccttgttcacacctgctggctgagcagcccaggcaggggcacccctaagcctcagtca

SEQ ID NO: 483959 - DNA, 201 bp, Homo sapiens
ctgactgcctcccagcccactccgcttctcagaacctccctggaacatctagccagaccctctggcccccttttgtgcccctgtctaccaatgcagcgagmccagcccctgccccgagctccctctagtccctaaggccacatcctgctccttggtgcattgagaaccttcccttcatgtgtgaacctatcagggctacag

SEQ ID NO: 483960 - DNA, 201 bp, Homo sapiens
ctcctccatctaaccaactccctgtcttttcctggacgacccctgcccctcctgcagggccaccactcctcctggtgctgggttctggagggatgggaccrcagtgggagggggaggggaagttctggctgactgcctcccagcccactccgcttctcagaacctccctggaacatctagccagaccctctggcccccttt

SEQ ID NO: 483961 - DNA, 201 bp, Homo sapiens
actctcgcccccagcaaacttcccgagtctggggaccctctactttgcttccccagaaccccaagcgggatacaaccccattcaaggcccagacccccggygtgccttctaggaccttccgtacctcttgaggctggaccccagcctgcttcccagaatctgtgacccccgcctagagaccaagaccccctgtgtgccctt

SEQ ID NO: 483962 - DNA, 201 bp, Homo sapiens
acagagtctccacacccaccaggacacccaggtaggtgggactgggaagctgcgggccggccaggcccgagctgcttctctcctggcacaactgggccccmaaatgggcaaggagcagaagctgggagttatagagtaaagccttctccacaagggacactctggggcctgggcctctgtgtcccagggaggggcacgcgt

SEQ ID NO: 483963 - DNA, 201 bp, Homo sapiens
gtgattattaatgtatttgattcacaaaatgcctggcacacagtaggcactcagtaaatgggacccgtggttacagcagggtggggcttgagcagaggcakggtcctggaacccaggcacacagactggccacgcccagctcgagaagctgctcttgccccggccacaccgccctggacggccattggtggtgcgtggtgg

SEQ ID NO: 483964 - DNA, 201 bp, Homo sapiens
ttgggggctctatcccagcttcggcaagcccccacccttgtcttgtccacctggaaagtctgttagaaatctccagtgtggttcacgggcgggctgggggscgagcggcgtgggaaagagacgacgcggcctccagggcttccaggagaaggtgtggggtcagcgttcctcaggaggccctccgagcccccaaccctcaaa

SEQ ID NO: 483965 - DNA, 201 bp, Homo sapiens
cttgggggctctatcccagcttcggcaagcccccacccttgtcttgtccacctggaaagtctgttagaaatctccagtgtggttcacgggcgggctggggsccgagcggcgtgggaaagagacgacgcggcctccagggcttccaggagaaggtgtggggtcagcgttcctcaggaggccctccgagcccccaaccctcaa

SEQ ID NO: 483966 - DNA, 201 bp, Homo sapiens
gaggatggaaaggaggcaagggctgaccacggagaggaggggaggcaggggacctggggaaggagaaaaggctgtcgggggcaggcaggggaccatgtcakgccttggactgccagagggctccgggtgtctccccagcagtgggaagttgttgaagggtttgagaagggaaggacagagatgctggtttgtgagctcatg

SEQ ID NO: 483967 - DNA, 201 bp, Homo sapiens
tgtgtgaaggccttgatgtgggatggaggatggaaaggaggcaagggctgaccacggagaggaggggaggcaggggacctggggaaggagaaaaggctgtygggggcaggcaggggaccatgtcaggccttggactgccagagggctccgggtgtctccccagcagtgggaagttgttgaagggtttgagaagggaaggac

SEQ ID NO: 483968 - DNA, 201 bp, Homo sapiens
agcatggaatggcatgtgtgaaggccttgatgtgggatggaggatggaaaggaggcaagggctgaccacggagaggaggggaggcaggggacctggggaargagaaaaggctgtcgggggcaggcaggggaccatgtcaggccttggactgccagagggctccgggtgtctccccagcagtgggaagttgttgaagggttt

SEQ ID NO: 483969 - DNA, 201 bp, Homo sapiens
aaagcctgaataggacctggctttctcaggcttagggaacagcatggaatggcatgtgtgaaggccttgatgtgggatggaggatggaaaggaggcaaggsctgaccacggagaggaggggaggcaggggacctggggaaggagaaaaggctgtcgggggcaggcaggggaccatgtcaggccttggactgccagagggct

SEQ ID NO: 483970 - DNA, 201 bp, Homo sapiens
tcggggcagaggggagcctgatttgtgtgatgctgtcaacactgctgatttcaagctaccagtgtaactgatgtttctgaacccagaactgggagagatgcccgcagtcaggaacacaggcctcgagcgggctcctgcacacctggcaggggatgtgaagacccatccctacttctgggtgttccagttcttttgaggagg

SEQ ID NO: 483971 - DNA, 201 bp, Homo sapiens
aaacctaaagcctgaataggacctggctttctcaggcttagggaacagcatggaatggcatgtgtgaaggccttgatgtgggatggaggatggaaaggagscaagggctgaccacggagaggaggggaggcaggggacctggggaaggagaaaaggctgtcgggggcaggcaggggaccatgtcaggccttggactgccag

SEQ ID NO: 483972 - DNA, 201 bp, Homo sapiens
ggtggccttaaggagacgaggagagaagagcggagcggaggggagggggctgccttcccatagtctggatcgcagcctgcctgggaaggggcagtgtctgkttcctgttccaggcaggtaataaagggcctaattaatgaggagcagctgaggcacacagctcagcagggcaggggcaggacctggaggggccccaggtag

SEQ ID NO: 483973 - DNA, 201 bp, Homo sapiens
tcctgcacctggcttgggtgccctccgttcctttcctggccagctggggtggccttaaggagacgaggagagaagagcggagcggaggggagggggctgcyttcccatagtctggatcgcagcctgcctgggaaggggcagtgtctggttcctgttccaggcaggtaataaagggcctaattaatgaggagcagctgaggc

SEQ ID NO: 483974 - DNA, 201 bp, Homo sapiens
ttcctgcagggaaccatcattgccctggtggtggtcatggccttcaggtgacttgtcccctgggctctcatggtggctgactaggggagtggagctgcccrgtggagtcagctgcccatgggctcaggcctgggggaagaggaggatgtagcttgggagatcaggcagctgaggtctcggtgaggtgggcctttctgcctc

SEQ ID NO: 483975 - DNA, 201 bp, Homo sapiens
agccatgcagggagccagttcagtcgggcgggcagcgtcccccacaagaagaggccccccaaggtggccagcaaggtaggggtgagcagggatggcaggcrggttggaaagggggcctcccttgtggcctccctttctggcttgcagttctccagcctcactgcctctggtgcttccctctccttgtgactctgtagccct

SEQ ID NO: 483976 - DNA, 201 bp, Homo sapiens
aaaagggcttcagggaaggtaagtgggccacctgctggaagctgccagctgcccggctggcaatggtgtgagtgtcttggccctgtccctgccctggggtycagcaggtcatccctcccttcttctctctcctttggcgtttgttcctgtagtcactgggctaatctccccctagcttcaagctgtacatagggcctccca

SEQ ID NO: 483977 - DNA, 201 bp, Homo sapiens; identical to SEQ ID NO: 401258

SEQ ID NO: 483978 - DNA, 201 bp, Homo sapiens; identical to SEQ ID NO: 401259

SEQ ID NO: 483979 - DNA, 201 bp, Homo sapiens; identical to SEQ ID NO: 401260

SEQ ID NO: 483980 - DNA, 201 bp, Homo sapiens; identical to SEQ ID NO: 401261

SEQ ID NO: 483981 - DNA, 201 bp, Homo sapiens; identical to SEQ ID NO: 401263

SEQ ID NO: 483982 - DNA, 201 bp, Homo sapiens
caggacaggaccagtttacctctttccagatatggtggttggagggctggttcaggtgccctggagggaaggggaagcctgtggccctgatttgttcagarcccattctcccttgcctccccttttgagactggagccaacccttttggagagaggacctgcccacctttgagatcagcagggggctcggatccagcccta

SEQ ID NO: 483983 - DNA, 201 bp, Homo sapiens
gccaggacaggaccagtttacctctttccagatatggtggttggagggctggttcaggtgccctggagggaaggggaagcctgtggccctgatttgttcasagcccattctcccttgcctccccttttgagactggagccaacccttttggagagaggacctgcccacctttgagatcagcagggggctcggatccagccc

SEQ ID NO: 483984 - DNA, 201 bp, Homo sapiens
ttcttgggccttcctgcctgccaccccctaggggccaggacaggaccagtttacctctttccagatatggtggttggagggctggttcaggtgccctggarggaaggggaagcctgtggccctgatttgttcagagcccattctcccttgcctccccttttgagactggagccaacccttttggagagaggacctgcccac

SEQ ID NO: 483985 - DNA, 201 bp, Homo sapiens
cccctcacggcacagagggaacctgagagccagagacttcttgggccttcctgcctgccaccccctaggggccaggacaggaccagtttacctctttccaratatggtggttggagggctggttcaggtgccctggagggaaggggaagcctgtggccctgatttgttcagagcccattctcccttgcctccccttttgag

SEQ ID NO: 483986 - DNA, 201 bp, Homo sapiens
gtgtgcatagagcgccccctacttcccagttaactcccagttcttctccctgagcttggtatttgtcatgtgccaactctgactctgaggtgggcagtgarggaagcagccccgggcctgcttgcttcctgtccccgaaatgttcgtttcttctgaagtaaatatacatatataaataaatgtataaatactgctttgtat

SEQ ID NO: 483987 - DNA, 201 bp, Homo sapiens
gaggcccagaggaggagcaggcctcagaggagatggggacggagggggacctttagatttgggttggattctcctggtccagcctgggggcaggaggtggytaggatgaggtgaaaggctgcccctccttgggcaggtttgtgcctccctgcccaggcctctagtaggtggctgaccaacggccctcccacctagggtagg

SEQ ID NO: 483988 - DNA, 201 bp, Homo sapiens
ctgctctcatcctgcacctggcttgggtgccctccgttcctttcctggccagctggggtggccttaaggagacgaggagagaagagcggagcggaggggarggggctgccttcccatagtctggatcgcagcctgcctgggaaggggcagtgtctggttcctgttccaggcaggtaataaagggcctaattaatgaggagc

SEQ ID NO: 483989 - DNA, 201 bp, Homo sapiens
ccaacggccacagctggtgggggggggggcacataagcacaaggaggggcggaagggaggggtcctgggtggagggaccacctgggcccctgcctgctctyatcctgcacctggcttgggtgccctccgttcctttcctggccagctggggtggccttaaggagacgaggagagaagagcggagcggaggggagggggctg

SEQ ID NO: 483990 - DNA, 201 bp, Homo sapiens
agacaacctggagacgcgcattgatgagctggagcgctggagccacaagctggccaagctgcggcggctcgacagcctcaagtccaccggcagctcgggcrccttcaggtaggggtgcggggtgggggaaggtgagacccttcttcccagggacacccctgatcctggccctcttgctgcagccatgcagggagccagttc

SEQ ID NO: 483991 - DNA, 201 bp, Homo sapiens
ccatggcagggattcgtgctccatctgatggagaaggaagccagggctcaggtcacttgctgagggtcatagccatcaagtgggaagtccacattagaaamcaggcctctttgactctggaggtctctctgggcatcgtggttatgcccaggtgggctgtcccttgactgctaccaccctggccctcagctgctgcctgaa

SEQ ID NO: 483992 - DNA, 201 bp, Homo sapiens
accctgactgcggaatggcctcctgggggtcacctcgtttaaggttcactccatggcagggattcgtgctccatctgatggagaaggaagccagggctcakgtcacttgctgagggtcatagccatcaagtgggaagtccacattagaaaccaggcctctttgactctggaggtctctctgggcatcgtggttatgcccag

SEQ ID NO: 483993 - DNA, 201 bp, Homo sapiens
tgcaggcaggaaaggagatgggagtcctaagagagatggaaacagggcggttcaccctgactgcggaatggcctcctgggggtcacctcgtttaaggttcwctccatggcagggattcgtgctccatctgatggagaaggaagccagggctcaggtcacttgctgagggtcatagccatcaagtgggaagtccacattaga

SEQ ID NO: 483994 - DNA, 201 bp, Homo sapiens
gggcctgggggagaggggacagcctgggcggaggtgtgcaggcaggaaaggagatgggagtcctaagagagatggaaacagggcggttcaccctgactgcsgaatggcctcctgggggtcacctcgtttaaggttcactccatggcagggattcgtgctccatctgatggagaaggaagccagggctcaggtcacttgctg

SEQ ID NO: 483995 - DNA, 201 bp, Homo sapiens
gagggacttaggagaaggtgaggatgtccctcggaggctctggagcacgtgtgcagcaaggcggaggggcctgggggagaggggacagcctgggcggaggygtgcaggcaggaaaggagatgggagtcctaagagagatggaaacagggcggttcaccctgactgcggaatggcctcctgggggtcacctcgtttaaggtt

SEQ ID NO: 483996 - DNA, 201 bp, Homo sapiens
accatgcctcagagggacttaggagaaggtgaggatgtccctcggaggctctggagcacgtgtgcagcaaggcggaggggcctgggggagaggggacagcstgggcggaggtgtgcaggcaggaaaggagatgggagtcctaagagagatggaaacagggcggttcaccctgactgcggaatggcctcctgggggtcacct

SEQ ID NO: 483997 - DNA, 201 bp, Homo sapiens
cggccacagctggtgggggggggggcacataagcacaaggaggggcggaagggaggggtcctgggtggagggaccacctgggcccctgcctgctctcatcstgcacctggcttgggtgccctccgttcctttcctggccagctggggtggccttaaggagacgaggagagaagagcggagcggaggggagggggctgcctt

SEQ ID NO: 483998 - DNA, 201 bp, Homo sapiens
gccacagcactgggggccctctgtgactggggcgatggggaggggctgccagggcaggcagggaggcagtcgcagaaggctgacccactggaagggatggytggggccgaggcccggaggctggactgtgctgtgcatgtgtaagaatagcagcagagtgctgaccatgcctcagagggacttaggagaaggtgaggatgt

SEQ ID NO: 483999 - DNA, 201 bp, Homo sapiens
gagatgctggttgggataagggcagcagtctgtcctgacccctctctcccttctctccagggcacctctcaccggtggccaataaccatcctgtccttccrtgaattcacctaccacttccgggtggcactgctggtgagcaggggcatcccacctaccctggaggtctgggcacccctgtctgcgacgtggggcttgagg

SEQ ID NO: 484000 - DNA, 201 bp, Homo sapiens
aggccagctctgctgttcactggccctacccgagactggtgaaactggaagtcttcacactggagttgctgttccagctggtcgcccctcacggcacagarggaacctgagagccagagacttcttgggccttcctgcctgccaccccctaggggccaggacaggaccagtttacctctttccagatatggtggttggagg

SEQ ID NO: 484001 - DNA, 201 bp, Homo sapiens
gctgcaggccagctctgctgttcactggccctacccgagactggtgaaactggaagtcttcacactggagttgctgttccagctggtcgcccctcacggcwcagagggaacctgagagccagagacttcttgggccttcctgcctgccaccccctaggggccaggacaggaccagtttacctctttccagatatggtggtt

SEQ ID NO: 484002 - DNA, 201 bp, Homo sapiens
gattgtactgaggatggggctaatgaaatactttgatgtgcccagagcatagtgggtgagggaacccagcacaacaggactgggaaggaggcaggggccasgtggaggtggctgtggacctgccagtcccgggcacggtctgcatggagtagctgccattgctccttctgccaaagcagaacatgctccttcctatctctt

SEQ ID NO: 484003 - DNA, 201 bp, Homo sapiens
gggcccggggctgtgctcttacccagaccccagtgattttgcagctgtctcatggaaccctcaggtttctgaggagtcttcttcctagacccaagcccccsactctgactcaacctgcacgattgtcttttcatctgttttacatgtggagattccatgaaaggtttagttcaaaggaaggttctgctgtcaaaacatttt

SEQ ID NO: 484004 - DNA, 201 bp, Homo sapiens
actggattgtactgaggatggggctaatgaaatactttgatgtgcccagagcatagtgggtgagggaacccagcacaacaggactgggaaggaggcagggsccaggtggaggtggctgtggacctgccagtcccgggcacggtctgcatggagtagctgccattgctccttctgccaaagcagaacatgctccttcctatc

SEQ ID NO: 484005 - DNA, 201 bp, Homo sapiens
aagatggggctagtagcagcactgtgtcactggattgtactgaggatggggctaatgaaatactttgatgtgcccagagcatagtgggtgagggaacccascacaacaggactgggaaggaggcaggggccaggtggaggtggctgtggacctgccagtcccgggcacggtctgcatggagtagctgccattgctccttct

SEQ ID NO: 484006 - DNA, 201 bp, Homo sapiens
ctctatagtgagggagaaaagacgtgcagaaagcacctgcaacagaggtgggggtgcttctgagggaggcccgagccctgtcgccctgcagaagagacagkgtccaagacagagggagagcccagctagacacacagcagacatggtgctcgggcctgaaaccacatcacagacgcacagccaaagcctcaggtagatggg

SEQ ID NO: 484007 - DNA, 201 bp, Homo sapiens
ggcaccccactgcacctcagcctgactctgcagatgaagtgagtgccggtgtggggaagtgggaggcaggaggggagccagggagaatctcccgcagagcytcagaacagccgagtctgaggacagccggagagtctctggtatttcctgcatggtgggataagtgctgacttcattgcctacttcgtggttaactggcta

SEQ ID NO: 484008 - DNA, 201 bp, Homo sapiens
cttcacctaccacatccctgtcagtagtggcaccccactgcacctcagcctgactctgcagatgaagtgagtgccggtgtggggaagtgggaggcaggagrggagccagggagaatctcccgcagagcctcagaacagccgagtctgaggacagccggagagtctctggtatttcctgcatggtgggataagtgctgactt

SEQ ID NO: 484009 - DNA, 201 bp, Homo sapiens
tgttcctcacccactaccaaccctaccactggtcctagtcttggccccagctttaaccctggccatgttctcagcccaagtcccagccccagcaccaaccrctcaggtaaggctttctgtgggctggggcttggggcgggggctacctgcgtagagagaaaggcccaaatactcattgatgggagggtctcctggagccta

SEQ ID NO: 484010 - DNA, 201 bp, Homo sapiens
gtccagcgtgggccctgctgagcccacctgggcccagggccagtcaggtacttgctgcacccctgacactacccagcccagcctggcaaggctcactggcmagggcccacctcagcccagtcatgtgactgtctgggttcagacttgtcagtcaatagacgtttgctgagcacagaataaggatcaggaatcaggcctgca

SEQ ID NO: 484011 - DNA, 201 bp, Homo sapiens
ccgtgcagccgccggagtgcacaaccacagcctctgtctctcctttgtggagtttgaggatcctatctccctccggcctccctcactcccctctcttctcyctccatggctggggcaaggggatccccatcccctgccctgctagcttggaggagggaagttgtgcctgtgacactgagttcactcagtggggcctggctc

SEQ ID NO: 484012 - DNA, 201 bp, Homo sapiens
caggtggtacgtgatcatgcgcatgtcagtggatacctgactgcagggtgtgcccttacatatatgtgtgtgtgttggcagtgtgcctgcgtggggccacrccggtgtgtaggcacagatgggcacaggtgaccctggtggagacctgtgtccaccccaagctgcagggtctctacctggcacctggtggcctgcctgccc

SEQ ID NO: 484013 - DNA, 201 bp, Homo sapiens
tcactgctgtagccccaaagctgggcactatgcttgcctggcacataacaggtgctcagtaaataactgctgaatgaatgaaggcacacggatgaacgctkgtgtgcgcatgtgtgtgggtatatgtgtggggcatgccactgtgtgtcagtactgtgtatgtgtgagtagggggcaggtggtacgtgatcatgcgcatgt

SEQ ID NO: 484014 - DNA, 201 bp, Homo sapiens
ggaagaagaggaggtgggagctcttcctgggtggccactaacctaacccatgcatgtgacgctgtgcctgtgggcctgggcctgtcgtcgggtcagtgagygtttgtgtacatgcgtgtcctggcatatacacctgtgaagtgtgctgaggtgtgaacatgcacaggcatgctcgtacctcagggcttttgcaccggctgt

SEQ ID NO: 484015 - DNA, 201 bp, Homo sapiens
ggctaaggtgccagttttgcccctgcaggcctgggaacttcacctaccacatccctgtcagtagtggcaccccactgcacctcagcctgactctgcagatraagtgagtgccggtgtggggaagtgggaggcaggaggggagccagggagaatctcccgcagagcctcagaacagccgagtctgaggacagccggagagtc

SEQ ID NO: 484016 - DNA, 201 bp, Homo sapiens
gcagccgccggagtgcacaaccacagcctctgtctctcctttgtggagtttgaggatcctatctccctccggcctccctcactcccctctcttctccctcyatggctggggcaaggggatccccatcccctgccctgctagcttggaggagggaagttgtgcctgtgacactgagttcactcagtggggcctggctccagc

SEQ ID NO: 484017 - DNA, 201 bp, Homo sapiens
ccgagactcagccaacggccacagctggtgggggggggggcacataagcacaaggaggggcggaagggaggggtcctgggtggagggaccacctgggcccytgcctgctctcatcctgcacctggcttgggtgccctccgttcctttcctggccagctggggtggccttaaggagacgaggagagaagagcggagcggagg

SEQ ID NO: 484018 - DNA, 201 bp, Homo sapiens
tcaggctaaggtgccagttttgcccctgcaggcctgggaacttcacctaccacatccctgtcagtagtggcaccccactgcacctcagcctgactctgcaratgaagtgagtgccggtgtggggaagtgggaggcaggaggggagccagggagaatctcccgcagagcctcagaacagccgagtctgaggacagccggaga

SEQ ID NO: 484019 - DNA, 201 bp, Homo sapiens
tagagtatggagggggctcccggacattctgtcctccctgtgccccaggtcgcatcagtgagggaagttctccctccagctgaccggggtccgtgcagccrccggagtgcacaaccacagcctctgtctctcctttgtggagtttgaggatcctatctccctccggcctccctcactcccctctcttctccctccatggct

SEQ ID NO: 484020 - DNA, 201 bp, Homo sapiens
gagtccctggtgggggtggggggtggcagggtaccctcaggctaaggtgccagttttgcccctgcaggcctgggaacttcacctaccacatccctgtcagyagtggcaccccactgcacctcagcctgactctgcagatgaagtgagtgccggtgtggggaagtgggaggcaggaggggagccagggagaatctcccgcag

SEQ ID NO: 484021 - DNA, 201 bp, Homo sapiens
tgaacactccattggtccatggcaggtgttctgcgccctaccttgaagattactggtccccagggtaggtcagtgcccctaagcttagggggcttgttgarcatgttctgtggttctgtgtgcaaggcctgaaccatgacagctctggcccagcgtggcctggtcctggtccctggcacatccagtggggcccgccccacc

SEQ ID NO: 484022 - DNA, 201 bp, Homo sapiens
gggtagcccctttccaggctacccttggacactgtctcttctggagggctccagtacagattgggggctgaggagtccctggtgggggtggggggtggcasggtaccctcaggctaaggtgccagttttgcccctgcaggcctgggaacttcacctaccacatccctgtcagtagtggcaccccactgcacctcagcctga

SEQ ID NO: 484023 - DNA, 201 bp, Homo sapiens
gtcccagggtttctggggtgattaggtaagattgtgcctggcctggtgaacactccattggtccatggcaggtgttctgcgccctaccttgaagattactrgtccccagggtaggtcagtgcccctaagcttagggggcttgttgagcatgttctgtggttctgtgtgcaaggcctgaaccatgacagctctggcccagcg

SEQ ID NO: 484024 - DNA, 201 bp, Homo sapiens
acctcagcccagtcatgtgactgtctgggttcagacttgtcagtcaatagacgtttgctgagcacagaataaggatcaggaatcaggcctgcagccttacrtagatcatcccatttagtcctcacagcactcctgcaagaaaggaattgttgttcctattgttcagctgaagaaatgggatggagactaaggtgaagtgac

SEQ ID NO: 484025 - DNA, 201 bp, Homo sapiens
gaccacttggagtttagtgggcctctgcccggcctctggagccccaccagggctggaggagggaggcctgggatttcgccccttctgaagctgatgggtgrctggactggtgacttccttctctggcctcattcccctcccagggtaagtaagtgggttggaccagagcaggggcttccaatgtgattttttaaccatcaa

SEQ ID NO: 484026 - DNA, 201 bp, Homo sapiens
tcactcagtcttgtggggccctagagacagctggacaggaagcagccagcttccagcttcttagcctgtgcctggttctatccacaggccccagccagatkgcccttctgccagtcaccaacatcagagccaagtcctggggtctttcagtcaatggcattggccactccaagcatcacaagagtctggagcctctggcca

SEQ ID NO: 484027 - DNA, 201 bp, Homo sapiens
ttcactcagtcttgtggggccctagagacagctggacaggaagcagccagcttccagcttcttagcctgtgcctggttctatccacaggccccagccagawggcccttctgccagtcaccaacatcagagccaagtcctggggtctttcagtcaatggcattggccactccaagcatcacaagagtctggagcctctggcc

SEQ ID NO: 484028 - DNA, 201 bp, Homo sapiens
gttcccctgagaggaccaagagacacatggggttcactcagtcttgtggggccctagagacagctggacaggaagcagccagcttccagcttcttagcctrtgcctggttctatccacaggccccagccagatggcccttctgccagtcaccaacatcagagccaagtcctggggtctttcagtcaatggcattggccact

SEQ ID NO: 484029 - DNA, 201 bp, Homo sapiens
ggtctcctggagcctagaacgaggctctggacaatgactgggaagttcccctgagaggaccaagagacacatggggttcactcagtcttgtggggccctakagacagctggacaggaagcagccagcttccagcttcttagcctgtgcctggttctatccacaggccccagccagatggcccttctgccagtcaccaacat

SEQ ID NO: 484030 - DNA, 201 bp, Homo sapiens
gcgtagagagaaaggcccaaatactcattgatgggagggtctcctggagcctagaacgaggctctggacaatgactgggaagttcccctgagaggaccaasagacacatggggttcactcagtcttgtggggccctagagacagctggacaggaagcagccagcttccagcttcttagcctgtgcctggttctatccacag

SEQ ID NO: 484031 - DNA, 201 bp, Homo sapiens
tcctgagcccaggcaggggaggaaatggtagtagggggtctgactcatccccatgtccccagcacccagtgcagggcaggggtggggggtgggcaggaagygctctccgggtcaatggtgacaacaatgggtatgtgaacagaggcggcgggggtgggggacgcaccccagaaagcacctctctggagggcctggggtcag

SEQ ID NO: 484032 - DNA, 201 bp, Homo sapiens
agcagaggctgctgggtaacagcccagcagagctgctcattggctgccacccttggactttgccctccctgataaggaactgggagcagaaattattaacygaatcattaactgggtggccccgccctacccaggcagcctgccttaccttcccaccttcctcttcacggacctagcaccttcctgggcctcagtttctct

SEQ ID NO: 484033 - DNA, 201 bp, Homo sapiens
gctgcggctgggctgttctgtgggctagcctggagctccatcttggcgtgcgtgcaggctagcccgctttctgggctctgcttctccacccccatgactcyctggttgttcagacggtgactcaggccccggggggcagggtggaggagtgggtttgcccggtgctgcctgcctaccctagcccagccctggaatgcagct

SEQ ID NO: 484034 - DNA, 201 bp, Homo sapiens
gctgtctggccttgtctgtcaccccccgtgcccactggcagggacaggaagctccccccccaccccgctttgggcagtttgccttggcacgggcctgatcygttttcctccccagagcagctgctgttctgtctgctgggcagagggctgggttcctccgaggtaggcaggggcctcaacccagagcccctctcacaccct

SEQ ID NO: 484035 - DNA, 201 bp, Homo sapiens
ggtaatttgcctaatagcagtggatttgaagactgttcaagcctggtagcaccagcagaccaggtcggcgcaggcctcagccccgtggcactcacaatctrgaagtgggagacagacaatacacgaatgaatgagaccatttaaagatgcagaaaataaaatagagggagggaatgggatgcgccgtcggcttattggagg

SEQ ID NO: 484036 - DNA, 201 bp, Homo sapiens
agctgctggttgactgttacaaacccacagaggtaagagatttcctggggggctggcgggggtggcagggtgaggggagcccggctcctgtcatcttgggrtctggtctccttaatgtttaccctcccaccccatccaggccttcatttctggcctgctggacaagatccggggcatgcagaagctgagcacaccccagaa

SEQ ID NO: 484037 - DNA, 201 bp, Homo sapiens
ttctgtctgctgggcagagggctgggttcctccgaggtaggcaggggcctcaacccagagcccctctcacaccctctctccaactcaggcttatgtctctycctcctcccccacccccaccccaggaagaggagatcccagaactggagattgacgtggatgagctcctggacatggagagtgacgatgcccgggctgcca

SEQ ID NO: 484038 - DNA, 201 bp, Homo sapiens
cgcagggaggggcccgacgctcgcacgtggccccggcggccgccatggcggacagcggcaccgcggggggcgcggcgttggcggccccggcccccgggccrggcagtggcggcccaggaccacgcgtctactttcagagcccccccggggccgcaggagagggcccgggcggggcggacgatgagggcccagtgaggcgcc

SEQ ID NO: 484039 - DNA, 201 bp, Homo sapiens
caggggtctcttcccctgccccctcagttttccacttttggggttttttattgttattaaactgatgggactttttgtgtttttatattgactctgcggcrcgggccctttaataaagctaggatacgcctttggtgcagctaacaggctcggctggtctcttttaggggggcacactgctctttgacttctgccagctca

SEQ ID NO: 484040 - DNA, 201 bp, Homo sapiens
tccttaatgtttaccctcccaccccatccaggccttcatttctggcctgctggacaagatccggggcatgcagaagctgagcacaccccagaagaagtgasggtccccgacccaggagaacggtggctcccacaggacaatcgctgccccccaacctcgtagcaacagcaataccgggggaccctgcggccaggcctggtg

SEQ ID NO: 484041 - DNA, 201 bp, Homo sapiens
atatttcttcaaagaattcataacacccaacaagtagagatccacagtgataataaatgctatgtctaaaatgacttaactgaaacaattccagagtgccrtcaacagagatcacgcaaaaggaaacatggcactttcaacgttctcttctggaagaacaggtaggtcttcaaagcttgagagttcaaacaggggccattt

SEQ ID NO: 484042 - DNA, 201 bp, Homo sapiens
aagtagagatccacagtgataataaatgctatgtctaaaatgacttaactgaaacaattccagagtgccatcaacagagatcacgcaaaaggaaacatggmactttcaacgttctcttctggaagaacaggtaggtcttcaaagcttgagagttcaaacaggggccatttaaacaggtagattatcaatggctaatgtatt

SEQ ID NO: 484043 - DNA, 201 bp, Homo sapiens
gatcatgccactgcactccagcctgggtgagagtgagactctgtctcgggggggaaaaaaaaaatccatagggaagaataaaggtccacaaatagttaagraaaagaagagttaaacaatcaccttatttgaaagtaagatatattacaatgccatggtaataaaacagtgtggtatagttgcaaacaaataatacagtga

SEQ ID NO: 484044 - DNA, 201 bp, Homo sapiens
ataggtcaggcgtggtggctcactattgtaatcccagcactttggggagctgaggtaagaggactgcttgagcccaggagtttgagaccaaactgggcaayatggcatgactccatctataaaaaaaaatacaaaaaaataagccaggcatggtggcacacacctgtggtcccagctacttgggaggctgaggtaagagga

SEQ ID NO: 484045 - DNA, 201 bp, Homo sapiens
gcaatcaaaactttccctcatccaccgcaagccatctaatggttttaccaagttctaccttactttcaagagcagataacatctacctacacaaatttttytaggagaaaaaaaaaaaaaagatacccaacttattttatgaggccaatagaaccttgatattataactgggtaataagagtacatgaaaagaaggctaca

SEQ ID NO: 484046 - DNA, 201 bp, Homo sapiens
ttagtagagatggggtttcgctatgttggccaggctggtctcgaacccctgaccaggtgatccacccgcctcggcctcccaaagtgctgggattacaggcstgagccatcgtgcctggcctatcttttatttcatttttaaagtaatgagaagaggtgtcattatgttgcccaggtgggtctcaaactcccgggctcaagc

SEQ ID NO: 484047 - DNA, 201 bp, Homo sapiens
agcaagggcaaagatgcccatctgtcaggaatgcacagggcctataaaggcccataaacatctttgtcttcgaatgctaaattgtgtctatgttttttttktttttttttttttttcaggtaagagtccttatgctagattctcaaaagggataataaccctaaaaatgataaaagtcactattattgagaaaattccagt

SEQ ID NO: 484048 - DNA, 201 bp, Homo sapiens
tcactattattgagaaaattccagtatttcaagtgagatttcactagatctaaacacttctttcaaatctgaaactgtaaacccctatagactatactccycttaaggagtgtagtcaaaacaggattcactacatattaatacaaatgacctgtggtccagaactgactaggggtgccctcattatggaagtgaaataaa

SEQ ID NO: 484049 - DNA, 201 bp, Homo sapiens
gcccaacatattcctttataattaaatcacagtattttttttttatgttttaacactattgtccacctccccccaacatacatgcccctgacacttaattmtctctactctaaaaatgtcaaatcaaggtaaaatgctatgatttttaaaaaactacacctaaattgtacagcatttcatttgaccaacaagtattactgc

SEQ ID NO: 484050 - DNA, 201 bp, Homo sapiens
gcaagggcaaagatgcccatctgtcaggaatgcacagggcctataaaggcccataaacatctttgtcttcgaatgctaaattgtgtctatgtttttttttkttttttttttttttcaggtaagagtccttatgctagattctcaaaagggataataaccctaaaaatgataaaagtcactattattgagaaaattccagta

SEQ ID NO: 484051 - DNA, 201 bp, Homo sapiens
tatgtccactacatcgtcagtgataatggaaaagaagtgtgagtctctcacttccctgagagtttcttctcgaatacagctctcacagatctctagcatcygcctctgctgtgtttttgaacaaaacaacgtgttaactgctgttgtctcaaaccgctttctcagaacctcttcaccagaatttatccgacactccagcag

SEQ ID NO: 484052 - DNA, 201 bp, Homo sapiens
gaactaagttgaaacagctttctgatatcaacagcaactcttattcagacaatcaagaacagaatgggcatcaggcagagagcctaatcaaatacacctgwctttctatatgaactacttaagaataaatctagtgaaagaagtgcaagacctctaataatctttttaaagcaaacttaaataaatacacaagtttatgaa

SEQ ID NO: 484053 - DNA, 201 bp, Homo sapiens
cgatatgcagttaaaaaggttattacaatactcctcttttttccatataattgtgaattctccacaagtggtagtttcttcaagattagttgaaatgtgamatctgagaccagaccaatgagctttttcatgccctagtacataaaaaatcccatagtctatcttgcacttttatccatgtatgtctctgtaaaaccataa

SEQ ID NO: 484054 - DNA, 201 bp, Homo sapiens
tcctagtgggagagacaaacagtgtaaagagatatattttaatcctagatgtaaatgctgttacaagataggaataattttttttttttaagaagtagagsggggagtctcactatgttgcccaggctggtcttgaactcctggcctcaagtgatcctcccacctcagctccaaagtacaaggattaaaggtgtgagatac

SEQ ID NO: 484055 - DNA, 201 bp, Homo sapiens
gcaccctcacgagtccccagaaaaccactgttttacatttcacaaagtagagcacaccagctctcaatcagccttcattaaattgccagaagaaccttggragccctcacccatcttgggtgagttagtactagctgcctgaggaggaagaagagagcttcaacgcccatctcactctaatcagagcaattcattagctct

SEQ ID NO: 484056 - DNA, 201 bp, Homo sapiens
ggaggctgaggcaggacaattgcctgaacccaggaggcagaggttatagttagccgagatcgtgccactgcactccagcctgggcaacagagtgagactcygtctcaaaaagaaaaaagactatggagggcggtggggagaaacaaaaattcagaagttgcatttgatgacaaggataaataagggggacatgaacaagga

SEQ ID NO: 484057 - DNA, 201 bp, Homo sapiens
gactgtaatgtaagtgtcagtattcatctaagtcccaggaaaatagaaataaacaaatagaggggaaaatgcataaagaaaaataaaaactaaggatttcycagaatttaaggtgtaagtcctcagttgtaagatgacaaattaaggtacataaaaaaaaaactcacatctagatacaggttagcaaattttaaaatgtca

SEQ ID NO: 484058 - DNA, 201 bp, Homo sapiens
actatcacttactttttttctgtttcagtgtcctgatttcatcttcactctaaatgtcaagaaaaaaaaagaaaaaaacaaatcatctttaaaaaactgayctctagtgtatcatcttagactcacaaatacaaatgcctattctgagtcaatttaattctttcaagagcataaattctttatatagtacacattcttcaa

SEQ ID NO: 484059 - DNA, 201 bp, Homo sapiens
tgtaagtcctcagttgtaagatgacaaattaaggtacataaaaaaaaaactcacatctagatacaggttagcaaattttaaaatgtcaaatataaagaaaycttctaaaaagctttgagggagaaaagaagattacctaaaaaggaacaagaatcaggctggcacagacttgaatagcaataatggatgcaaaaaaatcag

SEQ ID NO: 484060 - DNA, 201 bp, Homo sapiens
tcctatttcactcataataaaaaccatagtgccttccaagacctacaaggtcctacctaaagaatttgcccctaccatacacacacctttctggtctcatmtcacctctctcccagtccctctccctggactcctggttgccctgtctttgccttctttggaatgctgctgcccaaggtatctccatggctggccccttca

SEQ ID NO: 484061 - DNA, 201 bp, Homo sapiens
gggaggattgcttgagcctgggaggtcggggctgcagtgagccatggctgcgccactgcaccccagcttaggcaacagagtgagaccctatttcaaaaaawaataataataataaaaaatataaatatctataaggacacatgccaaaaaagacaatattcaaatactacgtatgataccaagtatctcagtatcaagatt

SEQ ID NO: 484062 - DNA, 201 bp, Homo sapiens
ttcaaatctgaaactgtaaacccctatagactatactccccttaaggagtgtagtcaaaacaggattcactacatattaatacaaatgacctgtggtccasaactgactaggggtgccctcattatggaagtgaaataaacctgtaagaatgtctttgggctaaaatttgggtaaaaggaagataacgcataatggggcaa

SEQ ID NO: 484063 - DNA, 201 bp, Homo sapiens
ctaaaaaaaatttttttcaaaaattagccgggggttgtgatgggcacctatagtcccaggtatttgggtggctgaggctggaagattgcttgagcccaggwggttgaggctgcagtgagccatgctcctgccactgcactccagcctgagtgacagagtaagacccctcaaaaaaaaaaaaaagtttgaaatttgctgctc

SEQ ID NO: 484064 - DNA, 201 bp, Homo sapiens
gagacttcgtgtgatcctgggaacaaaactaggacctccaaggcctcaattacaggaggcagatgtccactcaatacaaggaagaaacaacagccaaagcrtccagaatcatcacgtgtcttctcacaaaggggaggactatcattagaggtgttttagcaagggcaaagatgcccatctgtcaggaatgcacagggccta

SEQ ID NO: 484065 - DNA, 201 bp, Homo sapiens
cactttacatgggtgaattatatgtgaattgcatctcaataaacatctttttaaaaagaaattcatgatttggtcttgaagcattcaaaggagtctaacgytgaaaagggcagagacttcgtgtgatcctgggaacaaaactaggacctccaaggcctcaattacaggaggcagatgtccactcaatacaaggaagaaaca

SEQ ID NO: 484066 - DNA, 201 bp, Homo sapiens
ccaatttgagaatgtctctcccatgcttaagcttttagtggcttctcattactctcaggataaacaactgtgttcacttctatcctggggccttccctgcrctgtttactcagcctactacactcttcttgctgctttttatacacttcctatgcacagttaactatgactcagccttcagatcttagcgcaaatgtcatt

SEQ ID NO: 484067 - DNA, 201 bp, Homo sapiens
aggttaagaagtaacttgtttggagggaagtacaaaatcatcagcagaactagaactgaaacctgcatcttccaactcccaaaacatcagagaagattcamccatcagcagaacaagcagaaagctgcatgcacagccacaaggctcacagcttaacattcccttcaggatttcaacttcaacaagcatacaaaacaacac

SEQ ID NO: 484068 - DNA, 201 bp, Homo sapiens
ctcttccaaactggtcatctgcccttctctaaccccttctccgtgctgcagagcattttttaaagccaatttgagaatgtctctcccatgcttaagctttyagtggcttctcattactctcaggataaacaactgtgttcacttctatcctggggccttccctgcgctgtttactcagcctactacactcttcttgctgct

SEQ ID NO: 484069 - DNA, 201 bp, Homo sapiens
ataacttttcttcattaaaagaagccatttaagagtgaaatggcagaccacaaaatgtcagatatttgcaatacatatatctaacaatggactcacattcraaatatatatgaagaactcctacaaataaataacccaacataaaaataggcaaggggccttgaacaggcactttataataaaaaggttataaaaatggca

SEQ ID NO: 484070 - DNA, 201 bp, Homo sapiens
atatgtgaggctctctgagggacagactacagggaaatgatagctacaggacagcaagtgattgagctcctcatcctgatacatattacacttcatatctrtggatttaaccaaccatgcattgaaaatgctggggaaaaaatggatggttgtatctatcttgaacatgtacagactttttttctcattcttcccctacat

SEQ ID NO: 484071 - DNA, 201 bp, Homo sapiens
aaactttccctcatccaccgcaagccatctaatggttttaccaagttctaccttactttcaagagcagataacatctacctacacaaatttttctaggagaaaaaaaaaaaaaagatacccaacttattttatgaggccaatagaaccttgatattataactgggtaataagagtacatgaaaagaaggctacagaccaag

SEQ ID NO: 484072 - DNA, 201 bp, Homo sapiens
taggcaaagatatttagtgattaagtggtctacatacaccttacggctttttcttccaaatatcaaatataagaaagcctatttttaaaagtctcttaggyattttccacagtttcggaattatctgtaggaagctctgacttacttgtatagagtttaatatatgtgtccaccattaaatccaggtcgtgttttatatca

SEQ ID NO: 484073 - DNA, 201 bp, Homo sapiens
cactagagacaatgtaagcctggccacgacaatactccatatttaatccccacttctcagttatcatagtgtgaaatttcacagccaaaatttctgcatcrgcttcataaggcaggaagcctataaattcctctcttaggttatgagattcatcaacaaacctcaccaacacaggtaggtgctcttcccctgctatgtcca

SEQ ID NO: 484074 - DNA, 201 bp, Homo sapiens
catttatttcccgttacattacctctgaaatagagagtaatttggattaattttaacataaatgcatctgtatttgatttcatagtattatgggggaaggygggaaagctgaaagtacatagacataccagttcttttattcgttttctgtgtctactatgtgggttgttcaaatgactggtaagatcaaatattgttggt

SEQ ID NO: 484075 - DNA, 201 bp, Homo sapiens
taaggcaggaagcctataaattcctctcttaggttatgagattcatcaacaaacctcaccaacacaggtaggtgctcttcccctgctatgtccactacatmgtcagtgataatggaaaagaagtgtgagtctctcacttccctgagagtttcttctcgaatacagctctcacagatctctagcatctgcctctgctgtgtt

SEQ ID NO: 484076 - DNA, 201 bp, Homo sapiens
tcctctcttaggttatgagattcatcaacaaacctcaccaacacaggtaggtgctcttcccctgctatgtccactacatcgtcagtgataatggaaaagamgtgtgagtctctcacttccctgagagtttcttctcgaatacagctctcacagatctctagcatctgcctctgctgtgtttttgaacaaaacaacgtgtta

SEQ ID NO: 484077 - DNA, 201 bp, Homo sapiens
actccccaaaacagcctcatgtaaacttgttatataacagaggtggcattttataccagtggacgaaaggaagaactaacagaccatgttgggaaaacagyttctctataaggagaaaaagttattatagatccctactgtacatcatacatactaactccaaatggataaaatatctaaatagaaaggtaagcatagaat

SEQ ID NO: 484078 - DNA, 201 bp, Homo sapiens
gagaagtatataacagagcagtgcctgtcacaaagaatacactacgtaagtactgttccagcctgggcaacatggcgaaaccctgtctctacaaaaaatayaaaaattagccaggcatggtggtatgtacctgcagtcccagctacttgggaggataaggcaggagaattacttgagcgcaggaggcagaggttgcaatga

SEQ ID NO: 484079 - DNA, 201 bp, Homo sapiens
gaaaatgagctcagcatttaaatttcagccttcagttttaaggcaaacatacattaataacaacggattcctgctcccctccctgagaacataatttggaraatttgattaataacaaaataacagttggaaaaaaccttagaagtcatttagtaccaacatttcaattacagacaaggttaagaagtaacttgtttggag

SEQ ID NO: 484080 - DNA, 201 bp, Homo sapiens
ctaggagttcaagaccagcctggacaatatagggagaccttgtctctataaaaaattaaaaaattagtcaagtgtggtggcgtgcgcctatggtccccagmtacttgggaggcagagatgggaggattgtttgagcctgggagatggagactgcagtgagcaatgattgtgctcctgcactccagcctgggtgacagaata

SEQ ID NO: 484081 - DNA, 201 bp, Homo sapiens
cgggtttcttccttgagggggggctccagaccacaggacgcaggaccctctgtggggtgcccgtgttccgagggataagacacagcctcataggggcgccrtcccacctgactggaaaagaaggcccaagatgtcgctgacggttgaagaggagtgggaaacggcccacaattccccgggcaggcacaggtgcaggagctg

SEQ ID NO: 484082 - DNA, 201 bp, Homo sapiens
ggtcttcacccagcaccttcaaggccgccttctctggccacagggagcagcccggaactggggcagggagcactgttggaagtgggtcaggcttcccaaarggaaggatgcctccagcagggctgtgtgaactggcgactccatggcccttggagtagaaactcactgcatgcacctgggccttgtcagtctgattctttt

SEQ ID NO: 484083 - DNA, 201 bp, Homo sapiens
ggtccaagtccccagcacgcgcattgggaccgcagcgctgccggcagcccgatcccgcgctctgcaaaccgtgccgcggccccccagagagggtcactcgytcctatttgggtcagccctttccagcagctactgtgtggccggcccggggccagcgccgcccgggtacctcgcggggcgggagggagcggctgagccagg

SEQ ID NO: 484084 - DNA, 201 bp, Homo sapiens
ccctgctcgcggaagctcccgagggcccggaatcggcagggcagtcagagagggcttcagggaggaggcagctagagctgcgaccggaaggtgaggtgagsgtcatcccccccggcgcaaggaggagtggacccatggaaggacaggggagcagcagaggccaggcttctaggggctggaatgtcacacccagaagttaga

SEQ ID NO: 484085 - DNA, 201 bp, Homo sapiens; identical to SEQ ID NO: 302218

SEQ ID NO: 484086 - DNA, 201 bp, Homo sapiens
cgaatccgtggtcacctgaaggcaacagcaccggcgcccagtgcgcctgcgccgcgcgtgcgcagagccctcgcctcccggcctcgcctcgcagacgcgasgggccggggaggaagcgctcggagcagtgcaggtttcgttatcctgtgttaggtcactccggagaggggaaagcggcccacagcgtcgcgcgacccggaa

SEQ ID NO: 484087 - DNA, 201 bp, Homo sapiens
ggtgacccgggggacacgcccactccttccccagcgccccagatggcagtgtagaccgcacctgtgcctgctgacggcgagccagggctcccagggcaacycttccggaccccaggggccgggtgagcggaaaagcaggcaaggcaggagcgccggggagcacggagcgggcctcctcctctccgtctccgagagggagtc

SEQ ID NO: 484088 - DNA, 201 bp, Homo sapiens
ggatggctttttccgttccgtaccttcccgtctgtgctacctcctgtgttcccagagcaactgctgcaccttatttgcagcaagtcccctgtggtcaccgytgccctgttcatctcccaccaggctatgagcgccttcaagcacgctgccttgtgcatgcccatctgcctggcaaaggcctggcctgtcggaggtgttcag

SEQ ID NO: 484089 - DNA, 201 bp, Homo sapiens
agcctcccgagtagctgggattacaggtgcttgccaccatggctggctaatttttgtatttttagtagagacggggttttgccatgttggccaggctggtytcgaactcctgacctcaggtgatctgcccaccttggcgctggggttgcaggtgtgagccaccacacctggtcacaggtgcagttttgttacatggatata

SEQ ID NO: 484090 - DNA, 201 bp, Homo sapiens
tgatctgcctgcctcagcctcccaaagtgctgggattacagatgtgagctaccacgcccagctgaaagtaacttttaaaaatgacaactaataactggctracatattgaaatctcttctgtctttattacctcactggcatgtgcggggatcatattggtactagtgttctgccaagatgctcactgagtggaaatgaga

SEQ ID NO: 484091 - DNA, 201 bp, Homo sapiens
tgagcagctgggattacaggcacgcaccaccaagcccagctaatttttgtatttttagtagagacagggttttgctatgttggccgggctggtctcgaacycctgacctcaagcgatccccctgcctcagcatcccaaagtgctaggattacaggcatgagccaccacaccaggcttaagtacattgtatatagagtttcc

SEQ ID NO: 484092 - DNA, 201 bp, Homo sapiens
tgtaacagggatcttgagtccctgtgctcggcctgctcccaccctgtggaatgtactttcgctttcagtaaatctcggcttttgttgcttcattgtttccwtgctttgtttgtgcattttgtccaattttttgttcaaaatgccaagaacttgggcaccctccactggtaacaagaatgctttggaattcaatgtccatgg

SEQ ID NO: 484093 - DNA, 201 bp, Homo sapiens
ctgaaaattacaatatgtttccatcctcaccaaagcatttaggagagctgatgtttatcctaaatggacaaatttctttcctagatgatgaagctaaaaarcagacttcttcctctagaatatgtatcttttcaagtctagggtactgatgattttaacaactggcaaaaaaagactaacctcttcccccagcccacattt

SEQ ID NO: 484094 - DNA, 201 bp, Homo sapiens
tatgggctttacaaacaagcaatagttggagacattaatattggtattatatattattaatattaatatattcatatgttacaattaatatattaattgcrattataatatataattacttaaaatatagtaatatactccgtttgaacaatgtctatagaagtgcacagtaaaatgttaacctgcaaatgcatgtctcct

SEQ ID NO: 484095 - DNA, 201 bp, Homo sapiens
gtaatttcattctctttatatggctgagtaatatcccctggtatacatatacaacgttttctttatcccatcatctgctgatggatacttaggttgattcyatatctttgctcttgtgaattgtgctgcaatagatatacaagtgcaggtatcttttggatagaatgatttattttcctttaagaagatacccagtagtgg

SEQ ID NO: 484096 - DNA, 201 bp, Homo sapiens
tcctgagttttaaaaaataaggcaaggtaagacacagtttagtttaaaaatctataaaggaaactaatcacaaagctctttgtagagtataaactaagagkttagaaagggaaaaggataaagatcctgggaacactcaggctctggagtagactggacttccttgtctatttcagccactggctgaaccctgggccagcc

SEQ ID NO: 484097 - DNA, 201 bp, Homo sapiens
tcaaggggttgcacgaagtgaatacttccccccgcaacgaaactgcaacacgtgtgatgtttttgcccagggaagcaaatgagagactcagtacccagagytttggctgagggctggctttataccctcggcctagcatgttccagaattccacactcccataagcaggtaggtgtcagcatagaccacgttgttcataca

SEQ ID NO: 484098 - DNA, 201 bp, Homo sapiens
ccattaaagaaaaaaagaaatgcttcccccaacaaagactgtgcattcaataccttaatggaactcgaggtggagcttatgaaatttgtgtccaaagtgcrgaatcttaaacgtgccatggcaacaggtagtggcagtaacctcaggcttcgaaagtcagagatgcctgcagatccataccatgtcacgatctgtgaaata

SEQ ID NO: 484099 - DNA, 201 bp, Homo sapiens
tgcagtggcacgatctcggctcaccataacccctgcctctcgggttcaagcgattctctcacctcagcctcccgagtagctgggactacaggcatgtaccmccacacccagcaccaccatacacagtttttgtatttttagcagagacggggtttcaccatattggtcaggctggtctcgaactcctgacctcaaatggtg

SEQ ID NO: 484100 - DNA, 201 bp, Homo sapiens
tcactctccattaaagaaaaaaagaaatgcttcccccaacaaagactgtgcattcaataccttaatggaactcgaggtggagcttatgaaatttgtgtccraagtgcggaatcttaaacgtgccatggcaacaggtagtggcagtaacctcaggcttcgaaagtcagagatgcctgcagatccataccatgtcacgatctg

SEQ ID NO: 484101 - DNA, 201 bp, Homo sapiens
tcgaggcggccaacttcactctccattaaagaaaaaaagaaatgcttcccccaacaaagactgtgcattcaataccttaatggaactcgaggtggagcttwtgaaatttgtgtccaaagtgcggaatcttaaacgtgccatggcaacaggtagtggcagtaacctcaggcttcgaaagtcagagatgcctgcagatccata

SEQ ID NO: 484102 - DNA, 201 bp, Homo sapiens
ctcctggccttcgaggcggccaacttcactctccattaaagaaaaaaagaaatgcttcccccaacaaagactgtgcattcaataccttaatggaactcgargtggagcttatgaaatttgtgtccaaagtgcggaatcttaaacgtgccatggcaacaggtagtggcagtaacctcaggcttcgaaagtcagagatgcctg

SEQ ID NO: 484103 - DNA, 201 bp, Homo sapiens
acatctgttgccaacaaagaatgaacgagataatgaattatttttacttttatactgtacatcagagttgcctttgcagaactgtgttgaatactctgtgstagtttgttggggctgctgtaattaagtacccaagccggatgacttaccggaaagtcattgtcttatagttctggagactaacgtccaaaatcaaggtgt

SEQ ID NO: 484104 - DNA, 201 bp, Homo sapiens
gacagtagagaccaggtgacgaacaggagcgagcgtaggctcctcccggctcctcgtggaggccaccttggctgttgcgactttctgcagttatgacaggrcactggttgaaattcaggaatacctcaggaaattgtcttaaagatacatctgttgccaacaaagaatgaacgagataatgaattatttttacttttatac

SEQ ID NO: 484105 - DNA, 201 bp, Homo sapiens
ccttgcacttcaagagaagggaaggaagcaggaggaaagaggaacagagccacgtcaggattgcacaagggacagtagagaccaggtgacgaacaggagcragcgtaggctcctcccggctcctcgtggaggccaccttggctgttgcgactttctgcagttatgacaggacactggttgaaattcaggaatacctcagga

SEQ ID NO: 484106 - DNA, 201 bp, Homo sapiens
caatccagttttttcttacgcccataatagtacccatctgttagatgggtgcacagttgtcctttgcgttggttggcctaaaacaatcatactaataaccrtgatgacacgtatgcagtaaaacctcactgtctgccgagcttcacagagaagctgattctgttgcatggaaatacagcgttacaagggaactctgagatt

SEQ ID NO: 484107 - DNA, 201 bp, Homo sapiens
tctcttctcctttttctcttacccagtgaattgagctttgcttattttgactttgtccatctgttattgataagagcctccacacttgaaattgatgattsgattagtttgtgtatggtcatcccttgatatgtgtgggagattggttccaagaccccctgtggataccaaaatccatggatgctcaggtctctgatataa

SEQ ID NO: 484108 - DNA, 201 bp, Homo sapiens
ggtgccggagcttagcagtcatgtggcttgctttctggtgtccttgggtttggtggcgccttggaggaaatggtgcttggtcatgagcacgttcatttccrtcagccattgctacgggacttccagcgagatccagcctggtctgcggccttccgttcttgaggtggggaaacaaaacctgaagtgaagtgggattctgaa

SEQ ID NO: 484109 - DNA, 201 bp, Homo sapiens
atcagcttcttccaaactcctattaatgttgatattctgccctcctctcatgaatcacagattttttttgtttgttttttgtttttttgtttttttgagayggagtccagctctgttgccccgtctggagtgcagtggcacaatctcggctcactgcaacccccacctcctgggttcaagtaattctgctgcctcagcgtc

SEQ ID NO: 484110 - DNA, 201 bp, Homo sapiens
atacagttctatacttaaaatacttgtaatattcagttttatgtggttgaatatttaatggaaaaaaactccaagaaattagaacagtaaagaaaaaaagsatacaaataaaacaatgctaatacataagattgtcattaccgtcaattgatagtccacaaatactcggagcagagaactcagtgagacgtgctcattctc

SEQ ID NO: 484111 - DNA, 201 bp, Homo sapiens
tcataaaagttgaaaaaacaagtttttttaataagggaaatttcttgagaggacacaactttttaaatatggtcagtggggaaaaaaacttggaaaggtartgaagaatttgagaaccatcaggctagtcaaacccttcatctcactgtaaatgactcacttgaggccccatggctagcgaagtacttaaaccagaaccag

SEQ ID NO: 484112 - DNA, 201 bp, Homo sapiens
ctccgtcttgcccactaggattgaggcagcagttttatagttgttgtaaaatttgaagccttttttgttttgttttgtttttctttttacctttacatccwtcatgaacatttccttcctcacttttccgcttaatggctcgaacatttccttcccagccagcgtttggtgtagcacctggagcatctaagaggaaaacaa

SEQ ID NO: 484113 - DNA, 201 bp, Homo sapiens
aagtttttaaagtttaaataaaaattatttaaaataagttttaaagctttagatcacaggtccccaacccccataccggtgacagtccgtggcctcttagkaaccgggccacacagcaggaggtgagccacaggcgagagaacattagtgccagagctccatcagcggcattagattctcttaggagcacaaaccctgttg

SEQ ID NO: 484114 - DNA, 201 bp, Homo sapiens
tcgcagctactcaggaggctgaggcaggagaatggcttgaactgggaggcggaggttgcggtgagctaagatcattgcactccagtctgggcaacaagagsaaaattccgtccccaaaaaaaaacaaaaacaaattttttgtttgtttagtttgagccacataggtggctccaaatttgtaggtagcctgtggtttaatat

SEQ ID NO: 484115 - DNA, 201 bp, Homo sapiens
ttgaatgttatatatgctatgaatatttcacttagcctttggcttattgttttttgttgttgttgtgacattgtcatgtaaaagtttgtaatttttacatrgtaaaacttatttttttaaaataagtttttaaagtttaaataaaaattatttaaaataagttttaaagctttagatcacaggtccccaacccccataccg

SEQ ID NO: 484116 - DNA, 201 bp, Homo sapiens
tgttttctgagcgagccttgaaagagataaaagcggaagtttgccacacggtgagttcctgacatgtaccatttgttccttctctgtagctgaggaaatcrgatggtttagggtcctttccctccatttgttctttctgaaatcagctctcataagttgcttttctgcttccatggctcttggttgctggaagtgcagaat

SEQ ID NO: 484117 - DNA, 201 bp, Homo sapiens
ggcaccactgcactccagcctgggtgactgagtgagaccctgtctcaaagaaaaaaagtttacatgactatgagtatgttccataaatgaatcctttgaaygttatatatgctatgaatatttcacttagcctttggcttattgttttttgttgttgttgtgacattgtcatgtaaaagtttgtaatttttacatagtaaa

SEQ ID NO: 484118 - DNA, 201 bp, Homo sapiens
atttggcaataagaagaaatgtagttctgatccatactataacatggataaatctttaaaacattatgctaaaatccagtcacaaaaaaaaaaaacatgtrtattgtatgatttcatttatagaaatgtccagaagaggcaaatttgtaggatggaaagtagattaatggttgcctaagactgaggaaaggggaatggagt

SEQ ID NO: 484119 - DNA, 201 bp, Homo sapiens
atggttgaaatgccatctctactaaaaatacaaaaattagctgggcatgatggcgggggcctgtaatcccagctacccaggaggctgaagcaggagaatcrcttgaacccaggaggtggaggttgcagtgagccgagatcatgccactggactgcagcctggcgacaaagcgagatcccatctcaaaaaaaaaaaaaaaag

SEQ ID NO: 484120 - DNA, 201 bp, Homo sapiens
aacctggattagccatttaatttccccaattttctatacagccaaactcaaccattttctcattgtttttatttcccccttttttttttttttttttttttaaattttgaaacagggtctcactctgtcatccaggctggagtgcagtggcatgatcatggctcaccatagccttgacctcctgggctcaggtgatccacc

SEQ ID NO: 484121 - DNA, 201 bp, Homo sapiens
agtcttggactaagacagaacttatatccagaatatgctgtataaagacctcttagaacgcaacatcaaagagacaaataatacaattaagaaatggaccrgggatttaagcagacatttctccagagaaggtatacagatggtcagttagcacgtgaaaagatgcttaacatctctggtcatttgggaaatgcaaattaa

SEQ ID NO: 484122 - DNA, 201 bp, Homo sapiens
gtcctcctggccttcgaggcggccaacttcactctccattaaagaaaaaaagaaatgcttcccccaacaaagactgtgcattcaataccttaatggaactygaggtggagcttatgaaatttgtgtccaaagtgcggaatcttaaacgtgccatggcaacaggtagtggcagtaacctcaggcttcgaaagtcagagatgc

SEQ ID NO: 484123 - DNA, 201 bp, Homo sapiens
atcttcctaaagtattgtactgtgttgtatccacctgacaacaaatgtgcctgtatcctcagtttccaattggatactttcaatctcttttttttttttttaaagcgacaagcgacagaatctgtcccagttacctaggctggagtgcagtggcgctatcatagctcaggccatcctcccacctcagcctccctagtagct

SEQ ID NO: 484124 - DNA, 201 bp, Homo sapiens
agcagagtcctcctggccttcgaggcggccaacttcactctccattaaagaaaaaaagaaatgcttcccccaacaaagactgtgcattcaataccttaatsgaactcgaggtggagcttatgaaatttgtgtccaaagtgcggaatcttaaacgtgccatggcaacaggtagtggcagtaacctcaggcttcgaaagtcag

SEQ ID NO: 484125 - DNA, 201 bp, Homo sapiens
gcttcctgcttggggctaacagtgtagtggaggaaacacactgtttcaaaagtcagtacaaacatgcagacatatactcatttactctaagccatggggtrctgcacaggaaacaaaaacaggattccgtgataagagaatgaccatgtctcggaagtggaattcctaggtcagagatgcatgcagtcagctgttcattgc

SEQ ID NO: 484126 - DNA, 201 bp, Homo sapiens
cccaccatggaacatgaagacaaaatgcttcctgcttggggctaacagtgtagtggaggaaacacactgtttcaaaagtcagtacaaacatgcagacatayactcatttactctaagccatggggtactgcacaggaaacaaaaacaggattccgtgataagagaatgaccatgtctcggaagtggaattcctaggtcaga

SEQ ID NO: 484127 - DNA, 201 bp, Homo sapiens
tgctgcttttttgcagaacagatgttgctgttgccaaagcacagagtattagaaaaacactgagcagacagaatgtagtccccataatcttcaggggttgyggcattcatgtggccttccagtggggagaccccatacattttgtttgtgtgatgttcagagtccgtgagttaaggttctgatttgatctagcaagaatca

SEQ ID NO: 484128 - DNA, 201 bp, Homo sapiens
gagcagagtcctcctggccttcgaggcggccaacttcactctccattaaagaaaaaaagaaatgcttcccccaacaaagactgtgcattcaataccttaawggaactcgaggtggagcttatgaaatttgtgtccaaagtgcggaatcttaaacgtgccatggcaacaggtagtggcagtaacctcaggcttcgaaagtca

SEQ ID NO: 484129 - DNA, 201 bp, Homo sapiens
tccaggcaccagccttgcaagtgatagcactcttaacctgctacgctgacactttgctgtgtgcgggaactttccaaaccaaggctttgaccagaaagccrgtaataggaatttactcggagcctgggggccactgcttggggctgagagtgggggactgaagcgtggcctccccattgactggtgatggaatctgccctc

SEQ ID NO: 484130 - DNA, 201 bp, Homo sapiens
ctcacattaaaagcattaaggtaacacgagtgattctgaagtgctgtgagggtctgaacagtggctgaggtttattttatagaatttatacgccttaaagrctgaactcagaaatttgggattccattcccacatggccatctaatacaggtatgatcttgagaggtcacttaaatctcaagccacgagttccaccatgca

SEQ ID NO: 484131 - DNA, 201 bp, Homo sapiens
ttctttttctttgtacatgtcatatttagatgggcgtttatttgatgtagtattaattacttgtgacttttaaaatcctgacttcagccaggcacagttgytcatgctttcaataccagcagtttgggtggctgagatgggcggatcatttgagtccaggagtttgggggcagcatggcaaaaccacgtctctacaaaaaa

SEQ ID NO: 484132 - DNA, 201 bp, Homo sapiens
cccccatccttcagggaggagaagaggaattggacatggagttaataatccatcatgcctacgtggtggggtctccataaagatccctgaagttgagggtytggagattttctgggttgccgacaacatccacatgccaggagagttaccccaactccatgaggacagccctgcacttgggacccttccagattacttctt

SEQ ID NO: 484133 - DNA, 201 bp, Homo sapiens
agtctagccctggtggagcttacatttcggatcaatattgtgaaatctgccctggttcctaacgcagagcacctaaattccttgtaatttcctgggtgacrggatcatcttttgttctaataaggcaattattggtgggctcctggatggggcctggtcaccagaaacaccaagccaagattagaagcctggaactttcag

SEQ ID NO: 484134 - DNA, 201 bp, Homo sapiens
tctctactaaaaatacaaaattagccaagcgtgatggtggatgcctgtaatcgcagctactcaggaggctgaggcaggagaatggcttgaactgggaggcrgaggttgcggtgagctaagatcattgcactccagtctgggcaacaagagcaaaattccgtccccaaaaaaaaacaaaaacaaattttttgtttgtttagt

SEQ ID NO: 484135 - DNA, 201 bp, Homo sapiens
gagggaggctcaatattgcatttaccttattaggaacctcatatttagcttcaggaaatgggctttgaatcagggccccagtgttaggctcacagccctascacttacgagtctgttgggcaagtgacagaagctcctgagtgtccattttcttgactgcggatgtggtgtatggtagtgtctgcctcacagggacactgg

SEQ ID NO: 484136 - DNA, 201 bp, Homo sapiens
taagaaagtagactttaagctcagagctttggcaggcaggatctagcaaaactgtttggtattctctgcatttttatggtaacttgatatttatggcaaaragtactgtttctctatatttagcctaggaatataaagttaactgttaggttgggcacagtggctcatgcctgtaatcccagcactttgggaggccaaggc

SEQ ID NO: 484137 - DNA, 201 bp, Homo sapiens
tatctttcctgacaggagcagagtcctcctggccttcgaggcggccaacttcactctccattaaagaaaaaaagaaatgcttcccccaacaaagactgtgyattcaataccttaatggaactcgaggtggagcttatgaaatttgtgtccaaagtgcggaatcttaaacgtgccatggcaacaggtagtggcagtaacctc

SEQ ID NO: 484138 - DNA, 201 bp, Homo sapiens
ttactgaccttgagtatctttcctgacaggagcagagtcctcctggccttcgaggcggccaacttcactctccattaaagaaaaaaagaaatgcttccccyaacaaagactgtgcattcaataccttaatggaactcgaggtggagcttatgaaatttgtgtccaaagtgcggaatcttaaacgtgccatggcaacaggta

SEQ ID NO: 484139 - DNA, 201 bp, Homo sapiens
atattactgaccttgagtatctttcctgacaggagcagagtcctcctggccttcgaggcggccaacttcactctccattaaagaaaaaaagaaatgcttcycccaacaaagactgtgcattcaataccttaatggaactcgaggtggagcttatgaaatttgtgtccaaagtgcggaatcttaaacgtgccatggcaacag

SEQ ID NO: 484140 - DNA, 201 bp, Homo sapiens
gcttgcagtgagccgagatcgcgccactgcactccagcctcggtgaccgtgtgagactccgtctcaaaatcagtcagtcaatcaatcaatcaatcaatctrtctgctgctgttgctgctgactgcacaggcatccatatcggtgggtctttcttaccttttagtcggttcagggtcacccagtagtgttgctctgggctgc

SEQ ID NO: 484141 - DNA, 201 bp, Homo sapiens
acaaagttcacaatattactgaccttgagtatctttcctgacaggagcagagtcctcctggccttcgaggcggccaacttcactctccattaaagaaaaawagaaatgcttcccccaacaaagactgtgcattcaataccttaatggaactcgaggtggagcttatgaaatttgtgtccaaagtgcggaatcttaaacgtg

SEQ ID NO: 484142 - DNA, 201 bp, Homo sapiens
tgtcaaaaccaacaaagttcacaatattactgaccttgagtatctttcctgacaggagcagagtcctcctggccttcgaggcggccaacttcactctccaytaaagaaaaaaagaaatgcttcccccaacaaagactgtgcattcaataccttaatggaactcgaggtggagcttatgaaatttgtgtccaaagtgcggaa

SEQ ID NO: 484143 - DNA, 201 bp, Homo sapiens
gaactgtgtcaaaaccaacaaagttcacaatattactgaccttgagtatctttcctgacaggagcagagtcctcctggccttcgaggcggccaacttcacwctccattaaagaaaaaaagaaatgcttcccccaacaaagactgtgcattcaataccttaatggaactcgaggtggagcttatgaaatttgtgtccaaagt

SEQ ID NO: 484144 - DNA, 201 bp, Homo sapiens
tggttctgacctgcagattgaaaagttgctgcttttgcttctctgagtatttccttgggaccagatccttcctgaaaaacaaaatgagacaacagaagacrcctgacccagatgaagggcgcacagtcactcacattgagaaaactgcaggatgaaatcgtggcattcatgggtcagcgtcttgaaattattttaaataca

SEQ ID NO: 484145 - DNA, 201 bp, Homo sapiens
agtgcggaatcttaaacgtgccatggcaacaggtagtggcagtaacctcaggcttcgaaagtcagagatgcctgcagatccataccatgtcacgatctgtraaatatggggagaagaaagctctagctgaatggatttgtgtgtcaggagagaaaaaagttgagtgttgacaaactgtatgcaaactaataaaactattct

SEQ ID NO: 484146 - DNA, 201 bp, Homo sapiens
tggcctttgtatcaaccgaataaatgtgaattgatcatgtgattaatacagtccttcccccactgggttatttctccaggttctgcttccttcggtgctgyggctgtgtgttttctgagcgagccttgaaagagataaaagcggaagtttgccacacggtgagttcctgacatgtaccatttgttccttctctgtagctga

SEQ ID NO: 484147 - DNA, 201 bp, Homo sapiens
aaccacagagcaaagaaaaacataatttacttcaaaaagtatacctgtggccaggtgtggtggctcacacctgtaatcctagcactttgagaggctgaggwgggtggatcacttgaggtcaggagtttgagaccagtctggcccaacccaacatggtgaaacactgtctctaccaacaataaaaaattagctgggcatagt

SEQ ID NO: 484148 - DNA, 201 bp, Homo sapiens
tgtccaaagtgcggaatcttaaacgtgccatggcaacaggtagtggcagtaacctcaggcttcgaaagtcagagatgcctgcagatccataccatgtcacratctgtgaaatatggggagaagaaagctctagctgaatggatttgtgtgtcaggagagaaaaaagttgagtgttgacaaactgtatgcaaactaataaaa

SEQ ID NO: 484149 - DNA, 201 bp, Homo sapiens
agagctgaggatttgcacgtggccttgaatctgcctctcatgtgaggggttaacaaatggtagcattttatatttaaaaatctagttgatgccatactggraaaatattctacttttattttctttggcttaaacaaaaagtgggggctatttttgagagaaaaagacacctgcaacaccgacatttcaaatattactcat

SEQ ID NO: 484150 - DNA, 201 bp, Homo sapiens
ttaatggaactcgaggtggagcttatgaaatttgtgtccaaagtgcggaatcttaaacgtgccatggcaacaggtagtggcagtaacctcaggcttcgaargtcagagatgcctgcagatccataccatgtcacgatctgtgaaatatggggagaagaaagctctagctgaatggatttgtgtgtcaggagagaaaaaagt

SEQ ID NO: 484151 - DNA, 201 bp, Homo sapiens
aaacaacgacaagaaataaaacattctagtttacaaaatgagagctgaggatttgcacgtggccttgaatctgcctctcatgtgaggggttaacaaatggyagcattttatatttaaaaatctagttgatgccatactgggaaaatattctacttttattttctttggcttaaacaaaaagtgggggctatttttgagaga

SEQ ID NO: 484152 - DNA, 201 bp, Homo sapiens
ttcaataccttaatggaactcgaggtggagcttatgaaatttgtgtccaaagtgcggaatcttaaacgtgccatggcaacaggtagtggcagtaacctcargcttcgaaagtcagagatgcctgcagatccataccatgtcacgatctgtgaaatatggggagaagaaagctctagctgaatggatttgtgtgtcaggaga

SEQ ID NO: 484153 - DNA, 201 bp, Homo sapiens
attaggaacctcatatttagcttcaggaaatgggctttgaatcagggccccagtgttaggctcacagccctagcacttacgagtctgttgggcaagtgacrgaagctcctgagtgtccattttcttgactgcggatgtggtgtatggtagtgtctgcctcacagggacactgggaggaggtgtgggagtgaaggatgtgag

SEQ ID NO: 484154 - DNA, 201 bp, Homo sapiens
ccaacaaagactgtgcattcaataccttaatggaactcgaggtggagcttatgaaatttgtgtccaaagtgcggaatcttaaacgtgccatggcaacaggyagtggcagtaacctcaggcttcgaaagtcagagatgcctgcagatccataccatgtcacgatctgtgaaatatggggagaagaaagctctagctgaatgg

SEQ ID NO: 484155 - DNA, 201 bp, Homo sapiens
cttttcaaaaagggtgggggttgagggaggctcaatattgcatttaccttattaggaacctcatatttagcttcaggaaatgggctttgaatcagggcccyagtgttaggctcacagccctagcacttacgagtctgttgggcaagtgacagaagctcctgagtgtccattttcttgactgcggatgtggtgtatggtagt

SEQ ID NO: 484156 - DNA, 201 bp, Homo sapiens
ccatatctgcagcctttgaaaggtagcattgttaaatatgtatatagtgtacagtggaacaaaacagcttccaagccatgaataatgttaaaagttaaccrttcagttgactgaagccatctagcatccaagagatacagtagagtatctttcagtggaaatcattgtcaaacttatggtcaaggatggtggttaactttt

SEQ ID NO: 484157 - DNA, 201 bp, Homo sapiens
ggagatctcactgctgttgctgtcacttgaacataacatctagtgggtaatatgaaaattcctggaggaataaacttttcatggcctgactttttttttttccttttaagataatggtgaacattattttcagttttgcaaacatttcctagcaattcttagtttttgttgtggctgttttatttctatattgtgaagtca

SEQ ID NO: 484158 - DNA, 201 bp, Homo sapiens
tttggtgatcctcccacttcagcctccccagcagctgggactacaggcatctggctaattttttgtagagacaaggttttgccacacaagctttttttttwaaaaaaaatcttttaaaaattgatacataataattatatatgtttatggatcacagagtaatgtttcaatacacacaatgtatcagcacaagctttttaa

SEQ ID NO: 484159 - DNA, 201 bp, Homo sapiens
tctcaaaaacaaacaaacaacaaaccaaaaacccaacttcctatgtcattatctttgatttaaaaaacaaaaatcattacagtgcggtattactgaatatrcttttatatgtagaattgtgaaccatgtgtctttcagagttgaaaattaattgaattttttgttttttattaggtcgacaaagatgctgaattagtggcc

SEQ ID NO: 484160 - DNA, 201 bp, Homo sapiens
aattctaatgatcttgctaccagcaataaatcaagtaggccaagtgaaactgggctttaaaaaggatggatttcaaatacactgtgcccactagaagcttygaagggcctcgtccctctgctacagccctgggaggagccaggatccttgttggtctagctaaatactgttaggggagtgtgccccatctcatcatttcga

SEQ ID NO: 484161 - DNA, 201 bp, Homo sapiens
ttttgtttttttgagacggagtccagctctgttgccccgtctggagtgcagtggcacaatctcggctcactgcaacccccacctcctgggttcaagtaattctgctgcctcagcgtcccgagtagctgggattacaggtgcccgccaccgtgcccagctaatgtttatatttttagtagagacagggtttaccatattggc

SEQ ID NO: 484162 - DNA, 201 bp, Homo sapiens
taattaactaaaattctaatgatcttgctaccagcaataaatcaagtaggccaagtgaaactgggctttaaaaaggatggatttcaaatacactgtgcccmctagaagcttcgaagggcctcgtccctctgctacagccctgggaggagccaggatccttgttggtctagctaaatactgttaggggagtgtgccccatct

SEQ ID NO: 484163 - DNA, 201 bp, Homo sapiens
ctcatgaatcacagattttttttgtttgttttttgtttttttgtttttttgagacggagtccagctctgttgccccgtctggagtgcagtggcacaatctyggctcactgcaacccccacctcctgggttcaagtaattctgctgcctcagcgtcccgagtagctgggattacaggtgcccgccaccgtgcccagctaatg

SEQ ID NO: 484164 - DNA, 201 bp, Homo sapiens
agagcgaagctggaaaaggtaatgggagtcttcaggttccgcccagcccccatctctgctccagagccgactgcaaatcactgaactgagctggcagctgyttaggggtttgcatgatcaaggcgatttttataacctagaagggcctggactgtagaagcagattccagctgaggcccaggcactgccttgctgtggtga

SEQ ID NO: 484165 - DNA, 201 bp, Homo sapiens
tttccttcagaagcagaaggagctgtgggaggtgaatggtgggaggtgaacaggcaggttctgtgggagacacagacacgtgggcagaactccagggagargccagcaagggagaaccatgtgtggccctgctttttctcaaaccctgtgtggttcccggcttcacagttgatgggaaggtttggccccaaggatattttg

SEQ ID NO: 484166 - DNA, 201 bp, Homo sapiens
acaaataaatggaccattttcagagctgtgttaatgatatttgagtgattaaaaataaaccctttgttgctggttctaatgggatagctgttcttctgcaygcagagtcggactgggagcttgcccattgtagtggtggcaggcggttgctcccagtctgagccccagccctgcccctcctccctgtgcctgtgggagtga

SEQ ID NO: 484167 - DNA, 201 bp, Homo sapiens
ttcactctccattaaagaaaaaaagaaatgcttcccccaacaaagactgtgcattcaataccttaatggaactcgaggtggagcttatgaaatttgtgtcyaaagtgcggaatcttaaacgtgccatggcaacaggtagtggcagtaacctcaggcttcgaaagtcagagatgcctgcagatccataccatgtcacgatct

SEQ ID NO: 484168 - DNA, 201 bp, Homo sapiens
ggcacatattaattaactaaaattctaatgatcttgctaccagcaataaatcaagtaggccaagtgaaactgggctttaaaaaggatggatttcaaatacmctgtgcccactagaagcttcgaagggcctcgtccctctgctacagccctgggaggagccaggatccttgttggtctagctaaatactgttaggggagtgt

SEQ ID NO: 484169 - DNA, 201 bp, Homo sapiens
cgaaccccaggggaaggtgcaatacggagagcactttcggattcggcagaatctaccagagcacacccaaggctggcttgggagcaaatggctctggcttytttttgttgttgtgccgtttgtgatactgcagtgtcaaagagacagtgagaagaataaggtaaggatggctccattttttttacaccatattgattcaat

SEQ ID NO: 484170 - DNA, 201 bp, Homo sapiens
gccaggaagccctgtgggctgcactttttatgcttgcagtaacaagagactccagagtcctcaccggtgcagagttggcacatattaattaactaaaattytaatgatcttgctaccagcaataaatcaagtaggccaagtgaaactgggctttaaaaaggatggatttcaaatacactgtgcccactagaagcttcgaag

SEQ ID NO: 484171 - DNA, 201 bp, Homo sapiens
tcacctgcagctatgcctttatgttctcttctctgagacagaaaactagcgaaccccaggggaaggtgcaatacggagagcactttcggattcggcagaayctaccagagcacacccaaggctggcttgggagcaaatggctctggcttctttttgttgttgtgccgtttgtgatactgcagtgtcaaagagacagtgaga

SEQ ID NO: 484172 - DNA, 201 bp, Homo sapiens
gcagtggtgtgatcatggctcactgctgcctcaacctcctgggatttggtgatcctcccacttcagcctccccagcagctgggactacaggcatctggctrattttttgtagagacaaggttttgccacacaagctttttttttaaaaaaaaatcttttaaaaattgatacataataattatatatgtttatggatcacag

SEQ ID NO: 484173 - DNA, 201 bp, Homo sapiens
tggatgcacagctgggtgttaagggaaaaggcgcatgtagcagagtctggaggaatccacgtggggcttccttacgcgcactccctccctcaaggggttgyacgaagtgaatacttccccccgcaacgaaactgcaacacgtgtgatgtttttgcccagggaagcaaatgagagactcagtacccagagttttggctgagg

SEQ ID NO: 484174 - DNA, 201 bp, Homo sapiens
atatggtttaatattatatccatgtttcttatggaccagaggaaagtaactgtgagggagaggttttgatgggaagggctggaataacaatttgttgactyacgtggttaaggcaaaggatgatctgtttatcaaatgaattgttaaaatattaatggtttttcccagaatgtgacagagctgaagctttctgataatcct

SEQ ID NO: 484175 - DNA, 201 bp, Homo sapiens
gacctgtaacctctgtcctgaaatcatcacaatggccagagtggcctcagctcagggcctctgtgacatcaccaagggcctggcaccaggtgcccagtctyccagttgcgagggcaagcaaacccgtcatgagcaactcccttccccatctctgctcaccatgtggacgctgaaatcgtccctggtcctgcttctgtgcct

SEQ ID NO: 484176 - DNA, 201 bp, Homo sapiens
gtcaaggctggagtgcaatggcgtgatcttggctcactgcaacctccacctcctgggttcgagcgattctctggcctcagcctcccaagtagctgggattrcaggcatgcaccaccacactcagctaattttgtatttttggtagagatggggtttcaccatgttggtcagcctggtctcgaactcctgacctcaggtgat

SEQ ID NO: 484177 - DNA, 201 bp, Homo sapiens
ctgactgcctgctggaaatgcccccatctccctttgagtcctcctcccgggcaacccctgtgacctgtaacctctgtcctgaaatcatcacaatggccagrgtggcctcagctcagggcctctgtgacatcaccaagggcctggcaccaggtgcccagtctcccagttgcgagggcaagcaaacccgtcatgagcaactcc

SEQ ID NO: 484178 - DNA, 201 bp, Homo sapiens
caccacgcctggcaatacttatgtttataaacatgaaaccatcataatttatacattttatatgagatttctaaattaaattaaacctgaccatagaaatwgaataggaaagaaaaatgttcttgaaatgaaagtaaagctttttactacttctcctataagaattttgattaaagataaaccagataccatagtttgtca

SEQ ID NO: 484179 - DNA, 201 bp, Homo sapiens
ggaaagagtcccctggcagggaattggcaccccgtcgtgcccatcctctctctctgactgcctgctggaaatgcccccatctccctttgagtcctcctccygggcaacccctgtgacctgtaacctctgtcctgaaatcatcacaatggccagagtggcctcagctcagggcctctgtgacatcaccaagggcctggcacc

SEQ ID NO: 484180 - DNA, 201 bp, Homo sapiens
ctcaggctggagtgcaatggtgcgatctcggctcaccacaatctccgcctcccgggttcaagcgattctcctgcctcagcctcccaggtgcatgccaccaygcccggctaatttttgtatttttttagtagagacagggtttcaccataatggccaggctggtctcaaactcctgacctcgtgatccacccgcctaggcct

SEQ ID NO: 484181 - DNA, 201 bp, Homo sapiens
attccgtccccaaaaaaaaacaaaaacaaattttttgtttgtttagtttgagccacataggtggctccaaatttgtaggtagcctgtggtttaatatcttyctctcccgtttaactcagctccacggggcacatggcatctccctctgctcatcacaatgtctggatcaaacaaatgaaaaacaaaaacatgatggcctct

SEQ ID NO: 484182 - DNA, 201 bp, Homo sapiens
ttattacacgcaaggatcattctctggaatttagggaagaagattgataggtaacatgtcaagctttatattgttagaaagtatttgtttttcttgtttawgaatcttgacttggtttccattaaaagttgcatgttattcctacttcctgtttttcagaagaccatgtacgtgtgactggtatttgagctcaggttggac

SEQ ID NO: 484183 - DNA, 201 bp, Homo sapiens
tcctgcttcctgcataacctagtttagagcagtccccttatgctagtctctaaagcttcctgttcttatcacaattttaatcaaagtatactctctctctytttttttttcttcctgagatggagtctcactctgttgcccaggctagagtgcagtggtgcgatctcagctcactgcaacctctgcctcccaggtccaagt

SEQ ID NO: 484184 - DNA, 201 bp, Homo sapiens
gtgacaaattaagaggaatttgatgattatacacttaaacctgttgaagtgagtttctgggccaggcatagtggctcatgcctgtgatctcagcactttgrgaggccaaggcagaggatcacttgagcccaggtgttcaagactagcctgggcaacatagtaagactgtatctctataaaaaacttaaaaattagccacat

SEQ ID NO: 484185 - DNA, 201 bp, Homo sapiens
ttgagactagcctgggcaacacagggagaccctgtctctaccaaaaatgaaataaaaattatccagaccctgtctctaccaaaaacaaaacaaaaaaaaamacaaaaattatcgaggctgcagtgagccaagatcattccactgcactccagtctggatgacacagcaagaccctatctcaaagaaaagacacaggctgtg

SEQ ID NO: 484186 - DNA, 201 bp, Homo sapiens
aaaagcagccagactggtttgggaacatctttcagctaacttcagacccctaaaatcagagaacttcctgtttccctaagtggaaggtcttgcaaaatgtrgaacatttacaaggccaaagaaacatagctgaattgaaaaaatgttcaattttttcaataaatcttatggccgggcgtggtggctcacacctgtaatccc

SEQ ID NO: 484187 - DNA, 201 bp, Homo sapiens
tcagaattttccaaagtctcaggagatgcaaaatgccagtacttctttctagagagggaacaaaagcagccagactggtttgggaacatctttcagctaayttcagacccctaaaatcagagaacttcctgtttccctaagtggaaggtcttgcaaaatgtagaacatttacaaggccaaagaaacatagctgaattgaaa

SEQ ID NO: 484188 - DNA, 201 bp, Homo sapiens
aatgtggagttttaaagtgaaatgccccccaatatttaagtactgacaatttttaaaaacaatgtaggccaaacaaaacacataggtgggccgggcgcagyggctcatgcccgtaatcccaacactttaggaggccgaggcaggtggatcacctgaggtcggaagttagagaccagcctgaccaacatggagataccctgt

SEQ ID NO: 484189 - DNA, 201 bp, Homo sapiens
ctgttaggggagtgtgccccatctcatcatttcgaagatagcagagtcatagttgggcacccagtgattgggttcaaaaataaagctggtctgcctcttcwctcctctgtgtttttatcttttctaccttctgctcatgcttgggtaagaacattgcagccgttgcattggtgattacaggagtcattccatgaagtcaga

SEQ ID NO: 484190 - DNA, 201 bp, Homo sapiens
ttacagggcccccttcacggtatgtgactgggtgtaccacgggttgacattggaatgaagtgaaggcaggcttatgttttaagtaacttgaaagatgtaakcttttttattgttcctttaatggggtttacattcagttgctattgagttataaaataccggggacataatcgtggctaatctgagctttctgaatgaaca

SEQ ID NO: 484191 - DNA, 201 bp, Homo sapiens
ctattcacacaacaaatgcttaataagtggttaccatatatacattgttgtaggccccagggatatagcagtgaacaaggcagagtctagccctggtggarcttacatttcggatcaatattgtgaaatctgccctggttcctaacgcagagcacctaaattccttgtaatttcctgggtgacgggatcatcttttgttct

SEQ ID NO: 484192 - DNA, 201 bp, Homo sapiens
cgcttgaacccaggaggtggaggttgcagtgagccgagatcatgccactggactgcagcctggcgacaaagcgagatcccatctcaaaaaaaaaaaaaaaagaaaaacgatgacaggtgttgggaaggatgtggagaaatgagaatcctcaggcattgctggtggcaatgtaaaatggtgcagcctctttggaagttcatc

SEQ ID NO: 484193 - DNA, 201 bp, Homo sapiens
tcactattgtatttgaagcattccagtggcttcccatcacattaagaataaaatctcgtcagacccttgagcagaccttgcctatgtttctgacctcatcygcccctctccacctctttcatactgttctagctaaacaggcctcttgttcttcaacctggagtgtgagttcatcaatctgaaatactcttcactgagatt

SEQ ID NO: 484194 - DNA, 201 bp, Homo sapiens
tcactgcaagctccgcctcccagcttcacgccattctcctgcctcagcctcccgatcagctgagactacaggcgcccaccaccatgcccgactaatttttwgtatttttagtagagacggggtttcaccatgttagccaggatggtctcgatctcttgacctcgtgatccgcccgcctcggccttccaaagtactgggatt

SEQ ID NO: 484195 - DNA, 201 bp, Homo sapiens
atcgcttgaaatcaggaggcagaggttgcagtgagctgagattgcactgccacactccagcctgggtgacaaagtgagaccctgacacacacacacacgcrcacacacgcacatgcacatatacctgcttaacctttgccattggtgggtcctgcatagctattgagacgcttaccaggagaagccccctggttcctggag

SEQ ID NO: 484196 - DNA, 201 bp, Homo sapiens
agtgacgcccattttgctgtccttcagaccttctgcttgctttcaggagaaagtctccctttaatcttcgtacgtttgtaacactctcttaactgcctaaraaagtagactttaagctcagagctttggcaggcaggatctagcaaaactgtttggtattctctgcatttttatggtaacttgatatttatggcaaagagt

SEQ ID NO: 484197 - DNA, 201 bp, Homo sapiens
gaagccacactccctatagaagccagtccaccttttacaaagagaaaatactgaagtccacttaaggatggtatctgatttccctctacctctcagagaasccatctgaagtatcagatttgccacaaaatcattactagctttaacattttccatcttacagagagcccttagcacaatgcctgacaccagtaggtatcc

SEQ ID NO: 484198 - DNA, 201 bp, Homo sapiens
cgtgaacccgggaggtggagcttgcagtgagccgagatcgcgccactgcactccagcctcggtgaccgtgtgagactccgtctcaaaatcagtcagtcaakcaatcaatcaatcaatctatctgctgctgttgctgctgactgcacaggcatccatatcggtgggtctttcttaccttttagtcggttcagggtcacccag

SEQ ID NO: 484199 - DNA, 201 bp, Homo sapiens
ttgttactcccttgctgtatggagagtactctttgtgattctcttggggttctttggattgttttctctgtaacagccctcggagattatttgaaaatcaracttgcagtggacatgaaattatattaaaaaaaccccaaccaatgtctactggactcatcgtacaccactgtctaggctgattagcttagttgttcaggc

SEQ ID NO: 484200 - DNA, 201 bp, Homo sapiens
cagtagcatccaggtggaccaaggttggggatccccatctttgtacttgggtttcatttttcagccctttctccaccccttgttactcccttgctgtatgsagagtactctttgtgattctcttggggttctttggattgttttctctgtaacagccctcggagattatttgaaaatcaaacttgcagtggacatgaaatt

SEQ ID NO: 484201 - DNA, 201 bp, Homo sapiens
gtgctgactctgaatgctggccatggatggccacgctactgcctaactgtgagtaccgttttcatactgaagctagtgatggtaagaactttctgaagtayttacttttagggaatgaggactttgttaggatttatactaactagggtttttttcaaacattgttgaaacattctgatttcattgagaattctgaatcat

SEQ ID NO: 484202 - DNA, 201 bp, Homo sapiens
ttccttaagttaaaaagatgtggatagtagaaataactgatttacttgctagtcagtgaattgaaaaaaatcttgttttctgttttcttttttttttttttgagacggagttttgctcttgttgtccaggctggagtgcagtggcacgatctcagctcactgcaacctcctcctcccgggttcaagcgattctcctgcctc

SEQ ID NO: 484203 - DNA, 201 bp, Homo sapiens
gaactttctgaagtatttacttttagggaatgaggactttgttaggatttatactaactagggtttttttcaaacattgttgaaacattctgatttcattragaattctgaatcattactttattattgatagtatcaaccctttatgacttcttataccatgtgcacacctgaggggctcctgttttcaggaagaatctg

SEQ ID NO: 484204 - DNA, 201 bp, Homo sapiens
aggattgagtgcaggcccaaagctcggacccggaagatttaccacctccctacacaccagggcttggcctacttagggtgctgactctgaatgctggccawggatggccacgctactgcctaactgtgagtaccgttttcatactgaagctagtgatggtaagaactttctgaagtatttacttttagggaatgaggactt

SEQ ID NO: 484205 - DNA, 201 bp, Homo sapiens
ctttcattcttttagtgatttctgaaatctttgttagttactgctttaggtgaataccatgggatttaactcaccacgcgcacacgagagataagctagcrctcatttgcctgctaaaatctcagttccgatagattctgagttccatgaacttctaagtcttttcattggttgtaagtagttcataagaatggtatggat

SEQ ID NO: 484206 - DNA, 201 bp, Homo sapiens
ttcctctagatgaggtagtcaatgagaaaagtagaggggaaagtccaaccttccttgagatgtttcacttgtaacatcggatcaaaggctagtgcttttgsgggtgggagcatgtactacgctggcagtagcatccaggtggaccaaggttggggatccccatctttgtacttgggtttcatttttcagccctttctccac

SEQ ID NO: 484207 - DNA, 201 bp, Homo sapiens
gtgtggagacatatggcagggcctagctgttggtgcagagggtatatttactttgggaaattttatcaacctgtattttttgtgatttgtgtacttttctrtatgaatcttatataaaaagtttttttaaaaaattgactcaacctatactaattggatcatcactaattccagattactttaaacatgatcctccgtctt

SEQ ID NO: 484208 - DNA, 201 bp, Homo sapiens
gcactttcggattcggcagaatctaccagagcacacccaaggctggcttgggagcaaatggctctggcttctttttgttgttgtgccgtttgtgatactgmagtgtcaaagagacagtgagaagaataaggtaaggatggctccattttttttacaccatattgattcaatctcaggagtctcagggaaacggatgttcta

SEQ ID NO: 484209 - DNA, 201 bp, Homo sapiens
ctgtgttgtttattgtctctttcccacgtagacaggaaccttgtgtgtcttacctctgtaacccctaccatgtgtcagccacataatagacacctaataartatgtgtgaatatgggaatgaatgaatacccaagaggatgaagtgtaccctctgatcatacgtacatgtaaacaggcgaatgctggataattagcattca

SEQ ID NO: 484210 - DNA, 201 bp, Homo sapiens
tgtcctcattttcagacatggaagttgaggctcaaaaggagaaatttgcaaagctagtaaatggcagagccaggatttgaaccctacctgcgactagtagyaataatacaaatacctagtgtatactgagttttgtatacactaacttcatttgctcagagaagccttcccaaactgttcccttaccacatccttttataa

SEQ ID NO: 484211 - DNA, 201 bp, Homo sapiens
ttttcccacttctttggttcaatgttctcttgtttcaagtcaaggaaacagaatgataccagtaagaaagcaaacactccctagcggttcagtctcatatkgaaatgactctgctgttgaaaatgccagtgtggctctataggaacttctgcctgcctcagcacttgaagtctgtgccgccgctctaagcaggtaaccaca

SEQ ID NO: 484212 - DNA, 201 bp, Homo sapiens
tgtttgtttagtttgagccacataggtggctccaaatttgtaggtagcctgtggtttaatatctttctctcccgtttaactcagctccacggggcacatgrcatctccctctgctcatcacaatgtctggatcaaacaaatgaaaaacaaaaacatgatggcctctcccagcaaagctccagggttggaaagagtcccctg

SEQ ID NO: 484213 - DNA, 201 bp, Homo sapiens
agtctgcccactgggtcacccacacgtcctactgcttctgaagcccgcactgccaccgctcctgccccagaaggttgtttagtttccacgtaggcaggtcrctttgtgcctctgagtgcgctgctgtgtgttctctctatagttctgtgtcataaagctgtcctggccagccttcaagctggtgtggccactcttgatgtg

SEQ ID NO: 484214 - DNA, 201 bp, Homo sapiens
ttaaagtgaaatgccccccaatatttaagtactgacaatttttaaaaacaatgtaggccaaacaaaacacataggtgggccgggcgcagtggctcatgccygtaatcccaacactttaggaggccgaggcaggtggatcacctgaggtcggaagttagagaccagcctgaccaacatggagataccctgtctctactaaaa

SEQ ID NO: 484215 - DNA, 201 bp, Homo sapiens
aaaaagaaatgcttcccccaacaaagactgtgcattcaataccttaatggaactcgaggtggagcttatgaaatttgtgtccaaagtgcggaatcttaaasgtgccatggcaacaggtagtggcagtaacctcaggcttcgaaagtcagagatgcctgcagatccataccatgtcacgatctgtgaaatatggggagaaga

SEQ ID NO: 484216 - DNA, 201 bp, Homo sapiens
agggcttggcctacttagggtgctgactctgaatgctggccatggatggccacgctactgcctaactgtgagtaccgttttcatactgaagctagtgatgktaagaactttctgaagtatttacttttagggaatgaggactttgttaggatttatactaactagggtttttttcaaacattgttgaaacattctgatttc

SEQ ID NO: 484217 - DNA, 201 bp, Homo sapiens
cattaaagaaaaaaagaaatgcttcccccaacaaagactgtgcattcaataccttaatggaactcgaggtggagcttatgaaatttgtgtccaaagtgcgraatcttaaacgtgccatggcaacaggtagtggcagtaacctcaggcttcgaaagtcagagatgcctgcagatccataccatgtcacgatctgtgaaatat

SEQ ID NO: 484218 - DNA, 201 bp, Homo sapiens
tgctggaatggggaacactggggacagggagccgcatgatgccaaggacaggcctccaaactgaggtcacagggtggcccaaggccctggaaatcagggcrgctgcctctacagtgggtgtaattccaggcagtagctgccaagctgagtgggcccctgcaagaagagaagtgcccgtcttctggtcaacctggagatttg

SEQ ID NO: 484219 - DNA, 201 bp, Homo sapiens
catttctgttgtttggggccattcctgtaaaccacgtctgtttgccccttactgctccatcgcaccacagccaccaaacttcccagccgacttaagacacrggctgactgagcactgtggctcccgtctgcagtcccagcactttgggaggctgaggcaggaggactgcttgagcccaggagttttgagactagcctgggc

SEQ ID NO: 484220 - DNA, 201 bp, Homo sapiens
atctgactggaatttcaccaggctggaatttcccaatcctagcaagcctgggagagctgcaggagaccagggcgtatttcatcccttatctacaactgcakaagacagacactcccagagcggccattttagagacctccccctgagaatgcattcttttcccagggctgttccttgctgagaaaaagaattcagcgatat

SEQ ID NO: 484221 - DNA, 201 bp, Homo sapiens
tagaatggctgatgaggtttcatgtcccactgtgcacgcattgtcattgataaacatcttaacaggaaacagggttcaagaacagacaaccgatctgactrgaatttcaccaggctggaatttcccaatcctagcaagcctgggagagctgcaggagaccagggcgtatttcatcccttatctacaactgcataagacaga

SEQ ID NO: 484222 - DNA, 201 bp, Homo sapiens
aaaaacaatgtaggccaaacaaaacacataggtgggccgggcgcagtggctcatgcccgtaatcccaacactttaggaggccgaggcaggtggatcacctraggtcggaagttagagaccagcctgaccaacatggagataccctgtctctactaaaaatacaaaattagccaagcgtgatggtggatgcctgtaatcgca

SEQ ID NO: 484223 - DNA, 201 bp, Homo sapiens
tggggataaagtttgatgtatcccttagtgaataagccccaaaacacttatttctgttaaattgaacattttataaagaattatgtagtctttgttctgarctttaaaaaaaaaatgcttgtcttctcagttcttaagtctttaaattctgccgcaacttagcaggctttcccattgttagaaattaatctaacacacttt

SEQ ID NO: 484224 - DNA, 201 bp, Homo sapiens
cttgagcccagaaagtggaggctgcagtgagctatgatcataccacctgcactccagcctgggtgacagagcgagaccctgtctcaaaaaaaaaaaaaaaagattacaaatatgaagactatcagtgggagaaacttaggacataagtgaaaagcaactcagctacaccttgattataatgatacagctgtgccatttaga

SEQ ID NO: 484225 - DNA, 201 bp, Homo sapiens
ggtgcggtggctcacgcctgtgatcccagcactttgggaggccaaggcaggcggatcacctgaggtcgggagttcgagatcagcctgaccaacatggagamaccgcgtctctagtaaaaatacaaaaaaattagccaggcgtggtggtgcatgcctgtaattccagctagtcggcaggctaaggcaggagaatggcttgaa

SEQ ID NO: 484226 - DNA, 201 bp, Homo sapiens
tccctgtgcctcgattttctcatccgttaaaagtgtcagccattcttctgagcacttccccacccaggagcacccatgtcctcctaacggtgctggtgggyggatgcttttacagggcccccttcacggtatgtgactgggtgtaccacgggttgacattggaatgaagtgaaggcaggcttatgttttaagtaacttgaa

SEQ ID NO: 484227 - DNA, 201 bp, Homo sapiens
agtactggagttgtgatccgtagcattggacttgctacctctgtggcttcatttatgtaggctttgtagataggtgaatggggtgtgtggatgttttaaarttagaagtcaaaaatatatatactcacactgtctacctgcttttcatggagggggtggagtagaaagagaaaaagttaagttagggaaaaggagtgtcgt

SEQ ID NO: 484228 - DNA, 201 bp, Homo sapiens
acctggattagccatttaatttccccaattttctatacagccaaactcaaccattttctcattgtttttatttcccccttttttttttttttttttttttwaattttgaaacagggtctcactctgtcatccaggctggagtgcagtggcatgatcatggctcaccatagccttgacctcctgggctcaggtgatccaccc

SEQ ID NO: 484229 - DNA, 201 bp, Homo sapiens
ataggttgtgggtcacagagatcacatgcttcaaaggcaataaaatatcacaaggcaaatgggggcagagcgagatcaaagtccagggcaaaattagaatkgctgatgaggtttcatgtcccactgtgcacgcattgtcattgataaacatcttaacaggaaacagggttcaagaacagacaaccgatctgactggaattt

SEQ ID NO: 484230 - DNA, 201 bp, Homo sapiens
ccctgtgtggttcccggcttcacagttgatgggaaggtttggccccaaggatattttgacattgtgagtatagagcattttaataaaaattaagtgatgcrtttttgtcatggacttttccagaacaaacctggattagccatttaatttccccaattttctatacagccaaactcaaccattttctcattgtttttattt

SEQ ID NO: 484231 - DNA, 201 bp, Homo sapiens
ctgggaggagccaggatccttgttggtctagctaaatactgttaggggagtgtgccccatctcatcatttcgaagatagcagagtcatagttgggcacccrgtgattgggttcaaaaataaagctggtctgcctcttctctcctctgtgtttttatcttttctaccttctgctcatgcttgggtaagaacattgcagccgt

SEQ ID NO: 484232 - DNA, 201 bp, Homo sapiens
agtactagaaaattagctccagtaggctgaggacataaaattatgaaacaaatcgcctgccctcgcgtgggtgtgcattttaccagtgccagtccgaggcragagtgatggagtacctgaagatttttcagaggtttggggtttttaaaaaatcataacaagacaggaccgtatcaccctggaataatgtgtaattcgtgg

SEQ ID NO: 484233 - DNA, 201 bp, Homo sapiens
cccagcaaaatgtaaggctcccctgctgcccagattggaatgtgctcgggagggccctggcagtctgggctccagcaggcctgggtgggcctgggtgcctrtgcgtctcacccactcccagggcgtgtggatgcaactcctcagggtcacactttgaataacaaggagctaatgagtagccttcccaaaaatgggggccaa

SEQ ID NO: 484234 - DNA, 201 bp, Homo sapiens
ctgcccctggccatagtcttgcagaactactttgtcactccacagagatcagtagtttaaggcacagcgaaggtgcccagctgaactttgattatttcctrtgcagcataaagttctgctcctcgggagtaaatctgcaaatcagagccttcctcaggaagatagctctacagatgacccaggggaacaagtacaagccgt

SEQ ID NO: 484235 - DNA, 201 bp, Homo sapiens
tttctcatcagtgaagtggggtagtgacagcatgcgagggcacggagctgtcagcaggctccagagaccatggccataaagcactgacactgacacggccycagcaagcccttggggaagggcagccaccaccgttgctgctgctgtcacttactgttgctgttgatttaaggcagtacatactcaggtctcatagcttgt

SEQ ID NO: 484236 - DNA, 201 bp, Homo sapiens
gggactgaagcgtggcctccccattgactggtgatggaatctgccctctcttgtttgccctctccagtgtggggctgccttccaggaggatgatgtcatcrtgctcaatggcaccaaggaggatgtggacgtgctgaagacaaggatggaggagagaaggctgagagcgaagctggaaaaggtaatgggagtcttcaggtt

SEQ ID NO: 484237 - DNA, 201 bp, Homo sapiens; identical to SEQ ID NO: 314603

SEQ ID NO: 484238 - DNA, 201 bp, Homo sapiens; identical to SEQ ID NO: 314621

SEQ ID NO: 484239 - DNA, 201 bp, Homo sapiens; identical to SEQ ID NO: 314539

SEQ ID NO: 484240 - DNA, 201 bp, Homo sapiens; identical to SEQ ID NO: 314624

SEQ ID NO: 484241 - DNA, 201 bp, Homo sapiens; identical to SEQ ID NO: 314540

SEQ ID NO: 484242 - DNA, 201 bp, Homo sapiens
gaggcaggagaatcacttgaacccaggaggcggaggttgtagtgagccaagattgtgacgttgcctgccagcctgggtgacaagagtgaaaccccgcttcaaaaaaaaaaaaaattaataactaaataaaaagaaatttaaaaataaaggaaaccatggataatgaactaaaggaaaacaaaagaaccatgtctaaccaaa

SEQ ID NO: 484243 - DNA, 201 bp, Homo sapiens
tgtatgtcggcatgggatcctcagaacttagagagagaatatgtatatgggatcctcagaacttagagagagaatatgtatatgggatcctcagaacttasagagagaatatgtatatgggatcctcagaacttacagagaaccctgcaaatcaatgggaaaggaatgatgcctgcactaggagaggagcgcgtgacgacc

SEQ ID NO: 484244 - DNA, 201 bp, Homo sapiens
cggcatgggatcctcagaacttagagagagaatatgtatatgggatcctcagaacttagagagagaatatgtatatgggatcctcagaacttacagagagwatatgtatatgggatcctcagaacttacagagaaccctgcaaatcaatgggaaaggaatgatgcctgcactaggagaggagcgcgtgacgaccgttcctg

SEQ ID NO: 484245 - DNA, 201 bp, Homo sapiens
tcggctcactgcaagctccaccttccgggttcaccccattctcctgcctcagcctccggagtagctgggactacaggcgtctgccaacatgcccggctaattttttttttttttttaagtagagatggggtttcaccatgttagccaggatggtctcgatctcctgacctcatgattcacccgcctcggcctcccaaagtg

SEQ ID NO: 484246 - DNA, 201 bp, Homo sapiens
caagagaaaggcagcaaaggcagtctgcatcacgctcgtgccaacaaccccgcccttgagaaccaggattcctggcatggaaaaaaggacaccaacatggraaggaagaggccacacagaatccatgcaggccaaatccaccaacatgggaaggaagaggccacacagaatccgtgcaggccaaatccaccaacaggggaa

SEQ ID NO: 484247 - DNA, 201 bp, Homo sapiens
tgcacccccatctgcccacctggaacccccaaagtaccgggatgacagtgagccactgtgcctggccttttgttcccatttttatttttattttatgtatktatttttgaggtggagtctcgctctgtcgctcaggctggagtgcagtggtgcagttttggctcactgcaatctccacctctcggtttcaagtgattctcc

SEQ ID NO: 484248 - DNA, 201 bp, Homo sapiens
cacacctgtaatcccagctacttgggaggctgaggcaggagaatcacttgaacctgggaggtggaggttgcagtgagctgagagcgcaccattgcactccmgcctgggcaacaagagggaaactccgtctcagaaaaaaaaaaaaaagcgtgcctgcttgtagtcccagctgctcaggaggctgaggcaggaggagcgttt

SEQ ID NO: 484249 - DNA, 201 bp, Homo sapiens
tttcctcttctttcttcttcttccttttttttttttttttgagacagagtctcactctgctgcccaggctggagtgtagtggcaccatttcagctcactgyagcctccacctcccaggtttaagcgattctcctgcctcagccttccaagtagctgggattacaggcgtgtgccaccacgcctgactaattttttgtattt

SEQ ID NO: 484250 - DNA, 201 bp, Homo sapiens
cccagaggggcccactcgctgtcccgtaagtgcaggccctgggggccgcttggctttggtgtggttttgaaggctgagggttgcaggtcccgggccaagawgagatgaggctgagggtctgtccctgctgctcggccgcctgctgacctccctgttgcgggaggtgaggatgcggcgtcacagcctggactggcctctcag

SEQ ID NO: 484251 - DNA, 201 bp, Homo sapiens
caaaaaaaaaaaaaattaattagatgtactcaacggcagatttgagatggcagaagaaaaaaattcattaaaaattatcctggccgggtgcagtggctcaygactgtaatcctagtactttgggaggctgaggcaggtggttcacctgaggtccggagttcaacaccagccttgccaacatggtgaaacctcgtctctact

SEQ ID NO: 484252 - DNA, 201 bp, Homo sapiens
atttttagtagagatggggtttctccatgttggtcaggctggtctcgaactcctgacctcagatgatctgcccgcctcagccttccaaagtgctgggattrcaggcgtgagccaccgtgccaggcctggccttttccttttcttttaaggaagctggtcctattgggtgagggcccgccctaatccactatgacctcatct

SEQ ID NO: 484253 - DNA, 201 bp, Homo sapiens
ctggcactccagcctaggcaatacagcaagactccatctcaaaaaaaaaaaaaaaagaatttaaaaatctgagcagagatatcagaggctgcaggggtggrtgggcaagttttgcagtttaagtccaaacaacttaactaaaacaaacagaacacaagactcaggaaaacaactcagaatccagacatagatcatctgaaa

SEQ ID NO: 484254 - DNA, 201 bp, Homo sapiens
tagtagagatggggtttctccatgttggtcaggctggtctcgaactcctgacctcagatgatctgcccgcctcagccttccaaagtgctgggattacaggygtgagccaccgtgccaggcctggccttttccttttcttttaaggaagctggtcctattgggtgagggcccgccctaatccactatgacctcatcttaact

SEQ ID NO: 484255 - DNA, 201 bp, Homo sapiens
gctggggctgccagcagtgggtcccccctggcctgagggcccggacagggcaggagcggctccccggcccccactgtcctttgcgtcctccctcaccagcrtcaccctgggcatgtgccaccagacctcgtcctcccccatccctgcaggaggcccagtgtgggtttagggcactggaaaggagccgagagtttgccaatc

SEQ ID NO: 484256 - DNA, 201 bp, Homo sapiens
gaagcagacctcacatgggacgggcattgcaggacaggacggggccaatgagaagggggccagggtcgcacccccaatcatgggctcccagggacaccccygccgggaacctgcagggtccccatttgtctgtccctggagaagctgttcaggaagccgcgtgtgtccagagctcttcatctgcgtgcagctggggctgct

SEQ ID NO: 484257 - DNA, 201 bp, Homo sapiens
cactgcacctgcgcccaccgcacctgcacccaccgcacctgtgcccacctgcgcccactgcacctgtgcccacctgtgcccactgcacctgcgcccactgyacctgcacccactgcacctgtgcccactgtacctgcacccactgcacctgtgcccacctgtgtccactgtacctgtgcccactgcacctgcacccactgg

SEQ ID NO: 484258 - DNA, 201 bp, Homo sapiens
gtacccactgcacctgcacctactgcacctatgcccacctgcacctgtgcccatctgcacccactgcacctttgcccactgcacctgcactcactgcaccrgtgcccacctgcacccactgcacctgcacccattgcactcactgcacttgcactcgtgcccactgcacctgcgcccactgcacctgggcccactgcacct

SEQ ID NO: 484259 - DNA, 201 bp, Homo sapiens
gccctgcctaaccctgccatgatctcgtgtggccagcaggtacagcgtgggcagcacagaggaggcctcacagggctccacacagccacctgtgccttggyttccccagtcagggacttctgagtctgcttctaaaaaagccaccgaggccccggagaggcaacgtgcccagagcacccaaaatggggcgtgccctccaca

SEQ ID NO: 484260 - DNA, 201 bp, Homo sapiens
tacctgcccagaggggcccactcgctgtcccgtaagtgcaggccctgggggccgcttggctttggtgtggttttgaaggctgagggttgcaggtcccgggycaagatgagatgaggctgagggtctgtccctgctgctcggccgcctgctgacctccctgttgcgggaggtgaggatgcggcgtcacagcctggactggcc

SEQ ID NO: 484261 - DNA, 201 bp, Homo sapiens
tcgcccgcgcagggcagtggcaggggagcagttactctggtgtgtagccacaatgcttacattggaatttccaacttaatgtattttatttatttatttattttttttttttgagatggagtcttgctctgtctccaggctggagtatagtggcacagtctcagctcactataacctctgcctcctgggttcaagtgattc

SEQ ID NO: 484262 - DNA, 201 bp, Homo sapiens
acaggagctggcacctgcctgaccctttctcctccctgcagggacccccggtgagctctgtgttcccccaacataggccatctccatgcactgaaaatgcrgcagcccgaggggcctctcctcccgccaactggcccagccctcctctctgtgcccctgagggccccaaattaatctagaaattcaacatggcctagtgca

SEQ ID NO: 484263 - DNA, 201 bp, Homo sapiens
tgaggacgggactgggggcctgaccacctgcctctctgcccatcaccctctccacccactggcatcaagcaagcgagccgcgggcagccacccaggcccastgtgcagaagtcagaacaaaggaggctgccctgagtgtgagcctgccagcttggggcccctctgggggacagggggtcctgggagtaggaggcagacccc

SEQ ID NO: 484264 - DNA, 201 bp, Homo sapiens
agtctccctctgttacccaggctggagtgcagtggcatgatctcagctcactgcaacctcctcctcccaggttcaagcgattctcctgcctcaccctctcstgtagctgggattacaggtgtgcaccacctccgactaatttgttttttatttttagtagagacggggtttcaccacgttggccaggctggtcttgaactc

SEQ ID NO: 484265 - DNA, 201 bp, Homo sapiens
tttcttccagcggcaggctgtgcaccagaggtcccggcgctccatgccatacaccttccggcacttcttcgcgtcgccgcggggcttcctgtgcggggggkcacaggacatggggtgctgtgagaccaggaccctccccacctggtgccagccgcaggccctcagcccacacgcacctcagggtgactccgatcctggagg

SEQ ID NO: 484266 - DNA, 201 bp, Homo sapiens
agccccgcccccccaccccaagtaaaagcagaccctgcagctggtgaaagccagcccctggggctgtcctcgggctgtttcagccccgggcctggaggggrtggggagggagaaggtggtagcttatgttcttgaacgagccggacttagtccaggaaccgctggcaggctttcttccagcggcaggctgtgcaccagagg

SEQ ID NO: 484267 - DNA, 201 bp, Homo sapiens
tgcggctccaggcgggcgggcgtcaggcagccctacagggagacacagccagggcttcactcccctccagagagccctgagacccgccccagctgccaccygtggcctcacccacctggtagacacggtcactgtgacaggactgggggttagcaacggtgctcaggacagggggcgggggcaggggcggggcaggcggcc

SEQ ID NO: 484268 - DNA, 201 bp, Homo sapiens
tagcttccaaaaagaaaagtcaatttcaataaggaaattgaatcaatagtcaataaacttccaacaaaagaaaagtccatctctctctctctctctctctmtatatatgattgtatatatcacttcactgttgaattctatcaaacatttgaagaagaattaacaccaatccctttttacctcttcccataatataaagaa

SEQ ID NO: 484269 - DNA, 201 bp, Homo sapiens
cctggctacatggtgaaaccccatctctactaaaaatacaaaaaattagctgggcgtggtggcaggcacctgtattcccagcgactcaggaggctgaggcrgaagaatggtgtgaacccgggaggtggagcttgcagtgagccaagattgggccacttcactccagcctgggcaacagagcaagactccatctcaaaaaaa

SEQ ID NO: 484270 - DNA, 201 bp, Homo sapiens
gaaaagaatggaccctgccaagcacagtggcacacgcctgtagtcccaggagcttgggaggccgaggcaggaggatcacttgagcccaagaggtggaggcygcaggaggtggaggctgcagtgagccgtgatggcaccaccgctctccagcctgggtgacagagtgagaccccatctccaaaggggtgggggaacagatag

SEQ ID NO: 484271 - DNA, 201 bp, Homo sapiens
cgaagcgggtggatcacgtgaggtcaggagttcgagaccagcctggccaacacggagaaaccatctctactaaaaatacaaaattagctgggcgtggtggygcacgcctgtgatcccagctacttgggaggctgaggcaggagaattgcttgaacccaggaggcggaggttgcagtgagccaagatcgcgccattgcactc

SEQ ID NO: 484272 - DNA, 201 bp, Homo sapiens
ccaaggcaggtggaactctcgagctcaggagactggcctgagcaacagagtgagaccctgtctgtacaaaaaatacaaaaattaaccaggcatggtggtgygtgcctgcagtcccggctacttgggaggctgaggtgggaaaatcgcttgagcctgggaggctgaggctgcagtgagccaagactgtgacactgcactgca

SEQ ID NO: 484273 - DNA, 201 bp, Homo sapiens
ggtctccactgcggggccagggccacgctcacccctctcgcggcccctcctctgcttccccctgaacccaccccccacggaaaccagccctgcgggctaarcaggtgcgaccccagcaagaggggtgctctgggaccagacatgaagtgagttgggggagggcacagggtgggtttgagtgaagggagagcacggtcctaa

SEQ ID NO: 484274 - DNA, 201 bp, Homo sapiens
gtcagcacgtgcaggtcagggcaggtcctctgagccggcgcccctggccagcaggcgaggctacagtacctgctgtctttccagggggaaggggctccccrtgagggaggggcgacgggggaggggggtgatggtgcctgggagcctgcgtgtgcagccggtgcttgttgaactggcaggcgggtgggtgggggctgcagc

SEQ ID NO: 484275 - DNA, 201 bp, Homo sapiens
tggaggaccctgaggacccacgaggggaggcggaggagctgggcgaggacgacgagggcctggcccctgaggatgcgctgttggcagacgacaaggatgargaagactcgccgcggccgcgcagccccccaggaggccctgacaaggacttcgcctggctctcctaggcccgcccgccggcagggtcggtggctgcctcgc

SEQ ID NO: 484276 - DNA, 201 bp, Homo sapiens
gcgacgggccctatctggaggaccctgaggacccacgaggggaggcggaggagctgggcgaggacgacgagggcctggcccctgaggatgcgctgttggcrgacgacaaggatgaagaagactcgccgcggccgcgcagccccccaggaggccctgacaaggacttcgcctggctctcctaggcccgcccgccggcagggt

SEQ ID NO: 484277 - DNA, 201 bp, Homo sapiens
cttcagggtgctgccccatctccctgccgggcccagcacagggcacagcacgactgccctccctggcagccacacctcctcctctgaccataagtgctcayctctcttcttgcatgtctcagtcgaccttgaaacagcctgagagtgggggagttgcctcctttacacgttcctggagtcagggtcgggctgaggggtcag

SEQ ID NO: 484278 - DNA, 201 bp, Homo sapiens
gagggatggatggtgagtgggggcaggtccagcttgggcagctctgtgcctggggcaggctcagtgtctggtcagaagtgctcctgcctagtgggtgacggggggggggggggcagagggagtggctgtcacagtgtccacgcctgtgggcccctgggcagtcagaggcaggatgctgggtgtgaggcgctgcctctcctg

SEQ ID NO: 484279 - DNA, 201 bp, Homo sapiens
agggatggatggtgagtgggggcaggtccagcttgggcagctctgtgcctggggcaggctcagtgtctggtcagaagtgctcctgcctagtgggtgacggggggggggggggcagagggagtggctgtcacagtgtccacgcctgtgggcccctgggcagtcagaggcaggatgctgggtgtgaggcgctgcctctcctgc

SEQ ID NO: 484280 - DNA, 201 bp, Homo sapiens
gggatggatggtgagtgggggcaggtccagcttgggcagctctgtgcctggggcaggctcagtgtctggtcagaagtgctcctgcctagtgggtgacggggggggggggggcagagggagtggctgtcacagtgtccacgcctgtgggcccctgggcagtcagaggcaggatgctgggtgtgaggcgctgcctctcctgcc

SEQ ID NO: 484281 - DNA, 201 bp, Homo sapiens
tggcacagtctcagctcactataacctctgcctcctgggttcaagtgattctcctgcctcagcctcccgaatagctgggattacaggcgcgctccaccacrcccggctaatttttgtatttttagtagagacgaggtttcaccatgttggccaggctggtctcgaactcctgacctcagatgatccacccgcctcagcctc

SEQ ID NO: 484282 - DNA, 201 bp, Homo sapiens
ggacaaggcagtgctgtccttccagccccagctaccgcacagagaagacacaggctgtggcgtcactggccacagagacggccacagtggagggagggctragcctgggccccaccaccctgtgcccaccccacctggtccctgcccaggtctcgcccccgctcagagctgcgtctgtgaaggagaaggcagtgcctgctt

SEQ ID NO: 484283 - DNA, 201 bp, Homo sapiens
cctcccaaagtgctgggattacaggtgtgagccaccgtgcctggccccaacttaatgtattttaaaacacgggttgtttcatattttgatgcctgtttttkttttgttttgtttttttgagacggagtctcactctcaccaggctggagtatagtggtgcgatctcggctcactgcaacctccgccttccgtgttcaagca

SEQ ID NO: 484284 - DNA, 201 bp, Homo sapiens
atccctgggtacacctccaacatgcagacccctcctggactcagcccgccatgcttgggtcaggtgacctcccacatatatacacacacacgcacacgcayacacacacccctctggagagctggacactgcccaccagttcccattcccgaaacttccatgctggctgtctggacacaacctctgtctgccaggatccca

SEQ ID NO: 484285 - DNA, 201 bp, Homo sapiens
tcacagcctgtccggtggcagacagggtgcgaaggttcacggctaggcaacctcccgccaggtcgggcagtgagagcccaagccaagggggacaggcaggrgctggcctgtgtcttcctggtctgagtccacaggcctggaggaggagacagatgggggccccaatacccagaggcctaacacagacggaagcagcaccag

SEQ ID NO: 484286 - DNA, 201 bp, Homo sapiens
tattttaaaacacgggttgtttcatattttgatgcctgtttttgttttgttttgtttttttgagacggagtctcactctcaccaggctggagtatagtggygcgatctcggctcactgcaacctccgccttccgtgttcaagcaattctgctgcctcagccttccaagtagctgggactacaggcacgcgccatcacaccc

SEQ ID NO: 484287 - DNA, 201 bp, Homo sapiens
cgacttccctcgaggcaacaccacagcatggatgggctccacccggccttccgcgtgtcggcccaaacctgcggaggcacggggatggcagtgctgtggcygcgggaccccgggaatctgaggagcacggggatggcagtgctgtggccacgggaccccgggaatctgaggagcacggagatggcagtgctgtggccgtag

SEQ ID NO: 484288 - DNA, 201 bp, Homo sapiens
cagcacctggagtcaggcgggggcctggtcttggcatcttgggggcttgaggcccttcctgtaatggtcagcggtcaccgccgtcacagccctcgtgcccrgcgggcaggaagtgaaggggaggctgggcccggtcttctgcagcgcgtctcccggcaggcaacaccggctgtgggggcctgggaaccccacaccatccaa

SEQ ID NO: 484289 - DNA, 201 bp, Homo sapiens
cactttaatgtccttgccaaggaaatgcccaagacactggcaggtgggcaagtaagtgtccagatgggaccccgcagctctgtctccactcagcagtgtcygcacgccccaggccagcaggccggcccctcctcgggcaacactggtcttcctgagggcagcccgtgctggggtcccacgcttcgtccatagtgcttgtgg

SEQ ID NO: 484290 - DNA, 201 bp, Homo sapiens
gggtggatcatctgaggtcaggagtttgaaaccagcctggccaaaatggtgaaaccccatctctcctaaaaatacaaaaatgtcagccaggcgtggtggcrggtgtctgtagtcccagctactcgggaggctgaggcaggagaatggcatgaacctgggagcggagcttgcagtgagcggagatcaaaccactgcactcca

SEQ ID NO: 484291 - DNA, 201 bp, Homo sapiens
cggtaacacccagcacggccgtgaggaggggcaagacagctgtggccaccatagcccagatagtaaccagcatcgggggagcccctgggtgtgcgccacasgccacagactccacctgcagccaccctctgcccagacatggtctcctgtgtcaggtagtgcccccaagccgctcgctgcggagcccagaactgggaagag

SEQ ID NO: 484292 - DNA, 201 bp, Homo sapiens
tatatcccatctcgaggagctggcggggcgaagatgcgaagtggctgggccttgccttatcctcccgccccacaactccgtccttctctggaaaagacgcycacagtgctgcaagttccgcctgcagtaattccgcgacttccacaagagcgtgagggctgaagaggcaagcggcacccctcccggcctcaccaggcgcaa

SEQ ID NO: 484293 - DNA, 201 bp, Homo sapiens
ccgggttcacgccattctcctgcctcagcctcctgaatagctgggactacaggctcccgccaccatgcccagctgctttttttgtatttttagtagagacrgggtttcaccatgttggccaggatggtctcgatctcctgaccttgtgctccaccctcctcggcctcccagattgctgggattacaggcatgagccaccgc

SEQ ID NO: 484294 - DNA, 201 bp, Homo sapiens
cgggggctcccggtgaggtgaactagggctgctctgcctggcccctccgtgtccctgcgggtgaccacggtaacacccagcacggccgtgaggaggggcargacagctgtggccaccatagcccagatagtaaccagcatcgggggagcccctgggtgtgcgccacaggccacagactccacctgcagccaccctctgccc

SEQ ID NO: 484295 - DNA, 201 bp, Homo sapiens
ttccatcatcccaaagggaaactgtatccgtcatacagtaccttcctcttgcctctaccccacctgcgggtaaatgctgttctactttgacacaatgtagmttttattcattctcatctgttgttgctgtgcgtcctgcactgagctacggccagaccctggatgttcagtaaaagttggtgaccacgtgcagtcgctcag

SEQ ID NO: 484296 - DNA, 201 bp, Homo sapiens
aggaagggaagaagatcaggagcccatagggcaccacgcgggcgatgttgcctggaagtgcaggggccggggtcaaggcaggggcaggatgtctgcagggktccctaccagctcttgggagcaggggtccaggatccaggatgggcacagctggggcattcagggcactcacccagagccttccccagggaggataagcac

SEQ ID NO: 484297 - DNA, 201 bp, Homo sapiens
tcctgggttcaagtgattctcctgcctcagcctccgagtagctgggattacaggctcccgtgaccacgcccggctaatttctgtatttttagtagagacgsggtttcaccatattggccaggcttgtctcgaactcctgacctcaagcggtccgcccgcctcagcctcccaaagtgctgggattacaggcgtgagccagtg

SEQ ID NO: 484298 - DNA, 201 bp, Homo sapiens
  misc_feature (1)...(201): n = A,T,C or G
ctgcacgcacctgtggtcacagaggaagacagctccgtagtcctggcggtgccggatcactcgcccgatggcctggttcacagccctggacgcctgctgcnggtaccactcctgcccagagaggaactgtggggcgaggcggctcggtcacgggggctcccttggccacggggcgggggctcagtcaccagaccgccttac

SEQ ID NO: 484299 - DNA, 201 bp, Homo sapiens
gactcttagctttcctggtggagaagaaggggccaggcgacttggcctcgctgacagcatcttctccacgcacactgggtgctgtagcccggggggccggygctggcatctgcagaaccatgggggtgggtggacccatttctggctcctctggggacaacaccctcatcccctccctgggcaggaactcacagttcgctc

SEQ ID NO: 484300 - DNA, 201 bp, Homo sapiens
cggcgctgagcccactgcacttccgccccccacttccggtccgttgctttgtgctcccggcggaaactgttcccccgcggagggggtccgcctgctcttckgctcctccaggcctacacggcgttttgcgcgttctgtgtccggctccgctggccagtgaacctcacttccatcgcccacaggcagaaatctggggtcccg

SEQ ID NO: 484301 - DNA, 201 bp, Homo sapiens
tcttttgtggcttttgtgcttttggcaagcacctggctcctgatggctgctgtaataaatgaccagacttattgtcagagcaatgcacgttttgtctcacrgttctctgaagtctgaagcagccggcagggctgcatcccctggagctccaggggagtccatgtgcctcttctggcttctggaagccatagcatccttggc

SEQ ID NO: 484302 - DNA, 201 bp, Homo sapiens
ggggaggtgcctgaggccagatgggcggggtcgggttggcctcaggagacagagggtctgtgtccatcccaaggccctggaactgtacctgctcctcgccrgggctccccgcccgctgttcgctgtgctccagggcggccagcagccccctgggcctctgccgggcaggaactggctcctgctcatactccacacacaggc

SEQ ID NO: 484303 - DNA, 201 bp, Homo sapiens
acggctcgggggttgcagcctgggcgtctctgcaggagtcattggctcaccactgggggtttgcatacagtagccggggattttggtgaaaatcgccacgcctcttttctttttttttttttttgagacggagtcttgctctttcacccaggcctgagtgcagtggcgccatctcggctcactgcaagctccgcctccccg

SEQ ID NO: 484304 - DNA, 201 bp, Homo sapiens
gagctcactccaggggcctgaagggcagggatgggcaggaagaggggaatggctcccagcaggaagcagggagaaaatttcgggttggcctgaggaattaygggcttctggggcaaaaggccccaaggaagaaggaacctgggttccacccgcagcacattcctggagaaaggccagcctcaagcgcagccagtggcaggg

SEQ ID NO: 484305 - DNA, 201 bp, Homo sapiens
gcatcgatggccccctccaggcgcagcaggatcactgtgggtcgaggaggtgtcacccacctcctcgcaaggaggaggccccacccagctgcaaggaggcrgggagggcaacacttactcttcagctttgcaatgtcttccagctccatgttcagccctgggcaagagaaaggcagcaaaggcagtctgcatcacgctcgt

SEQ ID NO: 484306 - DNA, 201 bp, Homo sapiens
gcacctggacgcacagggaagatggtcccaaggagccctgagccaagatggaggtcgggggaggggggcacagcacaccccggtgacagtgccacaacttkgtcctgtccaagtcacaccagcggctcatgaggctcgcaggtggtgacttgtaagagcaggtccagggaagacagtccgaccacagcgaggggctggcag

SEQ ID NO: 484307 - DNA, 201 bp, Homo sapiens
acatattcaggtgttcagcagcaacaatgttcacatgggaagaaacgggaaaggagatactgtgagccttctgatagaaaggacgtcccatctggagcccrgcaaacggtggccgcagtctaactggggccctcaagccacctaagttcagagtaaaccggggaactcgtgtggctgcccctcctgtacagattccgactc

SEQ ID NO: 484308 - DNA, 201 bp, Homo sapiens
gcagctgtgggcctgaggaggacacagctcacaaccacacacagaccccaaccacacactctggggtcccaaagcacctggacgcacagggaagatggtcscaaggagccctgagccaagatggaggtcgggggaggggggcacagcacaccccggtgacagtgccacaacttggtcctgtccaagtcacaccagcggctc

SEQ ID NO: 484309 - DNA, 201 bp, Homo sapiens
agcctgggcaacaaaagtgaaactccatctcaaaaaaaaaaaaaagaaagaaaatatagaccaactgacaacatccatgaagggtttccacgttttccacrtatgccgtgactagcgctgtgtggaaatacacctctggacaaacactgggaaggaacctacaggcagagcagctgatgcatgccagatttgtgggtcatt

SEQ ID NO: 484310 - DNA, 201 bp, Homo sapiens
atggcctcactctgccgcccaggctggagtgcagtggagtcatctggggcaccggaagctctgcctcccaggctcaagcacgcctcccacttcggcctccrgaaaagcttggaccacaggagcacaccaccacacctggctaattttttggcaggggcgaggttccgccatgttgcccaggctggtctcaaactcctggcc

SEQ ID NO: 484311 - DNA, 201 bp, Homo sapiens
cttccccaccccctcctccaggagctcatttcctacaaacgcccagtgcagggagtggctgcttctgagaagtcaagtgacatcagaggtcaatggaacaracagattccaggcccttggaatctgtgcaccggctgcctcaggcacgcactgcctcccgcaaccccaactgcgtgaggggcgccggcctccccccgggat

SEQ ID NO: 484312 - DNA, 201 bp, Homo sapiens
aggctggtcttgaactcctgacctcaagtgatatgcccgcctcagcctcccaaagtactgggattacaggcgtcagccaccacacccagccagaaggcttmatattgtaaagatgacaatgtgccccaaacagatctacacattctatgcaatccatatcaaaattcaaactgtcttttatgcagaattggacaagccgat

SEQ ID NO: 484313 - DNA, 201 bp, Homo sapiens
ccggagtcgccccaagccacccccgccctcaggccctcccgccccctgtcctgcaggagctgcacgcggccgaggtgcgcaggaacaaggagcagcgagargagatgtcgggctaagggcccgggacgggcggcgcccatcctgcgacggaacacgttcgggttttggttttgtttcgttcacctctgtctagatgcaact

SEQ ID NO: 484314 - DNA, 201 bp, Homo sapiens
gtcctgcaggagctgcacgcggccgaggtgcgcaggaacaaggagcagcgagaagagatgtcgggctaagggcccgggacgggcggcgcccatcctgcgasggaacacgttcgggttttggttttgtttcgttcacctctgtctagatgcaacttttgttcctcctcccccaccccagcccccagcttcatgcttctcttc

SEQ ID NO: 484315 - DNA, 201 bp, Homo sapiens
gccgagggtgcccgtgagtgggtacaagggccacctctccccatccctggccatgtctgaggtctggttctgcacagcacaggtgtccacacccaccctcmgcagaagcccacctggggccacatgtccccagcagtgtgtggtagttccctcaggccttgaggccagtgctgagaccctccaggaacccagcacctcgcg

SEQ ID NO: 484316 - DNA, 201 bp, Homo sapiens
cccagaaggagagggctggtggacaggcttgtaagggcagcggcagccatgacctcgtccagccgggcttttcctggggtggctctggaggagatgggggyggggtgcgggtgacccagccagagctctgggcccctcccctggtcggtccacgtgcaggcctgggcacgcgtgcacaccaggctccccactcccagccct

SEQ ID NO: 484317 - DNA, 201 bp, Homo sapiens
ttgccccacagaggctgggtggctgtaggttctgagccctgtccccacccacacccctaaatgcagacatctgagtcttacctgggctgaaggctgcaacyggggcccccagaaggagagggctggtggacaggcttgtaagggcagcggcagccatgacctcgtccagccgggcttttcctggggtggctctggaggaga

SEQ ID NO: 484318 - DNA, 201 bp, Homo sapiens
ggtcctctgtgggtcctgccctctcggtccttggagggcagagacaggggctgtgctgtgagggatcagggccagccccccaaggcctcctctagctggcstggccgagggtgcccgtgagtgggtacaagggccacctctccccatccctggccatgtctgaggtctggttctgcacagcacaggtgtccacacccaccc

SEQ ID NO: 484319 - DNA, 201 bp, Homo sapiens
cacggctgggtgttctcatcgttcctgggatatgccagttgccgtatgtgggattctgttcagaaccccattagcctcgagcacggaaacacgtggcagaygtcccaccctggacgcactggtgccctccggtgtttgctgccctgcttcaggcggagacacaggcctcccgctgcacacctgtggatgggctctcgcgtg

SEQ ID NO: 484320 - DNA, 201 bp, Homo sapiens
ggagaaaactggtgagtttggaatggtttaaggaagagctaaactcacaagcacatcccagcctcagttctccgtgcagcctcagaggtgctgcaggcccsgggagacagccctgtggatggagggaggagccgaggggagcctggggtcattgccgggttcagcctggaggactgacctgaggccagcccacctcagaga

SEQ ID NO: 484321 - DNA, 201 bp, Homo sapiens
cccgggtccagccccaggatggggaggtggtagctgtggtgcctgcccgtcagaggtctttgcaagtgtagcaggaccgtcttccgccatgacacacattrattatgtatgtacttgctcatgggagaaaactggtgagtttggaatggtttaaggaagagctaaactcacaagcacatcccagcctcagttctccgtgca

SEQ ID NO: 484322 - DNA, 201 bp, Homo sapiens
acatcagcatcaagtcggacgcctcagatgagcttgcggagttcgagatcggcgcctcgtccagcagcagcacggaagctctcatctcggccgtgatggcygggaggagcatctccccgtggctggcacggcgaacgagtcctgccaattcttccggagactcggccatcgccagctgtcacgacggagggagcagctacg

SEQ ID NO: 484323 - DNA, 201 bp, Homo sapiens
ctcaaggaagcgggtctagaaggggaggtcgggccgtgctgggtggcctgtcggcctgtggattcggaacactgaggcaggaagtacgtaagggcccgggyccagccccaggatggggaggtggtagctgtggtgcctgcccgtcagaggtctttgcaagtgtagcaggaccgtcttccgccatgacacacattgattatg

SEQ ID NO: 484324 - DNA, 201 bp, Homo sapiens
ccgccaccatgcccagctgctttttttgtatttttagtagagacagggtttcaccatgttggccaggatggtctcgatctcctgaccttgtgctccaccckcctcggcctcccagattgctgggattacaggcatgagccaccgcgcccagcctggaagttttattctttttccttaagaatgtttcttcaagcgtgaggg

SEQ ID NO: 484325 - DNA, 201 bp, Homo sapiens
aggcacctctgccctcaaggaagcgggtctagaaggggaggtcgggccgtgctgggtggcctgtcggcctgtggattcggaacactgaggcaggaagtacrtaagggcccgggtccagccccaggatggggaggtggtagctgtggtgcctgcccgtcagaggtctttgcaagtgtagcaggaccgtcttccgccatgaca

SEQ ID NO: 484326 - DNA, 201 bp, Homo sapiens
accctatttccaaataaggtcacgtttgcaggtttaggacttcagcagacacatttcagcccttaacagcatcacagcttgggttttcttgatgcatcttycacacgtatttctctatggaggcttctccacacatcagcagctgctacctctcgtggccactgtatccttgacgctgctgttatttacagcagaggtggc

SEQ ID NO: 484327 - DNA, 201 bp, Homo sapiens
gtgtttgggcatctgaggtgtgctgtgtggtgctgccctggccctgaaagccaccagctgcccctgaaggtctcacatccctggacagcgcccatcccggkccaggcttagagctcacacagttgctctggaagcagacatttgagaagtgaggtctttatggttcccggctttgtggaagaagttacaggcacctctgcc

SEQ ID NO: 484328 - DNA, 201 bp, Homo sapiens
agccaggccagaggattgtgcatggtgacccgggctttgaccaatgagctcagatcctgggcagagccacgacaccccacctcttgggctccgtgctctcrtcaccgaggctgctgtgggcatgtgacaccaggcagagtgcatggcagtccccacggcctgctgcaccgtggcccctcctccgcagccctctcctgcccc

SEQ ID NO: 484329 - DNA, 201 bp, Homo sapiens
aattccttattctgtggttttttgtgtaagaagttttttttttttttttttttttttgagatggagtctcgccctgtcgcccaggctggagtgcactggcrcgatctcggctcactgcaggctccgcctcccgggttcacgccattctcctgcctcagcctcctgaatagctgggactacaggctcccgccaccatgccca

SEQ ID NO: 484330 - DNA, 201 bp, Homo sapiens
tccgccccgggcccctgtctgctctgccccggcctcctgggtgtggctgggccacatggcccctgcagaggcttcggcccaccctgctcacctgctggccsccaaggcagccaggcctcggcaaactcagctcgctctgcttggagcccccaaccctcagccacctctgcgcccccccgcccccgccctgcctcgggaggg

SEQ ID NO: 484331 - DNA, 201 bp, Homo sapiens
gggttgcagcctgggcgtctctgcaggagtcattggctcaccactgggggtttgcatacagtagccggggattttggtgaaaatcgccacgcctcttttctttttttttttttttgagacggagtcttgctctttcacccaggcctgagtgcagtggcgccatctcggctcactgcaagctccgcctccccggttcatgcc

SEQ ID NO: 484332 - DNA, 201 bp, Homo sapiens
ttgcacccacatctcccatttcgcctgcacacttttgggtccgtattactccacagtgtttgtttcttctctgcctccagggaggcgtctgatcggacacsacgcccagggcctgctacccacacatgcccagtggggtctgagggctggaaggagggtcctgcagggaccgggcactgtgttcagcattggccgttctta

SEQ ID NO: 484333 - DNA, 201 bp, Homo sapiens
atcctgtgaagccgaggccctggggacagaagaaaggggcgctgggggctggccaaggggacctggcgccacctggcagccccaaatctgcacctcccgcrgctgcggggctcctgcgtctcccgttccagctctgactcagcacaggaagccccaaggcctggcagtccctccctcccagaggtgcccaccttctggcgg

SEQ ID NO: 484334 - DNA, 201 bp, Homo sapiens
cgggccccggtgcagctcgtgcagtctggtgtccgacttgctgagggagcagaggtgggtccgcctcagtagggactgggggcgaggaaggctggtcggtsccctgcggaccccaccctggtccccgggacagcctggcactcaccgcttccgccgccgtcgcactgccctgcagcctcgcccgctgcctccgcgccctct

SEQ ID NO: 484335 - DNA, 201 bp, Homo sapiens
tgtacggcatgaatatgatgtcggcttgctgcttcaggttccgggacaggtagtaagggcacaccctgggaaggagagaggagaagatcctgtgagcaccycatgcaggggacggtgccccgaggccgccatgtcttctgacccggaaggagccctcatcctgcacgtagggcccaggtgggaagctgctgcctgggatgg

SEQ ID NO: 484336 - DNA, 201 bp, Homo sapiens
gtccctccttttaggcttgcagaccctggagtacaggacgtccacctggagacaggaagccaacccgaggaggggtcagcaccatccaacctgctgaggayctgccggccccacccacagcgccctaccctggcccacgttacctgagcggccggggtcacctcagtcttcccctgctgtggctcttggggactgcgatgg

SEQ ID NO: 484337 - DNA, 201 bp, Homo sapiens
cctcttctgcacagagacgcacagccacccgctccgggttctgagctctagccccgaggaactgcggtggagggaggtgtagggactcccagtcatcgatmatttctgctcagctcctccagggctgaagagcttgggggtggctggtaattacaaacctggggccctgacctggcctccgtcggggccggtgtctccgca

SEQ ID NO: 484338 - DNA, 201 bp, Homo sapiens
ggctcgggggttgcagcctgggcgtctctgcaggagtcattggctcaccactgggggtttgcatacagtagccggggattttggtgaaaatcgccacgcctcttttctttttttttttttttgagacggagtcttgctctttcacccaggcctgagtgcagtggcgccatctcggctcactgcaagctccgcctccccggt

SEQ ID NO: 484339 - DNA, 201 bp, Homo sapiens
cccctgccctggcagccagaccgaggtgtccggcctggcaggggttgggaggtggcggtcaggagccccagggattcctggacagtcgccccatgccgacsgcgcagcctcttctgcacagagacgcacagccacccgctccgggttctgagctctagccccgaggaactgcggtggagggaggtgtagggactcccagtc

SEQ ID NO: 484340 - DNA, 201 bp, Homo sapiens
caccaccacgcctggctaattttttttgtatttttagtagagacgaggtttcaccgtgttagtcaggatggtctcgatctcctgaccttgtgatctgcccrcctcagcctcctaaagtgctgggattacaggcgtgagccaccgcgcccggcctctattttttttttgacagagtctcgctctgttgtccaggctggagtg

SEQ ID NO: 484341 - DNA, 201 bp, Homo sapiens
cctggctgattttttgtatttttagtagagacggggtttggccgtgttggccaggctggtctcgaactcctgacctcaggtgatccgcctgcctcggcctyctacagtgctggcatgacagacgtgagacgccacacctggcttctctatggtctttgatttgcatttctttgatggcggatgatgccattcatatatctt

SEQ ID NO: 484342 - DNA, 201 bp, Homo sapiens
ggcagacgtgtgtggccagccgcgtggaggtgagcaggtcagggaggccagaaggcctgggtcctgccgctttggcctcagtagggggcactgagggtgcrggagtccattttagaaaggagtcccaggtttgagggctctgcttgccccacagaggctgggtggctgtaggttctgagccctgtccccacccacacccct

SEQ ID NO: 484343 - DNA, 201 bp, Homo sapiens
tgcaaactctgcctcctgggttcacgccattctcttgcctcagcctcctgaatagctgggattacaggcacccgccaccgcgcccagctaatttttgtattttttttttttttttagtagagatggggtttcaccatgttggtcaggctggtcttgaactcctgacctcatgatccacccgccttggcctcccaaaatgtt

SEQ ID NO: 484344 - DNA, 201 bp, Homo sapiens
ccagggagtccctaatcctgagctgcccctgttcaccaagtccggtgagactggtgggcagagcgtcttggaggagctggccccagggcttggggagaaasccccccggcacaggaaagggttggcagacgtgtgtggccagccgcgtggaggtgagcaggtcagggaggccagaaggcctgggtcctgccgctttggcct

SEQ ID NO: 484345 - DNA, 201 bp, Homo sapiens
ttagcctcccaaaatgttgggactggaagcgtgagccacggtgcctggcctttttatatccagccatcccagtgggtgtgtgctggaaccgtggcgtgtgstggaaccgtggcgtgtggtggaaccgtggcgtgtgctggaaccgtggcgtgtggtggaaccgtggcgtgtgctggaaccgtggcgtgtggtggaaccgtg

SEQ ID NO: 484346 - DNA, 201 bp, Homo sapiens
ctttgagtggtgggacccctccccgacctggcgggggggagggttcagggtcagccccgcccccccaccccaagtaaaagcagaccctgcagctggtgaargccagcccctggggctgtcctcgggctgtttcagccccgggcctggagggggtggggagggagaaggtggtagcttatgttcttgaacgagccggactta

SEQ ID NO: 484347 - DNA, 201 bp, Homo sapiens
gggactggaagcgtgagccacggtgcctggcctttttatatccagccatcccagtgggtgtgtgctggaaccgtggcgtgtgctggaaccgtggcgtgtgstggaaccgtggcgtgtgctggaaccgtggcgtgtggtggaaccgtggcgtgtgctggaaccgtggcgtgtggtggaaccgtggcgtgtggtggaaccgtg

SEQ ID NO: 484348 - DNA, 201 bp, Homo sapiens
tcacatggcaggctgggaggggcctctgccaactccctgtccctcaactcccaccaccaagcccaggccacgaagacaccgtcctgggcactgccagcagytttattagagagccctgtcccctgattaaaagtggacacgtgcccacgggggtctcctccttcccggtgaggggctcagctggggtgcccctgtggcacc

SEQ ID NO: 484349 - DNA, 201 bp, Homo sapiens
aaagtgaggctcagggctgagcactgcacagacgggacaagctgtgggtgctgggctgtcacagacatcctgaggcctcacttcccacatctgaaaaactgggggggggggggggcggggggtgccacttacacagctgttgtgaattcaaacaaaatagcgtttctaaaatatcaaacacggtgcaggcagagtgtttgt

SEQ ID NO: 484350 - DNA, 201 bp, Homo sapiens
tccagaactgcgtgtagtggcgcggtggacacgggccacacgtcgtggggctgtctcggcggcacggccgctgcacaaaggtgcctggggggcactgggcrcacaccagccgctcccctgtctctgcgtcccgccaggggtaggtgggtgtttctgccactccgcgtacagccggcaccggcagcagggcaggcagcgcca

SEQ ID NO: 484351 - DNA, 201 bp, Homo sapiens
agctctcacccggggcaatcacgccggcaccaggtggacacgatgcgtgctccaagcagaaaccagcgtgcgcgaagaagccggtgcggcagcggcaggcrcggttgtgggtggcgtggcaagcccgtgcctcctcctcacgctccccgcagaggacgttgcagtagcggcagcgctccaggtagttccagaactgcgtgt

SEQ ID NO: 484352 - DNA, 201 bp, Homo sapiens
gctgagcactgcacagacgggacaagctgtgggtgctgggctgtcacagacatcctgaggcctcacttcccacatctgaaaaactgggggggggggggggyggggggtgccacttacacagctgttgtgaattcaaacaaaatagcgtttctaaaatatcaaacacggtgcaggcagagtgtttgtgatttatgctccaag

SEQ ID NO: 484353 - DNA, 201 bp, Homo sapiens
ttaggagagttaccatcaggcctcggtttccccgtgtcagaggagccagccaccttcccctcgggcagttaggagattgctgcccactttcccagagctcyccaggggaggctgtgccctggctcagatccaaattctcagccacccctgagagggcagacttggtggggatctagtggagggacccctgacccctcaaat

SEQ ID NO: 484354 - DNA, 201 bp, Homo sapiens
gagactgaggcaggagaatcgcttgaacctggaaggaggaggttgccgtgagccgagatcatgccattccaacctgggcaacaagaccgaaactcgtcagaaaaaaaaaaaaaaaagaatttgcccttttgttttctgtaaacacggtttagaagttgtcagcatccttcgcctgtcgggctgtgaactggatgccccaga

SEQ ID NO: 484355 - DNA, 201 bp, Homo sapiens
ctcaacagtggttaacattgggcctcggtttccccatgtcagaggaggcagccaccttcctctcaggcagttaggagagttaccatcaggcctcggtttcyccgtgtcagaggagccagccaccttcccctcgggcagttaggagattgctgcccactttcccagagctccccaggggaggctgtgccctggctcagatcc

SEQ ID NO: 484356 - DNA, 201 bp, Homo sapiens
agactgaggcaggagaatcgcttgaacctggaaggaggaggttgccgtgagccgagatcatgccattccaacctgggcaacaagaccgaaactcgtcagaaaaaaaaaaaaaaaagaatttgcccttttgttttctgtaaacacggtttagaagttgtcagcatccttcgcctgtcgggctgtgaactggatgccccagac

SEQ ID NO: 484357 - DNA, 201 bp, Homo sapiens
gcagtgagccgtgctggagagggcagtgcaacgatggggactggagaaggggcaggagccttcggtcagagagctggagcaaaggcctagggggcaggagyggccactcggaccttggctgcaagaggcaagggggcccaggcaagggcttggggctcctgggccatcggaaggggcgagttgggacctgcagatggaccg

SEQ ID NO: 484358 - DNA, 201 bp, Homo sapiens
gtgttgccagcgagcccaggactgaccagcccaggctgcagaggtctgagctcagtgactctggccctgtcctggcagggaaggctcgcttcgtagatggygctggtcagtcttatccgcatggccacactccctccctgtgcgaggtgctggcacagagccccacaggtgcactccctcaacgggccaggctgtggtcta

SEQ ID NO: 484359 - DNA, 201 bp, Homo sapiens
tgcagttggggagctcccattgctgctggggagaaaaactcagacccacagtccctctgactgctccactggggtcagctggccagccaggagccacgctkggacacctccctcttccccctccttgtggggcaccccacaatgaccactgctgtgacgcctccactggggcgtggggctctgggtcctgcccgcactcag

SEQ ID NO: 484360 - DNA, 201 bp, Homo sapiens
ctcagccttccaaagtgctgggattacaggcgtgagccaccgtgccaggcctggccttttccttttcttttaaggaagctggtcctattgggtgagggccygccctaatccactatgacctcatcttaacttgattatatttgcaaagaccctatttccaaataaggtcacgtttgcaggtttaggacttcagcagacaca

SEQ ID NO: 484361 - DNA, 201 bp, Homo sapiens
acgctgggctgtctggtcagcacgtgcaggtcagggcaggtcctctgagccggcgcccctggccagcaggcgaggctacagtacctgctgtctttccaggrggaaggggctccccgtgagggaggggcgacgggggaggggggtgatggtgcctgggagcctgcgtgtgcagccggtgcttgttgaactggcaggcgggtg

SEQ ID NO: 484362 - DNA, 201 bp, Homo sapiens
ggtcagggcaggtcctctgagccggcgcccctggccagcaggcgaggctacagtacctgctgtctttccagggggaaggggctccccgtgagggaggggcracgggggaggggggtgatggtgcctgggagcctgcgtgtgcagccggtgcttgttgaactggcaggcgggtgggtgggggctgcagctttccttaatgtg

SEQ ID NO: 484363 - DNA, 201 bp, Homo sapiens
gtcctctgagccggcgcccctggccagcaggcgaggctacagtacctgctgtctttccagggggaaggggctccccgtgagggaggggcgacgggggaggsgggtgatggtgcctgggagcctgcgtgtgcagccggtgcttgttgaactggcaggcgggtgggtgggggctgcagctttccttaatgtggttgcacaggg

SEQ ID NO: 484364 - DNA, 201 bp, Homo sapiens
ggggaagatgtcctgcacagcagcaagtacatggtaatcccagggtgagcagccctcggcacatgcgtgcaccgggcttcaggtgggtctcccgtagggtyccgtggacgtggctgctccgggctctctcagtggcccatgcccaggtctgacgtgctggtatctgggcctgagtagcataacggcactgggcgtgctgag

SEQ ID NO: 484365 - DNA, 201 bp, Homo sapiens
tgcggcggggacatgcgtccgaacacagccagctggtcagaggtgctgccgtgccaggcggggcctccggggttttctgtgtcttggccacacagacatgstccagtctcacaaaatgagcgctcctggcagatgctgagtttcctgttagagctgccttttgggagatccttgtcatgggggtgtgcctgtccactggag

SEQ ID NO: 484366 - DNA, 201 bp, Homo sapiens
gaaggggcgcagctcatccagagagaccacctgcccatgggagaacctgcagacagagccgtaaggggcagggctcagacatgggccaccaggggcaaacsaacccaggagcactgacccatccgcctgggcactgtcctgagggagacagacacacacgcgtgcgtatacatacacactctcacacactcacgcacacac

SEQ ID NO: 484367 - DNA, 201 bp, Homo sapiens
tgactcacggaggagagccaggggcacagtgtggctgacagaggacaggccaggaagagcttgggatttcctcgtcaggagccactcgggggatgtgcggyggggacatgcgtccgaacacagccagctggtcagaggtgctgccgtgccaggcggggcctccggggttttctgtgtcttggccacacagacatgctccag

SEQ ID NO: 484368 - DNA, 201 bp, Homo sapiens
aactgaggacaggccttcagcccgtgacatggagccaaggctgtctttccagtaggaacgggtgggtggagcagagtgaggtggaacagggattttgtctyatgcgtagacaaaggtggcctcgtacacctccccaggccaggattttgggcggttccttctagtgcctactgttcttaggcacacagggccctgccaatg

SEQ ID NO: 484369 - DNA, 201 bp, Homo sapiens
caggcacagtggctcacacctataatccccatcacttttggaggccaaggcgggaggatcgcttgagcccaggagttcaagaccagcctgggcaacatggygagacctcatcttgtttaaaaaaagagaaaaaaaatgctgttttaaataaactaatagaaaaactcatttccttgctctccttttctagcctagaatgtg

SEQ ID NO: 484370 - DNA, 201 bp, Homo sapiens
gcaactccaggcccctcctctcccatggccacagccacgaccatggcctcccatcaatgagactgtagctgttgcacccacactccttgaagataaaggcygccacggatctacccctacccacacggcctcctcaggcacaggtggcaccctcgccgcagtcacacactctccaatagtttggttagatggttggtgccc

SEQ ID NO: 484371 - DNA, 201 bp, Homo sapiens
ctgcaaactctgcctcctgggttcacgccattctcttgcctcagcctcctgaatagctgggattacaggcacccgccaccgcgcccagctaatttttgtattttttttttttttttagtagagatggggtttcaccatgttggtcaggctggtcttgaactcctgacctcatgatccacccgccttggcctcccaaaatgt

SEQ ID NO: 484372 - DNA, 201 bp, Homo sapiens
tgcagtgagctgagatcgagccactgcactccagcctgggtgacagagtgagactccgtctaaaaaaaaaaaaagttgttttgggccaggcacagtggctmacacctataatccccatcacttttggaggccaaggcgggaggatcgcttgagcccaggagttcaagaccagcctgggcaacatggcgagacctcatcttg

SEQ ID NO: 484373 - DNA, 201 bp, Homo sapiens
ctcctctcccatggccacagccacgaccatggcctcccatcaatgagactgtagctgttgcacccacactccttgaagataaaggccgccacggatctacycctacccacacggcctcctcaggcacaggtggcaccctcgccgcagtcacacactctccaatagtttggttagatggttggtgccctcaccggccaggag

SEQ ID NO: 484374 - DNA, 201 bp, Homo sapiens
ccttttttcatttaacagtgtctcttcaggaggatcctttttttttgagacggagtatcattctgtcgcccaggctggagtgcagtggtgcaatctcggcycactgcaagctctgcctcctgggttcacaccattctcctgcctcagcctcccgagtagctgggactacaggcgcccgccaccacgcccggctcatttttt

SEQ ID NO: 484375 - DNA, 201 bp, Homo sapiens
atgggtcctaagtccaatcacaagtgtccttctaagagaagaggaagagacacagacagagaaaaggccacacagatggtggcagagactggagcgatgcrgtcacaagccaaggggcagctggagctactaggagctgaagaggccggagggaccctccccggagctactggagagagccagcccgtgctgatgccttga

SEQ ID NO: 484376 - DNA, 201 bp, Homo sapiens
cgtgggttgagcagtgaacactccgtcctgatcctcagagcttgtggatgtgactctttggaaaaaggtcttgcagatgtgataaaggatctcaaaatgakgtcctcctgcattgtccagatgggtcctaagtccaatcacaagtgtccttctaagagaagaggaagagacacagacagagaaaaggccacacagatggtg

SEQ ID NO: 484377 - DNA, 201 bp, Homo sapiens
ttttttatttaattcctgttaccaaatggactttaaaggcttcccagtgtttatgagaatgaagctacgtgatgtaagttttttctaagatatatagactrtaaatcacaaataaatcatggaaggtgttgtttccagtaagaaattattttagtaatgacagccagtgaaattccctcaatgatcacagtactgtcagtc

SEQ ID NO: 484378 - DNA, 201 bp, Homo sapiens
tagggggtccacgccagctctgatagcatcgcttctcagttactcttttggaagttggccttttccttgcgagaacacctgattcctggcaaagggttccrtttttaggacaggtcgtgagagtgcccgtttccgtgtaatgatctttatgcttttttatttaattcctgttaccaaatggactttaaaggcttcccagtg

SEQ ID NO: 484379 - DNA, 201 bp, Homo sapiens
tggggataggagccgggccaagcgctggcccctcagcggtgagccctgcccactcttaccgagcaaggtgggtggctctggcacgagtcccccagggggasagcatggctaccagggagctgcagcggagccctccagccctcaccccaggccagccccaccccggcctctttgagaattctcagaactttgtacctttcc

SEQ ID NO: 484380 - DNA, 201 bp, Homo sapiens
cattggcccccggttctaccaatgacagggtgccctggctggagctgtcatcacacacacccctcagctcggaggctgtgggctcctcaaagctggagaawgaggccaagatttttctgcacacggagtgtggggataggagccgggccaagcgctggcccctcagcggtgagccctgcccactcttaccgagcaaggtgg

SEQ ID NO: 484381 - DNA, 201 bp, Homo sapiens
gtgggggctgctcctcacggccttacctcccccagacgtgcctctcaatccctgacatcaagacggccttcagcgactgcaccagcaagatcggcaggcgmgattgcctgacccaggcctgctcggccctcacagggtgagtgggggctgcacctgcgggggctttggggaccgagaccccccgcctcacacccgctgtct

SEQ ID NO: 484382 - DNA, 201 bp, Homo sapiens
acagcactcaccatgaggacattccatccttcaccccctcctctggcacaggccaccactgcggtgctgtgccttcagatgggaggtgggcgcggtggcckcctccttccctccaggacctgcccgtgtgaagaccccccggagtgctgagcttcagggctgcgtggaaagagtttttactctctttttctagcctgtata

SEQ ID NO: 484383 - DNA, 201 bp, Homo sapiens
acctatggcatgtgcctgctagtgtgctgtcagtacagctgttgtgtatgcctgctagcacgctgacagtcagtatggctgacagtcagtaccccattgcrtgtgcctgcctaggtgctgacagtcagtacccctgttgtgtgttcctgctagtgcacactgtgcacatctactgtgttcctggcactatgccacgggctt

SEQ ID NO: 484384 - DNA, 201 bp, Homo sapiens
gagagtcccgggcccacaggcaggacagggccagacgtgggggctgctcctcacggccttacctcccccagacgtgcctctcaatccctgacatcaagacrgccttcagcgactgcaccagcaagatcggcaggcgcgattgcctgacccaggcctgctcggccctcacagggtgagtgggggctgcacctgcgggggctt

SEQ ID NO: 484385 - DNA, 201 bp, Homo sapiens
cgtgcctggccccaacttaatgtattttaaaacacgggttgtttcatattttgatgcctgtttttgttttgttttgtttttttgagacggagtctcactckcaccaggctggagtatagtggtgcgatctcggctcactgcaacctccgccttccgtgttcaagcaattctgctgcctcagccttccaagtagctgggact

SEQ ID NO: 484386 - DNA, 201 bp, Homo sapiens
gcttctgcatacaactgccccccaccccaagcctctaagccccacacacacacacacgcacacacacacacaaccacacatacacatgcacacatgcacaygcacacatgcacatacaaacatacacacacacgcacgcacacacacacaagaatcacttgaacctgggaggtggaggttgcagtgagccgagaccgcgcc

SEQ ID NO: 484387 - DNA, 201 bp, Homo sapiens
accccaagcctctaagccccacacacacacacacgcacacacacacacaaccacacatacacatgcacacatgcacacgcacacatgcacatacaaacatacacacacacgcacgcacacacacacaagaatcacttgaacctgggaggtggaggttgcagtgagccgagaccgcgccattgcactccagcctgggtgaga

SEQ ID NO: 484388 - DNA, 201 bp, Homo sapiens
ccccaagcctctaagccccacacacacacacacgcacacacacacacaaccacacatacacatgcacacatgcacacgcacacatgcacatacaaacatacacacacacgcacgcacacacacacaagaatcacttgaacctgggaggtggaggttgcagtgagccgagaccgcgccattgcactccagcctgggtgagag

SEQ ID NO: 484389 - DNA, 201 bp, Homo sapiens
cccaagcctctaagccccacacacacacacacgcacacacacacacaaccacacatacacatgcacacatgcacacgcacacatgcacatacaaacatacacacacacgcacgcacacacacacaagaatcacttgaacctgggaggtggaggttgcagtgagccgagaccgcgccattgcactccagcctgggtgagaga

SEQ ID NO: 484390 - DNA, 201 bp, Homo sapiens
ccaagcctctaagccccacacacacacacacgcacacacacacacaaccacacatacacatgcacacatgcacacgcacacatgcacatacaaacatacacacacacgcacgcacacacacacaagaatcacttgaacctgggaggtggaggttgcagtgagccgagaccgcgccattgcactccagcctgggtgagagag

SEQ ID NO: 484391 - DNA, 201 bp, Homo sapiens
gttaccatgtgctatgattgtgccactgtactccagcgtgggtaacggagcaacaccctatctctacaaaagaaaaaaagaaaagaaaaagatgaatcaascaaacactaaccaaaaagaaagtcagtatagcaatcttaatatcaaagtaaactttgagaagtattactcaagagggactggcataatgataattagtca

SEQ ID NO: 484392 - DNA, 201 bp, Homo sapiens
aggtcgactcaggcagcaggatccgcagagctgtggttggcccagcagggagccctggaggagaactggctatgctgtgccatgtggggccaggctggccrggacttcacaccatggcctggtgggtccccagtgtgggctgccctgggcaggtgtgacctggcagtgtggctctttgcagccaaagtgggtcccacagaa

SEQ ID NO: 484393 - DNA, 201 bp, Homo sapiens
taggggagtttcccacttgggagttccctgcgatggggccagtggagaattccagggaaagaatcactaaatgccaaggcgatcagatcagagcatgtatyaggggaacctgttgacagagtgcggcatcctcaggtgaccagtgagagaagggcgtgttcactggtcatgcctgaagccgggggggatctgggttcaggg

SEQ ID NO: 484394 - DNA, 201 bp, Homo sapiens
tgagaagtattactcaagagggactggcataatgataattagtcaattcagtagtaaatataacaatcctaatgcatattgctcctaacagctcagttggttttttttttgtttgtttgtttgtttgtttgttttttgagagaagtctcactgttgcccaggctggagtgcagtggcgcgatctcggctcactgcaacctc

SEQ ID NO: 484395 - DNA, 201 bp, Homo sapiens
gggacgcgggtgtgacaggagccagctttggctgcttgtcggggagcctcagacctggcggcggcggcttggggcggacgtagccgggggccgcgacccasgttcttccttcgcagtcgttccctgccagccgcgcgccgcctccaggtgcactccaggagcagccgcgccgctgctcacccgccctgtagtccgctcccc

SEQ ID NO: 484396 - DNA, 201 bp, Homo sapiens
gtattactcaagagggactggcataatgataattagtcaattcagtagtaaatataacaatcctaatgcatattgctcctaacagctcagttggttttttktttgtttgtttgtttgtttgtttgttttttgagagaagtctcactgttgcccaggctggagtgcagtggcgcgatctcggctcactgcaacctctgtctc

SEQ ID NO: 484397 - DNA, 201 bp, Homo sapiens
ctgctggtgcctccaccgcctcagtgatggcctcccggaaagcctggtactcagcatcttcctggcggcccgggcgctcttcgtccagcgcggccaacaasctgctcttcctgacagacaccaggctggcctcggtgagctcgatgagctccttcaggtccccctgcagctggcgcaggtcagcctgctcagacgaatcca

SEQ ID NO: 484398 - DNA, 201 bp, Homo sapiens
tactcaagagggactggcataatgataattagtcaattcagtagtaaatataacaatcctaatgcatattgctcctaacagctcagttggttttttttttrtttgtttgtttgtttgtttgttttttgagagaagtctcactgttgcccaggctggagtgcagtggcgcgatctcggctcactgcaacctctgtctcccag

SEQ ID NO: 484399 - DNA, 201 bp, Homo sapiens
ggaaaaaaccagtaacttctggaatttgctttaaaatggcccaggaaagaaaaaaatagggcagggagaacagacaaaatgagactgggaaaatattaatmaatgacgacattggatgatggaccgtgggcggtgattatgctaaactctctaatttggggtatgtttgaaaatctccatgaaagtaaaatttaaaagttg

SEQ ID NO: 484400 - DNA, 201 bp, Homo sapiens
ggagagtccaggggcccagtggggtgtgggcgtgtcccctggcgccgcgcctgccaccggactgcacgcacctgtggtcacagaggaagacagctccgtartcctggcggtgccggatcactcgcccgatggcctggttcacagccctggacgcctgctgccggtaccactcctgcccagagaggaactgtggggcgaggc

SEQ ID NO: 484401 - DNA, 201 bp, Homo sapiens
agtatacgtttacacaaccctcaagtcaaagaataaatccctatggaaatgataaacttttttttttttttttgaggcagagtctcgctctgtcacccagrctggagtgcagtggtgcgatgtctgctcactgcaacctctgcctccggggttcaagtgattctcctgctgcagcctcccgagtagctgggattacaggca

SEQ ID NO: 484402 - DNA, 201 bp, Homo sapiens
ctctacaaaaaatacaaaaattagctgggcgtggcagtgcacacttgtagtatcagctattagggaggctgaggtgggaggatggcttgggccagggaggyggagattgcagtgagccgagattgtgccactgcactccagcctgggtgacagagcagcaagacgctgtttcaaaaaaaaaaaaaaaaggaagacattcaa

SEQ ID NO: 484403 - DNA, 201 bp, Homo sapiens
gatgacaatgtgccccaaacagatctacacattctatgcaatccatatcaaaattcaaactgtcttttatgcagaattggacaagccgatcctaaaattcrtatgaaattgcaaaggatccagaaacaaaacaaacttgaaaaagaggagcaaatggtgaataactaccacttcctgagtttaaaacttatcacaaagcta

SEQ ID NO: 484404 - DNA, 201 bp, Homo sapiens
tgctgagcttgggtaactcttgttcttacctccacagagtctgtagaagaggcgacaccagggcttccaaatgaacaaccgaaaggaagatatggaaatcrcgtcccactaccggcacctgctgcgggagctcaacgagcagaggcagcacggcgtcctgtgcgacgtctgcgtggtcgtggagggcaaggtcttcaaggc

SEQ ID NO: 484405 - DNA, 201 bp, Homo sapiens
tcacttccccgatgcctagttaatctgggtgaagctgtgcctggtgggacacctgccctgccctcctggggctctgagatgctctccggtcaagaaccacygggcggcctcagcacatgaccccctccccacagcctgctccgaatgtcatctcttccttttcggcagctccttgttctgctcgcacccacacgcgtttgc

SEQ ID NO: 484406 - DNA, 201 bp, Homo sapiens
ctgaggcggtgtttggaggagacagcagaggcggcgtccctctgagggtctagggtagctattgggcaacctgacatcagtgcagccgcgggtgccccttrgtccctgcagcccgcagcacccactctttggagacttggcacctgtgccccagtgtggatcgggagctcctctctgaaggggcacctcgcgcacgggggt

SEQ ID NO: 484407 - DNA, 201 bp, Homo sapiens
ttatttttattttattttatttttttgagatggagtcttactcttgttgcccaggctggagtgcaatggtatgatctcggctcactgcaacctccgcctcscaggttcaagtgattctcctgcctcagcctcccaagtagttgggattacaggcgcctgccatcacgtcctgctaatttttgtattttagtagagatgggg

SEQ ID NO: 484408 - DNA, 201 bp, Homo sapiens
tagctgagtgtggtggtgtgcacctgtggtcctagctactcagggggctgaggtgggagaattgcttgagcccgggaggtggaggctgcagtgagccctgwtcatgccactgcactccagcctgggtgactgagtgacaccttgtctgaaaacaaaacagtttcaccaaaataattgtggagagcagttcttagagtaggt

SEQ ID NO: 484409 - DNA, 201 bp, Homo sapiens
cgttcctgtgggtgagactcctcctttcctgtgttcccagggcctgggtcccttgtgagggtcgctgatggcagaacagaagcccctccaccctccacccycagagccacaggatgagctctggggaaccgccagacccagcccagggagccggcacagcctcccccagctcaggtaagacaccagggtggccagctttgt

SEQ ID NO: 484410 - DNA, 201 bp, Homo sapiens
tgcttcacggctggtttcttgcagtctttgacactatcatgaaaaggttctggaatgttccctggtacagtggctatttaggacaggtccgattctcctgsagcggaaagcgcactgggaggggacagaggaagggccaagggcaggtggccatgcagccgacttggcttggtgcagggaggccagagacctctgctcttc

SEQ ID NO: 484411 - DNA, 201 bp, Homo sapiens
ggagattgctgtgagctgagattgcaccactgcactctagcctgggcgacagcaagactccatctaaaagaaaaaaaaaagttagtctcaccaggccacaygtgatgactcacgcctgtagtcccagaactttgggaggctgaggctggtggatggcttgagcccagcacttcgagaccagcctgagcaacatggtgaaac

SEQ ID NO: 484412 - DNA, 201 bp, Homo sapiens
cacctggggatttgtgttaatctggtgtcgtaggacacagacacagaaataactcataaagggaagaagtttgttacactcaccaatttccagaatagcakgcccaccagcccaggcagagacacatggggaagcaccagggtcagtcaggaggcagagggagagggggaaatgcaggccggagccttgtttggtttctgt

SEQ ID NO: 484413 - DNA, 201 bp, Homo sapiens
gctttccttggtgactgtcttctcttactcagcgtaactgtgggataatccgtgtggcgtggatgtgacctgtatagggggacggaaggctgagcagggakgtgccccagggtgccgaggccgggacggagcccagcagccccttcttgtgcctgagctgcctctgcagtttggaagcatcccgtgtttacctgctcacct

SEQ ID NO: 484414 - DNA, 201 bp, Homo sapiens
attcctggaaaacagaatttatcaaaactggagcaaacaggaagagctcaatggttttatgatctgctgagaaaattgaattaataactttaaagccttcycacagagaaagcttcagggcgagtgcctttactagtgaattctttccaattttaacggaagaaaatgacgccaacgttagacatatcttccaaatactag

SEQ ID NO: 484415 - DNA, 201 bp, Homo sapiens
ccgtgagtgtctcctgtgggaaggtccgttcagcttccgtgagtgtcccctgtgggaagggcctgtgccgcacaaggtggggacttgggcacacggcctcrgaggccagacaccgggcgagccccgctctgggagtgagacccgctcggagggggagcgagccctgaggcgccgcctgtaagccagacccgctgcctcaca

SEQ ID NO: 484416 - DNA, 201 bp, Homo sapiens
ttctgttgtctagagtttcctataaagggaatcacacgctttccttggtgactgtcttctcttactcagcgtaactgtgggataatccgtgtggcgtggaygtgacctgtatagggggacggaaggctgagcagggaggtgccccagggtgccgaggccgggacggagcccagcagccccttcttgtgcctgagctgcctc

SEQ ID NO: 484417 - DNA, 201 bp, Homo sapiens
agctactcgggaggctgaggcaggagaacccaggaggcggagcttgcagtgaatcgagattgtgccactgcactccagcctgggcaacagagtgagactcygtctcaaaaaaaaaaaacaaaaacactgatataactcctgtgaaaagtgatcaacggatattggatagataagattattatacacaactttatgcgaata

SEQ ID NO: 484418 - DNA, 201 bp, Homo sapiens
acatctgttccctccagtcctggaggccggaggtctgaggtttgggcatcagcccgccgcggttcctgggagggtgctgggggcctgaggttcggtcgtcsgccgcggcggttcctgggagggtgctgggggcctgaggttcggtcgtcggccacggcggttcctgggagggtgctgggggcctgaggttcggttgtcggc

SEQ ID NO: 484419 - DNA, 201 bp, Homo sapiens
ggctccggccttggccatcccaggaaggggctcccacagtgcagcagcgggctgaagggctcctcaagtgcagccagagtgggcgctgaggtcgaggaggygccaagagtgagtgagggctgtgagggcttgccagcatgctgtcaactctcaccatcaccacaggagcttcccgcagcctctccccctaccccagcccag

SEQ ID NO: 484420 - DNA, 201 bp, Homo sapiens
ggtcaggagatccgagaccatcctggctaacacggtgaaaccctgtctctactaaaaatagaaaaaattagccaggtgtggtgacaggcgcctgtaatccyagctactcgggaggctgaggcaggagaacccaggaggcggagcttgcagtgaatcgagattgtgccactgcactccagcctgggcaacagagtgagactc

SEQ ID NO: 484421 - DNA, 201 bp, Homo sapiens
cacacactctccaatagtttggttagatggttggtgccctcaccggccaggagcctctcagggtgaccccaccttcctggctcctgggctccgcagctgcwgccatacctctggcatagctggagtcacccgtaccgtcgctgtctgagtcggactctgtggcctctgtgcgcagtgggggcaggatgccgtccccctcca

SEQ ID NO: 484422 - DNA, 201 bp, Homo sapiens
atgatggacacccgtcaccttccgggagtctgttggagagaggatttgggatgggcaccgccacttccaagatggccctagaggctgggccgttcctatgygcattcggcagaggccactcttccttcactccagctgacccagggaggaggaggatagaagccacgtttggcggagcctgtttgccggtggtcattctgc

SEQ ID NO: 484423 - DNA, 201 bp, Homo sapiens
ccctcaagtcaaagaataaatccctatggaaatgataaacttttttttttttttttgaggcagagtctcgctctgtcacccagactggagtgcagtggtgygatgtctgctcactgcaacctctgcctccggggttcaagtgattctcctgctgcagcctcccgagtagctgggattacaggcaccggccaccacgcctgg

SEQ ID NO: 484424 - DNA, 201 bp, Homo sapiens
cagcagcagcgagtcaaacttgactgtgtagtagccgttgtccacatctgggggcagagacaagctgcaggtcagaatccttgacagcaggtgccactgawgggaaccaccctggacatgaggagcaaggcagggcagaggctgagggtaggtgtgctcatttcgggcccagagccagagtcccgacactcaacccaaagg

SEQ ID NO: 484425 - DNA, 201 bp, Homo sapiens
agtctgaagcagccggcagggctgcatcccctggagctccaggggagtccatgtgcctcttctggcttctggaagccatagcatccttggctcgtggcccsacatcattcctgccccttcccatcctcgcttctgtcaccctcctgcctccttctctgctgacggggccctggtgggtccgtttagggcccacgtggctca

SEQ ID NO: 484426 - DNA, 201 bp, Homo sapiens
ggtggctcatgcttgtaatcccagcactttgggagtctgaggtgggcagatcacctgaggttgggagtttgagaccagcctgaccaatgtggtgaaacccygtctctactaaaaatacaaaaattagcggccgggcgcggtggctcacaggcctgtaatcccagcactctcggaggctgaggggggcgaatcacgaggtca

SEQ ID NO: 484427 - DNA, 201 bp, Homo sapiens
aatcaagcacagcgccggtgggccggcactgctggcggacaccctccgcagctgctggcccgggtgctaagcccctcattgccctgggccgctccgagtgyggggccgccaagcccacacccacccggaactctagctggcccgcaagcgccgcacgcagccccggttcccgcccacgcctctccctccacacctccccgc

SEQ ID NO: 484428 - DNA, 201 bp, Homo sapiens
gtgtcatcgagggatttgtaaaaaaatataaaaaggagtatagtttggaaaaagagtagagtttggaaacatatcccttagaggcctccagaagaagtcayaggtagctcgacggtccgaatgtcactgtccctggagactcccacccgctcctgccaggctggactcaccccgtgtgctgcctgacgggggccctgccca

SEQ ID NO: 484429 - DNA, 201 bp, Homo sapiens
ttgaacacagttttcaaatgttaaattcaccttgaattcctggaaataaacacatctggtcacaagctgctattctttttctgtattattggattcagttwgctaatgtttggtttgagtcttgcatctgtgttcatagagatactggctgtaacagcacaattagcccagtttgaacgttacaccaaaagtgcaggatat

SEQ ID NO: 484430 - DNA, 201 bp, Homo sapiens
atcaagacggccttcagcgactgcaccagcaagatcggcaggcgcgattgcctgacccaggcctgctcggccctcacagggtgagtgggggctgcacctgygggggctttggggaccgagaccccccgcctcacacccgctgtcttcacagcaaaggggtgcgcgagggcatcgagtggatggtgaagtgtgtcgtgcgga

SEQ ID NO: 484431 - DNA, 201 bp, Homo sapiens
gcaggatgctgggtgtgaggcgctgcctctcctgccctccccagagaaggtggtgaccagcgaggcgctgtgcggtgtccccgtcttggtgctggccaacragcaggatgtggaggtgagccccacccctgcctcccgcagcagcttcccgagtccccagcctcccccacagcaaggggagtaggtgtgcacccagacacc

SEQ ID NO: 484432 - DNA, 201 bp, Homo sapiens
gcggcatggccgggcccctggaccatggcggcggaggcggcgagggctctccagaggcgctgttcccaggcgacgggccctatctggaggaccctgaggayccacgaggggaggcggaggagctgggcgaggacgacgagggcctggcccctgaggatgcgctgttggcagacgacaaggatgaagaagactcgccgcggc

SEQ ID NO: 484433 - DNA, 201 bp, Homo sapiens
tggcccttggcagggtggggactgagccccaactcctggtgcttcctcccagtattatgcggagtgtcacggcgtcatctacgtcattgactccaccgacraggagaggctggctgagtccaagcaggcgtttggtgagtgcggcctggctgctctgggagggatggatggtgagtgggggcaggtccagcttgggcagct

SEQ ID NO: 484434 - DNA, 201 bp, Homo sapiens
ttatacatcttctttggacaaatgtctagtaagattttttgcccatttttatattgagttacagtatttgcctttttattatcagatatataggttgcaattttttttttttttttgagacagagcgttgttctgtcgcccaggctagagtgcagtggtgtgatctcggctcattgcaacctccacctcctgggttcaagc

SEQ ID NO: 484435 - DNA, 201 bp, Homo sapiens
gagggtgcccgtgagtgggtacaagggccacctctccccatccctggccatgtctgaggtctggttctgcacagcacaggtgtccacacccaccctccgcrgaagcccacctggggccacatgtccccagcagtgtgtggtagttccctcaggccttgaggccagtgctgagaccctccaggaacccagcacctcgcgtcc

SEQ ID NO: 484436 - DNA, 201 bp, Homo sapiens
gagaagtctcttgttactgactcacggaggagagccaggggcacagtgtggctgacagaggacaggccaggaagagcttgggatttcctcgtcaggagccrctcgggggatgtgcggcggggacatgcgtccgaacacagccagctggtcagaggtgctgccgtgccaggcggggcctccggggttttctgtgtcttggcc

SEQ ID NO: 484437 - DNA, 201 bp, Homo sapiens
ggagaatggtatgaacccgggaggcggagctggcagtgagccgagatggcaacactacactccagcctgggtgacagagcgagactctgtttcaaaaaaawaaataaataaaatacagcaaaacaaaagcccaaaggagcagttctggcaccaagttgtctgaggctctgtttctagggttagcgtgtttgggcatctgag

SEQ ID NO: 484438 - DNA, 201 bp, Homo sapiens
atggtatgaacccgggaggcggagctggcagtgagccgagatggcaacactacactccagcctgggtgacagagcgagactctgtttcaaaaaaataaataaataaaatacagcaaaacaaaagcccaaaggagcagttctggcaccaagttgtctgaggctctgtttctagggttagcgtgtttgggcatctgaggtgtg

SEQ ID NO: 484439 - DNA, 201 bp, Homo sapiens
tgtggtggcaggcacctgtgatcccagctacttgggaggctgagcagaagaattgcttgaacccgggaggcagaggttgcagtgagccaagattgtgccaytgcactccagcctgggtgacagagcaagactctgtctcaaaaaaaaaaggaaaagaaaaacaattccttagagaagcatcaaaaataatacttatttaac

SEQ ID NO: 484440 - DNA, 201 bp, Homo sapiens
gctgatctcaagtgatctgcccacttccacctcccaaagtgctgggaacacaggtgtgagccaccacccccggcccgctctagtcacttttattcaacatygtacttgaagttctagctaaggcagttaagcaagaaaaagaaataaatgccatgcaaactagaaacaaagactacaattatctctattcacatatatatt

SEQ ID NO: 484441 - DNA, 201 bp, Homo sapiens
ccaactgtactttacacacatatgcacacacaatcacacacagggccaactgtacactttacacacatatgcacaatcacacacacaccaagggccaactstacactttacacatgtatgcacatgcacacatacacacaccaagggccaactgtacactttacacacgtatgcacacaatcacacacacaccaagggcca

SEQ ID NO: 484442 - DNA, 201 bp, Homo sapiens
catgaaaaaccaaccgccatccactgctgccatgccatcgtttcaaaaaggaagttctttcaaccccacaaaagcaactgaggggccaggtgcagcggctsacgcctgtaatcccagcactttgggaggccgagacgggtggatcacgaggtcaggagttcgagactagcttggccaacatggagaaacccgtctctacta

SEQ ID NO: 484443 - DNA, 201 bp, Homo sapiens
tgtaatccgagcactttgagaggccgaggtgggcggatcacaaggtcaggagatcgagaccatcctggctaacacggttaaacctcatctccactaaaaawacaaaaaattagccaggcatggtggcacacatctgtaatcccagctacttgggaggctgaggcaggagaattgcttgaactcaggaggtggaggttgcag

SEQ ID NO: 484444 - DNA, 201 bp, Homo sapiens
aggcataagaatcgcttgagcctgggaggcggaggttgcagtgagccgagattgcaccattgcacttcagcctgggcgacagagcaagactccatctcaaaaacaaacaaacaaacaaacaaacaaaaagcctattaaaaaaaaattcaaggccgggctcatgcctgtaatcccagcactttgagaggcctaggcgggcgg

SEQ ID NO: 484445 - DNA, 201 bp, Homo sapiens
gcacctggtctatgacgtccagtcctgaagccaggtcatggggagtcaggtcaaaggatgccgattcttcacacatcttctcctagagcccaagcacaccygaatcaccacagaacaggacaggatcgggggttccagaaagcagaaatggggtgggggtgcagaaggcacaggaggctgacagccaagttcccaaagcct

SEQ ID NO: 484446 - DNA, 201 bp, Homo sapiens
aaagggtctggtgagcggcctgtgggggccctgcgcctgacgggcaggtccctggcccagctggccagtctccagccccagcagaggcatcggatcagggygggagggggtggcagaagctcctggtgtgctcagtccccagtcctgggcacctagggcttcaggagtttggccagagcccctccagaaaggtttgcgtgg

SEQ ID NO: 484447 - DNA, 201 bp, Homo sapiens
aggccaaggtgggcggatcacctcaggtagggagtccaagaccagcctggccaacatggtgaaatcccatctctactaaaaatataaaaatcagccaggcrtggtggtgcacgcctatagttccagctactcgggaggctgaggcaggagaattgctggaatctgggagtcggaggttgcaatgagtgagattgcaccact

SEQ ID NO: 484448 - DNA, 201 bp, Homo sapiens
gggcgacagagcaagaccctttctcaaaaaaaaaagaaagaaagaaaaacttttttggaaaatttacaaatatgcagaaataaagacactcttgaataacsagtaagtcgaacaaaaaaacaaaagggagattaggatgccttgagatcaatgaaaatggaaatacaacagaacaaaacagccaagtggcagggtgcggtg

SEQ ID NO: 484449 - DNA, 201 bp, Homo sapiens
tccgtgctgcaatctcaacgatgcatttggagtggattacggtggcaagattgtgatcagcattgtttaaagaaatgctaattagaaacgtgtttagcgcrcggcctgggcgcagacacctgtgcgccgagaactcacgggcattttaattgtatcgattgtagaatctttcatattggctctattatcagagctaacttc

SEQ ID NO: 484450 - DNA, 201 bp, Homo sapiens
actcctgaccttgtgattcgcccgcctccacctcccaaagcactgggattataggcgcgcaccacattgcctggctaattttttgtattttagtagagacrgggttttaccatgttggccaggctggtctcgaactcctgacctcgtgattcgcccgcctccgcctcccaaagtgctgggattacaggtgcacaccacatt

SEQ ID NO: 484451 - DNA, 201 bp, Homo sapiens
accctgggaatctgaggagcacggggatggcagtgctgtggccgcgggaccccgggaatctgaggagcacggggatggcagtgctgtggctgcgggacccygggaacccgatggctgcgggaccccgggaacctgatggctgctggacctgggctatgctgcagcagcctgcccacttctccagggcagcttgtactcacc

SEQ ID NO: 484452 - DNA, 201 bp, Homo sapiens
cctgcacaatgtaactgcaccgcgtcctgtgcacctggggcagagcctgcacggtgtaactgcgcagcgtcccgtgcacctggttgtcggcggttgaggcrgagccatgcgtgggtttgtgcccccagcacctgcacggtgacgcggcttgtgagtttggagcatggcttcaggttgttgtggtcaccagagtggttatgc

SEQ ID NO: 484453 - DNA, 201 bp, Homo sapiens
ggaggcagctagggccggcgagaaatcaagcacagcgccggtgggccggcactgctggcggacaccctccgcagctgctggcccgggtgctaagcccctcrttgccctgggccgctccgagtgtggggccgccaagcccacacccacccggaactctagctggcccgcaagcgccgcacgcagccccggttcccgcccacg

SEQ ID NO: 484454 - DNA, 201 bp, Homo sapiens
gagtttggagcatggcttcaggttgttgtggtcaccagagtggttatgctgatgcccgtttcataagcgattctgtttgaagggaaggatcttgagattcrtgatatataagtaaagcagataccaagaagcctcagaaaaagctgaggcggtgtttggaggagacagcagaggcggcgtccctctgagggtctagggtag

SEQ ID NO: 484455 - DNA, 201 bp, Homo sapiens
cctgaggggaggcagctagggccggcgagaaatcaagcacagcgccggtgggccggcactgctggcggacaccctccgcagctgctggcccgggtgctaascccctcattgccctgggccgctccgagtgtggggccgccaagcccacacccacccggaactctagctggcccgcaagcgccgcacgcagccccggttccc

SEQ ID NO: 484456 - DNA, 201 bp, Homo sapiens
aagcaatctgcctgcctctgcctcccaaagtgctgggattacaggtgtgagccatcgtgtccagccccagcgacctcatcttaattaattgcatctgcaaygacctatttccaaataaggtggaattctgaaatatgaggggttagggcttcaacatgaatttgggaggcgggggcggggggttcaacccgtaacaaatgg

SEQ ID NO: 484457 - DNA, 201 bp, Homo sapiens
attacagacgtgcgccaccacacccggctaatatttgtatttttagtagagacgggggtttaccatgttggccaggctagtctcaaactcctggcctcaascaatctgcctgcctctgcctcccaaagtgctgggattacaggtgtgagccatcgtgtccagccccagcgacctcatcttaattaattgcatctgcaatga

SEQ ID NO: 484458 - DNA, 201 bp, Homo sapiens
gtaatcccagcaatttgggaggctaaggtgggaggatcacttggggccaagagtttgagacctgcctgggcaacttagcaagaccccatctctaaaagaaytaaataattagctgggtttggtggtgctcaccagtgattcaagctacttgggaggctgaggcaggagatgacttgagcccaaaagtttgaggttaccatg

SEQ ID NO: 484459 - DNA, 201 bp, Homo sapiens
agttttttttttttttttttttttttgagatggagtctcgccctgtcgcccaggctggagtgcactggcgcgatctcggctcactgcaggctccgcctccygggttcacgccattctcctgcctcagcctcctgaatagctgggactacaggctcccgccaccatgcccagctgctttttttgtatttttagtagagacag

SEQ ID NO: 484460 - DNA, 201 bp, Homo sapiens
gaagccagggcggcaggttcgtttaggaattcaagaccaacctgggcaacacgacagaaccccgtctctacaaaacaaaaaaattagcccgtgtggtggcrtgcccctgtggtcccagctgctcaggaggctgatgtgggaggatgccttgagcctgggaggttgaggctgcagtgagccgagattgcgccactgcactcc

SEQ ID NO: 484461 - DNA, 201 bp, Homo sapiens
aggtctccccagaagctgatgccaccatgcttcctgtagagcctgcagaaccgtgagccaatcaaacctcttttctcataaattatccagttgcaggtatytctttatagcagtgcaagaatggcccgatacaatacgtgattaatttgaaagaaggcaagaaaggaggaataagaacaaaaagcataaaggacaaataaa

SEQ ID NO: 484462 - DNA, 201 bp, Homo sapiens
aggtatgctggcgtgcgcctgtagtccgagatactggggaggctgaggtgggagaatcactcgaactcgggaggtagaagttgcagtgagccaagatggcrccactgcactccagcctgggtgacagagcgagaccaaactgactcaagaagaaacagaaaatctgaatagacctataacaaataaagaatcagtagtcaa

SEQ ID NO: 484463 - DNA, 201 bp, Homo sapiens
ctcttcgacttctgccatgattggaagctccctaaggtctccccagaagctgatgccaccatgcttcctgtagagcctgcagaaccgtgagccaatcaaayctcttttctcataaattatccagttgcaggtatttctttatagcagtgcaagaatggcccgatacaatacgtgattaatttgaaagaaggcaagaaagga

SEQ ID NO: 484464 - DNA, 201 bp, Homo sapiens
tcaccatgttggccaggctggccttgaactcctgacctcagatgatccgcccgcctcggcctcccagagtgctgggatcacaggcttgagccaccgcaccyggcgtcactttcttggtagtatcctttgaagcacagacatttaattttgatgagtccaatttattttgttgcttgtgcttggttttgtatctaagaacct

SEQ ID NO: 484465 - DNA, 201 bp, Homo sapiens
ggattgcttaagcctgagagttcaagaccagcctgggcaacatagggagaccttgtctctacagaaaaagtttaaaattagctgagcgtggtgctgtgcaygtgtggtcccaggtactcggcaggccgaggagggaggatcgcttgggcacagcaggtcgaggctgcagtgagccatgattacaccactgcactccagctg

SEQ ID NO: 484466 - DNA, 201 bp, Homo sapiens
cgcctctccctccacacctccccgcaagctgagggagccggctccggccttggccatcccaggaaggggctcccacagtgcagcagcgggctgaagggctsctcaagtgcagccagagtgggcgctgaggtcgaggaggcgccaagagtgagtgagggctgtgagggcttgccagcatgctgtcaactctcaccatcacca

SEQ ID NO: 484467 - DNA, 201 bp, Homo sapiens
ctccagctgggtgcagctgcccaggcgagagagctctcaagtgtgtgggagcaggaggggaactgggtgaccgaacagccgcgtcggagggggatatctgyggagagctgtgactgggagccggtgtgtgcctttctgtggtcatttctcgagtcctctgccggctgctgccaggtgaaggcatctccatgcccagccggt

SEQ ID NO: 484468 - DNA, 201 bp, Homo sapiens
gctggaagtggtttgggacagaactgcgggtgcctctggtctgtgcgctggagccggcgtttgctttgacctcagtgctgcggccagagctttggcgtccrggtcccgggctccagctgggtgcagctgcccaggcgagagagctctcaagtgtgtgggagcaggaggggaactgggtgaccgaacagccgcgtcggaggg

SEQ ID NO: 484469 - DNA, 201 bp, Homo sapiens
aatgcgagctcgtccgggtcgcgcaggggccgggggtctttgtgctccagagacgggctcgggcgccccctgccggcccctctgtcgccttcgtgctgagrctcgtttcgcgcaagggagatgggggcggccgctgcgagccgattgcacttgggggcctcgccttgcgttgccttcgctggatgatgctggtggcgtgtg

SEQ ID NO: 484470 - DNA, 201 bp, Homo sapiens
gaactcctgacctcaggtgatccgcctgcctcggcctcccaaagtgctgggatcacaggcatgagcctccttggtctcccaaagtgctaggatgagcctcrgtgcccagccttaaccacacattttggattttgaaattaattgctattcccacacgagtcgtttctcatttctcacaggatagttttggtggcaggtgtt

SEQ ID NO: 484471 - DNA, 201 bp, Homo sapiens
gggcaggggtctcccctcggaggaaaaggggaggggagggctgctttttgaagactgggcaggtggttgtgagcagaagccaccatgactgcagactgccyccatcactgatgcagggctcccacctctccatcatccccggctgtgtgggcccctgggacctgcctccgccactgcccaggaggcctcagtcctcagcgc

SEQ ID NO: 484472 - DNA, 201 bp, Homo sapiens
tctcagggggctgccgcggcggaggagcgcctcagagttcacggcgtagccccactcgccggtacccaggtggacgctgatcgggggagagaactgagccycggggtctgacgccgtctgctgatctgaagcgttgaactcacggacttctaagtctctcaacaccgtgcgggagcgccaggcccggcgggaccgcgtggc

SEQ ID NO: 484473 - DNA, 201 bp, Homo sapiens
gccccagcccgagccgcgcagagccctggtggaaggcattctccttcctgtgcctgaagtcgcggagtcttttctataaagaaagggccatggggtgtgtrcctccctggagaaaaaaaaattctttaacaagagctcaaccactttttttttttttcttttgagacagagtctggctttgtcacccaggctggagtgcag

SEQ ID NO: 484474 - DNA, 201 bp, Homo sapiens
tggcctggatatggagaaggtggccaggcccatgggggcaggagatccacggctgggcatgtgcctagcctgtggcatggtggtgccgggcactgcacccrggcgggcggggagcgtgtgggcccaggtctgtacctcgctttctggctgcagtggtgctccaggcatcagaccgctgagccgtcctccggtgaccagcat

SEQ ID NO: 484475 - DNA, 201 bp, Homo sapiens
tttggttgtggtttaaagactgtttccctgtggtatttaaaggatgaatcgagaactttaacttgattctggatcgagactggaattgtgaacagttgctractaaagggcatttggtggacatggtgctgcactttcaggtggtccaggccagcgtgccttggcgttctcatcaggagagcatttctgcagtccagaggt

SEQ ID NO: 484476 - DNA, 201 bp, Homo sapiens
gctactcaggaggctgaagcaggagaatcgcttgaacccaggaggcagaggttgcagtgagccaagatcaagccattgcactccagcctaggctatagagwgagactccatctaaaaaaaaaagaaaattaaaaaaaattttttaaaaataaagaaattaatagaaactgttcctgaggaagcctagacatttgaatgact

SEQ ID NO: 484477 - DNA, 201 bp, Homo sapiens
ctttgtgggacaaggtaagactccctggccaggaccacccccaccccagccctccagtgccacttctttccagagtgccctttgggcccttcctcagcagytttccttacccactctgtccctcgggttttctctctggtcctgtcccaggttcccgagtggctccctgttttgtcccagctgaacccttagctgaagttg

SEQ ID NO: 484478 - DNA, 201 bp, Homo sapiens
agccggtgcggcagcggcaggcacggttgtgggtggcgtggcaagcccgtgcctcctcctcacgctccccgcagaggacgttgcagtagcggcagcgctcyaggtagttccagaactgcgtgtagtggcgcggtggacacgggccacacgtcgtggggctgtctcggcggcacggccgctgcacaaaggtgcctggggggc

SEQ ID NO: 484479 - DNA, 201 bp, Homo sapiens
agtggtgctccaggcatcagaccgctgagccgtcctccggtgaccagcatcaggatggatgtgcacctggaggggacaggaccaggagtgtggaggccccrcccatgtcctgggggcagccccttaccttttaggaccagaagacccccagccccacctgcctcctggaggtggcccccaccttataggactgtaaggccc

SEQ ID NO: 484480 - DNA, 201 bp, Homo sapiens
ccatcaatctctgacatccctgtcagaggacttgccatacttctcattcaattctgttgaacttcgtgcttacttttattcctttttcagcagtaggcggkcctcctctctgttactagacattgttctcccagtagaaaccatgaaaactgtcatttaggctcagaacatggctgcccacaagttgtgctgggctggcgc

SEQ ID NO: 484481 - DNA, 201 bp, Homo sapiens
tcaagtgatccacccgcctccacttcccaaagtcctagcattacaggcgtgagccactgcgcccggcctctttatcctttttgccactagatatttaaagmaatctctttcaaagcacaagctaaccactaacctaaaagaacagaaacaagcacccctgacagaatatagtctttatttaaaaaggtcaggaaagtaact

SEQ ID NO: 484482 - DNA, 201 bp, Homo sapiens
gaacagacctgagtaaggatatttggaagccagtatagcccctccttgatgtgtttcgcctctgcctctctcctcagaccttcctggagcagtcgaaaacycgatttaacaagaactacaaggggatgagtctatccaaaatcaccaccaccgtgggcctaaacagtaagggtctcaatagcaggctgtgggtttggggcc

SEQ ID NO: 484483 - DNA, 201 bp, Homo sapiens
ccacctgcctcctggaggtggcccccaccttataggactgtaaggcccccagccctgccggggaacaagggctgccctccacctgcctcctggaggtggcmcctaccttataggactgtaaggcccccagccctgctggggaaccagggctgccctcggaggggtccacactgaacacaatctgaaaggcagaggaagtgc

SEQ ID NO: 484484 - DNA, 201 bp, Homo sapiens
acactctttatcctttttttttttttttttatttgagacagagtctcgctctgttgcccaggctggagtgcaatggcgcaatctcagctcactgcaacctycgccccctgggttgaagcgattctcctgcctcagtcttcccagtagctgggactacaggcaggtgccaccatgcccggttaatttttgtatttttagtag

SEQ ID NO: 484485 - DNA, 201 bp, Homo sapiens
cacctgagacggcaggatagtcaccaccagcctcctgaagagcagagtgttgctctgtttctgtttctgtcttttaaagaacagacctgagtaaggatatytggaagccagtatagcccctccttgatgtgtttcgcctctgcctctctcctcagaccttcctggagcagtcgaaaacccgatttaacaagaactacaagg

SEQ ID NO: 484486 - DNA, 201 bp, Homo sapiens
gcccccagccctgctggggaaccagggctgccctcggaggggtccacactgaacacaatctgaaaggcagaggaagtgcagccccgtcaggagcctgaggmcacccgactttctgcagcatcagccgcatacacagaaggtcacaggacacccaggggtcatcggttcaccggcccctgccatcatgcagccccaggccaa

SEQ ID NO: 484487 - DNA, 201 bp, Homo sapiens
ggcataagaatcgcttgagcctgggaggcggaggttgcagtgagccgagattgcaccattgcacttcagcctgggcgacagagcaagactccatctcaaaaacaaacaaacaaacaaacaaacaaaaagcctattaaaaaaaaattcaaggccgggctcatgcctgtaatcccagcactttgagaggcctaggcgggcgga

SEQ ID NO: 484488 - DNA, 201 bp, Homo sapiens
gcataagaatcgcttgagcctgggaggcggaggttgcagtgagccgagattgcaccattgcacttcagcctgggcgacagagcaagactccatctcaaaaacaaacaaacaaacaaacaaacaaaaagcctattaaaaaaaaattcaaggccgggctcatgcctgtaatcccagcactttgagaggcctaggcgggcggat

SEQ ID NO: 484489 - DNA, 201 bp, Homo sapiens
cataagaatcgcttgagcctgggaggcggaggttgcagtgagccgagattgcaccattgcacttcagcctgggcgacagagcaagactccatctcaaaaacaaacaaacaaacaaacaaacaaaaagcctattaaaaaaaaattcaaggccgggctcatgcctgtaatcccagcactttgagaggcctaggcgggcggatc

SEQ ID NO: 484490 - DNA, 201 bp, Homo sapiens
tgaggcaggagaatcacttgaacctgagaggtggaggttgcagtgagccaagatcgcgccattgcactccagcctgggcgacacagtgagactccgactcaaaaaaaaaaaaaattaattagatgtactcaacggcagatttgagatggcagaagaaaaaaattcattaaaaattatcctggccgggtgcagtggctcacg

SEQ ID NO: 484491 - DNA, 201 bp, Homo sapiens
ctcggccgtgatggctgggaggagcatctccccgtggctggcacggcgaacgagtcctgccaattcttccggagactcggccatcgccagctgtcacgacrgagggagcagctacgggaaagaggatcaggagcccaaggccgatggccctgatgatgtttcttcacagcctctatggcctggagacgtgggctacgggcc

SEQ ID NO: 484492 - DNA, 201 bp, Homo sapiens
gaggcaggagaatcacttgaacctgagaggtggaggttgcagtgagccaagatcgcgccattgcactccagcctgggcgacacagtgagactccgactcaaaaaaaaaaaaaattaattagatgtactcaacggcagatttgagatggcagaagaaaaaaattcattaaaaattatcctggccgggtgcagtggctcacga

SEQ ID NO: 484493 - DNA, 201 bp, Homo sapiens
aattagatgtactcaacggcagatttgagatggcagaagaaaaaaattcattaaaaattatcctggccgggtgcagtggctcacgactgtaatcctagtaytttgggaggctgaggcaggtggttcacctgaggtccggagttcaacaccagccttgccaacatggtgaaacctcgtctctactataaatacaaaaattag

SEQ ID NO: 484494 - DNA, 201 bp, Homo sapiens
aagggaggatggagctatgtcagaggagaagggaggatggagctatgtcagaggagaagggaggatggagctatgtcagaggagaagggaggatggagctrtgtcagaggagaagggaggatggagctatgccagaggagaagggaggatggagctgtgtcataggagaagggaggatggagctgtgtcataggagaaggg

SEQ ID NO: 484495 - DNA, 201 bp, Homo sapiens
tcagaggagaagggaggatggagctatgacataggagaagggaggatggagctatgtcagaggagaagggaggatggagctgtgtcataggagaagggagkatggagctatgtcagaggagaagggaggatggagctgtgtcataggagaagggaggatggagctatgccagaggagaagggaggacgtcataggaggagg

SEQ ID NO: 484496 - DNA, 201 bp, Homo sapiens
cagaggagaagggaggatggagctatgacataggagaagggaggatggagctatgtcagaggagaagggaggatggagctgtgtcataggagaagggaggwtggagctatgtcagaggagaagggaggatggagctgtgtcataggagaagggaggatggagctatgccagaggagaagggaggacgtcataggaggaggg

SEQ ID NO: 484497 - DNA, 201 bp, Homo sapiens
aagggaggatggagctatgacataggagaagggaggatggagctatgtcagaggagaagggaggatggagctgtgtcataggagaagggaggatggagctrtgtcagaggagaagggaggatggagctgtgtcataggagaagggaggatggagctatgccagaggagaagggaggacgtcataggaggagggaggatgga

SEQ ID NO: 484498 - DNA, 201 bp, Homo sapiens
catgagcagcttgggtgcggccggtggcacatgcccgtgggtgccgtcggagggggatcccaggcctccctcactaccctcccctccgagcgccttttcayatgaggggcttgggtgctgtttcctgtggatctctcagaccgtcgtatacactcattcagggcagggaccccaacacacccagttcctttgcagcacccc

SEQ ID NO: 484499 - DNA, 201 bp, Homo sapiens
gttcctttatgttcctgagatgagtttctgaagatggagaaaagtgggatttctagtgaggtttggggcattttaccaaaggtgaccgcgctctgctggcrtctgtgagggtcgggagagcagtccacacaggccgtgccttctgagctgccagacgcctctttatgcaaatgcctgttggagttttaatatcagttgtag

SEQ ID NO: 484500 - DNA, 201 bp, Homo sapiens
cgcctgctgacctccctgttgcgggaggtgaggatgcggcgtcacagcctggactggcctctcaggtgcacggggggctggctttagagtgaggagggaayggacgcggttgtgagcgcggcgggcaggggagcagccgagtgcttgctggaatgtttctcacaggagtcattggctgaatgcgagctcgtccgggtcgcg

SEQ ID NO: 484501 - DNA, 201 bp, Homo sapiens
attctcctgcctcagcctcccgagtagctgggactgcaggcgcccccaccacgcccggctaatttttttttgtattttttagtagagacggggtttcaccrtgttagccaggatggtcttgatctcctgacctcaccatccgcccgcctcggcctcccaaagtgctgggattacaggcgtgagccaccgcgcctgctggtt

SEQ ID NO: 484502 - DNA, 201 bp, Homo sapiens
aaggctgagggttgcaggtcccgggccaagatgagatgaggctgagggtctgtccctgctgctcggccgcctgctgacctccctgttgcgggaggtgaggrtgcggcgtcacagcctggactggcctctcaggtgcacggggggctggctttagagtgaggagggaacggacgcggttgtgagcgcggcgggcaggggagc

SEQ ID NO: 484503 - DNA, 201 bp, Homo sapiens
tgcagagaacagttgcagcttgtctttgttttggttgtggtttaaagactgtttccctgtggtatttaaaggatgaatcgagaactttaacttgattctgratcgagactggaattgtgaacagttgctgactaaagggcatttggtggacatggtgctgcactttcaggtggtccaggccagcgtgccttggcgttctca

SEQ ID NO: 484504 - DNA, 201 bp, Homo sapiens
aatctctgacatccctgtcagaggacttgccatacttctcattcaattctgttgaacttcgtgcttacttttattcctttttcagcagtaggcgggcctcytctctgttactagacattgttctcccagtagaaaccatgaaaactgtcatttaggctcagaacatggctgcccacaagttgtgctgggctggcgctgatc

SEQ ID NO: 484505 - DNA, 201 bp, Homo sapiens
atggacaggagctggcacctgcctgaccctttctcctccctgcagggacccccggtgagctctgtgttcccccaacataggccatctccatgcactgaaamtgcggcagcccgaggggcctctcctcccgccaactggcccagccctcctctctgtgcccctgagggccccaaattaatctagaaattcaacatggcctag

SEQ ID NO: 484506 - DNA, 201 bp, Homo sapiens
tcaacatggcctagtgcagtggctcaggcctgtaatcccagcactccgggaggctgagaggagcaaactgcccgaacccaggagttcgagaccagcctggrcaacatggtgcaaccccagggtgttcaccaaaaaaaaaaaaaaaaaaacctagccgggcatggtggcatgtgcctgtggtcccagctacttgggaggttg

SEQ ID NO: 484507 - DNA, 201 bp, Homo sapiens
tatattattattttaaaacctaattatatttttaaaaacttattttggaacttttcaaacatacacaaaattagagagaacgtccacgtcgcctggctgcrggaacccccagtgctctgctcttgtcttactcatctctcccactctctcccactgttttttctttttcctttctttttttcttttctttttttttttttt

SEQ ID NO: 484508 - DNA, 201 bp, Homo sapiens
tggacaccagcgcctgcgtccagggaagccttagccgaggcgcctcggtgtgatctgaaggtggggtccgggggcctggcctctcagggggctgccgcggyggaggagcgcctcagagttcacggcgtagccccactcgccggtacccaggtggacgctgatcgggggagagaactgagccccggggtctgacgccgtctg

SEQ ID NO: 484509 - DNA, 201 bp, Homo sapiens
cttgggggtccagctgctgggctgcagccgtggacacggtcagcttgggatccggcgccgttcttcctgatgaagagatgtagagccacaaagctggtcgrgagcatctggaaagttccctggggtgggggggcagggctggctagggaggccaggcctcacccacctcagaccagggcgggaaaacccaggcaggtacac

SEQ ID NO: 484510 - DNA, 201 bp, Homo sapiens
tggggttctctccccctgcagaggcaggtcttgggcctcctgttgaggggtggggctgcctgtgggtttccagatgagattctctctcaccgcatttgcaycgctggattgtatattttcccagttttgtaaaagttatattattattttaaaacctaattatatttttaaaaacttattttggaacttttcaaacataca

SEQ ID NO: 484511 - DNA, 201 bp, Homo sapiens
gtaaaccgtggacaccagcgcctgcgtccagggaagccttagccgaggcgcctcggtgtgatctgaaggtggggtccgggggcctggcctctcagggggcygccgcggcggaggagcgcctcagagttcacggcgtagccccactcgccggtacccaggtggacgctgatcgggggagagaactgagccccggggtctgac

SEQ ID NO: 484512 - DNA, 201 bp, Homo sapiens
tgctttaattccttattctgtggttttttgtgtaagaagttttttttttttttttttttttttgagatggagtctcgccctgtcgcccaggctggagtgcrctggcgcgatctcggctcactgcaggctccgcctcccgggttcacgccattctcctgcctcagcctcctgaatagctgggactacaggctcccgccacca

SEQ ID NO: 484513 - DNA, 201 bp, Homo sapiens
gatcagctcacaatagcatttttagtgcatccagtaagatccctggaaaatgaagggtagcaactactgaaatatcattgctaaaattcaggaaagtttgrtttgtgaggtagtaacatgtggaactttaatttagcacatagcattgtgaatggtgcatctgatattcctaattccgaagtagggtgagtatcgagcatt

SEQ ID NO: 484514 - DNA, 201 bp, Homo sapiens
cgcgggagtaaaccgtggacaccagcgcctgcgtccagggaagccttagccgaggcgcctcggtgtgatctgaaggtggggtccgggggcctggcctctcrgggggctgccgcggcggaggagcgcctcagagttcacggcgtagccccactcgccggtacccaggtggacgctgatcgggggagagaactgagccccggg

SEQ ID NO: 484515 - DNA, 201 bp, Homo sapiens
cttgagcattacgctgaggacagtggctccacctggaagcaactgggattcccccgaccaggtcggcgctcaggcagaacacgctccacctcggcggctgygcgctcaggagagcccccacacaggccccagccctgactcctcatctgcctgcaggacagacagcaaaccctgctgccctggctgcggagaagactggag

SEQ ID NO: 484516 - DNA, 201 bp, Homo sapiens
gaggagacagccctggcccaggctgaccccgagctggctggagggaaagggtctggtgagcggcctgtgggggccctgcgcctgacgggcaggtccctggsccagctggccagtctccagccccagcagaggcatcggatcagggcgggagggggtggcagaagctcctggtgtgctcagtccccagtcctgggcacctag

SEQ ID NO: 484517 - DNA, 201 bp, Homo sapiens
tttatcctttttgccactagatatttaaagaaatctctttcaaagcacaagctaaccactaacctaaaagaacagaaacaagcacccctgacagaatatartctttatttaaaaaggtcaggaaagtaactaaacaaacgagaaacgacaatccacaacaaacagcaacaatgaaccctgcagagggcggaggatctgatt

SEQ ID NO: 484518 - DNA, 201 bp, Homo sapiens
cagaaggccatgcacacagctggggctagacaggggctcagaaacacctgaggaggccctcaactttcacctctggttcatccttaggctccatgggagcragaagtaaaggctgaggaaaagccgtgaacagcctggcggacactgaaggacttgccccagtacagaggcaacctggaaaggatggaagacactctttat

SEQ ID NO: 484519 - DNA, 201 bp, Homo sapiens
cctttttttttttttttttatttgagacagagtctcgctctgttgcccaggctggagtgcaatggcgcaatctcagctcactgcaacctccgccccctggrttgaagcgattctcctgcctcagtcttcccagtagctgggactacaggcaggtgccaccatgcccggttaatttttgtatttttagtagagacagggttt

SEQ ID NO: 484520 - DNA, 201 bp, Homo sapiens
tgtggtggcacatgcctataatcccagctacttgggaggctgaggcaggagaatcacttgaacccaggaggcggaggttgtagtgagccaagattgtgacrttgcctgccagcctgggtgacaagagtgaaaccccgcttcaaaaaaaaaaaaaattaataactaaataaaaagaaatttaaaaataaaggaaaccatgga

SEQ ID NO: 484521 - DNA, 201 bp, Homo sapiens
gcaagagacaagtgactagtcaatatataaatgttcctcaataagattaacagccaatttctcatcagaaactattggaccagaaggcagtgagatgacatttttttttttttttttgagacggagtctcgcactgttgcccaggctggagtacagtggtgtgatctcagctcactgcaagctccacctcccgggttcacg

SEQ ID NO: 484522 - DNA, 201 bp, Homo sapiens
aatatataaatgttcctcaataagattaacagccaatttctcatcagaaactattggaccagaaggcagtgagatgacatttttttttttttttttgagayggagtctcgcactgttgcccaggctggagtacagtggtgtgatctcagctcactgcaagctccacctcccgggttcacgccattctcctgcttcagcttc

SEQ ID NO: 484523 - DNA, 201 bp, Homo sapiens
atcacttgaacccgggaggcagaggttgcagtgaggcaagattgtgcaccaccattctccagcctgggcgacagagcaagaccctttctcaaaaaaaaaagaaagaaagaaaaacttttttggaaaatttacaaatatgcagaaataaagacactcttgaataacgagtaagtcgaacaaaaaaacaaaagggagattagg

SEQ ID NO: 484524 - DNA, 201 bp, Homo sapiens
agtccaagaccagcctggccaacatggtgaaatcccatctctactaaaaatataaaaatcagccaggcgtggtggtgcacgcctatagttccagctactcrggaggctgaggcaggagaattgctggaatctgggagtcggaggttgcaatgagtgagattgcaccactgcactccagcctgggagacagaaacagactcc

SEQ ID NO: 484525 - DNA, 201 bp, Homo sapiens
tctgcacccactgcacctttgcccactgcacctgcactcactgcaccggtgcccacctgcacccactgcacctgcacccattgcactcactgcacttgcaytcgtgcccactgcacctgcgcccactgcacctgggcccactgcacctgtgccttcagctcagacttgggctctcggccttttgtgtcttctcagcagctg

SEQ ID NO: 484526 - DNA, 201 bp, Homo sapiens
gcttgaacctgggaggcaggggttgcagtgagccaagatcatgccactgcactccagcctgggtgacacagtgagactccatctcaaaaaaaaaaaaagargaagaaaagagatgactcaaattgctaaaaccaagagagaaagtggagctattactactgatcttacagaaataactagggctataaaaggatactatga

SEQ ID NO: 484527 - DNA, 201 bp, Homo sapiens
aagaaacagaaaatctgaatagacctataacaaataaagaatcagtagtcaaaaaacttccaatgaaagaaaagttcagaaactttcactacagttatacrttttagcttccaaaaagaaaagtcaatttcaataaggaaattgaatcaatagtcaataaacttccaacaaaagaaaagtccatctctctctctctctctc

SEQ ID NO: 484528 - DNA, 201 bp, Homo sapiens
cgttttagcttccaaaaagaaaagtcaatttcaataaggaaattgaatcaatagtcaataaacttccaacaaaagaaaagtccatctctctctctctctcwctctatatatatgattgtatatatcacttcactgttgaattctatcaaacatttgaagaagaattaacaccaatccctttttacctcttcccataatata

SEQ ID NO: 484529 - DNA, 201 bp, Homo sapiens
cttttcagaatagcatgttttgtttgtttattttgagacagggtcttgctctgtcatccaggctggagtgtagtggcgcaatctcagctcactgcagcctygacgtcctgggctcaagcgatccttgtgcctcagcttcctgagtagctgggaccccaggcatgtgagaccatgatcagctcacaatagcatttttagtgc

SEQ ID NO: 484530 - DNA, 201 bp, Homo sapiens
ttgggcatatcagcctgttctcagaagggcacagagcgtggctgaggggcaggctattcgggtctgggcgaaaaaaccactccgaacatcttagggtctcrggcactcctggtaagcgatgcgagcatgtgcactgggacacaacgctgttctcttcgagaatccctatggcacagacctgggaaagacagtaagactctg

SEQ ID NO: 484531 - DNA, 201 bp, Homo sapiens
gccgccctcgtgccagcatccccttgggacagggctgccttggtgccacctgcagttctgctgtgtggctctgataggagctggggctcaaggtctgagcrctcctgtctgcgcacctcccccaccaggagtctctgcctgtgcagacactcggagggcccgggaggctgtgcccccccaaccccaaccgggccctgctca

SEQ ID NO: 484532 - DNA, 201 bp, Homo sapiens
ccaacaccaggacttacgacaaaaccacagtgaacaaaaacatgaggaaaagtgtggcaggtgcccagtggagttgggggaagccgagccgctcggtcagmgcacagaaccaccggtgtggcgtgctgggaaaaatcaaggtagagtctgcctttcacacccccacaggtgacgtcagaaggcatggaggcccagacacaa

SEQ ID NO: 484533 - DNA, 201 bp, Homo sapiens
taccgctgagcccttatgcctggccgggtgtttgacctttagaattaacatttgtgaacacacctgtgcgtatggctgtatctccacgaaaacacccagtmacaacgaccaacccagtaaccatgaccaacccgctgccgcatggcgggtcttgaaataccgtcttgcaggaaaagaaagcagggcttcttggagacttgg

SEQ ID NO: 484534 - DNA, 201 bp, Homo sapiens
caacaccaggacttacgacaaaaccacagtgaacaaaaacatgaggaaaagtgtggcaggtgcccagtggagttgggggaagccgagccgctcggtcagcrcacagaaccaccggtgtggcgtgctgggaaaaatcaaggtagagtctgcctttcacacccccacaggtgacgtcagaaggcatggaggcccagacacaaa

SEQ ID NO: 484535 - DNA, 201 bp, Homo sapiens
aattaacatttgtgaacacacctgtgcgtatggctgtatctccacgaaaacacccagtaacaacgaccaacccagtaaccatgaccaacccgctgccgcayggcgggtcttgaaataccgtcttgcaggaaaagaaagcagggcttcttggagacttggctgattccaggtctggagcaggacatgagtgtgaaaaatcct

SEQ ID NO: 484536 - DNA, 201 bp, Homo sapiens
gggacacaccagggagctgcctggggccgtgggggctcctctccctggtgcccacacccagcccagccaccttccccgaggctccgtccccaaccaggggkgggaggaagctccatctgtgggtcaggaccccacttggggtccacagctcccagacgccacctccaactcttgtggccaggaaactcccatcctgcctgc

SEQ ID NO: 484537 - DNA, 201 bp, Homo sapiens
ttctaaaaaataaagtaggccaggcacagtggctcacacctgtaatcccagcactttgggaggtcgaggcgggcggatcacgaggtcaggagatcgagacyatcctggctaatatagtgaaaccccgtctctactaaaaatacaaaaaattagctgggtgtggtggcggtgcctgtggtcccagctactcgggaggctgag

SEQ ID NO: 484538 - DNA, 201 bp, Homo sapiens
acacacacctgcaccctggtgagggctggctcgtcttcttcgggatgcgctcctggagggagcaaagctggcaggcagcatccattagcatcccgggtgckctctctgttcgcttaatgttattgataacaacctcattttgtacttcacctaatttttgccttgtcttaagaaggaagcgcatccaggaagtcatgagtt

SEQ ID NO: 484539 - DNA, 201 bp, Homo sapiens
atccagggccctgagcgggagggtctggtaggccaggtcacccgccagggccagaatcgctccctggcccttggggtccagcgggtctgtggtgggtcctrggtccctccttttaggcttgcagaccctggagtacaggacgtccacctggagacaggaagccaacccgaggaggggtcagcaccatccaacctgctgagg

SEQ ID NO: 484540 - DNA, 201 bp, Homo sapiens
atcctgcgctggcgctttatttagacgcgggccttctctggagcccggggaggccgcggctgtcagagcggccaggacctcacggacctcacgggctggcrgcccggggacctgggactggcgctgtcagctgtgaggcggggcggggcgggggacgggcctcactctggaggaaggagcacaggtccttgagtgttcagg

SEQ ID NO: 484541 - DNA, 201 bp, Homo sapiens
cggggggctggctttagagtgaggagggaacggacgcggttgtgagcgcggcgggcaggggagcagccgagtgcttgctggaatgtttctcacaggagtcrttggctgaatgcgagctcgtccgggtcgcgcaggggccgggggtctttgtgctccagagacgggctcgggcgccccctgccggcccctctgtcgccttcg

SEQ ID NO: 484542 - DNA, 201 bp, Homo sapiens
gatgttgcctggaagtgcaggggccggggtcaaggcaggggcaggatgtctgcagggttccctaccagctcttgggagcaggggtccaggatccaggatgsgcacagctggggcattcagggcactcacccagagccttccccagggaggataagcactcctcggaaaacctagagccggagaggccactgctcaggacct

SEQ ID NO: 484543 - DNA, 201 bp, Homo sapiens
agggaagtctacggtcacaccattcaggactatcttgggcatatcagcctgttctcagaagggcacagagcgtggctgaggggcaggctattcgggtctgkgcgaaaaaaccactccgaacatcttagggtctcgggcactcctggtaagcgatgcgagcatgtgcactgggacacaacgctgttctcttcgagaatccct

SEQ ID NO: 484544 - DNA, 201 bp, Homo sapiens
ccgaggagaagaaggcaggctcgagcctggcggggggaccagactgcagctttgggaactgaggagaagaaggcaggctcgggcctgaggggggacgacaytggtcaaagatgtagctgccgagaagaaaacaggctcgagcctggagggggaaatcaggctgcagctttggaactgaaggcaacaactgtggaagtttcc

SEQ ID NO: 484545 - DNA, 201 bp, Homo sapiens
gggtcaggaccccacttggggtccacagctcccagacgccacctccaactcttgtggccaggaaactcccatcctgcctgcccaggcccagagcaggacasgctcccagcagggccagcagtcgctctcgtgggacccaaggaggggaccgggcagcccccagggcccagagtctgctggggagccataagcacccaccag

SEQ ID NO: 484546 - DNA, 201 bp, Homo sapiens
gttttagcttccaaaaagaaaagtcaatttcaataaggaaattgaatcaatagtcaataaacttccaacaaaagaaaagtccatctctctctctctctctmtctatatatatgattgtatatatcacttcactgttgaattctatcaaacatttgaagaagaattaacaccaatccctttttacctcttcccataatataa

SEQ ID NO: 484547 - DNA, 201 bp, Homo sapiens
gccctcccctcaccccagagaaggacgacgccctgcatcaggccaccgcggtggccaacctgcgcgcggcgctcatgagtaagaacagcctgctgtcgctraaggccgacgtgctgggggatgacggctccctgctgttcgagtacctgcccagaggggcccactcgctgtcccgtaagtgcaggccctgggggccgcttg

SEQ ID NO: 484548 - DNA, 201 bp, Homo sapiens
tttagcttccaaaaagaaaagtcaatttcaataaggaaattgaatcaatagtcaataaacttccaacaaaagaaaagtccatctctctctctctctctctmtatatatatgattgtatatatcacttcactgttgaattctatcaaacatttgaagaagaattaacaccaatccctttttacctcttcccataatataaag

SEQ ID NO: 484549 - DNA, 201 bp, Homo sapiens
tctcaacaaaacagcagcaaatcaaatccagcaatgttattacatgataaggccttaaacttttaactgttaaaaagataaggctcgctgcggtggctcaygcctgtaatcccagcacttcgggaggccaaggtgggtgaatcacgaggtcaggagtgcaagaccagcctgtccaacatggcaaaacaccgtctcaactaa

SEQ ID NO: 484550 - DNA, 201 bp, Homo sapiens
ataatcccagcgctttcggaggctgaggcaggaggatcactttagcccaggagtttgagaccagcttgggcaacagagtgaaatctcatctctacaaaaawaataataataaagagataatacgccatgaatatgcgtgctttatctgaggaattcaaggatggttcaacatacgaaaatcaatataccacattaacaaaa

SEQ ID NO: 484551 - DNA, 201 bp, Homo sapiens
gatatccagaatatataaagaaatcctgggccgggtgtggtggctcatgcctgtaatcccagcactttgggaaaccaaggcgggatcacctgaggtcaagrgttcgagaccagcctggccaacacggtgaaaccctgcctctactaaaaatataaaaattagctgggcaccacgtggtgacaggcgcctgtaatcccagct

SEQ ID NO: 484552 - DNA, 201 bp, Homo sapiens
cctgggccgggtgtggtggctcatgcctgtaatcccagcactttgggaaaccaaggcgggatcacctgaggtcaagagttcgagaccagcctggccaacayggtgaaaccctgcctctactaaaaatataaaaattagctgggcaccacgtggtgacaggcgcctgtaatcccagctacttgggaggctgaggcaggagaa

SEQ ID NO: 484553 - DNA, 201 bp, Homo sapiens
gtccccttctgacctgtccccagagagccctatgctctcctccccacccaagaagaaggacacctccctggaggagctgcaaaagcggctggaggcagccraggagcggaggaaggcaaggagtcctccatcccccaccccccaggagtttcaacggaggcggcccacggggacagggcctgcaagaagcagggtgctccc

SEQ ID NO: 484554 - DNA, 201 bp, Homo sapiens
ataaaaattagctgggcaccacgtggtgacaggcgcctgtaatcccagctacttgggaggctgaggcaggagaatcccttgaacccaggaggtggaggtcrtgccattgtactctagcctgggcaacaacagtgaaactccatcttaaaaaaaaaaaaaaggtccaacgcaaatccaagagaacttatcagtcctgaatgg

SEQ ID NO: 484555 - DNA, 201 bp, Homo sapiens
ggtgggaggatggcttgggccagggaggcggagattgcagtgagccgagattgtgccactgcactccagcctgggtgacagagcagcaagacgctgtttcaaaaaaaaaaaaaaaaggaagacattcaaagaactagaactagaactagggatggttacacggtcagcctgaactattggctaaaaaagaaaattacctac

SEQ ID NO: 484556 - DNA, 201 bp, Homo sapiens
agccctgtggatggagggaggagccgaggggagcctggggtcattgccgggttcagcctggaggactgacctgaggccagcccacctcagagaagcccctsgtgtggacttggccaggggccaggggttgctattggggtcctctgtgggtcctgccctctcggtccttggagggcagagacaggggctgtgctgtgaggg

SEQ ID NO: 484557 - DNA, 201 bp, Homo sapiens
gtgggaggatggcttgggccagggaggcggagattgcagtgagccgagattgtgccactgcactccagcctgggtgacagagcagcaagacgctgtttcaaaaaaaaaaaaaaaaggaagacattcaaagaactagaactagaactagggatggttacacggtcagcctgaactattggctaaaaaagaaaattacctact

SEQ ID NO: 484558 - DNA, 201 bp, Homo sapiens
ggagggatggatggtgagtgggggcaggtccagcttgggcagctctgtgcctggggcaggctcagtgtctggtcagaagtgctcctgcctagtgggtgacggggggggggggggcagagggagtggctgtcacagtgtccacgcctgtgggcccctgggcagtcagaggcaggatgctgggtgtgaggcgctgcctctcct

SEQ ID NO: 484559 - DNA, 201 bp, Homo sapiens
agttttcgcgggcagaggcgcgcagtcggcgctgagcccactgcacttccgccccccacttccggtccgttgctttgtgctcccggcggaaactgttcccscgcggagggggtccgcctgctcttcggctcctccaggcctacacggcgttttgcgcgttctgtgtccggctccgctggccagtgaacctcacttccatcg

SEQ ID NO: 484560 - DNA, 201 bp, Homo sapiens
gagtgagacacacacctgcaccctggtgagggctggctcgtcttcttcgggatgcgctcctggagggagcaaagctggcaggcagcatccattagcatccygggtgcgctctctgttcgcttaatgttattgataacaacctcattttgtacttcacctaatttttgccttgtcttaagaaggaagcgcatccaggaagtc

SEQ ID NO: 484561 - DNA, 201 bp, Homo sapiens
gtctgagtgagacacacacctgcaccctggtgagggctggctcgtcttcttcgggatgcgctcctggagggagcaaagctggcaggcagcatccattagcrtcccgggtgcgctctctgttcgcttaatgttattgataacaacctcattttgtacttcacctaatttttgccttgtcttaagaaggaagcgcatccagga

SEQ ID NO: 484562 - DNA, 201 bp, Homo sapiens
gtgggaccctgtgtctgtgtaaggccatgtcgagtgcccatggcagagccctcacaggaagcagagctgtgatcacagacgcctccgggtgagcctgagaktcagggtcaggaagggtctgagtgagacacacacctgcaccctggtgagggctggctcgtcttcttcgggatgcgctcctggagggagcaaagctggcag

SEQ ID NO: 484563 - DNA, 201 bp, Homo sapiens
tcattgatccattttgagcctctcctcgtctttgcgagatggaaatactgccgccccaggagcctctgactctcaggccctcggccctggagcagagcagstaccaggtctgcagcgcctcgtccagggagggcaaccccgttgttctgagttgagccgtcctccaaagccttggctgagactccaccgcagccatgggac

SEQ ID NO: 484564 - DNA, 201 bp, Homo sapiens
gcactaactctgatatcccatctagttaaagccattttcacggctgctcactggatttcactagacgttgcagtaacattcagggaggccgagaagtggtygttttaatccgtttacctctggtctggcccctgggacactgttgctgtttttgctttcttcagtgtggaaattgctagagaccttgggagaagggagggt

SEQ ID NO: 484565 - DNA, 201 bp, Homo sapiens
ctgtgctcctttgtcggggcctagagcccatcagtcccagggctgggttttgcatgcgtgtacacgtgtcagctctagggagagcaccccaggcttttctyattgggggcccgtgtcacatacaaaagtgcccgtctcccccatgggtgtgctggtgggtgaattcagggcgcttgaactcaggaaggctggacgtgtgtc

SEQ ID NO: 484566 - DNA, 201 bp, Homo sapiens
gacagcccaggactgcaccatggcccgtttctagctctaggctgggcctgcagtgaaggggctggctccccgcctctcacctccctggcttggtgacaccrctgtcgtctccaggcagctcaacagcatcgatggccccctccaggcgcagcaggatcactgtgggtcgaggaggtgtcacccacctcctcgcaaggagga

SEQ ID NO: 484567 - DNA, 201 bp, Homo sapiens
tggggctgtggactcagcaccatgccaagctggttctcttgaggaccccgagacaggtgtaaactcgtctgacccaccggtaggaggtgttccgaagctcrttgatgacctgtgtgagttgcgagtgggtcctggaggcgtaaataatctttgggatgtccgtgtagcaagctgaccagacacaagcaagcacagaagtca

SEQ ID NO: 484568 - DNA, 201 bp, Homo sapiens
ctttttgtttccatttttaaaacatgttttgtacagacagggtctcgctgtgttgcccaggctggtctcaaactcctgggctcaagcattcatcctgcctyagcctcccaaagtgctgggacgacaggtgtgagccatagcacctggcccgtggtctggaattccgagactcactgtaggcttcactctcatgttttcgtg

SEQ ID NO: 484569 - DNA, 201 bp, Homo sapiens
cctgcagtcccccagtgaacttcaaaccctagcccagcgggagcgcagcctggggctctggacacccagcagcactcgcctgtcggacactgagccggagygggagcccaggagcctacctgtagatggttactctcttgtttcttcacctcaggatggatgcacagctgctcccgggagcccagcacacacaccttaggc

SEQ ID NO: 484570 - DNA, 201 bp, Homo sapiens
tgtgcctggccttttgttcccatttttatttttattttatgtatgtatttttgaggtggagtctcgctctgtcgctcaggctggagtgcagtggtgcagtyttggctcactgcaatctccacctctcggtttcaagtgattctcctgctgcctcagcctcctgagtaactgggatcacaggtgcgcgccaccatgcccagc

SEQ ID NO: 484571 - DNA, 201 bp, Homo sapiens
ctggagtacagtggctcgatcacagctcaccacagcctcaacctctcaggctcaagtgatcctcccgccgcagcctcctgagtagctaggaccacaggcasaacccaccacactcagctaattttgttttattttaactttttgtcctgctgtgttgcccaggctggtcttgaactcctgttctcaatagatcttccggtc

SEQ ID NO: 484572 - DNA, 201 bp, Homo sapiens
tattatctgatcttttttgttgttgtttttgagatagggtctcactctgtcacccagactggagtacagtggctcgatcacagctcaccacagcctcaacytctcaggctcaagtgatcctcccgccgcagcctcctgagtagctaggaccacaggcagaacccaccacactcagctaattttgttttattttaacttttt

SEQ ID NO: 484573 - DNA, 201 bp, Homo sapiens
cttcccatccttgccaatattatctgatcttttttgttgttgtttttgagatagggtctcactctgtcacccagactggagtacagtggctcgatcacagstcaccacagcctcaacctctcaggctcaagtgatcctcccgccgcagcctcctgagtagctaggaccacaggcagaacccaccacactcagctaattttg

SEQ ID NO: 484574 - DNA, 201 bp, Homo sapiens
ccagggttctgatttcttcccatccttgccaatattatctgatcttttttgttgttgtttttgagatagggtctcactctgtcacccagactggagtacartggctcgatcacagctcaccacagcctcaacctctcaggctcaagtgatcctcccgccgcagcctcctgagtagctaggaccacaggcagaacccaccac

SEQ ID NO: 484575 - DNA, 201 bp, Homo sapiens
atcccccgcccgcttgcccgcctgcctgccaggcaggggatttacaggggtgtgtggggaggtgcctgaggccagatgggcggggtcgggttggcctcagragacagagggtctgtgtccatcccaaggccctggaactgtacctgctcctcgccagggctccccgcccgctgttcgctgtgctccagggcggccagcagc

SEQ ID NO: 484576 - DNA, 201 bp, Homo sapiens
ggccagcagccccctgggcctctgccgggcaggaactggctcctgctcatactccacacacaggctactctcggggtccccggcagctggtgaccctgcargggcacccgagtgcgcagtgaagcccacggggggccccagctggggtccctgcctgtggcaaagcccctcttgggggagagtcccagcacttggggtcct

SEQ ID NO: 484577 - DNA, 201 bp, Homo sapiens
cagccaggcagctgggatcccccgcccgcttgcccgcctgcctgccaggcaggggatttacaggggtgtgtggggaggtgcctgaggccagatgggcgggrtcgggttggcctcaggagacagagggtctgtgtccatcccaaggccctggaactgtacctgctcctcgccagggctccccgcccgctgttcgctgtgctc

SEQ ID NO: 484578 - DNA, 201 bp, Homo sapiens
tgtgaagggggcggctgagttctcttaggacccagagccagggccctcaacttccatcctgcgggaggccttggccgggcactgccagtgtcttccagagycacacccagggaccacgggaggatcctgacccctgcagggctcaggggtcagcagggacccactgccccatctccctctccccaccaagacagccccaga

SEQ ID NO: 484579 - DNA, 201 bp, Homo sapiens
agcctctgagagaagcggatgccctgcagtgccagcctgaatagatggtgcccaggccgaccacacacagccacagggcaggctgcccactgcagtagcaygggcctcaggaccaagcagcctggctatgaacgcacctgggctgggggagtccgtgctgaactccgggtggggctcaccctgcagcagcgcaggcctcag

SEQ ID NO: 484580 - DNA, 201 bp, Homo sapiens
aagcctctgagagaagcggatgccctgcagtgccagcctgaatagatggtgcccaggccgaccacacacagccacagggcaggctgcccactgcagtagcrcgggcctcaggaccaagcagcctggctatgaacgcacctgggctgggggagtccgtgctgaactccgggtggggctcaccctgcagcagcgcaggcctca

SEQ ID NO: 484581 - DNA, 201 bp, Homo sapiens
gagggagcatggggcaggaccaatccccacgttcacacacaaacattcagtgatgacacttgattgactgattgatttttgagacggagtctcgctctgtygccaggctggagtgcaatggtgcgatctcggctcactgcaacctccgcctcctgggttcaagtgattctcctgcctcagcctcccaagtagctgggatta

SEQ ID NO: 484582 - DNA, 201 bp, Homo sapiens
gcgaacctggggggtggccatagccctgctgccctgcccacagccgcttcaagggttcagttcaccgaagtgaagaccctcatctgctgcaggggccccaygctgaccccgagtagccggagaggctctggaggagacggggcctcatgtggggaaggagagtccaggggcccagtggggtgtgggcgtgtcccctggcgc

SEQ ID NO: 484583 - DNA, 201 bp, Homo sapiens
acgtctgtaagatgctccggaagctttcagatcaggcctgatgccgacatggcaagcagcactgggtggagcaggggacggaacgagggctgggggcaacyggagccctctgagccttgaagccctggaccactcagttcttctactcctgtttcctcctctgtcagatggtgtgactgcagggcctacctacagggctgt

SEQ ID NO: 484584 - DNA, 201 bp, Homo sapiens
cctttcaaatcagaggagggctgaaaaaattttttaagtcctttgaaagaagtattttctccctttctttaactgctttttcattttctcaactcttccamagagttgaagctttaaattttggtgaagtctaaattttaatgtttttcttcatggctagtgccttgtgtatccatactaagaaatctctgcctaccccaa

SEQ ID NO: 484585 - DNA, 201 bp, Homo sapiens
caacggtttacatttccttttacaaacagaaaacggagcagtcccaaagaacacacacacacacacacacacacacacacaaggttcctagaggacaaagktcaggacaggaatcaggacagaggaaaaggaattggaagacaccacaacgagaaaacttgttctgggaagtgtgtggtcagggatgcagtgtgacgtgga

SEQ ID NO: 484586 - DNA, 201 bp, Homo sapiens
ttcagtgtggaatctgcagacccacaagactcggaatttcccatgcttcagggaggccggctgctcaacctcgaaggtggccctgatgcttaggtgggacrtgtctgcttgttacccattcaaggaaacagaggactttggccagcgaccctgccctgagcctctggtctctaaagaagccttgattcgcctacagcctcc

SEQ ID NO: 484587 - DNA, 201 bp, Homo sapiens
agggcgtggttcagggcttttgtggcaaccgccaagtgagtttttctgatatttgctaaattagctttcaagacaacatggtctgtagtctttcttgtctyggtgtggccctatttgaataaaatgggtgttctctttccatgccatttaaattattgaatctggtgaatggcagtatccttttatttggcaagttcaaag

SEQ ID NO: 484588 - DNA, 201 bp, Homo sapiens
catttcttctctgggcctgtcattgtcggcccaggtgtcgcccccgggctcctcttggtttctctttgagcatctctgacttactagcgactcagtccttytcagtttcccccaaaatggaaaagagccacatatgtgtgtgaacaatcagtttctaaaaatgtcttcatttatctgaaagtcgggcagcattgctgcttg

SEQ ID NO: 484589 - DNA, 201 bp, Homo sapiens
ggccaagaaaggaccgaagccagtccccacccccaccaggtcctcccctgcagtcccccagtgaacttcaaaccctagcccagcgggagcgcagcctgggkctctggacacccagcagcactcgcctgtcggacactgagccggagcgggagcccaggagcctacctgtagatggttactctcttgtttcttcacctcagg

SEQ ID NO: 484590 - DNA, 201 bp, Homo sapiens
gtccccacccccaccaggtcctcccctgcagtcccccagtgaacttcaaaccctagcccagcgggagcgcagcctggggctctggacacccagcagcactygcctgtcggacactgagccggagcgggagcccaggagcctacctgtagatggttactctcttgtttcttcacctcaggatggatgcacagctgctcccgg

SEQ ID NO: 484591 - DNA, 201 bp, Homo sapiens
gaagccatagcatccttggctcgtggccccacatcattcctgccccttcccatcctcgcttctgtcaccctcctgcctccttctctgctgacggggccctkgtgggtccgtttagggcccacgtggctcatccaggactcatcgtgagatcctgaaccgaatcaggtctgcggagtcgttctgccacaaggtggcaaaacc

SEQ ID NO: 484592 - DNA, 201 bp, Homo sapiens
ggtggctggcagaggctggcaagaaacggcccaaggctgggaggagggtgcctggactgctgtgtggactgctgtggggactgctgtggggagtggcaccrgagcccaaaggtgactcgagggaagggagtccactcggagatccacccgcacggttccagacctggcagtcatccggtcctggtggagcgagtcatattc

SEQ ID NO: 484593 - DNA, 201 bp, Homo sapiens
agccccagcagaggcatcggatcagggcgggagggggtggcagaagctcctggtgtgctcagtccccagtcctgggcacctagggcttcaggagtttggcsagagcccctccagaaaggtttgcgtggctcttgacaaaaaggccagaagcaataggaggtgtttaggaggccagcggagactcaccacgttgtgagcttc

SEQ ID NO: 484594 - DNA, 201 bp, Homo sapiens
cccgccaccgcgcccggctaatttttttgtatttttagtagagacggggtttcaccttgttagccaggatggtctcgatctcctgacctcatgatccaccygcctcggcctcccaaagtgctgggattacaggcgtgagccaccgcgcccggccatcttttgtgttttgacagatgggcttttgcgtcttaccggagacac

SEQ ID NO: 484595 - DNA, 201 bp, Homo sapiens
atgggcacagctggggcattcagggcactcacccagagccttccccagggaggataagcactcctcggaaaacctagagccggagaggccactgctcaggrcctcaggcctcagtgctcccccacctcccaccccagcagggcccagggacaggccctcaccgtctgtcaaacgcggagctcaactgggctccatcggggc

SEQ ID NO: 484596 - DNA, 201 bp, Homo sapiens
gtggaagggtttcaaccaaaagatgacatcatgtgctttggtcagtagtggggtgggaagggcgtccggctccgcaccccgatcccacagctgctcgggakatgcttggcttggcctcttttaatccactcccctgttcagtcctgtcctgggaagcttgagaactcagctgcgccttctctagatgtttttgctttcagg

SEQ ID NO: 484597 - DNA, 201 bp, Homo sapiens
tgtttgattcaaaatctctattaaggccacagacttattcagggctttgagaggccgccgccttatcctgattgtggtcctcttgccgtctgccgcggctscggcgtagctgtgaacttgtgcggagtgctggggtcttaggccatggggtccatgggagggattttcctgcttttctgttatcacttagaccctttgagt

SEQ ID NO: 484598 - DNA, 201 bp, Homo sapiens
aaccctggtgaggtgggagcttgacatgttgggatttttaagcgtacatcagaactgcgggagctccagatgggggacaatggcctctcgggtgcctagcrctgcctgcaagcctcctgtctgctccgggaggggagtgagggtcccagctctcagggtagggtggtcttcgagctgcttcttggaccaggccggcctgcc

SEQ ID NO: 484599 - DNA, 201 bp, Homo sapiens
catgggacacacagatactttgtttgtaagacattttcgtttacaaaagtgcatcacatcatctcttccaaccactctgaagaaaatgaagaaaatgaagsctcttgcacagaaagccttcccattcgctggcatatcgctgcacacgaggcctgcgtcggtgctcctctgtggagatgtggagaggggcactgctgtgcc

SEQ ID NO: 484600 - DNA, 201 bp, Homo sapiens
ggaggccaaggctggtggataacctgaggtcaggatttcaagaccagcctggccgacagggagaaaccccatctctactaaaaatacaaaaactggctggrcatggtggctcatgcctataatcccagcactttgggaggccaaggtgggcggatcacctcaggtagggagtccaagaccagcctggccaacatggtgaaa

SEQ ID NO: 484601 - DNA, 201 bp, Homo sapiens
tccccaccaggtaccaggcccagcgtccccaccaggtcccaggcccagcagccaccggggcactgcccttgtccaggaccacggccggccaggcccatgcycagcgttccatgctatcccaaggacccccgctgcatgggactggggacacccagcaggcactcctgtcctggaaatccaggtgaggacctcggaaatgac

SEQ ID NO: 484602 - DNA, 201 bp, Homo sapiens
gagggcggaggggccctgggagaggtgggtgtgggctccaggtcccctccctgcagcctcccctcccaccagcccctctgagactgaaacagagataaaartgtccttttgggggtgccaccctggaggccaacgcattgggcaggggaagcggctccgttcccttcccggtgaggccagagaccagggttcacagggctg

SEQ ID NO: 484603 - DNA, 201 bp, Homo sapiens
gccgaggagagagggccgagctctatgcacaggtggaggagggtctcctgggaggagaagccagctatctgggccctcccctcaccccagagaaggacgaygccctgcatcaggccaccgcggtggccaacctgcgcgcggcgctcatgagtaagaacagcctgctgtcgctgaaggccgacgtgctgggggatgacggct

SEQ ID NO: 484604 - DNA, 201 bp, Homo sapiens
ggggctgtggactcagcaccatgccaagctggttctcttgaggaccccgagacaggtgtaaactcgtctgacccaccggtaggaggtgttccgaagctcgytgatgacctgtgtgagttgcgagtgggtcctggaggcgtaaataatctttgggatgtccgtgtagcaagctgaccagacacaagcaagcacagaagtcac

SEQ ID NO: 484605 - DNA, 201 bp, Homo sapiens
ccagatggcccccaccccacacgcggcggcagcactgccctcagggtgggtggcctctgcaagccagggcaccttggagcaggttgtgcttcttggggtcstcagcaaagagggggccgagacaggcggccagggcggcaaagtcatcggaacccttgtagtcctgcagggcctgggtgaaggtggcaaagttggcttggc

SEQ ID NO: 484606 - DNA, 201 bp, Homo sapiens
ctcagacccaccagcattccccacctcccgccgacatcgcacttgggcccgcttggctcggtctccgcctcctccctctgctctatttcccttcagtatcrtcagctcacgtgcttactcttttgctgtccacctgtccccaccactagaatcaaagctccatgtgagtgaagccagtcttgctatgcctggaatagcacc

SEQ ID NO: 484607 - DNA, 201 bp, Homo sapiens
cctcagggtgggtggcctctgcaagccagggcaccttggagcaggttgtgcttcttggggtcctcagcaaagagggggccgagacaggcggccagggcggyaaagtcatcggaacccttgtagtcctgcagggcctgggtgaaggtggcaaagttggcttggctcaactcctgcttcacggccaccatgaagagcttggcc

SEQ ID NO: 484608 - DNA, 201 bp, Homo sapiens
agaggcccccaaggcactcctaagtctgtcaccctcaaggactgtagggaaaagagagatcagactgttactgtgtctatgtagaaagggaagacataacmcactccattttgacctgtaccctgaacaattgctttgccctaagatgctgttaatctgtaactttgccccagccttgagctcacagaaacatgtgttgta

SEQ ID NO: 484609 - DNA, 201 bp, Homo sapiens
cctaagatgctgttaatctgtaactttgccccagccttgagctcacagaaacatgtgttgtatggaatcaaggtttaagggatctagagctgtgcagaacrtgccttgttaacaatatgtttacaggcagtatgcttggtaaaagtcatcgccattctccagtctcgataaaccaggggcacgatgcactgcggaaagccg

SEQ ID NO: 484610 - DNA, 201 bp, Homo sapiens
ctgctgcttctccctgggctttgcatgttttacctggaagtctcatgagtgaccttgagtgatggttgatacttccctctactggtttttctagcagattwaaaaaaaaaaataccctttgaatctgtcccctcccctgggggaaaaattcatcttgttgctgctaagtttgcttgaatggcctgactcctaagaataaat

SEQ ID NO: 484611 - DNA, 201 bp, Homo sapiens
aagtaccgttcttgtaaaaactcaggctgctgcttctccctgggctttgcatgttttacctggaagtctcatgagtgaccttgagtgatggttgatacttscctctactggtttttctagcagatttaaaaaaaaaaataccctttgaatctgtcccctcccctgggggaaaaattcatcttgttgctgctaagtttgctt

SEQ ID NO: 484612 - DNA, 201 bp, Homo sapiens
cctgcccctgggaactgaatgtttcggtataaaacccgattgtacatttgttcaattctgagataggagaaaagccgccctgtggcaggaggcgagacatrttggcagcaatgctgctctgttactctttactccaccgagatgtttgggtggagaaaagcataaaactagcctacgtgcacatccaggcatagtaccttc

SEQ ID NO: 484613 - DNA, 201 bp, Homo sapiens
agccggttcctcccactgccgtgactggtgcccaggcacccgctccactgctgagttaaagtgagaggaaaggtctagaagtccttgccccttcccatcckcacacccagtgtcacggcgtctgccgtggtaggttccctgtcctggggacttcgtgttcttgcctaagtaccgttcttgtaaaaactcaggctgctgctt

SEQ ID NO: 484614 - DNA, 201 bp, Homo sapiens
cgtcttggtgctggccaacaagcaggatgtggaggtgagccccacccctgcctcccgcagcagcttcccgagtccccagcctcccccacagcaaggggagyaggtgtgcacccagacaccccaggcccagtgactgcccagggggtacagagccattctcaaggcctgccctgcccccagcagcttcccaagcttggttcc

SEQ ID NO: 484615 - DNA, 201 bp, Homo sapiens
gggcgtgaggtgtgaccctgggagcgggcaccatccacccgggcgggcgggaggggtgggcgtgaggtgtgaccctgggagcgggcaccatccacccgggygggcgtcaggtgtgaccctgggagcgggcaccatccacccgggtgggtgggaggggcgggcgtgaggtgtgaccctgggagtgggcaccatccacctggg

SEQ ID NO: 484616 - DNA, 201 bp, Homo sapiens
agggcccccaggtcagttccaccagggccaggctgacccagtgccctgcgccctccgtccctccccagcccctggtggtcacagaggtcaggaggtaaacsctgtgaacggtgaaactgctccaaggatttagaggaaatgccgtggggggtacacagttgttattgtcagacgatgtactatttacaaacactgaattaa

SEQ ID NO: 484617 - DNA, 201 bp, Homo sapiens
cctctgaggtgccactgcccccgggagcactggccacgctgagttctagctgttctcttggagtggctttgcacagaagcagcccggcgtccagagggccrggtgaatcttcacttcctgccttctctggggtggctctgttgcccccagcctgtaaggctggcctcccctacaatctcagccgacaagagggacatctgg

SEQ ID NO: 484618 - DNA, 201 bp, Homo sapiens
tcaggagatcgagaccatcctggctaacacagtgaaaccccgtctctactaaaaatacaaaaaattagctgggcgtggtggcgggcgcctgtagtcccagytattcgggaggctgaggcaggagaatggcgtgaatccgggaggcggagcttgccgtgagccgagattgtaccactgcactccagcctgggagacagagtg

SEQ ID NO: 484619 - DNA, 201 bp, Homo sapiens
cccatcccctagaagccacacagtgagggtggagggcaggtggccggctggcagggtaagtggtgcagggagtctgtgaacacaggtctgcggagaggccrtaagcgcgaggctgtgccaggaccctcggggggccctgccagccagatggctctccatttgtgtctctggttgagttttcccaggggtttgtggggggca

SEQ ID NO: 484620 - DNA, 201 bp, Homo sapiens
cgcgctgtccgcggggtttcctcactgctcaggcggctgctgctcatccacgccacctccgtcggtccgttcagcttccgtgagtgtcccctgtgggaagktccgttcagcttccgtgagtgtcccctgtgggaaggtccgttcagcttccgtgagtgtcccctgtgggaaggtccgttcagcttccgtgagtgtctcctg

SEQ ID NO: 484621 - DNA, 201 bp, Homo sapiens
tggttctgcccacgctgtggcggccagtgactccctgagctgcgtcctccgtctgagccctcaggctgggatttggaagcttggggtttggaagtagatcrtgatcccatggaggtcagtttgtttccattaaagatttattctatcttagagaagaggatttttaattttcatcccatttatagaagcaaaggccctttt

SEQ ID NO: 484622 - DNA, 201 bp, Homo sapiens
aggtccgttcagcttccgtgagtgtcccctgtgggaaggtccgttcagcttccgtgagtgtctcctgtgggaaggtccgttcagcttccgtgagtgtcccytgtgggaagggcctgtgccgcacaaggtggggacttgggcacacggcctcggaggccagacaccgggcgagccccgctctgggagtgagacccgctcgga

SEQ ID NO: 484623 - DNA, 201 bp, Homo sapiens
ttttagaatccaacaagtgattttggctgtgtacttttgttagagtcttaaatcccttgggtttccaaggcaactgtgaaactcttccattagattattcygagttgctaagatgaggacacaaggctgtgagctgtgtgaggatggaggatggttctgcccacgctgtggcggccagtgactccctgagctgcgtcctcc

SEQ ID NO: 484624 - DNA, 201 bp, Homo sapiens
tgtctcctgtgggaaggtccgttcagcttccgtgagtgtcccctgtgggaagggcctgtgccgcacaaggtggggacttgggcacacggcctcggaggccrgacaccgggcgagccccgctctgggagtgagacccgctcggagggggagcgagccctgaggcgccgcctgtaagccagacccgctgcctcacacagacgg

SEQ ID NO: 484625 - DNA, 201 bp, Homo sapiens
tggggggtgtattctgatgtttacagatgcgctgcagggtccgttgtcagcacagcgaggcccctcccagtggtcccaggccacctccctgtgcgtgcacrtaactcgctggcaggtgcccgtgctggaggcctttgtattatgagagtcgatgcaggcactgagaaatagtgcactccttaagcctgtgggctgaatgct

SEQ ID NO: 484626 - DNA, 201 bp, Homo sapiens
ccgccgcggttcctgggagggtgctgggggcctgaggttcggtcgtcggccgcggcggttcctgggagggtgctgggggcctgaggttcggtcgtcggccrcggcggttcctgggagggtgctgggggcctgaggttcggttgtcggcccaccgcggttcctgggagggtgctgggggcctgaggttcggtcgtcggccgc

SEQ ID NO: 484627 - DNA, 201 bp, Homo sapiens
gcagttggtttaactcagcctcgggctgagttgtgctccatcgtgaggctgtcctgggtactgcaggatgttagcagcagctgtggcctccacccacagaygccaggagcacctgcctttggatcccccgttggtacaaccaaaaatgtctccagacattagcagttgggaaaatcgtttctctatgtgctgctgtgcgtg

SEQ ID NO: 484628 - DNA, 201 bp, Homo sapiens
ggaggaagagaagggacgcagcgctggagctcacagaggccgggaaagagggaagccaagacatgtgcagcaggcatcgaacatcacaagcgcagatgagmaacagcgccggcgatgtcgagagcagaggccagacctggatgacctggcaacaccgccccaccctaaccagcagttcgccataccgggagacgctcctcc

SEQ ID NO: 484629 - DNA, 201 bp, Homo sapiens
gagctacggccagaccctggatgttcagtaaaagttggtgaccacgtgcagtcgctcaggcccaaaatcccttttggaggcaatttgggaggccgaggcakgaggatcccttgaggccaggagtttgggactatcctgggcaaagtagtgaaatcccatttctaatacaaaagttatccgaggccgggcggggtggctcac

SEQ ID NO: 484630 - DNA, 201 bp, Homo sapiens
ctaccccacctgcgggtaaatgctgttctactttgacacaatgtagattttattcattctcatctgttgttgctgtgcgtcctgcactgagctacggccaraccctggatgttcagtaaaagttggtgaccacgtgcagtcgctcaggcccaaaatcccttttggaggcaatttgggaggccgaggcatgaggatcccttg

SEQ ID NO: 484631 - DNA, 201 bp, Homo sapiens
cagccccagcagaggcatcggatcagggcgggagggggtggcagaagctcctggtgtgctcagtccccagtcctgggcacctagggcttcaggagtttggmcagagcccctccagaaaggtttgcgtggctcttgacaaaaaggccagaagcaataggaggtgtttaggaggccagcggagactcaccacgttgtgagctt

SEQ ID NO: 484632 - DNA, 201 bp, Homo sapiens
ggaaagaagaaatggaggtgtcctagcaggtgctgcccgtggggaggttcctccaggatgaagcctggaaatgaacgtgggagggcgtgagtggacagagsaggacgaaagacagcaagccgcagggtgggaggccctgaaaaatgtcgcagatgccgtgtgtgggtggcgcagtgggagacgctgcctgcccccctggct

SEQ ID NO: 484633 - DNA, 201 bp, Homo sapiens
ctcgagcctggagggggaaatcaggctgcagctttggaactgaaggcaacaactgtggaagtttccttccctcggaaacaaattcagccctccaggggacrccagcattggaggtgagaggcctccgccctcaggagcctccaggtggggagaggaggcctggccagcacgagaacagcaccgaggaaaagaagccgcctc

SEQ ID NO: 484634 - DNA, 201 bp, Homo sapiens
cctctgagccttgaagccctggaccactcagttcttctactcctgtttcctcctctgtcagatggtgtgactgcagggcctacctacagggctgttgcacrgatgaatgaaagtatatgaaacccttggagcagtgcctggtccagagggagcaccacagggatgtgtcagatctctcatcaaagggatcaggaattcgag

SEQ ID NO: 484635 - DNA, 201 bp, Homo sapiens
gcctatctgagactcggcagggagttgaagatgaggagaccagccacacacactcgttgaatgaatgggcaccaagcacaagtttcagtgccccccatacrtgctgatatggttcggctctgtgtctccacccaagtctcacctcgaattgtaatccccacgtgtggagggagggacctggagggaggtggttggatcatg

SEQ ID NO: 484636 - DNA, 201 bp, Homo sapiens
gccacgggctcctcctgcaggacacaggcccgaggctccatcagggccagcctcatcatctggtccctggggctgcagagccttccttggaacattgagcrttccctgggacagtgactgccgaggtggggctgctgcctgagaaactggctggctggatggacatagggaggggctgcgggaagaaagctgtggggctgg

SEQ ID NO: 484637 - DNA, 201 bp, Homo sapiens
aaacgtctgtccggatgctctcccagtggttaactggccattccacccatcttggcgaaacgtctgtccggatgctctcccagtggttaactggccattcyacccatcttggtgaaacgtctgtccagatcccttcccagtggttaagtgggttgtttgcttagttatgggagaattttacatactctggtcaaaggtcct

SEQ ID NO: 484638 - DNA, 201 bp, Homo sapiens
ccacagtgtcggctccccgtggctttaatctgccttctcctatgactggagatgctgggcgactttccatgtgctcaactggtcattccatccaccttggygaaacgtctgtccggatgctctcccagtggttaactggccattccacccatcttggcgaaacgtctgtccggatgctctcccagtggttaactggccatt

SEQ ID NO: 484639 - DNA, 201 bp, Homo sapiens
ccgtgggggacactggagtcaggctggacagcccgtcggtcagcgtgtccacaccaacatccagctctgtgtagtagaagtcctcctcaccatcactctgmtcaggctctgcctgcctcctgcgggagacacagccagccagtgggagctgaaggggtggcctggccgggcctcacaaccccagccaacccgcaggccccg

SEQ ID NO: 484640 - DNA, 201 bp, Homo sapiens
ggctggacagcccgtcggtcagcgtgtccacaccaacatccagctctgtgtagtagaagtcctcctcaccatcactctgatcaggctctgcctgcctcctscgggagacacagccagccagtgggagctgaaggggtggcctggccgggcctcacaaccccagccaacccgcaggccccgccgcaccccaggccccgccgc

SEQ ID NO: 484641 - DNA, 201 bp, Homo sapiens
agacaaccacagaaatcccagctgggggtggacaaggaaatgcctccttgggagaagagggggtggcagtaaaggccctggcgaggttggggagctgcttgggggggggtggggacacagacaggaaggggtatcttgttcctcgggaattttctttcccaaagctcctcccaggccatccttcctgaggatgagaggcag

SEQ ID NO: 484642 - DNA, 201 bp, Homo sapiens
agcccgcggaccccagggccctgcgggcatcagccaggtaggcgctcacggcgtgctggccctgcttccctgctctgggcactccagacccccactgtggktggctgccagggtctcctggtgtgggagtagcatggctcagagtggcgctggggtggaggactgagagtcccaccgccctgcccgcccttcctccaggaa

SEQ ID NO: 484643 - DNA, 201 bp, Homo sapiens
ctggacagcccgtcggtcagcgtgtccacaccaacatccagctctgtgtagtagaagtcctcctcaccatcactctgatcaggctctgcctgcctcctgcrggagacacagccagccagtgggagctgaaggggtggcctggccgggcctcacaaccccagccaacccgcaggccccgccgcaccccaggccccgccgcac

SEQ ID NO: 484644 - DNA, 201 bp, Homo sapiens
gacagcccgtcggtcagcgtgtccacaccaacatccagctctgtgtagtagaagtcctcctcaccatcactctgatcaggctctgcctgcctcctgcgggwgacacagccagccagtgggagctgaaggggtggcctggccgggcctcacaaccccagccaacccgcaggccccgccgcaccccaggccccgccgcacccc

SEQ ID NO: 484645 - DNA, 201 bp, Homo sapiens
cgatagccacagcctcgtcctgtcagctggatacagacctcctcaaactgctgcttatggtggggccgcacaaactggtagaagcctgtagaggaaggggygtctgtccccatctgcccctttttctctagagaacagagaccaccttggacccagatggcccccaccccacacgcggcggcagcactgccctcagggtgg

SEQ ID NO: 484646 - DNA, 201 bp, Homo sapiens
ggtagaagcctgtagaggaaggggcgtctgtccccatctgcccctttttctctagagaacagagaccaccttggacccagatggcccccaccccacacgcrgcggcagcactgccctcagggtgggtggcctctgcaagccagggcaccttggagcaggttgtgcttcttggggtcctcagcaaagagggggccgagacag

SEQ ID NO: 484647 - DNA, 201 bp, Homo sapiens
acctccgccctggccccgcttccgccccacgcccccctgaagccccgggctccgtggcgtctgccttccgggccctcccctgcgctcagcccccggggcargggctgggaaggatggcttgactggcctacagggtacaggggacccctgacaggttcatcgctggggccccatgggccccccctccgtctgtgccgtgcg

SEQ ID NO: 484648 - DNA, 201 bp, Homo sapiens
gggacccctgacaggttcatcgctggggccccatgggccccccctccgtctgtgccgtgcggatgtggagactgaggactcctccatcgaaggcggccggyggtgaaatccagtaatctgggtggggtccttaccgcgctgtccgcggggtttcctcactgctcaggcggctgctgctcatccacgccacctccgtcggtc

SEQ ID NO: 484649 - DNA, 201 bp, Homo sapiens
acggcagctggcaagtggcactaacgcctccacgccccgatcagaagatgaggttctgtgggcctgttcctgctgacggccaggtgacggccaggggagcyctgactgccaagatggaggcctgctgcaccccctacgccacatttgcccgcaccaaagaccccgtgccagcactcacgtcctgccaggtgctggatgatc

SEQ ID NO: 484650 - DNA, 201 bp, Homo sapiens
ggcttcagcaaacagctcaaagatgtagctgccgaggagaagaaggcaggctcgagcctggcggggggaccagactgcagctttgggaactgaggagaagraggcaggctcgggcctgaggggggacgacactggtcaaagatgtagctgccgagaagaaaacaggctcgagcctggagggggaaatcaggctgcagcttt

SEQ ID NO: 484651 - DNA, 201 bp, Homo sapiens
gcttcagcaaacagctcaaagatgtagctgccgaggagaagaaggcaggctcgagcctggcggggggaccagactgcagctttgggaactgaggagaagamggcaggctcgggcctgaggggggacgacactggtcaaagatgtagctgccgagaagaaaacaggctcgagcctggagggggaaatcaggctgcagctttg

SEQ ID NO: 484652 - DNA, 201 bp, Homo sapiens
tattctgttgggtgggttcttggcccaccagagctggacaggcaggtgatcaagccacgttgggtgtgctgggggcctccgtgggcactcactggggctcyggccagaagacctgcatgacgctctgcttcctggaggcggtgtggcaggctgggcacatcctagaggcctgtgagacaaccggcccactgcacacgtctg

SEQ ID NO: 484653 - DNA, 201 bp, Homo sapiens
caggagaaggatggagaaacaagtcagtgtggaagatgagacagacattaatgccgagagagaggaaaagcggggagaggcagagggcgagagagacagarggcaggggacacaccacggagacagtgccgacgtctggaagcgagagagctggagagacgaaggggccggcggtgtggagacacacaagagagcgtgctg

SEQ ID NO: 484654 - DNA, 201 bp, Homo sapiens
agctggtgcacagcgtgtcatgggaggaagagcctggcacattgagggccaggcccagggccgtgcagttgcggtggggctggcactgctctgagctggarctgctggctgagaaggtgcctggggggcacggctggcactgcgtgttctggctgggggtgcctgcagccaggagggaagaacagggtcaggggaactggt

SEQ ID NO: 484655 - DNA, 201 bp, Homo sapiens
ggacccctgacaggttcatcgctggggccccatgggccccccctccgtctgtgccgtgcggatgtggagactgaggactcctccatcgaaggcggccggtsgtgaaatccagtaatctgggtggggtccttaccgcgctgtccgcggggtttcctcactgctcaggcggctgctgctcatccacgccacctccgtcggtcc

SEQ ID NO: 484656 - DNA, 201 bp, Homo sapiens
gggcacaagtgggcctggcctgcagtgtgctgccccctcaggcctctggctcacctggtaccctggtgctgagggggaagccagtgcagctggtgcacagsgtgtcatgggaggaagagcctggcacattgagggccaggcccagggccgtgcagttgcggtggggctggcactgctctgagctggagctgctggctgaga

SEQ ID NO: 484657 - DNA, 201 bp, Homo sapiens
ctgcacacttttgggtccgtattactccacagtgtttgtttcttctctgcctccagggaggcgtctgatcggacaccacgcccagggcctgctacccacasatgcccagtggggtctgagggctggaaggagggtcctgcagggaccgggcactgtgttcagcattggccgttcttaccccttgcctcctgcctttggcct

SEQ ID NO: 484658 - DNA, 201 bp, Homo sapiens
tacagtacctgctgtctttccagggggaaggggctccccgtgagggaggggcgacgggggaggggggtgatggtgcctgggagcctgcgtgtgcagccggwgcttgttgaactggcaggcgggtgggtgggggctgcagctttccttaatgtggttgcacaggggtcctctgagaccacctggcgtgaggtggacaccctg

SEQ ID NO: 484659 - DNA, 201 bp, Homo sapiens
gagcctgcgtgtgcagccggtgcttgttgaactggcaggcgggtgggtgggggctgcagctttccttaatgtggttgcacaggggtcctctgagaccaccyggcgtgaggtggacaccctgggccttcctggaagcctgcagttgggggcctgccctgagtctgctggggagtgggcattctctgccagggacccatgagc

SEQ ID NO: 484660 - DNA, 201 bp, Homo sapiens
tctgaggctctgtttctagggttagcgtgtttgggcatctgaggtgtgctgtgtggtgctgccctggccctgaaagccaccagctgcccctgaaggtctcrcatccctggacagcgcccatcccgggccaggcttagagctcacacagttgctctggaagcagacatttgagaagtgaggtctttatggttcccggctttg

SEQ ID NO: 484661 - DNA, 201 bp, Homo sapiens
ctgcgtgtgcagccggtgcttgttgaactggcaggcgggtgggtgggggctgcagctttccttaatgtggttgcacaggggtcctctgagaccacctggcstgaggtggacaccctgggccttcctggaagcctgcagttgggggcctgccctgagtctgctggggagtgggcattctctgccagggacccatgagcaggc

SEQ ID NO: 484662 - DNA, 201 bp, Homo sapiens
ctcagggtgggtggcctctgcaagccagggcaccttggagcaggttgtgcttcttggggtcctcagcaaagagggggccgagacaggcggccagggcggcraagtcatcggaacccttgtagtcctgcagggcctgggtgaaggtggcaaagttggcttggctcaactcctgcttcacggccaccatgaagagcttggccc

SEQ ID NO: 484663 - DNA, 201 bp, Homo sapiens
ctagggttagcgtgtttgggcatctgaggtgtgctgtgtggtgctgccctggccctgaaagccaccagctgcccctgaaggtctcacatccctggacagcrcccatcccgggccaggcttagagctcacacagttgctctggaagcagacatttgagaagtgaggtctttatggttcccggctttgtggaagaagttacag

SEQ ID NO: 484664 - DNA, 201 bp, Homo sapiens
agcttccgtgagtgtcccctgtgggaaggtccgttcagcttccgtgagtgtcccctgtgggaaggtccgttcagcttccgtgagtgtcccctgtgggaagktccgttcagcttccgtgagtgtctcctgtgggaaggtccgttcagcttccgtgagtgtcccctgtgggaagggcctgtgccgcacaaggtggggacttgg

SEQ ID NO: 484665 - DNA, 201 bp, Homo sapiens
gaaggtccgttcagcttccgtgagtgtcccctgtgggaaggtccgttcagcttccgtgagtgtcccctgtgggaaggtccgttcagcttccgtgagtgtcycctgtgggaaggtccgttcagcttccgtgagtgtcccctgtgggaagggcctgtgccgcacaaggtggggacttgggcacacggcctcggaggccagaca

SEQ ID NO: 484666 - DNA, 201 bp, Homo sapiens
tctgtccccatctgcccctttttctctagagaacagagaccaccttggacccagatggcccccaccccacacgcggcggcagcactgccctcagggtgggkggcctctgcaagccagggcaccttggagcaggttgtgcttcttggggtcctcagcaaagagggggccgagacaggcggccagggcggcaaagtcatcgga

SEQ ID NO: 484667 - DNA, 201 bp, Homo sapiens
ccgtctcggaggtgttctcgccaggccagcgtggtgcacagcaggcacagcgtcttccctgtacccgtagggctctccaggatgccattcaccttctgaayggagttcggagcaagggttacggggaagccaggaagaggcgaggccacacaagctgccctgagacaagcttcggcagccagcgggcagctctttgcagat

SEQ ID NO: 484668 - DNA, 201 bp, Homo sapiens
agggtcacctatggggtctccagcagcagcagcagcgttgccccaggatgacaaggcccgatccgggaaaagctctccttgcgccctctcggcaatcttgmgggcagagatgccgtctcggaggtgttctcgccaggccagcgtggtgcacagcaggcacagcgtcttccctgtacccgtagggctctccaggatgccatt

SEQ ID NO: 484669 - DNA, 201 bp, Homo sapiens
caccaagtcgtaggctgcacacggttcaggagtcagctacctgttgggggtggcctgggcgacaggtggggcctgccctggttcaggtgctcttgggggtycagctgctgggctgcagccgtggacacggtcagcttgggatccggcgccgttcttcctgatgaagagatgtagagccacaaagctggtcgagagcatctg

SEQ ID NO: 484670 - DNA, 201 bp, Homo sapiens
gtgctggggaggcgagtggctggtgcagccccctggttgctctgggtgcatcgggaggcttcagagcctgccccagagggggagaagcttcacttcccggraagcatgggaggcctggaggaggtctttggcaggtcccctctcgggaaatcccctgtgagttgggagtgggaggaattcataagtggggggttagtgtgg

SEQ ID NO: 484671 - DNA, 201 bp, Homo sapiens
ctgacctgttccactgtgtcatctataacccaaatgacagactaggagctcagctgccccggccccctcctgggtgcccagagcaccttgtgcccatctgraggcacccctgccaccctcacacatggcccgagccaggcactgctccaggcttcccctgcgtgtgactggtgggcacctggctggagctggagggatgct

SEQ ID NO: 484672 - DNA, 201 bp, Homo sapiens
ctccagccccgggaacctggccgtgctggggaggcgagtggctggtgcagccccctggttgctctgggtgcatcgggaggcttcagagcctgccccagagrgggagaagcttcacttcccgggaagcatgggaggcctggaggaggtctttggcaggtcccctctcgggaaatcccctgtgagttgggagtgggaggaatt

SEQ ID NO: 484673 - DNA, 201 bp, Homo sapiens
tgtgactggtgggcacctggctggagctggagggatgctgaggcctggagctgctgaggtgggagtggaagcccctccattcagggaccccacagcccacygagaccctggtggctggggctgagatgggacagcgcagggcagtgagaggtgtttggaaaggggaagcgtgctgggctctggctggggacgcccgacaga

SEQ ID NO: 484674 - DNA, 201 bp, Homo sapiens
ccctgtgtgtgttctgcaggttggttcccaggacctgggggggacctccagccccgggaacctggccgtgctggggaggcgagtggctggtgcagcccccyggttgctctgggtgcatcgggaggcttcagagcctgccccagagggggagaagcttcacttcccgggaagcatgggaggcctggaggaggtctttggcag

SEQ ID NO: 484675 - DNA, 201 bp, Homo sapiens
atagctgggactacaggctcccgccaccatgcccagctgctttttttgtatttttagtagagacagggtttcaccatgttggccaggatggtctcgatctyctgaccttgtgctccaccctcctcggcctcccagattgctgggattacaggcatgagccaccgcgcccagcctggaagttttattctttttccttaagaa

SEQ ID NO: 484676 - DNA, 201 bp, Homo sapiens
ttcaggcggagacacaggcctcccgctgcacacctgtggatgggctctcgcgtgggtcgtcctcccactggccgcactctgtgccccatggccctcctgcsccccgcccggcgtcctctcacggcctctgtctgtgctgagcttgggtaactcttgttcttacctccacagagtctgtagaagaggcgacaccagggcttc

SEQ ID NO: 484677 - DNA, 201 bp, Homo sapiens
accacattgcctggctaattttttgtattttagtagagacggggttttaccatgttggccaggctggtctcgaactcctgacctcgtgattcgcccgcctycgcctcccaaagtgctgggattacaggtgcacaccacattgcccggctaattttttgtatttttagtagagacggggtttcactatgttagccaggatgg

SEQ ID NO: 484678 - DNA, 201 bp, Homo sapiens
aggggagtaggtgtgcacccagacaccccaggcccagtgactgcccagggggtacagagccattctcaaggcctgccctgcccccagcagcttcccaagcytggttcctctccagacctgctgctgccagccctggaggttctcccacctcagggcaggcgcccagaggcctcttcctgctatgcagggcacctctcccca

SEQ ID NO: 484679 - DNA, 201 bp, Homo sapiens
ggcgagccccgctctgggagtgagacccgctcggagggggagcgagccctgaggcgccgcctgtaagccagacccgctgcctcacacagacgggtgcttckcttgttttggcctagtacagcttttaagcaaaaagtaactggttagggattctatcatattgcttgatgtaaacaaatgcggcaaaatgttaaaaaatgg

SEQ ID NO: 484680 - DNA, 201 bp, Homo sapiens
agatgctgagacaggtcgaggtacaggatgcacactgggggtcggcaccaggaaggcagggaggacgggagaggagaggtcgactcaggcagcaggatccrcagagctgtggttggcccagcagggagccctggaggagaactggctatgctgtgccatgtggggccaggctggccgggacttcacaccatggcctggtgg

SEQ ID NO: 484681 - DNA, 201 bp, Homo sapiens
agatggggtcggagggcacggcttggcagaagatgtcgatttcacccgtggcatacgagctgtgggccctgtggtgccaggtctgaccttggggaacacayaccccagctcggccttggtggccctggcagtttctccccttcctcggggcttttctgttctgggcccctcctttccggaagcgagccccggagcacgtgg

SEQ ID NO: 484682 - DNA, 201 bp, Homo sapiens
ggctgggcctgcagtgaaggggctggctccccgcctctcacctccctggcttggtgacaccgctgtcgtctccaggcagctcaacagcatcgatggccccytccaggcgcagcaggatcactgtgggtcgaggaggtgtcacccacctcctcgcaaggaggaggccccacccagctgcaaggaggcggggagggcaacact

SEQ ID NO: 484683 - DNA, 201 bp, Homo sapiens
tgcccaaggtttctctccatgtgatagtctgaaatatggcctcgtgggatgggaaagacctgacagtcccccagcccaacacccgtgaagggtctgtgctsaggattagtaaaagaggaaagcctcttgcagtcgagatagaggaaggccactgtctcctgcctgcccctgggaactgaatgtttcggtataaaacccgat

SEQ ID NO: 484684 - DNA, 201 bp, Homo sapiens
attgctgggattacaggcatgagccaccgcgcccagcctggaagttttattctttttccttaagaatgtttcttcaagcgtgagggatggccacagtgtakgtcatttaaccgagttctcagtttgggtaagagttgctcagccacggctgggtgttctcatcgttcctgggatatgccagttgccgtatgtgggattctg

SEQ ID NO: 484685 - DNA, 201 bp, Homo sapiens
ggattacaggtgcatgccaccacgcccggctaatttttgtatttttagtagagatggggtttcatcatgttggtcaggctggtcttgaactcctgacctcrtgatctgcccacctcagcctcccaaagtgttaagattacaggtgtgggccaccacgcccagccaagccagagttaatttcaagaatgcagaggtctgata

SEQ ID NO: 484686 - DNA, 201 bp, Homo sapiens
cccggcctcaccaggcgcaacgtcagagcggagggtctgaacctccggccctgcctctccagccctctgccctcctggctggctggagtccattccccatmcgcccgggtgggcaaccagatgcagccaaagtagcgaaagagcatgccgggatgccaacccgtgcagccctcagcaaatcactcaacttctctaagcctc

SEQ ID NO: 484687 - DNA, 201 bp, Homo sapiens
gtggtggcggtgcctgtggtcccagctactcgggaggctgaggcaggagaatggtgtgaacccaggaggcggagcttgcggtgagccgagatcgcaccackgcactgcagcctgggcaacagtgcaagactccatctcaaaaagaaaaaaagaaaacttgacaagtcagaccaaagtcccctgtgaggctcccccacctgg

SEQ ID NO: 484688 - DNA, 201 bp, Homo sapiens
gccagacagtgggtgggacaatttatgcagatggtgggggagcctggcctgtcgcagtgctgaccagcccccagtgggtggccgtgggagacagcccgtcstggctgctgggctgcggcgtgcagccgtggtctgtgggccgcagggcggtacatcccaagccctgctgacgcctcgcgggtccctctctttcagtgaatg

SEQ ID NO: 484689 - DNA, 201 bp, Homo sapiens
agatcgcaccactgcactgcagcctgggcaacagtgcaagactccatctcaaaaagaaaaaaagaaaacttgacaagtcagaccaaagtcccctgtgaggytcccccacctggtccccctccatctccctccctgaagacaatgaccaagacaggtagctttgcctcgcttcccggctcaaagtctcattccttcccccaa

SEQ ID NO: 484690 - DNA, 201 bp, Homo sapiens
aagctggagaaagaggccaagatttttctgcacacggagtgtggggataggagccgggccaagcgctggcccctcagcggtgagccctgcccactcttacygagcaaggtgggtggctctggcacgagtcccccagggggagagcatggctaccagggagctgcagcggagccctccagccctcaccccaggccagcccca

SEQ ID NO: 484691 - DNA, 201 bp, Homo sapiens
ttccaaagagcctctggcccaggcccctccccaccagggctttgcagatgtccttgaaagacccaccctagagccctttggagtgctggcccctcctgtgycctctgccctggtggaagcggcagccacaagtcctcctcagggagccccaagggggattttgtgggaccgctgcccacagatccaggtgttggaagggca

SEQ ID NO: 484692 - DNA, 201 bp, Homo sapiens
caggcccctccccaccagggctttgcagatgtccttgaaagacccaccctagagccctttggagtgctggcccctcctgtgccctctgccctggtggaagyggcagccacaagtcctcctcagggagccccaagggggattttgtgggaccgctgcccacagatccaggtgttggaagggcagcgggtaaggttcccaagc

SEQ ID NO: 484693 - DNA, 201 bp, Homo sapiens
tggagacagagacttgagtctgaggggggcctggggctttgctgctcactcccagggctgcgtgcggttggggcgctgccaggagcagccaggcaggtgcmctacctggttggggagccctgtgggtaagcacaggaggcacggcaagcctctcctcctggggtcccggtggctccatgcccgggtagggccggccggtca

SEQ ID NO: 484694 - DNA, 201 bp, Homo sapiens
tcctgacctcaagtgatccgcctgcctcggtctcccaaagtgctgggattacaggcatgagctactgcacccagccaggaagggtttgatgatggtgagaygggggtgcagtgatgggaagatgggggagggagggtttgatgacggtgagacgggggtgcagtgatgggaagatgggggagggagggtttgatgacggtg

SEQ ID NO: 484695 - DNA, 201 bp, Homo sapiens
ggagcagccaggcaggtgccctacctggttggggagccctgtgggtaagcacaggaggcacggcaagcctctcctcctggggtcccggtggctccatgccygggtagggccggccggtcaggtctgtgcacgtctgtgagaagcgctgcttgtggtgtggacgcacaaacatgctgaaccctgcggggagcttcaatcaga

SEQ ID NO: 484696 - DNA, 201 bp, Homo sapiens
cccacagtccctgctggcctctgtctaaggaaggacgagatcttgctctgggtcttcccggtcttctcggaccgtgaggggcctggagacagagacttgastctgaggggggcctggggctttgctgctcactcccagggctgcgtgcggttggggcgctgccaggagcagccaggcaggtgccctacctggttggggagc

SEQ ID NO: 484697 - DNA, 201 bp, Homo sapiens
gaccaggtcggcgctcaggcagaacacgctccacctcggcggctgtgcgctcaggagagcccccacacaggccccagccctgactcctcatctgcctgcargacagacagcaaaccctgctgccctggctgcggagaagactggagccccacggagcgttcagaacgttccaggcctcccggagtccaaaagaggtggtgg

SEQ ID NO: 484698 - DNA, 201 bp, Homo sapiens
gcttcccctgcaggagccgccgggcgtgagacgcggtccctcggtgcagacaccaggccgggcgcggctgggtcccccgggggccctgtgagagaggtggyggtgaccgtggtaaacccagggcggtggcgtgggatcacgggtccttacgctgggctgtctggtcagcacgtgcaggtcagggcaggtcctctgagccgg

SEQ ID NO: 484699 - DNA, 201 bp, Homo sapiens
accccagcttctgcatacaactgccccccaccccaagcctctaagccccacacacacacacacgcacacacacacacaaccacacatacacatgcacacaygcacacgcacacatgcacatacaaacatacacacacacgcacgcacacacacacaagaatcacttgaacctgggaggtggaggttgcagtgagccgagac

SEQ ID NO: 484700 - DNA, 201 bp, Homo sapiens
tcctgcaggagctgcacgcggccgaggtgcgcaggaacaaggagcagcgagaagagatgtcgggctaagggcccgggacgggcggcgcccatcctgcgacrgaacacgttcgggttttggttttgtttcgttcacctctgtctagatgcaacttttgttcctcctcccccaccccagcccccagcttcatgcttctcttcc

SEQ ID NO: 484701 - DNA, 201 bp, Homo sapiens
ccccagcttctgcatacaactgccccccaccccaagcctctaagccccacacacacacacacgcacacacacacacaaccacacatacacatgcacacatrcacacgcacacatgcacatacaaacatacacacacacgcacgcacacacacacaagaatcacttgaacctgggaggtggaggttgcagtgagccgagacc

SEQ ID NO: 484702 - DNA, 201 bp, Homo sapiens
ccatgggtgtgtgtgccgttccgtggggggctgtgtgctgtcccgtgggagtgtgtgctgctcctctcaacatctcagcaaccagatcatgcaaagcaggygctcctcccaggtctcaaaaagggaaaacaggcctgaaaacaggcctcactcgtgatgtgacagcccaggactgcaccatggcccgtttctagctctagg

SEQ ID NO: 484703 - DNA, 201 bp, Homo sapiens
gcggggccagggcggagctcggagcgggcaggggccggggcggggccggggcggagctcggagcgggcaggggccggggcgggggcagggctagcagcagkcagggggcggggcactgggcgggggcggggccagggcggagctcggagcgggcaggggccggggcggggccggggcggagctcggagcgggcaggggccg

SEQ ID NO: 484704 - DNA, 201 bp, Homo sapiens
gccggggcgggggcagggctagcagcaggcagggggcggggcactgggcgggggcggggccagggcggagctcggagcgggcaggggccggggcggggccrgggcggagctcggagcgggcaggggccggggcgggggcagggctagcagcaggcagggggcggggcactgggcgggggcggggctagggcggagctcgga

SEQ ID NO: 484705 - DNA, 201 bp, Homo sapiens
cagcccccagcttcatgcttctcttccgcactcagccgccctgccctgtcctcgtggtgagtcgctgaccacggcttcccctgcaggagccgccgggcgtkagacgcggtccctcggtgcagacaccaggccgggcgcggctgggtcccccgggggccctgtgagagaggtggtggtgaccgtggtaaacccagggcggtg

SEQ ID NO: 484706 - DNA, 201 bp, Homo sapiens
cctcggtgcagacaccaggccgggcgcggctgggtcccccgggggccctgtgagagaggtggtggtgaccgtggtaaacccagggcggtggcgtgggatcrcgggtccttacgctgggctgtctggtcagcacgtgcaggtcagggcaggtcctctgagccggcgcccctggccagcaggcgaggctacagtacctgctgt

SEQ ID NO: 484707 - DNA, 201 bp, Homo sapiens
acacccttcccacttggcacccagagggggctgtgggtggaggcctgactccaggcctctcctgcccacaccctctgggctgagttccttctttcccttgracgcccagtgctggccttggaggacggtcagctggaggatggcggtgggggaggctgtctttgtaccactgcagcatcccccacttctccacggaagccc

SEQ ID NO: 484708 - DNA, 201 bp, Homo sapiens
ggacaggcttggtcagtgccttggcctggagcaggaggggctgtggctccctgggcctctttctgagagataagaatgggatggggagaggccgggtgtgktggctcacgcctgtaatcccagaactttgggaagctgaggcaggcagatcacttgaggttggaagttcaagatcagcctggccaacatggtgaaacccca

SEQ ID NO: 484709 - DNA, 201 bp, Homo sapiens
cctgcagggcctgggtgaaggtggcaaagttggcttggctcaactcctgcttcacggccaccatgaagagcttggccctgtccgtctgtgcaccagccacrggctcctcctgcaggacacaggcccgaggctccatcagggccagcctcatcatctggtccctggggctgcagagccttccttggaacattgagcgttccc

SEQ ID NO: 484710 - DNA, 201 bp, Homo sapiens
aaggatggtggggagggggcggtgagaaagaagggagtcaaagagagggaggggccgggcgcgggggctcacgcctgtaatcccagcactgcggggggccrggcgcgggggctcacgcctgtcatcccagcactttgggaggctgaggtgggcagatcaccggaggtcaggagttcaagaccagcctggccaacatggtga

SEQ ID NO: 484711 - DNA, 201 bp, Homo sapiens
catttcctcggtatctaatgtttagtacaaagagaagcagggagacaaaacaagcccagctcactgcgagaattgtttttaactccctgaagtcagtgaargggaaggatggtggggagggggcggtgagaaagaagggagtcaaagagagggaggggccgggcgcgggggctcacgcctgtaatcccagcactgcggggg

SEQ ID NO: 484712 - DNA, 201 bp, Homo sapiens
gagttcgagactagcctggccaacatggtgaaatcccccctctctgctaaaagtacaaaattagccaggtgtggtgacacactcctgtgatcccagcaatytgggagactgaggcaggataattgcttgacccggggagagggaggttgcagtgagctgagattgtgccattgcactccagcctgggcagcaagagtagaa

SEQ ID NO: 484713 - DNA, 201 bp, Homo sapiens
atctcaacaacagaaaaccttctttggtttgatccctccgatttcttcaaccaggcaaaggaaactgcttttaaagggctcctgtgatgaggtcagggccygcctggtgatcctccagtcttaagggtacctctgggccacacaatgtcacattcctgggcatcacccccaccagactcacagtcccggggatgatgccgg

SEQ ID NO: 484714 - DNA, 201 bp, Homo sapiens
tcgctatgttgcccaggctggtgttgaactcctggcctcaagtgatcctcctgccttggcctcccaaggctttgggattacaggcatgaaccacagtgtcyagatcttaatttcttttcttttctttttttttttttttttaggcagagtctcgctctgtcatctaggctgtaatgcagtggtgcgatcttgctcactgca

SEQ ID NO: 484715 - DNA, 201 bp, Homo sapiens
cagcctgggtgacagagtgaaactccataaaaaaaaaaatgctgtactttaagtgttaagttagtaataatctgaagtacattgtggtaagttaaagatgyacattgtcatctctagagcaaccactaagaaaataacttaaaacagcatagctaaaaattcagcaacagagctggatatcaccaaaatgatggagttggc

SEQ ID NO: 484716 - DNA, 201 bp, Homo sapiens
attcagcaacagagctggatatcaccaaaatgatggagttggcagctccaaagatccgtctctccagcaaagcaactattctgctgtcaaaactgtcacartaaacttttttctattcagctgtcaaaactgtcacaataaacttttttctattaaactgtcaaaacctcccaataaacttttctgtaactctggtgtcta

SEQ ID NO: 484717 - DNA, 201 bp, Homo sapiens
acaagaagacactagaatatccccaaatgcttgcaaatcaaatagtatacgtttacacaaccctcaagtcaaagaataaatccctatggaaatgataaacttttttttttttttttgaggcagagtctcgctctgtcacccagactggagtgcagtggtgcgatgtctgctcactgcaacctctgcctccggggttcaagt

SEQ ID NO: 484718 - DNA, 201 bp, Homo sapiens
aatggactttaaaggcttcccagtgtttatgagaatgaagctacgtgatgtaagttttttctaagatatatagactgtaaatcacaaataaatcatggaaggtgttgtttccagtaagaaattattttagtaatgacagccagtgaaattccctcaatgatcacagtactgtcagtcaaatgtcgtgggttgagcagtgaa

SEQ ID NO: 484719 - DNA, 201 bp, Homo sapiens
tggactttaaaggcttcccagtgtttatgagaatgaagctacgtgatgtaagttttttctaagatatatagactgtaaatcacaaataaatcatggaaggtgttgtttccagtaagaaattattttagtaatgacagccagtgaaattccctcaatgatcacagtactgtcagtcaaatgtcgtgggttgagcagtgaaca

SEQ ID NO: 484720 - DNA, 201 bp, Homo sapiens
gactttaaaggcttcccagtgtttatgagaatgaagctacgtgatgtaagttttttctaagatatatagactgtaaatcacaaataaatcatggaaggtgttgtttccagtaagaaattattttagtaatgacagccagtgaaattccctcaatgatcacagtactgtcagtcaaatgtcgtgggttgagcagtgaacact

SEQ ID NO: 484721 - DNA, 201 bp, Homo sapiens
actgctggcggacaccctccgcagctgctggcccgggtgctaagcccctcattgccctgggccgctccgagtgtggggccgccaagcccacacccacccgkaactctagctggcccgcaagcgccgcacgcagccccggttcccgcccacgcctctccctccacacctccccgcaagctgagggagccggctccggccttg

SEQ ID NO: 484722 - DNA, 201 bp, Homo sapiens
ctttcacccaggcctgagtgcagtggcgccatctcggctcactgcaagctccgcctccccggttcatgccattctcctgcctcagcctcctgagtagctgrgactacaggcacccaccaccacgcctggctaattttttttgtatttttagtagagacgaggtttcaccgtgttagtcaggatggtctcgatctcctgacc

SEQ ID NO: 484723 - DNA, 201 bp, Homo sapiens
ctttcttacaaaatgcatttggaaaccagacctttgctacccaccaatgtctctgggttttgtaccagtccctgctctcaggccaccctgcccaggacccrggcccgcctccccctccacactcaggatgtcctgctccatctggccggctcactccgtgtggcctgcctttgctgaccgttttggggttccccgccggag

SEQ ID NO: 484724 - DNA, 201 bp, Homo sapiens
gatgcagtgtgacgtggatattgtccttttttctggtctgaattatttaatttttttttgagaaggggcctcgttctgttgcccaggctggagtgcagtgrcacagtcatggctcactgcggcctcgacctgggctaaggtgatcctcccacctctgcctcctgagtacctgggactacaagcacgcaccaccacacccgg

SEQ ID NO: 484725 - DNA, 201 bp, Homo sapiens
ttgagaagtattactcaagagggactggcataatgataattagtcaattcagtagtaaatataacaatcctaatgcatattgctcctaacagctcagttgkttttttttttgtttgtttgtttgtttgtttgttttttgagagaagtctcactgttgcccaggctggagtgcagtggcgcgatctcggctcactgcaacct

SEQ ID NO: 484726 - DNA, 201 bp, Homo sapiens
ttgcctctaccccacctgcgggtaaatgctgttctactttgacacaatgtagattttattcattctcatctgttgttgctgtgcgtcctgcactgagctayggccagaccctggatgttcagtaaaagttggtgaccacgtgcagtcgctcaggcccaaaatcccttttggaggcaatttgggaggccgaggcatgaggat

SEQ ID NO: 484727 - DNA, 201 bp, Homo sapiens
tgctacaacagcacctgcgaggagctcaggacgcccgcccaaggtcagcacacagatgcaaagctgcttcctcacaagtaatgggcattggaggcagcccrggccgcaccccacccctgggcaccagcgctctgcacacttcgggggagcgtctagaaagaccaccaccctccaccacagcacagcatggggctgtggact

SEQ ID NO: 484728 - DNA, 201 bp, Homo sapiens
gggggccctgccagccagatggctctccatttgtgtctctggttgagttttcccaggggtttgtggggggcacgtccctcagcaggtacatccgtggggcygcccagcctctgcaccttgccctgagccccccgtcctccagaactcctggcctgctgccgctcatccctcataggcctcagggtcccttggacaggctcc

SEQ ID NO: 484729 - DNA, 201 bp, Homo sapiens
gtgcgcagctgaagcacggccaagaaaggaccgaagccagtccccacccccaccaggtcctcccctgcagtcccccagtgaacttcaaaccctagcccagygggagcgcagcctggggctctggacacccagcagcactcgcctgtcggacactgagccggagcgggagcccaggagcctacctgtagatggttactctct

SEQ ID NO: 484730 - DNA, 201 bp, Homo sapiens
ggcacaagtggatctgtgggaggaagggcagagtgcgcagctgaagcacggccaagaaaggaccgaagccagtccccacccccaccaggtcctcccctgcrgtcccccagtgaacttcaaaccctagcccagcgggagcgcagcctggggctctggacacccagcagcactcgcctgtcggacactgagccggagcgggag

SEQ ID NO: 484731 - DNA, 201 bp, Homo sapiens
cagtaagcgggagcctccctgcaggcccatgttccgcccaccctgtccctccaagggccagggcccagaaacgcctggtagtgggtcatgcgggaccaccyggctcagtctctgccaggggagcgccgccctaaatacaagagcagcttcagggtcctcagtcctggcacactgagcactcagcaaacgtgagtgcagaaa

SEQ ID NO: 484732 - DNA, 201 bp, Homo sapiens
gcatttctttttttgagagggagtctcgctctgtcgcgcaggctggagtgcagcggcgcgatgtcggctcactgcaagctccaccttccgggttcaccccattctcctgcctcagcctccggagtagctgggactacaggcgtctgccaacatgcccggctaattttttttttttttttaagtagagatggggtttcacca

SEQ ID NO: 484733 - DNA, 201 bp, Homo sapiens
ccccgtcccagagtcacgtcctgcaggcatcaccgggacgagccggcagctcctgtcagggaacctgggggcacaaaggcagagccccttcttaggaccawcaaaaaggcctggacaaccacacatcaagatgactgagggtccttggtgccaccagaccaaaaaccacagcgaacaagaagcaacacagaggatgtctcc

SEQ ID NO: 484734 - DNA, 201 bp, Homo sapiens
ccccaccaggtcctcccctgcagtcccccagtgaacttcaaaccctagcccagcgggagcgcagcctggggctctggacacccagcagcactcgcctgtcrgacactgagccggagcgggagcccaggagcctacctgtagatggttactctcttgtttcttcacctcaggatggatgcacagctgctcccgggagcccag

SEQ ID NO: 484735 - DNA, 201 bp, Homo sapiens
agggttctacgcatcctctccgagacagcccaagacaggacaggagtggcggctacactcagccctcctcagggcagggaagaacagcccctcagcctatygccccaacccacagaggcatctcccacaaacccctgcaggtgcccctgtgattagcaccgtcactcagcttccctgccaaccacaacaggcccagaactt

SEQ ID NO: 484736 - DNA, 201 bp, Homo sapiens
aaaagcagagctgggccgggcgcggtggctcactcctgtaatcccagcactttgggaggccgaggtgggcggatcacaaggtcagaagatcgagaccatcytggctaacacggtgaaaccccgtctctactaaaaatacagaaaattagccagacgtggtggcgggcacctgtagtcccagctactcgggaggctgaggca

SEQ ID NO: 484737 - DNA, 201 bp, Homo sapiens
gagtttgggaccagcctggccaacatggcgaactgccgtctctactgaaaatacaaaaattagccgggtgtggtggcgggtgcctgtagtcccagctactyggaaggctgaggcaggagaactgtttgaacccaagaggcggaagctgcagtgagccaagaccacaccactgcactccagcctgcaccacagagcgagact

SEQ ID NO: 484738 - DNA, 201 bp, Homo sapiens
gccttggccaatcacggaacccattgtactgaaatggaataggcctcctgtgctcctttgtcggggcctagagcccatcagtcccagggctgggttttgcrtgcgtgtacacgtgtcagctctagggagagcaccccaggcttttctcattgggggcccgtgtcacatacaaaagtgcccgtctcccccatgggtgtgctg

SEQ ID NO: 484739 - DNA, 201 bp, Homo sapiens
actcaccgcttccgccgccgtcgcactgccctgcagcctcgcccgctgcctccgcgccctcttcctgggggctacagcgtcctcgggccttgggggtagasgtggggggcggggggcggggtcgtcagcctcgggtccaaggcccggtgcaggcgcgcgtgccgagctgggtgcgcggacctgcctccagccccttcccgc

SEQ ID NO: 484740 - DNA, 201 bp, Homo sapiens
taatagagtgtcacataaatggaataaaacagtaggtccagccgggtgcggtggttcatgcctgcaacctcagcactttgggaggccaaagtgagtggatsacaaggtcaggagtttgggaccagcctggccaacatggcgaactgccgtctctactgaaaatacaaaaattagccgggtgtggtggcgggtgcctgtagt

SEQ ID NO: 484741 - DNA, 201 bp, Homo sapiens
gaagggacgcagcgctggagctcacagaggccgggaaagagggaagccaagacatgtgcagcaggcatcgaacatcacaagcgcagatgagcaacagcgcyggcgatgtcgagagcagaggccagacctggatgacctggcaacaccgccccaccctaaccagcagttcgccataccgggagacgctcctccacagcatgg

SEQ ID NO: 484742 - DNA, 201 bp, Homo sapiens
gaccaggaccctccccacctggtgccagccgcaggccctcagcccacacgcacctcagggtgactccgatcctggaggacaaggcgggtgggcaggctccracctccgtgggctgcggctccaggcgggcgggcgtcaggcagccctacagggagacacagccagggcttcactcccctccagagagccctgagacccgcc

SEQ ID NO: 484743 - DNA, 201 bp, Homo sapiens
cctgtttcctcctctgtcagatggtgtgactgcagggcctacctacagggctgttgcacagatgaatgaaagtatatgaaacccttggagcagtgcctggyccagagggagcaccacagggatgtgtcagatctctcatcaaagggatcaggaattcgagacctgggtaatatggtgaaatcccgtctctacaaaaaatac

SEQ ID NO: 484744 - DNA, 201 bp, Homo sapiens
acatggggtgctgtgagaccaggaccctccccacctggtgccagccgcaggccctcagcccacacgcacctcagggtgactccgatcctggaggacaaggsgggtgggcaggctccgacctccgtgggctgcggctccaggcgggcgggcgtcaggcagccctacagggagacacagccagggcttcactcccctccagag

SEQ ID NO: 484745 - DNA, 201 bp, Homo sapiens; identical to SEQ ID NO: 259627

SEQ ID NO: 484746 - DNA, 201 bp, Homo sapiens
cgcggggtttcagctgtattttcgaacccctgtgcttggccgaggggttcccaaggctccactccgccttggagggggctgcggaagcccggaggtgaccygggctctgggaggggcgtccccaacgtgggggaggggagacaggggcctttgaagacagcgcgggactcggagggggtccccccgacctcagacgtggta

SEQ ID NO: 484747 - DNA, 201 bp, Homo sapiens
cgggtcgcaagaagaccctgaccgtgctccggcgctggggcgcgtgctaagggcccgcggggtttcagctgtattttcgaacccctgtgcttggccgaggrgttcccaaggctccactccgccttggagggggctgcggaagcccggaggtgacctgggctctgggaggggcgtccccaacgtgggggaggggagacaggg

SEQ ID NO: 484748 - DNA, 201 bp, Homo sapiens
caccccctgcactgattgagctctgactgtttgcctggccccaagaaagatcccactggcagcctcagcccagatggtgccttctccaggcagtcttcccygcccacccactctcctggctgggtcagatgtcctaactacttactcctacagggccctgtgtcttgcccaccagagccgtggggcactgggctgccagcc

SEQ ID NO: 484749 - DNA, 201 bp, Homo sapiens
tctaagatcttgtctccagctcgaaactgtggaccaagcctgttccctccttcccctggcctctggatgcccacgcctgcctcggaccacaggcctcagcsccgcctccgagcctcatgcccgctctgcagcactcggccctagctccccaactcagatcgcgctcccaggcctacggcctgccccgaggccacaacccga

SEQ ID NO: 484750 - DNA, 201 bp, Homo sapiens
cccaggctggactctgcccagaattggctatccttgggcaaaacggccaagagactgtggtgcagtatgaggctccagcccctgctacagacagagacacmgagccagcctccgccctgccagcagcaggcatgacctcggctactccacacccccaaggatgacgttcaaaactgttcacagcttcggcccatcagaaca

SEQ ID NO: 484751 - DNA, 201 bp, Homo sapiens
tctgcccagaattggctatccttgggcaaaacggccaagagactgtggtgcagtatgaggctccagcccctgctacagacagagacacagagccagcctcygccctgccagcagcaggcatgacctcggctactccacacccccaaggatgacgttcaaaactgttcacagcttcggcccatcagaacagacactgacatg

SEQ ID NO: 484752 - DNA, 201 bp, Homo sapiens
cacggggccacttttgaaaatatccagattctctcccctgggttccttctggtttgaatgctcttcctgctgcgcctcccaggtggcttccttcccactcmgctctcagaacaagagaccatccctgcagagaatgcagtcccttcacttcccttctggttttccatgccctccctgtgcacccccctccacccactgctc

SEQ ID NO: 484753 - DNA, 201 bp, Homo sapiens; identical to SEQ ID NO: 259610

SEQ ID NO: 484754 - DNA, 201 bp, Homo sapiens
tctgtaaaaaatcgtggctctcggcggaccctggggataggaggtgcaaagtgcgctcacacgcggcccgggtccgcggccgagagctgtggggatctggmgcgggccgggtcgcaagaagaccctgaccgtgctccggcgctggggcgcgtgctaagggcccgcggggtttcagctgtattttcgaacccctgtgcttgg

SEQ ID NO: 484755 - DNA, 201 bp, Homo sapiens
cccagacctggggcctggactctggtactgagcagactgggttggggctgcaggcctgctcctctctatacaaaggcccatgtctgtatctatgccatggrtgtacaacaggccacttgctcctaccacatgctccgtgaagcagagaccaaaacatctgctccaagtgtcatgaaaactatgccagggtaagccctgtcc

SEQ ID NO: 484756 - DNA, 201 bp, Homo sapiens
gactcggagggggtccccccgacctcagacgtggtaaactgaggccggcgaggagggaggctgagtccggggaccaggcggcccctcactgctcctccggyccgtctcccccctgcgcctgttcgtacgggcagggccggcggccgagtccagcgggctcggggccaggcctgggccctgcgggcggcgcctcctcctccg

SEQ ID NO: 484757 - DNA, 201 bp, Homo sapiens
cctgctcctctctatacaaaggcccatgtctgtatctatgccatgggtgtacaacaggccacttgctcctaccacatgctccgtgaagcagagaccaaaayatctgctccaagtgtcatgaaaactatgccagggtaagccctgtcccctggtatgaaaagggagaatccctgatgtgtttttcacactgtccctaagggg

SEQ ID NO: 484758 - DNA, 201 bp, Homo sapiens
cagtgttgatggggccctgtgcccgctctggggtattaacagaatgtccatggcatggaacccccatacctgtctccagggtgtccacaccctacccatcygtccccagtgtgtccataagacttcccttccacccccggagtgtccacaggaagccccacctgcctctgccatgtccacaggaccctatgtgaccatggg

SEQ ID NO: 484759 - DNA, 201 bp, Homo sapiens
ccaggcctgggccctgcgggcggcgcctcctcctccgcgccgtccccatgctcgccctccgcgtcgctctcgtccgagttgtcctcctccaagtagcggtmaccgcgcaccttgtgctggggccgcgggatgcggggctggcgcggggccacgccccggcgcagcttctgctccatccgcaggtaggagaccgcggccgcc

SEQ ID NO: 484760 - DNA, 201 bp, Homo sapiens
ggaggtgacctgggctctgggaggggcgtccccaacgtgggggaggggagacaggggcctttgaagacagcgcgggactcggagggggtccccccgacctmagacgtggtaaactgaggccggcgaggagggaggctgagtccggggaccaggcggcccctcactgctcctccggcccgtctcccccctgcgcctgttcgt

SEQ ID NO: 484761 - DNA, 201 bp, Homo sapiens
tcgccctccgcgtcgctctcgtccgagttgtcctcctccaagtagcggtaaccgcgcaccttgtgctggggccgcgggatgcggggctggcgcggggccaygccccggcgcagcttctgctccatccgcaggtaggagaccgcggccgccaccagcgtcaccagcagcaccgccagcttagcctgggcgtaaggagaggga

SEQ ID NO: 484762 - DNA, 201 bp, Homo sapiens
ggtccccccgacctcagacgtggtaaactgaggccggcgaggagggaggctgagtccggggaccaggcggcccctcactgctcctccggcccgtctccccyctgcgcctgttcgtacgggcagggccggcggccgagtccagcgggctcggggccaggcctgggccctgcgggcggcgcctcctcctccgcgccgtcccca

SEQ ID NO: 484763 - DNA, 201 bp, Homo sapiens
tgcggaagcccggaggtgacctgggctctgggaggggcgtccccaacgtgggggaggggagacaggggcctttgaagacagcgcgggactcggagggggtscccccgacctcagacgtggtaaactgaggccggcgaggagggaggctgagtccggggaccaggcggcccctcactgctcctccggcccgtctcccccctg

SEQ ID NO: 484764 - DNA, 201 bp, Homo sapiens
cagacccaacatctggagaacaaggtaccaaacagcccacaggatggctgtgatgcacccacaaatcccctcagagatgggcaaactgagactggctggasgtgggccagtaagtggggtgctgagttgggggccacccagtgggctgcaggaatggggccttggcccagagactggcttgggaaggggtggcatttagga

SEQ ID NO: 484765 - DNA, 201 bp, Homo sapiens
ccgcgtcgctctcgtccgagttgtcctcctccaagtagcggtaaccgcgcaccttgtgctggggccgcgggatgcggggctggcgcggggccacgccccgscgcagcttctgctccatccgcaggtaggagaccgcggccgccaccagcgtcaccagcagcaccgccagcttagcctgggcgtaaggagagggatgccagg

SEQ ID NO: 484766 - DNA, 201 bp, Homo sapiens
cgcaggtaggagaccgcggccgccaccagcgtcaccagcagcaccgccagcttagcctgggcgtaaggagagggatgccagggacccgcggccgcctcgcyccgcaccttccccgcctatgcccctcgctgagataggcccttccctcctccgggagcctcccgggccacgcggccctcaacttctccagcccctccaccc

SEQ ID NO: 484767 - DNA, 201 bp, Homo sapiens
gcaggtaggagaccgcggccgccaccagcgtcaccagcagcaccgccagcttagcctgggcgtaaggagagggatgccagggacccgcggccgcctcgccycgcaccttccccgcctatgcccctcgctgagataggcccttccctcctccgggagcctcccgggccacgcggccctcaacttctccagcccctccaccca

SEQ ID NO: 484768 - DNA, 201 bp, Homo sapiens
gagaccctggtcaccacactgctcacacgctaagcagaagtaggagcaggtgcctcgggctgtgtggatgcaggtgttcccgctccgcaccacatgcgtgrcctcaaaagaagaaagctctgtgcttagtcatgtcctgtccccaacccaggtgtgcagtgccaagcttgcaggcgctgtttctcctcctcagccaggact

SEQ ID NO: 484769 - DNA, 201 bp, Homo sapiens
tgctgtgaggcggtcctggcctgccccctggtggagaccctggtcaccacactgctcacacgctaagcagaagtaggagcaggtgcctcgggctgtgtggmtgcaggtgttcccgctccgcaccacatgcgtggcctcaaaagaagaaagctctgtgcttagtcatgtcctgtccccaacccaggtgtgcagtgccaagct

SEQ ID NO: 484770 - DNA, 201 bp, Homo sapiens
aggaatgatttcacaccatagcccagtacatacacacatatctgtatgcatacttcctgctcttttcttttttccagacacggtcgctccgtttccccacmgcgccccctccctcccttcccccacccactgctggagcgcagtggcacgctcacttcagcctcaatcttccaggctcaagccatcctcccacttcagtct

SEQ ID NO: 484771 - DNA, 201 bp, Homo sapiens
caggcgctgtttctcctcctcagccaggactagagagatcgaactgtttgcagctgccaactctgcaaatcaaacctgaagctaagcatggagaggggggmttcctttccagtgagtcctcccagggtgggcaacaagagtaatggattgggagtcagaagatgcacgctcgttctcagggctgtaatgttggctctgtgg

SEQ ID NO: 484772 - DNA, 201 bp, Homo sapiens
caaggaccccccggggttcaccggaggagatgggatatggagctgggcagaggggatgccaggaccagacagggcacaacatgggttcaagatacccaggytggactctgcccagaattggctatccttgggcaaaacggccaagagactgtggtgcagtatgaggctccagcccctgctacagacagagacacagagcca

SEQ ID NO: 484773 - DNA, 201 bp, Homo sapiens
cccaacgtgggggaggggagacaggggcctttgaagacagcgcgggactcggagggggtccccccgacctcagacgtggtaaactgaggccggcgaggagsgaggctgagtccggggaccaggcggcccctcactgctcctccggcccgtctcccccctgcgcctgttcgtacgggcagggccggcggccgagtccagcgg

SEQ ID NO: 484774 - DNA, 201 bp, Homo sapiens
gaccccccggggttcaccggaggagatgggatatggagctgggcagaggggatgccaggaccagacagggcacaacatgggttcaagatacccaggctggwctctgcccagaattggctatccttgggcaaaacggccaagagactgtggtgcagtatgaggctccagcccctgctacagacagagacacagagccagcct

SEQ ID NO: 484775 - DNA, 201 bp, Homo sapiens
gctccactccgccttggagggggctgcggaagcccggaggtgacctgggctctgggaggggcgtccccaacgtgggggaggggagacaggggcctttgaakacagcgcgggactcggagggggtccccccgacctcagacgtggtaaactgaggccggcgaggagggaggctgagtccggggaccaggcggcccctcactg

SEQ ID NO: 484776 - DNA, 201 bp, Homo sapiens
tgggatatggagctgggcagaggggatgccaggaccagacagggcacaacatgggttcaagatacccaggctggactctgcccagaattggctatccttgrgcaaaacggccaagagactgtggtgcagtatgaggctccagcccctgctacagacagagacacagagccagcctccgccctgccagcagcaggcatgacc

SEQ ID NO: 484777 - DNA, 201 bp, Homo sapiens
caaggctccactccgccttggagggggctgcggaagcccggaggtgacctgggctctgggaggggcgtccccaacgtgggggaggggagacaggggccttygaagacagcgcgggactcggagggggtccccccgacctcagacgtggtaaactgaggccggcgaggagggaggctgagtccggggaccaggcggcccctc

SEQ ID NO: 484778 - DNA, 201 bp, Homo sapiens
acggccaagagactgtggtgcagtatgaggctccagcccctgctacagacagagacacagagccagcctccgccctgccagcagcaggcatgacctcggcyactccacacccccaaggatgacgttcaaaactgttcacagcttcggcccatcagaacagacactgacatggatgcccggcaggactgcccatgtgtgcta

SEQ ID NO: 484779 - DNA, 201 bp, Homo sapiens
caaatgtgccctgaggcaaagttcctgtttccttccccaaatccgagtttcacccccttcactctcaggcttccgggtagaaaaaaacctctcccttgttycctcgccccacaaacaccccggcagatggacacctcctggcccgccggcctctgtacccctccgaaatgggagtaccgcagcatcccacaggagcagccg

SEQ ID NO: 484780 - DNA, 201 bp, Homo sapiens
gagggggtccccccgacctcagacgtggtaaactgaggccggcgaggagggaggctgagtccggggaccaggcggcccctcactgctcctccggcccgtckcccccctgcgcctgttcgtacgggcagggccggcggccgagtccagcgggctcggggccaggcctgggccctgcgggcggcgcctcctcctccgcgccgt

SEQ ID NO: 484781 - DNA, 201 bp, Homo sapiens
catagacttcaaccttccttctcagccccgcgccagacctcagccccgccttccaggctagtccccgcccctcggacacacccacagacttcggccccgcstcccagcactaggccccgccctgacacagccacggactgggccttgcctcccagctccatcgccaggctgcagccatgccaacgccttagttctgccgtc

SEQ ID NO: 484782 - DNA, 201 bp, Homo sapiens
ctatgtgaccatgggaccccatatctgtccctgggatgtctatgtctcgccaaccacccacagatagccataaagccccctgccccgcccccccccccccmgtgcccacagctatactcactgctgagtccagtcttgttcagggcactgcccacaccccaaagggcagctgccacatagaggatccagctgtgttgcagg

SEQ ID NO: 484783 - DNA, 201 bp, Homo sapiens
ctcatgcgtgttctgggctctctgattctcccattcccccttctcctcccaagctcatgcactgtgtctgtagggcccaggggcttgactcaggctgggasaagagaaaggaagaggccccactgctgggagcagcagagccagagtcccggcacccctgcctccagtccattgcttttatgaaccatggtggtcagtcag

SEQ ID NO: 484784 - DNA, 201 bp, Homo sapiens
gggcagctgccacatagaggatccagctgtgttgcaggacccgaggcacaggggcccagaaaaagaggatgaaggtgagcagcaggtgcacccctgctccrgccaccaggggcaccgggcgtggcagccacaggcccagcaggcccaggagtgaggcggctgaggcgcccaggctgtaagccacgaggaggtaagccagcc

SEQ ID NO: 484785 - DNA, 201 bp, Homo sapiens
ggggtcctaagagccaggggggaagagggtctggctcttactccccgcatcgtggggggtgcctcacccccctgcgatgggggtcctaagagtcggggggraaagaggggttggctcttactccccgcatcgcgggggggtgccttacccccctgcgatgggggtcctaagagccagggtggggagaggggccccccgcga

SEQ ID NO: 484786 - DNA, 201 bp, Homo sapiens
cccgggtccgcggccgagagctgtggggatctggagcgggccgggtcgcaagaagaccctgaccgtgctccggcgctggggcgcgtgctaagggcccgcgkggtttcagctgtattttcgaacccctgtgcttggccgaggggttcccaaggctccactccgccttggagggggctgcggaagcccggaggtgacctgggc

SEQ ID NO: 484787 - DNA, 201 bp, Homo sapiens
agagcagtttggaggtttggaccactggggctgggtttggaccactggggctgggtgttccccgggaaaggggcatctttcccctgcttcccaccctattkccccaaggctcagtggacctcacatttccatgcacaccccctgcactgattgagctctgactgtttgcctggccccaagaaagatcccactggcagcctc

SEQ ID NO: 484788 - DNA, 201 bp, Homo sapiens
ggcggcccctcactgctcctccggcccgtctcccccctgcgcctgttcgtacgggcagggccggcggccgagtccagcgggctcggggccaggcctgggcmctgcgggcggcgcctcctcctccgcgccgtccccatgctcgccctccgcgtcgctctcgtccgagttgtcctcctccaagtagcggtaaccgcgcacctt

SEQ ID NO: 484789 - DNA, 201 bp, Homo sapiens
gtacatacacacatatctgtatgcatacttcctgctcttttcttttttccagacacggtcgctccgtttccccaccgcgccccctccctcccttcccccamccactgctggagcgcagtggcacgctcacttcagcctcaatcttccaggctcaagccatcctcccacttcagtctcccaagtagctggaactacaggcac

SEQ ID NO: 484790 - DNA, 201 bp, Homo sapiens
cggcccctcactgctcctccggcccgtctcccccctgcgcctgttcgtacgggcagggccggcggccgagtccagcgggctcggggccaggcctgggcccygcgggcggcgcctcctcctccgcgccgtccccatgctcgccctccgcgtcgctctcgtccgagttgtcctcctccaagtagcggtaaccgcgcaccttgt

SEQ ID NO: 484791 - DNA, 201 bp, Homo sapiens
tatctgtatgcatacttcctgctcttttcttttttccagacacggtcgctccgtttccccaccgcgccccctccctcccttcccccacccactgctggagygcagtggcacgctcacttcagcctcaatcttccaggctcaagccatcctcccacttcagtctcccaagtagctggaactacaggcacacgccactacgcc

SEQ ID NO: 484792 - DNA, 201 bp, Homo sapiens
atgcatacttcctgctcttttcttttttccagacacggtcgctccgtttccccaccgcgccccctccctcccttcccccacccactgctggagcgcagtgscacgctcacttcagcctcaatcttccaggctcaagccatcctcccacttcagtctcccaagtagctggaactacaggcacacgccactacgcccagctat

SEQ ID NO: 484793 - DNA, 201 bp, Homo sapiens
ctgttcgtacgggcagggccggcggccgagtccagcgggctcggggccaggcctgggccctgcgggcggcgcctcctcctccgcgccgtccccatgctcgycctccgcgtcgctctcgtccgagttgtcctcctccaagtagcggtaaccgcgcaccttgtgctggggccgcgggatgcggggctggcgcggggccacgcc

SEQ ID NO: 484794 - DNA, 201 bp, Homo sapiens
catacttcctgctcttttcttttttccagacacggtcgctccgtttccccaccgcgccccctccctcccttcccccacccactgctggagcgcagtggcaygctcacttcagcctcaatcttccaggctcaagccatcctcccacttcagtctcccaagtagctggaactacaggcacacgccactacgcccagctatttt

SEQ ID NO: 484795 - DNA, 201 bp, Homo sapiens
tccccaccgcgccccctccctcccttcccccacccactgctggagcgcagtggcacgctcacttcagcctcaatcttccaggctcaagccatcctcccacytcagtctcccaagtagctggaactacaggcacacgccactacgcccagctattttttaaattttttgtagagacagggtctcctatgttgcccaggctgg

SEQ ID NO: 484796 - DNA, 201 bp, Homo sapiens
gccaccatgcccagcccactcactgcttttcttttttttttttccttttttttttttttggaagacagagtctcgctctgtcctccaggctgaagtgcggkggcgcgatcttggctcactgcaacctccatctcccaggttcaagccattcttgtgcctcagcctccagagtagctgggatcacagggacgtgccaccatg

SEQ ID NO: 484797 - DNA, 201 bp, Homo sapiens
aagacagagtctcgctctgtcctccaggctgaagtgcggtggcgcgatcttggctcactgcaacctccatctcccaggttcaagccattcttgtgcctcarcctccagagtagctgggatcacagggacgtgccaccatgcccagctaatttttgtgtttttagtagagacagagtttcacagcctgttacccaggctggt

SEQ ID NO: 484798 - DNA, 201 bp, Homo sapiens
gctgggatcacagggacgtgccaccatgcccagctaatttttgtgtttttagtagagacagagtttcacagcctgttacccaggctggtctcgaactccaratctcagaacccccacctcagcgtctcaaaatgctgggattacaggcgtgagccactactgccagcccactccctgctatttttagttctatttttattt

SEQ ID NO: 484799 - DNA, 201 bp, Homo sapiens
gtggctcgtgcctgtaatcccagcactttaggaggtggaggtgggcagatcacctgaggtcagaagtttgagaccagcctggccaacatggtgaaaccccrtctttactaaaaatacaaaaaattagctgagcgtggtggcgggcgcctgtaatcccagctactcaggaggctgaggcaggaaaatcgcttgaacctggga

SEQ ID NO: 484800 - DNA, 201 bp, Homo sapiens
cggtcaggctggtctcaaactccctacctcaggcaatccactcgcctcggcctcccaaagtgctgggattacaggcgtgagccaccgcgcccggcctttakttctatttttaaaaaatgtttagcaactgggacttgctagaccgagccaccattttttgtgagcagagcatgaggagcctgctccccttcaggccatgaa

SEQ ID NO: 484801 - DNA, 201 bp, Homo sapiens
cttggccgaggggttcccaaggctccactccgccttggagggggctgcggaagcccggaggtgacctgggctctgggaggggcgtccccaacgtgggggargggagacaggggcctttgaagacagcgcgggactcggagggggtccccccgacctcagacgtggtaaactgaggccggcgaggagggaggctgagtccgg

SEQ ID NO: 484802 - DNA, 201 bp, Homo sapiens
agcctcatgcccgctctgcagcactcggccctagctccccaactcagatcgcgctcccaggcctacggcctgccccgaggccacaacccgacccaggccaygccatccgatccagaccctttctcgcagactcggtccccagaaccacactctgcttcactgactgtcctgcccccatcccgggccgcaccagcagcatgg

SEQ ID NO: 484803 - DNA, 201 bp, Homo sapiens
acccctgtgcttggccgaggggttcccaaggctccactccgccttggagggggctgcggaagcccggaggtgacctgggctctgggaggggcgtccccaaygtgggggaggggagacaggggcctttgaagacagcgcgggactcggagggggtccccccgacctcagacgtggtaaactgaggccggcgaggagggaggc

SEQ ID NO: 484804 - DNA, 201 bp, Homo sapiens
aaaaaaacctacaacactgagttttcatttcatgcctgtcttttcctctttaaatgctgacaagactagattttctaactcttgttcaaatagcaattgtttattttatattttatatatatttttgagacagggtctcactgtgtcacctagcctggagtacagtggcaggatcacagcttattgcagcctcgacctcct

SEQ ID NO: 484805 - DNA, 201 bp, Homo sapiens
cagcctccagcacacctcgctggccccggggcaccgagagggcagagccgggaccaccccaggatcccagcccccagcccgccgccgccagcccgcccccrctccccgctgcgcacctgcggtcccccaggagcggagacgaggcggccctttcctcactgtccccctgcaggacccgtcgcagcctccgctttgcaaaat

SEQ ID NO: 484806 - DNA, 201 bp, Homo sapiens
tctaaaaacagggcaccagaagtagttcagtaccttaggaatatttcttcctgggaatagatgaaatgttattgtagtttcagaagttcacctttccaaayagcgttttttcagaataacttcatcaaccaaatataacttatctcatgtgttccatatttcactgaagcattaaaaaatacttagtgcaatttctgaaaa

SEQ ID NO: 484807 - DNA, 201 bp, Homo sapiens
aaaaaaaacctacaacactgagttttcatttcatgcctgtcttttcctctttaaatgctgacaagactagattttctaactcttgttcaaatagcaattgtttattttatattttatatatatttttgagacagggtctcactgtgtcacctagcctggagtacagtggcaggatcacagcttattgcagcctcgacctcc

SEQ ID NO: 484808 - DNA, 201 bp, Homo sapiens
caaaaaaaacctacaacactgagttttcatttcatgcctgtcttttcctctttaaatgctgacaagactagattttctaactcttgttcaaatagcaattgtttattttatattttatatatatttttgagacagggtctcactgtgtcacctagcctggagtacagtggcaggatcacagcttattgcagcctcgacctc

SEQ ID NO: 484809 - DNA, 201 bp, Homo sapiens
aaaaaacctacaacactgagttttcatttcatgcctgtcttttcctctttaaatgctgacaagactagattttctaactcttgttcaaatagcaattgtttattttatattttatatatatttttgagacagggtctcactgtgtcacctagcctggagtacagtggcaggatcacagcttattgcagcctcgacctcctg

SEQ ID NO: 484810 - DNA, 201 bp, Homo sapiens
ttaaggcacaatggtgttaagttgataggccacattttcaccaagcaggcttagaaagacctactcgaaaaaaatatttgcggccgggtgcagtggttcaygcctgtaatcccagcactttgggaggccgaagtgggtggatcacctgaggtcgggagttcgagaccagcctggccaacatggtgaaaccctgactctact

SEQ ID NO: 484811 - DNA, 201 bp, Homo sapiens
agggaactgaggttgccacgctctgaagacaaagtgaccgcacccctaccctgttccatagtcagctcccgtcccggccccctccctgcgtatccgcaccyctgtcctgttccatagtcagctcccgtcctggccccctccctgcgtatccgcacccctaccctgttctatagtcagctcctgtcctggccccctccctgc

SEQ ID NO: 484812 - DNA, 201 bp, Homo sapiens
aaggcgttggccctgcagtaatccagagacgcctttgttgctctaatgactgacctcactcgagtcacccaggctccttgcatgtgactgattgtggttcygggaaaccggggattgaatctgtgtggtgttcgctggggaggttcaacacgtttatggcctagctgggctccttgtgtcgcctactggccggcggtgatg

SEQ ID NO: 484813 - DNA, 201 bp, Homo sapiens
tccttttttttttttttttttgactgtttcttaatcagtgccatgccaggaaaatagggatgtttccttcccagagatctgtgtgtcttttttcagaaacrtctgtgacaggcccatcaattttgaaatatttggtttttgagcctgtcactctaaaccagcgtttaacgttcaaaaggcaaataactgatgaccaggcgg

SEQ ID NO: 484814 - DNA, 201 bp, Homo sapiens
cccaagaggcccgttggtcctcccagctggaggtggtgcccaagatgagagtgggtccagaatccaccacaaaaattggactcttgcaagtaagaggggargaaactcagcgcagaaggctagcttgtgcctgaatggatcttccctttcagaggacgacacggagagagacatggggagcaaaggaggcagctgggcagc

SEQ ID NO: 484815 - DNA, 201 bp, Homo sapiens
cgcacccctgtcctgttccatagtcagctcccgtcctggccccctccctgcgtatccgcacccctaccctgttctatagtcagctcctgtcctggcccccyccctgcatatccactgattgcttcagatgtgaagggacagccaggccgggacaaaagggattcccacccagggtgcgcgcagcttctgtggccgaggtgg

SEQ ID NO: 484816 - DNA, 201 bp, Homo sapiens
tgactctactaaaaatacaaaaaattagccgggcgtggtggcgtgcgcctgtaatcccagctactcgggaggctgaggcaggagaatggcgtgaacccgaraggtagaggttgcagtgagccaagactgtgccattgtactccagcctgggtgacagagtgagactccgtctccgggggaaagaaaaaggaaaaaaaagaa

SEQ ID NO: 484817 - DNA, 201 bp, Homo sapiens
gttgcaggtcattggtttgggtgctgtcctggccttcgcctctccttcatatcttacccctttttccctttatcctcctaagacacaaacgccaaaaggcrttggccctgcagtaatccagagacgcctttgttgctctaatgactgacctcactcgagtcacccaggctccttgcatgtgactgattgtggttccgggaa

SEQ ID NO: 484818 - DNA, 201 bp, Homo sapiens
gggtaacccgctgttcttggtttctgtgaatgggcctgaggggccaggccggccgctctcagagtcagagcgggcgtggggatggagggacagaggggagrccccggcaggagtccaggcccgggcagggctagtgaggtctcactggaggtgtgcccttcttgtggcctctcactccctgggatgggtgagtcagacaga

SEQ ID NO: 484819 - DNA, 201 bp, Homo sapiens
tgactgattgtggttccgggaaaccggggattgaatctgtgtggtgttcgctggggaggttcaacacgtttatggcctagctgggctccttgtgtcgcctrctggccggcggtgatggaggccgggcttctggaccctccgccctcccttggcactggtttcctctcccgcaccttggtagtctttcccttgttttcatca

SEQ ID NO: 484820 - DNA, 201 bp, Homo sapiens
gttccgggaaaccggggattgaatctgtgtggtgttcgctggggaggttcaacacgtttatggcctagctgggctccttgtgtcgcctactggccggcggwgatggaggccgggcttctggaccctccgccctcccttggcactggtttcctctcccgcaccttggtagtctttcccttgttttcatcagtttctggggtc

SEQ ID NO: 484821 - DNA, 201 bp, Homo sapiens
ttttcagtcctctatcttaagaataacctacacaaagggacgagagactcctgggaagagacggcccagccctccctgttagagcattactcctgtcactkacctcaagcccttgtcctcctgtcccctcgcggggagtgagggatggcccagtgagccgaggggctgcgtcgccattgctcgggtgtggccacgtactgt

SEQ ID NO: 484822 - DNA, 201 bp, Homo sapiens
agagataagaaagcaagtgtgctatacatcgaaggacacatgaacccgaaaatgaaagggtaacccgctgttcttggtttctgtgaatgggcctgaggggscaggccggccgctctcagagtcagagcgggcgtggggatggagggacagaggggaggccccggcaggagtccaggcccgggcagggctagtgaggtctca

SEQ ID NO: 484823 - DNA, 201 bp, Homo sapiens
gaggggaggccccggcaggagtccaggcccgggcagggctagtgaggtctcactggaggtgtgcccttcttgtggcctctcactccctgggatgggtgagycagacagaggctgggtgtgaagggtctggtcaaacaccccagttttcacaacttgatttgctggctttgaaaggcagcccaaccagacactcactggggc

SEQ ID NO: 484824 - DNA, 201 bp, Homo sapiens
gaggggtgggaggtgtggagtggagacccaggccccgaggtcggcctgtcctggcggggcccagtcagtgttgctgaagtcactggacccaccatggtgcrttgggagcttcttggcagctggggaaacggtcaccttccataaataagctggggctggtggggcctccagcggcctccactgatcttaatcagagacagg

SEQ ID NO: 484825 - DNA, 201 bp, Homo sapiens
aaagcagcctttagaaccatcgcattgcatatccccaagtcgaacgcgcagaaccggtgtcatctggtacttctgtgctgcccccgaggggtgggaggtgkggagtggagacccaggccccgaggtcggcctgtcctggcggggcccagtcagtgttgctgaagtcactggacccaccatggtgcgttgggagcttcttgg

SEQ ID NO: 484826 - DNA, 201 bp, Homo sapiens
tttaaagcactttgattgtaaagagaaacagacgcttctggtaggtggatgatgttttgtgcttgctttaaatggtttactttgtgattagtaaatatgtyctctgtgtgtagctcttgaaatccatggctgcggtgtacgcgtgtgaatgattgtgggaagtagcagagccaggctgcgctctggccgttagagttagat

SEQ ID NO: 484827 - DNA, 201 bp, Homo sapiens
tggagacccaggccccgaggtcggcctgtcctggcggggcccagtcagtgttgctgaagtcactggacccaccatggtgcgttgggagcttcttggcagcyggggaaacggtcaccttccataaataagctggggctggtggggcctccagcggcctccactgatcttaatcagagacagggaaaggtttttagcttatta

SEQ ID NO: 484828 - DNA, 201 bp, Homo sapiens
ccaagggcgcggagagccacctgcgggccatcctaaagagcaggaagccatctcgctggctgcagaccttcctgagctccagccagtacgtgacctgtgtrgagacctacctggaggatgaggggcagctggacctggtggtgaagtacctgcagggcgtctaccaggaggtgggggccaaggtgctccagcgcaccaacg

SEQ ID NO: 484829 - DNA, 201 bp, Homo sapiens
ttcatgttaacttttccctctctctgcttcaagtttcacagtgtctcttaaaagtttaaagcactttgattgtaaagagaaacagacgcttctggtaggtrgatgatgttttgtgcttgctttaaatggtttactttgtgattagtaaatatgtcctctgtgtgtagctcttgaaatccatggctgcggtgtacgcgtgtg

SEQ ID NO: 484830 - DNA, 201 bp, Homo sapiens
cccagccgcccctcgtggcacccctcccatcccaagggtgcgtttgtcgcagctgggaacccagtgcagcaccccactcagctgctggtttcactgtctcrtcattggtggttagactcaagtagtgtggggtatgtgaatctgcctttcagattctcctgatcttttaagcgaatgacacaaagtcaggttttaacaata

SEQ ID NO: 484831 - DNA, 201 bp, Homo sapiens
cgtgggctcagtcactgcgctgaattctcacaactgtcctgggaagttgcggccccatttccccgctttacgggtaaggaagctggggctccggcgaggasagtttacccagggccaccaggcaaggctacagcagagagcctctgcgcaaggccaccgccttccctggccgactgtctcagtccaccccatgtcacggtg

SEQ ID NO: 484832 - DNA, 201 bp, Homo sapiens
gatccgctttcttaaacctttccagaatttgcccctagaaccactcctattcttgacgcccagaatggtcagtggtgagcatcaaggtcatctcgtacccycgtggcctccagtacacaagacgaggaaggactttgctgccataaggggggaggtcctcctttttcctttcctcttcctatagtaagatttgctgtggta

SEQ ID NO: 484833 - DNA, 201 bp, Homo sapiens
cacctcccggtttcaagcgattctcctacctcagcctcctaagtagctgggattacagacatgcgccaccacgcccggctgtttgtttttttttttgtttktttttttttttttttggtattttttgtagagacagggtttcaccgtgttagccaggatggtcctgatctcctgaccttgtgatccgcctgcctcggcctc

SEQ ID NO: 484834 - DNA, 201 bp, Homo sapiens
gcgcttgaccctgtgcggagacggagccgcttacttgacccctgtgcagagatggagctgcttagaagctgtcagcaccagggggtgcgaactccctcccyactgcgggcgcacagatgcttcccagcctcggtgggtcagtcctgggaaacccactgcgagttggaaattcccaagtcagaatcgcatttagtacccaga

SEQ ID NO: 484835 - DNA, 201 bp, Homo sapiens
gcaccacctcccggtttcaagcgattctcctacctcagcctcctaagtagctgggattacagacatgcgccaccacgcccggctgtttgtttttttttttktttgtttttttttttttttggtattttttgtagagacagggtttcaccgtgttagccaggatggtcctgatctcctgaccttgtgatccgcctgcctcgg

SEQ ID NO: 484836 - DNA, 201 bp, Homo sapiens
ggctgcagggcccagtgaggggggaaaggccgggggtcccagcagaggaagtgtctttaggagcgtgaatgctccactcccgtgctaacacggagctcgakcgctagggtctgcccccatccctgccatgtcgcagcctcccatcggccctgacccacagccacccgaggaaggcagcccacgcgctggtcccacgacagg

SEQ ID NO: 484837 - DNA, 201 bp, Homo sapiens
atctctacagaaaaatagaaaaaaatgagctgggcgtgtggcttgcgtgcctgcagccccagctactcgggaggcagaggtgggagaatggcttgagcccragagttcaaggctgtggtgacctatgtgattgcaccgctgcactccagcctgggtgacagagcaagacctggtctcaaaaagagaacgtgtcacgaacac

SEQ ID NO: 484838 - DNA, 201 bp, Homo sapiens
aagggattcccacccagggtgcgcgcagcttctgtggccgaggtggctgctgcttacggcccgccttcccttcaccgcaggcctctctccctccctccttscctccttccctccttccctcttgcgtttttctttaaaatgtagtttattagaagcgcactctgtttgaatttggcagtgtggagttgtgtatagcatgga

SEQ ID NO: 484839 - DNA, 201 bp, Homo sapiens
ctgacccacagccacccgaggaaggcagcccacgcgctggtcccacgacaggtgcttcttttgcaggctatcctgtccgaaaatccatccagcaggacgtsttggggaccaagcttcctcaactgagcaaggggagccccgaggagcccgtggtggggtgccccctggggcagaggcagccctgccggaaaatgctccccg

SEQ ID NO: 484840 - DNA, 201 bp, Homo sapiens
tacatctgtgggaaaaaaacatactcaaaactatttaactttataactatgggaattttcaaatagacccaaaaagaaaatagcataatgaactctaatgygcccataacctgcctggaattattttttggagcataaaaaccctcaagcttttttttttttttttttttgagttggagtctcgctctgtcacccaggttg

SEQ ID NO: 484841 - DNA, 201 bp, Homo sapiens
tgacctcgtgatccgcccacctcagcctcccaaagtgctgggattacaggcgtgagccaccactcccggccacagtttttttttaagcccataaatacttyagtgtgtgtctctaaaaggagggtgattctgccccctgggggacactggcagtgtctggggacatctgtgcttgtcacagctaagggtgcttctggcatg

SEQ ID NO: 484842 - DNA, 201 bp, Homo sapiens
tgctctgaaccgaatggactctgttaaaaatgtgtttaccataatcacaaaagtaaaaaatagggatgatttcttaatgtcaggtatgtattgtgtattcrggatactcttttttttttataacaataaacttaaggccgggtgtggtggctcgcatcggtaattccagcactttgggaggccgaggcaggtggatcatga

SEQ ID NO: 484843 - DNA, 201 bp, Homo sapiens
ggaccaaatatctgaaatcccatggttataggccttcaggattacctgctgcatttgtgctaaagtttgccactgtttctcactgtcagctgttgtaatamcaaggattttcttttgttttaaatgtaggttttggcccgaaccgcgacttcaacaaaaaataagagaagaaaggaatattttctagctgtgcaaatcctc

SEQ ID NO: 484844 - DNA, 201 bp, Homo sapiens
taggtatgaaactagccgtcagaatgagacaagcgagcttctaaagcgatgccgtgaccgcagtgcctgtgcagtgaacgtaaccggcattgtgtatgttyggtccttgcagcctcacagaatgaggttcctgcggcacccctggaagaactggcctacagacggtcgcttcgcgtggctctggacgttctgagcgagggc

SEQ ID NO: 484845 - DNA, 201 bp, Homo sapiens
aactgtgttttctcaggctgttacacctggtgcttgatatggatttgacttgtctattcttttttttttgtttttcttttttctttaattctagaaccacrttcgtttgaagtaggaatgctagtctggcataaacataaaaaataccccttctggccagcagtggtaagaacagcttcctccgtcttctcagatgtagtt

SEQ ID NO: 484846 - DNA, 201 bp, Homo sapiens
aggacacatgaacccgaaaatgaaagggtaacccgctgttcttggtttctgtgaatgggcctgaggggccaggccggccgctctcagagtcagagcgggcrtggggatggagggacagaggggaggccccggcaggagtccaggcccgggcagggctagtgaggtctcactggaggtgtgcccttcttgtggcctctcact

SEQ ID NO: 484847 - DNA, 201 bp, Homo sapiens
agaagggctgccgtttatatcaaaaaccctgggttctgagagcacagggtgcccgcttcttcttcctaagagtgcgctcacatctgcttgtgagtcaggtrtgtggtggtcccgaagcccacttgattcagtggtagtcaccgtggcttctgagggatgatattggggaagccgtgctttaggaaagtgcgggggctgctg

SEQ ID NO: 484848 - DNA, 201 bp, Homo sapiens
cagccaaccttttctgtcttaaaaggaaaaaaaaaaaaaaaccattcaccagggttcttgctgcctgtaacctcaggcagatgaattcctagttggctgtracttttggtttaagtggaaggttgaggaggaaaatgaaaataattcttttgttatctaaaggaaaacatgtttgaaaatgtcttggcggcgttggctggt

SEQ ID NO: 484849 - DNA, 201 bp, Homo sapiens
agcaccacctcccggtttcaagcgattctcctacctcagcctcctaagtagctgggattacagacatgcgccaccacgcccggctgtttgttttttttttkgtttgtttttttttttttttggtattttttgtagagacagggtttcaccgtgttagccaggatggtcctgatctcctgaccttgtgatccgcctgcctcg

SEQ ID NO: 484850 - DNA, 201 bp, Homo sapiens
gagggctcgatttggagtcaagaaagctctgcagggacaggtagagctgaccggtctctgcgagggaagcccatggagcatgtctcctcgccctgtgattygaactcctcatctcttccccgcggagacgtgttgggcagttccagacctcacaggaggaggccatgtgtgcaacaaagcctgtcaagttcgttcacttgt

SEQ ID NO: 484851 - DNA, 201 bp, Homo sapiens
ttgtgtttgggtcttctccgcgtgccattacctcacctctgttttgtgccacacactctttaaaagtgtcttcccgcggggtttagagttaggaaagtcgygcacacataggacagagccccagccgcccctcgtggcacccctcccatcccaagggtgcgtttgtcgcagctgggaacccagtgcagcaccccactcagc

SEQ ID NO: 484852 - DNA, 201 bp, Homo sapiens
ctgtcatactcttttttttttttttttttttagagacagaatttagctctgtcgcccaggctggagtacaatggcatgatcttggctcactgcaagcaccmcctcccggtttcaagcgattctcctacctcagcctcctaagtagctgggattacagacatgcgccaccacgcccggctgtttgtttttttttttgtttgt

SEQ ID NO: 484853 - DNA, 201 bp, Homo sapiens
tgcccgcacgctggggtctgtcttgtctggagcagtggggcacaccccggaggaggcgggggtcagggctgtcggccttggccccctgctggtcgctgttkcggggactcggggcggccagtaccaccgcctgaggcggggctcagcagcgttgcatgtacgggcctcgtactgcctcatggaaaatcctccggagccgcc

SEQ ID NO: 484854 - DNA, 201 bp, Homo sapiens
ctatcctgtccgaaaatccatccagcaggacgtcttggggaccaagcttcctcaactgagcaaggggagccccgaggagcccgtggtggggtgccccctgrggcagaggcagccctgccggaaaatgctccccgaccgctcgcgggccgcccgggaccgggccaaccagaagctggtggagtacattgtgaaggccaaggg

SEQ ID NO: 484855 - DNA, 201 bp, Homo sapiens
caggcgtgagccaaagtgcctggactctctgtcatactcttttttttttttttttttttagagacagaatttagctctgtcgcccaggctggagtacaatkgcatgatcttggctcactgcaagcaccacctcccggtttcaagcgattctcctacctcagcctcctaagtagctgggattacagacatgcgccaccacgc

SEQ ID NO: 484856 - DNA, 201 bp, Homo sapiens
tataaagtatgtatactttatattatatataaaatatataattttatatatcatatgtatatgtagacatacacacacacacatatgtatttatttatttwtttttttttgagacagagtcttgctctgtcacccaggctggagtgcagtggcacagtctcggcccactgcaacccccccaccgtgccttggttcaagcga

SEQ ID NO: 484857 - DNA, 201 bp, Homo sapiens
gtgatttcatcacgccggggacatgctcaaaataacaagccagtgagcagcatcgcacttgatctttggcctcagtggagccttgggtcacacactgggcrtcctgggacccagtctcccccccgcacggcgtttcccaggccctcttgttcttttagagttgcaccatgagcctctctgcactcttcccaaggctgtcct

SEQ ID NO: 484858 - DNA, 201 bp, Homo sapiens
tgctgcatttgtgctaaagtttgccactgtttctcactgtcagctgttgtaataacaaggattttcttttgttttaaatgtaggttttggcccgaaccgcracttcaacaaaaaataagagaagaaaggaatattttctagctgtgcaaatcctctccctagaggaaaagttaagtgttgtgttgttttaatactgttttt

SEQ ID NO: 484859 - DNA, 201 bp, Homo sapiens
tgtctcctcgccctgtgattcgaactcctcatctcttccccgcggagacgtgttgggcagttccagacctcacaggaggaggccatgtgtgcaacaaagcytgtcaagttcgttcacttgtgaaaaggaccccgagtgcaaagtggaccacaagaaggggctcaggaaaagtgaaaacccaagaggcccgttggtcctccc

SEQ ID NO: 484860 - DNA, 201 bp, Homo sapiens
catgctcaaaataacaagccagtgagcagcatcgcacttgatctttggcctcagtggagccttgggtcacacactgggcgtcctgggacccagtctccccsccgcacggcgtttcccaggccctcttgttcttttagagttgcaccatgagcctctctgcactcttcccaaggctgtcctcctcaggtctgcctttctctg

SEQ ID NO: 484861 - DNA, 201 bp, Homo sapiens
gagattgtgctactgcattccagcctggtgacagagcgagactccgtttcaaaaaaaaaaaaaaatattacacatcctgtaaaagttaccatcctaacctycttaagtgtatggttcgatggcggtgagcactttcacagtgctatgcagccggtactgctgctcatctccgaacttcatctttccaaactacagctctgt

SEQ ID NO: 484862 - DNA, 201 bp, Homo sapiens
aaaatgtaggtgagaaatgttagtcctccccttcagtgatttaggtatgaaactagccgtcagaatgagacaagcgagcttctaaagcgatgccgtgaccrcagtgcctgtgcagtgaacgtaaccggcattgtgtatgttcggtccttgcagcctcacagaatgaggttcctgcggcacccctggaagaactggcctaca

SEQ ID NO: 484863 - DNA, 201 bp, Homo sapiens
cccgccacgacgcccggctaattttttgtatttttagtagagacggggtttcaccatgttggccaggatgatcttgatctcctgacctcgtgatccgcccmcctcagcctcccaaagtgctgggattacaggcgtgagccaccactcccggccacagtttttttttaagcccataaatacttcagtgtgtgtctctaaaag

SEQ ID NO: 484864 - DNA, 201 bp, Homo sapiens
tagagttgcaccatgagcctctctgcactcttcccaaggctgtcctcctcaggtctgcctttctctggtgctgcggccggtgtgctctcccctatttccakgtctgctggggcgcacatcagagccagcagccgttgttgatctcttttgatccagggcagccctattgctgagaggggttgctagctaagcaattgttat

SEQ ID NO: 484865 - DNA, 201 bp, Homo sapiens
ttctgtgctgcccccgaggggtgggaggtgtggagtggagacccaggccccgaggtcggcctgtcctggcggggcccagtcagtgttgctgaagtcactgkacccaccatggtgcgttgggagcttcttggcagctggggaaacggtcaccttccataaataagctggggctggtggggcctccagcggcctccactgatc

SEQ ID NO: 484866 - DNA, 201 bp, Homo sapiens
cctggaattattttttggagcataaaaaccctcaagcttttttttttttttttttttgagttggagtctcgctctgtcacccaggttggagtgcagtggcrcaatctcggctcactgcaagctctgcctcccaggttcacgccattctcttgtagccttccaagtagctgggactacaggcgcccgccacgacgcccggct

SEQ ID NO: 484867 - DNA, 201 bp, Homo sapiens
gctactcgggaggctgaggcaggagaatggcgtgaacccgagaggtagaggttgcagtgagccaagactgtgccattgtactccagcctgggtgacagagygagactccgtctccgggggaaagaaaaaggaaaaaaaagaattgtgatttgctcattttaaatattgtgcatttcaccccatgagagctcattaatttgg

SEQ ID NO: 484868 - DNA, 201 bp, Homo sapiens
gccacattttcaccaagcaggcttagaaagacctactcgaaaaaaatatttgcggccgggtgcagtggttcatgcctgtaatcccagcactttgggaggcygaagtgggtggatcacctgaggtcgggagttcgagaccagcctggccaacatggtgaaaccctgactctactaaaaatacaaaaaattagccgggcgtgg

SEQ ID NO: 484869 - DNA, 201 bp, Homo sapiens
gattccgctcagatgggaaaacgttcaagtgatgcgtgtggcagagcatggggccgtttctcagcgcctccttgcgggagacttcgctggggtcacccccwgagctggggtcagcgcctgttagatgtatcatgtgatgtcacaaaaaaatatttaaaatccacgatctcttttgttttgacgttttattttcttggattt

SEQ ID NO: 484870 - DNA, 201 bp, Homo sapiens
gggttaacaggtcactgatgtgacaggttcctggggcataagagcaggcagcctccctgagagcgcagggcggaagggccatcggaggcgctggtcgccastgctcctcactgccttctcacggtggccccgggaggccaggactggggaggctgtggggaggtggcagcgccctgtagtccctgcccctccccgtgtggc

SEQ ID NO: 484871 - DNA, 201 bp, Homo sapiens
ctgctgggttaacaggtcactgatgtgacaggttcctggggcataagagcaggcagcctccctgagagcgcagggcggaagggccatcggaggcgctggtygccagtgctcctcactgccttctcacggtggccccgggaggccaggactggggaggctgtggggaggtggcagcgccctgtagtccctgcccctccccgt

SEQ ID NO: 484872 - DNA, 201 bp, Homo sapiens
ttgggagcttcttggcagctggggaaacggtcaccttccataaataagctggggctggtggggcctccagcggcctccactgatcttaatcagagacaggraaaggtttttagcttattagaggaagttcattcatgttaacttttccctctctctgcttcaagtttcacagtgtctcttaaaagtttaaagcactttgat

SEQ ID NO: 484873 - DNA, 201 bp, Homo sapiens
tccagtgtgcatgagcgtgtctgaagatggggggctcagggggcacgtttgcgtttggacctgtctgtgcgttctcctgcgtggcagtcctgatttccatrcttctggagaatccatttcgttaacactgaaagccagttctcttttcctggcagtttttttcattttatttttggcattttttacaagataccgttcggg

SEQ ID NO: 484874 - DNA, 201 bp, Homo sapiens
ttgctctcccactcagtgtgctctgcagctgtgaggaaacagccttcgttagaggcgggagcagagacgagccgctgctctgtgtcgtgtttgctgtggcygcagggagaggagcaggacacgcacctttccaggggcctctgtgtcccgcactgtgtgtgagtggaccgcagcgcgcagccacatgccctggctgccatg

SEQ ID NO: 484875 - DNA, 201 bp, Homo sapiens
aggattttcttttgttttaaatgtaggttttggcccgaaccgcgacttcaacaaaaaataagagaagaaaggaatattttctagctgtgcaaatcctctcyctagaggaaaagttaagtgttgtgttgttttaatactgttttttcccgtgtagatttctgatacttcaatcccctactcccccaaaacagttgaagccca

SEQ ID NO: 484876 - DNA, 201 bp, Homo sapiens
cccaaacctgccagccttccttctcaaagtggaactgtttatcccatttgcaaataattgtttctcttgtgaaaagatggaccggaattccttccaatgaygtttataaaatcaggtctattttcctgtgtcttccgaaaaacagctcttgtttaaagcaggatccatctctgcataacttaggccgggctgaccatcatc

SEQ ID NO: 484877 - DNA, 201 bp, Homo sapiens
gtgtgctctgcagctgtgaggaaacagccttcgttagaggcgggagcagagacgagccgctgctctgtgtcgtgtttgctgtggccgcagggagaggagcrggacacgcacctttccaggggcctctgtgtcccgcactgtgtgtgagtggaccgcagcgcgcagccacatgccctggctgccatgggccagaccgcctcc

SEQ ID NO: 484878 - DNA, 201 bp, Homo sapiens
caggccccgaggtcggcctgtcctggcggggcccagtcagtgttgctgaagtcactggacccaccatggtgcgttgggagcttcttggcagctggggaaayggtcaccttccataaataagctggggctggtggggcctccagcggcctccactgatcttaatcagagacagggaaaggtttttagcttattagaggaagt

SEQ ID NO: 484879 - DNA, 201 bp, Homo sapiens
cctgctcagagcctggagaatgccctgcgaaaaagaggccgcgcctggatggcagccaaaggccgcctgccgtgcagctggagcccatggcagcaggggcygcaccatcccccgggccggggccagggcccagagagtctgtgaccccgcgcagcaccgccaggctgggcccgcctccctcccacgcctctgcggatgcaa

SEQ ID NO: 484880 - DNA, 201 bp, Homo sapiens
agagcgggcgtggggatggagggacagaggggaggccccggcaggagtccaggcccgggcagggctagtgaggtctcactggaggtgtgcccttcttgtgrcctctcactccctgggatgggtgagtcagacagaggctgggtgtgaagggtctggtcaaacaccccagttttcacaacttgatttgctggctttgaaagg

SEQ ID NO: 484881 - DNA, 201 bp, Homo sapiens
aaaaaaaaaaaaatattacacatcctgtaaaagttaccatcctaaccttcttaagtgtatggttcgatggcggtgagcactttcacagtgctatgcagcckgtactgctgctcatctccgaacttcatctttccaaactacagctctgtccccatcaaacaactgccctctcatatatatataatatatattatatatata

SEQ ID NO: 484882 - DNA, 201 bp, Homo sapiens
tcgaacgcgcagaaccggtgtcatctggtacttctgtgctgcccccgaggggtgggaggtgtggagtggagacccaggccccgaggtcggcctgtcctggyggggcccagtcagtgttgctgaagtcactggacccaccatggtgcgttgggagcttcttggcagctggggaaacggtcaccttccataaataagctgggg

SEQ ID NO: 484883 - DNA, 201 bp, Homo sapiens
tgctcacgcccataatcccagcactttgggaggccgaggcaggtggatcacgaggtcaggagttcgagaccatcctggccaccatggtgaaaccccatctytactttaaaaaaaaaaaaaaaccaagcatggtggcacgcgcctatagtcagtcccagctactcagcaggctgaggcaggggaatcgcttgaacccgggag

SEQ ID NO: 484884 - DNA, 201 bp, Homo sapiens
tgtctcagcgaccattcagccgtgggcaggaacgcatgttgcttagaaaagccaaatccagcccttgtctctgcctcctctggtctcatgatgtgcatctrttaccttgaaactggaaaccagtctatcaatgtctgtgccaattttttattccctccccaacctccttccccatacgactttttatttatgtaggatgtg

SEQ ID NO: 484885 - DNA, 201 bp, Homo sapiens
cttttttagaaagaggggtttggggcaggcagaggagagaagggagagcaaactgagagccaagtttccagacaatcttgcaggaggagaggatgcagctscccagagggaagcaggatcacatttaaggaagtgtgtggggtccctggatgacaccagcacccagtgcggctctgtcgggcaaccgctcccaaggtggga

SEQ ID NO: 484886 - DNA, 201 bp, Homo sapiens
ttagaaaagccaaatccagcccttgtctctgcctcctctggtctcatgatgtgcatctgttaccttgaaactggaaaccagtctatcaatgtctgtgccarttttttattccctccccaacctccttccccatacgactttttatttatgtaggatgtgtgctgtctaatgatgggatgaccacacttttccatgttctaa

SEQ ID NO: 484887 - DNA, 201 bp, Homo sapiens
cctctggtctcatgatgtgcatctgttaccttgaaactggaaaccagtctatcaatgtctgtgccaattttttattccctccccaacctccttccccatasgactttttatttatgtaggatgtgtgctgtctaatgatgggatgaccacacttttccatgttctaaaagtgctcctctcccgcagggtcccagggctggt

SEQ ID NO: 484888 - DNA, 201 bp, Homo sapiens
aatgatgggatgaccacacttttccatgttctaaaagtgctcctctcccgcagggtcccagggctggtggttgctttgggtctacagctacgtcttacccrcctcctgcctcaaaagcctgtgtggtggcaaagccggtgtggggctggggaacgcagcgttctccaggagggggacccggctctccttctgcaatgcagg

SEQ ID NO: 484889 - DNA, 201 bp, Homo sapiens
ttacccacctcctgcctcaaaagcctgtgtggtggcaaagccggtgtggggctggggaacgcagcgttctccaggagggggacccggctctccttctgcartgcaggcgaaggcctagatgccagtgtgacctcccacaaggcgtggcttccagactccccggctggaagtgatgcttttttgcctcgggccctgggtttg

SEQ ID NO: 484890 - DNA, 201 bp, Homo sapiens
acaggatacgtggagggttaggaaggggccaggcctagagatgggagactccctcctggagcaggtggaggcacaggaccattcgctaccccatctgccgrcacctgcggggaagcccaggcattctttgtaagccctcctgaccacctggctcaaagaaaacagaagcatggaggccgccaagtgttttcaagaaataac

SEQ ID NO: 484891 - DNA, 201 bp, Homo sapiens
cgttctccaggagggggacccggctctccttctgcaatgcaggcgaaggcctagatgccagtgtgacctcccacaaggcgtggcttccagactccccggcyggaagtgatgcttttttgcctcgggccctgggtttgaagcagcctggctttctcttggtaagtggctggtgtcttagcagctgcaatctgagctcagcca

SEQ ID NO: 484892 - DNA, 201 bp, Homo sapiens
ggagaggatgcagctgcccagagggaagcaggatcacatttaaggaagtgtgtggggtccctggatgacaccagcacccagtgcggctctgtcgggcaacygctcccaaggtgggaggagtgggtgtcccctgtgtgtcagtgggcaactcctgctgaacccgcagctcactagggagcctgacagtggggccatgcacct

SEQ ID NO: 484893 - DNA, 201 bp, Homo sapiens
ggctctccttctgcaatgcaggcgaaggcctagatgccagtgtgacctcccacaaggcgtggcttccagactccccggctggaagtgatgcttttttgcckcgggccctgggtttgaagcagcctggctttctcttggtaagtggctggtgtcttagcagctgcaatctgagctcagccacctacacaccaccgtggccga

SEQ ID NO: 484894 - DNA, 201 bp, Homo sapiens
gctctccttctgcaatgcaggcgaaggcctagatgccagtgtgacctcccacaaggcgtggcttccagactccccggctggaagtgatgcttttttgcctygggccctgggtttgaagcagcctggctttctcttggtaagtggctggtgtcttagcagctgcaatctgagctcagccacctacacaccaccgtggccgac

SEQ ID NO: 484895 - DNA, 201 bp, Homo sapiens
cacacttttccatgttctaaaagtgctcctctcccgcagggtcccagggctggtggttgctttgggtctacagctacgtcttacccacctcctgcctcaamagcctgtgtggtggcaaagccggtgtggggctggggaacgcagcgttctccaggagggggacccggctctccttctgcaatgcaggcgaaggcctagatg

SEQ ID NO: 484896 - DNA, 201 bp, Homo sapiens
gatgtgcatctgttaccttgaaactggaaaccagtctatcaatgtctgtgccaattttttattccctccccaacctccttccccatacgactttttatttmtgtaggatgtgtgctgtctaatgatgggatgaccacacttttccatgttctaaaagtgctcctctcccgcagggtcccagggctggtggttgctttgggt

SEQ ID NO: 484897 - DNA, 201 bp, Homo sapiens
ggcgaggacagaacaggagcctctgctctctgtacctatctgggcccggtgggctcccctgtcctggcttccatctgtctcagcgaccattcagccgtggrcaggaacgcatgttgcttagaaaagccaaatccagcccttgtctctgcctcctctggtctcatgatgtgcatctgttaccttgaaactggaaaccagtct

SEQ ID NO: 484898 - DNA, 201 bp, Homo sapiens
gctgaacccgcagctcactagggagcctgacagtggggccatgcacctgacactcctctctgcttgtggacctggcaaggcagggagcagaaaacagagcyacttgaaggctttctgtctgcgtctgtgtgcagtgtggatttagttgtgcttttttcttgctgggagagcacggccaccatttacaagcagtgtcaccct

SEQ ID NO: 484899 - DNA, 201 bp, Homo sapiens
ggatgacaccagcacccagtgcggctctgtcgggcaaccgctcccaaggtgggaggagtgggtgtcccctgtgtgtcagtgggcaactcctgctgaacccrcagctcactagggagcctgacagtggggccatgcacctgacactcctctctgcttgtggacctggcaaggcagggagcagaaaacagagccacttgaagg

SEQ ID NO: 484900 - DNA, 201 bp, Homo sapiens
ccctggatgacaccagcacccagtgcggctctgtcgggcaaccgctcccaaggtgggaggagtgggtgtcccctgtgtgtcagtgggcaactcctgctgarcccgcagctcactagggagcctgacagtggggccatgcacctgacactcctctctgcttgtggacctggcaaggcagggagcagaaaacagagccacttg

SEQ ID NO: 484901 - DNA, 201 bp, Homo sapiens
ccaacctccttccccatacgactttttatttatgtaggatgtgtgctgtctaatgatgggatgaccacacttttccatgttctaaaagtgctcctctcccrcagggtcccagggctggtggttgctttgggtctacagctacgtcttacccacctcctgcctcaaaagcctgtgtggtggcaaagccggtgtggggctggg

SEQ ID NO: 484902 - DNA, 201 bp, Homo sapiens
ttccctccccaacctccttccccatacgactttttatttatgtaggatgtgtgctgtctaatgatgggatgaccacacttttccatgttctaaaagtgctyctctcccgcagggtcccagggctggtggttgctttgggtctacagctacgtcttacccacctcctgcctcaaaagcctgtgtggtggcaaagccggtgtg

SEQ ID NO: 484903 - DNA, 201 bp, Homo sapiens
ctctgtcgggcaaccgctcccaaggtgggaggagtgggtgtcccctgtgtgtcagtgggcaactcctgctgaacccgcagctcactagggagcctgacagyggggccatgcacctgacactcctctctgcttgtggacctggcaaggcagggagcagaaaacagagccacttgaaggctttctgtctgcgtctgtgtgcag

SEQ ID NO: 484904 - DNA, 201 bp, Homo sapiens
tcaatgtctgtgccaattttttattccctccccaacctccttccccatacgactttttatttatgtaggatgtgtgctgtctaatgatgggatgaccacayttttccatgttctaaaagtgctcctctcccgcagggtcccagggctggtggttgctttgggtctacagctacgtcttacccacctcctgcctcaaaagcc

SEQ ID NO: 484905 - DNA, 201 bp, Homo sapiens
cagaacaggagcctctgctctctgtacctatctgggcccggtgggctcccctgtcctggcttccatctgtctcagcgaccattcagccgtgggcaggaacrcatgttgcttagaaaagccaaatccagcccttgtctctgcctcctctggtctcatgatgtgcatctgttaccttgaaactggaaaccagtctatcaatgt

SEQ ID NO: 484906 - DNA, 201 bp, Homo sapiens
cccaacctccttccccatacgactttttatttatgtaggatgtgtgctgtctaatgatgggatgaccacacttttccatgttctaaaagtgctcctctccygcagggtcccagggctggtggttgctttgggtctacagctacgtcttacccacctcctgcctcaaaagcctgtgtggtggcaaagccggtgtggggctgg

SEQ ID NO: 484907 - DNA, 201 bp, Homo sapiens
ccaattttttattccctccccaacctccttccccatacgactttttatttatgtaggatgtgtgctgtctaatgatgggatgaccacacttttccatgttstaaaagtgctcctctcccgcagggtcccagggctggtggttgctttgggtctacagctacgtcttacccacctcctgcctcaaaagcctgtgtggtggca

SEQ ID NO: 484908 - DNA, 201 bp, Homo sapiens
gtgtgtggggtccctggatgacaccagcacccagtgcggctctgtcgggcaaccgctcccaaggtgggaggagtgggtgtcccctgtgtgtcagtgggcarctcctgctgaacccgcagctcactagggagcctgacagtggggccatgcacctgacactcctctctgcttgtggacctggcaaggcagggagcagaaaac

SEQ ID NO: 484909 - DNA, 201 bp, Homo sapiens
aaccgctcccaaggtgggaggagtgggtgtcccctgtgtgtcagtgggcaactcctgctgaacccgcagctcactagggagcctgacagtggggccatgcrcctgacactcctctctgcttgtggacctggcaaggcagggagcagaaaacagagccacttgaaggctttctgtctgcgtctgtgtgcagtgtggatttag

SEQ ID NO: 484910 - DNA, 201 bp, Homo sapiens
gggtggcgaggacagaacaggagcctctgctctctgtacctatctgggcccggtgggctcccctgtcctggcttccatctgtctcagcgaccattcagccstgggcaggaacgcatgttgcttagaaaagccaaatccagcccttgtctctgcctcctctggtctcatgatgtgcatctgttaccttgaaactggaaacca

SEQ ID NO: 484911 - DNA, 201 bp, Homo sapiens
ctcactagggagcctgacagtggggccatgcacctgacactcctctctgcttgtggacctggcaaggcagggagcagaaaacagagccacttgaaggcttyctgtctgcgtctgtgtgcagtgtggatttagttgtgcttttttcttgctgggagagcacggccaccatttacaagcagtgtcaccctcgtgggtggcgag

SEQ ID NO: 484912 - DNA, 201 bp, Homo sapiens
ggcaaggcagggagcagaaaacagagccacttgaaggctttctgtctgcgtctgtgtgcagtgtggatttagttgtgcttttttcttgctgggagagcacrgccaccatttacaagcagtgtcaccctcgtgggtggcgaggacagaacaggagcctctgctctctgtacctatctgggcccggtgggctcccctgtcctg

SEQ ID NO: 484913 - DNA, 201 bp, Homo sapiens
ccacttgaaggctttctgtctgcgtctgtgtgcagtgtggatttagttgtgcttttttcttgctgggagagcacggccaccatttacaagcagtgtcaccstcgtgggtggcgaggacagaacaggagcctctgctctctgtacctatctgggcccggtgggctcccctgtcctggcttccatctgtctcagcgaccattc

SEQ ID NO: 484914 - DNA, 201 bp, Homo sapiens
ctttctgtctgcgtctgtgtgcagtgtggatttagttgtgcttttttcttgctgggagagcacggccaccatttacaagcagtgtcaccctcgtgggtggygaggacagaacaggagcctctgctctctgtacctatctgggcccggtgggctcccctgtcctggcttccatctgtctcagcgaccattcagccgtgggca

SEQ ID NO: 484915 - DNA, 201 bp, Homo sapiens
gtgtcaccctcgtgggtggcgaggacagaacaggagcctctgctctctgtacctatctgggcccggtgggctcccctgtcctggcttccatctgtctcagygaccattcagccgtgggcaggaacgcatgttgcttagaaaagccaaatccagcccttgtctctgcctcctctggtctcatgatgtgcatctgttaccttg

SEQ ID NO: 484916 - DNA, 201 bp, Homo sapiens
tgtcaccctcgtgggtggcgaggacagaacaggagcctctgctctctgtacctatctgggcccggtgggctcccctgtcctggcttccatctgtctcagcraccattcagccgtgggcaggaacgcatgttgcttagaaaagccaaatccagcccttgtctctgcctcctctggtctcatgatgtgcatctgttaccttga

SEQ ID NO: 484917 - DNA, 201 bp, Homo sapiens
tggcgaggacagaacaggagcctctgctctctgtacctatctgggcccggtgggctcccctgtcctggcttccatctgtctcagcgaccattcagccgtgsgcaggaacgcatgttgcttagaaaagccaaatccagcccttgtctctgcctcctctggtctcatgatgtgcatctgttaccttgaaactggaaaccagtc

SEQ ID NO: 484918 - DNA, 201 bp, Homo sapiens
tctctgcttgtggacctggcaaggcagggagcagaaaacagagccacttgaaggctttctgtctgcgtctgtgtgcagtgtggatttagttgtgctttttwcttgctgggagagcacggccaccatttacaagcagtgtcaccctcgtgggtggcgaggacagaacaggagcctctgctctctgtacctatctgggcccgg

SEQ ID NO: 484919 - DNA, 201 bp, Homo sapiens
gaacaggagcctctgctctctgtacctatctgggcccggtgggctcccctgtcctggcttccatctgtctcagcgaccattcagccgtgggcaggaacgcrtgttgcttagaaaagccaaatccagcccttgtctctgcctcctctggtctcatgatgtgcatctgttaccttgaaactggaaaccagtctatcaatgtct

SEQ ID NO: 484920 - DNA, 201 bp, Homo sapiens
ctgaacccgcagctcactagggagcctgacagtggggccatgcacctgacactcctctctgcttgtggacctggcaaggcagggagcagaaaacagagccmcttgaaggctttctgtctgcgtctgtgtgcagtgtggatttagttgtgcttttttcttgctgggagagcacggccaccatttacaagcagtgtcaccctc

SEQ ID NO: 484921 - DNA, 201 bp, Homo sapiens
caaccgctcccaaggtgggaggagtgggtgtcccctgtgtgtcagtgggcaactcctgctgaacccgcagctcactagggagcctgacagtggggccatgyacctgacactcctctctgcttgtggacctggcaaggcagggagcagaaaacagagccacttgaaggctttctgtctgcgtctgtgtgcagtgtggattta

SEQ ID NO: 484922 - DNA, 201 bp, Homo sapiens
atttacaagcagtgtcaccctcgtgggtggcgaggacagaacaggagcctctgctctctgtacctatctgggcccggtgggctcccctgtcctggcttccmtctgtctcagcgaccattcagccgtgggcaggaacgcatgttgcttagaaaagccaaatccagcccttgtctctgcctcctctggtctcatgatgtgcat

SEQ ID NO: 484923 - DNA, 201 bp, Homo sapiens
agcacccagtgcggctctgtcgggcaaccgctcccaaggtgggaggagtgggtgtcccctgtgtgtcagtgggcaactcctgctgaacccgcagctcactrgggagcctgacagtggggccatgcacctgacactcctctctgcttgtggacctggcaaggcagggagcagaaaacagagccacttgaaggctttctgtct

SEQ ID NO: 484924 - DNA, 201 bp, Homo sapiens
tgtcatctccagcataatgactgttttgatccttgtaaaaaaggtgatttttggctgggtgtggtggctcacacctgtaatcccagcactttgggaggctraggggggtggctcacttgaggtcaggagttggagaccagcctgggcaacatggtgaaaccacgtctctcctaaaaatacaaaaattagctgggcatggta

SEQ ID NO: 484925 - DNA, 201 bp, Homo sapiens
gcaaacatcagatgtcagagtcgaaggcctcacctaccattcactcttgcctccctgaacaaaattaaactcacacagtgatcatctgacacttaaataayggaaagttttgaatactgattaatattattatcccaaataatattgccaccagacatgggacacaaaatgaatctccctttaaatatatataataatctc

SEQ ID NO: 484926 - DNA, 201 bp, Homo sapiens
cccttcccaagactcctataaaagtgatcccatcccatcagctgaaatccgtggtctgttatagttcctcacaactcttgaattgaaaagatcagatcttyccccctcaacataaaatgggtacaggaataggtgtagagtccccagataccccctctttccttctgtgtctggacagaaaaccacagaatgtcttgatct

SEQ ID NO: 484927 - DNA, 201 bp, Homo sapiens
tcaactgcagcacctgattaaagccttcttctctggcaatactcagtgatttgctttctatgcagcaagcaacaggacttcaagtccctggtatttcagtracaaaaacaccatgatgtacacgatatttagaggagccaaaaaattctgaggtcttttcagaacaaaaaactagcaactaataaatttttttttcctgaa

SEQ ID NO: 484928 - DNA, 201 bp, Homo sapiens
tctggtaactatgcatctactctctgtctccatgtgctcaattgttttgatttttacatcccacacatagttaagaacatgtgacgtttgtctttctgtgyctggcttatttcaattaacataatgacctccagtaacatccatatttttgcaaatgacaggatctcatcctttttttgtggctgaatagttctgcatgat

SEQ ID NO: 484929 - DNA, 201 bp, Homo sapiens
ctgccacagggtctgctggggccaccagaagcccatgttcctgcctccatctctcccctttgtgctcacctctcaccaggaggccctcccagagttcagtstcctgcttttttttttttttttttttttgagatggtgtctcgctctgtcaccaggctggagtgcagtggcgcgatctcagctcactgcaacctctgcttc

SEQ ID NO: 484930 - DNA, 201 bp, Homo sapiens
agcctggggctggccccagctgctgctgcgaaacaggggtcactggatgctgggtccctggccgggctggctggaggcctcaggaagaggcctgctacagyatcatcctggccaagattcctccctgcagaggaccctggccacgctgccacagggtctgctggggccaccagaagcccatgttcctgcctccatctctcc

SEQ ID NO: 484931 - DNA, 201 bp, Homo sapiens
actccagcccctcttcccccacattccactcaccactaccctccccctatctgggtgacctgcaccttcttcctagtgatagaagttaggagatttgtgaytatttaatcttaccctctgtacaacacatcttcctgagattggagccccagtggcttcaagaagctgggggccacagagaagaaccaacccccacacttg

SEQ ID NO: 484932 - DNA, 201 bp, Homo sapiens
tttgtttgattatttctcagatatttagaactttctaagccaacctggagagggacggggtaaactcagctcctgactcctgagcttcagtgccttcctcyggacacctcatctcaatccagatattacaggaagccaaattttcctcaaacagccatctataaaaatctgtattttcgacatcagactggtccaggctca

SEQ ID NO: 484933 - DNA, 201 bp, Homo sapiens
tggaattcagcatgagatttgatgggggtgtatattcaaactatctcataaagtaattgttggaaagactagaaacaagaggtttaattgtttccttttarcaattcctgactggtgcccatatctgggagacacaagacagcatttaactcttcccagatacacataagtgatcctgatcgcctgtgtgctctcctcact

SEQ ID NO: 484934 - DNA, 201 bp, Homo sapiens
tgacctttcctggtccctctttctagatagacaggacgaagggaaggatcaagagagagacctagaggaagatgttacacacttttaacaaccagatctckagagaactcactgactattgtgaggacaacaccaagccatgagggatcagaaactatgacccaaacacctcccaccaggttctacctccaacacaggact

SEQ ID NO: 484935 - DNA, 201 bp, Homo sapiens
taatattattatcccaaataatattgccaccagacatgggacacaaaatgaatctccctttaaatatatataataatctcactttaaccccacatgctggsgtttcacagcagtccctctgtcacacagagatgaacacttctacagagaaagatggggcaaataagaaagttgcagaagtccccagtggcagatgtgagg

SEQ ID NO: 484936 - DNA, 201 bp, Homo sapiens
gggacctcactgtgtctctgcaggcatgccaacttttgcacagaactgggaaaccctctgagcaggaaccacatcctgacttctcacgggagtcgggatcygagcaagcagcgctcagtgaaactgagcaggattgccctggccctggtctgtgggcacctgatggtcctcagtccaataagctcggagaacactgagtta

SEQ ID NO: 484937 - DNA, 201 bp, Homo sapiens
ttccctatgttgtccaggctggtctggaactacagggcttgaggggatcccccgtcatagcctccccagtagctgggattacaggtgcaccaccacatcaygctactgagtcattttcaatcatgcttaaatgtcactcctgaagcccgcttatcttgctgcttctgaactgtcagacactactgtttacaaagccgccca

SEQ ID NO: 484938 - DNA, 201 bp, Homo sapiens
agaagtggaagaaggcatgaggctgaccagtgatccagatgctcatcctgacttgccgcatggtactgggaaaattagtttccatgctgggaatgcagacsgcttccttgcactgaaaagtattttccaagacatgtgaaattatgaccctggttacactgtatattaaagcaaataaaatgtttaaataatatgcctgac

SEQ ID NO: 484939 - DNA, 201 bp, Homo sapiens
ttttttctcttcagaccctcccccaattccagcacttggtgatgttgtcctggcaagtctctctattaactagaatgatttaatcttagttatcaggattrccacaatggctgcctgaattctttgcacagaagtggaagaaggcatgaggctgaccagtgatccagatgctcatcctgacttgccgcatggtactgggaa

SEQ ID NO: 484940 - DNA, 201 bp, Homo sapiens
cctgctggcttgccctacagattttaaacttgctagtccccacaatcatgtgagccaattcctaaataaatctctctctatgtataacctattggtttagyttctctgaaaagctttcacatccagtttcctggatgttaagaattactgaaactagctagtaacttctttttttttttgtttttttgagacagagttttg

SEQ ID NO: 484941 - DNA, 201 bp, Homo sapiens
cactctgcaatcacaaatataagacatgcaggtgtgctgctcactttagaaatattgcttccaacaacacacttagaatggagatcctacagagacaataygttattggcctaaaacatctgtgcatgtgaagcctctcatttcctgctgtatatgaagcataaataaatctaggttaatagagggaatgagatgctctat

SEQ ID NO: 484942 - DNA, 201 bp, Homo sapiens
taaaaaacaaaatgggcagcaatattttttatgataatgcacttggtacaataacattattcgctacaggcaaaaggtagaagcaactcaagtgtccatcratagataaatggataaccaaaatatgataaattcagataatgaaatactattcagctttaaaaaggaaaatagttctgacacatactacaacatgagtga

SEQ ID NO: 484943 - DNA, 201 bp, Homo sapiens
accataagtggctaattgtatttttagtagagagggggtttcatgttgttggccaggatggtctcaatctcctgacctcgtgatccgcccgcctcagcctyccaaagtactgggattacaggcatgagctaccacaaccagccttatttatataatattttattaattaatatgtgacacaactctaataatttcttccta

SEQ ID NO: 484944 - DNA, 201 bp, Homo sapiens
agaagcaggagctgtgtgtgtgagcttcaacacctgcagggcttgagcgcaaggagacagcctcagggactttgcacagaacaggtggcagggtgtgcccrtggggcagatggggacttgggaacaatggtggtgtgtgagtccatacctggctccaggattcaggaggcccatttgcatatcccaggtgggaacctgtct

SEQ ID NO: 484945 - DNA, 201 bp, Homo sapiens
gagaaataaaatctttttctgacaaacaagtgctaagggaatttgttactcctagatcagcttgacaagacatccttgagggagttacatggaaataaaakaaatgatccctgctaccccaaaaacttaagaacaaagctctcagatcctataaagaaaccacgtaacagaaactacaaagcaaccaactaaccacttcac

SEQ ID NO: 484946 - DNA, 201 bp, Homo sapiens
cagtccaataagctcggagaacactgagttaaacaaagggagccaggggtcttgactgaaggacttctgggatctttaaaatgctaagtacacacagggaytgggagagcaagaatggagtacatagctcttcacacagcaatttgaaggcagagccctctttctaggatagttcattaatccattttgagaaacctctaa

SEQ ID NO: 484947 - DNA, 201 bp, Homo sapiens
ctcatctggggagaaggagaactcacaatcctggcaatgaagcaactcagggctcgctggaaagccacgctgagcaaaggacaaagacacacatgggctckctctgcaggactccattcctgggaagctcaaggacaggtgacaaaggagtctacagggctggataggggctgccagggtggggtgggcacgagagtgggc

SEQ ID NO: 484948 - DNA, 201 bp, Homo sapiens
tctcagctcagtggacttgctcaacttttgcataagtctccacttggtggtagcagcttgctgatgacttgttttaaaactttcatcctaaataacctttygatgcttgaatatttttaagttttatacatagtttctaattttttttccccaacagatccagatacctggatccagggaatgaagttcattttgcagtgc

SEQ ID NO: 484949 - DNA, 201 bp, Homo sapiens
agaaaagtattattagattagtagtattattaggatcgtcccccgatcctgaccgcccttccggcccatgctctcctgtttggcttccacaggcctggacktctctggcttctctgcccacacactccctgcccccagtgtccctgcccctgccccagcacaggtgacttcatttctgtcctctcagctcagtggacttgc

SEQ ID NO: 484950 - DNA, 201 bp, Homo sapiens; identical to SEQ ID NO: 137153

SEQ ID NO: 484951 - DNA, 201 bp, Homo sapiens
ctctactttgctctgggacctcactgtgtctctgcaggcatgccaacttttgcacagaactgggaaaccctctgagcaggaaccacatcctgacttctcaygggagtcgggatctgagcaagcagcgctcagtgaaactgagcaggattgccctggccctggtctgtgggcacctgatggtcctcagtccaataagctcgg

SEQ ID NO: 484952 - DNA, 201 bp, Homo sapiens; identical to SEQ ID NO: 137154

SEQ ID NO: 484953 - DNA, 201 bp, Homo sapiens
ttcccccttctcactctttgtccttgtcccagcagaccacaacctggcccctgcacactccactgcccttgctggctgccctgtttgtggccctagcctaragtcccccagctctggctagaaagatcattcaaagtgacatctgtgatgcagaccttaatgatgatagatggcagcatgccctggacttcgccatcagtg

SEQ ID NO: 484954 - DNA, 201 bp, Homo sapiens
ctgagtcctctctgcaggggccacaccggagcctagctccttgtcctgcagagccctgcttccctcccaaagtcacacccctgggcacaaccccctagggmgagtggccttcaccctcaggctggctgaccacccccgacagcccagggcagctgagttccttctggggtggagcacgcctgaccctgcttttgccagctg

SEQ ID NO: 484955 - DNA, 201 bp, Homo sapiens
ggcagaagggaaacatgccccctcctgtgcagctggacttctccaggttacctgggtgctggaggccccaggctcagtcctgggtccattgtttctctctkggtccctattaccttgtccttgaagctgtaggttacaggaatcaaggcatacacagctgtgtcatgttttattttttttaagatggggtctatgctgcac

SEQ ID NO: 484956 - DNA, 201 bp, Homo sapiens
tggcccaggtcactctcctccctttcctggatgactacaatgtcctcctgactgtcccccaccctcccattctcactgactaaaagcttttttccctctgkgtggccatgtcagccttctaataacatataaggtgttatgctatgtcccagtaaatcatttcaaaggcttctcattgcattttgaataaaatacgagttc

SEQ ID NO: 484957 - DNA, 201 bp, Homo sapiens
acccttgtcttcagcatgaggcagtcagaaagatcaatgaacagattccccatgatttggaaatcgatacatagaaagggggttgaaactggcccaactgkcccatagaactgatatttatggtttcttttgaataaacacagatattgaccctttcagtcttaaaacttgagaaactcacatgtgccttctctgagttcc

SEQ ID NO: 484958 - DNA, 201 bp, Homo sapiens
tccttacatagacctttaaaagaactcactactcttggccaatgctgaagacacaactcagcttgggagcctggggggctgggcctcccaggtcagggtgwggccccttgaatggcaaaggcaattccttttgagtcacaagaaattctgcaaccctacttttaggcttttagtttttagctcttaagttacttaaagggt

SEQ ID NO: 484959 - DNA, 201 bp, Homo sapiens
cttcgagatcaactcttacctgaatttatagcctgctggcttgccctacagattttaaacttgctagtccccacaatcatgtgagccaattcctaaataartctctctctatgtataacctattggtttagtttctctgaaaagctttcacatccagtttcctggatgttaagaattactgaaactagctagtaacttctt

SEQ ID NO: 484960 - DNA, 201 bp, Homo sapiens
aaattagccaggtgtggtggtgggcacctgtagtcccagctactcgggaggctgaggcaggagaatagcttgaacccaggaggcagaggttgcagtgagcygagatcgcgccactgcactccaggctgggcaacagagtgagactctgtctcaagaacaaaaaaaaaagtggttgacggccggacacggtggctcacgcct

SEQ ID NO: 484961 - DNA, 201 bp, Homo sapiens
ctgaggcaggagaatcgcttgaatccaggaggtggagcttgcagtgagccaagattgtgccactgcactccagcctgggcaacagagcaagactccgtctaaaaaaaaaaaaagtggttgacaaggaaataagttgaaatgatgactagctttgtttaatgtctcagttttcagaaggagtctagataacctttttaaaaa

SEQ ID NO: 484962 - DNA, 201 bp, Homo sapiens
agagggagaagtcaggctggggtgcggctcagcagaagccacggccagccccacggagagctctaaagctctaaagctgggatggcctcagaattgtttcwtattggtgcaaacaagtcaggcctggtacccacttttaggccttttattcaaaataggcagtttccggggtgggaagggcatgctcttaggcaaagcatc

SEQ ID NO: 484963 - DNA, 201 bp, Homo sapiens
ctgtggactcaatgactgtaattagcaggtgggctctggcttggctttagagtactggatttcatcttctttcagtctcctatattctgcatctgttgaaygtaagggggaggtagcctgctgcccagttcacttgaaagtaatggacatgtaaatatcaagatgttggtctgtatttcattcagtgaaaactcatggcat

SEQ ID NO: 484964 - DNA, 201 bp, Homo sapiens
aagtgctgccattatatgggcttgacccccacttaattccttcatcttttttctcttcagaccctcccccaattccagcacttggtgatgttgtcctggcragtctctctattaactagaatgatttaatcttagttatcaggattaccacaatggctgcctgaattctttgcacagaagtggaagaaggcatgaggctga

SEQ ID NO: 484965 - DNA, 201 bp, Homo sapiens
gctttgggaagagctcatatcatatatagatatgtatacacacatatatacatgtatatatgcatacacatctaacagagagagagagagaaagagagagmaaggggaagacaagaaagccaaactatcatttgcatttttcctggaagaaagcaaagcataagggattattagcaatggatatctttagagatagtagcc

SEQ ID NO: 484966 - DNA, 201 bp, Homo sapiens
tcctggcccaggggaaatgtgaggaaaacaaaactggcctgattttccccaccaagttgatgtttatgtttttcttttttatatagaaattgatcctcccrgccttaaagcttgaaacacatttgtcttatctgagttcctgtctcaggaaattgaccctcaggccttgcagattgtatcaggaaactaaagctcctcttc

SEQ ID NO: 484967 - DNA, 201 bp, Homo sapiens
tttaccagcaaagcctggattttttgttgtttttcctacagcttatatttctccccttgaatattatcataaacagcaaggaaacaaaacaaatggcaccrtcatcactggctggaaatttccataactaggtcacccagttcattaggtacctttctgactttccacatcactgcaggctactgtgttgctaagctttct

SEQ ID NO: 484968 - DNA, 201 bp, Homo sapiens
ggatgctgggtccctggccgggctggctggaggcctcaggaagaggcctgctacagcatcatcctggccaagattcctccctgcagaggaccctggccacrctgccacagggtctgctggggccaccagaagcccatgttcctgcctccatctctcccctttgtgctcacctctcaccaggaggccctcccagagttcagt

SEQ ID NO: 484969 - DNA, 201 bp, Homo sapiens
agggcctttgcactggctgttcctgctgcctggagctgtttcctgtctaaacagggcttctcacctttccagtctcatagagacctccctgaccagggtcyggtggcacccatctctctccaccctccattctatttcacttcctgcagaacagatctactcccctcatctgatcactgctccccatctccacacacaccc

SEQ ID NO: 484970 - DNA, 201 bp, Homo sapiens
attgctataaaatacatgattttattttattttattttattttattattattatactttaagttttagggtacatgtgcacaacgtgcaggttttgttacwtaggtatacatgtgccatgttggtgtgctgcacccattaactcgtcatttaggattaggtatatctttttaatggctgagtgttgtttcattatagatgg

SEQ ID NO: 484971 - DNA, 201 bp, Homo sapiens
ctggggccacttttacaacagggtctctagagacaacgtaactatgcccaggagtggctgagaaccacaggagtgtgttcccctcaccccaggttaaatgygtcccagctcagcttcctcttagccagataccaaaatgcctgtgtccacccacagagcatgcaggaggagagtgggaaagagaaagtcagagtaaacaaa

SEQ ID NO: 484972 - DNA, 201 bp, Homo sapiens
ctgcatgagacaccttgtttcagttacttagagaaaacaagttatcagggaggcctggcgcccggggccactgccagccagtgtgtatgccttgtgggtgrcagtgtgggcggttcagaaaggcaggcatgaagccccaggcaaacccagtgactcaatcacagtgaaatgcctgtgtgtgcacggaactgacagtgtgct

SEQ ID NO: 484973 - DNA, 201 bp, Homo sapiens
agtggctgagaaccacaggagtgtgttcccctcaccccaggttaaatgcgtcccagctcagcttcctcttagccagataccaaaatgcctgtgtccacccwcagagcatgcaggaggagagtgggaaagagaaagtcagagtaaacaaaggcaatgctcttgaataactgcagtttaaatacttcttaaaattgtagaaaa

SEQ ID NO: 484974 - DNA, 201 bp, Homo sapiens
ctgcatcccatggcacagcaacaaacagtgacacagcctttggctctcctccaccttcccttggaaattcagaggagtccagaccagccccgtttctcctyctgcagctgtcagctggggccctctccctgcacaggaggggcactccctgctgccaggatccctgctggcctgtacccctctctcaagtgtgacactcac

SEQ ID NO: 484975 - DNA, 201 bp, Homo sapiens
taggcaaggaaaactcccctcagacactttgctgcctggcctcctgccagcaacaagcaggagctgaaaactagaagttgaggcgtgagtttggccactcygtagtgtgcacttggtgagggcagcaactcgccacagctgccaggcgtctgtccattcacccatctgtccatctggcagcccgctgttcagacctgtctg

SEQ ID NO: 484976 - DNA, 201 bp, Homo sapiens
gctgcctggcctcctgccagcaacaagcaggagctgaaaactagaagttgaggcgtgagtttggccactccgtagtgtgcacttggtgagggcagcaactygccacagctgccaggcgtctgtccattcacccatctgtccatctggcagcccgctgttcagacctgtctgtctgtccgcccatctgtaagcccatctctg

SEQ ID NO: 484977 - DNA, 201 bp, Homo sapiens
agtccccacaatcatgtgagccaattcctaaataaatctctctctatgtataacctattggtttagtttctctgaaaagctttcacatccagtttcctggwtgttaagaattactgaaactagctagtaacttctttttttttttgtttttttgagacagagttttggtcttgttgcccaggctggaatgcaatggcacaa

SEQ ID NO: 484978 - DNA, 201 bp, Homo sapiens
caaggagactaggtcgttaaatttcaagagacgctggttctcaaaacgtagagaataccagagttaccatgagggcttgtcaaagtgcacatgcacgtgtmacacacacacacaccacaccacaccacaccacaccaggttcagcaggtctgggatagggtcgaggaatctgtttctaagtaccatgcaggtgattttcat

SEQ ID NO: 484979 - DNA, 201 bp, Homo sapiens
aggtcgttaaatttcaagagacgctggttctcaaaacgtagagaataccagagttaccatgagggcttgtcaaagtgcacatgcacgtgtcacacacacacacaccacaccacaccacaccacaccaggttcagcaggtctgggatagggtcgaggaatctgtttctaagtaccatgcaggtgattttcatgcagagtata

SEQ ID NO: 484980 - DNA, 201 bp, Homo sapiens
ggatgttaagaattactgaaactagctagtaacttctttttttttttgtttttttgagacagagttttggtcttgttgcccaggctggaatgcaatggcayaatctcagctcaccgcaacctccacttcctgggtccaagcaattctcctccctcagcctcctgagtagctgggattacaggcatgtgccaccatgcttgg

SEQ ID NO: 484981 - DNA, 201 bp, Homo sapiens
tcctcactacccttttgagttacagtttccagttccctgggttcttccctctggtccctcttagtgctggcctgagtgctggaggtggaaggagctggggrcagtgagccacctccccctgccctgcacccttggggctcccgaggccatgcacaagctcgggttgtgctggggcaggaatcctgcaggctggggtggggg

SEQ ID NO: 484982 - DNA, 201 bp, Homo sapiens
caatcaaaatgaactgctttcatgagacacagagccagaaattagaacaattcagtccttctaggcccaggcactgtcgtggaagagctgagcatgtgagrttgtaagggctgattctgaaggatacgtttagttacgtatgttattttttggtggctgtgtgtgtccttacatagacctttaaaagaactcactactctt

SEQ ID NO: 484983 - DNA, 201 bp, Homo sapiens
attacctatggggtaaaaaagctttagacatgtgaacagaacagtgttataaaccagtgagtttgtattactacttcatggctagatttctgaggtaaaayctattggatcttgtgtgtgtttttgtgtgtacatgattagatgtgtttgtgtctatgtacctttttaatgttatatattatatctgctaaatttgcttat

SEQ ID NO: 484984 - DNA, 201 bp, Homo sapiens
agccttcgttggattacctatggggtaaaaaagctttagacatgtgaacagaacagtgttataaaccagtgagtttgtattactacttcatggctagattwctgaggtaaaatctattggatcttgtgtgtgtttttgtgtgtacatgattagatgtgtttgtgtctatgtacctttttaatgttatatattatatctgct

SEQ ID NO: 484985 - DNA, 201 bp, Homo sapiens
cccaagtgcacaaacacccagctgggtcatgaccgctcccaggctcagctacaactttgctctgctgcagagcaggtgccaggagcagggacaggccaggkagcaggagcaggcacttctgaacctgtcagggctggggactttctgggccctgagagcacagggatgcccaggtctggagctgcagctgggtgaccacag

SEQ ID NO: 484986 - DNA, 201 bp, Homo sapiens
gtaggattttttaatagttttgtctcttatgttgatgtctttaacccatgttaagctaatttttgtatatggtgagaggcttgggtctagtttcattcttstgcatatggctgtccaattttcccagtgccatttattgaagagggtgtcatttccccagtgtacatttttactgactttgtctaagataagttggttgta

SEQ ID NO: 484987 - DNA, 201 bp, Homo sapiens
ctggaatccagcttaaaaaatgttggatgtttaggactcagtcctactcatgcccatctgttcttctctgtgcctcctcaactggtccttgggattcttgkttccactatctgaatccttctttttccatgaaaggtagcacacatttgcagctgagtaattttctcaactggcttcctgctaggaggaatggcccatctt

SEQ ID NO: 484988 - DNA, 201 bp, Homo sapiens
gccaagcccctggctgccagaacacattgatcaatttctgttttcaacccctctccacctccctccctccattaagcaaagtatgctttttcatcctatcrggatcattttcacccaactgtgggcacaggttctagaatggaccagaaacaccgtagaccaggatggtcttcatgatgcagccactgttggtactttaat

SEQ ID NO: 484989 - DNA, 201 bp, Homo sapiens
gttttgtcgttcaatatttaagtgaaaggagattatttatcctcatcctatatctccaaaactgatatttgtgtttattaccatttttaatgatgcagaaraaactgaattgtctcacttggatacgtttggcatagggcctatcacattttttatgcttttggtcataattcagccatgacaatgttagcaattagacag

SEQ ID NO: 484990 - DNA, 201 bp, Homo sapiens
cttaatgatgatagatggcagcatgccctggacttcgccatcagtgagtacaacaaggagagaatgatgaacactacagtcaccctgcaggtgctgccagsccaacagcaggtgggtgatgccaccacccaaggggtcctgagtcccagccagatttgccccctaaccccaagagcattcccagcaaatcagcactgacac

SEQ ID NO: 484991 - DNA, 201 bp, Homo sapiens
cagacacttgtgagacaggtattatcattgcaccccttttacagatgaggaaactgagacacagaaaggataagcaattttcttagtagcactactgagcrgagccaggactcagcccccgacagtggcttgcagagcccatgctctgatgccctctactttgctctgggacctcactgtgtctctgcaggcatgccaact

SEQ ID NO: 484992 - DNA, 201 bp, Homo sapiens
acaggatcttgctaggttgcccaggctggtctcaaattcctggcctcaagccatcctcctgcctcagcctcccaagtgctgggattacaggtgtgagccamcacacctgggatgttttcacatttaattttcatttatttgcagatataaagccattgatgtttttgagtttcttatggaaagcttgtattgggttctatt

SEQ ID NO: 484993 - DNA, 201 bp, Homo sapiens
atctgtgatgcagaccttaatgatgatagatggcagcatgccctggacttcgccatcagtgagtacaacaaggagagaatgatgaacactacagtcacccygcaggtgctgccagcccaacagcaggtgggtgatgccaccacccaaggggtcctgagtcccagccagatttgccccctaaccccaagagcattcccagca

SEQ ID NO: 484994 - DNA, 201 bp, Homo sapiens
tagtactagcactacagtactggccatgtgcgtcaagtaaatgtctgaattcagtggtgttgctggactaaaatacattaatttgtacatctggaaaaaawtatccatcatttgttattgtaggatctggataacctgtggcttctaaggtaaactgaataggagataaatttagggttggtttaccttttttgttttttt

SEQ ID NO: 484995 - DNA, 201 bp, Homo sapiens
tttggggcatgtcctgtgtgtcgggtgctgttctaagtgctttacacatattgcctcatgtgcccaatctacacagacacttgtgagacaggtattatcaytgcaccccttttacagatgaggaaactgagacacagaaaggataagcaattttcttagtagcactactgagcggagccaggactcagcccccgacagtgg

SEQ ID NO: 484996 - DNA, 201 bp, Homo sapiens
taggggcagggcatggaaggacgtggggctgggggcccccaggctgtcttgcttttatccatttatcctaatgcacagctgcctgctggtctgggctcccygcctcaggatcatgccccttcactctcctgcacttcccccttctcactctttgtccttgtcccagcagaccacaacctggcccctgcacactccactgcc

SEQ ID NO: 484997 - DNA, 201 bp, Homo sapiens
taggtagcagtttaaaaatgtgagacgttctaatgatttttgatcccaagccttttatcactgttggggattcatgtctgtgcttaaaaacaaaatatgtrtaagtgttgcactgatttgaagatttctagtggtaaaagttacctaattggctgtcagtactgtatctagaaaccaattttgtaattgtgtgatgatgct

SEQ ID NO: 484998 - DNA, 201 bp, Homo sapiens
tgctgatccctgtactgccaactcttaccacctgccagggggtctccctgcaccttccacttggccccacccccagttactgtgagactccaggtccttcycttccctgctcacgttccctccaggggcttcctcttcctggaacaggcacactcagccccacctcagggcctttgcactggctgttcctgctgcctggag

SEQ ID NO: 484999 - DNA, 201 bp, Homo sapiens
tctgtcttcagcccccacctgtttgtccatctgtccaattacctgtgagtctatctatgcatcttcttgtccattcatctgcccacccatctgtccctccrtctgcccaccggcctcccctctccttctgggccgcagagccacggtccaggactgcagagccatggttggcctggtccttctggggctggggctggcgct

SEQ ID NO: 485000 - DNA, 201 bp, Homo sapiens
tcacatcatggaaaataagatatctaccctgtcaagcatttatcctttgtgttacaaaccacttaattatcctcttttagttatttttaaatgcatagttaagttactttgactatagtcaccctgttgtgctatcaaatactagatattattcattctctcaaactagtttttgtgcccattaaccatcctcacctttcc

SEQ ID NO: 485001 - DNA, 201 bp, Homo sapiens
ggaggagtggccgttctctctctttgttcattcattcaccttttcattcattccttcttccctccattcccccatctgtccatccttccctgccctgattkctcatgccacccccccagcccctcctgacctggtcctttggtttctcttcagggctttctgtctcctcccacagggctgagaatggcagctcagggacaa

SEQ ID NO: 485002 - DNA, 201 bp, Homo sapiens
cacatcatggaaaataagatatctaccctgtcaagcatttatcctttgtgttacaaaccacttaattatcctcttttagttatttttaaatgcatagttaagttactttgactatagtcaccctgttgtgctatcaaatactagatattattcattctctcaaactagtttttgtgcccattaaccatcctcacctttcct

SEQ ID NO: 485003 - DNA, 201 bp, Homo sapiens
gttaatcctttgctgtgggaaagagcattcacttgctgcttaaacccgccctgcaaacctggtgccaggactgtttctttgccccaccctggctggctccmcagagctgtgccttctattcctgaatccaatgaagggggttttaggccttggcttccatctgccctgcccttgcttctcctcctactgggctgcatgaga

SEQ ID NO: 485004 - DNA, 201 bp, Homo sapiens
agagtgaagattcctcaaagatcagacagtcacaagacatccatgagcgttctcatagctgtggcaatgtgaagaacaaaaaaaaaaaaagaaagaaaatmcaactcagagaattttacaggactttaattattattgtctggggaaagatgaggaatagagtggaaacatgatatatggacagatacatagatttgatac

SEQ ID NO: 485005 - DNA, 201 bp, Homo sapiens
gctgccccagacccactttctaagacccaaatgcagtgacagtccctttcatatcatctggtctgtgttttggaagaaatattattaaaaacaatttctaaaaaaaaaaaaaaaaaaaaaaaaaaggccacgcaatggcacatgcctgtaatcctagcacactgggagcctgaggcaggcagatcacctgaggtcaggagt

SEQ ID NO: 485006 - DNA, 201 bp, Homo sapiens
ggtttcatgttgttggccaggatggtctcaatctcctgacctcgtgatccgcccgcctcagcctcccaaagtactgggattacaggcatgagctaccacamccagccttatttatataatattttattaattaatatgtgacacaactctaataatttcttcctatgttttcatcttcaattaatgaatcgttatctgcct

SEQ ID NO: 485007 - DNA, 201 bp, Homo sapiens
agcctcctgagtagctgggattacaggcatgtgccaccatgcttggctaatttttgtatttttagtagagacagggcttctccatgttcgtcaggctggtmttgaactcctgggcttcagtgatccacccacctcgacctccaacaaagtgccgagattacagtcatgagccaccatgcccagcataactatttttaatga

SEQ ID NO: 485008 - DNA, 201 bp, Homo sapiens
aagcggccccagctctgctttcctagagctgctgagaacccgggaaatggtgtggaggttccggggagccctgcccctacctggcaaccgcaatgcagcasgcaccaagttctcctgcacattgcgacagtgtgaccctgggctctggcgggcggtaggtggggcctttggacctaccagcagtgagggagttaacacagc

SEQ ID NO: 485009 - DNA, 201 bp, Homo sapiens
ggtgttcccccagctactgcaggtgcccttggcacccttctttctgagcagatgctcttagcagcagcagctcccagcacctgcttctcagcagcagcagmctggcacagcaccttgctcttgaccactgctccctcggaagggccctcccctgagggcagagtcaagagacagtagtcaaagtctgactcctactattag

SEQ ID NO: 485010 - DNA, 201 bp, Homo sapiens
cgcttatcttgctgcttctgaactgtcagacactactgtttacaaagccgcccacctctccagatgcatgatgcagagaaggcaaaacatttgcctaaggycaccaaatatctggagcagctgtccagctaccctaaccttccacttcccatcacccgcactggacttggctcccgtagctcctgagagtgcccaccaatg

SEQ ID NO: 485011 - DNA, 201 bp, Homo sapiens
gccccagccacacctctcctgctgcagctggcatcctcacagtagctgctctagatgggccactgtcaccatcaataggggtatccacactttcattgtcwcctgccttgtgaaggtctagcaggggcagtggggagagctgcagaaataggaggttgtaccatccactgtcaattgctctaatcaataaaaccctgcatg

SEQ ID NO: 485012 - DNA, 201 bp, Homo sapiens
cgtggggctccaacaagccagatgctaaccaggtactcatgagcacttccaattacagatatgagattctcattactcattatcccaccatgcccctcctytgcttgaagcagccagaaagatcaatgacaagattccccatgattgaggaattggtatatagaaagagggcactgaaatggcccaatttcctggtagaac

SEQ ID NO: 485013 - DNA, 201 bp, Homo sapiens
aactccatatctactaaaaatacaaaaaattagccaggcgtggtggcacgcacgtctagttccatctactcgggaggctgaggcaggagaatcgcttgaayccaggaggtggagcttgcagtgagccaagattgtgccactgcactccagcctgggcaacagagcaagactccgtctaaaaaaaaaaaaagtggttgacaa

SEQ ID NO: 485014 - DNA, 201 bp, Homo sapiens
gctttaaccaaaggagtttaaccaaaggtgtgaagtaaccagaagtttgaaacaagtttgtgcaattcagcttgccctcttgcaccctgctcttgccatgygagaatatgaaaaatgtcagctatctccctggagaaggatcacagatgtggagcagagccagctcagacaatcccattccaggtcagtgactcccagctg

SEQ ID NO: 485015 - DNA, 201 bp, Homo sapiens
tcctgagattggagccccagtggcttcaagaagctgggggccacagagaagaaccaacccccacacttgggagatgaccattgtgcttggaagtacctggycaggggctgacccctctttctcttatctgtggagctcccagtctttcttgtctaactaggaggcatcatgcgctgccctgtttgagggccttccttccct

SEQ ID NO: 485016 - DNA, 201 bp, Homo sapiens
gcctttcttttctatcgcttatttctttcccaatcaagtccaatggcattagcgtctctgggcaggagattaaaaagggtagagcaatacaaaaagcatgmacaaaggttaattcctcaggagcacatgctgtatatctgcaaggagactaggtcgttaaatttcaagagacgctggttctcaaaacgtagagaataccag

SEQ ID NO: 485017 - DNA, 201 bp, Homo sapiens
gaagggctactgctttagataagaaaacaatatttaaagaagctggaatccacctttagtttcgatgaagtgatgcaggagagaaacaacagaagcaggamtggggactcccatattggctaccctatttttgtttgattatttctcagatatttagaactttctaagccaacctggagagggacggggtaaactcagctc

SEQ ID NO: 485018 - DNA, 201 bp, Homo sapiens
tttccatatttctgctgggaataattttccacacagtggcttctggctccacgcattgcaaaccttgtttcctctgcactgatcacaggcttcccatatgyggtgctgggaaatgtcgtgatccaggaaccacctctgcccctgctactttgggtcaaatcctaggcggatggtggggccagggctggggccacttttaca

SEQ ID NO: 485019 - DNA, 201 bp, Homo sapiens
ttaattccttcatcttttttctcttcagaccctcccccaattccagcacttggtgatgttgtcctggcaagtctctctattaactagaatgatttaatctyagttatcaggattaccacaatggctgcctgaattctttgcacagaagtggaagaaggcatgaggctgaccagtgatccagatgctcatcctgacttgccg

SEQ ID NO: 485020 - DNA, 201 bp, Homo sapiens
tcacactgcctttgctattctgcatagatagtactagcactacagtactggccatgtgcgtcaagtaaatgtctgaattcagtggtgttgctggactaaartacattaatttgtacatctggaaaaaaatatccatcatttgttattgtaggatctggataacctgtggcttctaaggtaaactgaataggagataaattt

SEQ ID NO: 485021 - DNA, 201 bp, Homo sapiens
taatactgttgggaatctggagtttgctgttgaatgggaatgtgggatggagttgtgtgtaatcaggctttatgttgctgttttttgggcctgcttagtayatgatgttcttccggggtgttgcttggcccagtattctttacagtccggagaagtttggtctttaaaaaatcaaactgccgtggaaatgagtttacccta

SEQ ID NO: 485022 - DNA, 201 bp, Homo sapiens
ttttccctgaggcccaagcccagacaatctgctcatcctcatatctcctcaagcttagtaattttcctgccccgtcatgaggcctgggctagagttctgtktttttccttccttctgcaccctcaccccagccctcagcaagtcctgccatgccacctctcacaggcatcctgagtctcctgtgctccacctcttggccac

SEQ ID NO: 485023 - DNA, 201 bp, Homo sapiens
cagctcccacagtccagagggggctgaagtggcagagggctggccactccagcactgacagcactgccccaagtgcacaaacacccagctgggtcatgacsgctcccaggctcagctacaactttgctctgctgcagagcaggtgccaggagcagggacaggccagggagcaggagcaggcacttctgaacctgtcagggc

SEQ ID NO: 485024 - DNA, 201 bp, Homo sapiens
aaatatctggagcagctgtccagctaccctaaccttccacttcccatcacccgcactggacttggctcccgtagctcctgagagtgcccaccaatgctgtytgtcctgttaggattacagcagtcattgatcaggacagctggccctccctgcagcacatgctagtgtcctgacagaggatgaccataggtaatgtcatca

SEQ ID NO: 485025 - DNA, 201 bp, Homo sapiens
taatgtacagcctgtaacctttacccagagaactaatcaactcccactgctgcccttcttgacacctgccactaaggtcttcctcacaggagtgaacccaytgttgactggcagtcagatcctcagagctgctttgaggggaccagagctgggagggcagcatccctgcccagcttggacagtgacctcagggtgaagctt

SEQ ID NO: 485026 - DNA, 201 bp, Homo sapiens
aaatattacatttaactaattagaagtgatgaaactacaaaatacagatctaaatacagtaaccaagaagttaaattgtgtggcctacagaataatgttaygctgtaccaaaatatcttttactttataccacctgccttcatttttttgtggtaaataataatttgctgaaatattttcatcaagggtcacaaaatttaa

SEQ ID NO: 485027 - DNA, 201 bp, Homo sapiens
tggaggccccaggctcagtcctgggtccattgtttctctcttggtccctattaccttgtccttgaagctgtaggttacaggaatcaaggcatacacagctrtgtcatgttttattttttttaagatggggtctatgctgcacagtttccctatgttgtccaggctggtctggaactacagggcttgaggggatcccccgtc

SEQ ID NO: 485028 - DNA, 201 bp, Homo sapiens
ctcccgctcagagccatctgtttcccttgaggccagtcccctgcagtctgcagcccagggagtcaggcgcagcccagcctgccccagctagcaacccgagytcctggaggcctctccctgtcctcttcactaggctgtgtggttcttcagtcactggctctgctctggtgaatgcactccttgagaaagtcagtggtaact

SEQ ID NO: 485029 - DNA, 201 bp, Homo sapiens
gctggggactgcttagtctccccagtggctctcaggggatttgagggtttgacgccagctgccaccccaggctgtgcccctcctctgctcaggaggacatwcaggatgcgacacccacttaaactcaaagttgcaaagatgcaaatgagactggggtctcaggcaccagagaccacccgtgggcacgtggcttttgggagt

SEQ ID NO: 485030 - DNA, 201 bp, Homo sapiens
tgacagtcaattgactttaagtaaaacagattacccaccataatatgggtgggccacctccaatcagttgaaggccttaagaacaaaaactgaggtttccmagagaagcaggaattctgcttcaagactataacacacaaaccctgcctgagtttctggcctgctgactgctctacagattttaggttccagacttcgaga

SEQ ID NO: 485031 - DNA, 201 bp, Homo sapiens; identical to SEQ ID NO: 137134

SEQ ID NO: 485032 - DNA, 201 bp, Homo sapiens
ggaggacaagatgctcacatcccttggttggtcctcactatctcagcacttaccagcccacattccaattgccagcatctgcactgattttcctgtgcatrtggcacaagtaagtgcaagagaactaatggccctgcacattcttcacccacagaatgacaccagcagatatgttccaggcaatctcccaggggttcccag

SEQ ID NO: 485033 - DNA, 201 bp, Homo sapiens
atgggagctggggagcagggctccactctgagacgggggcagccttgccggatccagggcagagttaagcggccccagctctgctttcctagagctgctgrgaacccgggaaatggtgtggaggttccggggagccctgcccctacctggcaaccgcaatgcagcaggcaccaagttctcctgcacattgcgacagtgtga

SEQ ID NO: 485034 - DNA, 201 bp, Homo sapiens
ccattacaaatctgatgacagttgtagaaataaatgtgtgtgtgtgtatgtatgcacactcctacacaaacacattcataagcttcagagtacaatggggkttctgcaagctcttgatagactcttatattgaaaaactttgttctggaaacctgaccagccatttccaactcccttcctcctgcctgaacccaagtgcaa

SEQ ID NO: 485035 - DNA, 201 bp, Homo sapiens
gtgaaactgagcaggattgccctggccctggtctgtgggcacctgatggtcctcagtccaataagctcggagaacactgagttaaacaaagggagccaggrgtcttgactgaaggacttctgggatctttaaaatgctaagtacacacagggattgggagagcaagaatggagtacatagctcttcacacagcaatttgaa

SEQ ID NO: 485036 - DNA, 201 bp, Homo sapiens
attaagccttgtcacctggcagagacattgacctgtggcaacctcacctccacaaaacagaggagcaggcgttgtgccaggaatcctatggtaccaggacrgaggggatgccttctttgccaaaatattgacagactcactggatatcagaaaagcatgacctgcaaagctaacccaaggggcagccaagaaggagagttc

SEQ ID NO: 485037 - DNA, 201 bp, Homo sapiens
gagagggggtttcatgttgttggccaggatggtctcaatctcctgacctcgtgatccgcccgcctcagcctcccaaagtactgggattacaggcatgagcyaccacaaccagccttatttatataatattttattaattaatatgtgacacaactctaataatttcttcctatgttttcatcttcaattaatgaatcgtta

SEQ ID NO: 485038 - DNA, 201 bp, Homo sapiens
tgagatcctgcctctctctctctttctttctctctcccttcctcctgccaccactaggactgccttttgctcctagcccttacccttggacactgtactgygggacaggatgccttgggctatggtgttcacctttcactcatgagcaatgtgcccaagaacaagagcccaaggaatgatgtagaagatggaaggaaacca

SEQ ID NO: 485039 - DNA, 201 bp, Homo sapiens
ctcgaggtgagtttatttccattccatcttctacctcataaggaaatttaatccagtagattaaatccagcagattaagccttgtcacctggcagagacaytgacctgtggcaacctcacctccacaaaacagaggagcaggcgttgtgccaggaatcctatggtaccaggacggaggggatgccttctttgccaaaatat

SEQ ID NO: 485040 - DNA, 201 bp, Homo sapiens
aaatgctttttctgcctctatgatatgatcatgatttcgttgttaattttgtttatgggatcatgtattttgttaatcagaggaataaaagcagatttttkcccctggaattcatgcctctgacccctagatattaccatgaacaagaaggagatgggtagcttcagaaaagagggagggaaggaagagaaagaatgccaa

SEQ ID NO: 485041 - DNA, 201 bp, Homo sapiens
cagctctccttcatacaccacgccctaaccagaaagtgacatgctgaaaaatagagaagccaagggcatgagaaggacctaggaagggctactgctttagrtaagaaaacaatatttaaagaagctggaatccacctttagtttcgatgaagtgatgcaggagagaaacaacagaagcaggactggggactcccatattgg

SEQ ID NO: 485042 - DNA, 201 bp, Homo sapiens
gtctggggtttttataggctccgaatgaaggaagtgtgtgctgattggtccatgggcaggtgcaaaaaaagtaccataagttttcactctggaccacggcytccacccagaactgacaccctggttccaaggcttcaggctgtccctggcttgaaggtgggaattcaccaggtatccacccctttctgtccaggaacctgt

SEQ ID NO: 485043 - DNA, 201 bp, Homo sapiens
cctctgtgtggccatgtcagccttctaataacatataaggtgttatgctatgtcccagtaaatcatttcaaaggcttctcattgcattttgaataaaatasgagttcttcctcgtggtgggaactgacatctgctcatccaccaaacccggtcttcttacctctcctgcctgccggtccctgacactccattcaggagctt

SEQ ID NO: 485044 - DNA, 201 bp, Homo sapiens
gagacccaagatgggtagttcctttctgcaagcaggtcagccccaggagtgtccagctctcagtggaaaggagaaccatggtgtatagctcctttccacaracaggttgtcccaaggagttgaggagacctgaagtgggtagctccttcccacagctggtagtcctgatgtctggctgagtctggctgagtctggggtttt

SEQ ID NO: 485045 - DNA, 201 bp, Homo sapiens
gttttcacatttaattttcatttatttgcagatataaagccattgatgtttttgagtttcttatggaaagcttgtattgggttctatttatagttgttttrttccctatgcatttccaaaaattcataatttgctctacttatctacaattcctaaactacctttgtgaagagtccaacaatgacagagcacaccagccac

SEQ ID NO: 485046 - DNA, 201 bp, Homo sapiens
ggtagcacacatttgcagctgagtaattttctcaactggcttcctgctaggaggaatggcccatcttattatgcactgtttcgatcctttcatacactgayggtgatttgtcagatataattttttaaaaaatgtgtgaatctcattgagtgttattccattagacaaaagtcacacccacaaatcagtctgaaataagcc

SEQ ID NO: 485047 - DNA, 201 bp, Homo sapiens
tgacaatcaaaatgaactgcttttctgagacacagagcaaaaaattagatctattcaatccctttaggtcaagggactactgcataaaaggtgagtgagtragattttaagggctgattttgagagataaaattagttcagaccttctaaatcaaggatgggcacacagatgcctaaaagctgaaaaactggggaactttg

SEQ ID NO: 485048 - DNA, 201 bp, Homo sapiens
cctcccatctcctctgctgtggcacccaatgaaagccctctccctggcaatgctggttgtctccatgtttgactttctgtgcaaggagtaacggaacttasatggaaccccctgcattttggtaccagattttggtttcctcaccaggaaagtgttgctcatggctcggctatgtggggaaggagacttttggaagattcc

SEQ ID NO: 485049 - DNA, 201 bp, Homo sapiens
aaattgtgagtcatgttcctatttatttgtttttttcttgctgtttgctcttctttgggttttactaagtaaactgatttttcaaactttgtaatggaagrcttttatttggttctatggatagtcattttgtttctatgcatttccaacaattcatcatttgctctacttatctaaaaatcctaaactaccttcatcaag

SEQ ID NO: 485050 - DNA, 201 bp, Homo sapiens
caaacaagtcaggcctggtacccacttttaggccttttattcaaaataggcagtttccggggtgggaagggcatgctcttaggcaaagcatcttcctttgyctcagatcaagccccattgaaggactcagctgtgagcaatcagtggacacacaccccaccccccgacctggctgagagaatgagtcttgctggtgagggg

SEQ ID NO: 485051 - DNA, 201 bp, Homo sapiens
atagggtcaacactctcacaataaaagagagagagctcaactatgaatataaaaagggcaagtgaggatatatagccaaggagcagggagcagggttaatrgattaaaaaaaattactaagcagagacatcaaatgtgggagtttcttgctaaattgacctaacaatattcttgctaaaggcaggacaaagccttagacat

SEQ ID NO: 485052 - DNA, 201 bp, Homo sapiens
gaactggtgatgcctgcaggacatccagtgataacatcatgggcagggcaatgaggagcttcactgctggaagcctgagcttggttgagatgactcaagayaattgcaatagggtcaacactctcacaataaaagagagagagctcaactatgaatataaaaagggcaagtgaggatatatagccaaggagcagggagcag

SEQ ID NO: 485053 - DNA, 201 bp, Homo sapiens
gtagaggagagagatgtaaggaaagttatggatataaagatgcatttctttggtagggaagagaaaaaagaaagaataatttcgtatgaggaaagatctcwtatgggaaatttttgttttgaactaaaatgactggttattttaaaaagaaaatttaggacaaaacagaaagcccaagcatgtcatacattgtctgtgtaa

SEQ ID NO: 485054 - DNA, 201 bp, Homo sapiens
gagggagttaacacagcagctgacttctgtaggcaaggaaaactcccctcagacactttgctgcctggcctcctgccagcaacaagcaggagctgaaaacyagaagttgaggcgtgagtttggccactccgtagtgtgcacttggtgagggcagcaactcgccacagctgccaggcgtctgtccattcacccatctgtcca

SEQ ID NO: 485055 - DNA, 201 bp, Homo sapiens
ggcctcaggaagaggcctgctacagcatcatcctggccaagattcctccctgcagaggaccctggccacgctgccacagggtctgctggggccaccagaarcccatgttcctgcctccatctctcccctttgtgctcacctctcaccaggaggccctcccagagttcagtctcctgcttttttttttttttttttttttga

SEQ ID NO: 485056 - DNA, 201 bp, Homo sapiens
tgagaacccgggaaatggtgtggaggttccggggagccctgcccctacctggcaaccgcaatgcagcaggcaccaagttctcctgcacattgcgacagtgkgaccctgggctctggcgggcggtaggtggggcctttggacctaccagcagtgagggagttaacacagcagctgacttctgtaggcaaggaaaactcccct

SEQ ID NO: 485057 - DNA, 201 bp, Homo sapiens
aggaggcccatttgcatatcccaggtgggaacctgtctggccccgcctgaccctgctggccggtgcaggccccttcagtgaggccaattctccaaggctgsggtcttctcccagggtcatgggtgaaggggtttggaggctccctgcgtgggtactggcctgctggggtacacacaatgctgccatagccagtctgcccta

SEQ ID NO: 485058 - DNA, 201 bp, Homo sapiens
agctctaaagctgggatggcctcagaattgtttcatattggtgcaaacaagtcaggcctggtacccacttttaggccttttattcaaaataggcagtttcsggggtgggaagggcatgctcttaggcaaagcatcttcctttgcctcagatcaagccccattgaaggactcagctgtgagcaatcagtggacacacacccc

SEQ ID NO: 485059 - DNA, 201 bp, Homo sapiens
cctctgttcagctccaccttgatgctgactaggctgggccatgaggagagggttaggggatagagatgggagctggggagcagggctccactctgagacgkgggcagccttgccggatccagggcagagttaagcggccccagctctgctttcctagagctgctgagaacccgggaaatggtgtggaggttccggggagcc

SEQ ID NO: 485060 - DNA, 201 bp, Homo sapiens
tgaagccagatttagcatggagccaaattttacataaatgcttgcattgctttatttcacactgcctttgctattctgcatagatagtactagcactacartactggccatgtgcgtcaagtaaatgtctgaattcagtggtgttgctggactaaaatacattaatttgtacatctggaaaaaaatatccatcatttgtta

SEQ ID NO: 485061 - DNA, 201 bp, Homo sapiens
tccactactcttagttagagtttcctggaaacagatgctgaaatggagattcatgggcaagggtctcattgtaaagagtacaagggtggcagcggcgaggrgtggggcagagggagaagtcaggctggggtgcggctcagcagaagccacggccagccccacggagagctctaaagctctaaagctgggatggcctcagaa

SEQ ID NO: 485062 - DNA, 201 bp, Homo sapiens
ttttcagaatggtcaacatacatttttgtctgggttttgcatttgtctctactagatattttgaggtgtcagggtttggcacacaaagttataaaactatraacccagcaaaaacaaaatgatccttgttcatgtgatttttttgatgaagaagactaatttagtgttggtttaataaagacagctggatcttctgagtta

SEQ ID NO: 485063 - DNA, 201 bp, Homo sapiens
ttctgtgaataatgctgcaacaaacaagggagtggagatgtctcttcaatatactgattctcttcttttgggtatatacccagcagtgagattgctgggtyatatgtaacctagccacttaattacagtggtttgaggtcctgcaggcagtaactactcaacaccccatcacagtgttttaatttgtgacaagttagagag

SEQ ID NO: 485064 - DNA, 201 bp, Homo sapiens
atgtccaaatgaaggtagccttggattagagttgaataaaaataaaataccatattgttcagccctgatgctggtgacagggccagttattaatcagatcmtactgggttagaaattgaaaacacaaaacatctgaacacaatgactctttgtctagacagacaatggcatcaaaggcagcatctcctctaggcctccagc

SEQ ID NO: 485065 - DNA, 201 bp, Homo sapiens
tcttgtcacaaatatatctcttgtcacagccatgggcaaggatggggctactaacacagatggggacactagtcgaagggtaggtctatgggcaaaatgawggtcaatggacatacagaactggtgatgcctgcaggacatccagtgataacatcatgggcagggcaatgaggagcttcactgctggaagcctgagcttgg

SEQ ID NO: 485066 - DNA, 201 bp, Homo sapiens
gtgtcacaaacaacacagataatgtcaacaaggcctggccagcttcagttcacacccaagagaggtccagaccgcggtgccaacactgagaccaagaagtygtgacacaaaaatcaaatcttaaaaacacaaattggcctggcactgtggctcatgcttgtaatctcaatactttgggaggtcaaggtgggtgggtcatct

SEQ ID NO: 485067 - DNA, 201 bp, Homo sapiens
gtgaagtaaccagaagtttgaaacaagtttgtgcaattcagcttgccctcttgcaccctgctcttgccatgtgagaatatgaaaaatgtcagctatctccytggagaaggatcacagatgtggagcagagccagctcagacaatcccattccaggtcagtgactcccagctggactgcagatgtgagcaaaataactggtc

SEQ ID NO: 485068 - DNA, 201 bp, Homo sapiens
tatactataggtctacagtaatcaaaataccatggtactggtacaaaagcagacacatagaccaatggaaaagaatagagaacccagaaataaggctgcayacctccaatgatctgattttttacaaatctgacaaataaaagcaatagggacaggattccctgttcaatacatggtgctgggataactggctagccatat

SEQ ID NO: 485069 - DNA, 201 bp, Homo sapiens
agctgtggcaatgtgaagaacaaaaaaaaaaaaagaaagaaaatacaactcagagaattttacaggactttaattattattgtctggggaaagatgaggawtagagtggaaacatgatatatggacagatacatagatttgatacatagatatatacatagattagatagatgagatcaattgatcaatcaataggtatgt

SEQ ID NO: 485070 - DNA, 201 bp, Homo sapiens
ttcctctctcctctcattccctgccttcccgcctgtctctgcccctacaatggcagctccatgaggttctggccacttttaaccaggacttagggcagcayctgacacagaacagaaaagcaacacataatttttaagacatgaatgaattaattcttctaagtttacctcaattctacccttcattatggttgaagaaca

SEQ ID NO: 485071 - DNA, 201 bp, Homo sapiens
agcagatatgttccaggcaatctcccaggggttcccagtggaaatgagtcccacatgcccgtagcggtagcctggcaactcgcacttgctgtattgaccayttctcttccttgtctcatttcctcactgcttcagtagactttcctgggactacccaccaaataaaacacttgcaattgcatatttgtttctgcttctggg

SEQ ID NO: 485072 - DNA, 201 bp, Homo sapiens
ggactacccaccaaataaaacacttgcaattgcatatttgtttctgcttctgggtaggtcaatctagacagtcacctttatggaaaatataatacctgggsaatcacgaaagatgaagaggaatcaatgaaatgacacaggggaagggaattccaaaaaggaggagagtctgggccaagacacatggctgtgatttggtgt

SEQ ID NO: 485073 - DNA, 201 bp, Homo sapiens
tgccatagaccacctaattataggccaacgatttaggaagaaatgattgacctgtttaggactgactcagaaaattaaaacccaaagagtaattgcagccrtcacaacaactagttagtaaattgtttctctgaaccctaaatgtcccaatcaaagatactcatttatgcagcttctgaaacatgcctctggtgaagccag

SEQ ID NO: 485074 - DNA, 201 bp, Homo sapiens
taaactaaatttgaaattactttttaaaagccctcaaatctcagtgacttaaggcagcaacataacactctattattgtgactgctatttccacagatgcktggcatctgtgctgggggctctggaccacattgtggtcactctgggcctcaggatgatgaagtcaccctcataacaacagaggggccaaggcaatgagca

SEQ ID NO: 485075 - DNA, 201 bp, Homo sapiens
tgagaaatgaggaacttggtcagatgttgagggtgatcagataccaagggtgaggggattctttctgaactgacttagcaggattctttcctaaacctggscactgcagccctcgcaagagcaggaggtaggggctggggactagggttgaggccaagggaagacggtggctcagacgagcttaactaaggtttggtcaag

SEQ ID NO: 485076 - DNA, 201 bp, Homo sapiens
ctgaactgacttagcaggattctttcctaaacctggccactgcagccctcgcaagagcaggaggtaggggctggggactagggttgaggccaagggaagamggtggctcagacgagcttaactaaggtttggtcaaggtgagtcttatctctggatccagcccctctgtgacaggaggaaagggcaggcagggccacagga

SEQ ID NO: 485077 - DNA, 201 bp, Homo sapiens
tcatttgtagttctgcttaaatatattcctaggtatttcattagtttttgatagcgactataaatgggattgcttcttgacttggttctcagctacattgytattggtgtgtagaaactccaatgatttctgtacattaattttgtatcttgaaactttttaccaaatttaacaaatctaagagatttttggtgaagtatt

SEQ ID NO: 485078 - DNA, 201 bp, Homo sapiens
gattaggtccctcccctgcttaaaaccagtcgcctctctcaattgccttcaagacagttgagaatctggcacctctgtcactcctagctcccaagggctcygacagtgcaggaccacgccccctacatgcccagtgctccctgagacccgctcagcccctttctaccttcctcaccactcgcctgtcactccagggcaggg

SEQ ID NO: 485079 - DNA, 201 bp, Homo sapiens
aatccattttgagaaacctctaattaaggggaaatgccctccagcctgagccaaccccttaatgaatgaaagccgatggcctttcattctcctttgccccrggactctgaagaagccaaagcaagtttctaaggcaaagccaagcccctggctgccagaacacattgatcaatttctgttttcaacccctctccacctccc

SEQ ID NO: 485080 - DNA, 201 bp, Homo sapiens
ctcctagctcccaagggctctgacagtgcaggaccacgccccctacatgcccagtgctccctgagacccgctcagcccctttctaccttcctcaccactcrcctgtcactccagggcagggtttctcagccttagcattatggatatgctgggtcaaattattcttttcattgtgggctttgtcatgtggcctccatgcac

SEQ ID NO: 485081 - DNA, 201 bp, Homo sapiens
cgccccctacatgcccagtgctccctgagacccgctcagcccctttctaccttcctcaccactcgcctgtcactccagggcagggtttctcagccttagcrttatggatatgctgggtcaaattattcttttcattgtgggctttgtcatgtggcctccatgcacagctgtcgatcccatctctttagttgcgacaagcaa

SEQ ID NO: 485082 - DNA, 201 bp, Homo sapiens
attaactaactggaatcattcattaactgaaacaatttaaagtacctttatgttttatctaaagaaacaccattgttgatatcttcctaagcaagacttcraattaatgtccaggttaatgtcacatgctgaccctttctttaccctgcaacaaaggggtaaaaccccattcacaaagttacagatgaactcaagcaagga

SEQ ID NO: 485083 - DNA, 201 bp, Homo sapiens
tactttataccacctgccttcatttttttgtggtaaataataatttgctgaaatattttcatcaagggtcacaaaatttaaatggatttcatttatatatwtttaaattgacacaataattgcacatatttatcatatttatggagcatagtgtgatatttcaatacatatatataatatgtaatgatcaaatcagggtaa

SEQ ID NO: 485084 - DNA, 201 bp, Homo sapiens
agggacaggtttagatgccaagtactcatcagagtttcaatttaaggacactcggaagccatgggaggctgtgaaccaaggatcacaatctgatttgctgyggtgggtaggacagcacaggagtggaggcacagagtagagtgaagattcctcaaagatcagacagtcacaagacatccatgagcgttctcatagctgtgg

SEQ ID NO: 485085 - DNA, 201 bp, Homo sapiens
  misc_feature (1)...(201): n = A,T,C or G
accaggtgcactcaggattgtgagcaaatttctaggtgcagaacagtccagactctcagcccaaagttcaggccaggccagagcccacttgcctgcaggangcacaagggagggtagggacaggtttagatgccaagtactcatcagagtttcaatttaaggacactcggaagccatgggaggctgtgaaccaaggatcac

SEQ ID NO: 485086 - DNA, 201 bp, Homo sapiens
actcgtcttcatgtgaaagcatcctctaaccttcttaaggctaaaagaccacctggaaagagatgcccactgtgcctgctgagcacattcccagcctaccycacctgaatgcagcccgcgagtgaacccagcaagaccagcgcaagagccgaggacagctccagagtcgtgagaatccatacattacgtgactttcagcta

SEQ ID NO: 485087 - DNA, 201 bp, Homo sapiens
ctacatctcccacagtctttcccatcttggcaaatgcactctgtttaaagtccttctgctcatggctttctatatggacacctgcacagatagagaacagmaaacttgtattccaaataaagaaaggagaaggtgtaactgcattgttccatggactcacagtttctacttggagaagtaataagcacatgtggagatgcc

SEQ ID NO: 485088 - DNA, 201 bp, Homo sapiens
ttctgaatccagcctacatttcatgctctccatctgccttctcaccggcttgcatcctctttctatagcactagaactatcaaacccatcaagctgccccyggagggtgagcctttcaaaaaatcttaaacaggtgcaggaccaggtgcactcaggattgtgagcaaatttctaggtgcagaacagtccagactctcagcc

SEQ ID NO: 485089 - DNA, 201 bp, Homo sapiens
aggcaggggcccatgtgacaagcccctctcaccccgagagagctgaccaggcagctcacaagcagagccacatcctgggagtccgagaaaggtccgagaargctcagccacctcattggctatgggcagcctttgtcgtgtgagccttgctctcctggggaggctcaggctgacggctgatgtgggcattgccgagggtaa

SEQ ID NO: 485090 - DNA, 201 bp, Homo sapiens
gagactccgtctcaaaaaaaaagaaaaagaaaaaaaagttcttgtgacatttgtgtatgaaatcagccttcactacatggataggaccagcacgcttccgsggcacgactctgcaatcttactacattttttttttattttgtattttatttattccttttgagacagagtctcactctgtcacccaggctgaagtgcagc

SEQ ID NO: 485091 - DNA, 201 bp, Homo sapiens
gttatttcttgaaaacacttggcggcctccatgcttctgttttctttgagccaggtggtcaggagggcttacaaagaatgcctgggcttccccgcaggtgycggcagatggggtagcgaatggtcctgtgcctccacctgctccaggagggagtctcccatctctaggcctggccccttcctaaccctccacgtatcctgt

SEQ ID NO: 485092 - DNA, 201 bp, Homo sapiens
ccgttcagcccatcccccagttcactttgcttgtgggatctccccgttgctcctgcctgtggactgagtggcaggccatcctacaagcacccggacacttracatcagtggtgtcaagacaactctaagaaggttttccgtgatcctgcaagccctgcgttccttcctgggatcctgctttcaatttgattgcacaggtac

SEQ ID NO: 485093 - DNA, 201 bp, Homo sapiens
aggtgcatggccccactgtcaggctccctagtgagctgcgggttcagcaggagttgcccactgacacacaggggacacccactcctcccaccttgggagcrgttgcccgacagagccgcactgggtgctggtgtcatccagggaccccacacacttccttaaatgtgatcctgcttccctctgggcagctgcatcctctcc

SEQ ID NO: 485094 - DNA, 201 bp, Homo sapiens
cccagggctcccaggagcggttacctgggcactctgtgcccctccttcctgttcgggcccaggcctaggacctgccagtagggctcagttgcctggagccsgttcagcccatcccccagttcactttgcttgtgggatctccccgttgctcctgcctgtggactgagtggcaggccatcctacaagcacccggacacttga

SEQ ID NO: 485095 - DNA, 201 bp, Homo sapiens
cggttccccagggctcccaggagcggttacctgggcactctgtgcccctccttcctgttcgggcccaggcctaggacctgccagtagggctcagttgcctrgagcccgttcagcccatcccccagttcactttgcttgtgggatctccccgttgctcctgcctgtggactgagtggcaggccatcctacaagcacccggac

SEQ ID NO: 485096 - DNA, 201 bp, Homo sapiens
caccagtgcagggcgcccctgagcctgctgctgccacgggcccggtctctacccaggacgtccccccaccctcgcagtgtcagggaaattatcatggtggyggtgacactctgcaggcagggctgctgagagaagctgagaagggtcacactgcaggcaggggcccatgtgacaagcccctctcaccccgagagagctgac

SEQ ID NO: 485097 - DNA, 201 bp, Homo sapiens
caccctcgcagtgtcagggaaattatcatggtggcggtgacactctgcaggcagggctgctgagagaagctgagaagggtcacactgcaggcaggggcccrtgtgacaagcccctctcaccccgagagagctgaccaggcagctcacaagcagagccacatcctgggagtccgagaaaggtccgagaaagctcagccacct

SEQ ID NO: 485098 - DNA, 201 bp, Homo sapiens
caggcagggctgctgagagaagctgagaagggtcacactgcaggcaggggcccatgtgacaagcccctctcaccccgagagagctgaccaggcagctcacragcagagccacatcctgggagtccgagaaaggtccgagaaagctcagccacctcattggctatgggcagcctttgtcgtgtgagccttgctctcctgggg

SEQ ID NO: 485099 - DNA, 201 bp, Homo sapiens
ctgcacacagacgcagacagaaagccttcaagtggctctgttttctgctccctgccttgccaggtccacaagcagagaggagtgtcaggtgcatggccccrctgtcaggctccctagtgagctgcgggttcagcaggagttgcccactgacacacaggggacacccactcctcccaccttgggagcggttgcccgacagag

SEQ ID NO: 485100 - DNA, 201 bp, Homo sapiens
ccagccccacaccggctttgccaccacacaggcttttgaggcaggaggtgggtaagacgtagctgtagacccaaagcaaccaccagccctgggaccctgcrggagaggagcacttttagaacatggaaaagtgtggtcatcccatcattagacagcacacatcctacataaataaaaagtcgtatggggaaggaggttggg

SEQ ID NO: 485101 - DNA, 201 bp, Homo sapiens
gttttctgctccctgccttgccaggtccacaagcagagaggagtgtcaggtgcatggccccactgtcaggctccctagtgagctgcgggttcagcaggagytgcccactgacacacaggggacacccactcctcccaccttgggagcggttgcccgacagagccgcactgggtgctggtgtcatccagggaccccacacac

SEQ ID NO: 485102 - DNA, 201 bp, Homo sapiens
tgccaccacacaggcttttgaggcaggaggtgggtaagacgtagctgtagacccaaagcaaccaccagccctgggaccctgcgggagaggagcacttttasaacatggaaaagtgtggtcatcccatcattagacagcacacatcctacataaataaaaagtcgtatggggaaggaggttggggagggaataaaaaattgg

SEQ ID NO: 485103 - DNA, 201 bp, Homo sapiens
tgacaagcccctctcaccccgagagagctgaccaggcagctcacaagcagagccacatcctgggagtccgagaaaggtccgagaaagctcagccacctcaytggctatgggcagcctttgtcgtgtgagccttgctctcctggggaggctcaggctgacggctgatgtgggcattgccgagggtaacctgtggcccagtgg

SEQ ID NO: 485104 - DNA, 201 bp, Homo sapiens
ctaaatccacactgcacacagacgcagacagaaagccttcaagtggctctgttttctgctccctgccttgccaggtccacaagcagagaggagtgtcaggygcatggccccactgtcaggctccctagtgagctgcgggttcagcaggagttgcccactgacacacaggggacacccactcctcccaccttgggagcggtt

SEQ ID NO: 485105 - DNA, 201 bp, Homo sapiens
tggtttccagtttcaaggtaacagatgcacatcatgagaccagaggaggcagagacaagggctggatttggcttttctaagcaacatgcgttcctgcccasggctgaatggtcgctgagacagatggaagccaggacaggggagcccaccgggcccagataggtacagagagcagaggctcctgttctgtcctcgccaccc

SEQ ID NO: 485106 - DNA, 201 bp, Homo sapiens
tcgcccccaggggtggcttccccagatcccaggcctctaggccctgtagacacaagtttcccctgctgccacgcaggcgaggggagcctttgatgctgccwcctcccttagagctggggtaccgggtcactgctgaagacctggaccgggagaaggaggtggcattccagcgcatcaagagtgcactgcaggttgaggaca

SEQ ID NO: 485107 - DNA, 201 bp, Homo sapiens
agcccctctcaccccgagagagctgaccaggcagctcacaagcagagccacatcctgggagtccgagaaaggtccgagaaagctcagccacctcattggcyatgggcagcctttgtcgtgtgagccttgctctcctggggaggctcaggctgacggctgatgtgggcattgccgagggtaacctgtggcccagtggatatg

SEQ ID NO: 485108 - DNA, 201 bp, Homo sapiens
ctcgccacccacgagggtgacactgcttgtaaatggtggccgtgctctcccagcaagaaaaaagcacaactaaatccacactgcacacagacgcagacagraagccttcaagtggctctgttttctgctccctgccttgccaggtccacaagcagagaggagtgtcaggtgcatggccccactgtcaggctccctagtgag

SEQ ID NO: 485109 - DNA, 201 bp, Homo sapiens
caggacaggggagcccaccgggcccagataggtacagagagcagaggctcctgttctgtcctcgccacccacgagggtgacactgcttgtaaatggtggcygtgctctcccagcaagaaaaaagcacaactaaatccacactgcacacagacgcagacagaaagccttcaagtggctctgttttctgctccctgccttgcc

SEQ ID NO: 485110 - DNA, 201 bp, Homo sapiens
gaatggtcgctgagacagatggaagccaggacaggggagcccaccgggcccagataggtacagagagcagaggctcctgttctgtcctcgccacccacgasggtgacactgcttgtaaatggtggccgtgctctcccagcaagaaaaaagcacaactaaatccacactgcacacagacgcagacagaaagccttcaagtgg

SEQ ID NO: 485111 - DNA, 201 bp, Homo sapiens
tgcccacggctgaatggtcgctgagacagatggaagccaggacaggggagcccaccgggcccagataggtacagagagcagaggctcctgttctgtcctcrccacccacgagggtgacactgcttgtaaatggtggccgtgctctcccagcaagaaaaaagcacaactaaatccacactgcacacagacgcagacagaaag

SEQ ID NO: 485112 - DNA, 201 bp, Homo sapiens
caaggtaacagatgcacatcatgagaccagaggaggcagagacaagggctggatttggcttttctaagcaacatgcgttcctgcccacggctgaatggtcrctgagacagatggaagccaggacaggggagcccaccgggcccagataggtacagagagcagaggctcctgttctgtcctcgccacccacgagggtgacac

SEQ ID NO: 485113 - DNA, 201 bp, Homo sapiens
tcaaggtaacagatgcacatcatgagaccagaggaggcagagacaagggctggatttggcttttctaagcaacatgcgttcctgcccacggctgaatggtygctgagacagatggaagccaggacaggggagcccaccgggcccagataggtacagagagcagaggctcctgttctgtcctcgccacccacgagggtgaca

SEQ ID NO: 485114 - DNA, 201 bp, Homo sapiens
gactggtttccagtttcaaggtaacagatgcacatcatgagaccagaggaggcagagacaagggctggatttggcttttctaagcaacatgcgttcctgcscacggctgaatggtcgctgagacagatggaagccaggacaggggagcccaccgggcccagataggtacagagagcagaggctcctgttctgtcctcgcca

SEQ ID NO: 485115 - DNA, 201 bp, Homo sapiens
agacattgatagactggtttccagtttcaaggtaacagatgcacatcatgagaccagaggaggcagagacaagggctggatttggcttttctaagcaacaygcgttcctgcccacggctgaatggtcgctgagacagatggaagccaggacaggggagcccaccgggcccagataggtacagagagcagaggctcctgttc

SEQ ID NO: 485116 - DNA, 201 bp, Homo sapiens
atgcacatcatgagaccagaggaggcagagacaagggctggatttggcttttctaagcaacatgcgttcctgcccacggctgaatggtcgctgagacagakggaagccaggacaggggagcccaccgggcccagataggtacagagagcagaggctcctgttctgtcctcgccacccacgagggtgacactgcttgtaaat

SEQ ID NO: 485117 - DNA, 201 bp, Homo sapiens
ccttgagtccgggaattggaggctgcattgagctataatcgcaccactgcactccagcttgggtgacaaactgagaccctgtctctaaaagaaaaaaaatyggcctgtgagcatgggtttgattttcaaacaggacccggagggtagggacagacagtgctgtcacccttaggtgctgaacactcagaaacaggccagcgg

SEQ ID NO: 485118 - DNA, 201 bp, Homo sapiens
gagaagctgagaagggtcacactgcaggcaggggcccatgtgacaagcccctctcaccccgagagagctgaccaggcagctcacaagcagagccacatccygggagtccgagaaaggtccgagaaagctcagccacctcattggctatgggcagcctttgtcgtgtgagccttgctctcctggggaggctcaggctgacgg

SEQ ID NO: 485119 - DNA, 201 bp, Homo sapiens
actgcaggcaggggcccatgtgacaagcccctctcaccccgagagagctgaccaggcagctcacaagcagagccacatcctgggagtccgagaaaggtcckagaaagctcagccacctcattggctatgggcagcctttgtcgtgtgagccttgctctcctggggaggctcaggctgacggctgatgtgggcattgccgag

SEQ ID NO: 485120 - DNA, 201 bp, Homo sapiens
ctgcaggcaggggcccatgtgacaagcccctctcaccccgagagagctgaccaggcagctcacaagcagagccacatcctgggagtccgagaaaggtccgrgaaagctcagccacctcattggctatgggcagcctttgtcgtgtgagccttgctctcctggggaggctcaggctgacggctgatgtgggcattgccgagg

SEQ ID NO: 485121 - DNA, 201 bp, Homo sapiens
agacagaaagccttcaagtggctctgttttctgctccctgccttgccaggtccacaagcagagaggagtgtcaggtgcatggccccactgtcaggctcccyagtgagctgcgggttcagcaggagttgcccactgacacacaggggacacccactcctcccaccttgggagcggttgcccgacagagccgcactgggtgct

SEQ ID NO: 485122 - DNA, 201 bp, Homo sapiens
cccctctcaccccgagagagctgaccaggcagctcacaagcagagccacatcctgggagtccgagaaaggtccgagaaagctcagccacctcattggctaygggcagcctttgtcgtgtgagccttgctctcctggggaggctcaggctgacggctgatgtgggcattgccgagggtaacctgtggcccagtggatatggc

SEQ ID NO: 485123 - DNA, 201 bp, Homo sapiens
cacatcctacataaataaaaagtcgtatggggaaggaggttggggagggaataaaaaattggcacagacattgatagactggtttccagtttcaaggtaayagatgcacatcatgagaccagaggaggcagagacaagggctggatttggcttttctaagcaacatgcgttcctgcccacggctgaatggtcgctgagaca

SEQ ID NO: 485124 - DNA, 201 bp, Homo sapiens
ttggctatgggcagcctttgtcgtgtgagccttgctctcctggggaggctcaggctgacggctgatgtgggcattgccgagggtaacctgtggcccagtgkatatggccgggtctcctcaagctgcattcattcaagtaggacccagggtgcgtgcccatctccagcccagggcagctcccctgtaagctgggtgagctac

SEQ ID NO: 485125 - DNA, 201 bp, Homo sapiens
ttagaacatggaaaagtgtggtcatcccatcattagacagcacacatcctacataaataaaaagtcgtatggggaaggaggttggggagggaataaaaaaytggcacagacattgatagactggtttccagtttcaaggtaacagatgcacatcatgagaccagaggaggcagagacaagggctggatttggcttttctaa

SEQ ID NO: 485126 - DNA, 201 bp, Homo sapiens
tcccaccttgggagcggttgcccgacagagccgcactgggtgctggtgtcatccagggaccccacacacttccttaaatgtgatcctgcttccctctgggsagctgcatcctctcctcctgcaagattgtctggaaacttggctctcagtttgctctcccttctctcctctgcctgccccaaacccctctttctaaaaaag

SEQ ID NO: 485127 - DNA, 201 bp, Homo sapiens
accagccctgggaccctgcgggagaggagcacttttagaacatggaaaagtgtggtcatcccatcattagacagcacacatcctacataaataaaaagtcstatggggaaggaggttggggagggaataaaaaattggcacagacattgatagactggtttccagtttcaaggtaacagatgcacatcatgagaccagagg

SEQ ID NO: 485128 - DNA, 201 bp, Homo sapiens
cctgcattgcagaaggagagccgggtccccctcctggagaacgctgcgttccccagccccacaccggctttgccaccacacaggcttttgaggcaggaggygggtaagacgtagctgtagacccaaagcaaccaccagccctgggaccctgcgggagaggagcacttttagaacatggaaaagtgtggtcatcccatcatt

SEQ ID NO: 485129 - DNA, 201 bp, Homo sapiens
caaacccagggcccgaggcaaaaaagcatcacttccagccggggagtctggaagccacgccttgtgggaggtcacactggcatctaggccttcgcctgcaytgcagaaggagagccgggtccccctcctggagaacgctgcgttccccagccccacaccggctttgccaccacacaggcttttgaggcaggaggtgggtaa

SEQ ID NO: 485130 - DNA, 201 bp, Homo sapiens
tggctgagctcagattgcagctgctaagacaccagccacttaccaagagaaagccaggctgcttcaaacccagggcccgaggcaaaaaagcatcacttccrgccggggagtctggaagccacgccttgtgggaggtcacactggcatctaggccttcgcctgcattgcagaaggagagccgggtccccctcctggagaacg

SEQ ID NO: 485131 - DNA, 201 bp, Homo sapiens
tcggccacggtggtgtgtaggtggctgagctcagattgcagctgctaagacaccagccacttaccaagagaaagccaggctgcttcaaacccagggcccgmggcaaaaaagcatcacttccagccggggagtctggaagccacgccttgtgggaggtcacactggcatctaggccttcgcctgcattgcagaaggagagcc

SEQ ID NO: 485132 - DNA, 201 bp, Homo sapiens
gtcggccacggtggtgtgtaggtggctgagctcagattgcagctgctaagacaccagccacttaccaagagaaagccaggctgcttcaaacccagggcccraggcaaaaaagcatcacttccagccggggagtctggaagccacgccttgtgggaggtcacactggcatctaggccttcgcctgcattgcagaaggagagc

SEQ ID NO: 485133 - DNA, 201 bp, Homo sapiens
ggctgacggctgatgtgggcattgccgagggtaacctgtggcccagtggatatggccgggtctcctcaagctgcattcattcaagtaggacccagggtgcrtgcccatctccagcccagggcagctcccctgtaagctgggtgagctactgaagccaaggcgggaggcagctgacaacacccacggcccatgtggaggtgg

SEQ ID NO: 485134 - DNA, 201 bp, Homo sapiens
gagaaagctcagccacctcattggctatgggcagcctttgtcgtgtgagccttgctctcctggggaggctcaggctgacggctgatgtgggcattgccgarggtaacctgtggcccagtggatatggccgggtctcctcaagctgcattcattcaagtaggacccagggtgcgtgcccatctccagcccagggcagctccc

SEQ ID NO: 485135 - DNA, 201 bp, Homo sapiens
actgaggggctcatgccagagcggtggccacaggtaagaacccgggcccaggctgtgtgtggcgggaatcctccatgtcccagggcttagcatagcaaagraagatcagctgggtcaccctggtggccatctgtccctgtcccacctgtagagtcagaacagcctctccccagtggggatcatctctctctgccaaagcaa

SEQ ID NO: 485136 - DNA, 201 bp, Homo sapiens
catctaggccttcgcctgcattgcagaaggagagccgggtccccctcctggagaacgctgcgttccccagccccacaccggctttgccaccacacaggctkttgaggcaggaggtgggtaagacgtagctgtagacccaaagcaaccaccagccctgggaccctgcgggagaggagcacttttagaacatggaaaagtgtg

SEQ ID NO: 485137 - DNA, 201 bp, Homo sapiens
acccaaagcaaccaccagccctgggaccctgcgggagaggagcacttttagaacatggaaaagtgtggtcatcccatcattagacagcacacatcctacakaaataaaaagtcgtatggggaaggaggttggggagggaataaaaaattggcacagacattgatagactggtttccagtttcaaggtaacagatgcacatc

SEQ ID NO: 485138 - DNA, 201 bp, Homo sapiens
agactggtttccagtttcaaggtaacagatgcacatcatgagaccagaggaggcagagacaagggctggatttggcttttctaagcaacatgcgttcctgyccacggctgaatggtcgctgagacagatggaagccaggacaggggagcccaccgggcccagataggtacagagagcagaggctcctgttctgtcctcgcc

SEQ ID NO: 485139 - DNA, 201 bp, Homo sapiens
ttgagtccgggaattggaggctgcattgagctataatcgcaccactgcactccagcttgggtgacaaactgagaccctgtctctaaaagaaaaaaaatcgkcctgtgagcatgggtttgattttcaaacaggacccggagggtagggacagacagtgctgtcacccttaggtgctgaacactcagaaacaggccagcggca

SEQ ID NO: 485140 - DNA, 201 bp, Homo sapiens
agggtgacactgcttgtaaatggtggccgtgctctcccagcaagaaaaaagcacaactaaatccacactgcacacagacgcagacagaaagccttcaagtrgctctgttttctgctccctgccttgccaggtccacaagcagagaggagtgtcaggtgcatggccccactgtcaggctccctagtgagctgcgggttcagc

SEQ ID NO: 485141 - DNA, 201 bp, Homo sapiens
aggccagggctgctggtcgaggtccggccccatctcttccagcagaaagggagtaagcttgcagggaggctgggggacaagatcccaggatctcagcctcygctcatggatgagctctgagaccccaagtgagctgggggtgctccgtgcgcattggtttccccagctgtcaagtaaagggattggatgaggaagtcttgt

SEQ ID NO: 485142 - DNA, 201 bp, Homo sapiens
ccttcaagtggctctgttttctgctccctgccttgccaggtccacaagcagagaggagtgtcaggtgcatggccccactgtcaggctccctagtgagctgygggttcagcaggagttgcccactgacacacaggggacacccactcctcccaccttgggagcggttgcccgacagagccgcactgggtgctggtgtcatcc

SEQ ID NO: 485143 - DNA, 201 bp, Homo sapiens
caagtggctctgttttctgctccctgccttgccaggtccacaagcagagaggagtgtcaggtgcatggccccactgtcaggctccctagtgagctgcgggytcagcaggagttgcccactgacacacaggggacacccactcctcccaccttgggagcggttgcccgacagagccgcactgggtgctggtgtcatccaggg

SEQ ID NO: 485144 - DNA, 201 bp, Homo sapiens
tgcaggcaggggcccatgtgacaagcccctctcaccccgagagagctgaccaggcagctcacaagcagagccacatcctgggagtccgagaaaggtccgasaaagctcagccacctcattggctatgggcagcctttgtcgtgtgagccttgctctcctggggaggctcaggctgacggctgatgtgggcattgccgaggg

SEQ ID NO: 485145 - DNA, 201 bp, Homo sapiens
gcaggcaggggcccatgtgacaagcccctctcaccccgagagagctgaccaggcagctcacaagcagagccacatcctgggagtccgagaaaggtccgagmaagctcagccacctcattggctatgggcagcctttgtcgtgtgagccttgctctcctggggaggctcaggctgacggctgatgtgggcattgccgagggt

SEQ ID NO: 485146 - DNA, 201 bp, Homo sapiens
cccagccccacaccggctttgccaccacacaggcttttgaggcaggaggtgggtaagacgtagctgtagacccaaagcaaccaccagccctgggaccctgygggagaggagcacttttagaacatggaaaagtgtggtcatcccatcattagacagcacacatcctacataaataaaaagtcgtatggggaaggaggttgg

SEQ ID NO: 485147 - DNA, 201 bp, Homo sapiens
cacaccggctttgccaccacacaggcttttgaggcaggaggtgggtaagacgtagctgtagacccaaagcaaccaccagccctgggaccctgcgggagagragcacttttagaacatggaaaagtgtggtcatcccatcattagacagcacacatcctacataaataaaaagtcgtatggggaaggaggttggggagggaa

SEQ ID NO: 485148 - DNA, 201 bp, Homo sapiens
caggcaggggcccatgtgacaagcccctctcaccccgagagagctgaccaggcagctcacaagcagagccacatcctgggagtccgagaaaggtccgagaragctcagccacctcattggctatgggcagcctttgtcgtgtgagccttgctctcctggggaggctcaggctgacggctgatgtgggcattgccgagggta

SEQ ID NO: 485149 - DNA, 201 bp, Homo sapiens
ggcttttgaggcaggaggtgggtaagacgtagctgtagacccaaagcaaccaccagccctgggaccctgcgggagaggagcacttttagaacatggaaaartgtggtcatcccatcattagacagcacacatcctacataaataaaaagtcgtatggggaaggaggttggggagggaataaaaaattggcacagacattga

SEQ ID NO: 485150 - DNA, 201 bp, Homo sapiens
acattgatagactggtttccagtttcaaggtaacagatgcacatcatgagaccagaggaggcagagacaagggctggatttggcttttctaagcaacatgygttcctgcccacggctgaatggtcgctgagacagatggaagccaggacaggggagcccaccgggcccagataggtacagagagcagaggctcctgttctg

SEQ ID NO: 485151 - DNA, 201 bp, Homo sapiens
gtgagtgaggacggacctcaggctgtctcttcgggtcacacccattgtgaaaagacggcagatacagcaccagggcagacactcgcccccaggggtggctyccccagatcccaggcctctaggccctgtagacacaagtttcccctgctgccacgcaggcgaggggagcctttgatgctgcctcctcccttagagctgggg

SEQ ID NO: 485152 - DNA, 201 bp, Homo sapiens
tggcctcaatacctgcatgagcacagtcatgtccaggccagggctgctggtcgaggtccggccccatctcttccagcagaaagggagtaagcttgcagggmggctgggggacaagatcccaggatctcagcctctgctcatggatgagctctgagaccccaagtgagctgggggtgctccgtgcgcattggtttccccagc

SEQ ID NO: 485153 - DNA, 201 bp, Homo sapiens
ggcgcccctgagcctgctgctgccacgggcccggtctctacccaggacgtccccccaccctcgcagtgtcagggaaattatcatggtggcggtgacactcygcaggcagggctgctgagagaagctgagaagggtcacactgcaggcaggggcccatgtgacaagcccctctcaccccgagagagctgaccaggcagctca

SEQ ID NO: 485154 - DNA, 201 bp, Homo sapiens
gtcccaagtagctgggattacaggtgcctgccaccacagctggctaatttttgtatttttagtagagacagtgtttcaccatcttggccaggctggtctcrggctcctgacctcatgagccacctgcctcagcctcgcaaagtgttgggactacaggtctaaggcaccatgctcggccatatttatttatttaattattta

SEQ ID NO: 485155 - DNA, 201 bp, Homo sapiens
agttcctcaaacacagtgagtgaggacggacctcaggctgtctcttcgggtcacacccattgtgaaaagacggcagatacagcaccagggcagacactcgmccccaggggtggcttccccagatcccaggcctctaggccctgtagacacaagtttcccctgctgccacgcaggcgaggggagcctttgatgctgcctcct

SEQ ID NO: 485156 - DNA, 201 bp, Homo sapiens
cagccacagctgcagcaggtgcccagaggtcagaaccagagatcccagacctcccggaccagctcgtgccccaaacgaaaggccatctccagctcctacarctctacgggaggcctcccggaacgaaagcggaggagggggccagcctcatcccactgccagctgaccctcagttcctcaaacacagtgagtgaggacgga

SEQ ID NO: 485157 - DNA, 201 bp, Homo sapiens
gacgagctcctgcaccaaacgaaatgccatctccagctcctgcagctccacgggaggcttgccggggctaaagcggaggaggggaccagcctcatcccacwgccagctgaccctcagttcctcaaagacagtgggtgaggacaggcttcaggctgtctcttcgggtcacacccagtgtgaaaaggcagcagatatagcacc

SEQ ID NO: 485158 - DNA, 201 bp, Homo sapiens
tggacgagctcctgcaccaaacgaaatgccatctccagctcctgcagctccacgggaggcttgccggggctaaagcggaggaggggaccagcctcatcccrcagccagctgaccctcagttcctcaaagacagtgggtgaggacaggcttcaggctgtctcttcgggtcacacccagtgtgaaaaggcagcagatatagca

SEQ ID NO: 485159 - DNA, 201 bp, Homo sapiens
caatggaggcctctctctccctttgtgcccgggcccgggcctctgcagacagacctccatacccagaggtgagaaatcagatataaccagacatcccagayctcctggacgagctcctgcaccaaacgaaatgccatctccagctcctgcagctccacgggaggcttgccggggctaaagcggaggaggggaccagcctca

SEQ ID NO: 485160 - DNA, 201 bp, Homo sapiens
ccgggcccagataggtacagagagcagaggctcctgttctgtcctcgccacccacgagggtgacactgcttgtaaatggtggccgtgctctcccagcaagwaaaaagcacaactaaatccacactgcacacagacgcagacagaaagccttcaagtggctctgttttctgctccctgccttgccaggtccacaagcagaga

SEQ ID NO: 485161 - DNA, 201 bp, Homo sapiens
gagggtgacactgcttgtaaatggtggccgtgctctcccagcaagaaaaaagcacaactaaatccacactgcacacagacgcagacagaaagccttcaagkggctctgttttctgctccctgccttgccaggtccacaagcagagaggagtgtcaggtgcatggccccactgtcaggctccctagtgagctgcgggttcag

SEQ ID NO: 485162 - DNA, 201 bp, Homo sapiens
ccagggaagacagtgttgagggccctcaaggagagcggggcagggatgcctgagcaggacaaggaccctagagtccaagagaatcctgatgatcagagaakggtccccgaggtcaccggggatgcacggtctgcatttcggcccctgcgggacaatggaggcctctctctccctttgtgcccgggcccgggcctctgcaga

SEQ ID NO: 485163 - DNA, 201 bp, Homo sapiens
taaatccacactgcacacagacgcagacagaaagccttcaagtggctctgttttctgctccctgccttgccaggtccacaagcagagaggagtgtcaggtrcatggccccactgtcaggctccctagtgagctgcgggttcagcaggagttgcccactgacacacaggggacacccactcctcccaccttgggagcggttg

SEQ ID NO: 485164 - DNA, 201 bp, Homo sapiens
ctacaagcacccggacacttgacatcagtggtgtcaagacaactctaagaaggttttccgtgatcctgcaagccctgcgttccttcctgggatcctgcttycaatttgattgcacaggtaccacagcaagccagtgctgtgtgctctgagttccagggcgtcctccagctcagccactccactgagcacaaggactctctg

SEQ ID NO: 485165 - DNA, 201 bp, Homo sapiens
catcctacaagcacccggacacttgacatcagtggtgtcaagacaactctaagaaggttttccgtgatcctgcaagccctgcgttccttcctgggatcctsctttcaatttgattgcacaggtaccacagcaagccagtgctgtgtgctctgagttccagggcgtcctccagctcagccactccactgagcacaaggactc

SEQ ID NO: 485166 - DNA, 201 bp, Homo sapiens
gagggcagaacccagtgtcaacccttctgcctgtgggaggggctgctgaggcctgcggagaggccagggtggaggctcgtccccttgtccagcccttggcrtggtctccatcaggttcccagcccaccagtgcagggcgcccctgagcctgctgctgccacgggcccggtctctacccaggacgtccccccaccctcgcag

SEQ ID NO: 485167 - DNA, 201 bp, Homo sapiens
cccagtgtcaacccttctgcctgtgggaggggctgctgaggcctgcggagaggccagggtggaggctcgtccccttgtccagcccttggcatggtctccaycaggttcccagcccaccagtgcagggcgcccctgagcctgctgctgccacgggcccggtctctacccaggacgtccccccaccctcgcagtgtcagggaa

SEQ ID NO: 485168 - DNA, 201 bp, Homo sapiens
taagtgttcaaactatccccagagaactaggataaacttgaactcaagcaaactggtgtgtgataaatgctttaaaaggaatgtggaaaaaaaaaaaaaaagaagaaatgtacggagaaagaaatgaatgacaaatgcctgggaggtgggggaagtcttcacactggaattgatggtttccctgggctgtgaatgaatgta

SEQ ID NO: 485169 - DNA, 201 bp, Homo sapiens
tggtagttatttgaaagagagtcaaagatacgtgctctgggaattaccactaaatgaccaaaagttcacgtcaaaaaaataaaatcagatcaagttagaawtttttttttttttttttttttgagacagaatctcactcttgtcacccaggctggagtgcagtgacgctatctctgctcactgcaacctccgccttccgag

SEQ ID NO: 485170 - DNA, 201 bp, Homo sapiens
atgctccagtcactgtagtgagggcagtgttaataaagcctaaggaaggattttgaccttttttgtgattggctgttatacattaacaatctgtttacagycagtagagctgttcaaactgttttgtctatagttgattcctttaattttactgaattatgctgacaaggatgtaaagctttgtgttctgtttatgattga

SEQ ID NO: 485171 - DNA, 201 bp, Homo sapiens
cacccacctcagcctcccaaagttctgggattacaggtgtgagccaccgcacctggccagaaaaaattttattatgcacacaaaagaacagttggagattrgtcagatgctccagtcactgtagtgagggcagtgttaataaagcctaaggaaggattttgaccttttttgtgattggctgttatacattaacaatctgtt

SEQ ID NO: 485172 - DNA, 201 bp, Homo sapiens
ctgtgtgccttgtgaagagagctaagcctccacggccattggtttttgaccacccactccactttcactccattcacaggcttttctggaatttataactgcagtttctcccattgttttgagcagctgcagcaacccaaatacaaagtatggctttcataaacggataaaaacaccttggcgataatttccttcatcagt

SEQ ID NO: 485173 - DNA, 201 bp, Homo sapiens
ttccagtcgcctagcctgaagggaagccccggagctccagcttcaaggctcagctctcccagatgcaagtatctttacctccagccagctccttgtaaccytggcaacacggcccgcccacgaatcgtcacgctacgattggtccgtggcgctaaagcctgaaagcgaattcctcagacattggtccgagtcactgcgatg

SEQ ID NO: 485174 - DNA, 201 bp, Homo sapiens
ctactaaaaatacaattagctgggcgtggtggcaggcgcctgtaatcccagctactccggagggtgaggcaggagaattgctggaacctgggaggcagagrttgcagtgagccgagatcacgccattgcacttcagcctggatgacagagtgagactctgtctcaaaaaaaaaaaaaaaagaaaaagaaaaaaaaaattca

SEQ ID NO: 485175 - DNA, 201 bp, Homo sapiens
gccccggagctccagcttcaaggctcagctctcccagatgcaagtatctttacctccagccagctccttgtaaccctggcaacacggcccgcccacgaatygtcacgctacgattggtccgtggcgctaaagcctgaaagcgaattcctcagacattggtccgagtcactgcgatgctgacgctgtggttggtgagtttgg

SEQ ID NO: 485176 - DNA, 201 bp, Homo sapiens
agggaagccccggagctccagcttcaaggctcagctctcccagatgcaagtatctttacctccagccagctccttgtaaccctggcaacacggcccgcccrcgaatcgtcacgctacgattggtccgtggcgctaaagcctgaaagcgaattcctcagacattggtccgagtcactgcgatgctgacgctgtggttggtga

SEQ ID NO: 485177 - DNA, 201 bp, Homo sapiens
gaggcgggcagatcacgaggtcaggagattgagaccatcctagctaacacggtgaaaccccatctctactaaaaatacaattagctgggcgtggtggcagrcgcctgtaatcccagctactccggagggtgaggcaggagaattgctggaacctgggaggcagagattgcagtgagccgagatcacgccattgcacttcag

SEQ ID NO: 485178 - DNA, 201 bp, Homo sapiens
ccctggataagcacctggcagtgactcacctcaccgaggaggtgggtcagctgttgcagcactgcaccaaggaggagtttgagcggaggtatagcaccctkcgggaactggccgacagctggattgggccttatgagcaggtccaactctgattattctcgatgcccagagatgctcatgcacctgtgcacactcacatcc

SEQ ID NO: 485179 - DNA, 201 bp, Homo sapiens
cctatcctagctatggagttccccacagctgaggtccttctctcagccttccacatttgtaagttcctccaggccaagttctatcagctgtcccttgaacrgcccgtggaaaggctgctcctgacctccctgcagagcacaatgtgctcagccacagcaggcaacctgagaaagttgtatacactcctgagcaactgcatc

SEQ ID NO: 485180 - DNA, 201 bp, Homo sapiens
cctgggaggcagagattgcagtgagccgagatcacgccattgcacttcagcctggatgacagagtgagactctgtctcaaaaaaaaaaaaaaaagaaaaagaaaaaaaaaattcaggctagggggcatgcctgttatcccagcacttgggaggccaaagtgggaggattgcttgagcccaggagttcaagaccagcctggc

SEQ ID NO: 485181 - DNA, 201 bp, Homo sapiens
ttttagttcttatatatttgttgaaacagggtctcactctgtcccccaggctggagtgcagtggcacaatcagctcactgagccttcaactgctgggctcmagcgatcctcccacctcagcctctcaagtagttggaactggaggtgcacgccaccatgcctggctaattatttgattttgtacagactgggtcttgttat

SEQ ID NO: 485182 - DNA, 201 bp, Homo sapiens
ggaacctgggaggcagagattgcagtgagccgagatcacgccattgcacttcagcctggatgacagagtgagactctgtctcaaaaaaaaaaaaaaaagaraaagaaaaaaaaaattcaggctagggggcatgcctgttatcccagcacttgggaggccaaagtgggaggattgcttgagcccaggagttcaagaccagcc

SEQ ID NO: 485183 - DNA, 201 bp, Homo sapiens
ctggaacctgggaggcagagattgcagtgagccgagatcacgccattgcacttcagcctggatgacagagtgagactctgtctcaaaaaaaaaaaaaaaagaaaaagaaaaaaaaaattcaggctagggggcatgcctgttatcccagcacttgggaggccaaagtgggaggattgcttgagcccaggagttcaagaccag

SEQ ID NO: 485184 - DNA, 201 bp, Homo sapiens
gctggaacctgggaggcagagattgcagtgagccgagatcacgccattgcacttcagcctggatgacagagtgagactctgtctcaaaaaaaaaaaaaaaagaaaaagaaaaaaaaaattcaggctagggggcatgcctgttatcccagcacttgggaggccaaagtgggaggattgcttgagcccaggagttcaagacca

SEQ ID NO: 485185 - DNA, 201 bp, Homo sapiens
tcagctctcccagatgcaagtatctttacctccagccagctccttgtaaccctggcaacacggcccgcccacgaatcgtcacgctacgattggtccgtggygctaaagcctgaaagcgaattcctcagacattggtccgagtcactgcgatgctgacgctgtggttggtgagtttggatgtcagtcagagtcggaggcagg

SEQ ID NO: 485186 - DNA, 201 bp, Homo sapiens
ttgtaaatggtttttgagctccttatattaaccgttttcaaacactttccatgtgccaggcagtgttctctatgcatgctttaccctgcagggctttttttcagaattatagataaatgttatttttttgcatttgacagatgagaagatttgacagatgagaagtcaggcttagaggttaagacaggagttgaaaactca

SEQ ID NO: 485187 - DNA, 201 bp, Homo sapiens
attccggctatgtggctgtgggcagttggccttggagtatatctaaactgtggcctccactttcatttttcttgaaacattgctatcaactgggaagagtmtgtgactttatgcccagtttcccctctcagatttttatgacggttgtttttctttttgttatgccatttgagggattgatgtttcttaaactatgaagta

SEQ ID NO: 485188 - DNA, 201 bp, Homo sapiens
tcccaacctcaagttatctgcccaccttggcctcccaaagtactgggattacaggtgtgagccactgcacctggctagaatgctatttttttaaaaggccrtatgcagctctggccatacctatttaaatcccctggaaccatatctttccatagctaacttcttatcatttagatttcagctccaatgtcatccttctcc

SEQ ID NO: 485189 - DNA, 201 bp, Homo sapiens
ctctgttactctccataggcccatctttggaaaaaagatctgggaatgattgtctagcctccagcctcaacttacttgatgcttgagagactcaaagcccygtggtcagctgccctgcaaagaaagtattttgaccttggcatttggacagctcccatctctcccatggccctgacaatgctgaatgggctcctgattaag

SEQ ID NO: 485190 - DNA, 201 bp, Homo sapiens
gtatttatttatttttatttttgtagaggtgaggtctcactatgttgcccaaactgatattgaactcctaggctcaagtgatcctccctcctcggccttgsaaagtgctaggattacaggcatgagccactgtgcctggcccactgcattattatatagaggcaatcagcgttaccttcctgagagatactgaggctgaac

SEQ ID NO: 485191 - DNA, 201 bp, Homo sapiens
taacctaacgtattcacagagtctaggattaggacaaggacatcttcaagggaccattctgcctgccacaagaagattaataacctggaggtaaaaatggygtgagtcagtacagacgtaaacatgacgtgcttctattagaaaacagtgatgggctgggcacggtggctcacacttgtaatcctaatactttgggaggct

SEQ ID NO: 485192 - DNA, 201 bp, Homo sapiens
agttgactgctggttgtgatgttataaaggacattcttggatcatttattgcaaactggctctgtgcagagctcactgtcttgggctttttgagtgatacrtgggtgtcttgggggactggagggttggtgggggaaatgtttttaggaggtaatttagtacatgtttctgcagccaaatacacatattactgggtggtca

SEQ ID NO: 485193 - DNA, 201 bp, Homo sapiens
cctctcaaagtgctgggattaaagggatgacctactgcacccagcccaataacattttcgatgcgtaagtaccaacactgatttgatgttgctagttggtmatcttaatcctccaaggcctggtaaacacccagttttctaagtctgccatcttcaagggaactgaggacaagagaccagttagtaggcccttgcactact

SEQ ID NO: 485194 - DNA, 201 bp, Homo sapiens
ccacccagataatcccagataatttccctattttgaagtcagctgatagccaccttaattctatctgcaaccttaattctcctttgccatgtaacctaacrtattcacagagtctaggattaggacaaggacatcttcaagggaccattctgcctgccacaagaagattaataacctggaggtaaaaatggtgtgagtcag

SEQ ID NO: 485195 - DNA, 201 bp, Homo sapiens
aggttagaagtcaggcacaggtcttagcaggctaaatcaagatgtctgcagggctgtatttctttctggagtccctgggtaagaatccatttcccgccggstgcagtggctgatgcctgtaatcccagcactttgggaggccaaggtgggcagatcacttgaggtcagcagttcaagaccatcctggccaacatggtgaaa

SEQ ID NO: 485196 - DNA, 201 bp, Homo sapiens
agggaaataggtgctgcgggaactcagaagagaaaaatcactgcgagctagagacgtaagagtgaaagggaggcttgagctgggcccccaaagatggagarctgtcagaaggtgtattggttttctgtttgccactctagtgaattaccacaagtttaatggtgcaaagcaacacaaatttattatcttagagttatttag

SEQ ID NO: 485197 - DNA, 201 bp, Homo sapiens
atgaatgacaaatgcctgggaggtgggggaagtcttcacactggaattgatggtttccctgggctgtgaatgaatgtagagtgctagagtagatctgtggytaattactgagtaccatggaggcatttgaccagaagttgctgtgcagaaggacctacaggagcaaagacaaagatacatgaaagaaggttggcatgttag

SEQ ID NO: 485198 - DNA, 201 bp, Homo sapiens
aatggagagtagatgccatctaatcagctccagctgatggctgccatatgaaaataaagatctagtgttgccagaattttgggcaagagttgtcagaaatscacactttatgtggattttcccatttaaaaaaattgaatcagttcaaattttaactcagagcatgcgggccaactcagagttaaagcatatccgagtttg

SEQ ID NO: 485199 - DNA, 201 bp, Homo sapiens
ttctctatgcatgctttaccctgcagggctttttttcagaattatagataaatgttatttttttgcatttgacagatgagaagatttgacagatgagaagycaggcttagaggttaagacaggagttgaaaactcaaatgccttcagggattaggtgaaacaacccaatgtaagaaagttttaactttgaattttacttta

SEQ ID NO: 485200 - DNA, 201 bp, Homo sapiens
taagcttcattattggatatatatttgcttatttgtttacatgtttattgtgtatcttcccctagaacagtgctgacatatagtaagtgttcaacaaataytgtgtggatgaataattgaagagccaggtccctgctgtctccttaaacctctgttactctccataggcccatctttggaaaaaagatctgggaatgattg

SEQ ID NO: 485201 - DNA, 201 bp, Homo sapiens
gacctcgggtgcagctggagggtcatcttgcccgagcagtctactttgccatccctgccaaggaggacactgaaggcctggcccagatgttccaagtattyaagaagtttaatccagcatgggagagagtctgtaccatcctggtggatcctcatttccttccactgcctatcctagctatggagttccccacagctgagg

SEQ ID NO: 485202 - DNA, 201 bp, Homo sapiens
atgcaaagtgtctttgaccatttccctgagatcttatttatccaccggacctataacccaaggggtaaggtcttatataccttcctggtggatggacctcrggtgcagctggagggtcatcttgcccgagcagtctactttgccatccctgccaaggaggacactgaaggcctggcccagatgttccaagtattcaagaag

SEQ ID NO: 485203 - DNA, 201 bp, Homo sapiens
gctgggcacggtggctcacacttgtaatcctaatactttgggaggctaagacagggagattgcttgaaatgaagagtttgagaccagcccagactataatsctgggcaacaaaatgagatccccgtctccacaaaacaaaatttaaaattaggggccaggttgtggcagctcacacgtataattccagcactttggtaggc

SEQ ID NO: 485204 - DNA, 201 bp, Homo sapiens
tgttactctccataggcccatctttggaaaaaagatctgggaatgattgtctagcctccagcctcaacttacttgatgcttgagagactcaaagccccgtrgtcagctgccctgcaaagaaagtattttgaccttggcatttggacagctcccatctctcccatggccctgacaatgctgaatgggctcctgattaaggac

SEQ ID NO: 485205 - DNA, 201 bp, Homo sapiens
cagtgagccatgcttgcaccactgcactcctacctgagcaacagagaccctgtctcaaaaaaagagagaaagaagaaaaggaaaggaaaatgctcgtagcmcctaaaacagtgctcagtaaatgtttgctgaagctgtaactatagtatgtagtagaaagtggtagttatttgaaagagagtcaaagatacgtgctctggg

SEQ ID NO: 485206 - DNA, 201 bp, Homo sapiens
tgtacctggctcttctcacttaccaatatatcttggaaattatgccaccgtatgggcaatttgatttgactttcattgatttccttgtttttttttttgtttgtttgtttgtttttttgtttgttttttgcagttgttaactaaaaagttactccatgctggtgtctggagatacgttgttgaaaaatataaattgaatct

SEQ ID NO: 485207 - DNA, 201 bp, Homo sapiens
ctgtacctggctcttctcacttaccaatatatcttggaaattatgccaccgtatgggcaatttgatttgactttcattgatttccttgtttttttttttgtttgtttgtttgtttttttgtttgttttttgcagttgttaactaaaaagttactccatgctggtgtctggagatacgttgttgaaaaatataaattgaatc

SEQ ID NO: 485208 - DNA, 201 bp, Homo sapiens
agagattgcagtgagccgagatcacgccattgcacttcagcctggatgacagagtgagactctgtctcaaaaaaaaaaaaaaaagaaaaagaaaaaaaaaattcaggctagggggcatgcctgttatcccagcacttgggaggccaaagtgggaggattgcttgagcccaggagttcaagaccagcctggccaacatggtg

SEQ ID NO: 485209 - DNA, 201 bp, Homo sapiens
atccctaaaccttacttcattcaaagatctcaggcgttccctgcttttctttcttgatggggtttagcaggtgaaaccatgacatctctgggtcctctccyctctgtagagaccaggtatgttgccaggcagccgaatgacacctcagggaccttccatgggaccccctggctatggggggaacccttcagtccgacctgg

SEQ ID NO: 485210 - DNA, 201 bp, Homo sapiens
ctgcaccaattcttgatttgggccctgtgctgcctgcctcatagtatctgccttggtcttgcttggggcgttccaggggatgctgttggttcaaggacaasaccagaatgaagagggtctcacaagacacctgttatcctcttctttcaccctatctcttcccacccccagcttccctttgccccacaaagttcccatgtg

SEQ ID NO: 485211 - DNA, 201 bp, Homo sapiens
ccaggctatatgtcttctggaaagtgtggtgagtttgagtatagagatgatcatcctagatttcaattaatttttctgttcctaagattcgtgaactggtrccagaatcccaggcctatatggatctcttggcttttgaaaggaaactggaccagactatcatgaggaaacggctagatatccaagaggccttgaaacgtc

SEQ ID NO: 485212 - DNA, 201 bp, Homo sapiens; identical to SEQ ID NO: 254324

SEQ ID NO: 485213 - DNA, 201 bp, Homo sapiens
ataagatgattcagataagggagatcagtgagactagaatctctggggaaggcttcatggaaaatttgggatttgaagacgttcccagaaaggggagcacrgtaagctcagacaagaagataggaatgggcacagagtatgaactcatccgttgtcacccctcctgtgctgactgtgacgagttagagaggctgagcagag

SEQ ID NO: 485214 - DNA, 201 bp, Homo sapiens
ttaccattatagatctgggacttcctcttggtctctgctctgtttacatttacattccaattcaccaaaaatcctttattatgatgcctgattgcacaacrttttgaagcccatgttagcaacagtattctttgggaaacaggcaaaaccagaatgacagtccagccagcactccaagtgaacctaacctgctcctttctt

SEQ ID NO: 485215 - DNA, 201 bp, Homo sapiens
ttcagggttctgttgctactatgattggtttaatacctgcagatgcctactttgcctatctctcttaagagatattcagaagatattttttgagttttttyccattgttgttggggttcctttttcataggattttgtcttgggaagtttcttctggcctttcctaatgtgatttttattttctctcctctagtcagcctt

SEQ ID NO: 485216 - DNA, 201 bp, Homo sapiens; identical to SEQ ID NO: 254335

SEQ ID NO: 485217 - DNA, 201 bp, Homo sapiens
gagtttgagactagcctggccaacatggtgaaaccccatctctactaaaataaaaaaatcagccaggcgtggtggcgggtgcctgtaatcccagctacccrggaggctgaggcaggagaatcgcttgaacctgggaggtagaggctgcagtgagccgagattgcgccactgcactcccagcctggctgacagagtgagact

SEQ ID NO: 485218 - DNA, 201 bp, Homo sapiens
ttcctctgggagagcaccccctgacatcttcctctctgtagtggcacaggaccgccactacccaggagaccgatggctttcaggtgaagcggccgggagaygtgaatgtacggtgtactgtcctactgatgctggattaccaggtattctgtggtggtgtgagggggtccagctttcacagccacataccgtcagcagtct

SEQ ID NO: 485219 - DNA, 201 bp, Homo sapiens
tttgagaccagcctggccaacatggcgaaaccccgtctccactaaaaatacaaaaacttagctgggcgtggtggtgcgcgcctgtaatcccagctacttgrgaggctaaggcaggagaattgcttgaacccaggaagcagaggttgcagtgagccaagatcgtgccgctgcactccagcctgggtgacagagcgaaactct

SEQ ID NO: 485220 - DNA, 201 bp, Homo sapiens
taggctagtatagccgggcatggtggctcacacctgtaatcccagcactttgggaggccgaggccgacggatcgcttgaggtcaggagtttgagaccagcytggccaacatggcgaaaccccgtctccactaaaaatacaaaaacttagctgggcgtggtggtgcgcgcctgtaatcccagctacttgggaggctaaggca

SEQ ID NO: 485221 - DNA, 201 bp, Homo sapiens
cagctcttcctctgggagagcaccccctgacatcttcctctctgtagtggcacaggaccgccactacccaggagaccgatggctttcaggtgaagcggccrggagacgtgaatgtacggtgtactgtcctactgatgctggattaccaggtattctgtggtggtgtgagggggtccagctttcacagccacataccgtcag

SEQ ID NO: 485222 - DNA, 201 bp, Homo sapiens
gtttcttctggcctttcctaatgtgatttttattttctctcctctagtcagccttgtccaaatatgatgccactaaacaaaagaggaagttctcttccttytttaagtccttggtgattgaactggacaaagacctgtatgggccagacaaccatctggtagaagtgagtagctctgccttctaggctttgactctgattg

SEQ ID NO: 485223 - DNA, 201 bp, Homo sapiens
gtaacatatattcaaaatgtataacttcctaattattacattttattgtatttgtgcttttttttttttttttttttttggagacagagtctcactctgtygcccaggctggagtccagtggcgcgatctcggctcactgcaagctccgcctcctgggttcacgccattctcctgcctcagcctcccgagtagccgggact

SEQ ID NO: 485224 - DNA, 201 bp, Homo sapiens
ttaaattacataaacttataattaaatatattagactaaaagtgggtaacatatattcaaaatgtataacttcctaattattacattttattgtatttgtrcttttttttttttttttttttttggagacagagtctcactctgtcgcccaggctggagtccagtggcgcgatctcggctcactgcaagctccgcctcctg

SEQ ID NO: 485225 - DNA, 201 bp, Homo sapiens
gcagcgtgtctctgtagttggatatagtctctttgtcttccttcctttattccatattaattctggtaagggctttcttttcttttcttttctttctttcytttttttttttttttttttttgagacagacagaatctcactctgttgcacaatctcggctcactgcaacctctgcctcctgggttcaagcgattctcctg

SEQ ID NO: 485226 - DNA, 201 bp, Homo sapiens
aaggaaatgttatgatgcctcccaggtctctagcttgggtggacagtagtatttactatgactgggaagaggggaggaggaggagcaggtattggagaaasggtagtgagtttaatgtcaagtttaagcagttggattggttggagtatagaagatagactctgggctgcagactggggactcattaccctgtcactggta

SEQ ID NO: 485227 - DNA, 201 bp, Homo sapiens; identical to SEQ ID NO: 254340

SEQ ID NO: 485228 - DNA, 201 bp, Homo sapiens
agaagtggtggtgctgtgtcagcagatggtgctacagaactcatccttgagaatgcttggtggtggtggtggtggtggtggtggtggtggtggtggtggtrgttctttgagagaagctttgcagtcccttcacattactataaatggacgtgctgacagcttattttcacgttctgactagttctgtcccaacctgataat

SEQ ID NO: 485229 - DNA, 201 bp, Homo sapiens
gactgagaatttgagtataatctggctctcgcttagcttttggactctgtttttctatggagtcactactggagcaaagggttctcctctcattgtcctcyattccatccctaaaccttacttcattcaaagatctcaggcgttccctgcttttctttcttgatggggtttagcaggtgaaaccatgacatctctgggtcc

SEQ ID NO: 485230 - DNA, 201 bp, Homo sapiens
gatggctgacaaaattctacctcaaagggtgagtccaggctatatgtcttctggaaagtgtggtgagtttgagtatagagatgatcatcctagatttcaaytaatttttctgttcctaagattcgtgaactggtaccagaatcccaggcctatatggatctcttggcttttgaaaggaaactggaccagactatcatgagg

SEQ ID NO: 485231 - DNA, 201 bp, Homo sapiens
tattttctccttaggtgcagcagagacgacaagaattagagcaagccctgggaatccggaatacatagggcctctcccacagccctgattcgactgcaccrattcttgatttgggccctgtgctgcctgcctcatagtatctgccttggtcttgcttggggcgttccaggggatgctgttggttcaaggacaacaccagaa

SEQ ID NO: 485232 - DNA, 201 bp, Homo sapiens
aagggcaaattacttgctgaaagaatgccaagggtcggagcagttggagctctatatgatggtgccagctgtgggcagcatggtgactaggttggaagtgkcatgtggagttgtcaggcaccacctgccatttaacttctcatttttctagtttgaaaatggtatgagcttcgttcttcctttcagatccatgagacaata

SEQ ID NO: 485233 - DNA, 201 bp, Homo sapiens
gggtatacagagagacagaaacaagggcaaattacttgctgaaagaatgccaagggtcggagcagttggagctctatatgatggtgccagctgtgggcagyatggtgactaggttggaagtggcatgtggagttgtcaggcaccacctgccatttaacttctcatttttctagtttgaaaatggtatgagcttcgttcttc

SEQ ID NO: 485234 - DNA, 201 bp, Homo sapiens
tacaggcgtgcaccactttttgtattgaggtttcgccatgttggccacactagcgttgaattcctggccttgagtgatctgcccgtgttggcttcccagartgctgggattacaggtgtgagccaccgcacctggccaaaaaagttttaaaaattattattattatttcttttttgagacagagtctctctctgttgccca

SEQ ID NO: 485235 - DNA, 201 bp, Homo sapiens
aagcaagaagaggcagtttggtgtaactttgttctcttcaaagttaaggccatctggacctactgtgcctcagggtttcaccctgaatccacatttttttyccctcagacttctaaggcgaccttatcttttgactatgaagtgggtataggacagcacagcccttagaaaaacctgacagcttagtgtgtgcaatccttt

SEQ ID NO: 485236 - DNA, 201 bp, Homo sapiens
tgtatcctgacctttcaaagagttcactggtatgtataaagcctaaaactttcactggccattggtaaacagaaaagctcgcacacttgatgattatgatrcatttgtcctaagcaagaaaggccattaaatatttgctaaataacttagaataattgtgaaaatgaattctcagttatctttttatagaattattttccc

SEQ ID NO: 485237 - DNA, 201 bp, Homo sapiens
ctcttctgaaatacctactttagagaaagtgggtaaacataatatttgccctggctttattggatagcttagcccaaattttaactggcagaacacttttytaaatggagagaagagcttaaggcagagatttttcaaattagtagggatgtgagctttgctgagggtctttaaataatatgaaaacaagtcttttgagaa

SEQ ID NO: 485238 - DNA, 201 bp, Homo sapiens
aggtctcaatacagcaaaatgaaaacgaaaattgagaacattgctcattaggccagcaactttaaaattatttaatttgaaatataaaataggtggtcttmataaaaagatgcatgaaatttaccttaccttatattttatactttaagagtacattttatacaaatcagtaaccaggcttctttcatgtttaacctgaaa

SEQ ID NO: 485239 - DNA, 201 bp, Homo sapiens
aaagtatggtggccattggcggtgacaaaaggaaaagaagcaaagagactcagtccataatgctgattagttagaagaaagggctaggattgagaaagtaycaggaacttttaattatttaaaagagaatgctgactgttaatgttttaaatcttactgttcaaatgtactaatatgaatttttaccctttgtgcatgaat

SEQ ID NO: 485240 - DNA, 201 bp, Homo sapiens
ggagttgggcagtccagtgggtagacccaagcactttcttcagtaactaaatagcagggagctccgtattttcagagtcacacttttttttttttttttttaaagatcagtgtctcagttcatagggaggcagcaatttctacctttttttgtggggagaggggagaaagcaagaagaggcagtttggtgtaactttgttc

SEQ ID NO: 485241 - DNA, 201 bp, Homo sapiens
aagaaattaaaaatatatatcaacttctggataaatacacatgcctatgtatcctgacctttcaaagagttcactggtatgtataaagcctaaaactttcrctggccattggtaaacagaaaagctcgcacacttgatgattatgatacatttgtcctaagcaagaaaggccattaaatatttgctaaataacttagaata

SEQ ID NO: 485242 - DNA, 201 bp, Homo sapiens
ttaagaaatttgagatacatttttaaggaaagggcagaggtgtgtatttctttttcaattcatacagacacagccataaacatttcatcagttaacattaycttacttctgagatcaattaggtataaagatctatgattccagtttttaaaaagactatttcaaattattccccatgtaaaaaattctacattcacatac

SEQ ID NO: 485243 - DNA, 201 bp, Homo sapiens
gccacttccacccttcctacccctccacctcccttgtgcctttcactgccttttacagcatttacattacacttcagtaaaaagttgtggttttggctggttttttttttttttaaataaaaacagcactgaagaagtagaaggaagatattcagggtttttatttttattttttgagtctgggtctcgctctgtcaccca

SEQ ID NO: 485244 - DNA, 201 bp, Homo sapiens
gaagaagtagaaggaagatattcagggtttttatttttattttttgagtctgggtctcgctctgtcacccaggctggagtacagtggtgagatcatagctyactgtagcctcgacctcccgggctcaaagatcctcacacctcagccttccaagtagttgggactacaggcatatatcatcatgcctggctaaattaacta

SEQ ID NO: 485245 - DNA, 201 bp, Homo sapiens
gcccagcatgcctggaccctcaacacttaatagtgataataacatatatccaacccttggtaaatgccaggactcatcctaagacctacatcgataaactmctttaatcttcacaacactgggaaatatatatatatacttatcctccttttacaggtgagaaaactaagggacagacagataaatcccttgcccaaggtc

SEQ ID NO: 485246 - DNA, 201 bp, Homo sapiens
ccaaggcatgtcctgctgccaggcctgcagtcccttaactcccctctgacccagcctccacaatccccaagaaagggacaaggggcttcggagaggggccrggtgtactgcaggaacggaacagatgggtggtgggaagagcccagggcttcactagtgcagacgccgccggtacagcaccaccaggagtgtgactaccag

SEQ ID NO: 485247 - DNA, 201 bp, Homo sapiens
tcacccaggctggagtacagtggtgagatcatagcttactgtagcctcgacctcccgggctcaaagatcctcacacctcagccttccaagtagttgggacyacaggcatatatcatcatgcctggctaaattaactattttattttaagagatgtggtctagctatgttacccaggctggtctcgaactcctggcttctag

SEQ ID NO: 485248 - DNA, 201 bp, Homo sapiens
actgatggcaagatcctcgaagcagcccgagaacgggctgtctacctgggatgccagcacgccaggcttactcagctccgacccaaggcccctattctcaragctgctgtctagccaggctgagctgcctccagtggcgccggcgggtgttggagctgctggggtctcctgggaaagaaaggagagcactggaagggactg

SEQ ID NO: 485249 - DNA, 201 bp, Homo sapiens
agatttttttttttttttttttttttttttttttttttttagagatagggtcttgctttgttgcccaggcttgtctcaaactcctggcttcaagggatccycccacctcggcttcccaaaatgctgggattacaggcacaagccaccacatccaacctccctcatatttgactaagaagtctcataaatctgagaacacct

SEQ ID NO: 485250 - DNA, 201 bp, Homo sapiens
tgcccagcatgcctggaccctcaacacttaatagtgataataacatatatccaacccttggtaaatgccaggactcatcctaagacctacatcgataaacwcctttaatcttcacaacactgggaaatatatatatatacttatcctccttttacaggtgagaaaactaagggacagacagataaatcccttgcccaaggt

SEQ ID NO: 485251 - DNA, 201 bp, Homo sapiens
tttttttttttagagatagggtcttgctttgttgcccaggcttgtctcaaactcctggcttcaagggatcctcccacctcggcttcccaaaatgctgggaytacaggcacaagccaccacatccaacctccctcatatttgactaagaagtctcataaatctgagaacacctagcaaggaattaaggcgagggtgtggcac

SEQ ID NO: 485252 - DNA, 201 bp, Homo sapiens
aggcagagtccacgcattcttcccagggagaaagaagcagtgacagctcttgggctttgagggaaatgattcagcgggagaaagaaggtggagaggggctratatgcagataccattgctgcaggtggctctgcccctaagcactgaggagggcactggtccctctggccccacccagccttcaccccaaggtgaagtacg

SEQ ID NO: 485253 - DNA, 201 bp, Homo sapiens
cctgtaggaagccaacacagacggatctacaagaaccaaaaacagctatagctactcttctaaatctcagtgcctgacattgcctctctttctgcctcctytctccaccccccaaaaaatgtggtcctccttgacctgagggagcttccgtccaagtctgagctctgatcatcctgaagaatcaaagtatcatcatccctt

SEQ ID NO: 485254 - DNA, 201 bp, Homo sapiens
tactgtgtgtcccccattccagcgatggtggcccctctcagagtcaatacccttccttccaagagactgaacatacaactggacaatggccaggccacatrtgacaatagactctggccagaaacccatgaccagcctgggaagccaaggaagccaaaccacagcctcagcagcaatcggacccagaacagtctgaactta

SEQ ID NO: 485255 - DNA, 201 bp, Homo sapiens
tggtgctggctgttggcaggaggcctcagctcacaatgcaggctttcataggactacgtgagtgtcctttcaacatggcagcaggccttccctagagctaktgaaggatgagaaaacgacaaatcgcaatgtcttttatgacctaggctgggaagttatactccatcatttatgcaatatcctgttatcacacaggtcatc

SEQ ID NO: 485256 - DNA, 201 bp, Homo sapiens
aggtcttgtggagtcgcccacacaccacatacctgccctgaggccttcagggaccaatgcaacaggagaggcattcccaagcaccacatgttccagtggtscctcctgctccacctgggccaacagggctgaggcctggaggaggaagctcctctggaggacatggatgataacctggattgccagtggggaaggtctgga

SEQ ID NO: 485257 - DNA, 201 bp, Homo sapiens
gccaccacgcccggctaacttttttttgtatatttagtagagacggggtttcactgtgttagccaggatggtcttgatctcctgacctcgtgatccgcccrcctcggcctcccaaagtgctgggattacaggcgtgagccaccatgcctggcccttttttttttttttttgagacagggtctggctcagtcacccaaggtg

SEQ ID NO: 485258 - DNA, 201 bp, Homo sapiens
ctggggtctcctgggaaagaaaggagagcactggaagggactggggttggcagggagacgaacctggtagggcggtcccattcccaggccagggcatgaamtaacactccaacccctcaattcccaatctataatgcccctaggccaccttttcttggagcagtgggggtagaggggaccaagaatctgcaccaatggtgg

SEQ ID NO: 485259 - DNA, 201 bp, Homo sapiens
aacataccaagacccagtctcttaagtaaattttttaaaaaatcaatttagtttccaaatgagatcaacatattaacatattatatttgattgctttgccttttttttttttttttgaggtggagtttcactcttgttgctcaggccgaagtacaatggcacaatctcagctcaccacaacttccgcctcccaggttcaag

SEQ ID NO: 485260 - DNA, 201 bp, Homo sapiens
agaagagaaattcataacattaactacttacgttaggggctacagcccctaccgtaattttctaatcaggtagtttcttctatgcttggttaactggaatttgtgtgtgtgtgtgtgtgtgtgtgtgtgtgtgtgtgtgacagagtctcactctgtcacccaggctggagtgcagtgacacgacctcagctcaccgcaact

SEQ ID NO: 485261 - DNA, 201 bp, Homo sapiens
gaagagaaattcataacattaactacttacgttaggggctacagcccctaccgtaattttctaatcaggtagtttcttctatgcttggttaactggaatttgtgtgtgtgtgtgtgtgtgtgtgtgtgtgtgtgtgtgacagagtctcactctgtcacccaggctggagtgcagtgacacgacctcagctcaccgcaactt

SEQ ID NO: 485262 - DNA, 201 bp, Homo sapiens
gaagccgatttccagctgtatgtgataatgaaagggtttttctttcttatgttaaatacaagcgaagtgattaactggaagatagcgtctgattgcgaggwaatcagtgattcagatggtgtgggaatggcacctggggatgggggaggcaggacggagatggaggaagctggtgcagcctagcctgccttgtgccaagga

SEQ ID NO: 485263 - DNA, 201 bp, Homo sapiens
aagagaaattcataacattaactacttacgttaggggctacagcccctaccgtaattttctaatcaggtagtttcttctatgcttggttaactggaatttgtgtgtgtgtgtgtgtgtgtgtgtgtgtgtgtgtgtgacagagtctcactctgtcacccaggctggagtgcagtgacacgacctcagctcaccgcaacttc

SEQ ID NO: 485264 - DNA, 201 bp, Homo sapiens
gagaaattcataacattaactacttacgttaggggctacagcccctaccgtaattttctaatcaggtagtttcttctatgcttggttaactggaatttgtgtgtgtgtgtgtgtgtgtgtgtgtgtgtgtgtgtgacagagtctcactctgtcacccaggctggagtgcagtgacacgacctcagctcaccgcaacttcct

SEQ ID NO: 485265 - DNA, 201 bp, Homo sapiens
gaaattcataacattaactacttacgttaggggctacagcccctaccgtaattttctaatcaggtagtttcttctatgcttggttaactggaatttgtgtgtgtgtgtgtgtgtgtgtgtgtgtgtgtgtgtgacagagtctcactctgtcacccaggctggagtgcagtgacacgacctcagctcaccgcaacttcctcc

SEQ ID NO: 485266 - DNA, 201 bp, Homo sapiens
ttaggggctacagcccctaccgtaattttctaatcaggtagtttcttctatgcttggttaactggaatttgtgtgtgtgtgtgtgtgtgtgtgtgtgtgtgtgtgtgacagagtctcactctgtcacccaggctggagtgcagtgacacgacctcagctcaccgcaacttcctcctcccaggttcaagcgattctcctgcc

SEQ ID NO: 485267 - DNA, 201 bp, Homo sapiens
taggggctacagcccctaccgtaattttctaatcaggtagtttcttctatgcttggttaactggaatttgtgtgtgtgtgtgtgtgtgtgtgtgtgtgtgtgtgtgacagagtctcactctgtcacccaggctggagtgcagtgacacgacctcagctcaccgcaacttcctcctcccaggttcaagcgattctcctgccc

SEQ ID NO: 485268 - DNA, 201 bp, Homo sapiens
atgttgcccagggtggtctcgaactcctgagctcatagaatccacccactttggcttctcaaagtgctgggattacaggcgtgcgccaccatgcctggtgktttttttttttttttttttttttttgagacggagtctcacactgttgccggggctggtgtgcactggcgtgatctcggctcgccacaacctccacctccc

SEQ ID NO: 485269 - DNA, 201 bp, Homo sapiens
taatatgcagataccattgctgcaggtggctctgcccctaagcactgaggagggcactggtccctctggccccacccagccttcaccccaaggtgaagtaygctttctcaggtccccaaggatgggtggccaggtcccccactgggagtggaggtctcactcccttccttgggttctgacctccacattatctggctgtga

SEQ ID NO: 485270 - DNA, 201 bp, Homo sapiens
ggctcacaattctaaggacatcatcatgacagcaagtaggaaaaaaaattaaagtaattctttcaccaattaccagtttatctcttctccaattcctttgsatacgcctcctgcaagaagccgatttccagctgtatgtgataatgaaagggtttttctttcttatgttaaatacaagcgaagtgattaactggaagatag

SEQ ID NO: 485271 - DNA, 201 bp, Homo sapiens
gatactcatttctattcacagctgcatagcactccaatgtagatataccttggtttattgccaatgttctgtagatggacattgtctgagttatttccagkcttttgctatttacacagtgggctataatgactagccttggacatatatctttatttttgccaatgttatctttggcttagactactagaaatggaattg

SEQ ID NO: 485272 - DNA, 201 bp, Homo sapiens
cacaagttcgagaccacttctacaaaaaataaaaaataaaaaaaattaggccaggcacagtggctcatgcctgtaatccaagcactttgggaggctgaggygggcggatcactggaggtcaggagtttcagaccagcctggcccaacatggtgaaaccctgtctctactaaaaatacaaaacttagctgggcgtagtggtg

SEQ ID NO: 485273 - DNA, 201 bp, Homo sapiens
ttttttttttagagatagggtcttgctttgttgcccaggcttgtctcaaactcctggcttcaagggatcctcccacctcggcttcccaaaatgctgggatyacaggcacaagccaccacatccaacctccctcatatttgactaagaagtctcataaatctgagaacacctagcaaggaattaaggcgagggtgtggcact

SEQ ID NO: 485274 - DNA, 201 bp, Homo sapiens
gtttgctgttcaaagtaggccaagtcacggctttgagcggcatcatttgaaaagtgctgggatcagccaggcgcagtggctcactcctgtatcccagcacyttgggaagccaacgcaggtggagcacttgaggtcaggagttcaagaacagcctggccaacatggagaaaccccgtctctactaaaaatacgaaaattagt

SEQ ID NO: 485275 - DNA, 201 bp, Homo sapiens
cccctgtcacagccacctggagccacagagccccaggtgagggcctgtggcatggcacctccctctcctggaacttccggtcggcttgtggcctggggccrccatccgggtccgcaggtggcccagggttgccctccaggagctggatgctggggttctcagccacgtggatcccaaaggtgccctcggacttatactcat

SEQ ID NO: 485276 - DNA, 201 bp, Homo sapiens
tttgctgttcaaagtaggccaagtcacggctttgagcggcatcatttgaaaagtgctgggatcagccaggcgcagtggctcactcctgtatcccagcactytgggaagccaacgcaggtggagcacttgaggtcaggagttcaagaacagcctggccaacatggagaaaccccgtctctactaaaaatacgaaaattagtc

SEQ ID NO: 485277 - DNA, 201 bp, Homo sapiens
aaacagaataccactctgtcgcccaggctggagcgcagtggcacaatctcggctcactgcaacctccgcatcctgggttcatggaattctcgtgcctcagyctcctgaatagctgggattacagacgtctgccactacacctggctaattttcttatttttgtagagacggggtttcaccctgttggccaggctggtcttg

SEQ ID NO: 485278 - DNA, 201 bp, Homo sapiens
agagcatctcctagatttttttttttttttttttttttttttttttttttttagagatagggtcttgctttgttgcccaggcttgtctcaaactcctggcytcaagggatcctcccacctcggcttcccaaaatgctgggattacaggcacaagccaccacatccaacctccctcatatttgactaagaagtctcataaat

SEQ ID NO: 485279 - DNA, 201 bp, Homo sapiens
attataactgtagttctagaagtaataatagcagatttattgtacagaagtgtccacgggctcacaattctaaggacatcatcatgacagcaagtaggaaraaaaattaaagtaattctttcaccaattaccagtttatctcttctccaattcctttggatacgcctcctgcaagaagccgatttccagctgtatgtgata

SEQ ID NO: 485280 - DNA, 201 bp, Homo sapiens
gaggtgctggcactgatggcaagatcctcgaagcagcccgagaacgggctgtctacctgggatgccagcacgccaggcttactcagctccgacccaaggcycctattctcagagctgctgtctagccaggctgagctgcctccagtggcgccggcgggtgttggagctgctggggtctcctgggaaagaaaggagagcact

SEQ ID NO: 485281 - DNA, 201 bp, Homo sapiens
ggcccctctcagagtcaatacccttccttccaagagactgaacatacaactggacaatggccaggccacatatgacaatagactctggccagaaacccatraccagcctgggaagccaaggaagccaaaccacagcctcagcagcaatcggacccagaacagtctgaacttagtggctgccagcttcttcccaatccccag

SEQ ID NO: 485282 - DNA, 201 bp, Homo sapiens
tcctttgcaaactttgaccaaatggcctctctgctcttgtttaggtggtttttatttccacatctccaacagggagtctggaaacaaactgacaatactcrtgaaatcaacacccagatgaggtagaccagcactccaggatgcccctccccagtatccctcccctgttaactgttcccctggcttctaacaccatggatc

SEQ ID NO: 485283 - DNA, 201 bp, Homo sapiens
cttgtccctttgccacccctaatgcctgcccccacttcatattccaggaacactccattaaaccaccccctactgtactggtgggtggtgggagggggctyatcgggtggggtctttgccgtattattctgtgtcactgaggcctatcacagtgctctgcacatgtaggtgcaaatatctgttgtatgattacataaaaga

SEQ ID NO: 485284 - DNA, 201 bp, Homo sapiens
cctcctctgaagacaggatcctgcgctactccaactctgaactggttcaaggtgagagacgtcatccacagaggccacaaaaccaagaggtggatgcctcrttgttacttcatgctgtctgggagcaaagagagggccttaggcacaaaatcctccagacccgcatctgccccttggctttctcaacccttcactctccaa

SEQ ID NO: 485285 - DNA, 201 bp, Homo sapiens
cgaaaattagccaggtgtggtggcgggcatctgtaatcccagctacttgagaggctgaagcaggagaatcacttgaacctgggaggcggaggttgcagtgmgccgaagttgcaccactgcactccagcctgggcaacagagcaacactctgtctcaaaagaaaagaacctctgcagaatgaggggaagcagggaagcaggc

SEQ ID NO: 485286 - DNA, 201 bp, Homo sapiens
acagctgcccctggcttccctgaggtccacaggaacctccagaccttcccaggattgcccagcaggggagggggcccagtggggcaggaactcaaggcagwtgggctcctggagagcagccaccctgccgctcctgcctgcctcaatgcaacggtctcaggctgggctgccaggatgggaggcaggtcttgtggagtcgcc

SEQ ID NO: 485287 - DNA, 201 bp, Homo sapiens
ggcatgtcctgctgccaggcctgcagtcccttaactcccctctgacccagcctccacaatccccaagaaagggacaaggggcttcggagaggggccaggtrtactgcaggaacggaacagatgggtggtgggaagagcccagggcttcactagtgcagacgccgccggtacagcaccaccaggagtgtgactaccagcacc

SEQ ID NO: 485288 - DNA, 201 bp, Homo sapiens
gcccactgggcagtgatcctaatgccccttgggcagtgatccttattcccctctcccataatgattggttgtagcaggctgaacaaaaaggttgagcttcrcttgtgcttgctgaatagaattctcacgcccactccacgttagctcccctcactgtaggactagctctgaaaattctagctcctgtaggaagccaacaca

SEQ ID NO: 485289 - DNA, 201 bp, Homo sapiens
gccaggcacagtggctcatgcctgtaatccaagcactttgggaggctgaggcgggcggatcactggaggtcaggagtttcagaccagcctggcccaacatrgtgaaaccctgtctctactaaaaatacaaaacttagctgggcgtagtggtgcgtgcctgtaatcccacttactccagaagctgaggcagaagaactgctt

SEQ ID NO: 485290 - DNA, 201 bp, Homo sapiens
tcacagcttactgcagcctcaaacccctgggttcaagcaattctcccacttcagcctcccaagtacctggaggtacaggtgtgcaccaccacgcccagctaattttttttttttttttttttttagagacaagggtctcactatgttgcccaggctggtctcaaactcctggcctcaagcgatcctcccaccttggcctcc

SEQ ID NO: 485291 - DNA, 201 bp, Homo sapiens
tttgttttgttttgtttttttgaggcagagtctctgtcgcccaggctggagtgcagtgacgctatgtcggctcactgcaagctccgcctcccaggttcacrccattctcctgcctcagcctcccgagtagctgggactacaggctacctgccactatgcctggctaattttttttttttttttttttttttttttagtaga

SEQ ID NO: 485292 - DNA, 201 bp, Homo sapiens
cggctcactgcaagctccgcctcccaggttcacgccattctcctgcctcagcctcccgagtagctgggactacaggctacctgccactatgcctggctaattttttttttttttttttttttttttttagtagagtcggggtttcaccgtgttagccaggatggtctcaatctcctgacctggtgatccgcccacctcagc

SEQ ID NO: 485293 - DNA, 201 bp, Homo sapiens
tgctgatcaaatttagtccagttggtccagggctacttaaacttgatccccagacaactctggacccactgcaaagcatgctagataatgtcacaggagargaaaacagattaggaaaaacatttgtattaaatctgaccaacaataactagttttgaatacaatgttttatacagataagttaaaataaacaaaaaaaaa

SEQ ID NO: 485294 - DNA, 201 bp, Homo sapiens
gccaaggcctatgtgcctggaaaccagcagggctgctgcaggaggagggctgcagaatgctccagctcagacctgactcagggttttagagggcatagggyataaggctgtggacatagacagccctactgcgcaggaagagcataaaccagccggagggcatgcatgtgggctgctgttagattctgttctcctttgagg

SEQ ID NO: 485295 - DNA, 201 bp, Homo sapiens
gaatgctccagctcagacctgactcagggttttagagggcatagggcataaggctgtggacatagacagccctactgcgcaggaagagcataaaccagccsgagggcatgcatgtgggctgctgttagattctgttctcctttgaggtagggaaggatgtgtttctattttatggatgagcaaactgaggcagagtgctgg

SEQ ID NO: 485296 - DNA, 201 bp, Homo sapiens
gacatgggcctatcagggccatgggcatgatgtcagccaaggaactcgcggcctgcctctgccaagagaccagcatctcggcctgagcactcccagcctcscatcgccttcaacctggctgcattcagctgccatgcccctacctccttgtgtggtcagcaccctccaggacttcatcttgggtcacccaaaggccgagga

SEQ ID NO: 485297 - DNA, 201 bp, Homo sapiens; identical to SEQ ID NO: 354172

SEQ ID NO: 485298 - DNA, 201 bp, Homo sapiens
acccaaaggcctgggcacctgtgattagtgcatggtccattgacctcatggggcaactgagcagcacgtactcaggccagcaccagcgtgttccccacgcwactggcgctcttaatgaactgctacagctgtggatgggttgtagggccacgcgtacattaatggacatctatgtgcagtgcctctcggctctcattggta

SEQ ID NO: 485299 - DNA, 201 bp, Homo sapiens
aatagtacctaacttattgaactgttgtcaggattgaaataatacacgcaaagtacttaaaagagtacctgatatattctaagagttatctgttgctgatwttattactgttgtcattgaaagaaacatagcttttggccgggcacgtggctcacgcctgtaatcccagcactttgggaggacgaggcgggaggatcacaa

SEQ ID NO: 485300 - DNA, 201 bp, Homo sapiens
gcgcctctcaggtagttagagcccttggcaccttccccccatcgcgcggccccgcgccgatccctagccttctcggtagaaacccggatcctacctcgagractcacgtcagggttctcagattcttggtcaggtcctcccagaactcagggactgcttcaccaaaactcagggctccagtgcccgccctcccgacctcgg

SEQ ID NO: 485301 - DNA, 201 bp, Homo sapiens
gaactgttgtgatatcgcaggtggcatgtactttttttttttttttttttttgagacacaggtagcatgtactctctctcagtttttttattttgagacagagtcttactcttttgcccaggctggagtgcagcctcattgcgacctcagcctctcaggctcaagctcagcctcccgagtagtgggattacaggcgcaagc

SEQ ID NO: 485302 - DNA, 201 bp, Homo sapiens
gcactccaaaggtagcaaatgacattggtagcgacttcaagggtctttgcgggaaataaaaaaaataaaataaaaagtgaggtctttaccaattttttttkttgttgttgtttaaatagagacagagtcttattctgttgcccaggctggagtacagtggtgtgatcatagctcactgtagccttgacctcccgggctcaa

SEQ ID NO: 485303 - DNA, 201 bp, Homo sapiens
gacctctcacagctgggtaaatgtgcaaaaaatgggagataagtattaatatagcaaagagtgaagcatttcatggaaaacatttctttttttctttttctttttttttttttttgagacagagtctcactctgttgcccaggctggagtgccatagtgcaatctcggcttactgcaatccccacctcccgggttcaagtg

SEQ ID NO: 485304 - DNA, 201 bp, Homo sapiens
gcgcaagaatcacttgagcctgggaggcagaggttgcagtgagctgacattttgccactgcactccagcctgggcaacagagtgagactgtctgaacagaaaaaaaaaaaaaaaaattaggaattcggcgaataaaaaagaatttaggaatttgggaggctgtggtgggaggatcgcttaagcccaagaatttgaggctgc

SEQ ID NO: 485305 - DNA, 201 bp, Homo sapiens
agactggtcttgaacttctgacctcaagtgatccacctgtctcagcctcctaaagtgctgggattacaagtgtgagccactgcgcccagcctcttttttgtttttttttttttgagaaggaggcttgctctgttgcccaggctggagtgcactggtgcaatctcggctcactccaacctccgcctcctgggttcaagtgat

SEQ ID NO: 485306 - DNA, 201 bp, Homo sapiens
cctcactgcaacctctgcctcctggattcaagtgattcacctgcctcagcttcccaagtagctgggattacaggtgcctgccaccatacccggctaatttytgtatttttaatagagatggggtttcaccatgctggccaggctggtctcaaactcctggtgtcaagcaatccacccatctcccaaagtgctgggattgca

SEQ ID NO: 485307 - DNA, 201 bp, Homo sapiens
tgaggcacgagaatcacttgaacccaggaggcgaaggttagagagagccaagatcataccactgtgctccagcctgggcaaaagagcgagattctgtctcaaaaaaaaaaaaaaaagattttgtttaatcctaacagtaatcctataaggccaggatgcttatctgtcttttacaggcaatactaagggaggctcagagag

SEQ ID NO: 485308 - DNA, 201 bp, Homo sapiens
aaaaaagtttaggataaatgcaaataaggtaatgtagataaagtgtttagcatagaggctgactccttagtaagcacacaataaaaatatatgaataaataataaaataaatcattttattaaataataaatcgttattatagtctgtatactgtatcttttatggataaggttcctcttctgttaggaaagtaacatttc

SEQ ID NO: 485309 - DNA, 201 bp, Homo sapiens
gaaaggttgctgttgatccttgttgtaaggtttccttttgacttacaagaatggaaatgaggaagtaggaaagagatagcatggttcactacagtctaacrtaagtactaccagcaaattgatagtcatgttcagaaatgaactctgcattgaacacactcatggcatttgaccagtgattttgcttctaggaaatattca

SEQ ID NO: 485310 - DNA, 201 bp, Homo sapiens
aaaaagtttaggataaatgcaaataaggtaatgtagataaagtgtttagcatagaggctgactccttagtaagcacacaataaaaatatatgaataaataataaaataaatcattttattaaataataaatcgttattatagtctgtatactgtatcttttatggataaggttcctcttctgttaggaaagtaacatttct

SEQ ID NO: 485311 - DNA, 201 bp, Homo sapiens
caaaaaatgcatatgatgacattttgcctctcggcttcttaggatctcctttgcccatgtttagttatttttctaaaaaataaaataaatatttgatgttrgcaataaaattatgacatataagaccttaaagtacttagtaagggaatgaaaaccaaagtactggttatttaacacagtagcgacatcaacctccgtaaa

SEQ ID NO: 485312 - DNA, 201 bp, Homo sapiens
tgaatccagaaaagactgaaagaatatactaataaatgttaatcatatttatttctgatggaagataatctttgctttctttttcttttcttttttgagamaggttcttgctctgttgcccaggctggagtgcattggcacaatcatagctcactgcagcctcaaactcttgggctcaagtgatcttcccacctcagcctc

SEQ ID NO: 485313 - DNA, 201 bp, Homo sapiens
aaaagtttaggataaatgcaaataaggtaatgtagataaagtgtttagcatagaggctgactccttagtaagcacacaataaaaatatatgaataaataataaaataaatcattttattaaataataaatcgttattatagtctgtatactgtatcttttatggataaggttcctcttctgttaggaaagtaacatttctg

SEQ ID NO: 485314 - DNA, 201 bp, Homo sapiens
gcgtgcagcaggaaggaggactcttttgccgcggactcaagccggaagccgccttcctagtggagacgcgagtgggggaggagcagtccgaggggaacgtrggttgaacgttgcaactagggtggagatcaagctggaacaggagttccgatcgacccggtaccaagaaggggagtgcccgcggcaggtaagggagaagag

SEQ ID NO: 485315 - DNA, 201 bp, Homo sapiens
tccagcagcactttctatgatggaaatcttctatatctgcactgtccaataaggtgtagctgctagcacatgtggccactgagtacttagaatatagctasgacaaccgagaggctgaattttaaatttaatttaatgaattcaaacaaatttatttttaatacagcactttaaattttatttttaaattttaatctatta

SEQ ID NO: 485316 - DNA, 201 bp, Homo sapiens
taatgaattcaaacaaatttatttttaatacagcactttaaattttatttttaaattttaatctattatttatttagagactgggttatgagactggctamtttttgtatttttggtagagacggcgtttcaccatgttgcccaagttagtctcaaactcccgggctcaagtgatccacctgccttggcctccccgcaaag

SEQ ID NO: 485317 - DNA, 201 bp, Homo sapiens
ctgcaacctctgcctctcgggctcagcgattctcccacctcagcctcctgagtggttgggaccacaggcgcatgccactacatctggctaattttttgtaragatggggttttgccatgttgcccaggctggtctttaactcctgggctcaagcgatcctcccaccttggcctaccacgcatgcccggccgcaacagggat

SEQ ID NO: 485318 - DNA, 201 bp, Homo sapiens
ttaaaaaacattttccattttaaaataattttactatttacctgtgatactgttgaaaattatgaaaaaacagataatttaaaatttagtgcttttttttwaaaaaaaaaaaaaagcgaatccctgggacacttcatatagtgcaaaacaacaattcaagaattcaagcattgaaagaaataatctcttatcccccagtct

SEQ ID NO: 485319 - DNA, 201 bp, Homo sapiens
agatagatgtgactcttacaggagcagcagggatttcccactttgggcggaaagcagcatttaggtattccccctccagtgcagttacagaccaccccccsgtagaagctgctcctgtcctctgtggcatgtcagcctctgattatcttttaataaacaatatggcatattaagtctcttttatgcccttctttgtattcc

SEQ ID NO: 485320 - DNA, 201 bp, Homo sapiens
aggtattccccctccagtgcagttacagaccacccccccgtagaagctgctcctgtcctctgtggcatgtcagcctctgattatcttttaataaacaatayggcatattaagtctcttttatgcccttctttgtattcccaggtaccacctccatgtcaggataacaagaatttggtaatgtttgttgaataaatttagca

SEQ ID NO: 485321 - DNA, 201 bp, Homo sapiens
ataaatttagcagaagttgaaagaaaaatcctgtttctacagaaagataccactggcttttggggagcccgagttcatgatgaaactaaagaaagccacawaagttcacctcaatgccaagacatttcttgatttttgaaaacccagttgtcgaaccacccatctatagaaacttgaaagactaaaaactatcttactcta

SEQ ID NO: 485322 - DNA, 201 bp, Homo sapiens
gtaaaatcagacaagaatatggccgagagattaaattccttgaaggggctatgccaagcaaacaaaacaaaacaaaaacagtccttcagggcgatctcaaraagtctagacacaaagatatacccatacagtattccctatctatccgcccgagtctgctctgaatgagtatctaactggtcacttaaacgattttaaaat

SEQ ID NO: 485323 - DNA, 201 bp, Homo sapiens
aaagtttaggataaatgcaaataaggtaatgtagataaagtgtttagcatagaggctgactccttagtaagcacacaataaaaatatatgaataaataataaaataaatcattttattaaataataaatcgttattatagtctgtatactgtatcttttatggataaggttcctcttctgttaggaaagtaacatttctgt

SEQ ID NO: 485324 - DNA, 201 bp, Homo sapiens
tggcaatttatttcccctgaaaatgtaaataatctctggcagagcaatctattaagtgatcatcagccactaacaccttagggtagaacagctcagatcasagtcttaaaataaattccatcagtatgaaattttctttattactgctccgctactggaatgttagatcactgtctgctttaataataattctggtgtagg

SEQ ID NO: 485325 - DNA, 201 bp, Homo sapiens
aagtttaggataaatgcaaataaggtaatgtagataaagtgtttagcatagaggctgactccttagtaagcacacaataaaaatatatgaataaataataaaataaatcattttattaaataataaatcgttattatagtctgtatactgtatcttttatggataaggttcctcttctgttaggaaagtaacatttctgtt

SEQ ID NO: 485326 - DNA, 201 bp, Homo sapiens
caaaaggagatacactgggcaaaggagaccaaatgtctaattcaaatgctctgggaacactcccacccaacaggaattttatactatttaaatataaccartatgaacaagtattagctaagaaactttgattgtacatttacactctaaactgacaaagtagcttgctaaatttctctcagattctactgtaaaacgtgt

SEQ ID NO: 485327 - DNA, 201 bp, Homo sapiens
acgtttatcacatgactggcaaaaatgaagtattagtgtcaattcacagcattttcaaaataccaacgatttatttttcaatttttttttctttttgagasagagtctcactctgtcacccaggctggagtgcagtggtgtgatctcggctcactgcaacctctgcctcccgggtttaagcaattctcttatctcagcttc

SEQ ID NO: 485328 - DNA, 201 bp, Homo sapiens
gaggcctcttgggtgcattgggatccttgaacttcttttttgtctcccctttgggagggatataggttttcatttctctttcataacgggccttgtccgcytttgccatatcttcaaattttcctttctctttagcagacatggtctacaaaataattatttgtaagtttaagttgtaacatttaagtaaattatcctcaa

SEQ ID NO: 485329 - DNA, 201 bp, Homo sapiens
tcaaaataccaacgatttatttttcaatttttttttctttttgagacagagtctcactctgtcacccaggctggagtgcagtggtgtgatctcggctcacygcaacctctgcctcccgggtttaagcaattctcttatctcagcttcccaagtagctgggactacaggcgccgccaccatgcccagctaatttatatatat

SEQ ID NO: 485330 - DNA, 201 bp, Homo sapiens
acctctgcctcccgggtttaagcaattctcttatctcagcttcccaagtagctgggactacaggcgccgccaccatgcccagctaatttatatatatatatatatatttgttgttgtcgttgttgttgttgttgttattgtttgagacggagtcttgcccttgtcacccaggctggagtacagtggcgccatctcagctca

SEQ ID NO: 485331 - DNA, 201 bp, Homo sapiens
cctccagagtagctgggactacaccatgcctggctaatttttgtatttttagtagagatggggtttcaccatgttggccaggctcgaactcctgacctcaratgatccgcccgccttggcctctcaaagtattgggattacaggcatgagccactgcgcctggcctctgagagccttctgctctgaagttctgtgatttgg

SEQ ID NO: 485332 - DNA, 201 bp, Homo sapiens
atccgaacacttatgggaggctgaggtgggaggatcgcttgagcctaggaatttaagaccagcctgggcaagatagcgagacttcatctctactaaaaataaaaataaaaaaatagctgggtgtggtggcacatgtccatagtcccatctacttgagatgccaaggtaggaaggttacttgagcccaggaattcaaggctg

SEQ ID NO: 485333 - DNA, 201 bp, Homo sapiens
gcttgaacccaggagatggaggttgcagtgagccaagatcacaccactgcactctagcctgagtgacagagtgacactctgtctcaaaaaaaaaaaaaagwaaaaaggccgggcgcggtggttcacgcctgtaatcccagcactttgggaggccaaggtgggcggatcacgaggtcaggagatcgagaccatcccggctaa

SEQ ID NO: 485334 - DNA, 201 bp, Homo sapiens
caactcgggaagtattttttggagccgtgaaagttggggtgactcctgcgcggggcgagccccccgcccctagaacttcgccggtggccgcgcggccgagragagaggacgcggcccggctcccaggcccgaggccgccacgtgcgcccggcaggccctgcaggcccgcgccgccgccgcccccattttgtcaggctcggc

SEQ ID NO: 485335 - DNA, 201 bp, Homo sapiens
acctaatttatttcctcaaatgtattaaactacttgagagtaagcttagataatctttcctgttttaatgttgatttctttttaaaagaaaatacactatyggactcagggattatagtcttggtgaatggacaatatatcacacatgcacatgaaaaagactataatattaaagaggatataaattggtatactgcacat

SEQ ID NO: 485336 - DNA, 201 bp, Homo sapiens
gttgcagtgagccaagatcacaccactgcactctagcctgagtgacagagtgacactctgtctcaaaaaaaaaaaaaagtaaaaaggccgggcgcggtggytcacgcctgtaatcccagcactttgggaggccaaggtgggcggatcacgaggtcaggagatcgagaccatcccggctaacacagtgaaaccctgtctcta

SEQ ID NO: 485337 - DNA, 201 bp, Homo sapiens
actccttcctagtcaaagaaactctgcacattgctcaaccctggctgagcaagggaaaaggcctctaaataaagctttcctactttgctaggaaaagtcarcttcgaatcactggaccataaaatcttattggagttacagagtgagataggttaatcagcatgtggtacatctatctactgaagccaagttttttttttc

SEQ ID NO: 485338 - DNA, 201 bp, Homo sapiens
tggggagcccgagttcatgatgaaactaaagaaagccacataagttcacctcaatgccaagacatttcttgatttttgaaaacccagttgtcgaaccaccyatctatagaaacttgaaagactaaaaactatcttactctaaacattttctaggaagttgattctacaacacattttggttttccaatttggcttctaata

SEQ ID NO: 485339 - DNA, 201 bp, Homo sapiens
ctgcctcagactcctgagtagctgggactacaggcacgcgccatggctaatttttgtatttttagtagagacagggtttcattatattggacaggccggtsttgaactcctgacctcgtgatccacctgccttggcctcccaaagtgctggaattacaggtgtgagccagcgcgcctggcctattttattttatctttaat

SEQ ID NO: 485340 - DNA, 201 bp, Homo sapiens
gttagttccgttaggataattgcctccagttacattcatgtcactgcaaaggatttgatttcattctttttaatggctgtgtagtattccatgttgtatakgtaacacattttctttatccactcatcaattaatgggcacttacattgatttcatgtgtttgctattgtgaacggtgctgcaatgaacatctgagcgcag

SEQ ID NO: 485341 - DNA, 201 bp, Homo sapiens
acatttattatttcataaagtttctgtggtcagaaatccaggagcagcttaactgggtggatctggctcagctgtagacaagatgtcggctgggacggccrtcctttgagggctctgagggctttgagggctgcacgatccaattgcaaggtggctcactcacatactaggcaagttactgctgggtgctgggaggagacc

SEQ ID NO: 485342 - DNA, 201 bp, Homo sapiens
ttacactgcaattgcatattatatagtatgtaggtgaacaaatactgggttagtcagtggacctacatttgaatactggttctgctcctagacagctgtaygatttgaatgacttctttatattttcatagtttctctgttcttctctgtaaaacaaaggcttagaagatattatgggttagattatgccccttacaaaag

SEQ ID NO: 485343 - DNA, 201 bp, Homo sapiens
ttttccacaagtgtctccaactcctcaggcaaaagagacacccacaggtctccccccccccttcttgccccacattcacgcccaaagccgttgagataagrggccccaggcttttaatggcccttcaaaagtgagggcgacactatgggatcatgtcccctgaaaactggggtctctgctggtgctgaggggcggaagccg

SEQ ID NO: 485344 - DNA, 201 bp, Homo sapiens
atagtatgtaggtgaacaaatactgggttagtcagtggacctacatttgaatactggttctgctcctagacagctgtacgatttgaatgacttctttataytttcatagtttctctgttcttctctgtaaaacaaaggcttagaagatattatgggttagattatgccccttacaaaagatgctgaagtcctaaactacaa

SEQ ID NO: 485345 - DNA, 201 bp, Homo sapiens
ctcagtttcctcaacatttccttagggctgtcactaccttagtctaacttgaaaggatgtttcatgactaaatggagaggcaagaagaaagaccagaggcraaagagagggagatggtgctatatgtgttcatgtatggagaaggagaacctcttccccagctgcttaagtacctcctgcctcagcccgagttttccgggg

SEQ ID NO: 485346 - DNA, 201 bp, Homo sapiens
gggttagattatgccccttacaaaagatgctgaagtcctaaactacaatacctgtgaatgtgactttatttggaaatagggtctttgcaagtgataaagawgaggtcatggagtgacctaatccaatacgaccagtgtccttataaaaaaaaaggaaatttggatacagatacacacaaacaaggagaatatcaaatgaac

SEQ ID NO: 485347 - DNA, 201 bp, Homo sapiens
gtcagatagtaaacattttaggctttgtgggccaaacaaggtttctgttacattttttttttataactccttaaaaatgtaaaaatcaccctcatcccaayggactacaggaacagacctcaggtcacatttgactcatagcctgacccctggtgtgtagggttaacaagcctcctttccctgggctcctttctctttcag

SEQ ID NO: 485348 - DNA, 201 bp, Homo sapiens
aaggcaatttttcctatagaaacccaaatctataaattatatacaaactgtggtaagttactcgataccttgccaggactcatctatggtggtagatagaycacaaagagtaccactgaaagatccctttcctaatcacagtttcctcactggcttgccacaaaacctaaaattcttctattctttcattggcaatttatt

SEQ ID NO: 485349 - DNA, 201 bp, Homo sapiens
ttatttcaatactgtcttatcttctcaatgtctcatattacaaaatattcatgagaatgattaagatactttcagtggcatcgatgatattaaaatttgaygattagttgaatatggcactatcaatattttccaggagcagtgttggctttgtactggcacggccatacactttactggttgtctataccagcttgctcc

SEQ ID NO: 485350 - DNA, 201 bp, Homo sapiens
ggaaaagtcagcttcgaatcactggaccataaaatcttattggagttacagagtgagataggttaatcagcatgtggtacatctatctactgaagccaagttttttttttcaggatttgtccaaaagatgttaccactctttgtacaacaaaatgatattaggatagggcccactctctgcatatgctggtgtggttgaaa

SEQ ID NO: 485351 - DNA, 201 bp, Homo sapiens
tctttgtacaacaaaatgatattaggatagggcccactctctgcatatgctggtgtggttgaaagaaccagtgtccttttcacacgtaagccatgctcagsctatcccctcatcttgcttacagcagctgctacttgtaccatctggtgcttcatttggcatttgtttttgttgggcccctttttttttttttgctttgag

SEQ ID NO: 485352 - DNA, 201 bp, Homo sapiens
ggaaactaatactttgttgaaaattcttataaaacaagttgtatttcataagattgcacagaaacaaaatattaaactccattattaacataaaaaaaaamccatcaggtctcacgggaactcactcgctaccataagaacagcatggggaaatggcccctgtgattcaattacctccatctggtctctcccttgacaggt

SEQ ID NO: 485353 - DNA, 201 bp, Homo sapiens
tctctctctctctctttttttttttttttttttttgagacagggtctcgcctaggctggagtgcagtgatgcgacttcagctcactgtctctctctctctytttttttttttttttgagatagggtctcacctaggctggagtgcagtggcgtgacctcggctcactgcagtctcctcccacctctcccctcccttcaccc

SEQ ID NO: 485354 - DNA, 201 bp, Homo sapiens
cgctaccataagaacagcatggggaaatggcccctgtgattcaattacctccatctggtctctcccttgacaggtggggattacaattcaagatgagattggggggggggacacaaagcctaaccatataatgggggtttcgtcatgttgcccaggctggtctggagcttctgagctcaagcgatctgtccgctttggcct

SEQ ID NO: 485355 - DNA, 201 bp, Homo sapiens
gccctcagggccctccctaatctggcagtttctctcttgctttccctcctgctgccctcctgatttctaatcaaactggaccttgtactttcccaccttcragattctggtcacactgtttctctggcctgtaatgtccttccccctcctctgctgctaaaacccaatctctccttttaaatatttactgtgtgacaataa

SEQ ID NO: 485356 - DNA, 201 bp, Homo sapiens
gctaccataagaacagcatggggaaatggcccctgtgattcaattacctccatctggtctctcccttgacaggtggggattacaattcaagatgagattggggggggggacacaaagcctaaccatataatgggggtttcgtcatgttgcccaggctggtctggagcttctgagctcaagcgatctgtccgctttggcctc

SEQ ID NO: 485357 - DNA, 201 bp, Homo sapiens
tttgttcatttattttaattttagagatgtgtagaatattcactttgacaacaaaatgtgtattcactaaattcaatgaattcagtctaggttttccttamatatatatttgtttgtttattttaattttagagatggggtctcactatgttgcccaggctcaagggatcctcctgcctcaggctcctgaatagctggaac

SEQ ID NO: 485358 - DNA, 201 bp, Homo sapiens
taccataagaacagcatggggaaatggcccctgtgattcaattacctccatctggtctctcccttgacaggtggggattacaattcaagatgagattgggkggggggacacaaagcctaaccatataatgggggtttcgtcatgttgcccaggctggtctggagcttctgagctcaagcgatctgtccgctttggcctccc

SEQ ID NO: 485359 - DNA, 201 bp, Homo sapiens
aagtggaactctcataacaaccactaactactcggaactgctatgctaggtaacatatacgtgtgtgtgtgtgtgtgtgtgtgtgtgtgtgtgtgtgtgtktgttttcagcgaaatttttttcctgaatatgaaagtcacacatgctcattgtaaaatattttacagctggtgcggtggctcacgcctgtaatcccagcac

SEQ ID NO: 485360 - DNA, 201 bp, Homo sapiens
gtggaactctcataacaaccactaactactcggaactgctatgctaggtaacatatacgtgtgtgtgtgtgtgtgtgtgtgtgtgtgtgtgtgtgtgtgtkttttcagcgaaatttttttcctgaatatgaaagtcacacatgctcattgtaaaatattttacagctggtgcggtggctcacgcctgtaatcccagcactt

SEQ ID NO: 485361 - DNA, 201 bp, Homo sapiens
acttgaaaggatgtttcatgactaaatggagaggcaagaagaaagaccagaggcaaaagagagggagatggtgctatatgtgttcatgtatggagaaggagaacctcttccccagctgcttaagtacctcctgcctcagcccgagttttccggggggaaatcagcagcttctccgtgggcagcattgatgatagccatcaa

SEQ ID NO: 485362 - DNA, 201 bp, Homo sapiens
aaaatgtactcttttgctcctggtctctttcattcaccattaattttgtctgattcacccacgtcgctgcatgtggtggcaattcattcattcttgttcatatatatatatatatatatatatatatatatatatatatatataaaattgatgtatccaatgttaatgaggatggacttgtgactatttccattctgggga

SEQ ID NO: 485363 - DNA, 201 bp, Homo sapiens
gaaagagcccagacataagaaggccacatattgtatgattccatttatataaaatatccagaacaggaaatattatagacagggaagtagattagtggctkccagggtttggggaaaaagagagtgcctgctaatgggtatggagtttcttttaggggtacaaaaatgttgcagattagattatagtaatggcagcatgac

SEQ ID NO: 485364 - DNA, 201 bp, Homo sapiens
aaagtatatttttgctgcaaaatattatagtaattttaaacaagcgcttttatagggataccgtgggaggcttttctggagagccgggggtgaccgtaatragtatgcccagccatgaagggttaggactgacagcgtaaactggcccctctctggccttatctgacccacagacgtttcattcggtcaaagcggtgtttt

SEQ ID NO: 485365 - DNA, 201 bp, Homo sapiens
aaaaggtagacattgggcaggtatggtggctcacacttgtaatcttagcactttgggaggccgaggcagaagaggagttcaaggatgcagtaagcagtgaytgaaccactgcactccagcctgggcgacagagcgagatggtctctctctcctttttttttttttttttttttgagatggtttcgctctatcgcctaagct

SEQ ID NO: 485366 - DNA, 201 bp, Homo sapiens
tcccagcactctgggaggccgcggtgagcggattgcttgagcccaggagttcaagaccaggctgggcaacatggcaaaaacccggctctactaaaaatgcaaaaaaaaaaaaaaaaaaaatttagctgggttttggtggcttatgcctgcagtcccagctactcgggaggctgactcgggaggctgaggcacaagaatcat

SEQ ID NO: 485367 - DNA, 201 bp, Homo sapiens
tgatcagagattctttttataggaaacacttattgtcatcatacaaaccatagagtgggaaactgagaaacagaactgttgtgatatcgcaggtggcatgyactttttttttttttttttttttgagacacaggtagcatgtactctctctcagtttttttattttgagacagagtcttactcttttgcccaggctggagt

SEQ ID NO: 485368 - DNA, 201 bp, Homo sapiens
cctcctgctgccctcctgatttctaatcaaactggaccttgtactttcccaccttcaagattctggtcacactgtttctctggcctgtaatgtccttcccsctcctctgctgctaaaacccaatctctccttttaaatatttactgtgtgacaataaagatgctttcggaagttaaagcatgtgattttctacatataacc

SEQ ID NO: 485369 - DNA, 201 bp, Homo sapiens
ttttattgttgaataatatcagttgcatggatatatcacattttatttattcactcatcagttgatggacacatgagtggtttctgcttttggctattatgaataatgctgctataagcattcatgtacaagattttgtgtagatacgtgttttcacgtctcttgggtatatccctagaagtagaactgctggatcacagg

SEQ ID NO: 485370 - DNA, 201 bp, Homo sapiens
caatctctccttttaaatatttactgtgtgacaataaagatgctttcggaagttaaagcatgtgattttctacatataaccagaaatcatagaagttcatmaactccttcaaaatgtattgccttgtgtggaatatttactttgacaccaaaatatgtattcgttaaattcaatgaattcagtctacgtttcatttattta

SEQ ID NO: 485371 - DNA, 201 bp, Homo sapiens
gcatcaccacgacatccagcactgcccttaactgcagaaacagaaggcgccgatacagtgtgacacaaaaagagatggagaggagatgggcaagctcacckttactcagccctgaccccacacccagccctatgctgtgctgaagttattattcataaatgtccacaagactccaaaggagtcttattcctgctcccagag

SEQ ID NO: 485372 - DNA, 201 bp, Homo sapiens
ggtctcgaactcctgatctcaagtgatctgcctgcctcgaggtattcttagtcttaaatgtgctactgtagacacatattattgtcacataggttaatatytctcttggagaaagaactgaggcaggacacctgaaggtactctttcaggcaacattttcacttaggaaagttctaaattgagtttgtatcattccgtgtc

SEQ ID NO: 485373 - DNA, 201 bp, Homo sapiens
accagacgcccgcatatgcagttatatacatatttgcttaattttctaaaaagagaaacaatgagttagttgtgtatgctgtgtgtttggaagataacatytcaaggcatgacatccatagagaacagctgataagttaaaaacggagaactactgggatgtggaagctgcgaaagaatcaggggaaacatcctcaactga

SEQ ID NO: 485374 - DNA, 201 bp, Homo sapiens
ctcggctcactgcaagctctgcctcctgggttcacgccattctcccacctcagcctcccgagtagctgggactacgggcgcgtgccaccacacccagctawtttttttgtatttttagtacagacagggtttcaccatgttagccaggatggtctccatctcctgatcccgtgatccacccacctcggcctcccaaagtgc

SEQ ID NO: 485375 - DNA, 201 bp, Homo sapiens
gagctgccggaggcgctctccccgccgcggcgctgccccagactcaccctcagcgaggcacagagtcgcccagtgcccgtccggctctcacttgccccggygctgtctctatggagctcaatgtactgcaatggctgtgagagcgggagccagacgcagcctcctcactctctccgctctgtaacattactctccagccag

SEQ ID NO: 485376 - DNA, 201 bp, Homo sapiens
ctcgtcgccgcagtcgcaactgcgtctgcggccacagggcggacagccacgcctctgcggagggcgaccggaagtgctcacgtcttcaccttccccgccamgccaccgtcctttcaggcccagcgtgcagcaggaaggaggactcttttgccgcggactcaagccggaagccgccttcctagtggagacgcgagtggggga

SEQ ID NO: 485377 - DNA, 201 bp, Homo sapiens
tccctctactaatcattcaaattttatattttttaaatctagatatttatttcaatactgtcttatcttctcaatgtctcatattacaaaatattcatgagaatgattaagatactttcagtggcatcgatgatattaaaatttgacgattagttgaatatggcactatcaatattttccaggagcagtgttggctttgta

SEQ ID NO: 485378 - DNA, 201 bp, Homo sapiens
ccttcaggctacctgtatagagtgtatatgaaacatcaatgaatttcatgtttagatttgggtcccatgcccacgatatctcattatgtatatgcaaataytccaaaatcctaaaatatctgaagtctgaaacatgtctggtcctgagcattttgtgtaaagaatactcaacttgtgcaggtaaaagtgtgtaggggaaaa

SEQ ID NO: 485379 - DNA, 201 bp, Homo sapiens
agtctgagagaatcattatactcatttgatcgactgcaacaaatgctgcttagaggtcaagcaaaatgaggactaagcaaggaccaccaggtctggcaacrtggaggccaatgccgacgtggaaatgagagttttggtgggaagacaggaataaaagtctcacaggtctgaattcaagagagagaacagcagaagaagggt

SEQ ID NO: 485380 - DNA, 201 bp, Homo sapiens
ccagggtttggggaaaaagagagtgcctgctaatgggtatggagtttcttttaggggtacaaaaatgttgcagattagattatagtaatggcagcatgacytggtaaatatgcccaaaaccattgaattgtacactgtaagtgggtaaattacatggtgtatgaatcatattttgataaagctattttttaaaaagcaata

SEQ ID NO: 485381 - DNA, 201 bp, Homo sapiens
gaatttcctaaaatttcttccctgattagcaaaatagtgcctccgaacacttgagggtgaaagttgttgtcaaatatgcctacatgactggaaattatgayatccaaatgagttcactgggtctgataataatatgctctacatgcttatgtctatgtaataaacagcttacatctggatgagaaaattgattatacaaat

SEQ ID NO: 485382 - DNA, 201 bp, Homo sapiens
aaagtaaaaagtatatagttgattctgcagggacttaaaaaagtataaatatcttttttaacatcacaaagctctgatatctgcaggtttatgactaactrctagctcactcccatgaatacacgtatgtaaacaggctctatacaatctacaatcccagactaaggggaaaaaactgtcctgtcactgtggtctccaacc

SEQ ID NO: 485383 - DNA, 201 bp, Homo sapiens
cctgaggcctccccagccatgcagaaatgtgagtcaattaaacctcttttctttgtaaattacccagtctcaggtagttctttacagcagtgtgaaaatasactaatacaatcaccttatggtaagtctgtctataaatcacctgaactttcacagactatctagaagaacatgtaaccagagtagttcttgatcatgcta

SEQ ID NO: 485384 - DNA, 201 bp, Homo sapiens
gtaaaacgcatgttccattgtagaacgtggttttaaaagaggcttggaaaacactgcatatggtcatttcttagtttagtacaatttattattttcgtaayaacctcagctataatataagtctaccatgaagcattttggggagattaaatgagatgtgaaaagtaaatgtgttagatagactgaattcatatcatagct

SEQ ID NO: 485385 - DNA, 201 bp, Homo sapiens
tttttttattgttattttttaagagactgggtcttgctctgtcacccaggctggaatgcagtgatgccatcatagctcactgcagccttaacctccctgarttcaagagatccttctacctcagctgggactacaggcatgcacagctatgcctggctaattactcaatctttaacatagctgataattccctccttgaaa

SEQ ID NO: 485386 - DNA, 201 bp, Homo sapiens
actgtggtttctgcctctctctcagatcacgtgctctgggggaaaagccaggtgtcattttgtgaagacactcaagcagcctttagatgactgcaaccacrtaagaggctccgaactggagccactcagctaaaccactcccagattcctgaccatgtatcatttcatacacaatgtatgaaatgacaaatgtctgttgtt

SEQ ID NO: 485387 - DNA, 201 bp, Homo sapiens
tgtatccaacatgtagtcttttaacccccatccaaccttcttccccaacccgaatccccaaagtccactgtatgattcttatgcctctgtgtttttatagyttagctcccacttttaagtgagaacataccatttttggtttcccattcctgagctacttcacttagaatactggcctccagctccatccaaattgctgca

SEQ ID NO: 485388 - DNA, 201 bp, Homo sapiens
tctacttctctttaggaataaggactatgcattattcactgttgtattctccctgcatttatggcagtcctttgcacattaaatacaagctttttggctckgtgcatctcttcatctggctgttcatctgtaccctttaaaacatcctttattaaaaaaacagtaaatgtaaaaaaaaaaaaaagccattgatgaaaaagt

SEQ ID NO: 485389 - DNA, 201 bp, Homo sapiens
aaaacatgtccacacacacttgtacatgaatcttcatagcagcagcatttgtaacagtcaaaaagtggaaaacacccaaatgcccatcaactgatgagtgrataaatcgaatgtggtatatccatacacatacatatatatttgacattatgctaagtgaaagagcccagacataagaaggccacatattgtatgattcca

SEQ ID NO: 485390 - DNA, 201 bp, Homo sapiens
aaatgtactcttttgctcctggtctctttcattcaccattaattttgtctgattcacccacgtcgctgcatgtggtggcaattcattcattcttgttcatmtatatatatatatatatatatatatatatatatatatatataaaattgatgtatccaatgttaatgaggatggacttgtgactatttccattctggggat

SEQ ID NO: 485391 - DNA, 201 bp, Homo sapiens
atctcctttgcccatgtttagttatttttctaaaaaataaaataaatatttgatgttagcaataaaattatgacatataagaccttaaagtacttagtaasggaatgaaaaccaaagtactggttatttaacacagtagcgacatcaacctccgtaaaatcagacaagaatatggccgagagattaaattccttgaagggg

SEQ ID NO: 485392 - DNA, 201 bp, Homo sapiens
ctggtctctttcattcaccattaattttgtctgattcacccacgtcgctgcatgtggtggcaattcattcattcttgttcatatatatatatatatatatwtatatatatatatatatatatataaaattgatgtatccaatgttaatgaggatggacttgtgactatttccattctggggatactagagatagggctgtc

SEQ ID NO: 485393 - DNA, 201 bp, Homo sapiens
agattctcacgctgttgcccaggctgagagcagtacacaatcacagctcactgcagctcttgggctcaagtggtcctcctgcatcagcctcctgagtagcygggactacaggtgcaggccaccatgtctgagtaatttttgtactttttgtgtgtgtgtgtgtagggacagggcttcactatgttgcccgggctagtcttg

SEQ ID NO: 485394 - DNA, 201 bp, Homo sapiens; identical to SEQ ID NO: 113010

SEQ ID NO: 485395 - DNA, 201 bp, Homo sapiens
aggagatggcaaagtcaactgacatgagaaaggtgacaatactgatgggttgaagagcgatggacatttgaaataacttcttagaccagtagaggctggagttcataaatcagaactggctacaggttatatatgtttttttttttttctccaacagcataagataacagagcgaagtctgtagaaatgaaagaagagtca

SEQ ID NO: 485396 - DNA, 201 bp, Homo sapiens
gtcatgttcaaaagtcaggctcatgaataaatgtgtgcattcattacatatattttcataaattcaaatttaaaagaataagagtagctagaaggtggaaraaaaatcttattctgattaggaatgcacaatcacaagaaaatttgtgatatatatagtcattttattctgtattgttttattttgattttggtaagacaa

SEQ ID NO: 485397 - DNA, 201 bp, Homo sapiens
tggaagtggaaatacacagtgcaatcttttattctatagattactcttcttccaggagacaaagagccaaggggataaacagccaaaggacctctcacagstgggtaaatgtgcaaaaaatgggagataagtattaatatagcaaagagtgaagcatttcatggaaaacatttctttttttctttttcttttttttttttt

SEQ ID NO: 485398 - DNA, 201 bp, Homo sapiens
atactgaagtgacctgttggtgtgtctttgttccccactagacagaaaactcaagatcagagaccagttcttgttcttttttttttttttttttttttttkgtatcacagtgtttagcagcctgctatatggtaaatgtcagtaaatgttccacaaactgaatggaattgagctctggaatctagaccatcttttccatac

SEQ ID NO: 485399 - DNA, 201 bp, Homo sapiens
gccataaagaatcacctttgtgctcatcattaaaacttcctctgggggtcctctcactcagttgcccggcccagaaacctgagtatcatcattaactcctccctttccctcactccccgcaaccagcaaaccctccagtcctagggatcctacctctttaatgtgtgtctctgatccctgtcacttcccttcatttccgag

SEQ ID NO: 485400 - DNA, 201 bp, Homo sapiens
taatagaaggatattcgcaggagacaatgcatagcaccatgccttgcacgtaacagacatttaataactattagttgaataaaattggagactagaatgayacataaagaggcaagaaagagcaaagataagcctttctgagaatttctatcatgttttgctcaatagcttgtctttatccactgcttgtatttttccatg

SEQ ID NO: 485401 - DNA, 201 bp, Homo sapiens
ttgggagtccgaggcgggcagatcacgaggtcaggagattgagaccatcctggctgacacggtgaaaccccgtctccactaaaaatacaaaaaattaaccrggcgtggtggcgggtgcctgtggtcccagctactcgggaggctgaggccggagaatggcatgaacccgggaggtggaggttgcagtgagctgagatcgtg

SEQ ID NO: 485402 - DNA, 201 bp, Homo sapiens
agtgactgtacctaaagcagttcctaattactggacattctcagatctgctagagctacatgtccaattacgagaatatactggaaaaagccctggattakaaatgagaggatgtaggttttagtaccaggtcagccaccttgttaatgcaaatttgagtaaattgttacttcttttaggccttgtttttgctgttttgtt

SEQ ID NO: 485403 - DNA, 201 bp, Homo sapiens
ccactgtgcccagcaggaaaacatttcaaatgtacttttaagatgagagaccctaactcccacttataacataggaaggcaacttgggagacactgggggyagcccccaaagggcaccagctcagcatgccgcagccatcacaaagccaccaaactgtgtggtgtcaccggaaaacacggaaaacaccagtgtcctgcctt

SEQ ID NO: 485404 - DNA, 201 bp, Homo sapiens
ccgcagccatcacaaagccaccaaactgtgtggtgtcaccggaaaacacggaaaacaccagtgtcctgccttgagtacctatgactttttttagagcgagrgtctctctagagatgggcaacaaaaataatcaagtgcatgctgagacttataaataaaagtagataaagagaagaaaagacagcagatctgcaatcacta

SEQ ID NO: 485405 - DNA, 201 bp, Homo sapiens
gggtgtggtggcacatgtccatagtcccatctacttgagatgccaaggtaggaaggttacttgagcccaggaattcaaggctgccgtgagctgtgttcacrctactgtactccagcctggacaacagagaccttgtctgaaacaagcaaaacaaaacacttctatatccagctgtcttttcctatttccctttgtgttgaa

SEQ ID NO: 485406 - DNA, 201 bp, Homo sapiens
ccgcctcagcctcccaaagtgctgggattacaggcgtaagccactgcgcccagccagcccagaagttttttactgaagatcaattctccccctgcccgcckccgctgaaaaggtacaaaatgaacattttgttttgagatggcagctccatcaggcattccaattcacccagccacttattctcacagaggtgaggggaac

SEQ ID NO: 485407 - DNA, 201 bp, Homo sapiens
ctgaggccggagaatggcatgaacccgggaggtggaggttgcagtgagctgagatcgtgccactgcactccagcctgggtgacagagcaagactccatctaaaaaaaaaaaacaaaaaccatccaccaaaatgggaagaagtgatgaaaaattacagtccaagaagaagggccatagctgtttaaatcaattggtatattt

SEQ ID NO: 485408 - DNA, 201 bp, Homo sapiens
catcctggaaaatctactgctgccacagcccacaatctggtagtctgaatgcttagtatccaggaaggctgggagtggaaaatatcttaagtattcctcgmctcttggcaccagggaagcaagagaaaaataaagcaggggaacctgttggacaggactgtcaaggccactcttgctggaggctgcctgctgctagaagga

SEQ ID NO: 485409 - DNA, 201 bp, Homo sapiens
tctctaactcaccaagctggctggtattaatagacatacttacgtctgtagagaaaatgtgctggctgtagtggccagttctgaagactctacagttatakcagtcctttatgaaactactatctattccttttagcctgagcagaccacgcccctattcagttataacagacttcccttttttttcactctctaatggta

SEQ ID NO: 485410 - DNA, 201 bp, Homo sapiens
aaaaatgtactcttttgctcctggtctctttcattcaccattaattttgtctgattcacccacgtcgctgcatgtggtggcaattcattcattcttgttcmtatatatatatatatatatatatatatatatatatatatatataaaattgatgtatccaatgttaatgaggatggacttgtgactatttccattctgggg

SEQ ID NO: 485411 - DNA, 201 bp, Homo sapiens
gaatttagatttcctagcattttactcctaaccctaagggttaaatttattgtccacttacatgcccatgtttctgacccaagctaaggggctggaaaacraaactcagagctagtgtgtggtggcacatgcctgtaatcccagttacttgggaggctgaggcaggaggatcacttgagcccaggagttcaaatccaacat

SEQ ID NO: 485412 - DNA, 201 bp, Homo sapiens
gaaaaaaattatactcttagtagttctagaggctgggaattattttcaaacaaattctttattggctcaatggagaagcctgcacttagaaaagaaacaayttttttctaattaaaatttcgttacaaaacaatgatttaaaattgaggggagaaaacatttgccaaagtctttaaagaattacagaattgttgtgtaatc

SEQ ID NO: 485413 - DNA, 201 bp, Homo sapiens
actgacaagttgatgggtggcgactcccaaaactgaaagattccaaactgaacacctacaatgtcaatggacagaaaaattcctttccgccaaggtgcacrgggcactgctacatagctgatcccttcccgtgcttgactttaatcattcagctatgtgggttttctccaaagcacatttggcacagatgggaagtccaca

SEQ ID NO: 485414 - DNA, 201 bp, Homo sapiens
aagtcctcctgagatgttattcacataactcatgacaaaggcaatggggaaaaagtgttctgctgcttagctttgtcaggttttgtccaaggtttgcttarttacagttttaagaaaattttatcatctctgatttctttatattccattgttttattcttttcccaaatattatttgagaacttactacaggtaaggcac

SEQ ID NO: 485415 - DNA, 201 bp, Homo sapiens
gccatcccctccccagccttcagtctttctccccttcaattataaactgagaccttgatcctcagtcatctcattttccaaaatgatcccctatctctttycgctggctccttcctcttcacgtttcactgtaaccaggacccttcaatgcagatgtacttgtcaatactactgcaccaaccctgccctctcttcactcac

SEQ ID NO: 485416 - DNA, 201 bp, Homo sapiens
gatccacccaccttggcctcccaaagttctgggattacaggtgtgagccaccatgcccgacctatttttcaacttcttattatggaaaattgcaaaagtasagtataacgaaaccccctgtacccgttattcaacctcaactgttctcaacacagggcccatcccgtttccatcttactcctatctagtggattagtgtga

SEQ ID NO: 485417 - DNA, 201 bp, Homo sapiens
aatggaatgagagtacatatcctccctgacatggtggggagggatgtcaaaggaaggctcttagacatagaatctaaatcgagtcctcgtgtttgtcgtayttccttaatgtagggattctctctgtataactacctatcattcatttgcctctttgctcagttcactacccaccagaggaactgctcccatgccgaggga

SEQ ID NO: 485418 - DNA, 201 bp, Homo sapiens
cttaagaagtttttggttttcaccgctttctgaatgttagattgagatgtgggattacagactgtactcatagagtgcttctagaaagcagtcagtcactkcaactctcattttttttttatgagactaaaaaagaaatcatagcaagtagcttttatatcccaggtttgggccaaagacttgtattgtggttaaggaatc

SEQ ID NO: 485419 - DNA, 201 bp, Homo sapiens
gacatggtggggagggatgtcaaaggaaggctcttagacatagaatctaaatcgagtcctcgtgtttgtcgtatttccttaatgtagggattctctctgtrtaactacctatcattcatttgcctctttgctcagttcactacccaccagaggaactgctcccatgccgagggaccctcggatgacacactcgggccacct

SEQ ID NO: 485420 - DNA, 201 bp, Homo sapiens
aactgaaatgaaaacataagtcatgtaaaaaaagattttttttttaagatgaaaaaatgttcaaccttgctggctttagagaaataggcattaaaatgtcygggcttttagcaataatcctagttgttagtgaaacaccaagtctgtctctaacagccatgggctatgaaaccttcctttttccaaaaagacattctgaca

SEQ ID NO: 485421 - DNA, 201 bp, Homo sapiens
tgtctatttcaggaggaagtactactttctccaattttaatcacaattcataaaaaagaaaaacctaactagctagatcttaaatatacaaatacattaayaatctagtaaagcaacagaaaaaggtaaacaaactaaccagcctatttttgtctggagaaaccccaacaaactgctggattccttggccatttgcattca

SEQ ID NO: 485422 - DNA, 201 bp, Homo sapiens; identical to SEQ ID NO: 113011

SEQ ID NO: 485423 - DNA, 201 bp, Homo sapiens
tagagcaatagttttcaagtgtgatcctgaacttgttagaaatgcaaattcttgggccccaccccagacccactgaatcagaaactctgggagtagggccsagaaatgagtttttcacaagcctccaagggattctgatgcacggtaaaatttgaggaccaccaatgcagatggattataatcttcttgagggcaaggacc

SEQ ID NO: 485424 - DNA, 201 bp, Homo sapiens
gatgcacggtaaaatttgaggaccaccaatgcagatggattataatcttcttgagggcaaggaccaaacttgttgaaggttaaccctggctcgtgactcayagtaggtgttcagaatgtgttgaatgaataaatgatctgtacacttttccagaaagctctgaatctatagttacttttaatttttaaaaatatcttttga

SEQ ID NO: 485425 - DNA, 201 bp, Homo sapiens
agacagggcacagaatagacttgaacctcatgtctatcaattcggtatgtgttcatgtggtttctgactctagaacagttatgccagtgtccctgaggttsctgtgcttggctccctccttttttcacatgtctggcatctcttgtgtatgcctgagaaggatccatgctaaaattgtaatgacatatatacctaaattag

SEQ ID NO: 485426 - DNA, 201 bp, Homo sapiens
agggaaaaagctacaaagacagaagcaccaggaaaaagtagggtcatgtaagtcaaagcaggaaaaaagttccatggtggggtggtcagcagtgtctaatrccacgaaggcacaaagtaggataaaggttaaaaatcagcctttggttttggcaaatatgaagcttatcggtagccttagcgagaacaattccatcaggga

SEQ ID NO: 485427 - DNA, 201 bp, Homo sapiens
cagtgttattccacatctctcccagtttcttcgcaacatcaccaatggacaggccaggatgttctcctttgatttttgggcgatactcagagcagaagagraagaaggccgaactaaaaaaaaaattaattttaggattttaagttaacagatcacaaaaacaaatactatcaagtgtacactgcattgctatttaaagct

SEQ ID NO: 485428 - DNA, 201 bp, Homo sapiens
atgccaccacacccagctaattttttattttattttatttttatttttatttttgtagagatgggggctggtcttgaattcctgggctcaaatgatcctcytgccttggcctcccaaggggttgggattatgggtgtgagccactgtgcccagcccaaataaacattctctagacagtcctggaataagtgtcaacaaatt

SEQ ID NO: 485429 - DNA, 201 bp, Homo sapiens
gcttgcagtgagccgagatcgcgccactgcactccagcctgggcgacagggcgagactgcgtctcaaaaaaaaaaaaaaaaaaaaaaaaaaaaagattgawttttggatgtcttgggtagtcagaaagaatcacatcctttataattcggtatttctggatggtgaaatgaagaaagcagtaaagacatcctaaatgatgg

SEQ ID NO: 485430 - DNA, 201 bp, Homo sapiens
cttgggtccaggaggtcaagggtgcagtgagccgtaattgagccactgaactccagcctaggtgacagagtgagatactgtctgaataaataaataaatamgaatgtctgaccagattggggcagcatctctgtatttgacagattctaaaacaacaacttagtaataaactctatcactcttacagtaatagtgatagtg

SEQ ID NO: 485431 - DNA, 201 bp, Homo sapiens
gtttcttacattgccaaatgtacctggggtggggggtgcgggtggaggaaaaattgcccctgttgagaagcactgccttagatcattccttaccaaggtasgttaggcactggcctcactccaaggccagtgcttcctgtgcttctagagtggctagggaagcacactatgggacaacctttcctcaccattgacaatggt

SEQ ID NO: 485432 - DNA, 201 bp, Homo sapiens
tctccccttactgtactgctcctgggcgatgtcaatcagtcccattgctttagatactatctgttgaaacactgaaatcactggttttttttgtttttttkttttttttttttttttgagatggagtttcgctctgttgcccaggctggagtgcagtggtgcaatctcggctcactgcaagttccacctcctgggctcaag

SEQ ID NO: 485433 - DNA, 201 bp, Homo sapiens
taaaaaacattttccattttaaaataattttactatttacctgtgatactgttgaaaattatgaaaaaacagataatttaaaatttagtgcttttttttawaaaaaaaaaaaaagcgaatccctgggacacttcatatagtgcaaaacaacaattcaagaattcaagcattgaaagaaataatctcttatcccccagtctc

SEQ ID NO: 485434 - DNA, 201 bp, Homo sapiens
aaaaaacattttccattttaaaataattttactatttacctgtgatactgttgaaaattatgaaaaaacagataatttaaaatttagtgcttttttttaawaaaaaaaaaaaagcgaatccctgggacacttcatatagtgcaaaacaacaattcaagaattcaagcattgaaagaaataatctcttatcccccagtctct

SEQ ID NO: 485435 - DNA, 201 bp, Homo sapiens
gcagaatttacaggagaacactggaaactataactgtagattctcacttgtgtttgctttgacttccatcgagtaacatggaaaacccagagctggccaakttgactgttagtgtagtcagagaaagaccagaagtctgcaactgccttctaactcttatatctggctgggtgtggtggctcacgcctgtaatccgaacac

SEQ ID NO: 485436 - DNA, 201 bp, Homo sapiens
aaaaacattttccattttaaaataattttactatttacctgtgatactgttgaaaattatgaaaaaacagataatttaaaatttagtgcttttttttaaawaaaaaaaaaaagcgaatccctgggacacttcatatagtgcaaaacaacaattcaagaattcaagcattgaaagaaataatctcttatcccccagtctctg

SEQ ID NO: 485437 - DNA, 201 bp, Homo sapiens
ggaagtggaactctcataacaaccactaactactcggaactgctatgctaggtaacatatacgtgtgtgtgtgtgtgtgtgtgtgtgtgtgtgtgtgtgtktgtgttttcagcgaaatttttttcctgaatatgaaagtcacacatgctcattgtaaaatattttacagctggtgcggtggctcacgcctgtaatcccagc

SEQ ID NO: 485438 - DNA, 201 bp, Homo sapiens
cccatagtgagtattccaagacaggaaagtggaagccacaatgtctttcatgacctagcctcaaaagtgacatactgtcatttacacaatattctactggytgtacaagttaatcctatttagtctgggaggggactgcataagggcatgagtaacaagaggcaagaatccttgggggccatcttggaagctggctacaca

SEQ ID NO: 485439 - DNA, 201 bp, Homo sapiens
actccttagcaaacagcaggccttgagtaaattctttcagaactgaatacacaaaggatacagaacggaatacactaacaatagtgcatgatgtgctcatktctgtaatagaaatgaattaattctgatccatctataatttattattgctccatgattaacggaaggcataggaaagatgactggaatagtgtaactagt

SEQ ID NO: 485440 - DNA, 201 bp, Homo sapiens
tcctgtatcctttaaatcatctctagtttataatacctcatacgatgaaaatactacgtaaatagttgttatactgtattgtttagggaataatgacaagraaaaaagtccacgcgtgttcagaatagatgcttttttttctcgtctaatattatggatccacagttggttgaatccacagatgtggaatccatggatacc

SEQ ID NO: 485441 - DNA, 201 bp, Homo sapiens
cctcttcacgtttcactgtaaccaggacccttcaatgcagatgtacttgtcaatactactgcaccaaccctgccctctcttcactcacactgaacacttcraatgattatgccgcactcattccatttttggatctaccactgattctctgtcacccgggcttgagtacagtggtgcgatctcggctcactgcaacctccg

SEQ ID NO: 485442 - DNA, 201 bp, Homo sapiens
gggtttatataccctatattcagaaaaaaactactaccatctctcatttaccctaagaattcataggagagcatgtcttaaagctgatcaataaccaaaccaaacattttattgatcatattacatttggaaagcaaaatgaatttcctaaaatttcttccctgattagcaaaatagtgcctccgaacacttgagggtgaa

SEQ ID NO: 485443 - DNA, 201 bp, Homo sapiens
cactgaacacttcgaatgattatgccgcactcattccatttttggatctaccactgattctctgtcacccgggcttgagtacagtggtgcgatctcggctyactgcaacctccgccttccgggttcaagcgattctcctgcctcagcctcccgagtagctgggattacaggtgccagccactacacccagctaatttcttt

SEQ ID NO: 485444 - DNA, 201 bp, Homo sapiens
ggtttatataccctatattcagaaaaaaactactaccatctctcatttaccctaagaattcataggagagcatgtcttaaagctgatcaataaccaaaccaaacattttattgatcatattacatttggaaagcaaaatgaatttcctaaaatttcttccctgattagcaaaatagtgcctccgaacacttgagggtgaaa

SEQ ID NO: 485445 - DNA, 201 bp, Homo sapiens
ctgcaacctccacctcctgtgttcaagagattctcctgccttagcctcccgagtagctgggactacaggcatgagccactatacccggctaatttctgtawttttagtagagacagggtttcaccatgttggccagactggtcttgaacttctgacctcaagtgatccacctgtctcagcctcctaaagtgctgggattac

SEQ ID NO: 485446 - DNA, 201 bp, Homo sapiens
gtttatataccctatattcagaaaaaaactactaccatctctcatttaccctaagaattcataggagagcatgtcttaaagctgatcaataaccaaaccaaacattttattgatcatattacatttggaaagcaaaatgaatttcctaaaatttcttccctgattagcaaaatagtgcctccgaacacttgagggtgaaag

SEQ ID NO: 485447 - DNA, 201 bp, Homo sapiens
tggtcccagctactcaggtgctcgcttgggtccaggaggtcaagggtgcagtgagccgtaattgagccactgaactccagcctaggtgacagagtgagatrctgtctgaataaataaataaataagaatgtctgaccagattggggcagcatctctgtatttgacagattctaaaacaacaacttagtaataaactctatc

SEQ ID NO: 485448 - DNA, 201 bp, Homo sapiens
ctcaagtgatccacctgtctcagcctcctaaagtgctgggattacaagtgtgagccactgcgcccagcctcttttttgtttttttttttttgagaaggagkcttgctctgttgcccaggctggagtgcactggtgcaatctcggctcactccaacctccgcctcctgggttcaagtgattttcctgcctcagtctcctaag

SEQ ID NO: 485449 - DNA, 201 bp, Homo sapiens
tgctctgttgcccaggctggagtgcactggtgcaatctcggctcactccaacctccgcctcctgggttcaagtgattttcctgcctcagtctcctaagtarctgggattacaggtgtgcactaccatgcccagctaatttttatatttttagtagagacaaggttttgccatgttggctaggctggtctcaaactcctgac

SEQ ID NO: 485450 - DNA, 201 bp, Homo sapiens
ctctccgctctgtaacattactctccagccagcgcggctcctattggctaccgccaactcacggggctcgctcattggcccgatacctcccattgtcctgmccagagcccgtttgctattggctgtctccggggacacgtcatcaaggattgaaacagcgcgcaaatctgaatgtgtgtgtatgccgggcaaagaggctga

SEQ ID NO: 485451 - DNA, 201 bp, Homo sapiens
gttctcgcagaagcacaaagtatgagaaataaaccttcattaattgtagattccctcttctttaaaaaccatatttgctagtcttggacttcttaggatcwtaagaccaaaaaggaaccttgaaaagtcaatccattagttatatcacatttaaataattatgtgactttgtttgaagaattaagaaaactgctgaattca

SEQ ID NO: 485452 - DNA, 201 bp, Homo sapiens; identical to SEQ ID NO: 113012

SEQ ID NO: 485453 - DNA, 201 bp, Homo sapiens
ctccagagcaggttgttataaaagctagcttggctcactcttgcagtctcttttgcatgtcctgcttgtccttctgcttttccaccatgttaagatgcagyacgaaagcttgcaccagaagctgctgccatgttcttggactacctggcctcctgaaccataagtcaaataaacttctttaatttgtaaattacggagtct

SEQ ID NO: 485454 - DNA, 201 bp, Homo sapiens
cttaacttcctggaaatcaaataattattccatgtaattaaagaacagccacttggtttgatatggggtactctagcaggaaatgtttgtgaggccctggyagaattagcaaattcattagagaccacattctaaactgtttggctattttatttgacttggtgtggattactgttacaatcaaacgaatccttgtgatgc

SEQ ID NO: 485455 - DNA, 201 bp, Homo sapiens
agaagctcaaatctgaaggttaggagaattaggtcagtagctagaaggaaatgtggagtcgaggggctgtttttcctcccaaggagtataaaggtgtaacrttgcatgaaaccacttcagacaaaggccgatatcaatagagaagttaaaacgcacgcctcaagatttgggaaggcttggggttgggcttaaagaggtagg

SEQ ID NO: 485456 - DNA, 201 bp, Homo sapiens
atcagatccttaaggatctccaaaaggcttaagaacccctgttttagaagaagggtaagattaaaatcaatatattattttatatatttataaatgcattaaatagaaattaaaaacttccattttagcaatagcaagataaaaggttgattgttgtaaataatcatcacataattagtaaccacatttaaacactaatag

SEQ ID NO: 485457 - DNA, 201 bp, Homo sapiens
gaatgaagagtaactgcctccctcaaagaggtcagggttctcaagtttaccacagtccccgccattccctaagtggttagcctgacttttcacccaatcayatcacctccctggcccctgcagacatttgagttggggcctaagcatttcatatgattgtaaactgtaattctgaaattttcttgatcagagattcttttt

SEQ ID NO: 485458 - DNA, 201 bp, Homo sapiens
taaataatcatcacataattagtaaccacatttaaacactaatagacaatattatttcagcattttagatatgtgtcaacaagtatttaccttaatatacrtgcaggtacatcagggaaggaggtgttcagatacagattttaacctggattgcaaactactggtaaatttactttcactattgtttaaaaaaatcatcaa

SEQ ID NO: 485459 - DNA, 201 bp, Homo sapiens
gcagcaagctatgatcacacctctgcactccagcctgggtgacagcatgagacccagtctctttaaaaaaaaaaaaaaaaaggccatatatagcccagaaragcgtcctcaccaaaacccaatcctgatagcacctggaggacttccagcctccagagctgtgagaaaatttctgttgcttgcaccgcccagtctgtggta

SEQ ID NO: 485460 - DNA, 201 bp, Homo sapiens
aatcatcacataattagtaaccacatttaaacactaatagacaatattatttcagcattttagatatgtgtcaacaagtatttaccttaatatacgtgcargtacatcagggaaggaggtgttcagatacagattttaacctggattgcaaactactggtaaatttactttcactattgtttaaaaaaatcatcaatcaga

SEQ ID NO: 485461 - DNA, 201 bp, Homo sapiens
aatgttacagattgaaggagactaaagttaaatgcaagaaaggaaaaaatggcatataggacagtattgaattgactgacaaaactggattacaatagtaragtatcaatgttaaacttgctgaagttgctaactgtatttcttaggaattattcacctaagaatttaggcacacagatatgatgtatgtaagttaccctt

SEQ ID NO: 485462 - DNA, 201 bp, Homo sapiens
gcagtttttcagcccttgccccctccctcccgctctccctccttgcttttggagttcccagtgtctactgttcccatctttatgtccatgtgtacccaagrcttatctcccacttacaagtgagagcatgcagtatttagttttcttgttctgcgttagttccgttaggataattgcctccagttacattcatgtcactgc

SEQ ID NO: 485463 - DNA, 201 bp, Homo sapiens
ctaaaaactatcttactctaaacattttctaggaagttgattctacaacacattttggttttccaatttggcttctaataattatttcaaagtttctgtgrcctaaattttgttttacattgatcctttgaatggactactgtttccacattttagaacatttaaaaagatatctacaacccgagtctaatcataaaaaaa

SEQ ID NO: 485464 - DNA, 201 bp, Homo sapiens
acaatacctgtgaatgtgactttatttggaaatagggtctttgcaagtgataaagatgaggtcatggagtgacctaatccaatacgaccagtgtccttataaaaaaaaaggaaatttggatacagatacacacaaacaaggagaatatcaaatgaacatgaaggcagagaccggggcggtacatctacaagccaagggaca

SEQ ID NO: 485465 - DNA, 201 bp, Homo sapiens
tgtaggttttagtaccaggtcagccaccttgttaatgcaaatttgagtaaattgttacttcttttaggccttgtttttgctgttttgtttttctgacagtmtggtctctgtggtccaggctggagtgcagaggcacaatatcaggtccctgcagtctctacctcccaggatcaagccattttcatgcctcatcctcctgag

SEQ ID NO: 485466 - DNA, 201 bp, Homo sapiens
taggttttagtaccaggtcagccaccttgttaatgcaaatttgagtaaattgttacttcttttaggccttgtttttgctgttttgtttttctgacagtatkgtctctgtggtccaggctggagtgcagaggcacaatatcaggtccctgcagtctctacctcccaggatcaagccattttcatgcctcatcctcctgagta

SEQ ID NO: 485467 - DNA, 201 bp, Homo sapiens
aaggatgaggacttatatcaacaccatacttaatgtagctgttaccctaaaaacttattacacctcaaactaagtacaatcatacatctggcgtacttgtsatcattttaccaagcaaacccacacttcttaccttttcgtatttttccttcagcttcgcagccttcttttcataaggctgcttgtcatctgcagcagtgt

SEQ ID NO: 485468 - DNA, 201 bp, Homo sapiens
cgtcactgttgcttttcatttttctaaatgtggccactgctgttttctcactaaaggaaatgttttatgtaaagtgaataacagtacctggcataaaatargtgctcaataaatgttaaggccttctctccctcttcaactggcctcctcatttttcacaaagtgaaatagaaaaacaacatggaagataatcctgttgct

SEQ ID NO: 485469 - DNA, 201 bp, Homo sapiens
agggaatggtcaacagtgactttctagtctggagctcaggaggaagaggcaactctacctgatggtattaagatcatggaggtagctgagatcacctagcytgtgtgtgtcaaatgagaaaagaagaaagaataggagaagttccccaggaacacagacattaagtggggctgtggtgacaacacaagaagagaggcttgc

SEQ ID NO: 485470 - DNA, 201 bp, Homo sapiens
tagagatggggtttcaccatgttggccaggctggtctcaaactcctgacctcaagtgatgcgcctgcctcggcctcccaaagtgctgggtttataggcgcragccactacgcctggcccaaacacatattatataccacagacttgtgaattattcattatttctctaactctatgagattgtattttttattcccatttt

SEQ ID NO: 485471 - DNA, 201 bp, Homo sapiens
tggagctcaggaggaagaggcaactctacctgatggtattaagatcatggaggtagctgagatcacctagcttgtgtgtgtcaaatgagaaaagaagaaaraataggagaagttccccaggaacacagacattaagtggggctgtggtgacaacacaagaagagaggcttgcaaaggagcctgagcagctgtcatgagaga

SEQ ID NO: 485472 - DNA, 201 bp, Homo sapiens
tttctaaaaagagaaacaatgagttagttgtgtatgctgtgtgtttggaagataacatctcaaggcatgacatccatagagaacagctgataagttaaaamcggagaactactgggatgtggaagctgcgaaagaatcaggggaaacatcctcaactgaagtttgcataagattgaattttggggccgggcgcggtggctc

SEQ ID NO: 485473 - DNA, 201 bp, Homo sapiens
aggcttgcaaaggagcctgagcagctgtcatgagagaggtaggatggtggactcggagaagaggcagaagatgttcttaaaggaaggacactgctgccaastagtcagccaattggtgacaaagaaagaccctgttgcgagaaaaaaagtcagtgaagtagtaggaacgatgacagatgacactgggttgaagactgagga

SEQ ID NO: 485474 - DNA, 201 bp, Homo sapiens
cttcccgagtagctgggattgtaggcgcccgccatcacgcctggctaatttttgtatttttagtagagacggggttttgccatgttggccaggctggtctsgaactcctgaccccaagtaatccgcctgcctcagcctcccaaagtgctggggttacaggcatgagccaccacacctggccacaaacactattttttaaag

SEQ ID NO: 485475 - DNA, 201 bp, Homo sapiens
tactggaaaaagccctggattagaaatgagaggatgtaggttttagtaccaggtcagccaccttgttaatgcaaatttgagtaaattgttacttcttttargccttgtttttgctgttttgtttttctgacagtatggtctctgtggtccaggctggagtgcagaggcacaatatcaggtccctgcagtctctacctccca

SEQ ID NO: 485476 - DNA, 201 bp, Homo sapiens
tagtcaatttccagtgctccattcaaagaaaaaccaaaaatgtccagaatataaccttattttaaaacttgttaaccactgatttcacttgttaaccaaatttttttttttttttttttgagaatgaatctcactctgtcaccaggctggagtgcagtggcatgatcttggttcactgcaacctccgcctcctgggtactg

SEQ ID NO: 485477 - DNA, 201 bp, Homo sapiens
tgcattcccccttgatgggtcaacagcgatttctttgtaagtgaaggacagcacactggttttgatgactcacgagagagtaggagggaaaaagaagtctraggcattgcctggaagcctcgctctgcttaaacaagtacactaatggctcatgcctgttactcccagcactttggaaggccaagatgggtggatcacttg

SEQ ID NO: 485478 - DNA, 201 bp, Homo sapiens
ggggtttcaccatgctggccaggctggtcttgaactcctgaccttgtgatctgcccgccttagcctcccaaagtgctgggattacaggcgtgagccaccgyacccagcctaaatggccaagttttattatggacaattaagctgtagaataaaaatctacttttaatagctggcatagtgcctagtggttttgaagccaca

SEQ ID NO: 485479 - DNA, 201 bp, Homo sapiens
tttcattacatacaaaccatataatttgtaaaaaattggaaattattcaaaacttcacataactaaagtgaccaaataaatactggagaggaaagaaaagragtcaaatgaatctagcattttctttttttttttttttttggagaaagggtctcactgtgccacccaggtgggagtgcaatggcacgatcatggctcact

SEQ ID NO: 485480 - DNA, 201 bp, Homo sapiens
gtgcatatgtttattattttaagtgtcagcgtatacattttcatgccataaagttataaaatgaaaaaatagtagccttttatattaagttcatgcttatktagttagtaaaaacaagaaagcaattaacatacaaaccatgatggtggttaaacttgcttcagtttgtgttttttaaaatttgaaagtgagaaatacagc

SEQ ID NO: 485481 - DNA, 201 bp, Homo sapiens
tcttttaggccttgtttttgctgttttgtttttctgacagtatggtctctgtggtccaggctggagtgcagaggcacaatatcaggtccctgcagtctctrcctcccaggatcaagccattttcatgcctcatcctcctgagtagctgggattacaggcatgtgccaccacaccctcgaactcctgacctcaagtgatctg

SEQ ID NO: 485482 - DNA, 201 bp, Homo sapiens
gacaagtttgcacaaaaaatgcatatgatgacattttgcctctcggcttcttaggatctcctttgcccatgtttagttatttttctaaaaaataaaataartatttgatgttagcaataaaattatgacatataagaccttaaagtacttagtaagggaatgaaaaccaaagtactggttatttaacacagtagcgacatc

SEQ ID NO: 485483 - DNA, 201 bp, Homo sapiens
tttatataccctatattcagaaaaaaactactaccatctctcatttaccctaagaattcataggagagcatgtcttaaagctgatcaataaccaaaccaaacattttattgatcatattacatttggaaagcaaaatgaatttcctaaaatttcttccctgattagcaaaatagtgcctccgaacacttgagggtgaaagt

SEQ ID NO: 485484 - DNA, 201 bp, Homo sapiens
gcctcagggaggttaaatattttgtatgaagtaacaaaactgagattaatatatggccaagtttaaatgagatctgtaaatctaatgcctacactaaaacaaaaaaaaaaaagtgggaagaaaaggtctatattgcttagcaaaacagaggtagggaagcaaaaataaacttacaaaatcagattagaccaccaaaaaaca

SEQ ID NO: 485485 - DNA, 201 bp, Homo sapiens
tatacagtattctcaacttgggaccgttactctataatataaacgaaaggggttttctagtcaatctctgctgatctcctgtaccaaagttcttccctttrtaagtcttgtactaccttttacaagaggaaaaagctctagagcgaaaacacagaacacactaaaatcccttcctttctctttacaactcaagccccgcct

SEQ ID NO: 485486 - DNA, 201 bp, Homo sapiens
gaaggcagtgattgcaaatctagtgaattttttgttgttgttgttattgttgttgtttgagacagagttttgctcttactgcccaggctggagtgcagcgktgcaatctcggctcactgcaacctacacctcctggttcaatcgattcttctacctcagcctcccgagtagctgggaatacaggcatgcgccaccatgccc

SEQ ID NO: 485487 - DNA, 201 bp, Homo sapiens
ccccgcccctcctcgtcgccgcagtcgcaactgcgtctgcggccacagggcggacagccacgcctctgcggagggcgaccggaagtgctcacgtcttcacmttccccgccacgccaccgtcctttcaggcccagcgtgcagcaggaaggaggactcttttgccgcggactcaagccggaagccgccttcctagtggagacg

SEQ ID NO: 485488 - DNA, 201 bp, Homo sapiens
tgttaccctaaaaacttattacacctcaaactaagtacaatcatacatctggcgtacttgtcatcattttaccaagcaaacccacacttcttaccttttcrtatttttccttcagcttcgcagccttcttttcataaggctgcttgtcatctgcagcagtgttattccacatctctcccagtttcttcgcaacatcaccaa

SEQ ID NO: 485489 - DNA, 201 bp, Homo sapiens
ttgtttgagacagagttttgctcttactgcccaggctggagtgcagcggtgcaatctcggctcactgcaacctacacctcctggttcaatcgattcttctrcctcagcctcccgagtagctgggaatacaggcatgcgccaccatgcccggctaattttttatttttagtagagacggggtttcaccatgttggtcaggct

SEQ ID NO: 485490 - DNA, 201 bp, Homo sapiens
taattagtaaccacatttaaacactaatagacaatattatttcagcattttagatatgtgtcaacaagtatttaccttaatatacgtgcaggtacatcagrgaaggaggtgttcagatacagattttaacctggattgcaaactactggtaaatttactttcactattgtttaaaaaaatcatcaatcagataatgtaaag

SEQ ID NO: 485491 - DNA, 201 bp, Homo sapiens
tccctagtagctgggattacaggtgcgtgccaccaggcctggctaattttttgtatttttagtagagacagggtttcaccgtgttagccaggatggtctcsatctcctgacctcgtgatcagcccaccttgacctcccaaagtgctgggattacaggtgtaagccaccacgcccaaccatttttatatttttaatagagat

SEQ ID NO: 485492 - DNA, 201 bp, Homo sapiens
cagggtttcaccgtgttagccaggatggtctcgatctcctgacctcgtgatcagcccaccttgacctcccaaagtgctgggattacaggtgtaagccaccrcgcccaaccatttttatatttttaatagagatgggtttcaccatattggttaggctggtctcgaactcctggcctcaggtgatccacccaccttggcctc

SEQ ID NO: 485493 - DNA, 201 bp, Homo sapiens
gtgcacacaatcaccttagagccaagcatgctttttggatcccccctttgtcttcactcactcccatcctctcagggggcagtctgaggacatcaagtagrcagtttttttgtttttttgtatttttagtagagacagggttttgtcatgttcgccaggctggtcttgaacccctggcgtctggtgatcagcctgcctctc

SEQ ID NO: 485494 - DNA, 201 bp, Homo sapiens
ctagttaacttctgagatttggttacctacacagaagacatccctacgcacccatcaattacaagagccagagttggaatcccagctgcttgggaggctgmagtgggaagaacatttgagcctaggagttcatgaccagcctagaaaacatagtgagactccatctctacataaaattttaaaaaattagccaggtgtggt

SEQ ID NO: 485495 - DNA, 201 bp, Homo sapiens
aagaacccactcctctccccaagtaatgaagtttgtcagtttcaagcctgtaataaggtactgacttaaaattaattttctaataatacagtactgctatrtatctaatgtggggttagtcaatgataggaaaaaaacataagacagagtcacatttaaaaatgtgtgcttaggtgcatggtgacacctgcctgtagtcca

SEQ ID NO: 485496 - DNA, 201 bp, Homo sapiens
atctctacataaaattttaaaaaattagccaggtgtggtggtgtgcacctgtagtcccagctattaaggaaggctgaatcgggaggatcgcttgagccccrggattcaaggctgcagcgagctatgacggcactactacattccagcctgggccacagagtgagactctctctctaaaaaagaaaaaataattaatgagag

SEQ ID NO: 485497 - DNA, 201 bp, Homo sapiens
tcaatttcacctgtgtgtcccatagccctcccaaatccacagggtggaaacccaaatcccctggaacctgaacaaccacctgcatcccgtactcttcctcyaccacctcctgctcaggccgggcaccgtaactgacctcatagcctcagccaggtatctgcaagcccagtaccagtggatagacaggacacataatatatc

SEQ ID NO: 485498 - DNA, 201 bp, Homo sapiens
agccggaagccgccttcctagtggagacgcgagtgggggaggagcagtccgaggggaacgtgggttgaacgttgcaactagggtggagatcaagctggaasaggagttccgatcgacccggtaccaagaaggggagtgcccgcggcaggtaagggagaagagggaggggtttctttccgctctcgaaattgggaaaagaga

SEQ ID NO: 485499 - DNA, 201 bp, Homo sapiens
tggagtacagtggcgccatctcagctcactgcaacctccgcctcctgggttcaaacgattctcctgcctcagcctccctagtagctgggattacaggtgcrtgccaccaggcctggctaattttttgtatttttagtagagacagggtttcaccgtgttagccaggatggtctcgatctcctgacctcgtgatcagcccac

SEQ ID NO: 485500 - DNA, 201 bp, Homo sapiens
gccatctcagctcactgcaacctccgcctcctgggttcaaacgattctcctgcctcagcctccctagtagctgggattacaggtgcgtgccaccaggcctrgctaattttttgtatttttagtagagacagggtttcaccgtgttagccaggatggtctcgatctcctgacctcgtgatcagcccaccttgacctcccaaa

SEQ ID NO: 485501 - DNA, 201 bp, Homo sapiens
tcctgggctcaagtgatcctcccacctcagcctcccatgtagttaggactacaggcatgtgccaccgtacctggcaatttttaaaaactctaggtgacctktctaatcaatctttttccattgacaatcacctttttataaacgactgcagcactgattgtagtattcattttaaactgtacattctggtcatatgtgtgt

SEQ ID NO: 485502 - DNA, 201 bp, Homo sapiens
gaataacaaaaccaacataaatgtacacagcctttgtctgagtctgattacattttagtcaaaaaaaccctaatttatttggtcctctgcattctttgaargatgaggacttatatcaacaccatacttaatgtagctgttaccctaaaaacttattacacctcaaactaagtacaatcatacatctggcgtacttgtcat

SEQ ID NO: 485503 - DNA, 201 bp, Homo sapiens
caaaaccaacataaatgtacacagcctttgtctgagtctgattacattttagtcaaaaaaaccctaatttatttggtcctctgcattctttgaaggatgargacttatatcaacaccatacttaatgtagctgttaccctaaaaacttattacacctcaaactaagtacaatcatacatctggcgtacttgtcatcatttt

SEQ ID NO: 485504 - DNA, 201 bp, Homo sapiens
caatcatacatctggcgtacttgtcatcattttaccaagcaaacccacacttcttaccttttcgtatttttccttcagcttcgcagccttcttttcataargctgcttgtcatctgcagcagtgttattccacatctctcccagtttcttcgcaacatcaccaatggacaggccaggatgttctcctttgatttttgggcg

SEQ ID NO: 485505 - DNA, 201 bp, Homo sapiens
aacatcaccaatggacaggccaggatgttctcctttgatttttgggcgatactcagagcagaagaggaagaaggccgaactaaaaaaaaaattaattttargattttaagttaacagatcacaaaaacaaatactatcaagtgtacactgcattgctatttaaagctgcctgtgaatttctgtgatgcattggacagggtg

SEQ ID NO: 485506 - DNA, 201 bp, Homo sapiens
tacatttacactctaaactgacaaagtagcttgctaaatttctctcagattctactgtaaaacgtgtctgggaagtaaaaacaggcaagatactcacggargcctcttgggtgcattgggatccttgaacttcttttttgtctcccctttgggagggatataggttttcatttctctttcataacgggccttgtccgcttt

SEQ ID NO: 485507 - DNA, 201 bp, Homo sapiens
acatcaaatcgattaccaacttgtgctgattttatcttcaaatactctccagaattgtcgctgtcatggactgaatatttgtgttcccccaaattcatatrtcctaatccctgatgtgactgtatttagagacgtgacctctaaggagtaattaaggttcagtgaggtcaaaggtggagccctgatctgataggatcagtg

SEQ ID NO: 485508 - DNA, 201 bp, Homo sapiens
ttgttgttgtttttgtttttatgagacagggtcttgctctgttgcccaggctggagtggaatggcacgatctcagctcactgcaacctccacctcccgggytcaagcaattctcgtgcctcagcctcccgagtagctgggactacaggcatgcaccaccatgcctgggtaattttgaatttttgatagagacggtttcacc

SEQ ID NO: 485509 - DNA, 201 bp, Homo sapiens
cccctctctggccttatctgacccacagacgtttcattcggtcaaagcggtgttttaaaaaggtagacattgggcaggtatggtggctcacacttgtaatyttagcactttgggaggccgaggcagaagaggagttcaaggatgcagtaagcagtgattgaaccactgcactccagcctgggcgacagagcgagatggtct

SEQ ID NO: 485510 - DNA, 201 bp, Homo sapiens
tctcctttttttttttttttttttttgagatggtttcgctctatcgcctaagctggagtgcaatggtgcaaccttggcactctctctctctctttttttgkttttttttttttgagacagggtcttgctctttcgcctaggctggagtgcaatggtgcaaccttggctcactctctttctcttttttttttcttttctttt

SEQ ID NO: 485511 - DNA, 201 bp, Homo sapiens
tttttttttttttttttttttgagatggtttcgctctatcgcctaagctggagtgcaatggtgcaaccttggcactctctctctctctttttttgtttttktttttttgagacagggtcttgctctttcgcctaggctggagtgcaatggtgcaaccttggctcactctctttctcttttttttttcttttctttttttgt

SEQ ID NO: 485512 - DNA, 201 bp, Homo sapiens
ggcaccattttccggtaggcctatagaacctgtaaccttaaataccataacataaaaactaaacttcttgccacagttttggccttttctaatccattctyattaaactgctgctaaagtgaccatttaaacacaaaagatgcatgaaattattcaatgtcacccaggcctctaggatgcagcccaacactctagcacaga

SEQ ID NO: 485513 - DNA, 201 bp, Homo sapiens
tgggcaccccaagtttaataaactattccctgcagaaacctgacaagtgaagttgtggctgggaatatgttagtcttcagataaaatgaattgtttaagamtttgctaaagatctcaaagcatctttcttaaatctaaagaaagtcaggaacaaagccacaaccaggaccatagcatcagaagatggaaagttgctttgtc

SEQ ID NO: 485514 - DNA, 201 bp, Homo sapiens
aacgttctgctgctttctgaactttaggttgctctagagtctaggaagagtgactgtacctaaagcagttcctaattactggacattctcagatctgctasagctacatgtccaattacgagaatatactggaaaaagccctggattagaaatgagaggatgtaggttttagtaccaggtcagccaccttgttaatgcaaa

SEQ ID NO: 485515 - DNA, 201 bp, Homo sapiens
ggcaggaggatggcttgagcccaggaatttgaggctgcagcaagctatgatcacacctctgcactccagcctgggtgacagcatgagacccagtctctttaaaaaaaaaaaaaaaaaggccatatatagcccagaagagcgtcctcaccaaaacccaatcctgatagcacctggaggacttccagcctccagagctgtgag

SEQ ID NO: 485516 - DNA, 201 bp, Homo sapiens
aacacttatgggaggctgaggtgggaggatcgcttgagcctaggaatttaagaccagcctgggcaagatagcgagacttcatctctactaaaaataaaaawaaaaaaatagctgggtgtggtggcacatgtccatagtcccatctacttgagatgccaaggtaggaaggttacttgagcccaggaattcaaggctgccgtg

SEQ ID NO: 485517 - DNA, 201 bp, Homo sapiens
tgagggagctactgtgtccattacaatactccttctagaagctcaatacataatgactaatctctggaaaaaagcaagtgtgagaatggaaggctcttctycaaactatgcaaaatgaatcaatcagcagtgaacaaatttatgagccaaacaaattcctacaaaaattaccatcatatgctgtcatgcatgtctgccagt

SEQ ID NO: 485518 - DNA, 201 bp, Homo sapiens
actccttctagaagctcaatacataatgactaatctctggaaaaaagcaagtgtgagaatggaaggctcttcttcaaactatgcaaaatgaatcaatcagyagtgaacaaatttatgagccaaacaaattcctacaaaaattaccatcatatgctgtcatgcatgtctgccagtctatttatcatattatttaagaaacaa

SEQ ID NO: 485519 - DNA, 201 bp, Homo sapiens
cactgccaaagaggaaataaagagcataatatctattcttagaaaataacattaacacaaatagaaaacaagaaaccataatgttaaaaatattacatagyaacacagaaagacaatgtataattatacatacgcactaaagcaaagataacataatttataaattatgaggtacagaatagttagattctgaaaattaaa

SEQ ID NO: 485520 - DNA, 201 bp, Homo sapiens
agaactgttgtgatatcgcaggtggcatgtactttttttttttttttttttttgagacacaggtagcatgtactctctctcagtttttttattttgagacagagtcttactcttttgcccaggctggagtgcagcctcattgcgacctcagcctctcaggctcaagctcagcctcccgagtagtgggattacaggcgcaag

SEQ ID NO: 485521 - DNA, 201 bp, Homo sapiens
attttcctgatgattaaccacattatacttgtccttttagtttgaatttacccaaatttctaccatttttccactaaactatttactcaaatagttttttkggggcacagctgtggtaaatatatgcactttcttttaattactttgtgcagtgtgtgtagcaaggaagccttgggtaggctggacagcacaagtgcaggc

SEQ ID NO: 485522 - DNA, 201 bp, Homo sapiens
accatcatagttctgtattaggaatacagtgtgctccaaattatgggaattgaggggaaggactgagagttaattctagataacttacaagatcatgattkgcaattttcctgatgattaaccacattatacttgtccttttagtttgaatttacccaaatttctaccatttttccactaaactatttactcaaatagttt

SEQ ID NO: 485523 - DNA, 201 bp, Homo sapiens
taaaggtgatgaggatgttttatatatctatacttacatcaatctctctttctatagttgtgtgtatgtatacatctatgatgacagatatagtatgcacrtatgatattaaagactttatttaaatactgatttacagtattgaatcactgtatgcaatacataatattattaggagagtttcataatttgccatcatcc

SEQ ID NO: 485524 - DNA, 201 bp, Homo sapiens
ggtcaccaaggactctgccctgcattccttactcattcatttctacatttttagtcttttgactccacctatgaagttaatgatttacttcatgaatactygtttccatttgagcctcttcctaaaactaggttttagttatggtcatttgcagatatctaatgtgatcccaaagctcaaaaaagaagtattaaaattcct

SEQ ID NO: 485525 - DNA, 201 bp, Homo sapiens
tgtttttgcaactaactcaacaaacatatattttatattgtaagagcccctcaaactgctccattagaaaacagccaagcttaactacagatttacttctrgattttgaaagcagcgaatcaaaaactggaggatttatataagaaataaagtccacctcctgaaaaaaaacatttaaattgaacagtgattgattgaaaa

SEQ ID NO: 485526 - DNA, 201 bp, Homo sapiens
aaacaagaaccaaagtgatcaaactctctccaagtaatttaactgtatcctggtataaagcctgagaaaatttctaggaatacaaaaacatccaatataamacaggataaaattaacaaagtctggtattcaatcaaagattacaaggtatgtaaaaaagcaggaaagtaagatcaataatcagaaaaataaataaatcaa

SEQ ID NO: 485527 - DNA, 201 bp, Homo sapiens
caataatcagaaaaataaataaatcaatttaacttaaacagaaattactcagagatgagaattagcaggcaaggatattttaaagagttataactatattstgtatggccaaaaagttaagtaaagacatggaaaatacaaaaaagacctaaattaaactgttagagataaaaactagaatatttgggacaaaagaattat

SEQ ID NO: 485528 - DNA, 201 bp, Homo sapiens
atcccaccctttaaatggtccaaatggaagccaagatactggatcacgtctaagaaaatttaaatatgctagctacactcaataatgtagtaattcatggkcatctgtaactcctcagtgtgaattaattaatcagatcactcagctgcttctgaaagggacccctggttctggtgtcccccacaacaggtacctcccttt

SEQ ID NO: 485529 - DNA, 201 bp, Homo sapiens
tttttggcctcttgtcttttgcacatgctgttatcttctctctccaattttgcaggtctggttctttcatatttttcaagtctcactttaatattaagatstcaggagttcttccctggtcaccccatctcttcttgtgattcttgatctcagcctattgtttctttcatagcacttaccacaaacttgcaattattttat

SEQ ID NO: 485530 - DNA, 201 bp, Homo sapiens
aataaattgctcagagtagggggagaaattggagaatatctaggaggcattggtgggttgcacaaagtaagtgatgggttggggcctagactagggaggtrgaaatgagaaggaaaatgaagaaaatcaaagacagcctgttgaagaaatgtttgaaagaaattggtaacaaatgaatacagggaataaagattagaagga

SEQ ID NO: 485531 - DNA, 201 bp, Homo sapiens
taccagttcatcttggcattactcataatcgaaacatttcaattttagttaacacacacacacacaaaactaatttaaaagtcaaatgagtaaattagttmtatgctcctatgttccaattccatgttgatatcaactagctgaatttagcctcaggaggtatgaaaaaatatctaatacaatgaatggaaaaccttttaa

SEQ ID NO: 485532 - DNA, 201 bp, Homo sapiens
tattaatgtagaaaatgtaaactaatttgaatttaataaattgattgccaactctttcttttatgtaaaagtaggttgggcacacctttggtaacatcaamcctttggaaaagttggtaaataaaatttaagttcaattgtattaatgaaattaaaaagctatgattgtggtattatcataaataaaatatgtgagtgcaa

SEQ ID NO: 485533 - DNA, 201 bp, Homo sapiens
cccgaggccctgatccatgacatgaaattcaaatacacttatgagtatctgagcatattttactcttctaacaacttctaaagatttaattcaagaaaggrctccttgacttaaaaaaattagcaaagagccttactcaaggtactgtgcaattaatatcattattgagaatttccctagttgcttctctcttttgcatat

SEQ ID NO: 485534 - DNA, 201 bp, Homo sapiens
gctccggctcctgtgccgcctctcagggaatgtggcactcagtcactcaaatcaggggccttggaattcctcttgcattcctccattacttacatgtcatmgataaccaagtcctgttcattccttcttcaaacatttctcaaatccacccactcccccatccgcactgctgcttccctgtttctaacctagataattgca

SEQ ID NO: 485535 - DNA, 201 bp, Homo sapiens
aatagaaatctccttttatcctcagccccccaaatggatcctcttgtgtctgctgtatctcagctaatagtattattcaccagcttgttctcagcttaaayctggagtcatcctttatctctgttttcgtatccttccacatccactctatcagcatgtgctgtcagttttacttctaaaatccttcctaaatctgacagc

SEQ ID NO: 485536 - DNA, 201 bp, Homo sapiens
ccccaaatggatcctcttgtgtctgctgtatctcagctaatagtattattcaccagcttgttctcagcttaaacctggagtcatcctttatctctgttttygtatccttccacatccactctatcagcatgtgctgtcagttttacttctaaaatccttcctaaatctgacagcatctcattatttctactgaaaccacct

SEQ ID NO: 485537 - DNA, 201 bp, Homo sapiens
gctgcagaaagatatagtccatttcaagttaccatgaaggttaaggaaaaatattaaatttaatgtacttcatatttgcttatctatatgtcctgggatgmacatttttaaatggcaagaaagctagcagattaggtaagaaaaatggccagagaaaacaagataaaagtgcattaaataaagtcaggttttgaatgtagt

SEQ ID NO: 485538 - DNA, 201 bp, Homo sapiens
tggaagcttcatcccagaggggcagccacctatatgaggtgtccatcagcccctactgggacctactgggaggtgtctcccagttaggctacacagggatsagggacccacttgaggaggcagtctctccattctcagagctcaaacactgtgctgggagaaccactgccctcttcagagctgtcagacagggacatttaa

SEQ ID NO: 485539 - DNA, 201 bp, Homo sapiens
tttgtaacaggaatcagaataattagaaggtggaatttgaattaggtcttcaaaaatggatggaagttggggagaataatggtgatgactaccctaactasgggagagggtttagagagaaacagcattgcccaggcaggtctgggtcaattgctttatgtttaaagcgatagacaatttggggggcaattatggtttttt

SEQ ID NO: 485540 - DNA, 201 bp, Homo sapiens
aataaaacaaaaggtacagtaattataagtcaatttaattctcaatagttttggacatgcggctaaaaattatagctagtggccatctgtcaacaaatgtraactatgaaactggatattaaattatatctaatttaatacactgtacataggatctaattttacatactgtggcctaacagtgtgcaaaatgttaggcta

SEQ ID NO: 485541 - DNA, 201 bp, Homo sapiens
ccacaacaggtacctccctttgtgggtctctctgttttcccactaaagcttagcctttcttggaattcctccaactgccactcaagtcataacctcacttytggggtgagtggacttgaggtgtttcatgtttccttagagtttcatggcttctctgttgtcctacgaatgctcttatctggggattttcagttaaataat

SEQ ID NO: 485542 - DNA, 201 bp, Homo sapiens
atgcagtaaatcacttgttgaggggccaagtcagggttagcagaatgaaggctgctagaatgaggaaatcccaccaggaaactagagtggctacccagaaygggtggaaattgaaaaggggagatcttttaagagaagaccatagaaataagttcagggagcctttgaacttgaattgctcagctgtctattgtatctatt

SEQ ID NO: 485543 - DNA, 201 bp, Homo sapiens
attgatttctatactgcatggctcaagtgacatacattcactttagaaggttttaagttgcacagtatacaagtatatcatttacagttgattaaaatgtktgtggtcatttctatttaaaagaacaagttaggcatctgtttcttggttagaaataagcacctcatttttttaccctgtgtgaaaatcaggtatgactta

SEQ ID NO: 485544 - DNA, 201 bp, Homo sapiens
gattttagacgaactaattcgcctcactaagatgaatcttttgatttgttcctacttcgcagggtcactgttgtgaggtttaagagagataatttaatgtraaatttagcataatgcctacacacaaaaagcttgtcaagcatttaataataataccgaccattattattactaatgtcgtgctaaatgtggcaggacctg

SEQ ID NO: 485545 - DNA, 201 bp, Homo sapiens
cctttcctatatttagacaccaaactccattcattttccccttgaaatgttcattcccatgatcaagattttgcttaaacacattttgttttcatgtccasattattacctcagctggaagaattaataagcaacacgttcacccaagaagtatttactgagcacctactatgtgcattattttctggtgttggggctagg

SEQ ID NO: 485546 - DNA, 201 bp, Homo sapiens
atttcttatgtataactattttatgttgataataatgtgcagttacatgaaacgttagcaatgaaaattataaatgatgtttcattttaaatatatcaaasagagatttcaggaacaacttggagaaaaagcaatggtcagaaggaatttataaagtgttatgttcatataataatagatacaaagcttggacatttttac

SEQ ID NO: 485547 - DNA, 201 bp, Homo sapiens
tatgtcagccttgcaacaaatctccttatcttcatgggatctttatcttcacttctgcctccacactactgttagaaacacatatactgagacttggtggktatggagtaataatatcttcactccatcaatgttgttttttttcaagaaaatttattttaaatcttggcacttccacagctgcaaaaaatctgggagaac

SEQ ID NO: 485548 - DNA, 201 bp, Homo sapiens
tctagagatatggtgagtttaagaacttaaaaataagttcagagataggacctgtctttgtaacaggaatcagaataattagaaggtggaatttgaattakgtcttcaaaaatggatggaagttggggagaataatggtgatgactaccctaactaggggagagggtttagagagaaacagcattgcccaggcaggtctgg

SEQ ID NO: 485549 - DNA, 201 bp, Homo sapiens
gctgggggcacgccaaccctttctgttacttcctgtaggcatagcccaagtctcaggaagcagaatatacatggggtggggtggggtggggtgggggaggwgaggggagctgtttctgcccccacccattacctactagtccaaagccacttgagccatgggaacagcaatgctaaccacaatagctgcagggacctggaa

SEQ ID NO: 485550 - DNA, 201 bp, Homo sapiens
cacttcttggagttcaagaatatctcttgaatatggatatctaagtatctgtattgtactatctattggatatctcttttgcatgtctgagcaaattctakagatatggtgagtttaagaacttaaaaataagttcagagataggacctgtctttgtaacaggaatcagaataattagaaggtggaatttgaattaggtct

SEQ ID NO: 485551 - DNA, 201 bp, Homo sapiens
aaagaatgacaaaatagcaagcctataatcatatgcattaatttatttaaattcctataataaaacaccactgaagtggctttcattttctcttggtgaakgcaggaattattttaacagagcagagagtgctcattggtgtaaacagacaagcttcaaacagttcatagaatcaggcacaccaatgccctgagtgcaggg

SEQ ID NO: 485552 - DNA, 201 bp, Homo sapiens
tagtgacatggaagtctggcctggacaatgtagtaataaagtcaaaaaagaatgacaaaatagcaagcctataatcatatgcattaatttatttaaattcmtataataaaacaccactgaagtggctttcattttctcttggtgaatgcaggaattattttaacagagcagagagtgctcattggtgtaaacagacaagct

SEQ ID NO: 485553 - DNA, 201 bp, Homo sapiens
agagataatttaatgtaaaatttagcataatgcctacacacaaaaagcttgtcaagcatttaataataataccgaccattattattactaatgtcgtgctmaatgtggcaggacctgaaaaattactaaatctgatttcaagcctgagtttccacctgtataaagtggagattaaaatcctggtcctcacagggttgttgt

SEQ ID NO: 485554 - DNA, 201 bp, Homo sapiens
taccacagactgattgtagtatttatgactatagtggcaaacagtatgttccaatcttgaaaactcagactattgttacaaatttagatttcctgatggcrtgatttgttgtcatttgaaatgattaggagccccctaacattcccctagaatatgggctctatccattagttatccttaacctcaccctctcatagaaat

SEQ ID NO: 485555 - DNA, 201 bp, Homo sapiens
atgtataactattttatgttgataataatgtgcagttacatgaaacgttagcaatgaaaattataaatgatgtttcattttaaatatatcaaagagagatwtcaggaacaacttggagaaaaagcaatggtcagaaggaatttataaagtgttatgttcatataataatagatacaaagcttggacatttttactccaatt

SEQ ID NO: 485556 - DNA, 201 bp, Homo sapiens
gtgttccaaattgaatccctcaagggaagctatgaaatgaagccagctttctcttctcttgatgctgccattaaacaatgaacagacataattcctgggtrcataagaagattcagaaaggaggaaaccagttaaacaaaatctagtactaacaaagaaatagttgtttacaagaagaaagagacttttacaatctgtcta

SEQ ID NO: 485557 - DNA, 201 bp, Homo sapiens; identical to SEQ ID NO: 437345

SEQ ID NO: 485558 - DNA, 201 bp, Homo sapiens; identical to SEQ ID NO: 437347

SEQ ID NO: 485559 - DNA, 201 bp, Homo sapiens
atatatcaaagagagatttcaggaacaacttggagaaaaagcaatggtcagaaggaatttataaagtgttatgttcatataataatagatacaaagcttgsacatttttactccaattaaccctcatggcaacctaacaaagttcaaactacaaccccaaatgtataattcagcacaatgtggctctgcgagttcaggtga

SEQ ID NO: 485560 - DNA, 201 bp, Homo sapiens; identical to SEQ ID NO: 437349

SEQ ID NO: 485561 - DNA, 201 bp, Homo sapiens
tagtatccataggccagtgagcaaccaatgaggggacctggagcaaaagacactgtccaagtgggtagagagtaactagctaaatcaatgtgtccatctcycttttgggctgtagactggaaaatatggagagtggccagttattacggggtaggaggagagagagagagagatgaagagagaagaggaggcacaaaagta

SEQ ID NO: 485562 - DNA, 201 bp, Homo sapiens
tgggctcacaagaagtattctggaatactggcattccattcttctgccatcatcaggagagttgaatcttcagtggcccttcaatcttgagacaggattgmagcaggttcttgtttttttggttctgttctgttctgttttttttttttcctttcctttgtcaaaaatactgaaactcagaattgaaaaccaaaggaatca

SEQ ID NO: 485563 - DNA, 201 bp, Homo sapiens
ttagtgacatggaagtctggcctggacaatgtagtaataaagtcaaaaaagaatgacaaaatagcaagcctataatcatatgcattaatttatttaaattyctataataaaacaccactgaagtggctttcattttctcttggtgaatgcaggaattattttaacagagcagagagtgctcattggtgtaaacagacaagc

SEQ ID NO: 485564 - DNA, 201 bp, Homo sapiens; identical to SEQ ID NO: 437346

SEQ ID NO: 485565 - DNA, 201 bp, Homo sapiens
ctctgggtctttttgggtaattagtgacatggaagtctggcctggacaatgtagtaataaagtcaaaaaagaatgacaaaatagcaagcctataatcataygcattaatttatttaaattcctataataaaacaccactgaagtggctttcattttctcttggtgaatgcaggaattattttaacagagcagagagtgctc

SEQ ID NO: 485566 - DNA, 201 bp, Homo sapiens
aaatttatttaagatcacaaaatgatacttgacagctgaaagggagatctcatattcttaacttttagccctggggacttaagggaggtcactctcatggkctatgtttttttctcacttcgacttccttcttttagactattacaattttagtgacatatgaaaaaaacagcctcctctccctgtgttcttgtctactgt

SEQ ID NO: 485567 - DNA, 201 bp, Homo sapiens
ctttttggagtgtctttaacctatattagaataagtcactaattctgaaagttggaagtgtatgtatttgagataaataatatggtgtagtgatcaaggtrtcccaaatgattcccatcttctcttcttttgatattcacgtcctgtgtaatcccactgaattagattgactgtgtaatcaaggattttgtgggaataata

SEQ ID NO: 485568 - DNA, 201 bp, Homo sapiens
ttctgaaagttggaagtgtatgtatttgagataaataatatggtgtagtgatcaaggtatcccaaatgattcccatcttctcttcttttgatattcacgtsctgtgtaatcccactgaattagattgactgtgtaatcaaggattttgtgggaataatatagtgtgattttgaggttgatccttaagaaaattgtggcttc

SEQ ID NO: 485569 - DNA, 201 bp, Homo sapiens
aaaaaagggaaaatggcaggaggctaatagaccttcttcagccatgcatagatctggaagaatctatctgttgctcaaagtctttttgttttttttggtcmaagggatttggaaaatacttcttttctaggtatctcagtaggaactttactctctcaaaccataaatttgtagtgccttacataaaaagttacaattaaa

SEQ ID NO: 485570 - DNA, 201 bp, Homo sapiens
cagggcagagaacaccatacacatcacctctagactaggttgctgggagccagaggaagatcttggtgaagtgcatgcagccaccatctgctcccatcacmtaatgctgcagaaccaactggagctgtgctactttgagataaactagaggtgggttcctgatcatattacatgacactctctcccattgttagcaattag

SEQ ID NO: 485571 - DNA, 201 bp, Homo sapiens
taaatgcagttataaagtacctagtacagtacctgacatatagtgtctgccatatagtaggtttctccaaaatgtgaatgcatcctgtctctatgcctttyttctctgattttctttaaataccgggcatatcatctataacgctgctttcccaacttcagattaagatgaccatgggaacagtccctgtgtgcataagca

SEQ ID NO: 485572 - DNA, 201 bp, Homo sapiens
aactagataaatgcagttataaagtacctagtacagtacctgacatatagtgtctgccatatagtaggtttctccaaaatgtgaatgcatcctgtctctaygcctttcttctctgattttctttaaataccgggcatatcatctataacgctgctttcccaacttcagattaagatgaccatgggaacagtccctgtgtgc

SEQ ID NO: 485573 - DNA, 201 bp, Homo sapiens
cacctgtgtcttaaatctcaagagcagagacttcagggcagagaacaccatacacatcacctctagactaggttgctgggagccagaggaagatcttggtraagtgcatgcagccaccatctgctcccatcacctaatgctgcagaaccaactggagctgtgctactttgagataaactagaggtgggttcctgatcatat

SEQ ID NO: 485574 - DNA, 201 bp, Homo sapiens
gcagactagctttttattagtcaattattgtttatcaaattatttgtttgaatgaaacaatttttttaacttataattatctaaccacaatgtttcaggartaagatacttgaaagatcttgcaattttctttttatcaggtaagtatttatttagtacctactatgagttgggcattctattgacacttaaatatttcat

SEQ ID NO: 485575 - DNA, 201 bp, Homo sapiens
atgactgaggggaacacaccccaaggatgaagtcaccaagcctctgaattaatgcaccacgggaccaccctgcatcaggttttcttgttatgtgttatttmacctttttgggtataagttcaagtttttggttacttgtagctgaaagcatacacaagccaactacaaaaataatattcaatgctaaatacactaggaata

SEQ ID NO: 485576 - DNA, 201 bp, Homo sapiens
tcaccaagcctctgaattaatgcaccacgggaccaccctgcatcaggttttcttgttatgtgttatttaacctttttgggtataagttcaagtttttggtyacttgtagctgaaagcatacacaagccaactacaaaaataatattcaatgctaaatacactaggaataaaatctaaaggaaagagcattgcctttaagac

SEQ ID NO: 485577 - DNA, 201 bp, Homo sapiens
ccaagcctctgaattaatgcaccacgggaccaccctgcatcaggttttcttgttatgtgttatttaacctttttgggtataagttcaagtttttggttacktgtagctgaaagcatacacaagccaactacaaaaataatattcaatgctaaatacactaggaataaaatctaaaggaaagagcattgcctttaagacagt

SEQ ID NO: 485578 - DNA, 201 bp, Homo sapiens
actgtactttagaggatcttctcttgctctctttcacacacatcactttcacagaaggtgaggagggcccaggtgtctgtatatggcatccacacctttcmtagaccatgcactgagtacctgggatgccagaattctctgacctaactctgcccagatcagatctctggaggaggggaccagattgcatcattggtgtgt

SEQ ID NO: 485579 - DNA, 201 bp, Homo sapiens
gcccaggtgtctgtatatggcatccacacctttcctagaccatgcactgagtacctgggatgccagaattctctgacctaactctgcccagatcagatctstggaggaggggaccagattgcatcattggtgtgtaggctccaaggcccgaggagtgttcaaaggattcctggggctttgatgtgtgtatcaatggcccca

SEQ ID NO: 485580 - DNA, 201 bp, Homo sapiens
ggaacttaaacaattgaacaagcaaaaacaaacaacctcattaaaaaatggacaaaagatgtgaacagacacttctcaaaggaagctgtcagcaaacacawgaaaaaatgctcaacgttactaattatcagagaaatgcatatcaaaaccacaatgagatagcatctcatgccagttagaatggctattactaaaagtcga

SEQ ID NO: 485581 - DNA, 201 bp, Homo sapiens
agcaaaaacaaacaacctcattaaaaaatggacaaaagatgtgaacagacacttctcaaaggaagctgtcagcaaacacaagaaaaaatgctcaacgttamtaattatcagagaaatgcatatcaaaaccacaatgagatagcatctcatgccagttagaatggctattactaaaagtcgaaacagcacatgctggcgagg

SEQ ID NO: 485582 - DNA, 201 bp, Homo sapiens
gaattcagaagtaattagacttctagaatttctatacatttctggaatgcaagcatgtcgaaacccattgtacaacctttgccgacataaaggcaccaaawcatccacaaatgttaatcatttctcatgaccaatgtgattaatatggtccaaatcacccttcagctcctgcgttaagtccacaaatacccctacggaaga

SEQ ID NO: 485583 - DNA, 201 bp, Homo sapiens
ttctggaatgcaagcatgtcgaaacccattgtacaacctttgccgacataaaggcaccaaatcatccacaaatgttaatcatttctcatgaccaatgtgaytaatatggtccaaatcacccttcagctcctgcgttaagtccacaaatacccctacggaagatccaactgggcacactcagtcctctcttactgaagctgc

SEQ ID NO: 485584 - DNA, 201 bp, Homo sapiens
agtctgtttcctcatttttaaagtgggaattccaagaactattttggaaacgttgaaatgtaagtgaaggcgttggctgggatccaggaccccaaacactstgtcttaccatagtaagaggtctcaattctgtcttcctatacacactcttcctttggaagtgtccatggtgtatgtttgtgtctatgcacacaaacaagg

SEQ ID NO: 485585 - DNA, 201 bp, Homo sapiens
tcttgcatttatttaatgaagatgtgtttattgagacttaccatatgtcaggtactctaggtcccccactaagtgggaacaaaagaggtttgaccttgtcmtatgtcacccccctgttagaggtaaactatagaacttgccatttcccaaacactccttgctttttgttgtccttgcttttgccagttatgcaggtctact

SEQ ID NO: 485586 - DNA, 201 bp, Homo sapiens
gagacttaccatatgtcaggtactctaggtcccccactaagtgggaacaaaagaggtttgaccttgtcctatgtcacccccctgttagaggtaaactatakaacttgccatttcccaaacactccttgctttttgttgtccttgcttttgccagttatgcaggtctactgctggtttgttctcaggtttattcacaccctt

SEQ ID NO: 485587 - DNA, 201 bp, Homo sapiens
aggcatggggatcatcccaccctttaaatggtccaaatggaagccaagatactggatcacgtctaagaaaatttaaatatgctagctacactcaataatgyagtaattcatggtcatctgtaactcctcagtgtgaattaattaatcagatcactcagctgcttctgaaagggacccctggttctggtgtcccccacaaca

SEQ ID NO: 485588 - DNA, 201 bp, Homo sapiens
gtacctccctttgtgggtctctctgttttcccactaaagcttagcctttcttggaattcctccaactgccactcaagtcataacctcacttctggggtgartggacttgaggtgtttcatgtttccttagagtttcatggcttctctgttgtcctacgaatgctcttatctggggattttcagttaaataatcagacaatg

SEQ ID NO: 485589 - DNA, 201 bp, Homo sapiens
ttcctgagtctgtttcctcatttttaaagtgggaattccaagaactattttggaaacgttgaaatgtaagtgaaggcgttggctgggatccaggaccccamacactctgtcttaccatagtaagaggtctcaattctgtcttcctatacacactcttcctttggaagtgtccatggtgtatgtttgtgtctatgcacacaa

SEQ ID NO: 485590 - DNA, 201 bp, Homo sapiens
attaacattcctgagtctgtttcctcatttttaaagtgggaattccaagaactattttggaaacgttgaaatgtaagtgaaggcgttggctgggatccagsaccccaaacactctgtcttaccatagtaagaggtctcaattctgtcttcctatacacactcttcctttggaagtgtccatggtgtatgtttgtgtctatg

SEQ ID NO: 485591 - DNA, 201 bp, Homo sapiens
aactgcatagcttctgtgtggtcaatggtataaaagaatgaggagtttattttataatttatggctggattcatgctgctgattaaacaccagcctccgcmgacattgaggatagcctctatatggctgtgaatcctctctgccctcctgcaggtttagataaactccacttgctcctgtctgtttctatttgcttagttg

SEQ ID NO: 485592 - DNA, 201 bp, Homo sapiens
ttacagttgattaaaatgtttgtggtcatttctatttaaaagaacaagttaggcatctgtttcttggttagaaataagcacctcatttttttaccctgtgkgaaaatcaggtatgacttaacactccttgcacaagccaggctgaggatctctgatattctatttctgtgtgcatttgtaatcctttgtttatacaaatga

SEQ ID NO: 485593 - DNA, 201 bp, Homo sapiens
aagtaatttttggctaacaccaactatgaaattattctccacttcctcttctgggtaaaagaaacacatacatgttgtttgtgaaagagtcaacacagatwaaagtttctctttttcagttacacaaggaggcaccctgtgaaatttattgtgatgcagctgaagataatacttctcccctgccacctaaagaaagcatgt

SEQ ID NO: 485594 - DNA, 201 bp, Homo sapiens
atgttgtttgtgaaagagtcaacacagattaaagtttctctttttcagttacacaaggaggcaccctgtgaaatttattgtgatgcagctgaagataatayttctcccctgccacctaaagaaagcatgtttccagtctcaactgtgagcaaataaatcctgtttggtgtagtataatagcaatccaaattaaacatcaaa

SEQ ID NO: 485595 - DNA, 201 bp, Homo sapiens
taaaggtttctgcagggcgagttctggcaattccagtctgctctacaggcgggcagggtggactcactcaggcagagtcacaggtgtgggtagttggttgraagtctggctggagtgcaaaagaatgttaagagatgaataaatatgggaaggcacagctagcactcttacagagagtccattaacattcctgagtctgtt

SEQ ID NO: 485596 - DNA, 201 bp, Homo sapiens
aattagctgggcgtggtggcgcacgcctgtacttccagctacttgggtggctgaggcaggagaattgcttgaacctgggaggcagagattgcagtgagccragatcgcactattgcactccagcctgggcgacacgagcaaaactccgtatcaaaaaacaaaacagaacaaaaaaacaaaaactgagttcctggctatgat

SEQ ID NO: 485597 - DNA, 201 bp, Homo sapiens
gcgtcagatcgcctaggtcttccacctattaattgggtgattttaggacaatgtcatcatttgtggctcctagaatcagaccttaagtcaagggttgagarcaagttattaatttagtgttgattccaggaaacactggcaggagagtagggaactgagaaaggaaaggcacagaatatagggtggattattgagcaagtt

SEQ ID NO: 485598 - DNA, 201 bp, Homo sapiens
tgagatggagactggaagtacaagagagaagaaagttgttgtgaggtcaggagcatggtggctggatagatcttcaaagtatgaagcttttgcgtcagatygcctaggtcttccacctattaattgggtgattttaggacaatgtcatcatttgtggctcctagaatcagaccttaagtcaagggttgagagcaagttatt

SEQ ID NO: 485599 - DNA, 201 bp, Homo sapiens
aaggggattggcttgagtgcaccagggggccagagacatgggtcatccctggtgacgggagttggaatgctcccctgagatggagactggaagtacaagaragaagaaagttgttgtgaggtcaggagcatggtggctggatagatcttcaaagtatgaagcttttgcgtcagatcgcctaggtcttccacctattaattg

SEQ ID NO: 485600 - DNA, 201 bp, Homo sapiens
aaggctactccccaaggggttcaatatgcttttatagatttatcattctatcttccttccaagttttgtaggaaaaatgagatgactcttttgtttgcaartttacagataaataaatcaagacagacttgtgtaataacttgcacaaggtcactctagaaaatgaatggagaagtcaggaatgtagtccagttctctaat

SEQ ID NO: 485601 - DNA, 201 bp, Homo sapiens
gggtacaaagttctggagacccaactgtgaacaagaccattgctcccaattagcctgctcctttctcccaaagaactggttggctctgttctccccttttycatgacattgtctctttctgtactatcacctacatttagcatgaccacttctgtaggggtgcttgaactgttttgaaggtgccacatgtgaagtcttgaa

SEQ ID NO: 485602 - DNA, 201 bp, Homo sapiens
caggtgtgagccaccatgtccagccctgtcttttttattttagccattcctaggagtgtaaagtgatatttcatcatggtttagatttgcatttccctgaygactaacaatgctgaacaccttttatgtgcttattggacattcatacgtcttctttggagaaatgtctattcagatccttttcctgttttttaattgagt

SEQ ID NO: 485603 - DNA, 201 bp, Homo sapiens
ctttttggcctcttgtcttttgcacatgctgttatcttctctctccaattttgcaggtctggttctttcatatttttcaagtctcactttaatattaagaygtcaggagttcttccctggtcaccccatctcttcttgtgattcttgatctcagcctattgtttctttcatagcacttaccacaaacttgcaattatttta

SEQ ID NO: 485604 - DNA, 201 bp, Homo sapiens
aggcaggtgattactggtggtaaggaacatatccatgctttggagggacttgggtaccaggtcatgtacaactcaggaaagaaggcaggagctcagctgcygggggcctgaagggtaaagcaagggctgattcagaaggtaacagggcaatcttccagtgactgaggtcacgcagtcagttgaggatcagggggactcagg

SEQ ID NO: 485605 - DNA, 201 bp, Homo sapiens
aaaaattgtatgatgggccagtatcacggaggactctagatacttaaagaaatattttttgacataatatttgttgagggagtccttgaataattttgagycaaagattgatccaaatggtaccctaggaagattaaccttgaggatgggggatcctggcaaagagatggaaaagtgtagatgaatgtagggcacattgta

SEQ ID NO: 485606 - DNA, 201 bp, Homo sapiens
ttcttctaatggagtattctcttccttctagtaataataatttttgcccatcatatgttttatgaatatttgtcctaatttgtcactcacctttacttgtktacaatgtttagggaataaaagaatattatagcaatggctagtattcagtaagcgcttacaacataccagcaacatcgatacattcttcactcagttctc

SEQ ID NO: 485607 - DNA, 201 bp, Homo sapiens
ccaggaagaggcactgtcaataagcaatcactggtggtataaccaagcatggtaggttaggggaatcctctgtagagagtatgtttggagaaagtataggycctagaccagtgtgtttcaaatttagtggacatcagaatgacctgcagaacttattaaagtagttttctgggtccctgatagtttgaatatatgtcccca

SEQ ID NO: 485608 - DNA, 201 bp, Homo sapiens
atttaacatctatagtatatagtcaccaaataggaaaaatataatgctttaaagaaaatgtttttccactatgtttttcttttttttatgtgtaaaagctrggaaatagagactgtagatcactgataaagaaaaatgaaacactcctaaattggtgcagccattgcctctttgactagcgtatattgcagctcttatgag

SEQ ID NO: 485609 - DNA, 201 bp, Homo sapiens
attgcctctttgactagcgtatattgcagctcttatgagagggttttgggggttgctttttttttttgttttttttgttttttgttttttttttggctgayacatttcattagttgcaaggagctccagtggtgggttgatatttgtcacgctcagtttacaaacttttccaaccagatagcaaacatactaaatttccac

SEQ ID NO: 485610 - DNA, 201 bp, Homo sapiens
ccatggtaacataatttactgtgtcattaccattgttatcgcatcctccgcttcaaagcacatggtatccaggtgataaattactgaatctgacatttctyaatattcataaagtactttgataaaaagaacttggtttccttatctaaatgtgcaatttcaagacaataggctctctgaagaggattaaattcctgagag

SEQ ID NO: 485611 - DNA, 201 bp, Homo sapiens
gacagaaaaatatacaaattgtattaatttgttctcacactgctataaagacataaccgagactgggtaatctataaagaaaagaggtttaattggctcgyagcctgtgggctgtacaggcttctgtttttggggaggcctcaggaaacttacaatcatggaggaaggtgaaggggaagcaagcatgtttccatggcaggg

SEQ ID NO: 485612 - DNA, 201 bp, Homo sapiens
atcatgtcacaaacctataaaacatttatgaatattaaacatcatattagttttctattacttctgtaacagacaatcacaaacagtggcttaaaatagcrcagatgtattattctacagcccggagatcgggagtctaccgtgagtgggcagggttgtgctgcttctggaggttcgcagggagactctgtccaccccggc

SEQ ID NO: 485613 - DNA, 201 bp, Homo sapiens
tggatcttatgttagacaggttattaaagtacagggtattgctcatttcaacccaaatgatgaaggatccacaaagaaatatataatccatgtgaagagayagccgtaaggaaaggtaatacatttaatctgaagaatggtatgtatatataagtagatagatggatatagatatacaggtaaatacgcacactcatcaac

SEQ ID NO: 485614 - DNA, 201 bp, Homo sapiens
ttacagtgagctgagattgcgccactgaactccagcctgggcgacagagtgagactctgtctcaaaaaaaaaaaaaatatatatatatatatatatacacrcacaattatatcatatatacaaatatacatatatcatatataattatatctatatatatatacacaattatataatcactaggaccacaaaaataatata

SEQ ID NO: 485615 - DNA, 201 bp, Homo sapiens
tgagaagagctccatctccatcaccgctgaattattctatggggcactttaacaaggccccaaaaattgacttttgagtgttgtcatgatggaaatgacasatcattttaatgcaagagaaaaagattgaaaaccttgaccctttagattactccgaacctcaatgagaaggagaaaaatacttgctgatcagcttattag

SEQ ID NO: 485616 - DNA, 201 bp, Homo sapiens
atatatacatgatacacatgattgcatatatatatatatagtacatatatatgtgtgtgtgtgtatacacaatttttaaccattgtatccccaatagtgtmtagaatggtctacagcctataataatttctctcaaatatttgtggaatgaacaagtgaatgaatgaatggaattaggtcttcaaggataattagtaattt

SEQ ID NO: 485617 - DNA, 201 bp, Homo sapiens
ctaagttatatttgaacttgaagtagcttttctgtacctgatcactgtagacacagggcatttcaggaatgcaaaaacatttacttaattttttttttttkgagacagtaatttttgaaaatgaggatttccttaaatctttatttgaattctttctaccatgaagaattgttcagaatttgtcttgtttggttatatgtt

SEQ ID NO: 485618 - DNA, 201 bp, Homo sapiens
ggagttcgatggactaacttctcatcctacccagggatgcttgtgagccatgtaatctgggaatgaggtcttgagtaccttctcattacatgtgctttttsttctcacctcttctctctttcgtgtgtgtgtgtgtgtgtgtgtgtgtatacacaagatacgtttggcatatccataagccatatataatcagtctctagg

SEQ ID NO: 485619 - DNA, 201 bp, Homo sapiens
cctcatggcttggtgctgtccttgccacagtgagttctcatgagatctggttgtttaagtgtgtggtatttcgcccccaactcactctcttgttcctgctyctcccatgtgacatgcctgctccctctttgccttttgccatgaaaaacagctcactgaggcctccccagaagccgagcagatgccagcttcgtgtatagc

SEQ ID NO: 485620 - DNA, 201 bp, Homo sapiens
ccaaacaagagatgatgggggcttagaccagggcagtagcagcgacaatggggacaagtggtgcttgacatttgaaagtggaatcctcttaattctctaayggattagatatgggatgtgagagaaagaaaagaatcaaagatgattccaagttttattgcccaaacaactgtaagtaagaatgaagatgccatcaatgga

SEQ ID NO: 485621 - DNA, 201 bp, Homo sapiens
gaaagtagggttagaagagaatattgaggatgggaggaagaacggcatgtttgtgtggtgaaggaatgatccagcgaaaaaaggaaaaattgatgttgttwtctgtcacttatgttcttgttcatatcccaccctgttcctatgtttggggatcccaactttgaggttgagcccacacatcctagattctcactttcccag

SEQ ID NO: 485622 - DNA, 201 bp, Homo sapiens
tactcaactttgaactatactataaggttatagtaacccaaacaagatggtactggtacaaaaacagacacataaaacagaatagagaatcaagaaataargttgcatgcctacagccatctgatctttgacaaagtcgacaaaaataagcaatagaaagaactctctattcaataaatggtgttgggatggctggtgagc

SEQ ID NO: 485623 - DNA, 201 bp, Homo sapiens
gttagtattttaaacatcttagcacaatgagtcatagcatgggtctggaattctgacctcctgagttccaattttgctttaccacttgctagctacgtagrtatgttgtttcattctgtgaattccacctttgcatctttaaaagggaataacagcagatgttactgacagggctatagagtgcttaggatccacacacag

SEQ ID NO: 485624 - DNA, 201 bp, Homo sapiens
cccaacaccaaatcccagctgaagaacagcttctcatcttttgagacacagcacagggtgatgggcatggagctcttccacactccccacagtctgacttrgctctctccgttgtgccctcctggcaccctgctcgtattttattgtggcacctatatcgctggatctcactcactggtttgcactcctgtatcccctttg

SEQ ID NO: 485625 - DNA, 201 bp, Homo sapiens
ataatcaatgaatggacaaggagaataaataatatgaaagatgaaataaagaaataaaagtattaatgagagtataaacatatccagattgggctgggtgygatggctcatgcctataatcccagcactttgggaggctgaggtgggaggatcacttgaggtcaagagttcgagagcagcctggccaacatggcgaaaccc

SEQ ID NO: 485626 - DNA, 201 bp, Homo sapiens
ggcagcatccgggaaggacctttgaggccacgctctttccctcaggggacagtgaggtgcgttgtccatggcaccgatgggtttttctctgggtagcaggrggttccacaattccccagccccatttccttttaagtcattctggttatcatttcagttgaaagaattggagctacttttcacttgggagaacataataaa

SEQ ID NO: 485627 - DNA, 201 bp, Homo sapiens
agtagtaaagttattattatctaaatattaagggaagtctatggataaaataaaaataaaaacaacaaatacatacaatcagtttagttgggtacttagaygttaagtgggacagtgtgtaatgatgcaaagccaactatttagtagctggttataaagcacatttcttaaaataggaggggaaaccccttaaatacaaga

SEQ ID NO: 485628 - DNA, 201 bp, Homo sapiens
actaagttaaaaaactgaaattaaaattaatttatctgtacattgtaactcaaccacatgggttggctaactagatagaaatcttataatttgacctagcrctacataaatttaaaaaagttaacagtatcctgaaaataattttaaaataataattgtgtgaaaactggcattggaaataacatttgttgtttgcgtgaa

SEQ ID NO: 485629 - DNA, 201 bp, Homo sapiens
cagtatcctgaaaataattttaaaataataattgtgtgaaaactggcattggaaataacatttgttgtttgcgtgaatgaaaagtttatttaaaggttgarggcagagtgaggtgctaagagtggcttattgaaatcaaagctctagagtaatctgcataataattatcctaatcattttcctaccagaaaaactgatgat

SEQ ID NO: 485630 - DNA, 201 bp, Homo sapiens
gaaattatgagcaatatcacaggggtgcacagccattgccatagcagaagtaatatcatgcgctccctcactagtttttaggaacaatatcacagggggawgtacaccttctggggtattgggaataatatcatcatctcttcttgtagatattaggtacaatatcacgggggggggtgtacaccccttgctctattagaa

SEQ ID NO: 485631 - DNA, 201 bp, Homo sapiens
ttttctgtatgaaggcaacaacgggaagcatttcattaggaaaggtaatgatatgagtccaaacagaatctatgcttgtgaagtctgagtttgttcacttkaaatagcaatttatgtggctaatgaacacacaatcctgcctagattttcatctgggggaaacaaggacatttcattgctctttttccccacactcttaat

SEQ ID NO: 485632 - DNA, 201 bp, Homo sapiens
ccttgtctctgtctgtgacaacatatcctgggtcttgtttaaaatatttgtataacagtttaacatgagggaaagttgaattttattgaaagccctttctrtatctattgagataatcatgtagtctgtggttttagttctgtttgtgtgatgaatcatatttattgatttgtggatgttgaactaactttgcatcccaag

SEQ ID NO: 485633 - DNA, 201 bp, Homo sapiens
attaacagaataaaaggaaaatttatcaataataggaagatattgcaatacatgtatctgacaaaagcatatataaataactcccataaatcaataaggtraagtcaatctctcagaaaaatgacaaagaatttgaagagaatcttcataaaagaggattaccaaaagacaaaaaaaaaaaaaaaagaaattgaaaagcta

SEQ ID NO: 485634 - DNA, 201 bp, Homo sapiens
caataataggaagatattgcaatacatgtatctgacaaaagcatatataaataactcccataaatcaataaggtaaagtcaatctctcagaaaaatgacamagaatttgaagagaatcttcataaaagaggattaccaaaagacaaaaaaaaaaaaaaaagaaattgaaaagctactcaatccttcattagtcatgaggaa

SEQ ID NO: 485635 - DNA, 201 bp, Homo sapiens
tataaataactcccataaatcaataaggtaaagtcaatctctcagaaaaatgacaaagaatttgaagagaatcttcataaaagaggattaccaaaagacamaaaaaaaaaaaaaagaaattgaaaagctactcaatccttcattagtcatgaggaaaataaaaaagtctatattgtacacactcatcagtatagctaagat

SEQ ID NO: 485636 - DNA, 201 bp, Homo sapiens
agatgtacaaatcactaaccctggcaccatttgcagttttctcattcagtagatctggaatggggcctgggattctgtaattttgaaaagcgttatagatwactgaacctctggttgaaaatctttagtgtatgtccatcactttattagtttggctggtgcaccaatgaaggaagtaaggttaggggaagtgttatgggc

SEQ ID NO: 485637 - DNA, 201 bp, Homo sapiens
attctccccagttatgagctaagatcatatgattttaggatgcaggctttatggcttaaattcctattcacattttggagtggccaccaactgtggactgycaatagtctaatgtggtctgaagagaaagggagagctgctctagaaatcagagacctccctgccagaacttgttctcttccacaattggtagtagaatct

SEQ ID NO: 485638 - DNA, 201 bp, Homo sapiens
tggaaaagtaaatgaataaattctgtgctgtggacataatgcatggtgtcatcagcctagaggtggagggagtggtggggaaagtttcctagggaatatamacatgattgcaaatatatatatacatgatacacatgattgcatatatatatatatagtacatatatatgtgtgtgtgtgtatacacaatttttaaccatt

SEQ ID NO: 485639 - DNA, 201 bp, Homo sapiens
taaagaaatagtaaaatcagtatgagaaacaacagttttaggttgtcttggaaattcccaagtacaaaatttcttcccactgagatctacccgacaagcaygtaattaatgtgacaaacaacagcccctttcagattcccaacattggtctggctgaattaaatcttagagtaaaccttttgatattcaggatctcattct

SEQ ID NO: 485640 - DNA, 201 bp, Homo sapiens
ccaaacactgcctgttctcacccataagtgggagtacaaagtggctgtacttcccaaagcaaactgcagattcaacactattcctatcaaactaccaatgrcatttttcacagaactggaaaaaaaaaaaacaaacctatcctaaaactcacttcaatgaaaaaggagcctgaatagtgaaagcaatcctaagcaaaaagg

SEQ ID NO: 485641 - DNA, 201 bp, Homo sapiens
aggtagcactaatggcatatcaataggcaggtggttacgtggctctcatgttctgaagataagcaagtgaagaagagacattggcttacaagagcagatayaatcactgtaggagggaaagaggatagattaaaaagcaaaaggccaagccaagaataatccagtgagtaaaattccaatagaagaacaaaactcaaaggg

SEQ ID NO: 485642 - DNA, 201 bp, Homo sapiens
attcaactgctccccctgtcctcttgtatctatctcttttccctacctatctcggttgctttcttattcctttagcacctgccacagtgctgggctcacargaagtattctggaatactggcattccattcttctgccatcatcaggagagttgaatcttcagtggcccttcaatcttgagacaggattgcagcaggttct

SEQ ID NO: 485643 - DNA, 201 bp, Homo sapiens
aaaatactgaaactcagaattgaaaaccaaaggaatcacttgcgagtgctctcactctcgtcctgtgctcttctctctcacacatatagaaatatacctckatagttcaggtagggtttttgcactgtatatcaaggacttaaagaggaaagggggtcctgttgattctgcttaaatattttgttgcaatttgtaacaatc

SEQ ID NO: 485644 - DNA, 201 bp, Homo sapiens
aatgatacttgacagctgaaagggagatctcatattcttaacttttagccctggggacttaagggaggtcactctcatggtctatgtttttttctcacttygacttccttcttttagactattacaattttagtgacatatgaaaaaaacagcctcctctccctgtgttcttgtctactgtaagtcattggccacacatga

SEQ ID NO: 485645 - DNA, 201 bp, Homo sapiens
cccacaaggccagcaggtgctggccactggtgattcctgacaattccctgcacactggatccgaagtttagattgcttgccttctactgtcaagaccacckttgcctttgccctttgcaacatggaagcaagctcctcctcttttggtgcacaggcccacatgtatctagttgtgctttggtccatgcaagcctttctaca

SEQ ID NO: 485646 - DNA, 201 bp, Homo sapiens
ggaagcaagctcctcctcttttggtgcacaggcccacatgtatctagttgtgctttggtccatgcaagcctttctacatgatactggggaaaggggaggcrtgcatctgcccagactctgatgccactagtatgctcccaagtccataaactgacaaatacataagtacattcctatttgttaattataatttatgtactg

SEQ ID NO: 485647 - DNA, 201 bp, Homo sapiens
gtaaaaattgagtgaatttatgattcaactgagaagattctctttccagtattcttttccccagtaaagtgattgtactgattcctttgtaaatttggtcrcttggaaagttctaaggattgagcaaattgcttttaaagaatctccattttctgcatatgtatgtcacctactcaaaatcttattttccagtttaaatta

SEQ ID NO: 485648 - DNA, 201 bp, Homo sapiens
tgatgccactagtatgctcccaagtccataaactgacaaatacataagtacattcctatttgttaattataatttatgtactgttgacccttgaacaatayagggtttaggggggagccaacccccctgtgccatcaaaaatctgagtataacttttgactcccccaaaatttaactactgatagcctatcgtagactaaa

SEQ ID NO: 485649 - DNA, 201 bp, Homo sapiens
gaatgtacaaccccctgtgagattgtccttaatattcaaagacagaggggatgatattactcccaatatcgcagaaagtgtacaccccctagtgatattgytcccatgatccacgatagaagaggatgatattactttcaatatcacagaatgtgtacacgcacccagtgatattgttcctaatttcaaggtgggagagga

SEQ ID NO: 485650 - DNA, 201 bp, Homo sapiens
aaagcacagtcacgagtgtgggtatactggataaggaacttcacatatttgttttaaaatagtatcaaggagagcatatttcatataagctgccagaacamtttagcaaggcatgctgaacatacattttgtagtgagcttcttcacagaaaatgtagcaatgagaaatggcatctacaggatagggaggaaagagccctg

SEQ ID NO: 485651 - DNA, 201 bp, Homo sapiens
tgttgaaagcacagtcacgagtgtgggtatactggataaggaacttcacatatttgttttaaaatagtatcaaggagagcatatttcatataagctgccasaacaatttagcaaggcatgctgaacatacattttgtagtgagcttcttcacagaaaatgtagcaatgagaaatggcatctacaggatagggaggaaagag

SEQ ID NO: 485652 - DNA, 201 bp, Homo sapiens
cagaattgagtagaagattttcctttttttctcgtacatcctcaggcatgtgaaacttggggttctgttaaaataaagaaggagaaatgttgaaagcacastcacgagtgtgggtatactggataaggaacttcacatatttgttttaaaatagtatcaaggagagcatatttcatataagctgccagaacaatttagcaa

SEQ ID NO: 485653 - DNA, 201 bp, Homo sapiens
tgcttactttatttgcttatattgataagaacctgtatatgttacagatactcgagtgggaattagagaaaataagaggaataaagagagatagagtaatyttgaaaactatgattgctcctctgtccttcccatttattaaattttatcataataggcacttttttattttaaaattttatttggtttttacttatacca

SEQ ID NO: 485654 - DNA, 201 bp, Homo sapiens
ttgaggtcttttcattttcaggttctttgtttctagttcttggggtaaaaactaacttttgtgttatgtgtgctgatctcccttcaaataattcatatcaytatataagtttaaatctttgaattatccccagtgaaagatggcgataactctttgtgtacgttacatgtgtccttggctgtggaaatttttctagagtaa

SEQ ID NO: 485655 - DNA, 201 bp, Homo sapiens
cttttccttagcaacttcttggcaatatttacattgctgatgaaatgctttaagttagtaggggacataggatgtgccagaggtcgaagttgtaggcttgygtgtccacatgtgtgacctgtaactaagttgacactctgccttacacagagaccagttctccttggccagatgtgcagcctcacttggacccaaacctga

SEQ ID NO: 485656 - DNA, 201 bp, Homo sapiens
aatgtagacctttagtgcttgtgttcattttgtctctttgtggaaggctcaaaagaaaacagaatcaattcccttaagtttttctggaagaagaaggttgsttttgttgctttgatcttagcatgttgtgcattttttattggctgttgaatataaaaagccacagcctcatctggtttttctgctatattctcatattgt

SEQ ID NO: 485657 - DNA, 201 bp, Homo sapiens
ggcgactctgtgtggagggatacgtgctagcatatgtgtacatacttcctaatagcaggaaataatggcttgaaaaattcaaaagtcacagagagggttaygtaggggctcctatactccaatagactaggctgaccaaagggtagaggattccacacatggtttcaggccttcttttcctttatcactctgcatcatttc

SEQ ID NO: 485658 - DNA, 201 bp, Homo sapiens
tgtggagggatacgtgctagcatatgtgtacatacttcctaatagcaggaaataatggcttgaaaaattcaaaagtcacagagagggttatgtaggggctyctatactccaatagactaggctgaccaaagggtagaggattccacacatggtttcaggccttcttttcctttatcactctgcatcatttctatgaattct

SEQ ID NO: 485659 - DNA, 201 bp, Homo sapiens
acatggtttcaggccttcttttcctttatcactctgcatcatttctatgaattctttaaaaccctttttagtagaattctctgcttcttgtttctctgcartccatattacctgcctcagattgatggtgtctgtgagatttgggtccctcgcaaggtctcaatctaagtcctggatataatttcaagactttgcttcagc

SEQ ID NO: 485660 - DNA, 201 bp, Homo sapiens
tatggctatatacacctcatgcttcttttgtaaggagtgtggcttggcttataagctgctgaaaggcagagcagtctgccttgctatcacccctgagcatraccagcatgctcaccaccgcctctttcctacctcactctacccgtttctctcctctcctgttaccttggcctagaacacgtggcttttacctgcctaagg

SEQ ID NO: 485661 - DNA, 201 bp, Homo sapiens
tttgatgtctccatgcttttgcttgtactgcctgaaatgctgcccttccctttctctacttgcagaaattccattcattctttaaagaatcagttcaagcrtgataactgttactgaatattctcccaactcttcctgttagatttaacagtgtattctgtgcattcccaaagcactttgttttttgggataacacattgc

SEQ ID NO: 485662 - DNA, 201 bp, Homo sapiens
gtctcagtgtgactcatttataatattgctttgctaaccctaattgagataaaaatcttattggtacttgtcttttaagttattttttagcaaatttcacrtgtgccaaaaaataccagtttacacttgcatcaatgatatgctattctgtttttagaatgatttaaagcatatatccaagggcatttttaattgtcttgt

SEQ ID NO: 485663 - DNA, 201 bp, Homo sapiens
tagtaaaggttctagaaatttgtattcaactgcttcagtgtatactgaacatggatgaagttcagtatgagaaattcagctttaaagatttgacagttccmaaattaatattgttataatgtccatactacccaaaatgatctattgatttaatgaaatccctatcaaaatttcaatgacatttttcctagaaataaaaaa

SEQ ID NO: 485664 - DNA, 201 bp, Homo sapiens
catcgttttttgtggtgaagcatgttttacctcttgaaacttggcataaacatcataataagtgaataggtctagagctttgatgaaaatttaattttttwaaaaattagcatttcactgatccttatcctgagggttggagagcttcacacagcactgagccaggtagagctcacactcaagtgagagaacacaaataca

SEQ ID NO: 485665 - DNA, 201 bp, Homo sapiens
tataacacctaatacaatataaatgctatgttcatagttgtgatatggtattgtttaggaaatgacaagaaaaaagagtctgcagttattgagtacagacrcaaccatgttttttcccccaaatattttaaatccacgtatgatggtatccatggatgcagaaaccgacatacatgaagggctgattgtaatttgaatctc

SEQ ID NO: 485666 - DNA, 201 bp, Homo sapiens
tggttgagattgaaaactttctttttataaaatagaattcagcttaaatatctttttggaaggagattacaagccatggattaattatttgattaacatgrgtaaacaagtaaagagtatatgagtagatggcttgtttcatgatttaaagattgtaaaattagttaattaaaaggaaacacaagcttaaaagacggcgag

SEQ ID NO: 485667 - DNA, 201 bp, Homo sapiens
catgctccagccatgtcaactttctttcttcttcctcaacccaccaagcttgccctgcctcagggcctttgcactcttctctcagatctgctcaaggctgkttccttcatatcactcaggatttagctcaaatgcctcctcctcagagaagtcttcctctcccattctggctaatgtgatgcctgtctacaactcctcaga

SEQ ID NO: 485668 - DNA, 201 bp, Homo sapiens
ctttttaatggctgaacagtattccaatgtatgtgtgtatatatatatatatatatataaatatatgtatatatgtgtgtgtatatatatgtgtatatatrtgtgtgtgtgtgtgtatatatatatatatatatatatatatatataacattttctttatcttattcattgatggacacttgggttgattctacatttttg

SEQ ID NO: 485669 - DNA, 201 bp, Homo sapiens
acctgatttttgagggaggggcactgcagagcataaattacatctcagaatttattcaccttggggcaaaggagttggccttttgtattcccacatacttstgttattggccagtcagcaggaggtgtcccccaccacagggaggaaccaggagaacaaggaggacccagtgagcccgagcaatcttctcatgggtgggag

SEQ ID NO: 485670 - DNA, 201 bp, Homo sapiens
acctttcatacatgtagaaagccaaggctgccatgctagttaaaatactatgggagaaatcattgctgcagtgatgagttttgaaaataatctaaaaggtmtagggctatacagatagcaatttaattttctttccctatccattagtagaattgttcctatgtgcattgctaagctatttaccaacaccatattataagc

SEQ ID NO: 485671 - DNA, 201 bp, Homo sapiens
gaaataagacatgctttgatgattctcaaagacatctgctcttttcctgtggtttttttttttctcccaatgtaaaattttgttcaaagtggaaaatagatttttttttgcaataaaacagaaattcataacaaattgttctattttatttaattagaaatctctttgtctcaaaatttttctttttactcttcccaacta

SEQ ID NO: 485672 - DNA, 201 bp, Homo sapiens
ctctcgtgtgctagaactttcctagccacctgaacccacttagatgaaaaataagacacctctctgttctcacaaacactcgtctgtttttgttagcgaaracagaagtgtctatcatgtgagttttgtgatgcagagggataaacacatgttcagaaaaacatctgacttccagtgttgcttctaacacttaccagcctc

SEQ ID NO: 485673 - DNA, 201 bp, Homo sapiens
ttgcttctaacacttaccagcctcgtaaccagagggaagaaacttcatctaagtcttagtttcttcaactgtaaaatgagaaaaaataatatcggtccttyctacctcacagggctgtggagaaaataaaatgaaagtaaacattatgaaaatgcctcataaatttcaaagtgttatgcaaattcaaggcactaatgcact

SEQ ID NO: 485674 - DNA, 201 bp, Homo sapiens
aagaacttggatctactttcatcactttcaagctatatcccagagttcatcaagactacattaagacaggatggatactctttcctccaggaagccacctstgtttccctacccactctacctgttaagcttaggtgtgtctcctctgtgcttctatataacccttcactatagagttaggatgttttgttatggttatat

SEQ ID NO: 485675 - DNA, 201 bp, Homo sapiens
ccatgccgtcattgccctagttgaagttcttatcagctctctcgatcagctgcaatatttcttctaaccagtcttctgtattccagtctcccatcctcccyttcccacttcccagtaaatcctccacacagcagtcagaatgacctttagaaaagcaaatctattatgttattttccctccttaacatcattcaatggctt

SEQ ID NO: 485676 - DNA, 201 bp, Homo sapiens
gaatatttactgataagaaaaaaatgatagcttaggaagaggaagatgttcaggaaaagcatttaagcagggtttgaaagacttgtgattttcttaactcrgggtaaaagtcgaccaattaaagtaggtttcccatccaaatgtttcccatccaaaatgatccctttttttttccccaagggatctaatttaggatccctt

SEQ ID NO: 485677 - DNA, 201 bp, Homo sapiens
tgccgtcattgccctagttgaagttcttatcagctctctcgatcagctgcaatatttcttctaaccagtcttctgtattccagtctcccatcctccccttyccacttcccagtaaatcctccacacagcagtcagaatgacctttagaaaagcaaatctattatgttattttccctccttaacatcattcaatggcttaca

SEQ ID NO: 485678 - DNA, 201 bp, Homo sapiens
attgccctagttgaagttcttatcagctctctcgatcagctgcaatatttcttctaaccagtcttctgtattccagtctcccatcctccccttcccacttyccagtaaatcctccacacagcagtcagaatgacctttagaaaagcaaatctattatgttattttccctccttaacatcattcaatggcttacagctgcct

SEQ ID NO: 485679 - DNA, 201 bp, Homo sapiens
caaattctaggctgccaactggtcttatctgaaagtatcattcattctttcctaggttctgattcagtgttgagaaaatacattctgactccaagtagtctgacattcttacaaaattaactttatccacttgtaggtggaattcatgtgaacacagtttattggatcataataacacataatattagactgtaccagaaa

SEQ ID NO: 485680 - DNA, 201 bp, Homo sapiens
tctaggagctcaaaacattttaacacctgtgtgatccccatacccccttgatccaggttgtgataaagatgtgaagtgcacagagctgaaacccgagtagmcattggaggctgtcctgccatggtaacataatttactgtgtcattaccattgttatcgcatcctccgcttcaaagcacatggtatccaggtgataaatta

SEQ ID NO: 485681 - DNA, 201 bp, Homo sapiens
atttttattggatattgctaatctagaagaaagcaatgttggaaagatgttcaaagaaaggcatggggatcatcccaccctttaaatggtccaaatggaarccaagatactggatcacgtctaagaaaatttaaatatgctagctacactcaataatgtagtaattcatggtcatctgtaactcctcagtgtgaattaatt

SEQ ID NO: 485682 - DNA, 201 bp, Homo sapiens
ggctttcagaataatgaacacacattctgtcctagttgtgctttattttatcacagattctagtttaaaaacaaaacattaaaatatggtttgcatcttayttctgcttaaacctggatgcagcactccacttgcgatgaataaaaatggaccataacctcataaaaattgaatttgtaagataaaactttttccttatat

SEQ ID NO: 485683 - DNA, 201 bp, Homo sapiens
ttcagtgtatactgaacatggatgaagttcagtatgagaaattcagctttaaagatttgacagttccaaaattaatattgttataatgtccatactacccmaaatgatctattgatttaatgaaatccctatcaaaatttcaatgacatttttcctagaaataaaaaaaaattctaaaattttcacggaactacagaaaac

SEQ ID NO: 485684 - DNA, 201 bp, Homo sapiens
tttgaagcagggctcacctagattccttctttcctaagagggtttgttcaatatacctataaatatgttctattattcagcattttagcatctaaaattaytccttttcatgaaaaaagaataaagcctgttattaggagtgcagttaaagcacaatttctatagattactacatattttgttttattagagttttacaat

SEQ ID NO: 485685 - DNA, 201 bp, Homo sapiens
gcatgaggccccttgcaatgctggagggactgtgatgaaggcagaaagaaaaggggacctacacttgttctcgatgagagcaaagatcacctggtggccaycaagcaggtcatctagaggcaaaactccttatctgaggaattcagaagtaattagacttctagaatttctatacatttctggaatgcaagcatgtcgaaa

SEQ ID NO: 485686 - DNA, 201 bp, Homo sapiens
cctctaagtggtaaatattagactttttttctcaattcaaaaactttgttgtttcttttggagaaatcactaaaatatctgtattatcctcataaatacaktgttgagaaattagctgccaggacaaaatgaactgtgcattattcatataaaagtgacattattgctagaggacatacaaataatgagcaggcattaata

SEQ ID NO: 485687 - DNA, 201 bp, Homo sapiens
ttaaatactttacatgcatttcccataccccccttactaggtaggtattctatcctcagttttcagatgagaaaactggcactgagagaagttaaagcaayttcagaggtcccaacatttgaaagttgaggatacggaattcaaacccagttcttactcatgacaagccccaggctcctaaccatcctacatagaatcctg

SEQ ID NO: 485688 - DNA, 201 bp, Homo sapiens
ataatcatatgcattaatttatttaaattcctataataaaacaccactgaagtggctttcattttctcttggtgaatgcaggaattattttaacagagcasagagtgctcattggtgtaaacagacaagcttcaaacagttcatagaatcaggcacaccaatgccctgagtgcagggccgtgagcggaaggtaagggatgc

SEQ ID NO: 485689 - DNA, 201 bp, Homo sapiens
ccaatataaaacaggataaaattaacaaagtctggtattcaatcaaagattacaaggtatgtaaaaaagcaggaaagtaagatcaataatcagaaaaatawataaatcaatttaacttaaacagaaattactcagagatgagaattagcaggcaaggatattttaaagagttataactatattctgtatggccaaaaagtt

SEQ ID NO: 485690 - DNA, 201 bp, Homo sapiens
aattaacaaagtctggtattcaatcaaagattacaaggtatgtaaaaaagcaggaaagtaagatcaataatcagaaaaataaataaatcaatttaacttamacagaaattactcagagatgagaattagcaggcaaggatattttaaagagttataactatattctgtatggccaaaaagttaagtaaagacatggaaaat

SEQ ID NO: 485691 - DNA, 201 bp, Homo sapiens
aaccccatctctactaaaaaaaaaaaaaaaaaaaatgcaaaaaattagctgggcgtggtggtgggcgcctgtagtctcagttactcgggaggctgatgcasgagaatggcatgaacccgggaggcggagcttgcagtgagccaagatcgcgccactacactgcaacccgggtgacagagcgagactccgtctcaaaaaaaa

SEQ ID NO: 485692 - DNA, 201 bp, Homo sapiens
ggaggctgatgcaggagaatggcatgaacccgggaggcggagcttgcagtgagccaagatcgcgccactacactgcaacccgggtgacagagcgagactcygtctcaaaaaaaaaaaaaaaaaaaagattactgcagccttgaggaaaaccccaaggtaaaactttctagctaagctggctggattcccgacccacagaaa

SEQ ID NO: 485693 - DNA, 201 bp, Homo sapiens
tgatgcaggagaatggcatgaacccgggaggcggagcttgcagtgagccaagatcgcgccactacactgcaacccgggtgacagagcgagactccgtctcaaaaaaaaaaaaaaaaaaaagattactgcagccttgaggaaaaccccaaggtaaaactttctagctaagctggctggattcccgacccacagaaaccgtgg

SEQ ID NO: 485694 - DNA, 201 bp, Homo sapiens
actagaaacaatccaaatgtcaaaaacaagataatggataagtaatttgtaatgtagtcatacagtagaatatcacacatcaataaaaaaggagtgaatgwctgatatatgcaacaatctcaaaattattacggcatgtgaaaggggcctttacaaagtacatgctgtgtgattccatttatattaagtccaagaataggc

SEQ ID NO: 485695 - DNA, 201 bp, Homo sapiens
gaggctgaggtgggaggatcacttgaggtcaagagttcgagagcagcctggccaacatggcgaaaccctgtctctgctagagatacaaaaattagctgggygtggtggtgtgtgcttgtaatcccagctacttgggaggctgaggcaggagaatcacttgaacctgggaggcggaagctgcagtgagctgaaattgcacca

SEQ ID NO: 485696 - DNA, 201 bp, Homo sapiens
ttataaatttatcaacttagtttatcaagtatgatgacaacattaatgcatccagtttccttagattaagcctcaatttattgtgaagttcaaaaacatawagaattacaaaaaccaaaaccaaaaagccttgtccagaatcaagattaaaatttcagagatgaatgtcattgccacactatgccagcaaggggagtagtt

SEQ ID NO: 485697 - DNA, 201 bp, Homo sapiens
gaggcaggagaatcacttgaacctgggaggcggaagctgcagtgagctgaaattgcaccagcctgggtgacacagtgagactctgtctcaaaacaaaacamaacaacaacaacaaaaaaaaaaaaaaaagaaagaaagaaaaaaagaaatccagatagactattatgtcttactgttctttttcattcataccaaatggga

SEQ ID NO: 485698 - DNA, 201 bp, Homo sapiens
atcaacttagtttatcaagtatgatgacaacattaatgcatccagtttccttagattaagcctcaatttattgtgaagttcaaaaacataaagaattacamaaaccaaaaccaaaaagccttgtccagaatcaagattaaaatttcagagatgaatgtcattgccacactatgccagcaaggggagtagttacactttgag

SEQ ID NO: 485699 - DNA, 201 bp, Homo sapiens
aacataagatgaagccctagcctagcagtccacagcctacagaaacagtcttaaagcctttttcattgtacagcactttctctccatcatttatttgtttkgtatctatctatctatctatctatctatctatctatctctctatctatctattattctatctatccaaccatcctttatcatataccaccatggtagaat

SEQ ID NO: 485700 - DNA, 201 bp, Homo sapiens
agaactgtttatactataaaccatatttcatcctcattgtccaccaatatttactaaaagggattatggactttcttctttgaaaatactgggaagcttgygatgcacattacatactgtctttttactctaaattatggagctagtaaaagataaatggaggatgatattttatggaaatttgagtgaaaattcacagat

SEQ ID NO: 485701 - DNA, 201 bp, Homo sapiens
cataagatgaagccctagcctagcagtccacagcctacagaaacagtcttaaagcctttttcattgtacagcactttctctccatcatttatttgttttgyatctatctatctatctatctatctatctatctatctctctatctatctattattctatctatccaaccatcctttatcatataccaccatggtagaatat

SEQ ID NO: 485702 - DNA, 201 bp, Homo sapiens
ataagatgaagccctagcctagcagtccacagcctacagaaacagtcttaaagcctttttcattgtacagcactttctctccatcatttatttgttttgtatctatctatctatctatctatctatctatctatctctctatctatctattattctatctatccaaccatcctttatcatataccaccatggtagaatatt

SEQ ID NO: 485703 - DNA, 201 bp, Homo sapiens
ggaatttattcatttcttgtaggttttctagtttgagctcatagtggtgttcataacactcgctgggttttttttttttttatttctgtggggttgctggkaatgccccctttgttgcttctgattgtgtttgtttcagtcttctctctttattctttatcagtctagttagtgatctaccaatcttatctattctttcaa

SEQ ID NO: 485704 - DNA, 201 bp, Homo sapiens
ctgacctacttatcatctctgtctccttaggcaagttactcagctatagtctgctttactttcctttatgatagatggaaagggagagggctacataataktacctatgttagactggctatggagattaaattaatgcatgtaaactacttgaagagtgcctgacacccagtaagtattgaataaatgttagctaggatc

SEQ ID NO: 485705 - DNA, 201 bp, Homo sapiens
tgtcaaagaaatgatattttgttttcacaaggctaaatttgttccagggactattttttcttcttaaaaacattgtttccatgattaactaaggattacamaaaagttgtggggaggaaacctaatttcttccaaagtctttgaacctgtcagtttaactcagcaggaataaagaaataagctgatttgaaatgtgataac

SEQ ID NO: 485706 - DNA, 201 bp, Homo sapiens
cttatccttgaccggtcttgtagctgtctggaatttcttgtcaaagaaatgatattttgttttcacaaggctaaatttgttccagggactattttttcttyttaaaaacattgtttccatgattaactaaggattacaaaaaagttgtggggaggaaacctaatttcttccaaagtctttgaacctgtcagtttaactcag

SEQ ID NO: 485707 - DNA, 201 bp, Homo sapiens
attctgttgatttggggtggagagttctatagatgtctattaggtccgcttggtgcagtcaggtccctcagctgcaggtctgttggagtttgctggagttytattccagaccctgtttgtctgggtatcaccagtgcaggctgcagaacagcaaatattgcagaacagctgcctgatccttcctctggaagcttcatccca

SEQ ID NO: 485708 - DNA, 201 bp, Homo sapiens
aaaaggtgtatgttcttagtttttatcttcatgttaagtcagaatcaaagtaaaaaaccatatagtggagcacgcaaattttacgttaaatatctgcaaargggttattttcacaatgagagaattaaagtatgtgatggaaactaattttttcctacttttatttgtgtcttttataagggaactatgtatacatagtgg

SEQ ID NO: 485709 - DNA, 201 bp, Homo sapiens
gcaattgctttcttagtttacccattcagattacttatcctattgaggaaatgaagatagaaaagattggtggctttattatatgttacactgatgctttsggttagagagcatgggttgcataaaatattttaaaatgcggatggataatttttagaccagttaggatggctacattagagaatccaagacaatgtctgc

SEQ ID NO: 485710 - DNA, 201 bp, Homo sapiens
cagaaacagtcttaaagcctttttcattgtacagcactttctctccatcatttatttgttttgtatctatctatctatctatctatctatctatctatctmtctatctatctattattctatctatccaaccatcctttatcatataccaccatggtagaatattttgatctcataaaatttacctttcccctaaaataga

SEQ ID NO: 485711 - DNA, 201 bp, Homo sapiens
cacatgacagccaaaagaaatggtggatttggaaaagaaaatgaattaaattggtttttgggtatcacatggacaaaaacaagcttttgggagtttttttsctatacttttcacttttcaatctatgggcttagtcttgtatatacaccatgaaatatgtttttctgcttgattgtttcctataaaagactgtaatgtaag

SEQ ID NO: 485712 - DNA, 201 bp, Homo sapiens
ccccaaaatttaactactgatagcctatcgtagactaaaagccttactgataatgtagtcgattaacatatattttaatgttatatatgttatatactgtrtttttgcaataaagtaagctagagaaaagaaaatatttttaagaaaatcataagaaagagaaaatatgttcactattcattaagtggaagtggatctcat

SEQ ID NO: 485713 - DNA, 201 bp, Homo sapiens
tacaatgaatggaaaaccttttaaagaattacagatctgaggctgaggcaggagaatggcgtgaacccgggaggcggagcttgcagtgagccgagatcccsccactgcactccagcctgggcgacagagcgagactctgtctcaaaaaaaaaaaaaaaaaaaaaaaaaaaaaaaaaaaaaaaagaattacagatctgttaa

SEQ ID NO: 485714 - DNA, 201 bp, Homo sapiens
aatgaatggaaaaccttttaaagaattacagatctgaggctgaggcaggagaatggcgtgaacccgggaggcggagcttgcagtgagccgagatcccgccmctgcactccagcctgggcgacagagcgagactctgtctcaaaaaaaaaaaaaaaaaaaaaaaaaaaaaaaaaaaaaaaagaattacagatctgttaaaac

SEQ ID NO: 485715 - DNA, 201 bp, Homo sapiens
tgctcaccactgtatatccagcgcctagcacaatatgggtcaataaacactaatcaaaggaaatagtgttagagctttcctaagctctaggttgtgttagmacattatcttaataaaggtgatgaggatgttttatatatctatacttacatcaatctctctttctatagttgtgtgtatgtatacatctatgatgacaga

SEQ ID NO: 485716 - DNA, 201 bp, Homo sapiens
gaaagacagtgaataatgctataaaatcacttgtgatataaagatcattatctaaagtcattatcatacatgggacattcaaacctcacactgagtttttytagtacttcaagcctgacaattttcaaaacactcaaatttctatttctactttatatttctcagaaaaaagagagtaaaccaaggagacactggaaaatt

SEQ ID NO: 485717 - DNA, 201 bp, Homo sapiens
tgggattcaataccttattttgggtggctggtacacaggtgtatctaattctcaaaacttactggattgagagaatacttaagatctgggcattttattgyaaattatacatcaattttaaaattaagagattctattattttgtttaaaattgtattactgaacactgtttggaatatttccctactttctaggcatgtg

SEQ ID NO: 485718 - DNA, 201 bp, Homo sapiens
tacatcccatgcttgttcacagtatagtggcaagaaaatggaagctttcaggcataaactctctcaaatttctttatatccatctttaaactcatcttagyttttccccactcatccttttctcctgtctcaggaagaagttgattctattgtgtgttcctaaaagttctctcctgtgcccttgaataatcttattcattt

SEQ ID NO: 485719 - DNA, 201 bp, Homo sapiens
caatcgctaagttatatttgaacttgaagtagcttttctgtacctgatcactgtagacacagggcatttcaggaatgcaaaaacatttacttaatttttttttttttgagacagtaatttttgaaaatgaggatttccttaaatctttatttgaattctttctaccatgaagaattgttcagaatttgtcttgtttggtta

SEQ ID NO: 485720 - DNA, 201 bp, Homo sapiens
ctgcttatccttgaccggtcttgtagctgtctggaatttcttgtcaaagaaatgatattttgttttcacaaggctaaatttgttccagggactattttttyttcttaaaaacattgtttccatgattaactaaggattacaaaaaagttgtggggaggaaacctaatttcttccaaagtctttgaacctgtcagtttaact

SEQ ID NO: 485721 - DNA, 201 bp, Homo sapiens
ttcctttgattctcagcattccatcccataacagatcaatgtgctaatatacaataatattttcatttattaataaaatctttgtgtaaaattgagtactygggctcgatgtctttgggtgaaattgagatagagatgccatgtacagctcctggcattattagtgacccactattggatgccttagtttgggaagcttgg

SEQ ID NO: 485722 - DNA, 201 bp, Homo sapiens
aatcgctaagttatatttgaacttgaagtagcttttctgtacctgatcactgtagacacagggcatttcaggaatgcaaaaacatttacttaatttttttttttttgagacagtaatttttgaaaatgaggatttccttaaatctttatttgaattctttctaccatgaagaattgttcagaatttgtcttgtttggttat

SEQ ID NO: 485723 - DNA, 201 bp, Homo sapiens
ctagcttgctgaaccgtgaccatctgcagtggctgtcaggggcctatgtgtggaaagttcgcctgaactttcttcctcttagattctgcttatccttgacyggtcttgtagctgtctggaatttcttgtcaaagaaatgatattttgttttcacaaggctaaatttgttccagggactattttttcttcttaaaaacattg

SEQ ID NO: 485724 - DNA, 201 bp, Homo sapiens
atcgctaagttatatttgaacttgaagtagcttttctgtacctgatcactgtagacacagggcatttcaggaatgcaaaaacatttacttaatttttttttttttgagacagtaatttttgaaaatgaggatttccttaaatctttatttgaattctttctaccatgaagaattgttcagaatttgtcttgtttggttata

SEQ ID NO: 485725 - DNA, 201 bp, Homo sapiens
agttatttaggaatggccttcgatgacctttctaataattcagatgctttctttttttccttcctaagtgatcatacatccttctctttaacctctgtgctttttttttttttttttcacattcatacaatcaggaaagcacatctgaaattcacagggacttagaagtgtcaagtcttggcattactggttttacctttc

SEQ ID NO: 485726 - DNA, 201 bp, Homo sapiens
gttatttaggaatggccttcgatgacctttctaataattcagatgctttctttttttccttcctaagtgatcatacatccttctctttaacctctgtgctttttttttttttttttcacattcatacaatcaggaaagcacatctgaaattcacagggacttagaagtgtcaagtcttggcattactggttttacctttcc

SEQ ID NO: 485727 - DNA, 201 bp, Homo sapiens
ttatttaggaatggccttcgatgacctttctaataattcagatgctttctttttttccttcctaagtgatcatacatccttctctttaacctctgtgctttttttttttttttttcacattcatacaatcaggaaagcacatctgaaattcacagggacttagaagtgtcaagtcttggcattactggttttacctttcct

SEQ ID NO: 485728 - DNA, 201 bp, Homo sapiens
aaactatggttttatttgccagttctttccatttttggatttaattcctattttttttctgcttgaagccaaacaagcttaaaatatgaggactgaggacrtaacataatgtgaatgtcaaggagaagtttctattggaaacagtgctctggtttgacaagaccatcagaagctgaaaactgacataaccttaatgtatat

SEQ ID NO: 485729 - DNA, 201 bp, Homo sapiens
tatttaggaatggccttcgatgacctttctaataattcagatgctttctttttttccttcctaagtgatcatacatccttctctttaacctctgtgctttttttttttttttttcacattcatacaatcaggaaagcacatctgaaattcacagggacttagaagtgtcaagtcttggcattactggttttacctttcctg

SEQ ID NO: 485730 - DNA, 201 bp, Homo sapiens
atttaggaatggccttcgatgacctttctaataattcagatgctttctttttttccttcctaagtgatcatacatccttctctttaacctctgtgctttttttttttttttttcacattcatacaatcaggaaagcacatctgaaattcacagggacttagaagtgtcaagtcttggcattactggttttacctttcctgg

SEQ ID NO: 485731 - DNA, 201 bp, Homo sapiens
gggtgaaattgagatagagatgccatgtacagctcctggcattattagtgacccactattggatgccttagtttgggaagcttggaagagtaaatgaacasaaagctaggataaaaaagagggctctgaggcaagcaaccccacggatatttaaattatccagaacgaatgaaagtttattctgtagtaaacagctataag

SEQ ID NO: 485732 - DNA, 201 bp, Homo sapiens
gttcacgccgttctcctgcctcagcctcctgagtagctgggactacaggcgcccaccaccaggcccggctactttttttgtatttttagtacagaggtggkttcaccatgttagccaggatggtctcaatctcctgacctcgtgatccgcccgtctcagcctcccaaagtgctgggattacaggcgcgagccactgtgcct

SEQ ID NO: 485733 - DNA, 201 bp, Homo sapiens
ctaatagaactggtttttctaactctaaaattgaggaaatcttgaaagggcatcgcgtctctccagcaaacagtaacaacacagaagaacccatgatgcamtggtcccatggggaaccaaggaaccaagggtgggataaagcttaaggaaatttgtgaccaaaaatagcaactgtacttcaaatgaagtacagttgtctct

SEQ ID NO: 485734 - DNA, 201 bp, Homo sapiens
gcatcgcgtctctccagcaaacagtaacaacacagaagaacccatgatgcaatggtcccatggggaaccaaggaaccaagggtgggataaagcttaaggaratttgtgaccaaaaatagcaactgtacttcaaatgaagtacagttgtctcttggtatctgtggcagattggttctggggcaccctgcaaacaccaaaatc

SEQ ID NO: 485735 - DNA, 201 bp, Homo sapiens
aagcttaaggaaatttgtgaccaaaaatagcaactgtacttcaaatgaagtacagttgtctcttggtatctgtggcagattggttctggggcaccctgcamacaccaaaatctgtgaatactcaagtccttgatatatatcatgtgcatatcacctatgcacattctcccatatactttaaatcatctctggagtatttat

SEQ ID NO: 485736 - DNA, 201 bp, Homo sapiens
cttctctttttctcattttcaagattgctttgctcaccagcatgacacacatcaagctttttcttttgatctgaaataaagtctctttttgttttttatgmtatgggccttttctgggtaatctcattcattttgttggctctaatgacaactatattagcactggtgactcctaaatttctgaactgtatttcttacctg

SEQ ID NO: 485737 - DNA, 201 bp, Homo sapiens
cattttcaagattgctttgctcaccagcatgacacacatcaagctttttcttttgatctgaaataaagtctctttttgttttttatgctatgggccttttstgggtaatctcattcattttgttggctctaatgacaactatattagcactggtgactcctaaatttctgaactgtatttcttacctgagctcaaataaga

SEQ ID NO: 485738 - DNA, 201 bp, Homo sapiens
tttaggaatggccttcgatgacctttctaataattcagatgctttctttttttccttcctaagtgatcatacatccttctctttaacctctgtgctttttttttttttttttcacattcatacaatcaggaaagcacatctgaaattcacagggacttagaagtgtcaagtcttggcattactggttttacctttcctggg

SEQ ID NO: 485739 - DNA, 201 bp, Homo sapiens
cacgagcaccaaaacagagcctatctaaatatgaagtcctcctcttcccttccaaacatgctccggctcctgtgccgcctctcagggaatgtggcactcastcactcaaatcaggggccttggaattcctcttgcattcctccattacttacatgtcatcgataaccaagtcctgttcattccttcttcaaacatttctca

SEQ ID NO: 485740 - DNA, 201 bp, Homo sapiens
tggcttggtgccattcttgcaggagtaactgaattctcacttagttcccatgagaactggttgttgaaaaaaacctggcatctcttcctccctctcttgcttcctcctctcacatgccagctctgcttccccctccgccatgagtggaatcttcctgaagccctcaccagaagcagatgctggtgccatactccttataca

SEQ ID NO: 485741 - DNA, 201 bp, Homo sapiens
tactaatttacattatcaccaacagtgtattaggattcccttttctccacatccttgccaacacttgttttcttttctctttttgatgatagccattctgrtaagtgtgagctaatatgtcattgtggttttgatttgcatttccctgatgattagcggtgttgaatatattttcatatacctattggccatttgtatgca

SEQ ID NO: 485742 - DNA, 201 bp, Homo sapiens
gcttggtgccattcttgcaggagtaactgaattctcacttagttcccatgagaactggttgttgaaaaaaacctggcatctcttcctccctctcttgcttcctcctctcacatgccagctctgcttccccctccgccatgagtggaatcttcctgaagccctcaccagaagcagatgctggtgccatactccttatacagc

SEQ ID NO: 485743 - DNA, 201 bp, Homo sapiens
tctaagctgcagtgagctgtgattctgccactggattccagcctgagcaactgagtgcagagagagaccctgtctcaaaagcaaaacaaaagaaaaaagasaaacaatgcaagctgattggagacacctgtttgcttatttttgccactaatcattatacgttatttaaaagcaagagatgattaaatccatctttcaggt

SEQ ID NO: 485744 - DNA, 201 bp, Homo sapiens
atatatcattggtttacataattatcattgaataattatatgaactagcaaaactggcacagcacatctgggtacaaacaccactgacgcttggtccacayacatctccacaggagggatcaggagtttacaggcgggctagagggcatccggtactgaggtggctgtgaacatcagtcgataggatataatgagagaacg

SEQ ID NO: 485745 - DNA, 201 bp, Homo sapiens
tggtgccattcttgcaggagtaactgaattctcacttagttcccatgagaactggttgttgaaaaaaacctggcatctcttcctccctctcttgcttcctmctctcacatgccagctctgcttccccctccgccatgagtggaatcttcctgaagccctcaccagaagcagatgctggtgccatactccttatacagcctg

SEQ ID NO: 485746 - DNA, 201 bp, Homo sapiens
ccattcttgcaggagtaactgaattctcacttagttcccatgagaactggttgttgaaaaaaacctggcatctcttcctccctctcttgcttcctcctctcacatgccagctctgcttccccctccgccatgagtggaatcttcctgaagccctcaccagaagcagatgctggtgccatactccttatacagcctgcagag

SEQ ID NO: 485747 - DNA, 201 bp, Homo sapiens
ccctctcttgcttcctcctctcacatgccagctctgcttccccctccgccatgagtggaatcttcctgaagccctcaccagaagcagatgctggtgccatrctccttatacagcctgcagagctgtgagccaaatagacctcttttctttttgaattgcccagactcagttacttctttataataatacaaaaattgacca

SEQ ID NO: 485748 - DNA, 201 bp, Homo sapiens
gctctgtcttgtgtttttttactcttcagtcttcctccatgggatgatataacaaaagggcccttggcagatgcaagccccttgatcttggacttcccagmctccagaactgcaagaaaaaaaatctctcttctttataaattacccagtctcagatgttctattatagcagcacaaaatggactaatacacccaccattg

SEQ ID NO: 485749 - DNA, 201 bp, Homo sapiens
tatgtatctggaagtcattaatggggaaaagtgctctcaagagtggtctaaagattttagaattattttcacagaaatagtgtttgaagtcattggaacgaattagacactatgggagaaagaagaaaaaaatgtctccgggaatgggaaaataagagcctatgaaggaccctgaaaaacacatgggttagagttgaaatt

SEQ ID NO: 485750 - DNA, 201 bp, Homo sapiens
atgtatctggaagtcattaatggggaaaagtgctctcaagagtggtctaaagattttagaattattttcacagaaatagtgtttgaagtcattggaacgaattagacactatgggagaaagaagaaaaaaatgtctccgggaatgggaaaataagagcctatgaaggaccctgaaaaacacatgggttagagttgaaattc

SEQ ID NO: 485751 - DNA, 201 bp, Homo sapiens
tgtatctggaagtcattaatggggaaaagtgctctcaagagtggtctaaagattttagaattattttcacagaaatagtgtttgaagtcattggaacgaattagacactatgggagaaagaagaaaaaaatgtctccgggaatgggaaaataagagcctatgaaggaccctgaaaaacacatgggttagagttgaaattca

SEQ ID NO: 485752 - DNA, 201 bp, Homo sapiens
ttatgatgggcttcttgggacataaccccatcataagtcaaagaacatcatattcacaaacagatctgtgcaaaaatgtccatagcagtcctattcataayagcctcaaactagaaacaatccaaatgtcaaaaacaagataatggataagtaatttgtaatgtagtcatacagtagaatatcacacatcaataaaaaagg

SEQ ID NO: 485753 - DNA, 201 bp, Homo sapiens
cctgtttgcttatttttgccactaatcattatacgttatttaaaagcaagagatgattaaatccatctttcaggtcatttagttaagtttttttttttttaaatttttacaagctctcaaggtctttgactactgccaattctcaagccattcagataagaaagcattgctgccaagtatgtatattaaatgcttcttcag

SEQ ID NO: 485754 - DNA, 201 bp, Homo sapiens
tactacaacatggatgaaatttgatgttatgaaattagctagtcacaaaaccacaaatattgtatgattctacttatataaattacccagagtagtcaaatttattgagacagacagtgaaatcgtgcttgccagggacagagggatggaagaatggggagttactgtttaaggaatacagagtttcagttgtgcaagatg

SEQ ID NO: 485755 - DNA, 201 bp, Homo sapiens
actacaacatggatgaaatttgatgttatgaaattagctagtcacaaaaccacaaatattgtatgattctacttatataaattacccagagtagtcaaatttattgagacagacagtgaaatcgtgcttgccagggacagagggatggaagaatggggagttactgtttaaggaatacagagtttcagttgtgcaagatga

SEQ ID NO: 485756 - DNA, 201 bp, Homo sapiens
ggggtgagtggacttgaggtgtttcatgtttccttagagtttcatggcttctctgttgtcctacgaatgctcttatctggggattttcagttaaataatcrgacaatgtatatgattgatttctatactgcatggctcaagtgacatacattcactttagaaggttttaagttgcacagtatacaagtatatcatttacag

SEQ ID NO: 485757 - DNA, 201 bp, Homo sapiens
tgattaggagccccctaacattcccctagaatatgggctctatccattagttatccttaacctcaccctctcatagaaatcaggcaattgacaagctacaratcagatagggcaaattagtaaaaattccactagtaaagggatttttctcatagccctagtgacctgtgttccctatcaaagatgctgttgccttaaaga

SEQ ID NO: 485758 - DNA, 201 bp, Homo sapiens
atctcattttcttttgaatgtaatgattggatgaaaagggcataactgatgtgaaagtgagaaagctaaatgtatgaatttattttaattaaattaatatygatcagttcaaaaaccataaactattaattttagtgtgaatttttgaataataaattttaaaaaatttaaaggtggaaataaaatcaggaaataaagctg

SEQ ID NO: 485759 - DNA, 201 bp, Homo sapiens
atgaattagtcctgttacaggaatctacttagatttcttagttatatatatgtatgtgtgtatatataggtgtgtgtgtatatatatatgtgtatatatakgtgtatatatgtatatatgtgtgtatatatatgtatatatgtgtgtatatatatttatacatgcacacacatacacacaaaacatcaaattagaaaaata

SEQ ID NO: 485760 - DNA, 201 bp, Homo sapiens
tacttagatttcttagttatatatatgtatgtgtgtatatataggtgtgtgtgtatatatatatgtgtatatatatgtgtatatatgtatatatgtgtgtrtatatatgtatatatgtgtgtatatatatttatacatgcacacacatacacacaaaacatcaaattagaaaaataaaaattacatggtaggacagtacta

SEQ ID NO: 485761 - DNA, 201 bp, Homo sapiens
gaaacttaatccccagtgcaacagtgtggagaagtggagcctttaaggggtgattaggtcataagggcagaaaatgaattaatgccaatatcgagggagtrggtgagttattgtgggagtggattcctgataaaaggatgagtttgactccgttcctcttgctctgtcttgtgtttttttactcttcagtcttcctccatg

SEQ ID NO: 485762 - DNA, 201 bp, Homo sapiens
gaggtaaacttgcccaagattacccagtaaacattagattctggattagaatccagggctttcacaaatcacactgtttaccacatatgctccctcatatwtttgtgatactggtctaatttatgtacaaaactgagagacacaaattgatttaaactatccttttgatttatacagtctccagtttcctatctcaaacac

SEQ ID NO: 485763 - DNA, 201 bp, Homo sapiens
aataacttataagatttaacatctatagtatatagtcaccaaataggaaaaatataatgctttaaagaaaatgtttttccactatgtttttcttttttttatgtgtaaaagctaggaaatagagactgtagatcactgataaagaaaaatgaaacactcctaaattggtgcagccattgcctctttgactagcgtatattg

SEQ ID NO: 485764 - DNA, 201 bp, Homo sapiens
tcccttgagctagtaaaattccaataaattaaaatatataattatagcgccaggtgcagtgattcacgcctatactcccagcactttgggaggctgaggcrggtggatcacaaggccaggagtttaagaccagcctggccaacatggtaaaaccctgtctctactgaaaatactaaaccctgtctctactaaaaattagct

SEQ ID NO: 485765 - DNA, 201 bp, Homo sapiens
atgagttcagctttggtcatgttgagttggaagctccagtgagacatctagatgaagcagtcccacaagaaactgggaatctgaatcaaagttcgtgatakaaacataggctagaaaaagatttcggaaccatcagcctaatggtggagctaaagcaaggagagtggaagagagtccccaagcagagagggtagagcgagc

SEQ ID NO: 485766 - DNA, 201 bp, Homo sapiens
agaaagcaggtttgggggttaggtgatgagttcagctttggtcatgttgagttggaagctccagtgagacatctagatgaagcagtcccacaagaaactgkgaatctgaatcaaagttcgtgatagaaacataggctagaaaaagatttcggaaccatcagcctaatggtggagctaaagcaaggagagtggaagagagtc

SEQ ID NO: 485767 - DNA, 201 bp, Homo sapiens
actagtccaaagccacctgagtcctgggagcagcattgccatgtgcgagagtagtaggggcactggcaggaatgcactccattcgtctcactggattaagyatctactggtcccagatcagattggcctgtgtcagcacctttgagtgaaacacacgcccctctgacttatgtcacttgcatatttgacaactcagctata

SEQ ID NO: 485768 - DNA, 201 bp, Homo sapiens
ttgaataaatgttagctaggatcatgcatacgattactgtataatgatcatgattgagattgagaaggtatgagcctaaatgtaggactaaattgaattakccttggcctaaggttctcaggtagttgagctataattaaacgcctttggccaatcctttttcaagtatcagagcatcttgggagggttagccctgggcaa

SEQ ID NO: 485769 - DNA, 201 bp, Homo sapiens
ggttctcaggtagttgagctataattaaacgcctttggccaatcctttttcaagtatcagagcatcttgggagggttagccctgggcaaaacatctgcttyaccacgccccatgaaggcctagaggctgggatgccctgagaggccacatgagaatgcacaggagggagacgtttactgtagtcctagcctaatcccaagt

SEQ ID NO: 485770 - DNA, 201 bp, Homo sapiens
tgttagtatagaatatttaaacttaaaaagaaaataccttaatttacttatgcataagcctattaaacacatttctaggggctctttttatgtttattctmtagaacataacctatctttgaagtggtatattagtttttaaaaagtcattcctaagctgaataattaaactgaaaacaaaagctattcttagggtgtatt

SEQ ID NO: 485771 - DNA, 201 bp, Homo sapiens
tccagcctgggtgacagagctagactccatctcagaaaaaaaaaaaaaaaatcaattgatgacaccaatcagtactatcacataacctatcatcttcccakacttggtcttttcagtaacaaaagtagtttaaataattcattttagtcaaatatcttctagtcattttctttactcagctggtatcccacttaactcaaa

SEQ ID NO: 485772 - DNA, 201 bp, Homo sapiens
agtttaggctcttacatttaggtctttgattaattttgaggtttttatctatgtgaggtaagggtcaaatttattgttttgcatatgaatatccatttacsccagtattatttgttaaaaatactattctttctccattaaactgtcttgccaaccctgttgaaaatcaattgaccataaatatgagggttgatttctgag

SEQ ID NO: 485773 - DNA, 201 bp, Homo sapiens
gatttttcaagagatagtttctcctttccaatctacatactggactttactttttaactatacgtttcatatgaaattttgatgattcttccctaaaatgrctgaaaaatagaaataataatgaagcaatatataagaagatgtatgttatatttaaattacttggatatttatgatagaaaaaaatatatctaccctatg

SEQ ID NO: 485774 - DNA, 201 bp, Homo sapiens
caagtagtcccacagtcttgccagaatggccactattcctctaacttttccttttccatcacccaccgtatgcaaatcaaaatctctgcctaaataattayatggttttcaaaaataatgaaatcattaattatttctatttaaccattaataaaattgattaacagttacattttgtaggcatttatgttggcacgtatt

SEQ ID NO: 485775 - DNA, 201 bp, Homo sapiens
ataaagaaaaatgaaacactcctaaattggtgcagccattgcctctttgactagcgtatattgcagctcttatgagagggttttgggggttgctttttttktttgttttttttgttttttgttttttttttggctgatacatttcattagttgcaaggagctccagtggtgggttgatatttgtcacgctcagtttacaaa

SEQ ID NO: 485776 - DNA, 201 bp, Homo sapiens
ctaaattggtgcagccattgcctctttgactagcgtatattgcagctcttatgagagggttttgggggttgctttttttttttgttttttttgttttttgttttttttttggctgatacatttcattagttgcaaggagctccagtggtgggttgatatttgtcacgctcagtttacaaacttttccaaccagatagcaaa

SEQ ID NO: 485777 - DNA, 201 bp, Homo sapiens
ggaacactttggtgcctgaccagtaagcaaatcctggtataggtgtgggccagtgtggcaagtgagagccaaaggagttcagaatgaaattccacagtccrtgagcctatacttccctaccaactcctattgacagcagctaggttttcattagtgtatacccgaatgagtccagaacagaccattctatccacagcttac

SEQ ID NO: 485778 - DNA, 201 bp, Homo sapiens
tttcaaacactagatcttgtgagaactctatcacaacaacagcaagggggaagtctgaccccatggtccaatcacctcccaccaggtccctcctccaacamtgagaattacaatttgacttgagatttgggtggggacacagaatcaaaccatatcaaacatggtagaaggaattcattattttatccattattgtttctc

SEQ ID NO: 485779 - DNA, 201 bp, Homo sapiens
ggattagctttttgatgtgctgctagatttggtttggtagtattttgttgaggatttttgtatctatgttcatcagggatattggcccaaagttgcttttytttttttgcttgtgtctctgccagattttggtatcagaatgatgctggcatcatataaagagttagagaggagttcctcctcttcaattttttggaataa

SEQ ID NO: 485780 - DNA, 201 bp, Homo sapiens
tgtcatgtgctttaactccctagcctgtggaatcatatgccaaataaacattttttctttataaatgacccagtctcagatattctgttatggcaacacamaattgactaaaacaataaacataaaaaaccgaaaaaagttgtttaaaccttttaaaagacaattgactaagcaaaaataataataatgtattgtgggatt

SEQ ID NO: 485781 - DNA, 201 bp, Homo sapiens
aggtgtcaggaagcatgtttctgtcttgtcatccctgttgacagtatctgtgactttcagtgctcatctggacccaacattagcagaaacactagcaaaaycacctttctaactgagcttcttcgcccttttattgagtctctttgcccttttggatggtttccaactgtagattgcagtaaattattcaatcattcattt

SEQ ID NO: 485782 - DNA, 201 bp, Homo sapiens
ctccctagcctgtggaatcatatgccaaataaacattttttctttataaatgacccagtctcagatattctgttatggcaacacaaaattgactaaaacamtaaacataaaaaaccgaaaaaagttgtttaaaccttttaaaagacaattgactaagcaaaaataataataatgtattgtgggatttatggtatataaaaa

SEQ ID NO: 485783 - DNA, 201 bp, Homo sapiens
gttttctaaatatataatcatgtcatctgcaaacagggacaatttgacttcccgatttcctaatcgaataccctttatttcttcctcttgcctgattgccstggccagaatttccaacactatgttgaataggagtggtgagagagggcatctttgccttgtgctggttttcaaagggaatgcttccagtttttgcccatt

SEQ ID NO: 485784 - DNA, 201 bp, Homo sapiens
aaatgacccagtctcagatattctgttatggcaacacaaaattgactaaaacaataaacataaaaaaccgaaaaaagttgtttaaaccttttaaaagacamttgactaagcaaaaataataataatgtattgtgggatttatggtatataaaaataaaatatatgacaacaacagggtggggaaaatggaagtattataaa

SEQ ID NO: 485785 - DNA, 201 bp, Homo sapiens
atcataatcataaaacactgagacatcttgatcaaactgtaacaccttatcatattcacagtagggatgtggaatgggacaaaattattgaacacttgataaagaaaacaaaatcttattcaaagaaaatcttaactctcatttgtttattgttggtgttttatatatacaaaatagcaacctctcttttattcaaaattc

SEQ ID NO: 485786 - DNA, 201 bp, Homo sapiens
aatcaaactggcttgattattaagaaagactctatccaacaataggataatacacacttttcaagtgcacatgcaatatttaacaaaatagaacataagtstggtccataaaacaactctcaataaatttaaaagtattcaagtcatgtaacatatgttttctggccataatggaattaaattagaaatcaataatgtgaa

SEQ ID NO: 485787 - DNA, 201 bp, Homo sapiens
tcataatcataaaacactgagacatcttgatcaaactgtaacaccttatcatattcacagtagggatgtggaatgggacaaaattattgaacacttgataaagaaaacaaaatcttattcaaagaaaatcttaactctcatttgtttattgttggtgttttatatatacaaaatagcaacctctcttttattcaaaattca

SEQ ID NO: 485788 - DNA, 201 bp, Homo sapiens
atttagaatggctaaaatgagaaagactgaccatacctgcattgtcattgatgtaaaaggattacaaatatcatacattcttgatggtaacatgaaatggkgcaaccattctggaaaatagcttggcagcttcttaaaaaattaaacatataactacccttgatccaaccttcctaggcatttttcccaagagaaataaaa

SEQ ID NO: 485789 - DNA, 201 bp, Homo sapiens
tggatggtgttgccaccaaataaggagaaagcaggtttgggggttaggtgatgagttcagctttggtcatgttgagttggaagctccagtgagacatctakatgaagcagtcccacaagaaactgggaatctgaatcaaagttcgtgatagaaacataggctagaaaaagatttcggaaccatcagcctaatggtggagct

SEQ ID NO: 485790 - DNA, 201 bp, Homo sapiens
cataatcataaaacactgagacatcttgatcaaactgtaacaccttatcatattcacagtagggatgtggaatgggacaaaattattgaacacttgataaagaaaacaaaatcttattcaaagaaaatcttaactctcatttgtttattgttggtgttttatatatacaaaatagcaacctctcttttattcaaaattcag

SEQ ID NO: 485791 - DNA, 201 bp, Homo sapiens
ggggttgacttctaggttcctaactcagaagatggagtagatggatggtgttgccaccaaataaggagaaagcaggtttgggggttaggtgatgagttcasctttggtcatgttgagttggaagctccagtgagacatctagatgaagcagtcccacaagaaactgggaatctgaatcaaagttcgtgatagaaacatagg

SEQ ID NO: 485792 - DNA, 201 bp, Homo sapiens
attctggaaaatagcttggcagcttcttaaaaaattaaacatataactacccttgatccaaccttcctaggcatttttcccaagagaaataaaagaatgtscatacaaacacttgtaaacaaatgttcatagtggcattatttgtaccagccagaaactggcagcaactcaaatattcatcgaggctgcgcctggtggctc

SEQ ID NO: 485793 - DNA, 201 bp, Homo sapiens
gcaggaatgcactccattcgtctcactggattaagtatctactggtcccagatcagattggcctgtgtcagcacctttgagtgaaacacacgcccctctgrcttatgtcacttgcatatttgacaactcagctatacttaagacagctccccaaagcctggtctaaccctcactggagagcaggcagctcacactctggtg

SEQ ID NO: 485794 - DNA, 201 bp, Homo sapiens
gcctgtgtcagcacctttgagtgaaacacacgcccctctgacttatgtcacttgcatatttgacaactcagctatacttaagacagctccccaaagcctgstctaaccctcactggagagcaggcagctcacactctggtgctaccatgtgttacctgggccctaagttaggaagagagattgcctgtggtatcagatcat

SEQ ID NO: 485795 - DNA, 201 bp, Homo sapiens
atgcatggctgtgtgcatgtatgtgtgtaatctaacatcagatgctatatctatgtgtatatacaggtacctaaactatgcctaatctcttaatttgactmtatgctgcttgtcagagaaaagcagtagaaaatttgatttgggccatatttcctctatcgtcagcaataatcctttgtattttaaacacatgtcccacaa

SEQ ID NO: 485796 - DNA, 201 bp, Homo sapiens
ttcaataagagcttttgtcttacattaaagctttataatattgcattctattgtgagtagacctctattcagagttacattgaatacaaatcggaataggrttacaagcaacattaaaagttaatgaaaaatcagccttgtacatgtagaacaacaacaaaaaaagttgaaggaaagaaagtacataattacgctagtttc

SEQ ID NO: 485797 - DNA, 201 bp, Homo sapiens
aatctagatcattctctccccctccatcccatgtaattatccattcaacttactaatgaacatttgtcatacagaactagcaagaactccaaaatgaagargtggagctgaaagagtgaaggagaaaaaggcaaatttgatgcatgtggaagcaaaagagtataggaaaacatcagtttttattgaacgatctgttactaa

SEQ ID NO: 485798 - DNA, 201 bp, Homo sapiens
tcccattaccactagttttccatttaagcacaccaccatttttccatcaattcttgattgctcataactcttcaaacctcttccaaaactacagcatcctrctttttggatatggagtttcaggttgcagttataacttttcccttagctttagtttattggacacacctttgattcaaagcaaaccaggagtctctacct

SEQ ID NO: 485799 - DNA, 201 bp, Homo sapiens
attgaattgcttctgggatgggtctaaaatgcaggcactgacccttaatgtcaatcacaaaattctgagtccaaaattctgaagcaatttcattgtttacmgtatatttctggcagagtgataataagcagcctgatcactttatggatttgtctctctcccgagcaaacttaaaagaaggcttagtaaaacctacattgg

SEQ ID NO: 485800 - DNA, 201 bp, Homo sapiens
ggcaatgtgagcaatgtggccagaaatgagcctaaagagttaggcagaggccacatcatgaagggttttgatagcctgagtatggagttgaggtttgtccygagagccactggggagacatgaagagcttcaagcaggaggataatcaggcttcaagcaggacaatgaggctcagtgaggacaatgggatggtgacagggc

SEQ ID NO: 485801 - DNA, 201 bp, Homo sapiens
tcaatacttgctaacaggacttaacttgctgactgccatgaattatttagtgagtgaggtctttacactcatactcaaagtccacactaatgacctagtarttattttaatcgattttcaatgaactgtgaaatactctgttggcataccaataaagtaagaaacactgagagcagattctgtgtcttatatttatatctt

SEQ ID NO: 485802 - DNA, 201 bp, Homo sapiens
tagcaatcagtgtatccaaaaaaatagttctgtgtatgttttattagaattatcattgaacacttctactgttttaagaaaccctaatttggattcatgtgagccgaggaatagatacgatatggaagcatagaattttgaagctgacaggattttggagaatacgcaattcagccccttatagcagctttcaaacatata

SEQ ID NO: 485803 - DNA, 201 bp, Homo sapiens
aatacatgcatgtgttaaaaattatagagacatacaggaatgtggtaataaacatcaaatttaggatggggttacctcaggaaggcaagaaagaaggtacraaaatgagagaagaaaagaaaccatcatgtacagagacttccaatttgttcaaagacacaaagcaggttagaagtgagtatcctagagaatacttttcac

SEQ ID NO: 485804 - DNA, 201 bp, Homo sapiens
gccaagcgtggtggcgcacgcctgtaatctcagcactttgggaggatgaggcaggtggatcacctgaggtcaggagttcgagaccagcctggccaacatgrtgaaaccccatctctaataaaaatacagaaaattagctgggcgtggtggcgcacgcctgtacttccagctacttgggtggctgaggcaggagaattgctt

SEQ ID NO: 485805 - DNA, 201 bp, Homo sapiens
cattgtacttatttgacataaatcagaaaaaaactggtaaaagtcaggaaaaaaaatctaactagaagtatacaagaaaaatttaaaaagtttctgagttmtggggagatagtcagaaaacaaaaaatttcagttagacagagacaattacatcaagacatctatggtacactatgctggctatagttaataacaatatat

SEQ ID NO: 485806 - DNA, 201 bp, Homo sapiens
ataatcataaaacactgagacatcttgatcaaactgtaacaccttatcatattcacagtagggatgtggaatgggacaaaattattgaacacttgataaagaaaacaaaatcttattcaaagaaaatcttaactctcatttgtttattgttggtgttttatatatacaaaatagcaacctctcttttattcaaaattcaga

SEQ ID NO: 485807 - DNA, 201 bp, Homo sapiens
taaccctcatggcaacctaacaaagttcaaactacaaccccaaatgtataattcagcacaatgtggctctgcgagttcaggtgactcatcaaagatcacayagctagctagtgtctaaggcagaatcaacacctctgtcttttttatttcaaagcctaagattctgtcttctttttacagacaaggtaattgcactctaat

SEQ ID NO: 485808 - DNA, 201 bp, Homo sapiens
caagaacttctagttctccaaaaagacttgacagccacacaatgatagtgggggacttcaataccccactaacagcattagacaggctattgaggcagaamaccaacgaagaaattctggacttaaactgaacatgtgaccaattggacctaatagacatatacagaatattgcccccaacaaccacaaaatggacatttt

SEQ ID NO: 485809 - DNA, 201 bp, Homo sapiens
cagccacacaatgatagtgggggacttcaataccccactaacagcattagacaggctattgaggcagaaaaccaacgaagaaattctggacttaaactgarcatgtgaccaattggacctaatagacatatacagaatattgcccccaacaaccacaaaatggacattttttaaaatctgcacatggaacatactccaaga

SEQ ID NO: 485810 - DNA, 201 bp, Homo sapiens
accaattctactgaacctattccaaaaaaatcaaggagaaactcttctccaactcactctatgaagccagcatccctctgatactgaaacctggcaaagamacaatgaaaaaagaaaactacaggccaacatccctgaagaacacagatgcaaaaatcctcaactaaatactagcaaactgaattcaacagcacatcaaaa

SEQ ID NO: 485811 - DNA, 201 bp, Homo sapiens
agaaatgcccactcaagattgacaaagtaaaaaaaaaaaggcacatcctttgggtggatgaatgagaaagagtcactccttcctttaggctaattcagtastgggccaggacccacagcttgagaaacaatgtaagtgagctttcagcccccattcaccctgcagtgcacaaactgcagaatcctacctggaggcctgcac

SEQ ID NO: 485812 - DNA, 201 bp, Homo sapiens
atagtttctcctttccaatctacatactggactttactttttaactatacgtttcatatgaaattttgatgattcttccctaaaatgactgaaaaatagaaataataatgaagcaatatataagaagatgtatgttatatttaaattacttggatatttatgatagaaaaaaatatatctaccctatgtcaggccttgtgc

SEQ ID NO: 485813 - DNA, 201 bp, Homo sapiens
gagataaaaaccaaaaccagaactcagtctcacacctaatgaaagcagagaagaacagtaaagtggaagaacacaaccaggcataatgggaggaagaacasaatgaaagataggcttgtaaaaaggaagagcaaattaccgcgagcaacagagggaaggagaatttcctcaggcgaggattaaggagggaaaaggccagag

SEQ ID NO: 485814 - DNA, 201 bp, Homo sapiens
agtttctcctttccaatctacatactggactttactttttaactatacgtttcatatgaaattttgatgattcttccctaaaatgactgaaaaatagaaataataatgaagcaatatataagaagatgtatgttatatttaaattacttggatatttatgatagaaaaaaatatatctaccctatgtcaggccttgtgcta

SEQ ID NO: 485815 - DNA, 201 bp, Homo sapiens
cagaatgaaagataggcttgtaaaaaggaagagcaaattaccgcgagcaacagagggaaggagaatttcctcaggcgaggattaaggagggaaaaggccasagagaaagaggccacaagaaagcaatgaaaagaatcaagcagggcgggggcgttttgctaggcttttcttttctgtctttttttttttattattatattt

SEQ ID NO: 485816 - DNA, 201 bp, Homo sapiens
ccatggtgcccctatggcccctgaggccatgctcacctatgctgccttgaaacatcatcatgctcctggattgcccaggtggcttccttcacttagccacyggtgaggtcagttcttcccaagtagtcccacagtcttgccagaatggccactattcctctaacttttccttttccatcacccaccgtatgcaaatcaaaa

SEQ ID NO: 485817 - DNA, 201 bp, Homo sapiens
ttgtaaaaaggaagagcaaattaccgcgagcaacagagggaaggagaatttcctcaggcgaggattaaggagggaaaaggccagagagaaagaggccacamgaaagcaatgaaaagaatcaagcagggcgggggcgttttgctaggcttttcttttctgtctttttttttttattattatatttctttccttaacaacaca

SEQ ID NO: 485818 - DNA, 201 bp, Homo sapiens
tataatttattatttattaattatattgactcataattgattatattgatttatatgcataattatataatctgtatatattgatttatttatatatatakgtgtgtgtgtgtgtgtgtgtgtgtgtgtgtatagagagagagagagagaaagaggcactgattgactgtgggggtgatcaaagaaggtgacatatgagcc

SEQ ID NO: 485819 - DNA, 201 bp, Homo sapiens
taacatcaaagcacatattcatatatttatttatttaaaaagagattgcctttaaaaatgcctaatgctcctgatgttatttgaaacacacacacacacayatatatatatataaaaaataaatgtctgcctacctagaaaactgcagaatttcaactcacagcactaacctagtataaggcagaacttcagatggaagtc

SEQ ID NO: 485820 - DNA, 201 bp, Homo sapiens
aggaagagcaaattaccgcgagcaacagagggaaggagaatttcctcaggcgaggattaaggagggaaaaggccagagagaaagaggccacaagaaagcamtgaaaagaatcaagcagggcgggggcgttttgctaggcttttcttttctgtctttttttttttattattatatttctttccttaacaacacatttgtgct

SEQ ID NO: 485821 - DNA, 201 bp, Homo sapiens
tattcatagaaagaagtccaccaattccaatgaacttgatacaaataagtactttgattgttctgaaaacctccagcaatgtgtgggtcatgaactgaatmtataatagttttccctgccatataaatttttattataatgctgtttggcctgtttaattatttaatttccattcacttgatttcaagtgtggttgagatg

SEQ ID NO: 485822 - DNA, 201 bp, Homo sapiens
ccccactctggtatcaaagtctccatggtggagaaacccactgaagtgtggattcactaaaatatgaatagttgacaatgctacctctttatgacattttstgcttaagtatccctttcaattacaactatttaataaaatggctgtctcctgtttccatagtcagtgagagatggtggctgagagagaaagacacagaca

SEQ ID NO: 485823 - DNA, 201 bp, Homo sapiens
cgcaagtgcaaatcagtggagtggctgggacagagccagactggggtgaacatggagaaaatagggtctggggggacaggaaagggtatagataactcttytgaaatgcatggctaaggaaaagagctgtatctggaaaaggatacaggattcaggaagatcatttactgactgatttattttttggtgggggagaataca

SEQ ID NO: 485824 - DNA, 201 bp, Homo sapiens
atgtatgcatgcattcagatacattttatcatctttattttttagaatattatttcattaactctaagttttgcagctttttggggtttccaaaatgggtyacctctcctaaaaacagttgtacttgattcaagatatcaattaaatgggtactggaggcagccatggccacagcctctccttttgttccctttctttgtg

SEQ ID NO: 485825 - DNA, 201 bp, Homo sapiens
ctgatttattttttggtgggggagaatacagagcattgcaaatgctgacagaaagcatccagtagagaagaggttaaagatccagaagagaaagtgagtcwctcatcagggaggttcatgggaggacacggagagacaggacccacagcataggagggacgactcaccactgataggaggtgggtccactcctcccttgta

SEQ ID NO: 485826 - DNA, 201 bp, Homo sapiens
ttcagatacattttatcatctttattttttagaatattatttcattaactctaagttttgcagctttttggggtttccaaaatgggttacctctcctaaamacagttgtacttgattcaagatatcaattaaatgggtactggaggcagccatggccacagcctctccttttgttccctttctttgtgagggcaagtatag

SEQ ID NO: 485827 - DNA, 201 bp, Homo sapiens
aaacagtgtgtattgagcagatgtttctttaagttgacaatccttaattggaaaaaggaaaaataaattgcataaagtgttaaatgagttccttgcgaggmtaggaggcagtcgttcattcaactgctccccctgtcctcttgtatctatctcttttccctacctatctcggttgctttcttattcctttagcacctgcca

SEQ ID NO: 485828 - DNA, 201 bp, Homo sapiens
actaatggtacctatctcagacttgttgtgggattaaatgagatagtgggtgtgatgtgtttagagcattgcctgggacccaataactgctaaactataaygcttccattcttgtctacaaaaagcttttttaatacagtttttaaagaagtttctgagttttaagtaaacatgtaaaattgttataaataaatagctaaa

SEQ ID NO: 485829 - DNA, 201 bp, Homo sapiens
tgaaaaattttaaacatgggagtgatataatccaatttgtatttttaaaaaacgggtggattcaagaggatctttgaattcttatctaaagctgagatggygactctgtcgttagagggtctcaaagctgtcttacggcacatacgaaacagttatacaccatgacttttggtatgagttccatatagcagtaagattcta

SEQ ID NO: 485830 - DNA, 201 bp, Homo sapiens
aaacatctgtactgatactactgcatttataattatatgcctacataatccagtgttttggttaggagactctttcagggattccgacaattaggaaaacytaggtatgggttacacttcaaaaacctgtagctttatagctacaggttaagtcatttaaactttctgagtctcccttgcttcatctgtgctatagagaaa

SEQ ID NO: 485831 - DNA, 201 bp, Homo sapiens
ctggtcttgaactcctgacctcaggcgatcctcccgcctcagcctcccaaagtgctgggattacaggcgtgagccactgcccctggcctgaatagttattyttctttatattttaactctgacctggaaggggccagggtaagagctgtttgtcagcgctacctaagatgctttctcaaatccagttctctgagttctctg

SEQ ID NO: 485832 - DNA, 201 bp, Homo sapiens
gggatttttctgcggtggtacaaaaaaatggtaatttgggtggtcatatctaagatgacttgaaggagttatcagtgagggatgtgtctgatgagctaagwtaactatggattgggtaagtcagttagcaactcaaatgagatgatcaagttttagttgtcgtaattaatcatgtaaactaagaagtgctgaataaagctc

SEQ ID NO: 485833 - DNA, 201 bp, Homo sapiens
tttaaaaatggaaacaattttaaaaataatcatagttgtaactcagtattaaattgtcttttggagaagattcttaagggttttatatctagaataacttaaaaaaaaaagaaaaaagaaaatgggccacaactggagacaatcaaaaaatcattcttctgcttttactttattatccttaacagtcataagccatagtct

SEQ ID NO: 485834 - DNA, 201 bp, Homo sapiens
tccataatagtttgggctcccgaattccattgtagagttgtgtctagcatgctggaatcacttgtttacttttatctccatcactggcctgtgatggcaaygggagtagggaacactctcttagtcatcttactaattagtcacattgtaaagattaaaaagaattgtggagtaaacaagtgaatatggctcaaataaggc

SEQ ID NO: 485835 - DNA, 201 bp, Homo sapiens
agctccatccacgtttccacaaaggacatgatctcattcctttttatggctgcatagtattccatggtatagacgtaccacattttctttttttttaattwtattattattatactttaagttttagggtacatgtgcacaacatgcaggtttgttacatatgtacacatgtgccatgttggtgtgctgcacccattaact

SEQ ID NO: 485836 - DNA, 201 bp, Homo sapiens
ctttgcaaacagtgttaataaatgtgagtaaggatgatgctgaggctcatgattttaaaaaaggcattcaagccgggtgtggcagctcatacttcgaatgmcagtgctttgggaggttgaggcaggagtatcacttcaggccaagagttcaagacagcctgggcaacatagagagacccgtctttacagacaattttttaa

SEQ ID NO: 485837 - DNA, 201 bp, Homo sapiens
ttaaaatttttagcaagacaaccctttgcccttatattctttgttttagaagaaaaagttttaaactcatattttacattctagtattcagtgtagagtcttttttttttcattttaagcaacaatagtctatctttagactgcacaagctaaaaccaaaggcctttgtacacatttgcattaaagagtgaaaaaacacag

SEQ ID NO: 485838 - DNA, 201 bp, Homo sapiens
ttcactgggaaagtagaggccttccacccaagcactctgtccactgctctctttcacctacacacatggcctctaacatttctgtagccaaaagaaaattwtgtattttttctcttcaaatcaaatgccatctccgttcatccagctaccccacgtcagaaagtggagagtcattcctgacttcttctctcaacccacact

SEQ ID NO: 485839 - DNA, 201 bp, Homo sapiens
agtctctgcctcccacttcacatggccttttcctctctcttgctttctctttgtctctgtctctgtctctctctgtctttctctctctctctctctctctstgtgtgtgtgtgtgtgtgtgtatgtgtgtgtgtgtgtgtgtgtgccttctcttctgtcctgtatcttataaagatacttgtccttagatttagggcccat

SEQ ID NO: 485840 - DNA, 201 bp, Homo sapiens
ccttccctgactaggtaacttatatctcatcctttaaaattcaatttaagtttcactttttctgtaaaacctttcctgttcctctaattttatttagatgycatttctctttatttctcccacaacacccttccaaaatagcttcatacctccctatttccaagcatataaatatcagatccccttcatgttgctccccaa

SEQ ID NO: 485841 - DNA, 201 bp, Homo sapiens
ggccttttcctctctcttgctttctctttgtctctgtctctgtctctctctgtctttctctctctctctctctctctgtgtgtgtgtgtgtgtgtgtgtatgtgtgtgtgtgtgtgtgtgtgccttctcttctgtcctgtatcttataaagatacttgtccttagatttagggcccatccagctaatctggcatgatctca

SEQ ID NO: 485842 - DNA, 201 bp, Homo sapiens
tcttttcttctgcttttacctttggtagaatcatatccatggtaaattatttggggttgcatcagaaatacacacttcatgagccttggaggtaaaaccasaaggcatagtttctaaattaaaccagcaaaagtaaaaaggtaatacttttgttttattgttttcacttatatctaaccctctaacctcagttttctgtga

SEQ ID NO: 485843 - DNA, 201 bp, Homo sapiens
gaacaaatcacaccacatctatgctggaaacagatgctagtgagccttcagacacagaaagtttgagaaaaagaaaagtgttatgttttcctttaaaggaktttataatcactgagggtggggattgactgtctcttatttaccactgaagctcctgagcctagcgcagttcctgataccaagcagaagtttattaaattt

SEQ ID NO: 485844 - DNA, 201 bp, Homo sapiens
atgaatttctccacttctgttatgggttccgccctctcctacctcctctagtaccattctctaatccagcagtcctcaaattgaactatatatgttgacaycatactaggaactgaagcagaaaaattttaaaaatatgttataattttcttaaaatatcaagaataaacccaatatatgttaactaaattgaatttttat

SEQ ID NO: 485845 - DNA, 201 bp, Homo sapiens
gccttttcctctctcttgctttctctttgtctctgtctctgtctctctctgtctttctctctctctctctctctctgtgtgtgtgtgtgtgtgtgtgtatgtgtgtgtgtgtgtgtgtgtgccttctcttctgtcctgtatcttataaagatacttgtccttagatttagggcccatccagctaatctggcatgatctcat

SEQ ID NO: 485846 - DNA, 201 bp, Homo sapiens
tcatgcatcattttctctagcatgctgtagtaatttaggtgtttgctgtgtcttccctgcaagactatgtgtgcctcattcctttgtgtctcattcctcakgcaccctgcagaatctgtctcctgtcttgctcattatcactggttgaatattgtgtttaataaatgaacacaaatttgttgaggaaaagaaagttctagt

SEQ ID NO: 485847 - DNA, 201 bp, Homo sapiens
atcctcctacctcagccttctaagtagctgggactacaggcatgcaccaccatgctaagctaatttgcaaacactttttgttgagacggggggtcttgctrtgttgccaggctggtgttgaatttctggtgttgttcaggctggtttcaagtgatgttcttgccccagcctcccaaagtgctgggactataggtgtgagtc

SEQ ID NO: 485848 - DNA, 201 bp, Homo sapiens
acaaagtttttttgtttttttgtttttttaattatactttaagttttagggtacatatgcacaacgtgcaggttagttacatatgtatacatgtgccatgttggtgtgctgcacccatcaactcatcatttaacattagttatatctcccaatgctatccctcccccttccccccaccccacaacaggccccagtgtgtga

SEQ ID NO: 485849 - DNA, 201 bp, Homo sapiens
cacatataattggatccatacagtttaaacccatgttgttcccagggttaactgtagttccttacagtttacagagcactttggcatggaaatggaaactmtaaacaaacaaacaaaaaagacaaatgcctgcagttcagcaaggtagaacaagttttcccaaatcacacagacaggatgtagtgaacttagaactctact

SEQ ID NO: 485850 - DNA, 201 bp, Homo sapiens
gaggccagaagtttgagaccagtctggccaacatggaaaaaccccatctctactaacaatacaataattatttaggcatggtggcaggtgcctgtaatccyggctactcaggaggctgaggcacaagaatggcttgaacctgggaggcagagattgcagtgagccaagatcatgccactgcactctagcctgggagacaga

SEQ ID NO: 485851 - DNA, 201 bp, Homo sapiens
ataaatgtcttcttttgagaagtgtctgtctgttcatatccttcgcccactttttgatggggctgtttgtttttttcttgtagatttgtttgagttctttrtagattctggatattagccctttgtcagatgagcagattgcaaaaattttctcccattttgtaggttgcctgttcactctgatggtagtttcttttgctg

SEQ ID NO: 485852 - DNA, 201 bp, Homo sapiens
acattcaatttgaatagccatggtttgttagccattctttgaagtaaaaatagtatttcatgaaaaaaggggttagttcagctcacaactatatagacccmaaaaaaaagccatcacacttggtctacaggagaagtgctttatatgcactttccattttgccacattgaatgctaaaaagatatggactgtgaatcaaga

SEQ ID NO: 485853 - DNA, 201 bp, Homo sapiens
caatgcaggctcgtttttggttccatatgaactttaaagcagttttttccaattctgtgaagaaagtcattggtagcttgatggggatggcattgaatctrtaaattaccttgggcagtatggccttcttcacgatattgagtcttcctacccatgagcatggaatgttcttccatttgtttgtatcctcttttatttcat

SEQ ID NO: 485854 - DNA, 201 bp, Homo sapiens
ctgtgggtttatcatggatagctcttattattttgagatacatcccatcaatacctaatttattgagagtttttagcatgaagagttgttgaattttgtcraaggccttttctgcatctgttgagataattatatggtttttgttgttggttctgtttatatgctggattacatttattgatttgcgtatgttgaaccagc

SEQ ID NO: 485855 - DNA, 201 bp, Homo sapiens
gatatatttccaagttcagagtccaaaataaaacaaaaggtacagtaattataagtcaatttaattctcaatagttttggacatgcggctaaaaattatakctagtggccatctgtcaacaaatgtaaactatgaaactggatattaaattatatctaatttaatacactgtacataggatctaattttacatactgtggc

SEQ ID NO: 485856 - DNA, 201 bp, Homo sapiens
aaagtcacatggtgaaaaaggcaaatgctatcttattattattattatgaatacagttttgatctctcagcctccctgaaaaggtttttgggacccctagrggtatgtaggccaccctttgagacccactgatctaattgattgtctcctttttttgtatcttaattctctaattcatattgtgtctgtatcttttaagca

SEQ ID NO: 485857 - DNA, 201 bp, Homo sapiens
actggatattaaattatatctaatttaatacactgtacataggatctaattttacatactgtggcctaacagtgtgcaaaatgttaggctacccctgtagygtacagtgtcacctctgtcatatacctctgtcaaactggtgcagtggagtcctgccttccagatctaattctttcattactgtatgagcttgggtagggc

SEQ ID NO: 485858 - DNA, 201 bp, Homo sapiens
ttgtaccagccagaaactggcagcaactcaaatattcatcgaggctgcgcctggtggctcatgcctgtaatcccagcacttttggattgcttgaggccagragtttgagaccagtctggccaacatggaaaaaccccatctctactaacaatacaataattatttaggcatggtggcaggtgcctgtaatcccggctactc

SEQ ID NO: 485859 - DNA, 201 bp, Homo sapiens
gagagaaggtagaagaagggtagggaggtaggtgatgaggttttgaattggaattgactggaaagggcaaagagaaaactatttagggtgtgggattcaayaccttattttgggtggctggtacacaggtgtatctaattctcaaaacttactggattgagagaatacttaagatctgggcattttattgcaaattataca

SEQ ID NO: 485860 - DNA, 201 bp, Homo sapiens
gggtagggaggtaggtgatgaggttttgaattggaattgactggaaagggcaaagagaaaactatttagggtgtgggattcaataccttattttgggtggstggtacacaggtgtatctaattctcaaaacttactggattgagagaatacttaagatctgggcattttattgcaaattatacatcaattttaaaattaag

SEQ ID NO: 485861 - DNA, 201 bp, Homo sapiens
tgtattttataaatttatcaacttagtttatcaagtatgatgacaacattaatgcatccagtttccttagattaagcctcaatttattgtgaagttcaaamacataaagaattacaaaaaccaaaaccaaaaagccttgtccagaatcaagattaaaatttcagagatgaatgtcattgccacactatgccagcaagggga

SEQ ID NO: 485862 - DNA, 201 bp, Homo sapiens
agagattcaacttgttcctggtttagtcttgggaggttgtatgtgtccaggaatgtatccatttcttctagattttctagtttatttgcgtggaggtgttkgtagtattctctgatggtagtttgtatatctgtgggatcggtggtgatatcccctttatcattttttattgcgtctattggattcttctctcttttcttc

SEQ ID NO: 485863 - DNA, 201 bp, Homo sapiens
taggtctttgtatgtgaaaaaaaatacacttgttccacgttcttgctttgcttatagcaaaagtcctgggaaaggttacttaactggccatggctaagtartgggcacacccagcccctgcctttgccatactgaggaatgggttgtttgtatcctttagctctggaaggtacccctaagcctgtacccaagggacttgct

SEQ ID NO: 485864 - DNA, 201 bp, Homo sapiens
ggtggtgatatcccctttatcattttttattgcgtctattggattcttctctcttttcttctttattagtcttgctagccgtctatcaattttgttgatcytttcaaaaaaccagctcctggattcattgattttttgaagggttttttgtgtctctatttccttcagttctgctctgatcttagttatttcttgccttct

SEQ ID NO: 485865 - DNA, 201 bp, Homo sapiens
acaaatgttcatagtggcattatttgtaccagccagaaactggcagcaactcaaatattcatcgaggctgcgcctggtggctcatgcctgtaatcccagcrcttttggattgcttgaggccagaagtttgagaccagtctggccaacatggaaaaaccccatctctactaacaatacaataattatttaggcatggtggca

SEQ ID NO: 485866 - DNA, 201 bp, Homo sapiens
aaagaagaaaaaaatgtctccgggaatgggaaaataagagcctatgaaggaccctgaaaaacacatgggttagagttgaaattcatgtggctgcaatgctrtggaaacaaaaagagggaagttcataaaatagggataccctggggtccaacagttgcaaacacattaaagggaataaaaattttttaaatgccatgtgat

SEQ ID NO: 485867 - DNA, 201 bp, Homo sapiens
tctaatgttgacagtggggtgttaaaatctcccattattattgtgtgggagtccaagtctctttctaggtctctaaggacttgctttatgaatctgggtgstcctgtattgtgtgcatatatatttaggatagttagctcttcttgttgaattgatccctttaccattatgtaatggccttctttgtctcttttgatcttt

SEQ ID NO: 485868 - DNA, 201 bp, Homo sapiens
cttgctgcctgggctaattatcatcatcataatcactaaaaaatttttttgagctcttactatatgccagtttctgttcttaagtctttaaatggatcatmtttgggctgggcaggaggcatgtgatcataagagaatcagcaagctgtgtaagatggaaaggcaggcagagtcattccaaagcttagtaaaggttctaga

SEQ ID NO: 485869 - DNA, 201 bp, Homo sapiens
tccgctgttagtctgatgggcttccctttgtgggtaacccaacctttctctctggctgctcttaacattttttccttcatttcaactttggtgaatctgayaattatgtgtcttggagttgctcttctcgaggagtatctttgtggcgttctctgtatttcctgaaactgaaagttggcctgccttgctagatcctttaag

SEQ ID NO: 485870 - DNA, 201 bp, Homo sapiens
caggaggcatgtgatcataagagaatcagcaagctgtgtaagatggaaaggcaggcagagtcattccaaagcttagtaaaggttctagaaatttgtattcmactgcttcagtgtatactgaacatggatgaagttcagtatgagaaattcagctttaaagatttgacagttccaaaattaatattgttataatgtccatac

SEQ ID NO: 485871 - DNA, 201 bp, Homo sapiens
gctctgttttttccccatctttgtggttttatctacctttggtctttgatgatggtgacgtacagatggggttttggtgtggatgtcctttctgtttgttwgttttccttctaacagtcaggaccctcagctgcaggtctgttggagtttgctggaggtccactccagacacttgtttgcctgggtatcagcagtggaggc

SEQ ID NO: 485872 - DNA, 201 bp, Homo sapiens
ccctttgccaaatgagggcaaagacactgagtataggtaaacaatagtccatttcaggacccgtgcccaggagaacatgcctaccaaatgcaaagctctakggcaccaagtgccggtttgtggacccacagtagcctgcaaggattaactctagctttaaaatcacacggcactgcagtttggcacaaaagcagccctcta

SEQ ID NO: 485873 - DNA, 201 bp, Homo sapiens
tgtcctttctgtttgttagttttccttctaacagtcaggaccctcagctgcaggtctgttggagtttgctggaggtccactccagacacttgtttgcctgrgtatcagcagtggaggctgcagaacagtggatattggtgaacagcagatgttgctgcctgatcgttcctctggaagttttgtctcagaggagtacctggc

SEQ ID NO: 485874 - DNA, 201 bp, Homo sapiens
caaggattaactctagctttaaaatcacacggcactgcagtttggcacaaaagcagccctctactccgagagagagtatgctatcaatatgtaaaaaggtrttatccttgaatatgtgtatccttttgctggtacataaaccctgcctcaagatattcttcatgaaattccaaggaacatttctcagttcaatgaccctaa

SEQ ID NO: 485875 - DNA, 201 bp, Homo sapiens
aataactatatgtcacagcctcagaaagataagagaaaatattggttccaccaaaaaaggaaaggccctatgtttaataaaaagacaagaaatcagaaagaaaaaaaaaaaacgcttttgcaaatgaaaaatataaccaagtgaaaaacatatgagttggaagataagttaaggtgattcttagaaagtaaacaaaaagaa

SEQ ID NO: 485876 - DNA, 201 bp, Homo sapiens
tgatttaatgaaatccctatcaaaatttcaatgacatttttcctagaaataaaaaaaaattctaaaattttcacggaactacagaaaactctgaatagccmaagtaatcttatgcaaaaaagaacaaagctggaggcatctcattacctgacttcataatatactacaaagctatagtaatcaaagcagcatagtactggc

SEQ ID NO: 485877 - DNA, 201 bp, Homo sapiens
caacacagtgttaggggctttgcatgtttccaacttgagggtaagtgaaataaacttggtgacagaggatattctaaacaagacccacactggagctgtargctccccgtgtacaacacctcctgccattccacatcattagtccccttcaagaatggaaaacaatcaaaaagtggcttatgaactagaggcgcaggcaag

SEQ ID NO: 485878 - DNA, 201 bp, Homo sapiens
atttctcagttcaatgaccctaagaaatgatgttgaattactctccacttacaaaatagaggaaaagcattttctttcagttcctgtaaatggaggcctakagacgtaaaggagtcagagtcagaagagtcaagttttagattctgctttgaactatatcgagatctccaaatcggagatgctagtctgggttatattctt

SEQ ID NO: 485879 - DNA, 201 bp, Homo sapiens
aaaattgatgtacagactaatggaacagacaggagggcacagaaataaatctgcacattacaatccattgttttttgacaaagaagccaagatgtatacaytgaagcagttgaatacaaatttctagaacctttaccaagctttggaatcactttgcctgccttcccatatcttggggggtgtccaccccactgcgatgtc

SEQ ID NO: 485880 - DNA, 201 bp, Homo sapiens
atgttgggccattcaacagaccaagaagcttccagtaagaatgaacaatacacagaaaacaatcacagatcaaattgtgttctgtacaattgctgcatcctctttgtcggaaaagctgcctctcttgatttggtaaaacatgtccttctatgcagagaattttgtgattgtgtcaaagcaattggttattcacacacatac

SEQ ID NO: 485881 - DNA, 201 bp, Homo sapiens
gaaatgatgttgaattactctccacttacaaaatagaggaaaagcattttctttcagttcctgtaaatggaggcctagagacgtaaaggagtcagagtcaraagagtcaagttttagattctgctttgaactatatcgagatctccaaatcggagatgctagtctgggttatattcttgccgtcaaggacgcacagaactg

SEQ ID NO: 485882 - DNA, 201 bp, Homo sapiens
ggggtgatattactccccatatggcggagggtgtccagcctcctgcgatgtggattgtaataaccaggaggagagacgggggcgatattgctccccatatmgcagggggtgtccacccttctgcgatgtggaccgtaatacccagtgggagagacggggtgatattacttcacatatgtcggggggtgtccaccccactgc

SEQ ID NO: 485883 - DNA, 201 bp, Homo sapiens
acacatattattgacttcaatctcaagtgctgcgcttacattaaaaagcttctttctttaaaaagaataatatatacaatggcctaaaaatatgtaacgtrgaccctgactgggaagaaatctaagaaaaaatatctcacaatttgataaattcaagatggtgtagctaacactcaaattacatttcatattaactcttca

SEQ ID NO: 485884 - DNA, 201 bp, Homo sapiens
tgccactgaatggatgtgagtcttgtgttctaagtgggaaataaactaaaagaccatattccaaggattactaaaatctgtgagatatgtaaaggatagamacaagagtgaaaaagaacatacacaaagaacccagaaatgggagacatgttgattacaggaggaaatataaggagggtgtaattagggtcaaagaaataa

SEQ ID NO: 485885 - DNA, 201 bp, Homo sapiens
gggggtgtccacccttctgcgatgtggaccgtaatacccagtgggagagacggggtgatattacttcacatatgtcggggggtgtccaccccactgcgatrtagaccctaatacccagagagggagaaggggtaatattactccccatgtcatggggggtgttcaccctccttctatatggggagtaatatcatcctctcc

SEQ ID NO: 485886 - DNA, 201 bp, Homo sapiens
ttaaaatatataattatagcgccaggtgcagtgattcacgcctatactcccagcactttgggaggctgaggcaggtggatcacaaggccaggagtttaagmccagcctggccaacatggtaaaaccctgtctctactgaaaatactaaaccctgtctctactaaaaattagctgggtgtggtggcgcacacctgtagtccc

SEQ ID NO: 485887 - DNA, 201 bp, Homo sapiens
tgagtcttgtgttctaagtgggaaataaactaaaagaccatattccaaggattactaaaatctgtgagatatgtaaaggatagaaacaagagtgaaaaagmacatacacaaagaacccagaaatgggagacatgttgattacaggaggaaatataaggagggtgtaattagggtcaaagaaataaaatgaatagatgcttg

SEQ ID NO: 485888 - DNA, 201 bp, Homo sapiens
tgaggacgaaagctctaacaattcaaatctctctcggaggtaagtttagtaactatcaagatagatcttggcagctctctcttggggtccccaaggctcaytaaacattttaagaggacgctgaacattttcctagtggatggtgagataactcacttccaagtgtgggaggaagtgcaatcttgcctgttgcaaccagca

SEQ ID NO: 485889 - DNA, 201 bp, Homo sapiens
  misc_feature (1)...(201): n = A,T,C or G
aattcaaatctctctcggaggtaagtttagtaactatcaagatagatcttggcagctctctcttggggtccccaaggctcattaaacattttaagaggacnctgaacattttcctagtggatggtgagataactcacttccaagtgtgggaggaagtgcaatcttgcctgttgcaaccagcaaattctggaatgaggttta

SEQ ID NO: 485890 - DNA, 201 bp, Homo sapiens
aattgggtaggtagcagcagaactgttagtggacccacatgaaagggctgtgtttatatgtcagagtcagtcaaatgttggcaatgtcatatggttcaacmtaatagaaaggcaaaaagagacaaatcctttaatgaagttcaagaaaatatacattataaccatttaagttaaattgcaaaatatttcctggggcacttg

SEQ ID NO: 485891 - DNA, 201 bp, Homo sapiens
ggcaggtagcatgcagtctggctcctttttattaatagttagctgaaactttacctttctatttcagaggaggtggacagcttttttactaccttatgtgmtagggaagaatgaaagttcaagtgaaaggggaggctgggaataggctgcagttgggatgtgagacaagggtgggaggtgagagggtaggagggtcaggca

SEQ ID NO: 485892 - DNA, 201 bp, Homo sapiens
  misc_feature (1)...(201): n = A,T,C or G
acacatttgtcttttatatttcaaacagaggaaagtttccatttccccatttcattctgaaagctttcaaaaagtttgggcagtgcccagtgctgtccccntccctcacttcatcatttcagctctagttcttgcacttggcagacttcggacgccaagtttctgcttcagtgctggtcaaaatcccacagaggactttgg

SEQ ID NO: 485893 - DNA, 201 bp, Homo sapiens
tttcttcacatttcaactctttatgcaaaagactctcaaatctttctttctctaaactccaattattgttttcgaccacttaaagggtatcttttcttggkaatatacctttatgtatagaccatacactactcccacattccctcagctctatacaactaactctaagtctacgttgttttacttgggcaatacatgtgc

SEQ ID NO: 485894 - DNA, 201 bp, Homo sapiens
aaaaaggaaattttcaggtggttttcatagagattccaattctgtgtatcttggatggggtctgggaatatgtttttaacaaaaattaggttaattctgayacaggtcgtccatacactatttttttcagaaattgataagttaaatcagggcttattttttcctaaggataatcacagtcaaacaaataatattgttctt

SEQ ID NO: 485895 - DNA, 201 bp, Homo sapiens
aatagggtcaaggataatgttcaggagttgatttcctttggaagcttggcgggggaaggaatacactcttcagagcaggacttgaaaagtgagatgcttakgggccaggcaagtaaggtgaatgagtgatggtggattagtgaagagtgtgaacaactagagatctccaacctcatctaaagggactgaccttgcctctgt

SEQ ID NO: 485896 - DNA, 201 bp, Homo sapiens
ggaagcttggcgggggaaggaatacactcttcagagcaggacttgaaaagtgagatgcttaggggccaggcaagtaaggtgaatgagtgatggtggattaktgaagagtgtgaacaactagagatctccaacctcatctaaagggactgaccttgcctctgtccaactattttcaggtgggcatatagaatgtagggtaac

SEQ ID NO: 485897 - DNA, 201 bp, Homo sapiens
aatacactcttcagagcaggacttgaaaagtgagatgcttaggggccaggcaagtaaggtgaatgagtgatggtggattagtgaagagtgtgaacaactakagatctccaacctcatctaaagggactgaccttgcctctgtccaactattttcaggtgggcatatagaatgtagggtaacaaatcccctgtcattaatga

SEQ ID NO: 485898 - DNA, 201 bp, Homo sapiens
tgatggtggattagtgaagagtgtgaacaactagagatctccaacctcatctaaagggactgaccttgcctctgtccaactattttcaggtgggcatatakaatgtagggtaacaaatcccctgtcattaatgaggcccaatgttggcagctaattcagatgttaaataaaatgcactgtcagccaaaccaaacatatctg

SEQ ID NO: 485899 - DNA, 201 bp, Homo sapiens
tctgccagatgaagttggcctactgtaacatagtatatttcttctggcctagtcacctatggggagagaagagcctcagttccttctgagaacaatcttasagagcagtaagaatgtaattatatgactacttagtttttggctttttgggttacatggttccatttctttcctttaaaacattatatatatatatgtata

SEQ ID NO: 485900 - DNA, 201 bp, Homo sapiens
attcagatgttaaataaaatgcactgtcagccaaaccaaacatatctgtagccagatctaccccgtgggctgccaatgtatggtctcagctttggagccasagagactgttattaaacctctttgatactcagttttctcattcatgaaatgataggtggaaaaatactcgactttgatttttttgaaagctacttttgga

SEQ ID NO: 485901 - DNA, 201 bp, Homo sapiens
aaaagtaacttctttttttttttgagatggagtctcgctcagtcgcccaggctggagtgcagtagcacgatctcggctcacggcaagctctgccttccggkttcacgccgttctcctgcctcagcctcctgagtagctgggactacaggcgcccaccaccaggcccggctactttttttgtatttttagtacagaggtggt

SEQ ID NO: 485902 - DNA, 201 bp, Homo sapiens
tgccaatgtatggtctcagctttggagccagagagactgttattaaacctctttgatactcagttttctcattcatgaaatgataggtggaaaaatactckactttgatttttttgaaagctacttttggaaacggttagacttactcttcatgtcattaaatgaatgtatgcaaagtatttttcccgtgtctgctactga

SEQ ID NO: 485903 - DNA, 201 bp, Homo sapiens
aacatgagtaaacaagtaaagagtatatgagtagatggcttgtttcatgatttaaagattgtaaaattagttaattaaaaggaaacacaagcttaaaagayggcgagatgcaagatcagtgtctgaaataagtgcttcttttcaggatgccctgcataaagccttgcctgtgcggaggcagcttcctgtgcactgccggct

SEQ ID NO: 485904 - DNA, 201 bp, Homo sapiens
tctcctgaacttcaattctgcttcttcaaattctagcttccacatcagtgtcccattgttgcctcaagtgcagctggacttgaatgaaacttgtaatcctkgtccccaaaccacccacccctctgaacttgcacaagtgtctattatatggacacttcttcctgccattccggcatgcagctttgacatatccccccacca

SEQ ID NO: 485905 - DNA, 201 bp, Homo sapiens
cctgaacttcaattctgcttcttcaaattctagcttccacatcagtgtcccattgttgcctcaagtgcagctggacttgaatgaaacttgtaatcctggtmcccaaaccacccacccctctgaacttgcacaagtgtctattatatggacacttcttcctgccattccggcatgcagctttgacatatccccccaccatct

SEQ ID NO: 485906 - DNA, 201 bp, Homo sapiens
tcatatagattcttcaagatctaagatggtttcttctctcagtttcagagtggccatcctctgaactacagcaggcattgctcgttgggaggaaggcaacrgcacaggcatgagcagcatgccaggccaagccctttatatatacatgaactcatctgctcttaaccttaccacgcatgcatcatcactgtccctacttta

SEQ ID NO: 485907 - DNA, 201 bp, Homo sapiens
agaaaaagagtaatactactaataaaaatacccgatacatttccacatttcagaatgtgggccagataatgaagaaaggtctttgaacagtacagcctccstccttccctctcttccttcttttcttccttcttttgtcacttgctcaacaaacatttgttttatgcacaccctgtgccagaacaacgcacctcagggttt

SEQ ID NO: 485908 - DNA, 201 bp, Homo sapiens
caactgtctggtagacaatcacccaacccaaataatcacctggatatacagtggtctgtcctttaccccacccctttcatacacgcagttcaagatcaacrtctcagtttctgagttctttatcatcctgctctgtggttgcaggttttgctctttggatgtgagacttgcccttatgtccaatatttcctagttgcaggt

SEQ ID NO: 485909 - DNA, 201 bp, Homo sapiens
tgggattacagagaagtcagccttggagaaccacattatagcatttctgtatatttttcatttgatcctactaatggctttgagatacgcagatgaggaarattgatttcataggggccagatttgtacagttgtgaactggaagacctaggacgaggaacgtgtctgaattagcttttcctaatgagctctccttccaca

SEQ ID NO: 485910 - DNA, 201 bp, Homo sapiens
tcctgttttttcaaagcctaaaattatgtgtgtatacatatatgctttcataaatatgcacatatatacatatatgtacatgcatacatgtgtgataatgtctctctctctctctctctctatatatatatatatgaaaactttcagtgctttatggagatatacatttaagcagttaaggcctaagaccactaaaatatt

SEQ ID NO: 485911 - DNA, 201 bp, Homo sapiens
cctgttttttcaaagcctaaaattatgtgtgtatacatatatgctttcataaatatgcacatatatacatatatgtacatgcatacatgtgtgataatgtctctctctctctctctctctatatatatatatatgaaaactttcagtgctttatggagatatacatttaagcagttaaggcctaagaccactaaaatatta

SEQ ID NO: 485912 - DNA, 201 bp, Homo sapiens
aaattatgtgtgtatacatatatgctttcataaatatgcacatatatacatatatgtacatgcatacatgtgtgataatgtctctctctctctctctctcwatatatatatatatgaaaactttcagtgctttatggagatatacatttaagcagttaaggcctaagaccactaaaatattacccagcatgtacttcagtt

SEQ ID NO: 485913 - DNA, 201 bp, Homo sapiens
tgacctgcttgagggcagtgaagtctgtggttctgatccattagagccagtgtatcagtgaacaaatgggatggtcctacttaaaagaagtaaagatagataggtaggggcatgaaaaataatccacgcctacataaaaatcttggttatctagctctatggctctcataatggcaagtgacacacctacagaatatttta

SEQ ID NO: 485914 - DNA, 201 bp, Homo sapiens
ttcttaatatcaagggtggggagaggacgatattactgccaatactgcagagggtgtacacttgtctggaaatagttcataatttcaagaagggaagatgrtattactcacaatatcataaacaagctgtcggtccaccgtggatcgtaatatccaagggaagagaggggggtgatattactccccatatcgtggggggtg

SEQ ID NO: 485915 - DNA, 201 bp, Homo sapiens
gacctgcttgagggcagtgaagtctgtggttctgatccattagagccagtgtatcagtgaacaaatgggatggtcctacttaaaagaagtaaagatagataggtaggggcatgaaaaataatccacgcctacataaaaatcttggttatctagctctatggctctcataatggcaagtgacacacctacagaatattttag

SEQ ID NO: 485916 - DNA, 201 bp, Homo sapiens
catgcttttgcttgtactgcctgaaatgctgcccttccctttctctacttgcagaaattccattcattctttaaagaatcagttcaagcgtgataactgtkactgaatattctcccaactcttcctgttagatttaacagtgtattctgtgcattcccaaagcactttgttttttgggataacacattgcttatcacatga

SEQ ID NO: 485917 - DNA, 201 bp, Homo sapiens
ctggaaacatcgccaaaacccagcaatttctcagaattttcagaggcgccaggggggtgtttgcatttcaatggaaaaagttctgaaagctctggaaactwttctcagttttactttctcattgaaaggcaaaaaccatggctgtaagtaagagacagaagcatttgctatggctttgttaagaattaagaaaagggacct

SEQ ID NO: 485918 - DNA, 201 bp, Homo sapiens
acctgcttgagggcagtgaagtctgtggttctgatccattagagccagtgtatcagtgaacaaatgggatggtcctacttaaaagaagtaaagatagataggtaggggcatgaaaaataatccacgcctacataaaaatcttggttatctagctctatggctctcataatggcaagtgacacacctacagaatattttagg

SEQ ID NO: 485919 - DNA, 201 bp, Homo sapiens
agctccagtaaggttgaattagttcttgagggaatggattagttctagggagagtagttatataaccaagacatcccttaggttttggctctctttgcacrtgtctgcttcctctttgacctctctgccatgctttgcagcacaaaagcccttgtcagaagccagtgtcatgtgctttaactccctagcctgtggaatcat

SEQ ID NO: 485920 - DNA, 201 bp, Homo sapiens
gcatgatggttgttttaggaaagacacctatgccattatttgagttgtgagctgaactagcagctttttttcccccaaggaatatcattcttacttaaaaraacaatactaataaacaaacatactgattattcagacttgcatatttggtggacattttatcaatgatgtgaccctgtcatttccaggataacaactgaa

SEQ ID NO: 485921 - DNA, 201 bp, Homo sapiens
cctgcttgagggcagtgaagtctgtggttctgatccattagagccagtgtatcagtgaacaaatgggatggtcctacttaaaagaagtaaagatagataggtaggggcatgaaaaataatccacgcctacataaaaatcttggttatctagctctatggctctcataatggcaagtgacacacctacagaatattttaggt

SEQ ID NO: 485922 - DNA, 201 bp, Homo sapiens
gatcatcttctattactaaatgcttccatccacatgttacacaatagcaaacctcattagattagaataattagtttggaaaggaggagaggaagatctakcctgaattatggaagtcagaatttattgaaagcaacattgttttattactttcaatactattacctgccaataaagtctaaggggatatctacttcatga

SEQ ID NO: 485923 - DNA, 201 bp, Homo sapiens
aatacagttgtcttccattaagtcaaacattagatttgcaaaaatataaacaataactcttttcttactcatttttttgtgggttaaaatattatatcacmaaatatgtaatttatgttaatttagttgatttattattattttaggtatgttgataaatattttaaatttttttcagttttaatttctaatgtggtaagt

SEQ ID NO: 485924 - DNA, 201 bp, Homo sapiens
atcacagcagtgaggaaattcaggccaacctgataatacatgaactctacttctaggctgttgcaaaacatgcaaattttttagcctgtgcctttcagaagttgagcaagaatatcattagaactgtatttgaatatagttctatgcttaaaatgggcataaattgaaaagttttagtagctaacgggggaattgggcatg

SEQ ID NO: 485925 - DNA, 201 bp, Homo sapiens
agcaaatccattccttgcagaaaattcaaagctaaatttcagcttagtctagatcaaattctcaagaattctgtattagcagtatctgaattaatgaggtkttactctattcatagaggaagacactttaaacaatagactacagtgcaatgtgccaggaaagtgttaagtacttttaaaataaaaatagaaaaatatgta

SEQ ID NO: 485926 - DNA, 201 bp, Homo sapiens
gttttaatagatataatacacataagcaaatatctctcagtagttaaaatactagaaattattgaggccctcaacaattttcaagagttgtgaagaggttytgagattaaaaaaaaaaaagttagagaaccactgctacaataggtccaatcttaggtgcctacccccatccccaactcaggctaactacagacatgacaa

SEQ ID NO: 485927 - DNA, 201 bp, Homo sapiens
catatattaccatcacatccaaagacatttataaaactttctacacaaagatgcctcaaagcctctcatattttatttgtaacaaggaaaatgatgggaarggagagggtcatgaaataaaatgtgtcatcccctgtgtttctggcctgattaagcttggtgtcacttattaggaaacctggcattaccatgaaaatttgg

SEQ ID NO: 485928 - DNA, 201 bp, Homo sapiens
ccatcacatccaaagacatttataaaactttctacacaaagatgcctcaaagcctctcatattttatttgtaacaaggaaaatgatgggaagggagagggkcatgaaataaaatgtgtcatcccctgtgtttctggcctgattaagcttggtgtcacttattaggaaacctggcattaccatgaaaatttggtatagaaaa

SEQ ID NO: 485929 - DNA, 201 bp, Homo sapiens
acccatttagtcattcgttcagaaaatactgagggcatattatgtaccgggcactgtattgggcatagagtgaatgaaacaaacaaaaacactcatggggycatatgtgaacccaagtcagtctgcctctcaacatagagttctttccactgtctcaaactgtcttctattaaacatttgataaatctcatttttccaaaa

SEQ ID NO: 485930 - DNA, 201 bp, Homo sapiens
tcacctatggggagagaagagcctcagttccttctgagaacaatcttacagagcagtaagaatgtaattatatgactacttagtttttggctttttgggtyacatggttccatttctttcctttaaaacattatatatatatatgtatatatataatatgtataatacaacatattataacatatatactatatgtcatac

SEQ ID NO: 485931 - DNA, 201 bp, Homo sapiens
ccaagctaaattacactagtcaatgcttttggtcaacatagaggtcaccttttaattttccccaatcttttctgctatagagcaaagcactaatactgtcytggcttctgttgctgcaatgcagtctttaggaatttagtcttaagtaaattctggtggagtaactcccgtgtaatccgtttcagtctagcatttgccaat

SEQ ID NO: 485932 - DNA, 201 bp, Homo sapiens
gcatagagtgaatgaaacaaacaaaaacactcatggggtcatatgtgaacccaagtcagtctgcctctcaacatagagttctttccactgtctcaaactgycttctattaaacatttgataaatctcatttttccaaaacttgacatgaaggactcactcctctgccatttcctggaaccatgggctgcttttgcaccttt

SEQ ID NO: 485933 - DNA, 201 bp, Homo sapiens
gttccttctgagaacaatcttacagagcagtaagaatgtaattatatgactacttagtttttggctttttgggttacatggttccatttctttcctttaamacattatatatatatatgtatatatataatatgtataatacaacatattataacatatatactatatgtcataccatatattttatataatatataacta

SEQ ID NO: 485934 - DNA, 201 bp, Homo sapiens
tatatgactacttagtttttggctttttgggttacatggttccatttctttcctttaaaacattatatatatatatgtatatatataatatgtataatacmacatattataacatatatactatatgtcataccatatattttatataatatataactataatgaaatatatattatataatacacttacatatattatat

SEQ ID NO: 485935 - DNA, 201 bp, Homo sapiens
actatatgtcataccatatattttatataatatataactataatgaaatatatattatataatacacttacatatattatatattaatatatattctattstgtattttataaatatataggtaatgttttgctctctgcatgccttttaaaaaatatctttcaacatatgttgactaaaacttgaatgagtactaaagga

SEQ ID NO: 485936 - DNA, 201 bp, Homo sapiens
aatgaaatatatattatataatacacttacatatattatatattaatatatattctattctgtattttataaatatataggtaatgttttgctctctgcaygccttttaaaaaatatctttcaacatatgttgactaaaacttgaatgagtactaaaggatggtgtggcttaagcaatggtaggattaattgtctgtcctg

SEQ ID NO: 485937 - DNA, 201 bp, Homo sapiens
ataatgatcaaatacagcaaggaatcagagtgtttaacttagcttcctgctccttagtgaggtaaattggagaaaacctatctttccaatggttgttgaacctttcacaaacaccataaatctctctctgtgccccacgccccacagatccaggtttttatgtttggtgtagcaggcacatttttcttgattcagatccag

SEQ ID NO: 485938 - DNA, 201 bp, Homo sapiens
tcaagattgctttgctcaccagcatgacacacatcaagctttttcttttgatctgaaataaagtctctttttgttttttatgctatgggccttttctgggyaatctcattcattttgttggctctaatgacaactatattagcactggtgactcctaaatttctgaactgtatttcttacctgagctcaaataagaatgtg

SEQ ID NO: 485939 - DNA, 201 bp, Homo sapiens
tcccccatccgcactgctgcttccctgtttctaacctagataattgcagtagatatccaagaagcatcattgctttggtagctaacagtcatttcaaattkaagataaataaaatagaaatctccttttatcctcagccccccaaatggatcctcttgtgtctgctgtatctcagctaatagtattattcaccagcttgtt

SEQ ID NO: 485940 - DNA, 201 bp, Homo sapiens
gtcctaatatccagtgccatctgccccatctcgctctccatcctcaccctttgcccttccaccttcagttattcattaaacacgtgttttctgagcacaawctgtgctccaggcactgggctgtgcgttggtggtatagctagcaagacagacttggtccctgatcttacggagcatccttgtggtcagggtggggtaggg

SEQ ID NO: 485941 - DNA, 201 bp, Homo sapiens
cttagcttcctgctccttagtgaggtaaattggagaaaacctatctttccaatggttgttgaacctttcacaaacaccataaatctctctctgtgccccaygccccacagatccaggtttttatgtttggtgtagcaggcacatttttcttgattcagatccaggcggactgctttggtgggggagttgtactctgctgac

SEQ ID NO: 485942 - DNA, 201 bp, Homo sapiens
ttggagaaaacctatctttccaatggttgttgaacctttcacaaacaccataaatctctctctgtgccccacgccccacagatccaggtttttatgtttgktgtagcaggcacatttttcttgattcagatccaggcggactgctttggtgggggagttgtactctgctgacatttaaggcaggaattccctgggaaaata

SEQ ID NO: 485943 - DNA, 201 bp, Homo sapiens
ttattattactaatgtcgtgctaaatgtggcaggacctgaaaaattactaaatctgatttcaagcctgagtttccacctgtataaagtggagattaaaatcctggtcctcacagggttgttgtaacaaaacatgagatatggagcactgagtgattagcacaattattgatggcaattattcagaagcattgagtgcttga

SEQ ID NO: 485944 - DNA, 201 bp, Homo sapiens
ttccagcttcaaggacagaaaaggtgtttaaaattctgtacacatggggtatgactggcagagtaggccaaaaaactaggtggttaaaaaaaatgctttcrgaataatgctagaaacagaacactttttaaagaagcagaagtggccataatctgtgaccacaaaaagaaatgactgatctcaacagtcaagttatttagg

SEQ ID NO: 485945 - DNA, 201 bp, Homo sapiens
ccagcctgggtgacagagcaagatcctgtctcataaaagaaaaataaataaataaataagaaactttaacaagcagaccaagagatagagtgctgtgtgcrgttagtaccaaagactagattcatagaatcctcactgtggccattttgatacagactgaattggaacaggacaatgtagaacacagaggaagaacagcaa

SEQ ID NO: 485946 - DNA, 201 bp, Homo sapiens
acctaggttgccctttgatacaacttccacgataaattagttgatcattcaacacatacatatgagcctaatagcatgagcccaattttgtcaagacctgyttcgtctcatgctgccttgatgagatttgtcatctagctcttgaatattcatttttatttgagttactttctatttcaattgggaattatttgtgatttg

SEQ ID NO: 485947 - DNA, 201 bp, Homo sapiens
tctttttgcatagcaagagtgacctttactccagttcccaacgaattcctcatctccatctgagactacctcagcctggactttgttgtccaaattgttaycagcattttggtcaaatccattcaacaagtctctaggaagttccaaactttcccacatcttcctgtcttctgagccctccaagtctccaggaagttccaa

SEQ ID NO: 485948 - DNA, 201 bp, Homo sapiens
aattattgatggcaattattcagaagcattgagtgcttgaatgagagctgtctgtatatttgattgtgaatagttctcacagtgtttattccaaccactattttcttcttggtggtcatgcttttaaaacatctgaaggccatattctcagctttgctttgtcttgtcaatctagatacctttccacaggtacccttcaca

SEQ ID NO: 485949 - DNA, 201 bp, Homo sapiens
cacacctaggttgccctttgatacaacttccacgataaattagttgatcattcaacacatacatatgagcctaatagcatgagcccaattttgtcaagacstgcttcgtctcatgctgccttgatgagatttgtcatctagctcttgaatattcatttttatttgagttactttctatttcaattgggaattatttgtgat

SEQ ID NO: 485950 - DNA, 201 bp, Homo sapiens
ggtggagtaactcccgtgtaatccgtttcagtctagcatttgccaatgtcttagaaaagaggaagactgaaactcagagctttatttatttagtcagtcarcagagtttactgaatgttgactacacgcttggggctgagaaaaacagaagaaacctaagagacactctccctgacccagaggaccatctcatcttgcagt

SEQ ID NO: 485951 - DNA, 201 bp, Homo sapiens
ttgatttctatactgcatggctcaagtgacatacattcactttagaaggttttaagttgcacagtatacaagtatatcatttacagttgattaaaatgttkgtggtcatttctatttaaaagaacaagttaggcatctgtttcttggttagaaataagcacctcatttttttaccctgtgtgaaaatcaggtatgacttaa

SEQ ID NO: 485952 - DNA, 201 bp, Homo sapiens
aaacaggataaaattaacaaagtctggtattcaatcaaagattacaaggtatgtaaaaaagcaggaaagtaagatcaataatcagaaaaataaataaatcwatttaacttaaacagaaattactcagagatgagaattagcaggcaaggatattttaaagagttataactatattctgtatggccaaaaagttaagtaaag

SEQ ID NO: 485953 - DNA, 201 bp, Homo sapiens
ttagggagaaatcggggttgacttctaggttcctaactcagaagatggagtagatggatggtgttgccaccaaataaggagaaagcaggtttgggggttakgtgatgagttcagctttggtcatgttgagttggaagctccagtgagacatctagatgaagcagtcccacaagaaactgggaatctgaatcaaagttcgtg

SEQ ID NO: 485954 - DNA, 201 bp, Homo sapiens
gctttggtcatgttgagttggaagctccagtgagacatctagatgaagcagtcccacaagaaactgggaatctgaatcaaagttcgtgatagaaacatagsctagaaaaagatttcggaaccatcagcctaatggtggagctaaagcaaggagagtggaagagagtccccaagcagagagggtagagcgagctgaatgtgg

SEQ ID NO: 485955 - DNA, 201 bp, Homo sapiens
aattgtctgtcctgctagcctgcctcatttaaatcacctagtctcagtgtgactcatttataatattgctttgctaaccctaattgagataaaaatcttaktggtacttgtcttttaagttattttttagcaaatttcacgtgtgccaaaaaataccagtttacacttgcatcaatgatatgctattctgtttttagaatg

SEQ ID NO: 485956 - DNA, 201 bp, Homo sapiens
tgcatcaatgatatgctattctgtttttagaatgatttaaagcatatatccaagggcatttttaattgtcttgttatgaacttcctggtgtaaggtactgsccattctacttgatttagtaatatctgcattttggaggcaggtatttatgagtcatatagctcatcagtaagtcacaggtccttcagtacaactgatccc

SEQ ID NO: 485957 - DNA, 201 bp, Homo sapiens
gtaagtcacaggtccttcagtacaactgatccccaggggctggacctggatatgtaatgcattgctcccacccaatttattgtaattgcaactctatattyacctgttcacccaggtaatggtagcatgattaaggtcacactatcatggcttagtgataagaatattgtttagactagaacaaaatcttcctccacacaa

SEQ ID NO: 485958 - DNA, 201 bp, Homo sapiens
ctgaacctagtttagtcttatgcatatatattgaattaacctaaatttctgaaagagctatttctgtaagcatcgattaaatgatagggaaataaatacamtttattttttatcttttgaattgtctcctaaggaaaagtatcctctcccacatctcaataatagtaatatagtatatagctctttaaaggctttaactat

SEQ ID NO: 485959 - DNA, 201 bp, Homo sapiens
atatagtatatagctctttaaaggctttaactatatcttttaaatcattgttatttttctgtatatttgtacataataaatatgtaggatgttgggctcastccatacaatcaatatagactgactgactagctacaagatcatgtactgaatagctatgcatattcttccatggttaactgtgaaaataacttgaaaccc

SEQ ID NO: 485960 - DNA, 201 bp, Homo sapiens
aaaaagaattaagacttaatttagataatcaaataaaataggatctttgcctttcattccataacttattctgatcatcgttttttgtggtgaagcatgtkttacctcttgaaacttggcataaacatcataataagtgaataggtctagagctttgatgaaaatttaatttttttaaaaattagcatttcactgatcctt

SEQ ID NO: 485961 - DNA, 201 bp, Homo sapiens
aaacttggcataaacatcataataagtgaataggtctagagctttgatgaaaatttaatttttttaaaaattagcatttcactgatccttatcctgagggktggagagcttcacacagcactgagccaggtagagctcacactcaagtgagagaacacaaatacaaccatggtgtacttttctcaaagaattcaaaataat

SEQ ID NO: 485962 - DNA, 201 bp, Homo sapiens
cataataagtgaataggtctagagctttgatgaaaatttaatttttttaaaaattagcatttcactgatccttatcctgagggttggagagcttcacacascactgagccaggtagagctcacactcaagtgagagaacacaaatacaaccatggtgtacttttctcaaagaattcaaaataattcttctggccatgtgat

SEQ ID NO: 485963 - DNA, 201 bp, Homo sapiens
gtgtacttttctcaaagaattcaaaataattcttctggccatgtgataaattaatttagttgtttgtcatcatccttatctaactgagaatacaaggatakgaaaaggttagagagcttcctaaggctatgtggcagtttgttgttaaagttgaaatagggttacatttggaatgccaaggctttattttcaataatgaat

SEQ ID NO: 485964 - DNA, 201 bp, Homo sapiens
tgatcatcaatatcctcttaattttacacacagatatttggatgcaaagaaaaaaataatcacagtgaagtttaggtcctttggttgctgggtttaaaagwttatcccaatattttcttttgaaagattgatttggtctcaccttgccttttgttttatcttttcttttaaaatcgcctggatgcgccattattaaatgaa

SEQ ID NO: 485965 - DNA, 201 bp, Homo sapiens
aaataggtaagatggggagggataggaaaatattcattaaaaggataccaaaaaatgataaggtgataaaattttatgttatgtggattttgccacaattraaaatatcaaaagaagaaaaatgcaaagagaaaagaagtaatttttaaataaataaataaaaaaggcaggacttctattcagaggctatttccaatagtt

SEQ ID NO: 485966 - DNA, 201 bp, Homo sapiens
gaggctgggatgccctgagaggccacatgagaatgcacaggagggagacgtttactgtagtcctagcctaatcccaagttctattaattcagcaagtgatyttttcaaagggcactctaatattcaaaattctctgcatcttcttatatataccttctgctaaacactatacattttaggagataagaataataatacatc

SEQ ID NO: 485967 - DNA, 201 bp, Homo sapiens
tcttttccctacctatctcggttgctttcttattcctttagcacctgccacagtgctgggctcacaagaagtattctggaatactggcattccattcttcygccatcatcaggagagttgaatcttcagtggcccttcaatcttgagacaggattgcagcaggttcttgtttttttggttctgttctgttctgtttttttt

SEQ ID NO: 485968 - DNA, 201 bp, Homo sapiens
cagtctgcctctcaacatagagttctttccactgtctcaaactgtcttctattaaacatttgataaatctcatttttccaaaacttgacatgaaggactcrctcctctgccatttcctggaaccatgggctgcttttgcaccttttcttctagatgtgcactttccgctaagcttggcaggatctccaaactcctaaactc

SEQ ID NO: 485969 - DNA, 201 bp, Homo sapiens
ggcccctgttcctgtctttatagcactctgttgcttccctgcagaaaatctcacaaaatcaaaaactgtacgtttgtttacttgattaactctcccctcasacagtaagctcccggaggtcaggtacctggacgtttgctcaccactgtatatccagcgcctagcacaatatgggtcaataaacactaatcaaaggaaata

SEQ ID NO: 485970 - DNA, 201 bp, Homo sapiens
gatttacagtattgaatcactgtatgcaatacataatattattaggagagtttcataatttgccatcatcctctcactgcaaaggtgaggataaagaacasaaatcatatgttctgcctccctggaactgaagtccttgctgaaagacagtgaataatgctataaaatcacttgtgatataaagatcattatctaaagtca

SEQ ID NO: 485971 - DNA, 201 bp, Homo sapiens
gcaaaaatgtccatagcagtcctattcataatagcctcaaactagaaacaatccaaatgtcaaaaacaagataatggataagtaatttgtaatgtagtcayacagtagaatatcacacatcaataaaaaaggagtgaatgactgatatatgcaacaatctcaaaattattacggcatgtgaaaggggcctttacaaagtac

SEQ ID NO: 485972 - DNA, 201 bp, Homo sapiens
acctgagctcaaataagaatgtgcccagagcacatggcctcaggttttccacgagcaccaaaacagagcctatctaaatatgaagtcctcctcttcccttycaaacatgctccggctcctgtgccgcctctcagggaatgtggcactcagtcactcaaatcaggggccttggaattcctcttgcattcctccattacttac

SEQ ID NO: 485973 - DNA, 201 bp, Homo sapiens
ttcttacctgagctcaaataagaatgtgcccagagcacatggcctcaggttttccacgagcaccaaaacagagcctatctaaatatgaagtcctcctcttyccttccaaacatgctccggctcctgtgccgcctctcagggaatgtggcactcagtcactcaaatcaggggccttggaattcctcttgcattcctccatta

SEQ ID NO: 485974 - DNA, 201 bp, Homo sapiens
gttgttcccttaaggcaaagaaggacttacccccaccgccttgctgtgggtctgtcactcatgccttccccagccagagtgcagctctcattgcctgcccygcagctccctgtgtgctgggagtcagattacggccacttgtctgattgggtttttggagtgttaggggtggaaagattctgcaccatgtggcaatcgcta

SEQ ID NO: 485975 - DNA, 201 bp, Homo sapiens
tggagtgttaggggtggaaagattctgcaccatgtggcaatcgctaagttatatttgaacttgaagtagcttttctgtacctgatcactgtagacacaggrcatttcaggaatgcaaaaacatttacttaatttttttttttttgagacagtaatttttgaaaatgaggatttccttaaatctttatttgaattctttcta

SEQ ID NO: 485976 - DNA, 201 bp, Homo sapiens
gcatgcctactcttttctatggtcttagatttctaagaaaaatgtgcatctctaaagaaaaaaagttacttgccaatatataaagccttttaatttgtacygatgcttaaaaaaaaaagtttaaacaaaacccagatggaagctgtctaaatgcttgggttagaaagaagattgggtcaaatacaatagcaagtcctaaag

SEQ ID NO: 485977 - DNA, 201 bp, Homo sapiens
ttctgtacctgatcactgtagacacagggcatttcaggaatgcaaaaacatttacttaatttttttttttttgagacagtaatttttgaaaatgaggattyccttaaatctttatttgaattctttctaccatgaagaattgttcagaatttgtcttgtttggttatatgttgtagttgaaattgggcaattattagaaaa

SEQ ID NO: 485978 - DNA, 201 bp, Homo sapiens
taataagggaaacaggtaggttgttacatttataaggaaaacagggctttttataaggaaaagtattcctatatgatttaaataaataaaaatagcagcartaaactttactggctaaccattgctgagcctcaccaaaccacttgagcacatacaaataattttaaatgaagtaataaagaaactaagggccggcgtggt

SEQ ID NO: 485979 - DNA, 201 bp, Homo sapiens
accgtggtttgtacctattacttccagtttgtcatctgctgtcctcaactgtctggtagacaatcacccaacccaaataatcacctggatatacagtggtstgtcctttaccccacccctttcatacacgcagttcaagatcaacgtctcagtttctgagttctttatcatcctgctctgtggttgcaggttttgctcttt

SEQ ID NO: 485980 - DNA, 201 bp, Homo sapiens
cacagatatttggatgcaaagaaaaaaataatcacagtgaagtttaggtcctttggttgctgggtttaaaagtttatcccaatattttcttttgaaagatwgatttggtctcaccttgccttttgttttatcttttcttttaaaatcgcctggatgcgccattattaaatgaataataaccacaataacagctaacatgga

SEQ ID NO: 485981 - DNA, 201 bp, Homo sapiens
tttggatgcaaagaaaaaaataatcacagtgaagtttaggtcctttggttgctgggtttaaaagtttatcccaatattttcttttgaaagattgatttggkctcaccttgccttttgttttatcttttcttttaaaatcgcctggatgcgccattattaaatgaataataaccacaataacagctaacatggattgaatgc

SEQ ID NO: 485982 - DNA, 201 bp, Homo sapiens
tggatactaggaacaatatctcatgggaggtgtacagcccattccattttgggagtaatattaatttcttcattgctggaaataagaaacaatataacagkggtggtgtacacaccctgtgatattgccagtaatagagacttcgccccccccaccggatattaggaacaacatcaaaaaggggtgtatacagcgatattg

SEQ ID NO: 485983 - DNA, 201 bp, Homo sapiens
ttgttttatcttttcttttaaaatcgcctggatgcgccattattaaatgaataataaccacaataacagctaacatggattgaatgcttattaaatatcasacatgctgctgagtgcgttatgtgaaccttatctaatttagtatcataagaatcccatggaaatactaccaggatttctgcatatagaatatagccacat

SEQ ID NO: 485984 - DNA, 201 bp, Homo sapiens
ccccaaatattttaaatccacgtatgatggtatccatggatgcagaaaccgacatacatgaagggctgattgtaatttgaatctcatcatccacctttttmtaatctttgggtttcatatgttctatttccatcaagtccttctttaggtaatactatttaagcaccagttttgaagaacttcctagtcccctagaaagga

SEQ ID NO: 485985 - DNA, 201 bp, Homo sapiens
aactatccttcaggtcaagggatgactattagtgtagaaaaggtgtgtggctcagctcccttccctcagctgccctgctctagcaccttcctttcagatcytctggtcctatagatgcctgaaggtcacaggcagaaatatacaaattctacactaaaagaagttgtacaggaacctttaaacaacagcatcaaaagcatc

SEQ ID NO: 485986 - DNA, 201 bp, Homo sapiens
ggacacttcttcctgccattccggcatgcagctttgacatatccccccaccatctcctctccccaacacttgcttccagccaccttttgatcctttctttmtatatctcataatcattctttttagcttttcagcgctgcagcattctggccaaggtccttagcacatcaaattacaactgtctgcaagctggtatccctg

SEQ ID NO: 485987 - DNA, 201 bp, Homo sapiens
tgtgtggctcagctcccttccctcagctgccctgctctagcaccttcctttcagatcctctggtcctatagatgcctgaaggtcacaggcagaaatatacraattctacactaaaagaagttgtacaggaacctttaaacaacagcatcaaaagcatctgttaaagtaacgctttccactgagtgccttgctagacatggt

SEQ ID NO: 485988 - DNA, 201 bp, Homo sapiens
ttgctagacatggtacaaagtgcattcaacagacacagttcctttcctcttggaagacctaagacattccaatgacaacaacagatattttatattcatawaaagtgagataaatagcacatgaacaaataaattaacgaacctccctgacaaaaaaaatcgaggaaaggaatgcctgcatttattggtaagagaataatc

SEQ ID NO: 485989 - DNA, 201 bp, Homo sapiens
atcctctgaactacagcaggcattgctcgttgggaggaaggcaacggcacaggcatgagcagcatgccaggccaagccctttatatatacatgaactcatstgctcttaaccttaccacgcatgcatcatcactgtccctactttagaggagcaaatgtggctcagagaggttaataacttgtctaggtcacagatttgcc

SEQ ID NO: 485990 - DNA, 201 bp, Homo sapiens
atcttggtggtcgggccatagagtttgtgcttctaacctttacaccacacgatctatcaaagcttctgttgctctaaaaatccttttgtgccactggtctmtagcatttgcaagctccttaagggaaggctctttgtctctgtgctctgtagcctgtgactggcacacagaaacaccccgtatgtgaagccttagaggtcc

SEQ ID NO: 485991 - DNA, 201 bp, Homo sapiens
agcctgtgactggcacacagaaacaccccgtatgtgaagccttagaggtccagagatggagtttagcagtagaaacaagagcaaacccctgacagtgtctstgggctcaaaacacacagagacatacaccttccttcttgatctttcctctactctgacaaaagtgctgactgcatatttcatagatcagaaaaagagtaa

SEQ ID NO: 485992 - DNA, 201 bp, Homo sapiens
ccactccgagtctccattgtccatcattacacactctaagtccatgtgcacacattatttagctcccacttataagtgagaacatgcagtatttgtctttmtatgtctgacttatttcacttaaaataatggcattcagtttcatccacattgcttcaaaggacatgatcttattctttttaatggctgaacagtattcca

SEQ ID NO: 485993 - DNA, 201 bp, Homo sapiens
ccagagatggagtttagcagtagaaacaagagcaaacccctgacagtgtctctgggctcaaaacacacagagacatacaccttccttcttgatctttcctmtactctgacaaaagtgctgactgcatatttcatagatcagaaaaagagtaatactactaataaaaatacccgatacatttccacatttcagaatgtgggc

SEQ ID NO: 485994 - DNA, 201 bp, Homo sapiens
cactagtttttaggaacaatatcacagggggaagtacaccttctggggtattgggaataatatcatcatctcttcttgtagatattaggtacaatatcacgggggggggtgtacaccccttgctctattagaagtaatatcgttctcgcctcttctagattttaccaataatatcacaagcggggtgtacatcccttgtta

SEQ ID NO: 485995 - DNA, 201 bp, Homo sapiens
gcgatactggaagtaatgtcatcctcttccccctggatattaaaaacagtatcacagaggtggtctacaccccccgcgatgtggccagcaatatcatcctytcccccactggatattgggaacaacatcacaggggtgtgtacacctcctgcgctattgggagtagtatcattctctcttcttctggatattaggaataat

SEQ ID NO: 485996 - DNA, 201 bp, Homo sapiens
ttcaagattgcgacagcagagcataaataaaggctgggtgctcctaaaggcaggaccttgtgcagctgcgcaggctgcatgcttatgaagacgtccctgcygaaggagtttggtgaactctagaagggtctaaccattagctacctgcatcaccatctcattattattttttctttaaacagatcttaggtgcatgggatt

SEQ ID NO: 485997 - DNA, 201 bp, Homo sapiens
ttaggtgcatgggattggaataatcagaattcctgatttatgacactctgtcatcactcgtgcatgtatggccctcttattttctaatagttaattataayggcttttaaataatgtaatgaacatctatgaacccaccactcaacccaacatctagaacaatgataataactcacattacctacggatgcctcccttttc

SEQ ID NO: 485998 - DNA, 201 bp, Homo sapiens
acaaattggaaaactgtgagtttctaggcagatgtgctaaatgtcattactctgaccctaagacatttgagtcagaagtattttgagggctgtgaagctawggcacaatgtagccatgtttaggggcttccttgtgaatgagtacggtgggcagatcctcaggaatctacagagtggggctctttagggctaccggtctgg

SEQ ID NO: 485999 - DNA, 201 bp, Homo sapiens
cccatcaaggaaggggtcaccctcattggctccaacccctacacttattagtactctcagcagagtagcttaaaattgaccagggattaactcttcacctrccagaggtagtttttcttattaagtattgctaattaacctttttgtacttgagctgctactactgatcttcctgtgatactgtcagctctatgcaataat

SEQ ID NO: 486000 - DNA, 201 bp, Homo sapiens
tgagctgctactactgatcttcctgtgatactgtcagctctatgcaataatcagctacttatctggcttttctttggactaggggcagaaatttcccacasgattgtctgtggctttgtatgcagaatgcgataatgaaggaaagcagctataatgtgcttgtagtggtggtggaccaccaggaggtgggaagctctggtg

SEQ ID NO: 486001 - DNA, 201 bp, Homo sapiens
aggatagttacatggcatattgatttaaaattggtctttatgccagaccaccttgtgaatctttagttcaatagccttgcgaagttgtgggtcagtaacayatgaggaaccagagagaagcgtaagtgaaaatgacaagtacttagcaaacactagctaattgacacgctttttttgttgttgtttctgaatttttaatct

SEQ ID NO: 486002 - DNA, 201 bp, Homo sapiens
aagcaaggattctagtttgggtagtttgaaacgagagcctgcactcttaccctttacacttgacttccgccagaagtagatacagctttgcaacataccasaggcatatttaaaattagtttcatatcctttgaaaatagctccataaacagtatcagggtacaacaggaatgcctccactatcatcacacactttacctg

SEQ ID NO: 486003 - DNA, 201 bp, Homo sapiens
gggacaagcaaggattctagtttgggtagtttgaaacgagagcctgcactcttaccctttacacttgacttccgccagaagtagatacagctttgcaacayaccagaggcatatttaaaattagtttcatatcctttgaaaatagctccataaacagtatcagggtacaacaggaatgcctccactatcatcacacacttt

SEQ ID NO: 486004 - DNA, 201 bp, Homo sapiens
tggctctcagtggtctgcacctcctgttcttcatgcccttgtgtatccacttgagtgtgggctggatttattgattctttttttgcggggctggggggtgsacagggttttgctctattgctcaggctgaagtgcagtggtgcaaccttggctcactgcaacctctgcctcctgggttcaagtgattctttgcctcagcct

SEQ ID NO: 486005 - DNA, 201 bp, Homo sapiens
ttatttgtaacaaggaaaatgatgggaagggagagggtcatgaaataaaatgtgtcatcccctgtgtttctggcctgattaagcttggtgtcacttattakgaaacctggcattaccatgaaaatttggtatagaaaagcctgggctttgagcctgtactctttatggcagggaaatggagccagggactggggggtgggt

SEQ ID NO: 486006 - DNA, 201 bp, Homo sapiens
caatgtggatgtttacaaccacttcaataactggggaaaaaaagccaaaacctaaataaactgtgttaggcaaagataacagaaaatggagtggaaatccwataagggtgataccagcagaatgtattaaactttcacagataaatgatgaagagatgaaaaggaccgaagaaaaatttgaacaacagccagtcaaaacaa

SEQ ID NO: 486007 - DNA, 201 bp, Homo sapiens
caggaggctccctttttcttatattcacattctctaatagcagagttggattattgcattttttctagtttctcaagttaagaagtagattgggaaattakaattggttacaggctgaattttacatgttaaaggcttttgacttaaaaagatattggtaagaaagagccaagggtttctttttacaaggccaaaagcata

SEQ ID NO: 486008 - DNA, 201 bp, Homo sapiens
atacatttccacatttcagaatgtgggccagataatgaagaaaggtctttgaacagtacagcctccgtccttccctctcttccttcttttcttccttcttktgtcacttgctcaacaaacatttgttttatgcacaccctgtgccagaacaacgcacctcagggtttgttactaatggtttctactgagctgctaaaagac

SEQ ID NO: 486009 - DNA, 201 bp, Homo sapiens
gcagatttaattactggtagtgctgcctaaggcaagcagtcctatcagtgctaaatctgtttaaaaaaagtccacacttttcttggggaaaaaaaaggttktataatttataagagttcataatgaatattttaccaagggcagaaaatgagcaaagaggtatgaaagaggctatgggattatttcctagcaacccatcgg

SEQ ID NO: 486010 - DNA, 201 bp, Homo sapiens
agggcttggcagatattatctcacttaatccttattaaaactctatgagataaaaagattattatctccattttacatataaggtgagaaaggtgaaggtsataggactcataagggacaagcaaggattctagtttgggtagtttgaaacgagagcctgcactcttaccctttacacttgacttccgccagaagtagata

SEQ ID NO: 486011 - DNA, 201 bp, Homo sapiens
tcttttcttccttcttttgtcacttgctcaacaaacatttgttttatgcacaccctgtgccagaacaacgcacctcagggtttgttactaatggtttctamtgagctgctaaaagacagagccaagtgatattaggtgattaccaaaagcaacaaaaaaattgctaaaatgtattgtgagcataccaccaggtagacatta

SEQ ID NO: 486012 - DNA, 201 bp, Homo sapiens
taccctttacacttgacttccgccagaagtagatacagctttgcaacataccagaggcatatttaaaattagtttcatatcctttgaaaatagctccatamacagtatcagggtacaacaggaatgcctccactatcatcacacactttacctgaaagcaggtgttcccagggctttattcaattcatttgtaaaattaaa

SEQ ID NO: 486013 - DNA, 201 bp, Homo sapiens
aatgaggtttctttgaatagcccagcacccttgctatcagttcctgtcaccgtggtttgtacctattacttccagtttgtcatctgctgtcctcaactgtstggtagacaatcacccaacccaaataatcacctggatatacagtggtctgtcctttaccccacccctttcatacacgcagttcaagatcaacgtctcagt

SEQ ID NO: 486014 - DNA, 201 bp, Homo sapiens
gactggttcttgacctacactggttcttgaggagagtaaagatcacctggtggccacaagcagatcatctggaggcaaaactccttatctgaggacaaaaycaactcacttcaagaatgactgaggggaacacaccccaaggatgaagtcaccaagcctctgaattaatgcaccacgggaccaccctgcatcaggttttct

SEQ ID NO: 486015 - DNA, 201 bp, Homo sapiens
ctacacctctgaaatgtaatactgtgaggaaaacttataacttgccaattattagtaggtaaataatgtatcttgctcatataaagacagaaaaatatacraattgtattaatttgttctcacactgctataaagacataaccgagactgggtaatctataaagaaaagaggtttaattggctcgcagcctgtgggctgta

SEQ ID NO: 486016 - DNA, 201 bp, Homo sapiens
acaccccctgcgatattggtagtaacatcattctctcccccacttgatattacaaaacaatatcccaagaaagggtgtacaccctctgagatattgagagyattatcatcctctccccaactaaatatgaggaacaatgttggtgggggggatgtacaccccttgcgatattgggagtaatatcctctccctccctggata

SEQ ID NO: 486017 - DNA, 201 bp, Homo sapiens
agagttaatggcatggaaaagtagtaaaaggttggattagaaggtttaatacttttgatctctcagcccattgcagtttacttactccttaggagacacasatgggacacggcaggtgtgtgtaaggagcgaagcaattcatgaatactcagccatgaaatagaaaatcaaaatgaaataagtatgactgcaactatcttg

SEQ ID NO: 486018 - DNA, 201 bp, Homo sapiens
tcttttccccagtaaagtgattgtactgattcctttgtaaatttggtcgcttggaaagttctaaggattgagcaaattgcttttaaagaatctccattttstgcatatgtatgtcacctactcaaaatcttattttccagtttaaattattttctaactaatatgttatacttccctcagcaatccctcaactgtaagaaa

SEQ ID NO: 486019 - DNA, 201 bp, Homo sapiens
tccaaacgtttgagaaaatccgaaaactggatgtcctgtacatacatttccattgaagtttatggcagtttctgggcacaatcacatcaatattgcacatmtatagatagtttacaggttacataactgtggttttggatttaattgccaacttgttaccctgatagtaattccagacaggggaataacagagcgaagggg

SEQ ID NO: 486020 - DNA, 201 bp, Homo sapiens
aatatggaaagactgtgtgtgtgtgtgtatgtgtgtgtgtgcatttgtgtccataataaaagagaaatcttatgtgtccataataaaagagaaatctattktgctaatgagagtttccaatcaacaaattttgccttgtgaattacagttttaaagtactttcaattgttaaatttattgctatttaaaatcctatttagg

SEQ ID NO: 486021 - DNA, 201 bp, Homo sapiens
gtgaaaggattttatgtactacattgtaagaggaggaacagagaagtttaactgggccaatttgaaaaccaactggtctgtagaagtctacataaaactgyagaaactgcatagcttctgtgtggtcaatggtataaaagaatgaggagtttattttataatttatggctggattcatgctgctgattaaacaccagcctc

SEQ ID NO: 486022 - DNA, 201 bp, Homo sapiens
agggtcatgaaataaaatgtgtcatcccctgtgtttctggcctgattaagcttggtgtcacttattaggaaacctggcattaccatgaaaatttggtatakaaaagcctgggctttgagcctgtactctttatggcagggaaatggagccagggactggggggtgggtagcattggaaaatgaccatcacaaggaagacaa

SEQ ID NO: 486023 - DNA, 201 bp, Homo sapiens
tttctactgagctgctaaaagacagagccaagtgatattaggtgattaccaaaagcaacaaaaaaattgctaaaatgtattgtgagcataccaccaggtakacattaggcaagggcttggcagatattatctcacttaatccttattaaaactctatgagataaaaagattattatctccattttacatataaggtgagaa

SEQ ID NO: 486024 - DNA, 201 bp, Homo sapiens
tgtgggtttccaaagttgtgtatatagctaaccatgctctcaagattcacccccccatctctgaattgtctaatcacatctactttgctcttagaacaaayggaagttctaatcatttctccctagtagatgatcttgcataccccttgggatatgagcaacccacattggagatcagtgcccccaaaggttataaagcat

SEQ ID NO: 486025 - DNA, 201 bp, Homo sapiens
agcaagaagcaaggacaacactcaggtttttattagggaatctggcagatgatagcattattaaagatacaatgagaatacagcaagacctcatctctacttttttttttaattagctgggtgtggttgcatgtgcctgtagtcccagctactcaagagactgaggtgggaggattgcttgagcccttgaattcaagacag

SEQ ID NO: 486026 - DNA, 201 bp, Homo sapiens
ctgtaataaagaggaagatacctgtaggttacagaagctgacatgacaattacggcagattgaataatggcccccaacatgtccacatcctaatcagcctrtgaatacgggacctttcatgacaaagggactttgcagatgtgattcagttaaggatctgtggatgggaagcttatctggacacagccagtgtaatcataa

SEQ ID NO: 486027 - DNA, 201 bp, Homo sapiens
ctgttacccaggtcttaacagccagcatgactggctcttcattcttcagctctcagttggaaagtcacctctgtagaaaggctttccctattcaccctgtmtaggttatttccctccctttcaaaatatttcctgcagaaccctgcttatttttctcatagcactaatcacactgagaaatgattttatttatttccttct

SEQ ID NO: 486028 - DNA, 201 bp, Homo sapiens
accctgtctaggttatttccctccctttcaaaatatttcctgcagaaccctgcttatttttctcatagcactaatcacactgagaaatgattttatttatytccttctctgttgtctttttcaccccactctacctccattgcactagaatataactgcagagaggtcttatctttcttgctctctgtggtactaagcaca

SEQ ID NO: 486029 - DNA, 201 bp, Homo sapiens
agatggagtagatggatggtgttgccaccaaataaggagaaagcaggtttgggggttaggtgatgagttcagctttggtcatgttgagttggaagctccastgagacatctagatgaagcagtcccacaagaaactgggaatctgaatcaaagttcgtgatagaaacataggctagaaaaagatttcggaaccatcagcct

SEQ ID NO: 486030 - DNA, 201 bp, Homo sapiens
taggttatttccctccctttcaaaatatttcctgcagaaccctgcttatttttctcatagcactaatcacactgagaaatgattttatttatttccttctstgttgtctttttcaccccactctacctccattgcactagaatataactgcagagaggtcttatctttcttgctctctgtggtactaagcacactgcctgg

SEQ ID NO: 486031 - DNA, 201 bp, Homo sapiens
gaatcctgcttcccaatctctcatagtactcagggcagagcatctcatctgagccaggcagagatgacaaatgcctccctgagcttagtttagggattagraagtgttggggaggtgaaggggggtaggtgggtgccctaatagagggacaagctgagtagacccaggaggaagaaaactatccaatgttagggtattatg

SEQ ID NO: 486032 - DNA, 201 bp, Homo sapiens
ccctgcttatttttctcatagcactaatcacactgagaaatgattttatttatttccttctctgttgtctttttcaccccactctacctccattgcactakaatataactgcagagaggtcttatctttcttgctctctgtggtactaagcacactgcctggcgcatagaagatgttaaggaaataattcttgaataagta

SEQ ID NO: 486033 - DNA, 201 bp, Homo sapiens
aaatgattttatttatttccttctctgttgtctttttcaccccactctacctccattgcactagaatataactgcagagaggtcttatctttcttgctctstgtggtactaagcacactgcctggcgcatagaagatgttaaggaaataattcttgaataagtaaatgtgcttctaatttaatagcggtcttctaaacaac

SEQ ID NO: 486034 - DNA, 201 bp, Homo sapiens
ctgtgcctttcagaagttgagcaagaatatcattagaactgtatttgaatatagttctatgcttaaaatgggcataaattgaaaagttttagtagctaacrggggaattgggcatgatcagatcaacttattgaatttgcttgattgatgagctactaggcattgctagtccattatggggtttccagtctttagaatcta

SEQ ID NO: 486035 - DNA, 201 bp, Homo sapiens
acagtcaaccactgacttcagtcgaacgtacttggaaagggaagaacttaaaccagccatgaacagaagaaagccaggttttctggaaacatcgccaaaayccagcaatttctcagaattttcagaggcgccaggggggtgtttgcatttcaatggaaaaagttctgaaagctctggaaactattctcagttttactttct

SEQ ID NO: 486036 - DNA, 201 bp, Homo sapiens
ttattttaacagagcagagagtgctcattggtgtaaacagacaagcttcaaacagttcatagaatcaggcacaccaatgccctgagtgcagggccgtgagyggaaggtaagggatgccgcccaggcagaatagaagagccagggccccatgaagaaaactttgagccattctcaggctggggaaaaaaacagacaagagca

SEQ ID NO: 486037 - DNA, 201 bp, Homo sapiens
ggtgctcctctttataagtattctgtatcaggttgtccttaatagcatataataattctttatatccttaaggtcgatgacttccattatgaatattatamagttgagactttgggagttttctgatatgtttacatcacctccctctcttcccttctttttgtttccaaggaaaaaggggcttcccattttagtggattc

SEQ ID NO: 486038 - DNA, 201 bp, Homo sapiens
tcttagtcaatttcttcctacaggaaatagcatgatataacaaaaggaacacggatttggagttcgatggactaacttctcatcctacccagggatgcttstgagccatgtaatctgggaatgaggtcttgagtaccttctcattacatgtgctttttgttctcacctcttctctctttcgtgtgtgtgtgtgtgtgtgtg

SEQ ID NO: 486039 - DNA, 201 bp, Homo sapiens
aactcagaattctctacaaattctgaaagtcccctgaataggccacttctaatcccaagcttgaaacagccctcatccttctgtttgaaaaattcatatakattcttcaagatctaagatggtttcttctctcagtttcagagtggccatcctctgaactacagcaggcattgctcgttgggaggaaggcaacggcacagg

SEQ ID NO: 486040 - DNA, 201 bp, Homo sapiens
tgagagctatttagaaataggaatttttagctgtcatacttagctactaccttgatcctttgttttaaaaccctgtattcattgtttataactacactgcaaaaaaaaaaaaaaatagccaagcatcagatctggactttaataacgacaatagcaatcacaatcatcatcgtcataataaatgacaattttcaccactat

SEQ ID NO: 486041 - DNA, 201 bp, Homo sapiens
ttaatgatttcagtttatgttaaatgctttctccgttaatttccttggcacttcccaagttatttccttcaagaagaaaatttgaaaggtactcagatttmtatgacttcacaaggaattcataaaaaggtcaagctctcaaatggctatcccttcaataaaattatgttaaattgttcaaaatgtttgtacatgggtcat

SEQ ID NO: 486042 - DNA, 201 bp, Homo sapiens
ttaatagaaatagcagttctcttctacacacccatatatcattggtttacataattatcattgaataattatatgaactagcaaaactggcacagcacatstgggtacaaacaccactgacgcttggtccacatacatctccacaggagggatcaggagtttacaggcgggctagagggcatccggtactgaggtggctgt

SEQ ID NO: 486043 - DNA, 201 bp, Homo sapiens
ctttgtttcctttcccacatgacccattggtaggtccagagcaccttctccagggcgtctccagcatgtttcttccttggccattaccatggttgggtgcytaaaattgcccacagtgagattatcatgtctgcctctaaaccagtgtctctgcctccagtgtctcccactttcaacccagactcaccctgctgtgatgtt

SEQ ID NO: 486044 - DNA, 201 bp, Homo sapiens
tggggtcccacaggtatttgtctccatcatcagcttgtggcaatgagtgggcgtactctgaagccctcctatgctctaataatggcagaactgtttatackataaaccatatttcatcctcattgtccaccaatatttactaaaagggattatggactttcttctttgaaaatactgggaagcttgcgatgcacattacat

SEQ ID NO: 486045 - DNA, 201 bp, Homo sapiens
tgtggtgggttgggtgtgctgctgcagaccagaaagggggctcaagacagttctcctggtcagcaggagaacagagcaaaagaagatagaagaaaccacamagtgattaaatagttttagaaaaaagacaattcttgcaaaagaagagcactctgattctgttttccttgagttaacccatgtatttcttgactttgtacc

SEQ ID NO: 486046 - DNA, 201 bp, Homo sapiens
acagattttaaaccaaaaacagtaaaagaggacaaagaagggcactacataatgttaaatggttcaattcaagaagacttaattattctaaaaatatacayacctaaaattggagcacccagatacatagaacaagaacttctagttctccaaaaagacttgacagccacacaatgatagtgggggacttcaataccccac

SEQ ID NO: 486047 - DNA, 201 bp, Homo sapiens
tgggcctccaaatgtgctgggattataggcatgagccaccacgcctggccttctggagctcttttgaattcattcatttcttttctttataaattacccartctgtagtattatgttatagcaatacaaaatgaactaagacagtgaccatcatacccaagattcaaggagccctcccaaccagctattaagatttgctcc

SEQ ID NO: 486048 - DNA, 201 bp, Homo sapiens
agttttgtaggtttggtgtatgagaaattctgaagcagccccaaagtagaggagaagagaagagaagttaagaagaaaaggaaagaaacttttgagaaatrtccctatgtgcaatgaattacacctctttcaagtcctgcaagggacccaattgaatatggaagttctcttttaatttctttggctattgcttttactatt

SEQ ID NO: 486049 - DNA, 201 bp, Homo sapiens
gaaaagaaagcaataaagaaaatctctctttgatcaatttcttctccttgacttctccctaagaagacttctgtctttgtcagaccaatctgaggactcaytgtgatttagaacctggagagtctcataataaagaacagagagaaaggaggatgatctgcagaaaagttatgcatgtttactgagagaaagttttgtagg

SEQ ID NO: 486050 - DNA, 201 bp, Homo sapiens
catgctttcgttttgaatacttgaaaaaaaatgaaatttgtttagcatttggatctgaggaagcaggatgcctctttagtgcctggctcatagacggcackaaagacatagttgttaaatgaataaaagatgcaaatactagtcactttaagcataggaactgttcgccttccagtaatttatggaaatgaagttttatta

SEQ ID NO: 486051 - DNA, 201 bp, Homo sapiens
cctgatgcaagggggtgagaattcaacttattttaataaactctaaatgcatactatgttaaatgtgcattaaatatataatatgatatttaaaatcttckatcatacttttaaaaaagccattacctgctatcttaccactattcctgccaccaaaaccaccacacatcgagcacctactaagaactaggcactgcactg

SEQ ID NO: 486052 - DNA, 201 bp, Homo sapiens
actgttttattagataaggttctcctgagccaagatttcagttgcaagtgatgtagtgatcaattgcttccaggagaagccagtgagggtggggggaagasacatagggaacaggaaggagcccacactcagcctgactttcctttttacttgtataaatgtatggcatacaagtataattttgttacatgcagaaattgt

SEQ ID NO: 486053 - DNA, 201 bp, Homo sapiens
gtcattagcagagtccaaggcaagtaattaattgtaataaccaaccacacaattggaattaatgcttttcttgctctcacatagctgtttataaatactayagtaaagagtacagagaagcaagaggttcattaccctgaagtccctgaatattatgagatttctaggatttacaggtaatttactaatcaatactacctg

SEQ ID NO: 486054 - DNA, 201 bp, Homo sapiens
gatggtctcaatctcctgacctcgtgatccgcccgtctcagcctcccaaagtgctgggattacaggcgcgagccactgtgcctggccagtaaaagtaactyctattgtattttatactttaactatgtatgcatttgataaaattcattactttgataaaattattaaaacgtttaaaatggaaggacaaggaggaagagc

SEQ ID NO: 486055 - DNA, 201 bp, Homo sapiens
accccatcctaaatgataaatttttctatgcacatgtagcattcttcattggggaaatatagaatcttattcagttaacaatgtgtaacaacttcttagayaacgatattatcacctcaaaatttgatattaagctttgcacagataagtttattcacacattaatctttggatgagattgggttcctttgggacatactt

SEQ ID NO: 486056 - DNA, 201 bp, Homo sapiens
caatctcctgacctcgtgatccgcccgtctcagcctcccaaagtgctgggattacaggcgcgagccactgtgcctggccagtaaaagtaacttctattgtrttttatactttaactatgtatgcatttgataaaattcattactttgataaaattattaaaacgtttaaaatggaaggacaaggaggaagagcatgagttt

SEQ ID NO: 486057 - DNA, 201 bp, Homo sapiens
tatttgaagagatatgcattcattttaaaagttaataaaacaatataattagtatgttaaaacttttgtactaatttatggatatccttgtttagggtaamtgtaagtaagcatttttaagtcaatttgaggaaaagtattagtaatttatagaacagattgatggccatggcaaaatttatgaaggtgttgtgatgatta

SEQ ID NO: 486058 - DNA, 201 bp, Homo sapiens
acctcgtgatccgcccgtctcagcctcccaaagtgctgggattacaggcgcgagccactgtgcctggccagtaaaagtaacttctattgtattttatactytaactatgtatgcatttgataaaattcattactttgataaaattattaaaacgtttaaaatggaaggacaaggaggaagagcatgagtttaggtatccta

SEQ ID NO: 486059 - DNA, 201 bp, Homo sapiens
gtggccaagaaacatgtgagaaaatgttccacatcatcaatcacaagagaaatgcaaatcaaaaccattatgagatattatctcacaccagtcagaatagstattggtttacaaattaaaaacaacaacaacaacaacagatattggcaaggctgcagagaaaagggaatgcttatacactgtcggtgggaaggtaaatta

SEQ ID NO: 486060 - DNA, 201 bp, Homo sapiens
aaatagttttagaaaaaagacaattcttgcaaaagaagagcactctgattctgttttccttgagttaacccatgtatttcttgactttgtacctcactggktcaaaacaaaagggttttagcatacaaattttgctaatagaactggtttttctaactctaaaattgaggaaatcttgaaagggcatcgcgtctctccagc

SEQ ID NO: 486061 - DNA, 201 bp, Homo sapiens
caaaacaaacaaaaaacaaataatcccactgagaaatggtcaaaagacatgaacagacacttctcaaaagagtacatacaagtggccaagaaacatgtgaraaaatgttccacatcatcaatcacaagagaaatgcaaatcaaaaccattatgagatattatctcacaccagtcagaataggtattggtttacaaattaaa

SEQ ID NO: 486062 - DNA, 201 bp, Homo sapiens
aaagacaattcttgcaaaagaagagcactctgattctgttttccttgagttaacccatgtatttcttgactttgtacctcactggttcaaaacaaaagggktttagcatacaaattttgctaatagaactggtttttctaactctaaaattgaggaaatcttgaaagggcatcgcgtctctccagcaaacagtaacaacac

SEQ ID NO: 486063 - DNA, 201 bp, Homo sapiens
attctgttttccttgagttaacccatgtatttcttgactttgtacctcactggttcaaaacaaaagggttttagcatacaaattttgctaatagaactggkttttctaactctaaaattgaggaaatcttgaaagggcatcgcgtctctccagcaaacagtaacaacacagaagaacccatgatgcaatggtcccatgggg

SEQ ID NO: 486064 - DNA, 201 bp, Homo sapiens
agctgcctacaagctcccccatctgttcaaatggaaaaacttcacagagccctagggtgctgggcagcgcagattccagcttctgtttttaaggagtattaaaaaaaaaaaaaaaaggaaacaattatttcagtgtctctacaaatgaaaacatctatttcaactcaaagaatattttgtaaaagtagaatgtagtgagta

SEQ ID NO: 486065 - DNA, 201 bp, Homo sapiens
acagtgcgtagaaggccccgggttcaagtagtctcataaaagctggagaaggtgttgctttagatcaagcttatccaacctgcggcctgcaggcggcatgmggcccagaatggcgttgaatgtggccgaacacaaatttgtaaactttcttaaaacatgacattatgtttttttgcaatttttaaaagcgtatctgctatt

SEQ ID NO: 486066 - DNA, 201 bp, Homo sapiens
agcatttttgattaatttaaaggaaaaccacagacatttaaaataaaaaatagaagcagaacgctgatgtggctaacacaagttggacaacatttattaaygttctaatgctttataaaaattggagaccaaatagaaatccatataatttcctttattttattgctcatatctaacttagccactaagaaattagtgcaa

SEQ ID NO: 486067 - DNA, 201 bp, Homo sapiens
cttgattacaacaaattcttccagcctcgcggacattccctttacctagaacatgttctctcctttttcatgtcttagctcaaatgtctcccgttggagasgctttccctgacctcaaggaggcctctcctgtttatcgttggtctcaccactccctgtatttccttcatggtggttactgcagtctgcagtcctatagtt

SEQ ID NO: 486068 - DNA, 201 bp, Homo sapiens
tggtttgggataagtgaagaccatccttccagctgtcacttttttttgtcatctatcaacattccacagctggagctagttactgagaagttaggccacaygttgaagctacatgtaaactttatccaagcttttctaacagcccttcgagtcttttaaaatcctaacatataaggtggaaaatgtacaatcttcccttat

SEQ ID NO: 486069 - DNA, 201 bp, Homo sapiens
tcaagatgagtggttagctaggtgactttgggtatagagatgcaagttggggaaatggtattatagaatgtgatgaggctgggaataacaagttcagtgtyagacctactgactttgaagtactatggggacaaggagcttgtaagaggtcagaaaatttaactatcctaatatatacgcatctgacattggagcatccag

SEQ ID NO: 486070 - DNA, 201 bp, Homo sapiens
tgtccagtgtgctcctagagatgactgggctcagctgacaggcataagaactgcttacaaaccaatttatgaaagtaaaaaataaataactatgcattaawtgtgctgttggatttttaaaatcttgttagccagagtcgtttactcaacaataaacttacaaagggcaaatccccatagaaaccattatggggaaaacag

SEQ ID NO: 486071 - DNA, 201 bp, Homo sapiens
aaacagccctcatccttctgtttgaaaaattcatatagattcttcaagatctaagatggtttcttctctcagtttcagagtggccatcctctgaactacascaggcattgctcgttgggaggaaggcaacggcacaggcatgagcagcatgccaggccaagccctttatatatacatgaactcatctgctcttaaccttac

SEQ ID NO: 486072 - DNA, 201 bp, Homo sapiens
agattcttcaagatctaagatggtttcttctctcagtttcagagtggccatcctctgaactacagcaggcattgctcgttgggaggaaggcaacggcacasgcatgagcagcatgccaggccaagccctttatatatacatgaactcatctgctcttaaccttaccacgcatgcatcatcactgtccctactttagaggag

SEQ ID NO: 486073 - DNA, 201 bp, Homo sapiens
gaaaatcagatctaggcccagcttacagttatggaagttctagtgttcttcagggcagagcttctcaggcagcagactgtgggccgtaaacaggtatgccwctgtatttgccccctggcttctgggtctaccagtcagggcctgggccagcccaaatctctaagctcattgccttcccacctccagcagagcagtcttgtc

SEQ ID NO: 486074 - DNA, 201 bp, Homo sapiens
agatctaagatggtttcttctctcagtttcagagtggccatcctctgaactacagcaggcattgctcgttgggaggaaggcaacggcacaggcatgagcascatgccaggccaagccctttatatatacatgaactcatctgctcttaaccttaccacgcatgcatcatcactgtccctactttagaggagcaaatgtggc

SEQ ID NO: 486075 - DNA, 201 bp, Homo sapiens
gcgtggcactaagaatgaaatccagtttcttcccacgacccagaagacggccgagcttcaccctctggcttcaccccctggcaccccgctcctcgtttacygaagccagctacactggcctccttttggtcacttgattacaacaaattcttccagcctcgcggacattccctttacctagaacatgttctctcctttttc

SEQ ID NO: 486076 - DNA, 201 bp, Homo sapiens
gatggtttcttctctcagtttcagagtggccatcctctgaactacagcaggcattgctcgttgggaggaaggcaacggcacaggcatgagcagcatgccasgccaagccctttatatatacatgaactcatctgctcttaaccttaccacgcatgcatcatcactgtccctactttagaggagcaaatgtggctcagagag

SEQ ID NO: 486077 - DNA, 201 bp, Homo sapiens
ctgggagggtaaagatggaggcagggggcggcggcgagcaagacagtgatccagatgagagctgaggcggctcacccggggatggcgcttttccttgccaygggctctgataccagatttcctttcaagtgtgtgttttaaaatgcagttttggcttccaacactgcgtggcactaagaatgaaatccagtttcttcccac

SEQ ID NO: 486078 - DNA, 201 bp, Homo sapiens
gatagatagcccttaattgaaaatgcagactaaagaagagggaaagtgtccagtcctaagtttccagcagtagcaaggaggtgacacttactgaactgagrgattttggaagagggccaggggtgaggcaggtagcactaatggcatatcaataggcaggtggttacgtggctctcatgttctgaagataagcaagtgaag

SEQ ID NO: 486079 - DNA, 201 bp, Homo sapiens
ccctactttagaggagcaaatgtggctcagagaggttaataacttgtctaggtcacagatttgccaagtgctggacccaaatcttggtggtcgggccatakagtttgtgcttctaacctttacaccacacgatctatcaaagcttctgttgctctaaaaatccttttgtgccactggtctctagcatttgcaagctcctta

SEQ ID NO: 486080 - DNA, 201 bp, Homo sapiens
ttggtggtcgggccatagagtttgtgcttctaacctttacaccacacgatctatcaaagcttctgttgctctaaaaatccttttgtgccactggtctctakcatttgcaagctccttaagggaaggctctttgtctctgtgctctgtagcctgtgactggcacacagaaacaccccgtatgtgaagccttagaggtccaga

SEQ ID NO: 486081 - DNA, 201 bp, Homo sapiens
atagagtttgtgcttctaacctttacaccacacgatctatcaaagcttctgttgctctaaaaatccttttgtgccactggtctctagcatttgcaagctcyttaagggaaggctctttgtctctgtgctctgtagcctgtgactggcacacagaaacaccccgtatgtgaagccttagaggtccagagatggagtttagca

SEQ ID NO: 486082 - DNA, 201 bp, Homo sapiens
tatgtgaagccttagaggtccagagatggagtttagcagtagaaacaagagcaaacccctgacagtgtctctgggctcaaaacacacagagacatacaccytccttcttgatctttcctctactctgacaaaagtgctgactgcatatttcatagatcagaaaaagagtaatactactaataaaaatacccgatacatttc

SEQ ID NO: 486083 - DNA, 201 bp, Homo sapiens
cttggcagatattatctcacttaatccttattaaaactctatgagataaaaagattattatctccattttacatataaggtgagaaaggtgaaggtcatakgactcataagggacaagcaaggattctagtttgggtagtttgaaacgagagcctgcactcttaccctttacacttgacttccgccagaagtagatacagc

SEQ ID NO: 486084 - DNA, 201 bp, Homo sapiens
caggtgttcccagggctttattcaattcatttgtaaaattaaaaattagcaccaagcaatctccagaattcctcccagacacagaccttgtattattccasaaaggcagctgttgggcagtgagtgttcactaatcttggagtcagaatgaggtttctttgaatagcccagcacccttgctatcagttcctgtcaccgtgg

SEQ ID NO: 486085 - DNA, 201 bp, Homo sapiens
atggaaactataaacaaacaaacaaaaaagacaaatgcctgcagttcagcaaggtagaacaagttttcccaaatcacacagacaggatgtagtgaacttakaactctactccaggtgatatatttccaagttcagagtccaaaataaaacaaaaggtacagtaattataagtcaatttaattctcaatagttttggacatg

SEQ ID NO: 486086 - DNA, 201 bp, Homo sapiens
tttattcaattcatttgtaaaattaaaaattagcaccaagcaatctccagaattcctcccagacacagaccttgtattattccagaaaggcagctgttggrcagtgagtgttcactaatcttggagtcagaatgaggtttctttgaatagcccagcacccttgctatcagttcctgtcaccgtggtttgtacctattactt

SEQ ID NO: 486087 - DNA, 201 bp, Homo sapiens
gtattattccagaaaggcagctgttgggcagtgagtgttcactaatcttggagtcagaatgaggtttctttgaatagcccagcacccttgctatcagttcstgtcaccgtggtttgtacctattacttccagtttgtcatctgctgtcctcaactgtctggtagacaatcacccaacccaaataatcacctggatatacag

SEQ ID NO: 486088 - DNA, 201 bp, Homo sapiens
gtgtgtgtgcgtgtatatgcgtgtgtgggcattccgtggagcttacttcaagctcctaaaattccacattcaacaggcgcaatccccactctggtatcaamgtctccatggtggagaaacccactgaagtgtggattcactaaaatatgaatagttgacaatgctacctctttatgacattttctgcttaagtatcccttt

SEQ ID NO: 486089 - DNA, 201 bp, Homo sapiens
ggcaatatcaaacacagcatgaaagcaggagagagcacatattatgctttccgtattccagtcccccttgtgtgtatgtgagcatgtgtacgtgcatgtgkgtgtgcgtgtatatgcgtgtgtgggcattccgtggagcttacttcaagctcctaaaattccacattcaacaggcgcaatccccactctggtatcaaagtc

SEQ ID NO: 486090 - DNA, 201 bp, Homo sapiens
ctctttttgtactacatttgcttgcctcctccaccattccagattcaaatgatttatgtgattgcttctcagtctttctgggattgctgcaatttttagaygttatttcggttcaacctgtcacataaaaactgcagagaaaagtccaatctccctgagatagattgagtcaaagccagcaaagccgggtcatttgaacag

SEQ ID NO: 486091 - DNA, 201 bp, Homo sapiens
gaattaacctaaatttctgaaagagctatttctgtaagcatcgattaaatgatagggaaataaatacaatttattttttatcttttgaattgtctcctaargaaaagtatcctctcccacatctcaataatagtaatatagtatatagctctttaaaggctttaactatatcttttaaatcattgttatttttctgtatat

SEQ ID NO: 486092 - DNA, 201 bp, Homo sapiens
gagaatacttaagatctgggcattttattgcaaattatacatcaattttaaaattaagagattctattattttgtttaaaattgtattactgaacactgtktggaatatttccctactttctaggcatgtgaaacatttttagaattcttgtattttataaatttatcaacttagtttatcaagtatgatgacaacattaa

SEQ ID NO: 486093 - DNA, 201 bp, Homo sapiens
attaagagattctattattttgtttaaaattgtattactgaacactgtttggaatatttccctactttctaggcatgtgaaacatttttagaattcttgtrttttataaatttatcaacttagtttatcaagtatgatgacaacattaatgcatccagtttccttagattaagcctcaatttattgtgaagttcaaaaaca

SEQ ID NO: 486094 - DNA, 201 bp, Homo sapiens
gtttcccttttcgtagtacaaatgtggctgtcgtagggacaaacaatccaactttcgatcaatttattttaattaggcagaaaggagggtttcttgagcasgtctaggacaccataataaattactgtttttctttatgaattaatttataattggaaaaattcacagtcccttagaataaaatcaggcctctccaaatta

SEQ ID NO: 486095 - DNA, 201 bp, Homo sapiens
gagggaaggagaatttcctcaggcgaggattaaggagggaaaaggccagagagaaagaggccacaagaaagcaatgaaaagaatcaagcagggcgggggcsttttgctaggcttttcttttctgtctttttttttttattattatatttctttccttaacaacacatttgtgcttccagtggtaaaaggcagaggcagaga

SEQ ID NO: 486096 - DNA, 201 bp, Homo sapiens
aggtaatggtagcatgattaaggtcacactatcatggcttagtgataagaatattgtttagactagaacaaaatcttcctccacacaaaattgattatttmtagcatattatcattatttatgcaggctgtcactgaatcaaggaaggaagttaaattggtgtggaaaaactggttattcaaaaaatctgcttctttatat

SEQ ID NO: 486097 - DNA, 201 bp, Homo sapiens
ccatattacctgcctcagattgatggtgtctgtgagatttgggtccctcgcaaggtctcaatctaagtcctggatataatttcaagactttgcttcagccyaatcttgtgacacgtggccttctacaaacttcttcagtatatgcatgcacatgtacctgatgtggatcctaaattcaaacccacttggtgagcatccccc

SEQ ID NO: 486098 - DNA, 201 bp, Homo sapiens
taaaaaatatctttcaacatatgttgactaaaacttgaatgagtactaaaggatggtgtggcttaagcaatggtaggattaattgtctgtcctgctagccygcctcatttaaatcacctagtctcagtgtgactcatttataatattgctttgctaaccctaattgagataaaaatcttattggtacttgtcttttaagtt

SEQ ID NO: 486099 - DNA, 201 bp, Homo sapiens
agggctcaaatacatgcagaaacttgtccaaattttcatggtctatgggtgaaaggacagccagcattctaaggaacaacatagctactcttaagacatakaaaagcaaactttcattatataaaaaagacatatgaacatgcaggtttttagcagcacaattcgcagttgcaaaaatgtagaaccaacctaaatgcccat

SEQ ID NO: 486100 - DNA, 201 bp, Homo sapiens
gaggcttgtgcctgtaataaagaggaagatacctgtaggttacagaagctgacatgacaattacggcagattgaataatggcccccaacatgtccacatcmtaatcagcctgtgaatacgggacctttcatgacaaagggactttgcagatgtgattcagttaaggatctgtggatgggaagcttatctggacacagccag

SEQ ID NO: 486101 - DNA, 201 bp, Homo sapiens
gttgttggctggtggaggtgcagctggattcatgggccttgaaggcactgcccagggagtaatttataatattactcttaataatgtatcttttgtgattyaccttgaatctagatagaagtgcagttatatttcttcacaccatcaaggagacctaattgtctccagtcattgataagataaatgatgggagagggtggg

SEQ ID NO: 486102 - DNA, 201 bp, Homo sapiens
tagtcccagctactcaagagactgaggtgggaggattgcttgagcccttgaattcaagacagtcctagaaacatagtgagaccctgtctgaaaataaacamacaaacaaacaaaaagatacaatgggagaaggaaaaaaaatgaagaggaagttaataagtgaggcttgtgcctgtaataaagaggaagatacctgtaggt

SEQ ID NO: 486103 - DNA, 201 bp, Homo sapiens
ggcagtgagaatgggaagggagggacgccaggagcaggtggtatttctgaagtaggttctggagattgattgaatgtgggaaatacaggagcaagaagcamggacaacactcaggtttttattagggaatctggcagatgatagcattattaaagatacaatgagaatacagcaagacctcatctctacttttttttttaa

SEQ ID NO: 486104 - DNA, 201 bp, Homo sapiens
tgaaagcagagaagaacagtaaagtggaagaacacaaccaggcataatgggaggaagaacagaatgaaagataggcttgtaaaaaggaagagcaaattacygcgagcaacagagggaaggagaatttcctcaggcgaggattaaggagggaaaaggccagagagaaagaggccacaagaaagcaatgaaaagaatcaagca

SEQ ID NO: 486105 - DNA, 201 bp, Homo sapiens
agagataaaaaccaaaaccagaactcagtctcacacctaatgaaagcagagaagaacagtaaagtggaagaacacaaccaggcataatgggaggaagaacmgaatgaaagataggcttgtaaaaaggaagagcaaattaccgcgagcaacagagggaaggagaatttcctcaggcgaggattaaggagggaaaaggccaga

SEQ ID NO: 486106 - DNA, 201 bp, Homo sapiens
ggaagctttcaggcataaactctctcaaatttctttatatccatctttaaactcatcttagcttttccccactcatccttttctcctgtctcaggaagaarttgattctattgtgtgttcctaaaagttctctcctgtgcccttgaataatcttattcatttccatttcttcacatttcaactctttatgcaaaagactct

SEQ ID NO: 486107 - DNA, 201 bp, Homo sapiens
ttctgcacagcaaaagaaactttcatcagagtgaacaggcaacctacagaataggagaaaatgtttgcaatctatccatttgacaaagggctaatatctakaatctacaaagaacttaagtaaatttataagaaaaaaacaaaccccatcaaaaagtgggcaaaggatatgaacagacacttcttgaagacatttatgcag

SEQ ID NO: 486108 - DNA, 201 bp, Homo sapiens
aggatttggctaaaaagcatcccttttcttctaccttctctatgcctctcttctgaaaatgcccagtactcagatctaaaagaaccacccacctgccctakagctgccttccagattctgcctaagaaggcacaaacatctataataaaagagacagtttcatcttttggccctaagcgttgttcccttaaggcaaagaag

SEQ ID NO: 486109 - DNA, 201 bp, Homo sapiens
gatttggaaaagaaaatgaattaaattggtttttgggtatcacatggacaaaaacaagcttttgggagtttttttgctatacttttcacttttcaatctaygggcttagtcttgtatatacaccatgaaatatgtttttctgcttgattgtttcctataaaagactgtaatgtaagaatgtgttatttgctccaatttttc

SEQ ID NO: 486110 - DNA, 201 bp, Homo sapiens
gatttttttgtactttacaacacctgcacatgacagccaaaagaaatggtggatttggaaaagaaaatgaattaaattggtttttgggtatcacatggacmaaaacaagcttttgggagtttttttgctatacttttcacttttcaatctatgggcttagtcttgtatatacaccatgaaatatgtttttctgcttgattg

SEQ ID NO: 486111 - DNA, 201 bp, Homo sapiens
tcaatgtggttggtttctttttatttttgatatattctgtggtatggatgtgccaaagtttgtttagccatttactcgttgaaggatatcttggtagtttmtaagttttgactatcatgaataaagctgctataaacatttttgtacaggttattatgtgaacataaatcttcatttctctgggataaatgtccagaagtg

SEQ ID NO: 486112 - DNA, 201 bp, Homo sapiens
ccttaaatacaagagaaccacgtaataaaaatgcaacagaaaagcagcttgatgatgtgcacattcaactcagtaacatgcttgtaaatacagagacctakgctgtcttttttcattttggggaacagattctaaatgatatctccaactacctcttaccccatccctggtaggatcacattacagatatccaccccggtt

SEQ ID NO: 486113 - DNA, 201 bp, Homo sapiens
aaatactcaactttggattttcaaaatcaattctggaaggatgtagtccataatgctataattcatttttcaaagtacatagcatcactgatgcagtgtgytctaaaaacttgtgttccaagcatgataatgatttttagtccatatcattgatattgactttactaggtctcataaaatgcatttccaaaagtaattaca

SEQ ID NO: 486114 - DNA, 201 bp, Homo sapiens
tggaagtgtccatggtgtatgtttgtgtctatgcacacaaacaaggctgagaaaaggaacaccctacaactagatggaaccctaatcctgttcagctaagrctatatagatctgtgggaattctgttgctcagagaaggcaatcctaactttgggcaggaggtctctttggaccctttaaccaagagccatgccaaaatat

SEQ ID NO: 486115 - DNA, 201 bp, Homo sapiens
tagagaattaactagataaatgcagttataaagtacctagtacagtacctgacatatagtgtctgccatatagtaggtttctccaaaatgtgaatgcatcstgtctctatgcctttcttctctgattttctttaaataccgggcatatcatctataacgctgctttcccaacttcagattaagatgaccatgggaacagtc

SEQ ID NO: 486116 - DNA, 201 bp, Homo sapiens
atagaaagagtgttttccttaccacaagtatctccccttttgtccactacactacatcactcccctccacctccatgctttccctaaaccctggcaaccamtagtctgttttccatttctgtcgttttgtcatttcaggaatgttatacaaatgaatcataaagcatagagcctttaaggattggcttttttcctcggcat

SEQ ID NO: 486117 - DNA, 201 bp, Homo sapiens
gggctatagagtgcttaggatccacacacagctattaatcaataaatgttggtgatcatgcagaaaggtggaacaactttcttaaaataagtaattctccrgcatataactgcaaacaaaattctaagtagagaaagtgttattattagtagtataatcctgagctataaaataaaatgctccagtaatatctatattatc

SEQ ID NO: 486118 - DNA, 201 bp, Homo sapiens
attaatattgatagaaagagtgttttccttaccacaagtatctccccttttgtccactacactacatcactcccctccacctccatgctttccctaaaccstggcaaccactagtctgttttccatttctgtcgttttgtcatttcaggaatgttatacaaatgaatcataaagcatagagcctttaaggattggcttttt

SEQ ID NO: 486119 - DNA, 201 bp, Homo sapiens
ccaaggtattaatattgatagaaagagtgttttccttaccacaagtatctccccttttgtccactacactacatcactcccctccacctccatgctttccmtaaaccctggcaaccactagtctgttttccatttctgtcgttttgtcatttcaggaatgttatacaaatgaatcataaagcatagagcctttaaggattg

SEQ ID NO: 486120 - DNA, 201 bp, Homo sapiens
gtatctggaagtcattaatggggaaaagtgctctcaagagtggtctaaagattttagaattattttcacagaaatagtgtttgaagtcattggaacgaattagacactatgggagaaagaagaaaaaaatgtctccgggaatgggaaaataagagcctatgaaggaccctgaaaaacacatgggttagagttgaaattcat

SEQ ID NO: 486121 - DNA, 201 bp, Homo sapiens
taatggtaacatcttgaaaagctatagtacaatattacaaccaaggtattaatattgatagaaagagtgttttccttaccacaagtatctccccttttgtscactacactacatcactcccctccacctccatgctttccctaaaccctggcaaccactagtctgttttccatttctgtcgttttgtcatttcaggaatgt

SEQ ID NO: 486122 - DNA, 201 bp, Homo sapiens
agatctcttgtactttttacccagttcccctaatggtaacatcttgaaaagctatagtacaatattacaaccaaggtattaatattgatagaaagagtgtkttccttaccacaagtatctccccttttgtccactacactacatcactcccctccacctccatgctttccctaaaccctggcaaccactagtctgttttcc

SEQ ID NO: 486123 - DNA, 201 bp, Homo sapiens
tagttgtaagaaataatgcagagagatctcttgtactttttacccagttcccctaatggtaacatcttgaaaagctatagtacaatattacaaccaaggtrttaatattgatagaaagagtgttttccttaccacaagtatctccccttttgtccactacactacatcactcccctccacctccatgctttccctaaaccc

SEQ ID NO: 486124 - DNA, 201 bp, Homo sapiens
actgttgagtcacatgtagttgtaagaaataatgcagagagatctcttgtactttttacccagttcccctaatggtaacatcttgaaaagctatagtacamtattacaaccaaggtattaatattgatagaaagagtgttttccttaccacaagtatctccccttttgtccactacactacatcactcccctccacctcca

SEQ ID NO: 486125 - DNA, 201 bp, Homo sapiens
ttttttttaattggaaggctttagacacactgatatagtttggatgttttgtcccctccaaatcccacgttgaaaggtaaccctcaacgttggaggtgggrcctggtaggaggtgtttgggtcatgggagcggatccctcatgaatggctcggtgctgtcctcatgatagtgagtgagttcttcagagatctggttgttta

SEQ ID NO: 486126 - DNA, 201 bp, Homo sapiens
aataaactgttccaacctctgactgttacccagttccaaagttgcttccacatttttgggtatccttacagcaacacctcactctaccagtaccagtttayggtattaggccattttcatgctgctaataaagacatacttgagactggataatttataaaggaaagaggtttaattgactcacagttcagcatggctggg

SEQ ID NO: 486127 - DNA, 201 bp, Homo sapiens
gtaataacttgcacaaggtcactctagaaaatgaatggagaagtcaggaatgtagtccagttctctaattctaacccagtaaacattagttagcagaatawcttgtttttttaaagaaactcaaagccttaatgaggagctgcaacttgataaatgaaatacattcaaaatgtttggccctattttatttcttaggtttgt

SEQ ID NO: 486128 - DNA, 201 bp, Homo sapiens
cccctttgtagatgcaggcagaaagagagcaggcatgtgcatgtgtaagaaataagacatgctttgatgattctcaaagacatctgctcttttcctgtggtttttttttttctcccaatgtaaaattttgttcaaagtggaaaatagatttttttttgcaataaaacagaaattcataacaaattgttctattttatttaa

SEQ ID NO: 486129 - DNA, 201 bp, Homo sapiens
ctccttctagcgcttctatctggtcagcaattctatccctgacaactgactgtgctgcttctcctgcctgcaactcattagtttgtcccataatggagggyctgtctcttttctgtcacaaaggactcctccttttgtcccaatggcttggcctggactcaggaccattttctcccttacaattcatttgactgcactctc

SEQ ID NO: 486130 - DNA, 201 bp, Homo sapiens
caagcttaaaatatgaggactgaggacgtaacataatgtgaatgtcaaggagaagtttctattggaaacagtgctctggtttgacaagaccatcagaagckgaaaactgacataaccttaatgtatataagtagataaggctactccccaaggggttcaatatgcttttatagatttatcattctatcttccttccaagtt

SEQ ID NO: 486131 - DNA, 201 bp, Homo sapiens
acagtgaacacttgaagagagtgggtaaagagagaaactactgaattacagtcttctccaagctatgagctttaaaatatttaaactgcttcaacacaaamcagctgtttctgttgtgaggctattcaagttgatccaaaaagctaatttctatggtcctcttggattcaaggattgaaactatggttttatttgccagtt

SEQ ID NO: 486132 - DNA, 201 bp, Homo sapiens
acgaactaattcgcctcactaagatgaatcttttgatttgttcctacttcgcagggtcactgttgtgaggtttaagagagataatttaatgtaaaatttakcataatgcctacacacaaaaagcttgtcaagcatttaataataataccgaccattattattactaatgtcgtgctaaatgtggcaggacctgaaaaatta

SEQ ID NO: 486133 - DNA, 201 bp, Homo sapiens
ggataataaggacaaggtagttttcactggatccttactggtactctgaattttcactatttgtccgcatttcttctccttcccggaaatttgttttctgsgaaaaacaagtgctactttgtcaaataaagcttaaataaaattggtttcaatttatgcataataaaaggaatgcctagtgactttctatctctagtggga

SEQ ID NO: 486134 - DNA, 201 bp, Homo sapiens
atacattttgagcaaggcatataccagtgatgaaacagggaagaatcttgtttattccatccttgtttgatgatcgaccacagaatataacataacacttstgtgtataagaattttttcaacattaaggataataaggacaaggtagttttcactggatccttactggtactctgaattttcactatttgtccgcatttc

SEQ ID NO: 486135 - DNA, 201 bp, Homo sapiens
taagtgatcatacatccttctctttaacctctgtgctttttttttttttttttcacattcatacaatcaggaaagcacatctgaaattcacagggacttaraagtgtcaagtcttggcattactggttttacctttcctgggtgttcttatctcttgcctcactttggcctgtatttttgctgcagggagtatgctgcgac

SEQ ID NO: 486136 - DNA, 201 bp, Homo sapiens
cagttctccgggaagcaaaggacttcgggatttaatgggttggacaaaatgtttgaaatggttaacagtctaagtgtagcctgtactagtaattgttttaraatttaaattaaatttgaatatattaaaagctaagccaacattttggtgaccactctcactcagcaacctctgtcatctacacagtgatcattacagaag

SEQ ID NO: 486137 - DNA, 201 bp, Homo sapiens
attagatatttttattgatttaggcgctgaatatttttgagcaatttctatatgataagcagtttttaggtaagtatttgttttttattctgcttttttcwtctctttctcctcttccttctctctcacaacatgtagcaaagttaaatgttcaatggcaataaaaatgagtgagaaaaaaagagaaggataagacaattg

SEQ ID NO: 486138 - DNA, 201 bp, Homo sapiens
atctggaaaatgaagataataacaacatctaccttgttggattataggaaatgcctgtagagattccttaatgtaaatatgttctccataaatattagatwtttttattgatttaggcgctgaatatttttgagcaatttctatatgataagcagtttttaggtaagtatttgttttttattctgcttttttcttctcttt

SEQ ID NO: 486139 - DNA, 201 bp, Homo sapiens
agagccatgggtcgattaaatctcttttgtttataaattagcccacctcaagtatttctttatagcaatgcaagaatggcctaatatagtcccatcttcagaatttctgatttagtaagtctttggaaggggacaagaatttgcatttctaacaagttttaggtagtgctgatattattgatctgaagaaccacactttga

SEQ ID NO: 486140 - DNA, 201 bp, Homo sapiens
gcgcccggccgtagtttacattttctaaagcgtactctgccagccaagtggcaaacagacttgggcctcttaagagtggaagcaggaggaaacccgaagakcctggagagagactggtggctggtaccagtggagagggagcaaaaaggaaaatacaggatacaatttcaggaaaaatttcataccaatttcctgaggtaa

SEQ ID NO: 486141 - DNA, 201 bp, Homo sapiens
tctctctctgtgccccacgccccacagatccaggtttttatgtttggtgtagcaggcacatttttcttgattcagatccaggcggactgctttggtggggkagttgtactctgctgacatttaaggcaggaattccctgggaaaataatcaagagattattttggagctgctggaaaagctccaaagggtttagggttccc

SEQ ID NO: 486142 - DNA, 201 bp, Homo sapiens
ccccccacaccactggtatgtttaaaagggcgcaattcattaaaaaattgaataacaatttattatattttcttgactttctcattgtatagtgttacgawcttttgggggaggatagttacatggcatattgatttaaaattggtctttatgccagaccaccttgtgaatctttagttcaatagccttgcgaagttgtgg

SEQ ID NO: 486143 - DNA, 201 bp, Homo sapiens
ggaggtcgggaccacaccgtataggaatatcagatcatggtcagggctttggattttacaggggtgcagtataagccatggggagttttagacaggtacasaagtaatttacattttctttctttctttttttttttttttgaaacggagtcttgctctgtcccccaggctggagtgcagcggcgcgatctcggctcactg

SEQ ID NO: 486144 - DNA, 201 bp, Homo sapiens
tattgggagtaatattattctcttgtccctgtacgttaggaactatatcacaggggggctgtacaccttctgtgatattagaattaatgttatcatcttcyccactgaatattaggaacaatatcacagaagggtgtacaccccctgcgatcaggccagtaatatcatcggctccttccctggatattaggaacaatttca

SEQ ID NO: 486145 - DNA, 201 bp, Homo sapiens
tcactaaggagtgtacacctcctgtgatactgagactagtatcatcctcttgccccctggatattaggaacaatatcacaggggtggtgtacacctcctgcgaatttggggcaaatgtcatcctctccacctttggatattagagacaatatcacaggaggggtctacgccccctgcaatattgggagtgatatcatcctc

SEQ ID NO: 486146 - DNA, 201 bp, Homo sapiens
  misc_feature (1)...(201): n = A,T,C or G
gtaattaaagtgcttacaatgaaattaatgttaataacatcaataagagccatagtaaataaaacattagcaatttatattgattaataactagtattagnattaataattaataataccattatgttagaaatcagtattagttgctatcaataattaataataataattagtgattactaatgacattatcactattat

SEQ ID NO: 486147 - DNA, 201 bp, Homo sapiens
ctgatttgtagaatcactgaaataatagtaagactctacttctcagaagatgaaacagagtcttagagaagtttattactaaattagacagtttttttttkttttgtttttttttttgagatggtgtctcaccctgttgcccaggctggaatacagtggcacgatcctggctcactgcaatctccatctcccgggttcaag

SEQ ID NO: 486148 - DNA, 201 bp, Homo sapiens
gatttgtagaatcactgaaataatagtaagactctacttctcagaagatgaaacagagtcttagagaagtttattactaaattagacagtttttttttgtkttgtttttttttttgagatggtgtctcaccctgttgcccaggctggaatacagtggcacgatcctggctcactgcaatctccatctcccgggttcaagcg

SEQ ID NO: 486149 - DNA, 201 bp, Homo sapiens
caggcatatgcctgttacaagagagtatggtcgttaagaacatggatttttgagtcagacagaactggttatgtgtcttcttctgtcgttttctctctggrtgacctcggttatcttattttgtttttctgagcttcagtttccttatctggaaaatgaagataataacaacatctaccttgttggattataggaaatgcc

SEQ ID NO: 486150 - DNA, 201 bp, Homo sapiens
agtctcgttctgtcgcccaggctggagtgcagtggcttgatctcggctcactgcaagctccgcctcccgggttcacgccattctcctgcctcagcctcccsagtagctgggactacaggcgcccaccaccacgcccggcttatttttgtatttttagtagagacggggtttcaccgtggtctcgatctcctgacctcgtga

SEQ ID NO: 486151 - DNA, 201 bp, Homo sapiens
gatgtcaggaaagcaccaggcatatgcctgttacaagagagtatggtcgttaagaacatggatttttgagtcagacagaactggttatgtgtcttcttctrtcgttttctctctggatgacctcggttatcttattttgtttttctgagcttcagtttccttatctggaaaatgaagataataacaacatctaccttgttg

SEQ ID NO: 486152 - DNA, 201 bp, Homo sapiens
cttgatctcggctcactgcaagctccgcctcccgggttcacgccattctcctgcctcagcctcccgagtagctgggactacaggcgcccaccaccacgccyggcttatttttgtatttttagtagagacggggtttcaccgtggtctcgatctcctgacctcgtgatccacccgcctcggcctcccaaagtgaaatattaa

SEQ ID NO: 486153 - DNA, 201 bp, Homo sapiens
ttttacagattaagaacctgagctcagagaatttaaataatgtgccaagttaacacagctattgctggagctagtgtctcaaatctctgtcttagtcatgyctggcttttttcagctgcatcatatatcaagcaatctatttcttgtttaatgtccattaaatgaactgatgtcaggaaagcaccaggcatatgcctgtta

SEQ ID NO: 486154 - DNA, 201 bp, Homo sapiens
catattttaaaacgtacttacaacatttaaaattgaaatcctactgtacatactcacttgtaatctgacttgtcccattcatcataaacactttttttttyctcaattttaagttcaggggtacgtgtgcaggatgtgcaggtttgttacataggtaaatgtgtactatggtggtttgctgcacaggccatcccatcgcct

SEQ ID NO: 486155 - DNA, 201 bp, Homo sapiens
ttcatagaagaaaactgaggtccagtgggggaagcgaattgtacaaaattacacacaagttagatgggaccaggtctctcaactcccagtctggagttcarttttttttttttgagacggagtcttgctctgttacctaggctggagtgcagtggcacaatctcagttcactgcaagctctgcctcccgggttcaagcaat

SEQ ID NO: 486156 - DNA, 201 bp, Homo sapiens
aacagaagagtagatacagataagctcattttacagattaagaacctgagctcagagaatttaaataatgtgccaagttaacacagctattgctggagctrgtgtctcaaatctctgtcttagtcatgtctggcttttttcagctgcatcatatatcaagcaatctatttcttgtttaatgtccattaaatgaactgatgt

SEQ ID NO: 486157 - DNA, 201 bp, Homo sapiens
catgccccatgattagacatcctggcacatttctccaatttttcagtgtaaagaaacatactttttattttccgaagtttaaatgatcaccagagaggcakttgtgtgtgtgtgtgtgtgtgtgtgtgtgtgtgtgtgcaggcactacgcatccttcggagagtgtgaggggaagggacctgagaagaggaaagcaaatgc

SEQ ID NO: 486158 - DNA, 201 bp, Homo sapiens
atgccccatgattagacatcctggcacatttctccaatttttcagtgtaaagaaacatactttttattttccgaagtttaaatgatcaccagagaggcagttgtgtgtgtgtgtgtgtgtgtgtgtgtgtgtgtgtgcaggcactacgcatccttcggagagtgtgaggggaagggacctgagaagaggaaagcaaatgct

SEQ ID NO: 486159 - DNA, 201 bp, Homo sapiens
agagaaaatcaaaaaggaccaaagggttctgaagaaaggaattgaaagatgagaaatgtagtatccctcccattagtttgaaatgtcagaaaagaagaagygtatgtgagatataccctttaaccttaaataaaaataaggtattttgggtactatgtatataatcaatactaatttaaattttcattttctgtttcagtg

SEQ ID NO: 486160 - DNA, 201 bp, Homo sapiens
taatgagtctttggagctgtcttttcacaggtgcctggaattttgtccaattggataggtttttccagatgtttcaaatgttattcatgggagatgtttayattcattatctccaaagatcttgactaggagctagcaccttgcatttgatatatttaatgaatagccattgactgagggaatcaaccatgctcccaaatg

SEQ ID NO: 486161 - DNA, 201 bp, Homo sapiens
ggtgactcagggcttcccaggctgcagtgattattttgcaggtgatctgagaatgaagctcagagcctcagttggatggttatgggaagtaatattttatstcctagtgaatgtgaataagaaagcatgtagttcctgctgttgctggcagctctctggctgccttgatggaagccagtctgaaaaataagctggcacaga

SEQ ID NO: 486162 - DNA, 201 bp, Homo sapiens
accattcaacccactacaccaggtgactcagggcttcccaggctgcagtgattattttgcaggtgatctgagaatgaagctcagagcctcagttggatggytatgggaagtaatattttatgtcctagtgaatgtgaataagaaagcatgtagttcctgctgttgctggcagctctctggctgccttgatggaagccagtc

SEQ ID NO: 486163 - DNA, 201 bp, Homo sapiens
aagtacctttcaacccctgataaactcccagggaccaaggaacctggtccccatggctttttatcactgagatgctagctctataatgccatctccatggkgatttctacattgaagaagaacatttatttcctgccaccagtaagagaccacctgagtgttcagttgcagtatcttcaactccccagatccatcagtagc

SEQ ID NO: 486164 - DNA, 201 bp, Homo sapiens
ggggccgatccttcatgaatggcttggtgctattctcatgacaataagtcagttctagctccagtaaggttgaattagttcttgagggaatggattagttmtagggagagtagttatataaccaagacatcccttaggttttggctctctttgcacgtgtctgcttcctctttgacctctctgccatgctttgcagcacaa

SEQ ID NO: 486165 - DNA, 201 bp, Homo sapiens
ggtgctattctcatgacaataagtcagttctagctccagtaaggttgaattagttcttgagggaatggattagttctagggagagtagttatataaccaasacatcccttaggttttggctctctttgcacgtgtctgcttcctctttgacctctctgccatgctttgcagcacaaaagcccttgtcagaagccagtgtca

SEQ ID NO: 486166 - DNA, 201 bp, Homo sapiens
tttataaaagaaagagatttaattgactcacagtccagcatggctggggaggcctcaggaaacgtacaattatggcagaaggggaagcaaatatgtccatyttcacatggcggcaacaaggagaagtgcagagtgaagggtggcagcaaagcctcttacaaaaccatcagatttcgtgataactcacttactatcaagaga

SEQ ID NO: 486167 - DNA, 201 bp, Homo sapiens
tgacagcctgagctctatgttggctccttttagccacagctggagctgaagcagctgggacacagggcatcatgtcctgaggctgcatagagcagggggtygctggggccaacccaggaaaccatttttccctcctaggcctccaggcctgtaatgggaggggctgccatgaaggtctctgacaggctctggatacatttt

SEQ ID NO: 486168 - DNA, 201 bp, Homo sapiens
ataaactgttccaacctctgactgttacccagttccaaagttgcttccacatttttgggtatccttacagcaacacctcactctaccagtaccagtttacrgtattaggccattttcatgctgctaataaagacatacttgagactggataatttataaaggaaagaggtttaattgactcacagttcagcatggctgggg

SEQ ID NO: 486169 - DNA, 201 bp, Homo sapiens
cccagttccaaagttgcttccacatttttgggtatccttacagcaacacctcactctaccagtaccagtttacggtattaggccattttcatgctgctaayaaagacatacttgagactggataatttataaaggaaagaggtttaattgactcacagttcagcatggctggggaggcctcaggaaacttacaattatggc

SEQ ID NO: 486170 - DNA, 201 bp, Homo sapiens
tgaggacattatgctaagagaaatacgccagtcacaaaaagacacatgctgtatgattccatttatatgaggtattttaagttatcaaattcatagagacmaaaggtagaatgatggttgccagaactgggggagggcaaaaagtgaagttgtttaataggtgcagagtatccatttttcacaaggaaggaaggtatgtga

SEQ ID NO: 486171 - DNA, 201 bp, Homo sapiens
ctctcttgaatattcttctccattttgtttgcctagttaattaatagactagggcatggagcaagctggtttaatcactgcgtcaaacagaagagtagatrcagataagctcattttacagattaagaacctgagctcagagaatttaaataatgtgccaagttaacacagctattgctggagctagtgtctcaaatctct

SEQ ID NO: 486172 - DNA, 201 bp, Homo sapiens
gagacaggagaatagcttgaacccaggacgtggaggttgcagtgagcagagatggtgccactgcactgcagcctgggcgacaagagtgaaactctgtctcaaaaaaaaaaataggtaagatggggagggataggaaaatattcattaaaaggataccaaaaaatgataaggtgataaaattttatgttatgtggattttgc

SEQ ID NO: 486173 - DNA, 201 bp, Homo sapiens
tctctgtgacttatttcctctctcttgaatattcttctccattttgtttgcctagttaattaatagactagggcatggagcaagctggtttaatcactgcrtcaaacagaagagtagatacagataagctcattttacagattaagaacctgagctcagagaatttaaataatgtgccaagttaacacagctattgctgga

SEQ ID NO: 486174 - DNA, 201 bp, Homo sapiens
aagaaaaatgcaaagagaaaagaagtaatttttaaataaataaataaaaaaggcaggacttctattcagaggctatttccaatagttctgaggagagccartgtggttagaattgggtaggtagcagcagaactgttagtggacccacatgaaagggctgtgtttatatgtcagagtcagtcaaatgttggcaatgtcata

SEQ ID NO: 486175 - DNA, 201 bp, Homo sapiens
ccccaaacaatgaaatactgtttggagatcccactggatataggaccaaagggcaagcagcactgtgagcaaggatatggaaacccggaatgggataaccsgcacaacacaaatagggtcaaggataatgttcaggagttgatttcctttggaagcttggcgggggaaggaatacactcttcagagcaggacttgaaaagt

SEQ ID NO: 486176 - DNA, 201 bp, Homo sapiens
gaggaaacctaatttcttccaaagtctttgaacctgtcagtttaactcagcaggaataaagaaataagctgatttgaaatgtgataactaactagctaaaycacacacacacacacacacacacacacacacacacacagacacccatatttgtatggaaaaaatttcaggattccaatatattgtttttgcctctaccta

SEQ ID NO: 486177 - DNA, 201 bp, Homo sapiens
aggaaacctaatttcttccaaagtctttgaacctgtcagtttaactcagcaggaataaagaaataagctgatttgaaatgtgataactaactagctaaaacacacacacacacacacacacacacacacacacacacagacacccatatttgtatggaaaaaatttcaggattccaatatattgtttttgcctctacctat

SEQ ID NO: 486178 - DNA, 201 bp, Homo sapiens
aggtaatgagatggagaaaaaacttggtgcattaaaggacaaaaaaaaaattggcacaggaaaacatgaaagaggaatcctggctcgcaggtgagggaggrtatctgggagaaactatgagccaggcagaatcatttccatttcctgtctctgtgacttatttcctctctcttgaatattcttctccattttgtttgccta

SEQ ID NO: 486179 - DNA, 201 bp, Homo sapiens
cagggtggggtagggagatacaaataagaaaaccaaagttatacttatgggaggtaatgagatggagaaaaaacttggtgcattaaaggacaaaaaaaaawttggcacaggaaaacatgaaagaggaatcctggctcgcaggtgagggaggatatctgggagaaactatgagccaggcagaatcatttccatttcctgtct

SEQ ID NO: 486180 - DNA, 201 bp, Homo sapiens
ttttttttttttgagacagtaatttttgaaaatgaggatttccttaaatctttatttgaattctttctaccatgaagaattgttcagaatttgtcttgttkggttatatgttgtagttgaaattgggcaattattagaaaatgaatttgtataatccagcagttaacatgaatttagatagagacttcagtgcatttagtt

SEQ ID NO: 486181 - DNA, 201 bp, Homo sapiens
taatttttttttttttgagacagtaatttttgaaaatgaggatttccttaaatctttatttgaattctttctaccatgaagaattgttcagaatttgtctkgtttggttatatgttgtagttgaaattgggcaattattagaaaatgaatttgtataatccagcagttaacatgaatttagatagagacttcagtgcattt

SEQ ID NO: 486182 - DNA, 201 bp, Homo sapiens
tcttatgtgtccataataaaagagaaatctattttgctaatgagagtttccaatcaacaaattttgccttgtgaattacagttttaaagtactttcaattrttaaatttattgctatttaaaatcctatttaggaaccttgctattaatactagaactttagttacagcctcaagtttgagcccctcccaaaaaatctcat

SEQ ID NO: 486183 - DNA, 201 bp, Homo sapiens
gtgccttagagagctggaggtagatagcaggactgaaaagctgggtatagattcaggagttgttggctggtggaggtgcagctggattcatgggccttgawggcactgcccagggagtaatttataatattactcttaataatgtatcttttgtgatttaccttgaatctagatagaagtgcagttatatttcttcacacc

SEQ ID NO: 486184 - DNA, 201 bp, Homo sapiens
gggtatagattcaggagttgttggctggtggaggtgcagctggattcatgggccttgaaggcactgcccagggagtaatttataatattactcttaataaygtatcttttgtgatttaccttgaatctagatagaagtgcagttatatttcttcacaccatcaaggagacctaattgtctccagtcattgataagataaat

SEQ ID NO: 486185 - DNA, 201 bp, Homo sapiens
ttggaaacgttgaaatgtaagtgaaggcgttggctgggatccaggaccccaaacactctgtcttaccatagtaagaggtctcaattctgtcttcctatacwcactcttcctttggaagtgtccatggtgtatgtttgtgtctatgcacacaaacaaggctgagaaaaggaacaccctacaactagatggaaccctaatcct

SEQ ID NO: 486186 - DNA, 201 bp, Homo sapiens
ggagagcatatttcatataagctgccagaacaatttagcaaggcatgctgaacatacattttgtagtgagcttcttcacagaaaatgtagcaatgagaaayggcatctacaggatagggaggaaagagccctggatttttgtcctggctttgcctgtaatgcaataggatgtaactcaaccattctgagcatctatgactt

SEQ ID NO: 486187 - DNA, 201 bp, Homo sapiens
ctcttacagagagtccattaacattcctgagtctgtttcctcatttttaaagtgggaattccaagaactattttggaaacgttgaaatgtaagtgaaggcrttggctgggatccaggaccccaaacactctgtcttaccatagtaagaggtctcaattctgtcttcctatacacactcttcctttggaagtgtccatggtg

SEQ ID NO: 486188 - DNA, 201 bp, Homo sapiens
gtcagtttaactcagcaggaataaagaaataagctgatttgaaatgtgataactaactagctaaaacacacacacacacacacacacacacacacacacacacagacacccatatttgtatggaaaaaatttcaggattccaatatattgtttttgcctctacctatcctgaatagaggtaacggaaagcaaaagtaaata

SEQ ID NO: 486189 - DNA, 201 bp, Homo sapiens
ggtaggtattctatcctcagttttcagatgagaaaactggcactgagagaagttaaagcaatttcagaggtcccaacatttgaaagttgaggatacggaaytcaaacccagttcttactcatgacaagccccaggctcctaaccatcctacatagaatcctgcttcccaatctctcatagtactcagggcagagcatctca

SEQ ID NO: 486190 - DNA, 201 bp, Homo sapiens
tcagtttaactcagcaggaataaagaaataagctgatttgaaatgtgataactaactagctaaaacacacacacacacacacacacacacacacacacacacagacacccatatttgtatggaaaaaatttcaggattccaatatattgtttttgcctctacctatcctgaatagaggtaacggaaagcaaaagtaaatat

SEQ ID NO: 486191 - DNA, 201 bp, Homo sapiens
agtttaactcagcaggaataaagaaataagctgatttgaaatgtgataactaactagctaaaacacacacacacacacacacacacacacacacacacacagacacccatatttgtatggaaaaaatttcaggattccaatatattgtttttgcctctacctatcctgaatagaggtaacggaaagcaaaagtaaatattg

SEQ ID NO: 486192 - DNA, 201 bp, Homo sapiens
gtttaactcagcaggaataaagaaataagctgatttgaaatgtgataactaactagctaaaacacacacacacacacacacacacacacacacacacacasacacccatatttgtatggaaaaaatttcaggattccaatatattgtttttgcctctacctatcctgaatagaggtaacggaaagcaaaagtaaatattgg

SEQ ID NO: 486193 - DNA, 201 bp, Homo sapiens
taagagcctagtagatctctcagaattgagtagaagattttcctttttttctcgtacatcctcaggcatgtgaaacttggggttctgttaaaataaagaargagaaatgttgaaagcacagtcacgagtgtgggtatactggataaggaacttcacatatttgttttaaaatagtatcaaggagagcatatttcatataag

SEQ ID NO: 486194 - DNA, 201 bp, Homo sapiens
atggtgtcatcagcctagaggtggagggagtggtggggaaagtttcctagggaatataaacatgattgcaaatatatatatacatgatacacatgattgcwtatatatatatatagtacatatatatgtgtgtgtgtgtatacacaatttttaaccattgtatccccaatagtgtctagaatggtctacagcctataataa

SEQ ID NO: 486195 - DNA, 201 bp, Homo sapiens
tttctagtgcaagaggactgtgtgaataaccccctgaataccatatgccaacgtgtatagccccgtgtatagccccgtgtattagtctgttctcatgctgmtaataaagacacacccgagactgggtaatttataaagaaaaagatgtttaatgaactcacagttccacatggctggggaggcctcacaatcatggcagaa

SEQ ID NO: 486196 - DNA, 201 bp, Homo sapiens
cacatggctggggaggcctcacaatcatggcagaaggtaaaggaagagcaaaggcctgtcttatatggtggcaggcaagagggagagtgtgcaggggaackgccctttataaaaccatcaaatcttgtgagacttattcactatcacgaggacagcatgggaaaaacccacccccatgattcaattacctcccacctggtc

SEQ ID NO: 486197 - DNA, 201 bp, Homo sapiens
tcagctctcagttggaaagtcacctctgtagaaaggctttccctattcaccctgtctaggttatttccctccctttcaaaatatttcctgcagaaccctgmttatttttctcatagcactaatcacactgagaaatgattttatttatttccttctctgttgtctttttcaccccactctacctccattgcactagaatat

SEQ ID NO: 486198 - DNA, 201 bp, Homo sapiens
gcagctggattcatgggccttgaaggcactgcccagggagtaatttataatattactcttaataatgtatcttttgtgatttaccttgaatctagatagamgtgcagttatatttcttcacaccatcaaggagacctaattgtctccagtcattgataagataaatgatgggagagggtggggtgctcaaaagtcagtctt

SEQ ID NO: 486199 - DNA, 201 bp, Homo sapiens
gtgccatctgccccatctcgctctccatcctcaccctttgcccttccaccttcagttattcattaaacacgtgttttctgagcacaaactgtgctccaggyactgggctgtgcgttggtggtatagctagcaagacagacttggtccctgatcttacggagcatccttgtggtcagggtggggtagggagatacaaataag

SEQ ID NO: 486200 - DNA, 201 bp, Homo sapiens
ttttaaaattagcccagcgtggtgccatgggcctctagtcccagatactggaaagcctgaggtaggaggatcacttgagcccagaatggtggaggctgcastgagccatgatcaggccactgcgcttcagcctaggcaacagagcgagactctgtctcaaataaatagataaataaataaataaaaaacaaaaacaaaaaa

SEQ ID NO: 486201 - DNA, 201 bp, Homo sapiens
aggtgcagctggattcatgggccttgaaggcactgcccagggagtaatttataatattactcttaataatgtatcttttgtgatttaccttgaatctagakagaagtgcagttatatttcttcacaccatcaaggagacctaattgtctccagtcattgataagataaatgatgggagagggtggggtgctcaaaagtcag

SEQ ID NO: 486202 - DNA, 201 bp, Homo sapiens
agggtggggtgctcaaaagtcagtcttttctggggacacaggtcagtgtgtctctcctgggtccctctgtgccacagctactcctcttaaatcttgattcmagggcttcagaagctgatggcatagttatgagaggggtgaagactgcgactgcatttccaacagaccctgaggacaattgggaagaatgtgagtacggag

SEQ ID NO: 486203 - DNA, 201 bp, Homo sapiens
cttcacaccatcaaggagacctaattgtctccagtcattgataagataaatgatgggagagggtggggtgctcaaaagtcagtcttttctggggacacagrtcagtgtgtctctcctgggtccctctgtgccacagctactcctcttaaatcttgattccagggcttcagaagctgatggcatagttatgagaggggtgaa

SEQ ID NO: 486204 - DNA, 201 bp, Homo sapiens
tctcctgggtccctctgtgccacagctactcctcttaaatcttgattccagggcttcagaagctgatggcatagttatgagaggggtgaagactgcgactrcatttccaacagaccctgaggacaattgggaagaatgtgagtacggagtcctaatatccagtgccatctgccccatctcgctctccatcctcaccctttg

SEQ ID NO: 486205 - DNA, 201 bp, Homo sapiens
ccaatgtgaggatgcaatatctagttggttgccttaaactacagaaccattagaagaaagaacgttaacaatgtttttatactgtctatttaagagagaamggaggaataatatatccacatggtcacatttccctttgattaaaagtttacccatgggacattaagtcacctccacttaaaaggtgtacattcattggca

SEQ ID NO: 486206 - DNA, 201 bp, Homo sapiens
aactcagctatacttaagacagctccccaaagcctggtctaaccctcactggagagcaggcagctcacactctggtgctaccatgtgttacctgggccctragttaggaagagagattgcctgtggtatcagatcatgccatggggattctgagtccatgctgagtggggtttcttttcaggatttcattctgagaaagaa

SEQ ID NO: 486207 - DNA, 201 bp, Homo sapiens
aagaatgtgagtacggagtcctaatatccagtgccatctgccccatctcgctctccatcctcaccctttgcccttccaccttcagttattcattaaacacktgttttctgagcacaaactgtgctccaggcactgggctgtgcgttggtggtatagctagcaagacagacttggtccctgatcttacggagcatccttgtg

SEQ ID NO: 486208 - DNA, 201 bp, Homo sapiens
ttagttttctgcagcataatttaattgcttatctaccagtcctgagtaaactcactcacttagggttttctcagcatttcatagatcatagatcacctctkccaattataggggtcattctttcccactttcctttccaaggtgacctgtaacttctgggcagcttacattgcctcatgacctctggatgaaagtgcctac

SEQ ID NO: 486209 - DNA, 201 bp, Homo sapiens
agaagggaagacaggagtcaagtgggttgtcatatgatgaggtcagagtgaatagagcactaacaaaactaagcgagcatcaaatggatatttgcaaggtmtatgtatgcatgcattcagatacattttatcatctttattttttagaatattatttcattaactctaagttttgcagctttttggggtttccaaaatggg

SEQ ID NO: 486210 - DNA, 201 bp, Homo sapiens
ggaggatatctgggagaaactatgagccaggcagaatcatttccatttcctgtctctgtgacttatttcctctctcttgaatattcttctccattttgttygcctagttaattaatagactagggcatggagcaagctggtttaatcactgcgtcaaacagaagagtagatacagataagctcattttacagattaagaac

SEQ ID NO: 486211 - DNA, 201 bp, Homo sapiens
ctgatggtagtttcttttgctgtgcagaagctctttagtttaattagatcccatttgtcaattttagcttttgttgccattgcttttggtgttttagacaygaagtctaataatggcctctagctccatccatgtttccacaaaggacatgatctcattctttttcatggctgcatagtattccacggtatagacgtacca

SEQ ID NO: 486212 - DNA, 201 bp, Homo sapiens
ccaagttttgtaggaaaaatgagatgactcttttgtttgcaaatttacagataaataaatcaagacagacttgtgtaataacttgcacaaggtcactctakaaaatgaatggagaagtcaggaatgtagtccagttctctaattctaacccagtaaacattagttagcagaatatcttgtttttttaaagaaactcaaagc

SEQ ID NO: 486213 - DNA, 201 bp, Homo sapiens
taaatcaagacagacttgtgtaataacttgcacaaggtcactctagaaaatgaatggagaagtcaggaatgtagtccagttctctaattctaacccagtamacattagttagcagaatatcttgtttttttaaagaaactcaaagccttaatgaggagctgcaacttgataaatgaaatacattcaaaatgtttggcccta

SEQ ID NO: 486214 - DNA, 201 bp, Homo sapiens
aatatttccgtgtatttagttgtctgaaattagtattggtcagccagcctcccctccccttgcatttcaggttaatgccaacaacaatgtgtgtgtccaasagggtttggaggagcaatggaggggtgcaccctgactctgacaccttgttctaaagtatacagttgctagacagagttcttcttcttgttctctggaatg

SEQ ID NO: 486215 - DNA, 201 bp, Homo sapiens
ttgcatttcaggttaatgccaacaacaatgtgtgtgtccaagagggtttggaggagcaatggaggggtgcaccctgactctgacaccttgttctaaagtayacagttgctagacagagttcttcttcttgttctctggaatgtggtgaagaggaaggaaccagctgtcttgtgttgcaatttcaaaatgtcaagttttctt

SEQ ID NO: 486216 - DNA, 201 bp, Homo sapiens
gatcctgaccttttggcctgaggatggaagtcttcagtatctgtacaactttactcccaagagctggtgtagaatgagttcctctggccatgggaggatcrcagaggggcgcctgccaccagcagcccagcctcagtaagtgcaatgtgcagttggcagaggggagggagctgggggcacgccaaccctttctgttacttc

SEQ ID NO: 486217 - DNA, 201 bp, Homo sapiens
aagattttcacaggtgaaggggaggtcttcccctccacacctgtgggcgtttctcgtcggggggcgggggtacgagagactgagaaaagaaagagatacasagacaaagtatagagaaagaaaagtgggcccaggggatccgcgctcagcatatggtctctgagttccctcagtatttattgattattatctctaccatct

SEQ ID NO: 486218 - DNA, 201 bp, Homo sapiens
ttttggcctgaggatggaagtcttcagtatctgtacaactttactcccaagagctggtgtagaatgagttcctctggccatgggaggatcacagaggggcrcctgccaccagcagcccagcctcagtaagtgcaatgtgcagttggcagaggggagggagctgggggcacgccaaccctttctgttacttcctgtaggcat

SEQ ID NO: 486219 - DNA, 201 bp, Homo sapiens
gtattgccaccagcatgtctcaactccagtcctaaggtggttttctcctgtctcagtagatggaatataccatagggttttacaccgagacattccattgycgatgacagggatgagcaggagacagatgccttcctcttatctcaactgcaaagaggccttcctcttttactaatcctcctcagcacagaccatttatgg

SEQ ID NO: 486220 - DNA, 201 bp, Homo sapiens
cctctggccatgggaggatcacagaggggcgcctgccaccagcagcccagcctcagtaagtgcaatgtgcagttggcagaggggagggagctgggggcacrccaaccctttctgttacttcctgtaggcatagcccaagtctcaggaagcagaatatacatggggtggggtggggtggggtgggggaggagaggggagctg

SEQ ID NO: 486221 - DNA, 201 bp, Homo sapiens
taatccctatgctttgggaggctgaggcaggaggatcacttgaggccagcagtttcagaccagcctgtgcaacaaaatgagaccaccatctctaaattgtktttttaaagattagccaggcatggtggcacacatctgtcacctccctaattagttgggaggctgaggcaggaggatcacttaaaccaaggagtttgaggt

SEQ ID NO: 486222 - DNA, 201 bp, Homo sapiens
ctgtgtataagaattttttcaacattaaggataataaggacaaggtagttttcactggatccttactggtactctgaattttcactatttgtccgcatttyttctccttcccggaaatttgttttctgcgaaaaacaagtgctactttgtcaaataaagcttaaataaaattggtttcaatttatgcataataaaaggaat

SEQ ID NO: 486223 - DNA, 201 bp, Homo sapiens
catcactgctgcatcatacgcatagctccctgctctcctctggtcctctgggtcctctgcacgctttcacctgcccagcctccactcccctccttctagcrcttctatctggtcagcaattctatccctgacaactgactgtgctgcttctcctgcctgcaactcattagtttgtcccataatggagggcctgtctctttt

SEQ ID NO: 486224 - DNA, 201 bp, Homo sapiens
tacagcattttttgcatgataatcagaaataaatgataataaatatgctaatatttcttaagcagttatattctcggtgctactactctaagcattttatwttgattatttaacttaattttcacaataaccttgttttcttttcagacaagaaatatcatttaagcacatggtcaaattcagagttcagggagagatgag

SEQ ID NO: 486225 - DNA, 201 bp, Homo sapiens
agaccatacactactcccacattccctcagctctatacaactaactctaagtctacgttgttttacttgggcaatacatgtgctttgatgtctccatgctyttgcttgtactgcctgaaatgctgcccttccctttctctacttgcagaaattccattcattctttaaagaatcagttcaagcgtgataactgttactgaa

SEQ ID NO: 486226 - DNA, 201 bp, Homo sapiens
aagataccagaggacataacaaggcaagggagttagatgagcggaagaaatgggatgcagaaacctgatctgaaaaaggagagagagaaaagaaaatttckattggttggcaggataacagctgtgtaacaggtgtagagagcaagcatttcaaattggagcaaaacagatgcttgggagactgtgtggaaagataaaact

SEQ ID NO: 486227 - DNA, 201 bp, Homo sapiens
atatacctttatgtatagaccatacactactcccacattccctcagctctatacaactaactctaagtctacgttgttttacttgggcaatacatgtgctytgatgtctccatgcttttgcttgtactgcctgaaatgctgcccttccctttctctacttgcagaaattccattcattctttaaagaatcagttcaagcgt

SEQ ID NO: 486228 - DNA, 201 bp, Homo sapiens
actggcaaatagtttttcatcattaacccacatctaagtgcttacaaaagtggacatccacactgaaataccacagccacatagaacttccttttttaacrgctacaagttcttgctatcacaaaatatatcttctgaattcctgacccctttgtggcattttacctgcagactattttgaaaggcttcacaatcctggct

SEQ ID NO: 486229 - DNA, 201 bp, Homo sapiens
aagtcagtcttttctggggacacaggtcagtgtgtctctcctgggtccctctgtgccacagctactcctcttaaatcttgattccagggcttcagaagctratggcatagttatgagaggggtgaagactgcgactgcatttccaacagaccctgaggacaattgggaagaatgtgagtacggagtcctaatatccagtgc

SEQ ID NO: 486230 - DNA, 201 bp, Homo sapiens
ttttagggcttttttctttttcagatggacctaataattaaattggcctaagacagatcaacaggagaaaaacatacacatttatttaatataagttttaygtggcacaggagccttcatagggaaatgaagacccgaagatgcagtcagtgatgaacatatgtactgaattagacaaagagtaggaaattaggaaaatgt

SEQ ID NO: 486231 - DNA, 201 bp, Homo sapiens
gtgtctctcctgggtccctctgtgccacagctactcctcttaaatcttgattccagggcttcagaagctgatggcatagttatgagaggggtgaagactgygactgcatttccaacagaccctgaggacaattgggaagaatgtgagtacggagtcctaatatccagtgccatctgccccatctcgctctccatcctcacc

SEQ ID NO: 486232 - DNA, 201 bp, Homo sapiens
ctgccatttgtgatgacgtggatggacttggaggactttatgttcagtaaaataagccagaggcagaaagacaaattctacataatctcaattatacgtakaatctaaaattgttgaactcatagatataattatgcaagatgaataagttctagagctccaatgtagagcatggtgactatagttaaccacactgtattg

SEQ ID NO: 486233 - DNA, 201 bp, Homo sapiens
ggagacagatgccttcctcttatctcaactgcaaagaggccttcctcttttactaatcctcctcagcacagaccatttatgggtgtcaggctgggggacgrtcaggtctttcccttcccacaaggccacatttcagactatcacatggggagaaacctcagacaatacctggctttcctaggcagaggtccctgcggcctt

SEQ ID NO: 486234 - DNA, 201 bp, Homo sapiens
tcctcagcacagaccatttatgggtgtcaggctgggggacggtcaggtctttcccttcccacaaggccacatttcagactatcacatggggagaaacctcrgacaatacctggctttcctaggcagaggtccctgcggccttccgtggtgttttatttccctgggtacttgacattagggagtggtgatgacttttaacaa

SEQ ID NO: 486235 - DNA, 201 bp, Homo sapiens
tttttttttaaatttttacaagctctcaaggtctttgactactgccaattctcaagccattcagataagaaagcattgctgccaagtatgtatattaaatkcttcttcagaagttcactgaaattcaaacattacaactataattaggataccaagaataggacattactggtactttaatgtgaaaccaggacctaatac

SEQ ID NO: 486236 - DNA, 201 bp, Homo sapiens
tgtggtaagtcatggacagggttaaggagaagggtacatgtcgagaaactaaatcacatttggagaggagatgtaacaaaggtagggttcagaggtttacyggtaacaattccaaatttggaatgaaaaagttactctttgtttagcgttcgagttgggagtttgccctgcaagagacagtcaaccactgacttcagtcga

SEQ ID NO: 486237 - DNA, 201 bp, Homo sapiens
ggacggtcaggtctttcccttcccacaaggccacatttcagactatcacatggggagaaacctcagacaatacctggctttcctaggcagaggtccctgcsgccttccgtggtgttttatttccctgggtacttgacattagggagtggtgatgacttttaacaagcacactgccttcaagcatttgtttaacaaagcaca

SEQ ID NO: 486238 - DNA, 201 bp, Homo sapiens
catatttgcttatctatatgtcctgggatgaacatttttaaatggcaagaaagctagcagattaggtaagaaaaatggccagagaaaacaagataaaagtkcattaaataaagtcaggttttgaatgtagtgttttgtttgtctctggatatcagtgaaacagagaactattcgttttcagagaaggcttggtaaaattgc

SEQ ID NO: 486239 - DNA, 201 bp, Homo sapiens
ttcagactatcacatggggagaaacctcagacaatacctggctttcctaggcagaggtccctgcggccttccgtggtgttttatttccctgggtacttgasattagggagtggtgatgacttttaacaagcacactgccttcaagcatttgtttaacaaagcacatcctgcatagccctaaatccattaaacgttgagtcg

SEQ ID NO: 486240 - DNA, 201 bp, Homo sapiens
tagaagaaagcaatgttggaaagatgttcaaagaaaggcatggggatcatcccaccctttaaatggtccaaatggaagccaagatactggatcacgtctargaaaatttaaatatgctagctacactcaataatgtagtaattcatggtcatctgtaactcctcagtgtgaattaattaatcagatcactcagctgcttct

SEQ ID NO: 486241 - DNA, 201 bp, Homo sapiens
atacctggctttcctaggcagaggtccctgcggccttccgtggtgttttatttccctgggtacttgacattagggagtggtgatgacttttaacaagcacrctgccttcaagcatttgtttaacaaagcacatcctgcatagccctaaatccattaaacgttgagtcgacacagcacttgtttcggggagcacagggttgg

SEQ ID NO: 486242 - DNA, 201 bp, Homo sapiens
tcttttttcagcaattccttggggtctgtgttaagccagatgtggatcacaggtctgggttcaagtctcaattctgccatctgctagctaacccaagtgaycttgaccaagtcacatagcagggcagtgcaaaatgaccaggctttgctatcacacagacctagatccaggggcacactggtcaatgtttaaaactgaatg

SEQ ID NO: 486243 - DNA, 201 bp, Homo sapiens
gaaacaattttaaaaataatcatagttgtaactcagtattaaattgtcttttggagaagattcttaagggttttatatctagaataacttaaaaaaaaaaraaaaaagaaaatgggccacaactggagacaatcaaaaaatcattcttctgcttttactttattatccttaacagtcataagccatagtctatttctacca

SEQ ID NO: 486244 - DNA, 201 bp, Homo sapiens
acgttgagtcgacacagcacttgtttcggggagcacagggttgggggtagggttacagataaacagcatctcaaggcagaagaatttttcttagtacagarcaaaatggagtctcttatgtctacttctttctacatagacacagtaacagtctgacttctctttcttttccccacacacaggcaagggggatgagtccat

SEQ ID NO: 486245 - DNA, 201 bp, Homo sapiens
tcttccacctattaattgggtgattttaggacaatgtcatcatttgtggctcctagaatcagaccttaagtcaagggttgagagcaagttattaatttagwgttgattccaggaaacactggcaggagagtagggaactgagaaaggaaaggcacagaatatagggtggattattgagcaagttagcacagtgggaatagg

SEQ ID NO: 486246 - DNA, 201 bp, Homo sapiens
attaactagataaatgcagttataaagtacctagtacagtacctgacatatagtgtctgccatatagtaggtttctccaaaatgtgaatgcatcctgtctmtatgcctttcttctctgattttctttaaataccgggcatatcatctataacgctgctttcccaacttcagattaagatgaccatgggaacagtccctgtg

SEQ ID NO: 486247 - DNA, 201 bp, Homo sapiens
ccactctcactcagcaacctctgtcatctacacagtgatcattacagaagggctcagagtacccatatttttagcagactgacaaagatgtttccagcttyaaggacagaaaaggtgtttaaaattctgtacacatggggtatgactggcagagtaggccaaaaaactaggtggttaaaaaaaatgctttcagaataatgc

SEQ ID NO: 486248 - DNA, 201 bp, Homo sapiens
acatatagtgtctgccatatagtaggtttctccaaaatgtgaatgcatcctgtctctatgcctttcttctctgattttctttaaataccgggcatatcatmtataacgctgctttcccaacttcagattaagatgaccatgggaacagtccctgtgtgcataagcagttgacagaggtggatgctaattcaattaatagta

SEQ ID NO: 486249 - DNA, 201 bp, Homo sapiens
gtgggttgtcatatgatgaggtcagagtgaatagagcactaacaaaactaagcgagcatcaaatggatatttgcaaggtctatgtatgcatgcattcagayacattttatcatctttattttttagaatattatttcattaactctaagttttgcagctttttggggtttccaaaatgggttacctctcctaaaaacagtt

SEQ ID NO: 486250 - DNA, 201 bp, Homo sapiens
tcctgacctcaggtgatccagccgcctcggcctcccaaactgctgggattacaggcatgagcccctgcgcctggccaattcttgttatttttaagggtttstgtatcaagcatatctcctctgtgaattcttatcgatcctcaacactgatatgaattatactttctttctccccgtcaaagttgttgagcacctcctata

SEQ ID NO: 486251 - DNA, 201 bp, Homo sapiens
agtccttcatatggggaaaatcctcattctccaatagaataaatgtttcctgagttgaaagaaacaagctagtgttccctgagctgtatttaactgacacrtgcctggtaggcaattgatgagcgctccttgaatgaactaaccatttaacttactcgctcttggtttggttccctgtgtatccatccatgttctatgaat

SEQ ID NO: 486252 - DNA, 201 bp, Homo sapiens
aatctaatttaccttatttttcttttgttgcttgtgattttggtgtcagagttaaggaacccattgtcatgaagatttatgattatgttttctcctaagarttttatagtttaggctcttacatttaggtctttgattaattttgaggtttttatctatgtgaggtaagggtcaaatttattgttttgcatatgaatatcc

SEQ ID NO: 486253 - DNA, 201 bp, Homo sapiens
tgcacaactacactaaatgctgctgaactgtacacttaaaaaatggtggcaaggcatggtggctcatgcctgtaatcccagcactttgggaggctgtggcrgatgggtcacgaggtcaagagatcgagaccatcctggccaatgtggtgaaacccaatctctactaaaaatacaaaaattagctgggcgtggtgctgtgca

SEQ ID NO: 486254 - DNA, 201 bp, Homo sapiens
aagcaagagagtagaatgttacagggggtgctacaatcacccagataatagcaggaagtagggtggagaggcatgttataaatcagaaagaagaatcttcrgagaaggctgggaagcaggtgatttttagagttgaggaagcgggcacacctgcaaaacagaagagatttttggatgaaggttatagaacagcagtctaga

SEQ ID NO: 486255 - DNA, 201 bp, Homo sapiens
gacctggccagggtaataccactagagataaaaagaagtgacagaatttgaaattattttttgagatgacatttatgatacagggaaatttttgaaggagyaaatcaagagttcagttttgatcttgttgagttttagatattaatgagaaaaccaagtaagaggtatcacatagggagttgaatatgtaagacaaggtct

SEQ ID NO: 486256 - DNA, 201 bp, Homo sapiens
gtgctacaatcacccagataatagcaggaagtagggtggagaggcatgttataaatcagaaagaagaatcttcggagaaggctgggaagcaggtgattttyagagttgaggaagcgggcacacctgcaaaacagaagagatttttggatgaaggttatagaacagcagtctagaggcagcagtgggagccagtttctgtcc

SEQ ID NO: 486257 - DNA, 201 bp, Homo sapiens
gacttccctgaagttagaaatgatctcctgctggccttgaagaagcaaaaaactacatcttgaacttcctatggagaggggtgtcctctaggagttgaagycgtcagtcctatagctgcaaaacacagaattctgcccacaagttcaagcttggaagatgactctgagtttcagatgagaataaaacccagtcaacagctt

SEQ ID NO: 486258 - DNA, 201 bp, Homo sapiens
tggtggattagtgaagagtgtgaacaactagagatctccaacctcatctaaagggactgaccttgcctctgtccaactattttcaggtgggcatatagaakgtagggtaacaaatcccctgtcattaatgaggcccaatgttggcagctaattcagatgttaaataaaatgcactgtcagccaaaccaaacatatctgtag

SEQ ID NO: 486259 - DNA, 201 bp, Homo sapiens
cagagagtccacttaagttgttcccatactcttaactcatagaaactgacatgatatatgtatgttgtttcaagctgctaaatttacagtaatttatcacmcagcaatagaaaactaatacaagaggtctaggctgaatacataaatttagaagtcataagcatatagatgatcactacactttgattacaaaattaaatt

SEQ ID NO: 486260 - DNA, 201 bp, Homo sapiens
tcatggtcattccaccagctgaggttgaagggcactgcttttttttctagtgcaagaggactgtgtgaataaccccctgaataccatatgccaacgtgtayagccccgtgtatagccccgtgtattagtctgttctcatgctgctaataaagacacacccgagactgggtaatttataaagaaaaagatgtttaatgaact

SEQ ID NO: 486261 - DNA, 201 bp, Homo sapiens
cttggctcactgcaagctccgcctcccaggttcacaccattctcctgcctcagcctcccgagcagctgggactacaggcacccaccaccatgccggctaawtttttttgtacttttagtagagacgggatttcaccgtgttagccaggatggtctcgatctcctaacgtcgtgatcctcccgcctcggcctcccaaagtgc

SEQ ID NO: 486262 - DNA, 201 bp, Homo sapiens
tacaacacgaattccacagaattagcctggtattcacgatcactgtttcttaaaacataactcttttatgttaccaagcaacttttatctgagatgatgaytactcgaatacttcttttgcatatcgccagaaaatatcaagttttcatttgagtccttaattcaagttctttatcacaagaagaaagaatagcatggata

SEQ ID NO: 486263 - DNA, 201 bp, Homo sapiens
ccattctcctgcctcagcctcccgagcagctgggactacaggcacccaccaccatgccggctaattttttttgtacttttagtagagacgggatttcaccrtgttagccaggatggtctcgatctcctaacgtcgtgatcctcccgcctcggcctcccaaagtgctgggattacaggcgtgagccactgcgcctggccaga

SEQ ID NO: 486264 - DNA, 201 bp, Homo sapiens
aaatgatgatgctaaccattttgctaataaaatatgctaagctgaaacatttcagttactcagttcatcttctggtacagatgctagcaagcagagaaggwtatgatttgaaaaactcaacagaaaggaggaaaaagatgagaaaaagattgactagaaaattattcatggaatatatttcaccagcctattgggtgttag

SEQ ID NO: 486265 - DNA, 201 bp, Homo sapiens
ggctctactatttctttttcattatcagcttgtattcttcagtgaaacacagcctttccttctctccacccaatctgtgcattcacacactctgggttcayggatacttttcttagtcaatgtgctctaatccattacatacattattactctttatatacaaaagatcccaaatttggccagggagagtcttttaaatct

SEQ ID NO: 486266 - DNA, 201 bp, Homo sapiens
acatacacaatgacactgttattactaacaataaagaacttgtaagagagtttttagaagtaacatgcttttctaagaaacacaaagaaaacattttatartgagtgaaaatgaaggtttttacttcaaattctctttttatttccatgatatttctgcctgggctctgccaaggaaaactggcagtgggcaacggattat

SEQ ID NO: 486267 - DNA, 201 bp, Homo sapiens
gaggaggctgtccttgctgggctacaaaaatcaggtgctgagttttggtctttatcttaagcaaagcaatggtaattcatttaagtgttatccgtggttgsaaggtgatagttttcatatttgcattttgaatgcaaatataatatctggtatcccattggaggatgaatttgggggtggggaacaatgccaggagatcag

SEQ ID NO: 486268 - DNA, 201 bp, Homo sapiens
ccagatgacccagttcagctgctatgttcctttccatgttttgtgtgctctcaattggtcatgaaactttaaaacatgagactcagaaaaaaaaacctgtytttgcatgactgtgtttgtgatgcttggagactcctaaagcctgtgacctttcttggtctcgtctgagggttgtgctgtgtcttaacccaagtctagagc

SEQ ID NO: 486269 - DNA, 201 bp, Homo sapiens
tatgagctgtatctacaagtgggcaatgtagagggactttctgagctgcgattatgttttatagagtgttctgcattaaatatatatcaataatctcaagscattcttactggttagtacttggtatatgtatgttgagaaatcccaaggtgaatcaaaggtctgaggtattagatgaacaagctctggtacctgggattt

SEQ ID NO: 486270 - DNA, 201 bp, Homo sapiens
tgaaactttaaaacatgagactcagaaaaaaaaacctgtctttgcatgactgtgtttgtgatgcttggagactcctaaagcctgtgacctttcttggtctygtctgagggttgtgctgtgtcttaacccaagtctagagctactgacccagaatgtcttggggttaggattggagatggggtctcaggatctgtgttaaca

SEQ ID NO: 486271 - DNA, 201 bp, Homo sapiens
aaaaaaattaccctccttctaatcgactgttcaaagaatcctgtaaaaaactaaattaatttagatgataatttctttaaaactgtgcctatttaattttwaaatgtattcattaaagtatataatcaacatcactattttacctaaatccttacagactatatttgcttaaagtaagctggacctataggtcaccacttt

SEQ ID NO: 486272 - DNA, 201 bp, Homo sapiens
ttcttctctttctcctcttccttctctctcacaacatgtagcaaagttaaatgttcaatggcaataaaaatgagtgagaaaaaaagagaaggataagacamttgagagacagaaatgggaaagagaaaagataaaattaagtggaggcaaaggcaaagaaagaaaacagaagaaaagaaatcacaattatgggtaacaggg

SEQ ID NO: 486273 - DNA, 201 bp, Homo sapiens
accgcaaaactaagtggaattttgggcttcttggtactgaaattaatggaaaagtaagtatcgtttcttcatttgaattgacggtgtcatcttatttggtkttcccattttcacataaatctaacagagccttctgaaatttcttttaccacattagctgggtatatttttccttttcttaaccatattctttagtgttat

SEQ ID NO: 486274 - DNA, 201 bp, Homo sapiens
catatattttataatattctttaccaagccaaatcgccaaatttagttttgatgtttctaaccatattctatgactatgacatagactttcaagcttagtstcaaggaggatataatttgaatgggttttcaaaaatgacaatgaatgataccaagtgatacatactctcttgtgaagttatttctggcttatgaaaaata

SEQ ID NO: 486275 - DNA, 201 bp, Homo sapiens
gagcactgctattcccccactgagataacaaaaatttccattgttaagccaccaaacaaatgcctaccagagttgtataattttccttccttttaggagcygggaattttatcttatgactcattttttgttgttgaaaatattgtgattctcaatatattaataagcatcacaactaatttaatttaaaaatagctatta

SEQ ID NO: 486276 - DNA, 201 bp, Homo sapiens
ttcagaagctgatggcatagttatgagaggggtgaagactgcgactgcatttccaacagaccctgaggacaattgggaagaatgtgagtacggagtcctamtatccagtgccatctgccccatctcgctctccatcctcaccctttgcccttccaccttcagttattcattaaacacgtgttttctgagcacaaactgtgc

SEQ ID NO: 486277 - DNA, 201 bp, Homo sapiens
aaggaggatataatttgaatgggttttcaaaaatgacaatgaatgataccaagtgatacatactctcttgtgaagttatttctggcttatgaaaaatagcrtcacacatgaatcaatagcccggactgcaatcagtgtagacggactctaaatagaagtcactaaatagactacaggacagttttattccatagtcctggc

SEQ ID NO: 486278 - DNA, 201 bp, Homo sapiens
ccgggcgtggtggcgggcgcctgtagtcccagctacttgggaggctgaggcaggagaatggcgtgaacccagcaggcggagcttgcagtgagctgagatcrcgccactgcactccagcctaggcgactgagcaagactctgtctcaaaaacaaacaaacaacaacaaaatagaccagcctggtcaacatggtgaaaccccg

SEQ ID NO: 486279 - DNA, 201 bp, Homo sapiens
taatatccagtgccatctgccccatctcgctctccatcctcaccctttgcccttccaccttcagttattcattaaacacgtgttttctgagcacaaactgygctccaggcactgggctgtgcgttggtggtatagctagcaagacagacttggtccctgatcttacggagcatccttgtggtcagggtggggtagggagat

SEQ ID NO: 486280 - DNA, 201 bp, Homo sapiens
aggcctatggagaggtccatgtggcatggaactgaggcctcctgtcaactgccaatgaggaacaaaggcctgccagcagcccccaccaacttgctaggcayatgagcaatccatttaccagccccagtcaagccttcagctgacagcagctctgggcaacatgttgactgtaatcttgagaaagccaaaaccagaaccatc

SEQ ID NO: 486281 - DNA, 201 bp, Homo sapiens
agcagcccccaccaacttgctaggcatatgagcaatccatttaccagccccagtcaagccttcagctgacagcagctctgggcaacatgttgactgtaatyttgagaaagccaaaaccagaaccatccagttggctattccagagtcccctacagaaaccatgtgagctgataagtttattgttgtttttagctgctaaat

SEQ ID NO: 486282 - DNA, 201 bp, Homo sapiens
ccatggccacagcctctccttttgttccctttctttgtgagggcaagtataggttgcactgatcctgaccttttggcctgaggatggaagtcttcagtatstgtacaactttactcccaagagctggtgtagaatgagttcctctggccatgggaggatcacagaggggcgcctgccaccagcagcccagcctcagtaagt

SEQ ID NO: 486283 - DNA, 201 bp, Homo sapiens
gggaggatcacagaggggcgcctgccaccagcagcccagcctcagtaagtgcaatgtgcagttggcagaggggagggagctgggggcacgccaaccctttstgttacttcctgtaggcatagcccaagtctcaggaagcagaatatacatggggtggggtggggtggggtgggggaggagaggggagctgtttctgccccc

SEQ ID NO: 486284 - DNA, 201 bp, Homo sapiens
tgttgttttttttcaagaaaatttattttaaatcttggcacttccacagctgcaaaaaatctgggagaacaagccagcacttgtggagctgtgtgtgttakctggatcaggggtgaaggggggcaagctgaagtacctttcaacccctgataaactcccagggaccaaggaacctggtccccatggctttttatcactgag

SEQ ID NO: 486285 - DNA, 201 bp, Homo sapiens
tggccaggtggaaggacagagggcaaggctgttgtggttgccctgtgagtgcgaacggcccaagatgggatgaaagaggaggtcgggaccacaccgtatakgaatatcagatcatggtcagggctttggattttacaggggtgcagtataagccatggggagttttagacaggtacagaagtaatttacattttctttctt

SEQ ID NO: 486286 - DNA, 201 bp, Homo sapiens
gtgtctgctactgagtagatcctcagtaaatggctcttatgttgaccagaatcatgcatttttctcaaaattttcttccccaaacaatcaagcaactgctwtttcttagaaatgtaaaagatttctgtgtctgcaactatccttcaggtcaagggatgactattagtgtagaaaaggtgtgtggctcagctcccttccctc

SEQ ID NO: 486287 - DNA, 201 bp, Homo sapiens
atagggtagaaaatatctatagcaaaagggcagagaaaataaaatggggtcatggaagagagtgagattattcttggctatgtgataaaggaaagcttcakggagaaggtagtatttgagttaggtcttatatgagtaaattttgtacatgaagagaaggggattagtacgttgatgaaatagttttataaagaaccaaca

SEQ ID NO: 486288 - DNA, 201 bp, Homo sapiens
cctgggtagatttacttctaaaggatcaattagtggaatctatattgaattaagagttttaatattatttagagttaattttctgtatgaaggcaacaacrggaagcatttcattaggaaaggtaatgatatgagtccaaacagaatctatgcttgtgaagtctgagtttgttcactttaaatagcaatttatgtggctaa

SEQ ID NO: 486289 - DNA, 201 bp, Homo sapiens
atcacaggcctgggaaatgtctgccatcttctagcaagagcttatttattttcacctggtttcatggtgtttttcagtcggtttaagtcagcttgctcctmtattcttttctgcagtcttcccgtgtaggctcagggtaatctgactacaaactagtactagggaaggagactcaggaagaaggggataatgcacagttgc

SEQ ID NO: 486290 - DNA, 201 bp, Homo sapiens
aaccactagtctgttttccatttctgtcgttttgtcatttcaggaatgttatacaaatgaatcataaagcatagagcctttaaggattggcttttttcctsggcatacttctctggagattcttccaggttgctgtgtgtgtcaatgtggttggtttctttttatttttgatatattctgtggtatggatgtgccaaagtt

SEQ ID NO: 486291 - DNA, 201 bp, Homo sapiens
gttttccatttctgtcgttttgtcatttcaggaatgttatacaaatgaatcataaagcatagagcctttaaggattggcttttttcctcggcatacttctstggagattcttccaggttgctgtgtgtgtcaatgtggttggtttctttttatttttgatatattctgtggtatggatgtgccaaagtttgtttagccatt

SEQ ID NO: 486292 - DNA, 201 bp, Homo sapiens
tgctgggttatataatagttgtaggcttaattgtttgagaaactgccaaactgttttcaaaaaaagatgtcccaagtgaaacttactggccaattagtcamccaataataagtatacttaaaaattttgttaagtattcagtaccaagctccatgtcatatgagatacagtagaagtgtaaggcgtataggggaaattgaa

SEQ ID NO: 486293 - DNA, 201 bp, Homo sapiens
aataaaatttcaggcttctggaatattttttattttctctctccataaaaagataatttcaatttccctaaattactaggaatctactctacatggtgcascaaaattttaaattatgtaatttagattactccagagtaaaacgtcttaaaaactgagagcacagcttaagtgtatggtctagaggcaagagttaatggc

SEQ ID NO: 486294 - DNA, 201 bp, Homo sapiens
acagtagaagtgtaaggcgtataggggaaattgaatggtgatgttcagagtgggctatttcatggtgtcattgttaggaaatgcctgatgcctggggccastctcagactcgccagataataagaatcaattttcttcatttttttaagggcaatctcaatcagatactcttgatatgttttagatttcttttgtcagttt

SEQ ID NO: 486295 - DNA, 201 bp, Homo sapiens
ccctaaattactaggaatctactctacatggtgcagcaaaattttaaattatgtaatttagattactccagagtaaaacgtcttaaaaactgagagcacascttaagtgtatggtctagaggcaagagttaatggcatggaaaagtagtaaaaggttggattagaaggtttaatacttttgatctctcagcccattgcagt

SEQ ID NO: 486296 - DNA, 201 bp, Homo sapiens
ccatcctgttttggttactgtagccttgtagtacagtttgaagtcgggtggtatgatgcctccagctttgttctttttgcttagggttgtcttggctataygtgctcttttttggttccatatgaaatttaaagtagtttttttctaattctgtgaagaaagtcaatggtagcttgatggggatagcattaaatctataca

SEQ ID NO: 486297 - DNA, 201 bp, Homo sapiens
tgtttggggttcatgaccatttcagatggctgcatttctccttatttcagaatctgaagaccacatgatttgttttcccgtaaaacttcagtcttttcttrttctctaagagcccaattccataaagtaacctagaattttaaaaagaaatctacattgtacatttctgctaatattaattctcaaatacggcataaatat

SEQ ID NO: 486298 - DNA, 201 bp, Homo sapiens
ttgatttaatatttgaatgcaatggtatctgactttgttagtatagaatatttaaacttaaaaagaaaataccttaatttacttatgcataagcctattamacacatttctaggggctctttttatgtttattctctagaacataacctatctttgaagtggtatattagtttttaaaaagtcattcctaagctgaataat

SEQ ID NO: 486299 - DNA, 201 bp, Homo sapiens
gtgggagatgttgtatgcagaggaagccaatccatttagtaccatcagaattcttttccaattggaacagccagccttaggtacctcacaatataagattktgtgtttatcttctacatagattctggatactgtatgaaaaagatgtgactgatgatgactcaccccaccgtatttcttgcaaaactcctgaaggaaaga

SEQ ID NO: 486300 - DNA, 201 bp, Homo sapiens
ttaaaaacagtcttagctccttgacgtttttcaatcaacttctctgttggtgaccctgtggacttacttaaagcttgatcccctccttgtgaatgactggkctttgttaagagcctagtagatctctcagaattgagtagaagattttcctttttttctcgtacatcctcaggcatgtgaaacttggggttctgttaaaat

SEQ ID NO: 486301 - DNA, 201 bp, Homo sapiens
taaacttatatgcacctaatagcatggcatcaaaaaatataaggcaaaaattgatagaactataagaaatggctaaatccatcgtcagcattttttaaatrtacttctttcagtatttgatagaacattcagacaaaattagcaagaaaataagaatatttgaataacagacttaaaaactttatgtaatggacacacata

SEQ ID NO: 486302 - DNA, 201 bp, Homo sapiens
ctaaagcctgtgacctttcttggtctcgtctgagggttgtgctgtgtcttaacccaagtctagagctactgacccagaatgtcttggggttaggattggasatggggtctcaggatctgtgttaacaagtttcaggggtgactataatgcccagtcagggttaaaatcactgttaacaataggggaggtttttctacttag

SEQ ID NO: 486303 - DNA, 201 bp, Homo sapiens
tggagtcgaggatgactctgaggtttccggcttgttatgggtcatattatgtcccccaaacagatatgttgaagtcctaactcctagtacctaagaatacraccttgtttgataatagggtctttgcaactgcaattaagttaagagaaggtcattgagggaaagccctaagccaagatggctgggatccttataagaagg

SEQ ID NO: 486304 - DNA, 201 bp, Homo sapiens
taaaagaagcagagcttatggtgtaataagccaaacacaacagttactgaacttgagtcaacattggataccattacagctttcaggatagtcatgggaakgtatgaaatgagtaagtacgttttgatacctgtgaaaataaaacattgtgctgtaagtgagtgggagagaacagatggttggtaatgatttaaaacattt

SEQ ID NO: 486305 - DNA, 201 bp, Homo sapiens
ccgtgggctaaaagcacaggctggatattggccagcaggctagagcttcccctccactcctgatttctcacgttggtgagaaactcatagcctgcctgatrtgggggggagaaaagactcgattttcaatttcaatttaattacacaatccatagtgcctaatgggaaggatttagcggcaagattaatgctcagcggcgc

SEQ ID NO: 486306 - DNA, 201 bp, Homo sapiens
ggcaagtcttctcttcctgggctcagtttcctcatctgcagtgcatgaggtcattgaactccataagccctaaggatccttctggtttcaaaaatcccatracgtctgatatagaacacttaccttgacaaagctcttcaagtcattttcaccttcacatattgatttatctgtgtagtgacatttaaagtgaattctaat

SEQ ID NO: 486307 - DNA, 201 bp, Homo sapiens
cttctctttggtaagggtaagctgtaatttatgccattgaaaggaaaaaagaaagaagatatggaaatgtgtacctatgggtgaaacccaagcatattttyccacaggtcaatgtctgcattctctgactctagtggcacaggcagggtttggagaaactgtagctaagctggcctggggaaaaattaggtgggtggggca

SEQ ID NO: 486308 - DNA, 201 bp, Homo sapiens
ccatctcgctctccatcctcaccctttgcccttccaccttcagttattcattaaacacgtgttttctgagcacaaactgtgctccaggcactgggctgtgygttggtggtatagctagcaagacagacttggtccctgatcttacggagcatccttgtggtcagggtggggtagggagatacaaataagaaaaccaaagtt

SEQ ID NO: 486309 - DNA, 201 bp, Homo sapiens
aataaaatattcacaccctaataatgcagcagcctactgaactctagaaaatggactaaaggacagcatggtatctaatagcagctctgacaattactagktgtttgaactggggctagttactttaatgctctggcttgtttgcctatctataacaaagggttaacaatatccaccctttcccaaatttgtgaggattga

SEQ ID NO: 486310 - DNA, 201 bp, Homo sapiens
aagagaggggcactccagggagttggggcaggacaagtaaagaaatctaagaggcaggtaagtgtagggtgtgtgtgggtgaatcgtgagaagttctgagyggcttatgtaatacacgcatacactttagcaggtgtggggatggaatgtgggaagagggaaggggcccagcctttggagattgtgacttggggtgatatt

SEQ ID NO: 486311 - DNA, 201 bp, Homo sapiens
cagctgcttctgaaagggacccctggttctggtgtcccccacaacaggtacctccctttgtgggtctctctgttttcccactaaagcttagcctttcttgraattcctccaactgccactcaagtcataacctcacttctggggtgagtggacttgaggtgtttcatgtttccttagagtttcatggcttctctgttgtcc

SEQ ID NO: 486312 - DNA, 201 bp, Homo sapiens
ctgcttaggcgatgagtgcaccaaaatctcagaatcaccactgaagaacttatccatgtaatcaagaaccacctgttctgcaaaaattattgaaacaaaawttttttaaagctaactttcaggataaaactagtcttttttgtctcatatttgggtcttatccctccagcttttggttagaggattaaagagggaaaaaat

SEQ ID NO: 486313 - DNA, 201 bp, Homo sapiens
ctccaaaatctacttaggttttaaagcctcttggaaatctctacttgtgtcctccactgcacttcaacacatgtttttaacttaaataattatagtcccartttctctaatgaccagtgatgatgagcttaatgtggcacatatacaccatggaatactatgcagccataaaaaagaatgagttcatgtcctttgcaggga

SEQ ID NO: 486314 - DNA, 201 bp, Homo sapiens; identical to SEQ ID NO: 437350

SEQ ID NO: 486315 - DNA, 201 bp, Homo sapiens
gttgtgacactgctagatattatgggtaaagaaaaatcaggcctgagtatgaataggctggctgatcttagttcttaacaagctcattggaaaccctgggmaagtgataatagatagagaaaagagtaatttcaaaaggtgaagaaaaatgttacaaaattcagatcacacatttgtaatacctaagccttacagcgaaaa

SEQ ID NO: 486316 - DNA, 201 bp, Homo sapiens
acactccttcttcacaagcataaagtcttgatggattgcagatgccaaccattacacagatagcacaataaatctgctataaactactgaacatactctgmaatatctattgaaacataggggctatatgcactataactccagtttccaaattcctgctatattaattcattgtgacttttttgaatagacctgtcttct

SEQ ID NO: 486317 - DNA, 201 bp, Homo sapiens
tatattaattcattgtgacttttttgaatagacctgtcttctattgctacaaaatgaaaattaaacagatatgtgaaaaccgatttgggggctacctaaaytgaattgagcaccaccagacacaaattacagcaaaaggatactgttctaatttgaatcctagtaaaccaagcagcagcagtaaattagttggcatttgag

SEQ ID NO: 486318 - DNA, 201 bp, Homo sapiens
ttctttcctaacagatacaaaaggctttgttgctccagtaatccaagccttggcagaagactttttagtccagtttatggctttaaagtaactgctagaaktaatggaagcatagaagtatgccttattaagacttattggtccagtaggggcttctctttctgtttgagaagtacaatccaactctgggtagatccttgc

SEQ ID NO: 486319 - DNA, 201 bp, Homo sapiens
tattggtccagtaggggcttctctttctgtttgagaagtacaatccaactctgggtagatccttgcaactcaaagtatgggggacaagccgcagtatgatyaccaggaactcattagttatgaagagtctcaggttacatttcaggatctaccaaatcagaatctggacttcagcaagacttcagtagtttgtttgcccgc

SEQ ID NO: 486320 - DNA, 201 bp, Homo sapiens
caaaaaaagccaaaattgacaaatgggatctaattaaaccaaagagcttctgcacagcaaaagaaactttcatcagagtgaacaggcaacctacagaatakgagaaaatgtttgcaatctatccatttgacaaagggctaatatctagaatctacaaagaacttaagtaaatttataagaaaaaaacaaaccccatcaaaa

SEQ ID NO: 486321 - DNA, 201 bp, Homo sapiens
gttatgaagagtctcaggttacatttcaggatctaccaaatcagaatctggacttcagcaagacttcagtagtttgtttgcccgctgaaatttgagaagcrttgggctaaatcaccaagtgactagagcagaatcagcaccagggcatcctctaattggcaatgggaattttgtacttgtaggtgaatatgtagctggatg

SEQ ID NO: 486322 - DNA, 201 bp, Homo sapiens
ccatttgacaaagggctaatatctagaatctacaaagaacttaagtaaatttataagaaaaaaacaaaccccatcaaaaagtgggcaaaggatatgaacasacacttcttgaagacatttatgcagccaacaaacatatgaaaaaagctcatcatcactggtcattagagaaatgcaaatgaaaaccacaatgagataaca

SEQ ID NO: 486323 - DNA, 201 bp, Homo sapiens
tggaatgctggcctggctgaggcattttctaggatctcctaaggagacaacccaggataagaatgatgccactgctgggataacaagttaagctggtgcaytggtagcgcccagctgatgggggtggggggtgggggtgggcagcgcaggtgctgggtcaaagtggggaagtgaaacccttagactgagtagcccagactg

SEQ ID NO: 486324 - DNA, 201 bp, Homo sapiens
acgtatgtttattgcagcactgttcacaatagcaaagacttggaaccaacctaaatgcccatcaatgacagacaggataaagaaaatgtggcacatatacmccatggaatactatgcagtcataaaaaaggatgagttcatgtcctttgcagggacatggatgaagctggaaaccatcattctcagcaaactaacacagga

SEQ ID NO: 486325 - DNA, 201 bp, Homo sapiens
actgagtagcccagactgtaaaacactatgtgacacactgaggtgacatcagcagcaagtatatagtcaggaatgggtaaacctgcagtgtgaccagaggsaagatggcatagcctagacaggaaggttcctaggggtaatggagaggggtcatcgaggggctgatgctgagaggctgctgcaggaaggagagtcaaggtc

SEQ ID NO: 486326 - DNA, 201 bp, Homo sapiens
gataaagaaaatgtggtatatatacaccgtggaatactactcagccataaaatggaatgaaacaatggcatttgcaacaacttggatggagctagaggccrttatcctaagtgaagtaagttaggaacagaaaaccaaatatcacatgttctcatttataagtgggagctaagctatgaggatgcaaaggtgtagaaatga

SEQ ID NO: 486327 - DNA, 201 bp, Homo sapiens
cctttaaaattattagcatttaaaaaatagcctaggggtaaaaggtttgtgtgtttatagagttaaataaaatggaatctactaaagttatccttcccccrtctgtcaaattttgactttctctaggaaatgaggatgacaaagcattcccatcctcctgactacctgtcttcccctactccaagtcctggcattgacata

SEQ ID NO: 486328 - DNA, 201 bp, Homo sapiens
actatctattggatatctcttttgcatgtctgagcaaattctagagatatggtgagtttaagaacttaaaaataagttcagagataggacctgtctttgtracaggaatcagaataattagaaggtggaatttgaattaggtcttcaaaaatggatggaagttggggagaataatggtgatgactaccctaactaggggag

SEQ ID NO: 486329 - DNA, 201 bp, Homo sapiens
ttgttttaaaatagtatcaaggagagcatatttcatataagctgccagaacaatttagcaaggcatgctgaacatacattttgtagtgagcttcttcacasaaaatgtagcaatgagaaatggcatctacaggatagggaggaaagagccctggatttttgtcctggctttgcctgtaatgcaataggatgtaactcaacc

SEQ ID NO: 486330 - DNA, 201 bp, Homo sapiens
tccagtgactgaggtcacgcagtcagttgaggatcagggggactcaggagccacatagttcatttctgtgagttatagccatttaaatatgagaaaaaatyacctcttcccttgagctagtaaaattccaataaattaaaatatataattatagcgccaggtgcagtgattcacgcctatactcccagcactttgggaggc

SEQ ID NO: 486331 - DNA, 201 bp, Homo sapiens
ttcatcttgccacatccttcctacaactctcacagtaaaagaagacatggaagacgggatttacaaggtggcatcctctggtagggatgaaaattttaagsaccttggcttttactctgggtaaactagggaacttttgtagggctctgggtagaaaagtaacatgatctcacttagacttgaaaaggatggtgtggagag

SEQ ID NO: 486332 - DNA, 201 bp, Homo sapiens
ccagtgactgaggtcacgcagtcagttgaggatcagggggactcaggagccacatagttcatttctgtgagttatagccatttaaatatgagaaaaaattmcctcttcccttgagctagtaaaattccaataaattaaaatatataattatagcgccaggtgcagtgattcacgcctatactcccagcactttgggaggct

SEQ ID NO: 486333 - DNA, 201 bp, Homo sapiens
cacatagttcatttctgtgagttatagccatttaaatatgagaaaaaattacctcttcccttgagctagtaaaattccaataaattaaaatatataattakagcgccaggtgcagtgattcacgcctatactcccagcactttgggaggctgaggcaggtggatcacaaggccaggagtttaagaccagcctggccaacat

SEQ ID NO: 486334 - DNA, 201 bp, Homo sapiens
agccatttaaatatgagaaaaaattacctcttcccttgagctagtaaaattccaataaattaaaatatataattatagcgccaggtgcagtgattcacgcmtatactcccagcactttgggaggctgaggcaggtggatcacaaggccaggagtttaagaccagcctggccaacatggtaaaaccctgtctctactgaaaa

SEQ ID NO: 486335 - DNA, 201 bp, Homo sapiens
tcttccataccattggaccgtctatttggagttttaactctaaaaccatttgtctgctgtcttctccagagactgccaggattacttcaaagccctttgtrcttctttactctgatcagtgatttgtagtacataaagttgtcactgaaaatataaaatttgactgtggtttgacagaccatagggttatgggtgcacatg

SEQ ID NO: 486336 - DNA, 201 bp, Homo sapiens
aaaattccaataaattaaaatatataattatagcgccaggtgcagtgattcacgcctatactcccagcactttgggaggctgaggcaggtggatcacaagsccaggagtttaagaccagcctggccaacatggtaaaaccctgtctctactgaaaatactaaaccctgtctctactaaaaattagctgggtgtggtggcgc

SEQ ID NO: 486337 - DNA, 201 bp, Homo sapiens
gacatcacccagcaaagccctctgcttctgtgaaatcaatgtgttctccttaagtctccctttccccctcctcttgttgtcatctacctttatcactgatstgtccactttacacactccagcttctaactcagctcctgtcattacatttagtgactctgacatccaatcaactctcagttccttgaccactttgttttt

SEQ ID NO: 486338 - DNA, 201 bp, Homo sapiens
atttaaatttcaagattgcgacagcagagcataaataaaggctgggtgctcctaaaggcaggaccttgtgcagctgcgcaggctgcatgcttatgaagacrtccctgccgaaggagtttggtgaactctagaagggtctaaccattagctacctgcatcaccatctcattattattttttctttaaacagatcttaggtgc

SEQ ID NO: 486339 - DNA, 201 bp, Homo sapiens
aataattcttgaataagtaaatgtgcttctaatttaatagcggtcttctaaacaactgttttatgaccttgttgaagaaaaacaacattgaccaaaaggtsaagttaaacttgaataaacaattgaccaattcttgttaaggtgatgagaatctgtgtttaaataaacctttggcaaaagagaaaacaaataaaataagca

SEQ ID NO: 486340 - DNA, 201 bp, Homo sapiens
attaagcaatagaacagaggaatgaagcaccgttcatggagccacctccagacatcatggtcattccaccagctgaggttgaagggcactgcttttttttmtagtgcaagaggactgtgtgaataaccccctgaataccatatgccaacgtgtatagccccgtgtatagccccgtgtattagtctgttctcatgctgctaa

SEQ ID NO: 486341 - DNA, 201 bp, Homo sapiens
tgaggaaggagaattgcttgaatccaagaggcagaggttacagtgagctgagattgcgccactgaactccagcctgggcgacagagtgagactctgtctcaaaaaaaaaaaaaatatatatatatatatatatacacacacaattatatcatatatacaaatatacatatatcatatataattatatctatatatatatac

SEQ ID NO: 486342 - DNA, 201 bp, Homo sapiens
gaggaaggagaattgcttgaatccaagaggcagaggttacagtgagctgagattgcgccactgaactccagcctgggcgacagagtgagactctgtctcaaaaaaaaaaaaaatatatatatatatatatatacacacacaattatatcatatatacaaatatacatatatcatatataattatatctatatatatataca

SEQ ID NO: 486343 - DNA, 201 bp, Homo sapiens
ctgagattgcgccactgaactccagcctgggcgacagagtgagactctgtctcaaaaaaaaaaaaaatatatatatatatatatatacacacacaattatwtcatatatacaaatatacatatatcatatataattatatctatatatatatacacaattatataatcactaggaccacaaaaataatataattgtgtaca

SEQ ID NO: 486344 - DNA, 201 bp, Homo sapiens
agactctgtctcaaaaaaaaaaaaaatatatatatatatatatatacacacacaattatatcatatatacaaatatacatatatcatatataattatatcwatatatatatacacaattatataatcactaggaccacaaaaataatataattgtgtacatatatacaattatatatataatatacaattttttatatata

SEQ ID NO: 486345 - DNA, 201 bp, Homo sapiens
ggccatggaggaaagggaatgcttatacactgttggtgggaatgtaaattagttcagccactgtggaaagcagtttgaagatttctcaaaaaacttaaaayggaagttccattcaacccagcaatcccattacagggtatatatacaaaagaaagaaattgttctaccaaaaagacatatgcactcatatgttcattgcag

SEQ ID NO: 486346 - DNA, 201 bp, Homo sapiens
agtttaattgatctgatgaaaataagcagtttatgaaaaaatgtgacaattgctataataaaaggataggtcaggtatttggaaaacaaagaaaaaagtgyttaatttttctggagagatttttgggggcaaatttcacaagggaggtgatgcctgagatgagcctgggaagatgactgaggagctaccaggtggacaagc

SEQ ID NO: 486347 - DNA, 201 bp, Homo sapiens
gtcagaggagatatactttagcactttgttacacgttaaggccgggtgggaaaggagtaagagttacttttaatttaagcacatctgtttccttttttttytttgcccttgtgacagcaactggctccattgcccaggctggagtgcaatggtgcaatcatagctcactgcagcctcgaactcttgggctcagacaatccc

SEQ ID NO: 486348 - DNA, 201 bp, Homo sapiens
atctgatgaaaataagcagtttatgaaaaaatgtgacaattgctataataaaaggataggtcaggtatttggaaaacaaagaaaaaagtgcttaatttttstggagagatttttgggggcaaatttcacaagggaggtgatgcctgagatgagcctgggaagatgactgaggagctaccaggtggacaagccagagatggc

SEQ ID NO: 486349 - DNA, 201 bp, Homo sapiens
cctggggtgttaatgactctcctgttactaacctggggttactatactatcttccgtggtctgctgctccctctactcctatcccaaattatagtctccttttttttttttttttgagaccaagtctggctctgtcgcccaggctggggtgcagtggcgcgatctcagcacactgcaacctctgcctcctgggttcaagtg

SEQ ID NO: 486350 - DNA, 201 bp, Homo sapiens
atttcacaagggaggtgatgcctgagatgagcctgggaagatgactgaggagctaccaggtggacaagccagagatggcaagggctgtacatcctgacatmgagtctgcttgggggccagactcagatgacagggagaggcaggaggggttgggtgtcattccaggagggcctgggctgatataaacagtcagactttacc

SEQ ID NO: 486351 - DNA, 201 bp, Homo sapiens
atagagttctttccactgtctcaaactgtcttctattaaacatttgataaatctcatttttccaaaacttgacatgaaggactcactcctctgccatttcmtggaaccatgggctgcttttgcaccttttcttctagatgtgcactttccgctaagcttggcaggatctccaaactcctaaactctgtgtcctggtaagtc

SEQ ID NO: 486352 - DNA, 201 bp, Homo sapiens
aggactcactcctctgccatttcctggaaccatgggctgcttttgcaccttttcttctagatgtgcactttccgctaagcttggcaggatctccaaactcytaaactctgtgtcctggtaagtcatcaccaggactaaacaaacattaatgttggtgcttattactgagccgttgggtctatttttaagaacacaaagaat

SEQ ID NO: 486353 - DNA, 201 bp, Homo sapiens
tttccacttgcaggagcagtgtagctccatagcagtgccatcagtttataactatgtgaagatttgtgtatgagaacctcagtgaactgacaacacattaytgatttactccagtaatgtcctgtgctttttatagattagaacccctgggaagcaggccatctggcttgccctttagtttgacctggcctgtagcatggg

SEQ ID NO: 486354 - DNA, 201 bp, Homo sapiens
acccagtaaacattagttagcagaatatcttgtttttttaaagaaactcaaagccttaatgaggagctgcaacttgataaatgaaatacattcaaaatgtktggccctattttatttcttaggtttgtgtctgtacatattaaatgtggatgggaacagcaaaacccaataaattatatttggcaggaaagaagtagaata

SEQ ID NO: 486355 - DNA, 201 bp, Homo sapiens
atatcttgtttttttaaagaaactcaaagccttaatgaggagctgcaacttgataaatgaaatacattcaaaatgtttggccctattttatttcttaggtktgtgtctgtacatattaaatgtggatgggaacagcaaaacccaataaattatatttggcaggaaagaagtagaataagttggtgttttcactattaggat

SEQ ID NO: 486356 - DNA, 201 bp, Homo sapiens
ccctccccttgcatttcaggttaatgccaacaacaatgtgtgtgtccaagagggtttggaggagcaatggaggggtgcaccctgactctgacaccttgttmtaaagtatacagttgctagacagagttcttcttcttgttctctggaatgtggtgaagaggaaggaaccagctgtcttgtgttgcaatttcaaaatgtcaa

SEQ ID NO: 486357 - DNA, 201 bp, Homo sapiens
taatttgtactgatgcttaaaaaaaaaagtttaaacaaaacccagatggaagctgtctaaatgcttgggttagaaagaagattgggtcaaatacaatagcmagtcctaaagcaatagcctgctgcagggagtatacatctatccacatttagtctaaatgtagagtgacctttcactaccaagccttgagcttaaagttgg

SEQ ID NO: 486358 - DNA, 201 bp, Homo sapiens
tagctccatagcagtgccatcagtttataactatgtgaagatttgtgtatgagaacctcagtgaactgacaacacattactgatttactccagtaatgtcstgtgctttttatagattagaacccctgggaagcaggccatctggcttgccctttagtttgacctggcctgtagcatgggttttggaattcacagacctaa

SEQ ID NO: 486359 - DNA, 201 bp, Homo sapiens
tcttactacacacacgttcatgtgtgcacttgtatgtgtacctgtgacatagctgtttagaatggttggaccttcagatggattggccacagacctttctrtcatgacacagccttgccagtcattctttcagcttcctagctcccctggcagtggtggagaagatcccaagttgttatcaactgaacaagtgaaggaaag

SEQ ID NO: 486360 - DNA, 201 bp, Homo sapiens
gacacagccttgccagtcattctttcagcttcctagctcccctggcagtggtggagaagatcccaagttgttatcaactgaacaagtgaaggaaagttggktattttaaggcacatgaattattttaggatttctggttgtccctggctaagtttttgatgattactggagataagaaaacaagacttaattattactttc

SEQ ID NO: 486361 - DNA, 201 bp, Homo sapiens
aagttgggtattttaaggcacatgaattattttaggatttctggttgtccctggctaagtttttgatgattactggagataagaaaacaagacttaattaytactttctttaaaaaaaaaaaaaaaaaaagctcttgcagagtttcagaagattctggaaattgacatgatttcctaatgttccagttggtagatatctcg

SEQ ID NO: 486362 - DNA, 201 bp, Homo sapiens
tttaaggcacatgaattattttaggatttctggttgtccctggctaagtttttgatgattactggagataagaaaacaagacttaattattactttctttaaaaaaaaaaaaaaaaaaagctcttgcagagtttcagaagattctggaaattgacatgatttcctaatgttccagttggtagatatctcgggttggcctgg

SEQ ID NO: 486363 - DNA, 201 bp, Homo sapiens
atatctcgggttggcctggggacttgtcatttcagtctcaggcagacactacagatacgctttttgggggatgggtcaaaaggagagtgtgactgaaacaytgagggctttattcttccttttgtgaattctaacactaatcatattcatcatgaaagacgtttccaatactgagagagtgtaaggcaaaaatcaaaaggg

SEQ ID NO: 486364 - DNA, 201 bp, Homo sapiens
aaacttcttgtaatctttgtgtactcatgcaagtatattctatcggttaaattcttagaagtggaattatgtggccaaaaggtgtgtgtgatggttaataktgtgtcaacttgattggattgaaggatgcaaagtattgttgttcctgggtgtgtctgtgaggtgttgccaaaggagattaacatttgaatcagtggactg

SEQ ID NO: 486365 - DNA, 201 bp, Homo sapiens
ggcttttctcaatccacagctgttttttaaaaatgagctattttcttctatgacttttacaattattttgatgatttcttaccttatggttaaaaatttgrcacatttgaaatttattttggtttaatgtttgaggaaaggatccagatatgtttttcttccaggtggctggtcagttttgctcaaaatgttgattgaaac

SEQ ID NO: 486366 - DNA, 201 bp, Homo sapiens
tcaactcttctttccaaatgaatgcttcctatctgccaggtacaattctaaatgctgtatgtattgattcatttaaactacacaacagccctttgaggtaygtactattattattattattatttttgagacagggtctcactctgtcagccaggctagagtgcagtggcacagtctcggctcactgcaacctctgactct

SEQ ID NO: 486367 - DNA, 201 bp, Homo sapiens
tcctcagcctcccaagtagctgggactacagtcacatgccaccacacctggctaattttgtattttttgtagagatggggtttcaccatgttgcccaggcrggtcttgagcttctgggcccaggtgatcctcctgtctcggcctcccaaagtgctgggattataggcgtgagccaatgcgcctggctgaggaaggtatcat

SEQ ID NO: 486368 - DNA, 201 bp, Homo sapiens
caggatgtagtgaacttagaactctactccaggtgatatatttccaagttcagagtccaaaataaaacaaaaggtacagtaattataagtcaatttaattytcaatagttttggacatgcggctaaaaattatagctagtggccatctgtcaacaaatgtaaactatgaaactggatattaaattatatctaatttaatac

SEQ ID NO: 486369 - DNA, 201 bp, Homo sapiens
taggcatagcccaagtctcaggaagcagaatatacatggggtggggtggggtggggtgggggaggagaggggagctgtttctgcccccacccattacctastagtccaaagccacttgagccatgggaacagcaatgctaaccacaatagctgcagggacctggaaggggattgttgatgcatccaactgcaatgctcttt

SEQ ID NO: 486370 - DNA, 201 bp, Homo sapiens
ccagtggagagggagcaaaaaggaaaatacaggatacaatttcaggaaaaatttcataccaatttcctgaggtaatttctgaactcgaacattttcagtgycaccacattgtgtttcctgctgaatcaagtctacatcacttcggtttttaaagccttccacgatccttccctgaacactgtagttttcactgatggttgg

SEQ ID NO: 486371 - DNA, 201 bp, Homo sapiens
ccagaatagtggctgttgctcacactgtagatagcattggattgccttatttaatcctggcatgaccacttatgcatgcatgattttagacgaactaattygcctcactaagatgaatcttttgatttgttcctacttcgcagggtcactgttgtgaggtttaagagagataatttaatgtaaaatttagcataatgccta

SEQ ID NO: 486372 - DNA, 201 bp, Homo sapiens
cttgcctgtgcggaggcagcttcctgtgcactgccggctgccgggtgtgcttgtccatgtgccagaccccctgtgcaggagaatccagcactttagagcaygctttgtgtaaaatagagtgaaaatcgaatcatattcggggagtgtctgagagacaggactagctcaagaggcagcctctaaagtgagaatagcactgaa

SEQ ID NO: 486373 - DNA, 201 bp, Homo sapiens
caccacacctggctaattttgtattttttgtagagatggggtttcaccatgttgcccaggcgggtcttgagcttctgggcccaggtgatcctcctgtctcrgcctcccaaagtgctgggattataggcgtgagccaatgcgcctggctgaggaaggtatcatcataattgccacctcataaataaggaaactgaagcatgg

SEQ ID NO: 486374 - DNA, 201 bp, Homo sapiens
actagacctggaaggacagagcgcccatggctatggatagctcccacgactccccacagacaaagatttctgcctggtggagcttattccagtctctcaagggaacacagacaataagtaatagacacgataggtaagtaaatggtagaacatgttagaagatgacaagtattatggcggaaaaaaagcagagtttggtga

SEQ ID NO: 486375 - DNA, 201 bp, Homo sapiens
aaaaaaaaaaaaaggaagaaaaaatagatggtgacattgagcaaggaattgaaggaggtgacagagtcagtcatgcagctatcctgggagaaagggttctrgacagagggagcaggagcgcaaaagccctaaagggagagagagcatggccgtgtgtttaggcagcaaggaagccagtgtggtggagcagatggggaccga

SEQ ID NO: 486376 - DNA, 201 bp, Homo sapiens
ttctctcctttttcatgtcttagctcaaatgtctcccgttggagaggctttccctgacctcaaggaggcctctcctgtttatcgttggtctcaccactccstgtatttccttcatggtggttactgcagtctgcagtcctatagtttacctaattccttttcaatggtctatttcttactgctagaacgtaagctccataa

SEQ ID NO: 486377 - DNA, 201 bp, Homo sapiens
tcctttttcatgtcttagctcaaatgtctcccgttggagaggctttccctgacctcaaggaggcctctcctgtttatcgttggtctcaccactccctgtayttccttcatggtggttactgcagtctgcagtcctatagtttacctaattccttttcaatggtctatttcttactgctagaacgtaagctccataatcaga

SEQ ID NO: 486378 - DNA, 201 bp, Homo sapiens
tttgattgtgaatagttctcacagtgtttattccaaccactattttcttcttggtggtcatgcttttaaaacatctgaaggccatattctcagctttgctktgtcttgtcaatctagatacctttccacaggtacccttcacattttaactttcttggcttccaattaaagaggcaaagcccagcacttcgacatttacac

SEQ ID NO: 486379 - DNA, 201 bp, Homo sapiens
tcggacttccaaagtgttgggattacaggcatgagccactgcgcccagcccaggcgtacttattttcatttcacaaatgaggaaagagaggcttggggctmtaggcaccttgctccaggccagagagctgttacgcggcagagctgcaagcatgggtcttttgataacacacctactgtgtcctgctaaccttactttgtt

SEQ ID NO: 486380 - DNA, 201 bp, Homo sapiens
agttctcacagtgtttattccaaccactattttcttcttggtggtcatgcttttaaaacatctgaaggccatattctcagctttgctttgtcttgtcaatmtagatacctttccacaggtacccttcacattttaactttcttggcttccaattaaagaggcaaagcccagcacttcgacatttacacttaagtattttct

SEQ ID NO: 486381 - DNA, 201 bp, Homo sapiens
aatgaggaaagagaggcttggggctctaggcaccttgctccaggccagagagctgttacgcggcagagctgcaagcatgggtcttttgataacacacctastgtgtcctgctaaccttactttgttgtttaaatctactgttttattagataaggttctcctgagccaagatttcagttgcaagtgatgtagtgatcaatt

SEQ ID NO: 486382 - DNA, 201 bp, Homo sapiens
aaagagaggcttggggctctaggcaccttgctccaggccagagagctgttacgcggcagagctgcaagcatgggtcttttgataacacacctactgtgtcstgctaaccttactttgttgtttaaatctactgttttattagataaggttctcctgagccaagatttcagttgcaagtgatgtagtgatcaattgcttcca

SEQ ID NO: 486383 - DNA, 201 bp, Homo sapiens
tcacagtgtttattccaaccactattttcttcttggtggtcatgcttttaaaacatctgaaggccatattctcagctttgctttgtcttgtcaatctagayacctttccacaggtacccttcacattttaactttcttggcttccaattaaagaggcaaagcccagcacttcgacatttacacttaagtattttctaggta

SEQ ID NO: 486384 - DNA, 201 bp, Homo sapiens
tccaggagaagccagtgagggtggggggaagagacatagggaacaggaaggagcccacactcagcctgactttcctttttacttgtataaatgtatggcayacaagtataattttgttacatgcagaaattgtgcagtagtgatgtcagggattttagggtatacatcacccaaataatgtacagtgtactccttacataa

SEQ ID NO: 486385 - DNA, 201 bp, Homo sapiens
tctagatacctttccacaggtacccttcacattttaactttcttggcttccaattaaagaggcaaagcccagcacttcgacatttacacttaagtattttmtaggtagaagccatctgacctttaaaaaagacatcttttataaattcttctttgttaaccaccattagtgtcaccacttttcgatcctttcagtccttct

SEQ ID NO: 486386 - DNA, 201 bp, Homo sapiens
gcagtagtgatgtcagggattttagggtatacatcacccaaataatgtacagtgtactccttacataatacctcattgtctggcccctcccactgcccccmccactccgagtctccattgtccatcattacacactctaagtccatgtgcacacattatttagctcccacttataagtgagaacatgcagtatttgtcttt

SEQ ID NO: 486387 - DNA, 201 bp, Homo sapiens
agcccagcacttcgacatttacacttaagtattttctaggtagaagccatctgacctttaaaaaagacatcttttataaattcttctttgttaaccaccawtagtgtcaccacttttcgatcctttcagtccttctttcaggattttgaaaaagactcgtaaattggatagcttttctaaaagtgcaactctctcaattct

SEQ ID NO: 486388 - DNA, 201 bp, Homo sapiens
ccaggcaaaccatttaatgttctgcaggcaatatggatatggacatacaggtaaaaagaagatctggatctccctgcccttcaattctttcatttcctgastgtgtgaccattattcataatgaccatgtgcagtcttggcttgttccttctgtttttggtttagaatccttacctgggaggggaaggaaggataccttgt

SEQ ID NO: 486389 - DNA, 201 bp, Homo sapiens
aactatttcaaagtgttaaaggaagctgcacccaagacctggtccttgttcccatccaagggactgctttgggactaggaggcttaagaagccctgctgtscctcaaggccatcctgcactagaggcctgattcattgcttggaacttcacgggggaaacaggacggaccctggacttagcctggggactcgtgggcaggg

SEQ ID NO: 486390 - DNA, 201 bp, Homo sapiens
gtgactataatgcccagtcagggttaaaatcactgttaacaataggggaggtttttctacttagtttttatttctcagcaagatgatattttaaaaagcamactgcaggagaatggaagatgaatagaaaggtggtgaggctaacaggagagcctcaggaaatcaccgagcaaatgagacaagggcctggatgaagcaggg

SEQ ID NO: 486391 - DNA, 201 bp, Homo sapiens
tgatatgggggggagaaaagactcgattttcaatttcaatttaattacacaatccatagtgcctaatgggaaggatttagcggcaagattaatgctcagcrgcgctccattttgccttttttttttgataaaaaatactgtatggattatctaaagtgggttttcaaaaatgtttttcaagagccaaattattttggtggc

SEQ ID NO: 486392 - DNA, 201 bp, Homo sapiens
gaaaagactcgattttcaatttcaatttaattacacaatccatagtgcctaatgggaaggatttagcggcaagattaatgctcagcggcgctccattttgycttttttttttgataaaaaatactgtatggattatctaaagtgggttttcaaaaatgtttttcaagagccaaattattttggtggcatagtgatttgaaa

SEQ ID NO: 486393 - DNA, 201 bp, Homo sapiens
tatctttcttgctctctgtggtactaagcacactgcctggcgcatagaagatgttaaggaaataattcttgaataagtaaatgtgcttctaatttaatagyggtcttctaaacaactgttttatgaccttgttgaagaaaaacaacattgaccaaaaggtcaagttaaacttgaataaacaattgaccaattcttgttaag

SEQ ID NO: 486394 - DNA, 201 bp, Homo sapiens
tgaccaaaaggtcaagttaaacttgaataaacaattgaccaattcttgttaaggtgatgagaatctgtgtttaaataaacctttggcaaaagagaaaacamataaaataagcacatgggaatctgcttgcagtaaagtagatgtggaggcttcgtgtttaacctgcctgccaaatcagatcagttcaaagtcactcaacgc

SEQ ID NO: 486395 - DNA, 201 bp, Homo sapiens
tcagcctgcctttactccattttatatgtcaggtttccttcctctaaaaattcttagggtttaccacttcagcatgcagatttaattactggtagtgctgyctaaggcaagcagtcctatcagtgctaaatctgtttaaaaaaagtccacacttttcttggggaaaaaaaaggttgtataatttataagagttcataatga

SEQ ID NO: 486396 - DNA, 201 bp, Homo sapiens
tgcttgcagtaaagtagatgtggaggcttcgtgtttaacctgcctgccaaatcagatcagttcaaagtcactcaacgctgtctccaaacctgtcgagggcmtgccagcaatcaggatttccaggccttactgcagacatcctgaatcagaatgtctgagtgtaaggcccctgactttaatttcaacaagatccccaggtac

SEQ ID NO: 486397 - DNA, 201 bp, Homo sapiens
ctacccactctacctgttaagcttaggtgtgtctcctctgtgcttctatataacccttcactatagagttaggatgttttgttatggttatatatttactygtctttcttccaaagaagactatgagctcctttaaaggaagaggcaaatgtaataaattattacaatccctagcgcctagaagtgtaacagattcacaat

SEQ ID NO: 486398 - DNA, 201 bp, Homo sapiens
ccatataaagtttatgtgtcctatttagctaaatgttatgcatatcaaactgtataatctggtacataattacaattaagaattttatttacattcccacsaaaagccgagcaatttacaaaaatagtttagttatttcatgtactctatcttctaactctagaactgatagactataatgttgatagaaattaaacttaa

SEQ ID NO: 486399 - DNA, 201 bp, Homo sapiens
agtagatgtggaggcttcgtgtttaacctgcctgccaaatcagatcagttcaaagtcactcaacgctgtctccaaacctgtcgagggcttgccagcaatcmggatttccaggccttactgcagacatcctgaatcagaatgtctgagtgtaaggcccctgactttaatttcaacaagatccccaggtactccagtggcagt

SEQ ID NO: 486400 - DNA, 201 bp, Homo sapiens
agcctataatcatatgcattaatttatttaaattcctataataaaacaccactgaagtggctttcattttctcttggtgaatgcaggaattattttaacasagcagagagtgctcattggtgtaaacagacaagcttcaaacagttcatagaatcaggcacaccaatgccctgagtgcagggccgtgagcggaaggtaagg

SEQ ID NO: 486401 - DNA, 201 bp, Homo sapiens
atatccaggaacataaaccaaattctacatgttctcacttataagtgggagctaaacattgggtacacatgaacataaagatggaaacaatcgacactgamgaccactagagggaggagtgatggaggtggggaagggttgaaaaactaactattgggtactgtgctcagtatctgggtgatgggatcaatggtatcccaa

SEQ ID NO: 486402 - DNA, 201 bp, Homo sapiens
gccctgagcttcctcccttgtggtattgtcttatggtgcattgaagttgctggcttacatttcttctctgagttctagctttcagatggcgagattgtgtmtgagtttcaccttacacccccagaatctggtacagggcctggaatccatgtcccttaatatttgatgaataataaatatactgggtgtgaggaacgaatg

SEQ ID NO: 486403 - DNA, 201 bp, Homo sapiens
ttccaggccttactgcagacatcctgaatcagaatgtctgagtgtaaggcccctgactttaatttcaacaagatccccaggtactccagtggcagtcatakcatttggggactactgaactagaatataagaaaggaaagtataaaaaaaggcacaagccttgaaaagttcctttcatcctatctgggggagaaagacatc

SEQ ID NO: 486404 - DNA, 201 bp, Homo sapiens
tcagcctcccaagtagctgggactacagtcacatgccaccacacctggctaattttgtattttttgtagagatggggtttcaccatgttgcccaggcgggwcttgagcttctgggcccaggtgatcctcctgtctcggcctcccaaagtgctgggattataggcgtgagccaatgcgcctggctgaggaaggtatcatcat

SEQ ID NO: 486405 - DNA, 201 bp, Homo sapiens
gcatgttgtcacatctgggcatgatgactggttcttgacctacactggttcttgaggagagtaaagatcacctggtggccacaagcagatcatctggaggyaaaactccttatctgaggacaaaaccaactcacttcaagaatgactgaggggaacacaccccaaggatgaagtcaccaagcctctgaattaatgcaccac

SEQ ID NO: 486406 - DNA, 201 bp, Homo sapiens
ttctccccgtcaaagttgttgagcacctcctatacatcaggttctgtgctggatgccagagatggtggggtttataagacaagtgcggactttattcatayacagttggtattctcatagggaaaagtatattaagcaaataactgcacaattaattaatctattaccatagtggcaaaggctccagcaagatactattgg

SEQ ID NO: 486407 - DNA, 201 bp, Homo sapiens
aggctccagcaagatactattggaagctgggagagcagaaatgggggtccaggatacaaagaaaagactggcccagtttgagtgttaagtcctctgtttaytgtgttttattttattctaggtagttgttagggttaattgtttaggtaatgatctctctattttaatttcattaaatgtcagtgtgcactcttttaaatc

SEQ ID NO: 486408 - DNA, 201 bp, Homo sapiens
ggggaggcagcccaatttaatgaagagtttttctaaaaatattccatataaagtttatgtgtcctatttagctaaatgttatgcatatcaaactgtataayctggtacataattacaattaagaattttatttacattcccacgaaaagccgagcaatttacaaaaatagtttagttatttcatgtactctatcttctaac

SEQ ID NO: 486409 - DNA, 201 bp, Homo sapiens
tattggaagctgggagagcagaaatgggggtccaggatacaaagaaaagactggcccagtttgagtgttaagtcctctgtttattgtgttttattttattmtaggtagttgttagggttaattgtttaggtaatgatctctctattttaatttcattaaatgtcagtgtgcactcttttaaatctatataacccccactag

SEQ ID NO: 486410 - DNA, 201 bp, Homo sapiens
gaatattttaggtaggactgggtatgttcagggttgtcacaaattattggtggtggtagtggtggtgtgctattggcttttagtgtatatgggggaggcarcccaatttaatgaagagtttttctaaaaatattccatataaagtttatgtgtcctatttagctaaatgttatgcatatcaaactgtataatctggtacat

SEQ ID NO: 486411 - DNA, 201 bp, Homo sapiens
agatcagtgcttggcataaactgctcaagaaatatttgtggaatagactaccaattcctatgataaattcttagcaaaaatcatgtgtgtctgccctctakaccattgagttgataaactataatttccttaaaaattcctcaattgctggtttccatattgttactacactacaattaacattttaaacgtattttttct

SEQ ID NO: 486412 - DNA, 201 bp, Homo sapiens
aggttgaaaaatgcacctttgactggtataagtgtagatttaccacccttctctttggtaagggtaagctgtaatttatgccattgaaaggaaaaaagaargaagatatggaaatgtgtacctatgggtgaaacccaagcatatttttccacaggtcaatgtctgcattctctgactctagtggcacaggcagggtttgga

SEQ ID NO: 486413 - DNA, 201 bp, Homo sapiens
aaatggcagacttgatgcctggctcagagctgaacagagtgggttccctacaaagggacgaacccaagggagagtcaagaccttagccaataagaattttmtaggtgactcatgtgacaaggcctatctgtggtttttgtggtttttgttgtttccgttttttttatttattttattttattttattttttttaaagattg

SEQ ID NO: 486414 - DNA, 201 bp, Homo sapiens
atgaagtaaaggcttttttactctgcctcctttttttgaaaaaaagaaaacaaaaatacaaagtataaaaaccactaactgtcaagcatacctgctaaatygtgtaaaatctagagggagaagagaacaagaatcgacacatctaccttcaaaccttgagcttaatatagatttttgtacaaataatattagtcccaaaag

SEQ ID NO: 486415 - DNA, 201 bp, Homo sapiens
tctgtactcactgaaagagaaagcaaaaagaatttttacattaaagcatgaaaatgaataaaatgcggtactgatgctgctctgtttacagtaaacacttycaaagtggtcatggactctctgagcaaggatttctatcacaatgtggatgtttacaaccacttcaataactggggaaaaaaagccaaaacctaaataaac

SEQ ID NO: 486416 - DNA, 201 bp, Homo sapiens
actcttgatatgttttagatttcttttgtcagtttatatgcggagtgtttaaagaagagacaacatggcttgtgggaaaaggttggccttttaaattacasatcactggtgtttaaatgtgggctccccaaagaagtgacatttgagtcaaaacctgaaagatgataaaggagttaacttgaccaagaagaggggggagaa

SEQ ID NO: 486417 - DNA, 201 bp, Homo sapiens
caaagaagtgacatttgagtcaaaacctgaaagatgataaaggagttaacttgaccaagaagaggggggagaactttcaggcagaaggaagaacatgacamgggccatgtgataggagggagcatagtggatccaaggatagaaaggaggccagcatggcaggtgtggagaggtgagcagggcatagtgtgagagaggcta

SEQ ID NO: 486418 - DNA, 201 bp, Homo sapiens
ggcagaaggaagaacatgacaagggccatgtgataggagggagcatagtggatccaaggatagaaaggaggccagcatggcaggtgtggagaggtgagcasggcatagtgtgagagaggctacacagataggcaggaaaccctgcaaagaagtcaggtagaccatttttgggaaatttaagatcctctcaagaacagtggg

SEQ ID NO: 486419 - DNA, 201 bp, Homo sapiens
ggaagaacatgacaagggccatgtgataggagggagcatagtggatccaaggatagaaaggaggccagcatggcaggtgtggagaggtgagcagggcataktgtgagagaggctacacagataggcaggaaaccctgcaaagaagtcaggtagaccatttttgggaaatttaagatcctctcaagaacagtgggaaactga

SEQ ID NO: 486420 - DNA, 201 bp, Homo sapiens
catgtgataggagggagcatagtggatccaaggatagaaaggaggccagcatggcaggtgtggagaggtgagcagggcatagtgtgagagaggctacacasataggcaggaaaccctgcaaagaagtcaggtagaccatttttgggaaatttaagatcctctcaagaacagtgggaaactgaccattaaggggattcaggc

SEQ ID NO: 486421 - DNA, 201 bp, Homo sapiens
tgataggagggagcatagtggatccaaggatagaaaggaggccagcatggcaggtgtggagaggtgagcagggcatagtgtgagagaggctacacagatakgcaggaaaccctgcaaagaagtcaggtagaccatttttgggaaatttaagatcctctcaagaacagtgggaaactgaccattaaggggattcaggcaagt

SEQ ID NO: 486422 - DNA, 201 bp, Homo sapiens
tgtatctaggcttcgaaaactttaccatatattgttagaattatgtagaaatcctctgaactgaaacactcaaaagattcaacacaatttatggtaaatartttaaaatagtcttattttccctgggtagatttacttctaaaggatcaattagtggaatctatattgaattaagagttttaatattatttagagttaatt

SEQ ID NO: 486423 - DNA, 201 bp, Homo sapiens
ttctcaatccacagctgttttttaaaaatgagctattttcttctatgacttttacaattattttgatgatttcttaccttatggttaaaaatttgacacakttgaaatttattttggtttaatgtttgaggaaaggatccagatatgtttttcttccaggtggctggtcagttttgctcaaaatgttgattgaaacatcta

SEQ ID NO: 486424 - DNA, 201 bp, Homo sapiens
aattgtggggaggatggagaaccagtttgcaagtggcaacaccccaggtagctctggaagctggaggcaggacctgcacatcagctgctgggatggatggmcttccagccttcctccttttctggcattgctgccttcagaagcaaaattgcagaagtgagcatttgatactgggtcagggagagagatgacttccataga

SEQ ID NO: 486425 - DNA, 201 bp, Homo sapiens
aagttccgcatctcatgactatttatctatgtaaactgagtctcaatatttttaaaagctattttagacttgaggttgtggatattgtttcatggagaaayattacatatatgtcaatttacagtacatttcagtacttcagtatggaagtagtctcttaatcacagtgattgtttctgatcttttaaaaccacaggcaca

SEQ ID NO: 486426 - DNA, 201 bp, Homo sapiens
ttcagaattgataaatggtcactaggatttattcttctctttcttcttttttttttcactgactcctactcatattttaagactcaacttagatactgctytttcccagaagcctttcctgacttccaaatctggattagctgtgccccttggtgccctgagcttcctcccttgtggtattgtcttatggtgcattgaagt

SEQ ID NO: 486427 - DNA, 201 bp, Homo sapiens
tccaatcacctcccaccaggtccctcctccaacactgagaattacaatttgacttgagatttgggtggggacacagaatcaaaccatatcaaacatggtaraaggaattcattattttatccattattgtttctctaagagagaaacagggtaacagagtgtgacatacagccagcctgcatgctaacacatgagtgaagc

SEQ ID NO: 486428 - DNA, 201 bp, Homo sapiens
tactgggtgtgaggaacgaatgggaccttcctgagatatgtatctggaagtcattaatggggaaaagtgctctcaagagtggtctaaagattttagaattrttttcacagaaatagtgtttgaagtcattggaacgaattagacactatgggagaaagaagaaaaaaatgtctccgggaatgggaaaataagagcctatga

SEQ ID NO: 486429 - DNA, 201 bp, Homo sapiens
ttctagttctccaaaaagacttgacagccacacaatgatagtgggggacttcaataccccactaacagcattagacaggctattgaggcagaaaaccaacraagaaattctggacttaaactgaacatgtgaccaattggacctaatagacatatacagaatattgcccccaacaaccacaaaatggacattttttaaaat

SEQ ID NO: 486430 - DNA, 201 bp, Homo sapiens
acacattaaagggaataaaaattttttaaatgccatgtgattttgaaataattctgtggttttaaaaagaactgttgcagttgaataaagataaaaatcasggagtgaggagaaagtgcatagtgaagaaatcgaggttgaaggtgaagcataatatatacagctcagtggttctcaaccaggtatgcacatcagttcacc

SEQ ID NO: 486431 - DNA, 201 bp, Homo sapiens
tgcaatgcctgtcaaaaagcagaaatcatataattttctttcttaattttgataaatttcacaatgaacaatttaccagtctatcgcagttggcaagttartctacctacttactaccctatttccataaaataacctttttatttacctagatctttttcatcaataaaaaggaaaataatcctagcactttggttccac

SEQ ID NO: 486432 - DNA, 201 bp, Homo sapiens
aaattcaatatatatactttcaggaaaatccattccatgtatcacctaagggcatcttgcataccatcagtggcccatatgctgcctccatgatgaggaakgacactgtttttgagaaaggaggaaagaaaacgaggattcaggaggaaatgccttatattaagatggagatgaagatttgtgtgcatctcatttgaaggt

SEQ ID NO: 486433 - DNA, 201 bp, Homo sapiens
ctgtcaaaaagcagaaatcatataattttctttcttaattttgataaatttcacaatgaacaatttaccagtctatcgcagttggcaagttaatctacctrcttactaccctatttccataaaataacctttttatttacctagatctttttcatcaataaaaaggaaaataatcctagcactttggttccacttaaatat

SEQ ID NO: 486434 - DNA, 201 bp, Homo sapiens
gatatcatgcacattgctgcatcaaaaagttatctcttctattccattgcctcaaaatatttgaggagagtctttgatggaaaatattgattttgcctaaraggtgttttatggggtgccagttaaaagttaaaaactgctgtgggaaattgcttgtctggttaaaggataatatttaggtattcttggcaaaaccaattt

SEQ ID NO: 486435 - DNA, 201 bp, Homo sapiens
atctgtcacccctttctttgactaggaaagggaattccctgatcccttgcacttcccgggtgaggccatgcctcaccctgcttcggctcacgctcagtgcrctgcacccaatgtcctgcacccactttctgatactccccaatgagatgaaccctgtacctcagttggaaatgcagaaatcacccgtcttctgtgtcgctc

SEQ ID NO: 486436 - DNA, 201 bp, Homo sapiens
gtgcgctgcacccaatgtcctgcacccactttctgatactccccaatgagatgaaccctgtacctcagttggaaatgcagaaatcacccgtcttctgtgtygctcatgctgggagctgtagactggagctgttcctattcggccatcttggctccacccttgtttcacacaaagttttataaatatggaatgcagacaaag

SEQ ID NO: 486437 - DNA, 201 bp, Homo sapiens
atcaatcaataaacacctattaggcccagatatgattaaggccctgtgctagacaatgtggcaaagccagaatgagtaagatttaatacctgatcttcatyagagaatatttgaacctatctgtttataacttgtactggttgttctagttgagctttctagaacaactcataacaaatctgttctctcctttacatgaaa

SEQ ID NO: 486438 - DNA, 201 bp, Homo sapiens
ctgaatcctaaattcagacattgtacttatttgacataaatcagaaaaaaactggtaaaagtcaggaaaaaaaatctaactagaagtatacaagaaaaatktaaaaagtttctgagttctggggagatagtcagaaaacaaaaaatttcagttagacagagacaattacatcaagacatctatggtacactatgctggcta

SEQ ID NO: 486439 - DNA, 201 bp, Homo sapiens
aattacagacatttctcatagaaagtttaaaaattgatttactatctgaactgctcagaaattttgctactgcccagatataattctggatttgtgtgggyctgttctttccactaaatgaaacaaccttaataaaaatgctgttcttacaacttcaataagagcttttgtcttacattaaagctttataatattgcattc

SEQ ID NO: 486440 - DNA, 201 bp, Homo sapiens
ggagcaatggaggggtgcaccctgactctgacaccttgttctaaagtatacagttgctagacagagttcttcttcttgttctctggaatgtggtgaagagraaggaaccagctgtcttgtgttgcaatttcaaaatgtcaagttttctttttatgtgtgtgtgttatggccatggattggcaagaaaaagattttcacagg

SEQ ID NO: 486441 - DNA, 201 bp, Homo sapiens
ttagatgaaaaataagacacctctctgttctcacaaacactcgtctgtttttgttagcgaagacagaagtgtctatcatgtgagttttgtgatgcagaggkataaacacatgttcagaaaaacatctgacttccagtgttgcttctaacacttaccagcctcgtaaccagagggaagaaacttcatctaagtcttagtttc

SEQ ID NO: 486442 - DNA, 201 bp, Homo sapiens
aggaaatgaattcaaacaagttcttatgctttttctcagctgttcctcaaggtacggggaggaaagcacactgctgctgagtaactgctgtgccctgggcmtaggcgacatacctcacagacattatgtcctgaaaagtagagattattcctcctatgtttttaaagattatgtgaccagggctcaaatacatgcagaaac

SEQ ID NO: 486443 - DNA, 201 bp, Homo sapiens
taatacatactgatattatcatattatgtattgtctcctacattgcctgaaacatattcttctaaggataattttttctttagtgcttatatataaattayggaattattatagaatgttgaattaagatatttagatactttagagaagacactctgttaattaaacaactttcaaacatttaagctcacttcaagatat

SEQ ID NO: 486444 - DNA, 201 bp, Homo sapiens
ggtgtagaaatgatgtaatggacttgagggactcagagggaagggttgagggagggtgagggagaaaagacaacatatggggtaccgtgcacactgcttakgcgatgagtgcaccaaaatctcagaatcaccactgaagaacttatccatgtaatcaagaaccacctgttctgcaaaaattattgaaacaaaattttttta

SEQ ID NO: 486445 - DNA, 201 bp, Homo sapiens
gcaggttgcgcacactgttggctcatcttatgatgaaggtggtgttgagacacttctgtgcattcatgagcttcaggaataaaatttgtagaaacagcccyaacccactatcatcaacatgggtggggaaggacctatttctctaagatttataattccaggacaactgcctcaaattctccaaactttgcagtgagactc

SEQ ID NO: 486446 - DNA, 201 bp, Homo sapiens
tccaggacaactgcctcaaattctccaaactttgcagtgagactcactaattcttctcattgtaagttgcttgattaatcaccccgaactgattaaaattmtagggaaagttattttgctgcctaaacagtttaaagcagtggttctaaacctctttcaggtaacaggcccctttgagaatctaagagcagttatgattct

SEQ ID NO: 486447 - DNA, 201 bp, Homo sapiens
gttttttttggtcaaagggatttggaaaatacttcttttctaggtatctcagtaggaactttactctctcaaaccataaatttgtagtgccttacataaaragttacaattaaatcaacataaatcttttgttttaataaataaagcacattcatggcttagattttagatcacatttatagatgaggaaaatttctaggc

SEQ ID NO: 486448 - DNA, 201 bp, Homo sapiens
gggatttggaaaatacttcttttctaggtatctcagtaggaactttactctctcaaaccataaatttgtagtgccttacataaaaagttacaattaaatcmacataaatcttttgttttaataaataaagcacattcatggcttagattttagatcacatttatagatgaggaaaatttctaggcccaaacagtaacagtg

SEQ ID NO: 486449 - DNA, 201 bp, Homo sapiens
tacaattaaatcaacataaatcttttgttttaataaataaagcacattcatggcttagattttagatcacatttatagatgaggaaaatttctaggcccamacagtaacagtgaagctactactgctggaaggaataatgtgccacctgtgtcttaaatctcaagagcagagacttcagggcagagaacaccatacacatc

SEQ ID NO: 486450 - DNA, 201 bp, Homo sapiens
agaacttcacaagatctgtatgtatacatttctatgatattctaagttttttactttaataatactatatcattataaatataatcatttttaacagtaaktgagtgcctccaatgggcagcaattgcaaattgaaagacaaaagtacaagatgagcacagcagggatcagtaaactattgcctgtggaccaaatctggcc

SEQ ID NO: 486451 - DNA, 201 bp, Homo sapiens
aataattaaagacttttttttaaaaatgagatttatgatgatggtaaccgatgtgactttttgatgttatataaaatctgccaacatttggaaaatctacrtaactcagaaaaactaatattctcccaaacgataaatgcactgtgttcaaaatcacgcacgaataaaagatcctttcagagtgtgagatagatggacttc

SEQ ID NO: 486452 - DNA, 201 bp, Homo sapiens
ccactccacaatccttacagttatcaaagtccagattctgcatattccaatgactcaccttccacttgaacctcatcctgactaaccacaggtagtaaccrcagcctttgtagctgggatgccattccttgctaggggttcccataatttcactcttgtctccaaatgttgtagcccagtctactgatttgaagagtgtcc

SEQ ID NO: 486453 - DNA, 201 bp, Homo sapiens
tttggtagtggtatttgctgcttggcttcatcctggcttctgacctacttatcatctctgtctccttaggcaagttactcagctatagtctgctttacttycctttatgatagatggaaagggagagggctacataatagtacctatgttagactggctatggagattaaattaatgcatgtaaactacttgaagagtgcc

SEQ ID NO: 486454 - DNA, 201 bp, Homo sapiens
agcctaatcccaagttctattaattcagcaagtgatcttttcaaagggcactctaatattcaaaattctctgcatcttcttatatataccttctgctaaayactatacattttaggagataagaataataatacatcaataaaatgtaaaagtatttttcctctttctaattaaaaatgacatacaagtagttcttgaatt

SEQ ID NO: 486455 - DNA, 201 bp, Homo sapiens
tccctaatgataataatattattattttctgttacagaatgttttatagacatctagcaagtggcatcacatttccattgaattaatggatatttccaaaygtttgagaaaatccgaaaactggatgtcctgtacatacatttccattgaagtttatggcagtttctgggcacaatcacatcaatattgcacatctataga

SEQ ID NO: 486456 - DNA, 201 bp, Homo sapiens
tggccaatcagaatatttatttctgtgggtatggcagctggtacataggttagcagaagacctcagtaggatgaatcagaatccaattttggtaaataatkggggaaacagggaagaaagggagtcctttttgaaactgctatcaataaagatgataaaaggcaggaacttcccagtgggtatctttgatgtcaaacgcag

SEQ ID NO: 486457 - DNA, 201 bp, Homo sapiens
aaacactaaaacagtaatgcaatagaagatgtcagagggagagtgggaaggttacgttaaatagatgtccaaggaagatctctctgaggagaagctactakggctgagatcttaatgacaacaaggaacccaagggctggaagcagagcgttttgaacatggccagtgggtgcaaaggccatcacacgtgaatgggcctgg

SEQ ID NO: 486458 - DNA, 201 bp, Homo sapiens
ctcagccacattatagaaaaaggtgtaacattcattgggcttttagaagttctgaacttagcttaatagttctcagatctgagtacctgggatattgggaycccagtttgtggattactagctaggtaatattaaaagtctttttcagttgtaacattttgtgaaaaagaaaccacaaaatactcccatgaatattatctc

SEQ ID NO: 486459 - DNA, 201 bp, Homo sapiens
tgaggtcagttcttcccaagtagtcccacagtcttgccagaatggccactattcctctaacttttccttttccatcacccaccgtatgcaaatcaaaatckctgcctaaataattatatggttttcaaaaataatgaaatcattaattatttctatttaaccattaataaaattgattaacagttacattttgtaggcatt

SEQ ID NO: 486460 - DNA, 201 bp, Homo sapiens
agagcagagacttcagggcagagaacaccatacacatcacctctagactaggttgctgggagccagaggaagatcttggtgaagtgcatgcagccaccatstgctcccatcacctaatgctgcagaaccaactggagctgtgctactttgagataaactagaggtgggttcctgatcatattacatgacactctctcccat

SEQ ID NO: 486461 - DNA, 201 bp, Homo sapiens
tattattagcctttcacttcttggagttcaagaatatctcttgaatatggatatctaagtatctgtattgtactatctattggatatctcttttgcatgtstgagcaaattctagagatatggtgagtttaagaacttaaaaataagttcagagataggacctgtctttgtaacaggaatcagaataattagaaggtggaa

SEQ ID NO: 486462 - DNA, 201 bp, Homo sapiens
agtttaagaacttaaaaataagttcagagataggacctgtctttgtaacaggaatcagaataattagaaggtggaatttgaattaggtcttcaaaaatggrtggaagttggggagaataatggtgatgactaccctaactaggggagagggtttagagagaaacagcattgcccaggcaggtctgggtcaattgctttatg

SEQ ID NO: 486463 - DNA, 201 bp, Homo sapiens
ggggggcaattatggttttttcagcagaggtgggttataaaggaacattaaactggtaaataaattgctcagagtagggggagaaattggagaatatctakgaggcattggtgggttgcacaaagtaagtgatgggttggggcctagactagggaggtagaaatgagaaggaaaatgaagaaaatcaaagacagcctgttg

SEQ ID NO: 486464 - DNA, 201 bp, Homo sapiens
tataagcagagttgagtcatttattaccagggtggtctgggaaggcagatggagaaagacagagcttttgtctcagggtttcaacacattaaaataaatcytactataaaagtgtaaagattcaatgtagagttcctcaccagagtgtttttagcccagtctttttttttttttggattattcctgccacttgaaaaaagg

SEQ ID NO: 486465 - DNA, 201 bp, Homo sapiens
gtgttcaatatatatattgatctcagtgggtgaagccttgcactagcctccaacatattgagggcagctgctcctggccctggtttgctcatgaaagaaarggtacatgggttaaaaatctttagatggatgatattagggcctgagtttgactgctgatgaattctgggccatatcaaatgctttgtttgtgatagcagc

SEQ ID NO: 486466 - DNA, 201 bp, Homo sapiens
tttttgtattttacacatctataccatcatagttctgtattaggaatacagtgtgctccaaattatgggaattgaggggaaggactgagagttaattctasataacttacaagatcatgatttgcaattttcctgatgattaaccacattatacttgtccttttagtttgaatttacccaaatttctaccatttttccact

SEQ ID NO: 486467 - DNA, 201 bp, Homo sapiens
aaggaaataggtccaatttaaagaagtaagtttggtgagcaacagaggaggtgggatgataagctcggtttagcatttatttggtttaaaataccagtaamacatcccacaggaggcagaaatagatatcaggaaaataccaggcagtcttctgcagagagatgatggggagaagagagcgtagaagactctcgagttgaa

SEQ ID NO: 486468 - DNA, 201 bp, Homo sapiens
tgtttaaatgtgggctccccaaagaagtgacatttgagtcaaaacctgaaagatgataaaggagttaacttgaccaagaagaggggggagaactttcaggyagaaggaagaacatgacaagggccatgtgataggagggagcatagtggatccaaggatagaaaggaggccagcatggcaggtgtggagaggtgagcaggg

SEQ ID NO: 486469 - DNA, 201 bp, Homo sapiens
ccatttttgggaaatttaagatcctctcaagaacagtgggaaactgaccattaaggggattcaggcaagtgcacaggtagtgacatcagaatagcatgcamagcctatgtcctgaatggtattgcctaggttttcttctagggtttttatggttttaggtcttacgtttaagtctttaatccatcttgagttaatttttgt

SEQ ID NO: 486470 - DNA, 201 bp, Homo sapiens
gcaatgagcatgtgctgtgtccaggcagaaggggtgcgggcttgagcccaggcagtgagaatgggaagggagggacgccaggagcaggtggtatttctgargtaggttctggagattgattgaatgtgggaaatacaggagcaagaagcaaggacaacactcaggtttttattagggaatctggcagatgatagcattatt

SEQ ID NO: 486471 - DNA, 201 bp, Homo sapiens
aatgagcatgtgctgtgtccaggcagaaggggtgcgggcttgagcccaggcagtgagaatgggaagggagggacgccaggagcaggtggtatttctgaagyaggttctggagattgattgaatgtgggaaatacaggagcaagaagcaaggacaacactcaggtttttattagggaatctggcagatgatagcattattaa

SEQ ID NO: 486472 - DNA, 201 bp, Homo sapiens
gggaaatacaggagcaagaagcaaggacaacactcaggtttttattagggaatctggcagatgatagcattattaaagatacaatgagaatacagcaagayctcatctctacttttttttttaattagctgggtgtggttgcatgtgcctgtagtcccagctactcaagagactgaggtgggaggattgcttgagcccttg

SEQ ID NO: 486473 - DNA, 201 bp, Homo sapiens
gcagcaaaaggaaatgaattcaaacaagttcttatgctttttctcagctgttcctcaaggtacggggaggaaagcacactgctgctgagtaactgctgtgycctgggcctaggcgacatacctcacagacattatgtcctgaaaagtagagattattcctcctatgtttttaaagattatgtgaccagggctcaaatacat

SEQ ID NO: 486474 - DNA, 201 bp, Homo sapiens; identical to SEQ ID NO: 437348

SEQ ID NO: 486475 - DNA, 201 bp, Homo sapiens
ccttaataacttaaaaaaaaaaattcacaggctcagcaggagtatagaaatactcttatgttcatcagtgaatgctaaatgagtcccctttgtagatgcasgcagaaagagagcaggcatgtgcatgtgtaagaaataagacatgctttgatgattctcaaagacatctgctcttttcctgtggtttttttttttctccca

SEQ ID NO: 486476 - DNA, 201 bp, Homo sapiens
gattctcagcattccatcccataacagatcaatgtgctaatatacaataatattttcatttattaataaaatctttgtgtaaaattgagtacttgggctckatgtctttgggtgaaattgagatagagatgccatgtacagctcctggcattattagtgacccactattggatgccttagtttgggaagcttggaagagta

SEQ ID NO: 486477 - DNA, 201 bp, Homo sapiens
ttctgtggtatggatgtgccaaagtttgtttagccatttactcgttgaaggatatcttggtagtttctaagttttgactatcatgaataaagctgctatamacatttttgtacaggttattatgtgaacataaatcttcatttctctgggataaatgtccagaagtgacattgctgggttatataatagttgtaggcttaa

SEQ ID NO: 486478 - DNA, 201 bp, Homo sapiens
gccagatctaattggtgctgacgccagctgcttgactcccatcacgatctatctgaatccgttcatcactgctgcttcatttgtctgacaggggctcctgstgaattataaaattggttccgacaactttttttttttaacctcaaggctgtgccccagttacctaggtgagtttgacagtctgatgtttctcttcataat

SEQ ID NO: 486479 - DNA, 201 bp, Homo sapiens
ggaagttgtcagactatgaggtgtggataatcttgcttaactgaaatgtggggctctaacatgaggtggtttctttaattttctaaaaaaaaataaatgaracagaaataagtaccctaaaacatgatttatgcacagcagaatggcttttatgtatagacatatgaagcaagaattgaagtgtgtgttatactgtcttga

SEQ ID NO: 486480 - DNA, 201 bp, Homo sapiens
gcccttattcagcctaccacaaatgtataattggtccaagttctatagagagttcaaagataattgatgcatggtccttgcccttaaaacctgtaatctakgcaggagctggcaaatactaaaatgaccataaaacaaggtagaggaactttcatgtcatatgggagttcagaaaagaaagagatgggtcattaactgacc

SEQ ID NO: 486481 - DNA, 201 bp, Homo sapiens
tatatgcatctatcccatttgttctatccctccagagaaccctgactaatacagtatggaaattgaaatttttggttgttattgctacatgaccaaaaaakatatattatataagtaatatatatttacactcccaccaacaatttatgagagtttgttatttcacccacatcctctaggctttagcattgtcagactttg

SEQ ID NO: 486482 - DNA, 201 bp, Homo sapiens
accaggcagtcttctgcagagagatgatggggagaagagagcgtagaagactctcgagttgaagggaaataaatatcaagatttgaactttggaaaatggktgtattttatttatatttgaataatttgatgtttcaaattattcaacttagatagtggaatgcaaattttacatcatccatagtgaataagaagagactc

SEQ ID NO: 486483 - DNA, 201 bp, Homo sapiens
agtccagtctccattcagatgaagagggccaaagttggcctgggggtgtcaggaaaaactgccaaaaggctccagcttttaaactgagacacagcttacasaattttccctttctagttcccataactgttcacacccactgactcttccagcctggggtgttaatgactctcctgttactaacctggggttactatacta

SEQ ID NO: 486484 - DNA, 201 bp, Homo sapiens
aaagttggcctgggggtgtcaggaaaaactgccaaaaggctccagcttttaaactgagacacagcttacagaattttccctttctagttcccataactgtkcacacccactgactcttccagcctggggtgttaatgactctcctgttactaacctggggttactatactatcttccgtggtctgctgctccctctactcc

SEQ ID NO: 486485 - DNA, 201 bp, Homo sapiens
tcaggaaaaactgccaaaaggctccagcttttaaactgagacacagcttacagaattttccctttctagttcccataactgttcacacccactgactcttycagcctggggtgttaatgactctcctgttactaacctggggttactatactatcttccgtggtctgctgctccctctactcctatcccaaattatagtct

SEQ ID NO: 486486 - DNA, 201 bp, Homo sapiens
caaaaggctccagcttttaaactgagacacagcttacagaattttccctttctagttcccataactgttcacacccactgactcttccagcctggggtgtkaatgactctcctgttactaacctggggttactatactatcttccgtggtctgctgctccctctactcctatcccaaattatagtctcctttttttttttt

SEQ ID NO: 486487 - DNA, 201 bp, Homo sapiens
actcagttacttctttataataatacaaaaattgaccaaggtgtccttctcacctcattctggtttgagtccaacttttatatgcttccataatagtttgrgctcccgaattccattgtagagttgtgtctagcatgctggaatcacttgtttacttttatctccatcactggcctgtgatggcaacgggagtagggaaca

SEQ ID NO: 486488 - DNA, 201 bp, Homo sapiens
tacttctttataataatacaaaaattgaccaaggtgtccttctcacctcattctggtttgagtccaacttttatatgcttccataatagtttgggctcccraattccattgtagagttgtgtctagcatgctggaatcacttgtttacttttatctccatcactggcctgtgatggcaacgggagtagggaacactctctt

SEQ ID NO: 486489 - DNA, 201 bp, Homo sapiens
attaggcatgatagtatgcacctgtggtcccagccactggggggctgaggtgggaggatcgcttgagcccaagagtttggagctgcagtgagctatgattrcaccactgcattccaatctgggtgacagagtgagacactgctgctaaaaaataaataagtaaataaaaaaggcatttgcttatgagttaagaaacttatc

SEQ ID NO: 486490 - DNA, 201 bp, Homo sapiens
tcttaatcttattatccaaattacagaatgaaataataaatcttttctagcataggtaaggatccatgttaatggatgcatattgcttttaaaataagaarttaggtaactgtagagtataaacattaacgataaaatttcataaacttcaaatgtatatagataattccatggctacattttagagtttaaggcagaagt

SEQ ID NO: 486491 - DNA, 201 bp, Homo sapiens
gctcaatgcaacctccacttcctggtttcaagcgactctcctgcctcagcctcctgagtagctgggattacaggcatgcaccacaatgcccagctattttktgtgtgtgtgtgtgtatttttagtagagatagagtttcgccatgttggccaggctgatcttaaactcctggcctcaagcgatccgcctgccccagcctcc

SEQ ID NO: 486492 - DNA, 201 bp, Homo sapiens
agtcctataattttgtgggcagataactattgtatgtgtttagaaatttcttattacaagcaatttgtcaatgaaacttcttgtaatctttgtgtactcaygcaagtatattctatcggttaaattcttagaagtggaattatgtggccaaaaggtgtgtgtgatggttaatattgtgtcaacttgattggattgaaggat

SEQ ID NO: 486493 - DNA, 201 bp, Homo sapiens
attcctgagagtttagttaaatgagagataattagaaattttaggctctttctgatatgggacaattccagaagcagtagcagtaactctatcctgtttawtttaatttaaaggactgacttgttattaatgaatgtgtgtgtgtaagtgtatgtgtgtagtattggtccattttagtaggttcagtttttttctaggtca

SEQ ID NO: 486494 - DNA, 201 bp, Homo sapiens
caaagagactcattagtcttgaaaatgtgatagtagccaaatgtattcttgttgttgcccaagtcttcaactaagtgtgtttgtagacagtggaaaaaagmagggaaaaatggccacttaaatgacaaatagaattttggaattccttggcttcaacagaccttagagacaccttctctaaccttttccttttattgttaa

SEQ ID NO: 486495 - DNA, 201 bp, Homo sapiens
tctacctcattgttttcaataactgcattgtattctactgaatagaagtcctataattttgtgggcagataactattgtatgtgtttagaaatttcttatyacaagcaatttgtcaatgaaacttcttgtaatctttgtgtactcatgcaagtatattctatcggttaaattcttagaagtggaattatgtggccaaaagg

SEQ ID NO: 486496 - DNA, 201 bp, Homo sapiens
gcctcaactttgaacaacattattgactaaggatcattcttcttagtttcccgtcttaatgattagctccatttgaaaagtagctctctaattttgttaaygccattattggagttggataaattcgcctactagcccaaccaatttgttcctattttgttgtaattgttgtcttagcaacagcttcttattctctcagac

SEQ ID NO: 486497 - DNA, 201 bp, Homo sapiens
agggatatttatatttgtctttttgctttttacacgtgtagtagggccatggtgtagatgctcttcagctacttgttttttgcttttgtatattacaatayacctgtatattgtaaacacctttttgttggtccctatagatctacctcattgttttcaataactgcattgtattctactgaatagaagtcctataatttt

SEQ ID NO: 486498 - DNA, 201 bp, Homo sapiens
tgaatgaattacagacatttctcatagaaagtttaaaaattgatttactatctgaactgctcagaaattttgctactgcccagatataattctggatttgygtgggcctgttctttccactaaatgaaacaaccttaataaaaatgctgttcttacaacttcaataagagcttttgtcttacattaaagctttataatatt

SEQ ID NO: 486499 - DNA, 201 bp, Homo sapiens
tttgctcctgatgatatccaggtatttcatcaattttggaccatttattattttaacttaccaacatactactagggtagttgaatttgtaccctatattyattcacatagtatggaagtcagaggttcaagtttctttgggatgcctcattttattcttgtggcctttggcttacttgctagtgctgcatctctgggaca

SEQ ID NO: 486500 - DNA, 201 bp, Homo sapiens
ttttctgatgtgtgtgtgtgagtgtgtgtatgtgtgtgtgtgtgtgtgctgctcttcagagtagattgctaaggacaatgacaatatctatttagatactytatttaggacttgtatatttatttttaaatcctttcatttattaagtttattaagtattaataatcttttcatttattgccacccctcacaaatgtatag

SEQ ID NO: 486501 - DNA, 201 bp, Homo sapiens
aggttagaagtccaagggcaaggtgccggcagggcacgtttcattctggggcctctctcctcggctgggggatggccctctttctcttctcaccttgtctycacatggtctttcctctctgcccttacagatttgatgtctctctttgtgttcaaattgcctcttataagaatgactgtcagaatggatgaaggcccactc

SEQ ID NO: 486502 - DNA, 201 bp, Homo sapiens
aaaaattgaagaaattctttttaaaaatcctatactggtgtgaagtaaataaagtgggatggagttagcctttcctcctagcattattttataggatacasacaatccactgtcatgtgtataaaatgttctctgaagtcttgtggaaatgggtcatttctattctttttcctttgttgtgcaaaatatgtaagtttttcc

SEQ ID NO: 486503 - DNA, 201 bp, Homo sapiens
actttatttaggacttgtatatttatttttaaatcctttcatttattaagtttattaagtattaataatcttttcatttattgccacccctcacaaatgtrtagagcatctctcgtgtgctagaactttcctagccacctgaacccacttagatgaaaaataagacacctctctgttctcacaaacactcgtctgtttttg

SEQ ID NO: 486504 - DNA, 201 bp, Homo sapiens
caagattacccagtaaacattagattctggattagaatccagggctttcacaaatcacactgtttaccacatatgctccctcatatttttgtgatactggkctaatttatgtacaaaactgagagacacaaattgatttaaactatccttttgatttatacagtctccagtttcctatctcaaacacacctagcaaagctt

SEQ ID NO: 486505 - DNA, 201 bp, Homo sapiens
ttatttaggacttgtatatttatttttaaatcctttcatttattaagtttattaagtattaataatcttttcatttattgccacccctcacaaatgtatakagcatctctcgtgtgctagaactttcctagccacctgaacccacttagatgaaaaataagacacctctctgttctcacaaacactcgtctgtttttgtta

SEQ ID NO: 486506 - DNA, 201 bp, Homo sapiens
cgtgtgctagaactttcctagccacctgaacccacttagatgaaaaataagacacctctctgttctcacaaacactcgtctgtttttgttagcgaagacaraagtgtctatcatgtgagttttgtgatgcagagggataaacacatgttcagaaaaacatctgacttccagtgttgcttctaacacttaccagcctcgtaa

SEQ ID NO: 486507 - DNA, 201 bp, Homo sapiens
tgagttttgtgatgcagagggataaacacatgttcagaaaaacatctgacttccagtgttgcttctaacacttaccagcctcgtaaccagagggaagaaayttcatctaagtcttagtttcttcaactgtaaaatgagaaaaaataatatcggtccttcctacctcacagggctgtggagaaaataaaatgaaagtaaaca

SEQ ID NO: 486508 - DNA, 201 bp, Homo sapiens
aaacttcatctaagtcttagtttcttcaactgtaaaatgagaaaaaataatatcggtccttcctacctcacagggctgtggagaaaataaaatgaaagtamacattatgaaaatgcctcataaatttcaaagtgttatgcaaattcaaggcactaatgcactgagtaaatggcagacttgatgcctggctcagagctgaac

SEQ ID NO: 486509 - DNA, 201 bp, Homo sapiens
aaagcttttagaagaaaacatagggtaatatcttcataaacttggagtaggcaacagtttctcaaacaggatataaaagaactagcaataaggggaaaatstggtaaagtcaactacattaaaattaagaatttttttattatccaaagacaccattaacagaataaaaggaaaatttatcaataataggaagatattgca

SEQ ID NO: 486510 - DNA, 201 bp, Homo sapiens
ttgagttcccaggttgtaacacaaggagagaaaactacaatagagcccagaagactctttgagtttaagggacaaatatgagaatccatgaacaaggtgtmtagagttctcaagacaaagaaccagaaaggtgcatgcagttcaaagagagaatgctgaacatctgctgaggcttcccattgggtattcagcaatttctga

SEQ ID NO: 486511 - DNA, 201 bp, Homo sapiens
  misc_feature (1)...(201): n = A,T,C or G
taaagagtggactaagcaactaagaaagtattttaggacactttaaaacacctagaaataaattagtttaaacattcagtttgttacctatggcaaaacantaaaattcttgaaatgttgggagtggacaggcaggtgtttgagatatcattctttctatttctgtatggttgaaatattaaataaataagaaattaaata

SEQ ID NO: 486512 - DNA, 201 bp, Homo sapiens
atgctctctgaagatttatccatgattcaggaatactccccccaacctgggggctctgatgctgctccgtcttccctttgcttggctctgataggtacccyagagccactcccctggctgctcaaactcctggtatcccctgcactttcttcttatgtttagccagtgatttcaactcctacatcacaatgaaaagaaacc

SEQ ID NO: 486513 - DNA, 201 bp, Homo sapiens
tagctatattgctcctattgctgcagaaagatatagtccatttcaagttaccatgaaggttaaggaaaaatattaaatttaatgtacttcatatttgcttwtctatatgtcctgggatgaacatttttaaatggcaagaaagctagcagattaggtaagaaaaatggccagagaaaacaagataaaagtgcattaaataaa

SEQ ID NO: 486514 - DNA, 201 bp, Homo sapiens
ctgcagctcaggggaacagacagcacagagtctctgtggtggcttgtctaccattccctggagactgagagctgtcttgggctctatttgccaggtttgcrtgcctacctaccattgtggctcctttgtaactcccacaaatacttaataattgttcaagaatgtatatagataaagggaggcattattgctattaaaact

SEQ ID NO: 486515 - DNA, 201 bp, Homo sapiens
ttgcctttctttactttctagagctgaaaaggaattgaggcataactaaatcctcctttgtgatttttcatagaagaaaactgaggtccagtgggggaagygaattgtacaaaattacacacaagttagatgggaccaggtctctcaactcccagtctggagttcaattttttttttttgagacggagtcttgctctgtta

SEQ ID NO: 486516 - DNA, 201 bp, Homo sapiens
tggaaacggttagacttactcttcatgtcattaaatgaatgtatgcaaagtatttttcccgtgtctgctactgagtagatcctcagtaaatggctcttatrttgaccagaatcatgcatttttctcaaaattttcttccccaaacaatcaagcaactgctttttcttagaaatgtaaaagatttctgtgtctgcaactatc

SEQ ID NO: 486517 - DNA, 201 bp, Homo sapiens
atgctatgtaggaagctgcttatataacggactgcttatctaacattctgaaagtttatgttgcatttacagggatatttatatttgtctttttgcttttyacacgtgtagtagggccatggtgtagatgctcttcagctacttgttttttgcttttgtatattacaatatacctgtatattgtaaacacctttttgttgg

SEQ ID NO: 486518 - DNA, 201 bp, Homo sapiens
aaaatccttgtatatgcaatgaaagctttctgaatgctatgtaggaagctgcttatataacggactgcttatctaacattctgaaagtttatgttgcattyacagggatatttatatttgtctttttgctttttacacgtgtagtagggccatggtgtagatgctcttcagctacttgttttttgcttttgtatattacaa

SEQ ID NO: 486519 - DNA, 201 bp, Homo sapiens
tggtctcgatctcctgaccttgtgatccacccgcctcagcttcccaaagtgctaggattacaggcgtgagccaccgcgcctggccacgaatttatgcagtyttatattttaatactctttactagctagtcttccttttttgattctctctctctctctctgtgtgtgtgtgtgtgtgtgtgtgtgtgttaagccctaata

SEQ ID NO: 486520 - DNA, 201 bp, Homo sapiens
tcacaccccctatgtctttaaaagcaagaagacaaatacaaaaatccttgtatatgcaatgaaagctttctgaatgctatgtaggaagctgcttatataasggactgcttatctaacattctgaaagtttatgttgcatttacagggatatttatatttgtctttttgctttttacacgtgtagtagggccatggtgtaga

SEQ ID NO: 486521 - DNA, 201 bp, Homo sapiens
tcctgttcttgctgagcttacattagagagttggggaggagcatacaaacaattagcaaataagcaaatgtatacggtcttattgtgccatgaagtgaaaygaagaagataaattagggtgatgagctagagagtgagggaggagggaggtattttagataagttatttggggaagattttctgagtgacatttgagcgta

SEQ ID NO: 486522 - DNA, 201 bp, Homo sapiens
ttagataagttatttggggaagattttctgagtgacatttgagcgtagccttaagttaagcttcagtttatcgtatctaatttctttctaaatagtttgaycttgatactttagtgtctaaaatagaatttgttatatttcccttaaaatctgttcccctctgatcttcaccattttggtcagtgttatcattatatttct

SEQ ID NO: 486523 - DNA, 201 bp, Homo sapiens
ttctgctaatgataatgtttgtctcttgcttatggatagccttagcctggtggagatgacaatattctctggcctatgcaagaaaagaggagggaatcccrcttaacgaaaacttaagtcattctcaaatttattcaaatcatacttgaaaaggcggaatgaaatttagggggatatgttttaactatataagcctttgct

SEQ ID NO: 486524 - DNA, 201 bp, Homo sapiens
cctttttgggtataagttcaagtttttggttacttgtagctgaaagcatacacaagccaactacaaaaataatattcaatgctaaatacactaggaataawatctaaaggaaagagcattgcctttaagacagttccaaaaattgtaggcgtgagactcttccccagccaggcactgtactttagaggatcttctcttgct

SEQ ID NO: 486525 - DNA, 201 bp, Homo sapiens
aagcttgtaaagactatcccccataaacttggttgaatggagtttactaggaaaattgttaattgtctagttcattttaggtgtagaagaggctccccacmacttgggcacttaggagaaaacaaccagagcacatcttgttgagtgtctattatgtgagagacagaaagataggtacttaatgtctgcaacgctattgta

SEQ ID NO: 486526 - DNA, 201 bp, Homo sapiens
gtttgaccttgatactttagtgtctaaaatagaatttgttatatttcccttaaaatctgttcccctctgatcttcaccattttggtcagtgttatcattayatttcttggtcatccagaccctgaaattttggggccatttacttctttgtttcctttcccacatgacccattggtaggtccagagcaccttctccagggc

SEQ ID NO: 486527 - DNA, 201 bp, Homo sapiens
acacttatggagcatatgctgtgcacctggcattgttgtcagtactcaggaggcattcctgaacatgtgagacatagtcagaatagactaggttgtgttgyaataacaaacaattgccaagtcacagtggcttaaaaggaaaggtttattcatttatcatactctatgtcctttgatggctgccaggggaataatgttcga

SEQ ID NO: 486528 - DNA, 201 bp, Homo sapiens
atgatgggaagggagagggtcatgaaataaaatgtgtcatcccctgtgtttctggcctgattaagcttggtgtcacttattaggaaacctggcattaccaygaaaatttggtatagaaaagcctgggctttgagcctgtactctttatggcagggaaatggagccagggactggggggtgggtagcattggaaaatgacca

SEQ ID NO: 486529 - DNA, 201 bp, Homo sapiens
cccatatttgtatggaaaaaatttcaggattccaatatattgtttttgcctctacctatcctgaatagaggtaacggaaagcaaaagtaaatattggtttktaatattctaagcaaagagtttggtagtggtatttgctgcttggcttcatcctggcttctgacctacttatcatctctgtctccttaggcaagttactca

SEQ ID NO: 486530 - DNA, 201 bp, Homo sapiens
ttccttatatagttttaggaatacttttgaggaaattgcctttattctttatagtggatttcatataaagcaagttttgtgtttcttaggaataaaatttyaggcttctggaatattttttattttctctctccataaaaagataatttcaatttccctaaattactaggaatctactctacatggtgcagcaaaatttta

SEQ ID NO: 486531 - DNA, 201 bp, Homo sapiens
cctgtcattacatttagtgactctgacatccaatcaactctcagttccttgaccactttgtttttaacagaggagctctccacttcacatcaaacttggtyatcaccagagcctttactattcccaccatctttctgaccactcttgtctcaccttccagttcagtgttatttcctggtttgcaattctttgaccactttt

SEQ ID NO: 486532 - DNA, 201 bp, Homo sapiens
tggcctggggaaaaattaggtgggtggggcaagatatgcttttggggaaggcctctctttgtttgtgtggctgcaggtctcaagctcctaaaacagttctrtagaaggacaccatctacctagaaatacaaaaatagatcagtaagaagatgggataagaaaaccatgatgcagacaggaagatgctggccaactgtgagt

SEQ ID NO: 486533 - DNA, 201 bp, Homo sapiens
tctacctagaaatacaaaaatagatcagtaagaagatgggataagaaaaccatgatgcagacaggaagatgctggccaactgtgagtagaaacaaaagacsagaatggaagatcaacttgtggtatatagggggccagttcttagctgtttgggaggcagtgacttttagctgattgaacgaaaacctgagaaaatcacgg

SEQ ID NO: 486534 - DNA, 201 bp, Homo sapiens
gtatcaatacagaggtcacaataaggtcacagagatacttgcaagttagaactggcagagtctcattagtctactgtttcctgtttggataggatgtggtwgggaaggacttggcttgggaggagacaaagaaagcgcatggtcatctacatatgaccaaatatgtttttttccccagaaccaataacatatatattgctc

SEQ ID NO: 486535 - DNA, 201 bp, Homo sapiens
tacttgcaagttagaactggcagagtctcattagtctactgtttcctgtttggataggatgtggttgggaaggacttggcttgggaggagacaaagaaagygcatggtcatctacatatgaccaaatatgtttttttccccagaaccaataacatatatattgctcataactaacagctaacattaccccctgcctttttt

SEQ ID NO: 486536 - DNA, 201 bp, Homo sapiens
ttgaagtacaaaccaacagttctataaattgtatcttgatcaggatgaaaaacatgcagagtaatgtatgacaggcaaccaagggacataaaaaataaggwttctaatataatatatttctctgtcattgtgaaaatagcctgaaagtgatcaacgttatgtatgtcttaagtagaggaaaataaaatccttagtagtaat

SEQ ID NO: 486537 - DNA, 201 bp, Homo sapiens
attcttccttttgtgaattctaacactaatcatattcatcatgaaagacgtttccaatactgagagagtgtaaggcaaaaatcaaaagggtcacttcaccyttagtcacaccccctatgtctttaaaagcaagaagacaaatacaaaaatccttgtatatgcaatgaaagctttctgaatgctatgtaggaagctgcttat

SEQ ID NO: 486538 - DNA, 201 bp, Homo sapiens
agaaaacaagacttaattattactttctttaaaaaaaaaaaaaaaaaaagctcttgcagagtttcagaagattctggaaattgacatgatttcctaatgtyccagttggtagatatctcgggttggcctggggacttgtcatttcagtctcaggcagacactacagatacgctttttgggggatgggtcaaaaggagagtg

SEQ ID NO: 486539 - DNA, 201 bp, Homo sapiens
aagtgaaggaaagttgggtattttaaggcacatgaattattttaggatttctggttgtccctggctaagtttttgatgattactggagataagaaaacaakacttaattattactttctttaaaaaaaaaaaaaaaaaaagctcttgcagagtttcagaagattctggaaattgacatgatttcctaatgttccagttggt

SEQ ID NO: 486540 - DNA, 201 bp, Homo sapiens
agacttgccagtggtccagcacatcagaacttgtaaaccatcaattggggtacccatttgaaacaatgacattaaaatatgtatctaggcttcgaaaactytaccatatattgttagaattatgtagaaatcctctgaactgaaacactcaaaagattcaacacaatttatggtaaataatttaaaatagtcttattttcc

SEQ ID NO: 486541 - DNA, 201 bp, Homo sapiens
ctcaggaggcattcctgaacatgtgagacatagtcagaatagactaggttgtgttgcaataacaaacaattgccaagtcacagtggcttaaaaggaaaggyttattcatttatcatactctatgtcctttgatggctgccaggggaataatgttcgaattaatcactcagggagcaagcccagtggagcagcttccatcta

SEQ ID NO: 486542 - DNA, 201 bp, Homo sapiens
aaaattattccttttcatgaaaaaagaataaagcctgttattaggagtgcagttaaagcacaatttctatagattactacatattttgttttattagagtkttacaattttaccctgtaaagtggagtaaaagtaaagtggagacttgccagtggtccagcacatcagaacttgtaaaccatcaattggggtacccatttg

SEQ ID NO: 486543 - DNA, 201 bp, Homo sapiens
taaaattattccttttcatgaaaaaagaataaagcctgttattaggagtgcagttaaagcacaatttctatagattactacatattttgttttattagagwtttacaattttaccctgtaaagtggagtaaaagtaaagtggagacttgccagtggtccagcacatcagaacttgtaaaccatcaattggggtacccattt

SEQ ID NO: 486544 - DNA, 201 bp, Homo sapiens
gtgtgtgattgaatgttgttccttctggcagaaatcttttctcagctctatttttgcttgtctatgtcctcaaggcccagctcaggtagcctcctatcccyttctctcaccagcctcatcctcattagtggcttccacccctgaactctcaggacagttttaggatgtatcacccactactacacagtggagcagatgatt

SEQ ID NO: 486545 - DNA, 201 bp, Homo sapiens
gtttattcactcctgtgctagaaaaaaatgataacacattaagagttagagtttaattcccttcccctcgaatctctgcaggcctagtaacttgcttaccyagtcggatacagcagaaatgatgtttttccaatccctaagcttaggccttgagcatcaggcagcttctactttccatctttaaaaacgtgctccagacac

SEQ ID NO: 486546 - DNA, 201 bp, Homo sapiens
gtaaatggtagaacatgttagaagatgacaagtattatggcggaaaaaaagcagagtttggtgaggaggttgtgatggaggtgtggcaggggtgtggaggraaatggggttttcattaagatggttacattgggccagacgccgtggctcacgtctgcaatcccagcactttgggaggccgaggcgggcggatcacttgag

SEQ ID NO: 486547 - DNA, 201 bp, Homo sapiens
cagagaagatttttggaagacctttagaggttgaagtcagactggcaatagtaaatacctaattattgccaggttttaaatagctttgcaaaataggaatrctagtcttaattgcgtaagctgcagctactgactaaaggagggatgtgagcatttgtactttcctctgagcattgaacgtgtttctagtaagttaggtgt

SEQ ID NO: 486548 - DNA, 201 bp, Homo sapiens
taaatggtagaacatgttagaagatgacaagtattatggcggaaaaaaagcagagtttggtgaggaggttgtgatggaggtgtggcaggggtgtggagggraatggggttttcattaagatggttacattgggccagacgccgtggctcacgtctgcaatcccagcactttgggaggccgaggcgggcggatcacttgagg

SEQ ID NO: 486549 - DNA, 201 bp, Homo sapiens
tttttccgaagaaatgtactatagctagattcacctccatagggtaattttcctgggcttttgcagatctgaaacatatggaggatttggctaaaaagcaycccttttcttctaccttctctatgcctctcttctgaaaatgcccagtactcagatctaaaagaaccacccacctgccctatagctgccttccagattctg

SEQ ID NO: 486550 - DNA, 201 bp, Homo sapiens
aaaataaaatccttagtagtaataaataaaaaacaaaccatgagaaaagaaaagagagaagacatttagtggcatcacagttattatgtgtttgtgaacaycttagtgtgttacaaacattttattaaatgtgtcccttttaaaaaaacaaactttaattttaattgaaataactgttgagtcacatgtagttgtaagaaa

SEQ ID NO: 486551 - DNA, 201 bp, Homo sapiens
aatgttatacaaatgaatcataaagcatagagcctttaaggattggcttttttcctcggcatacttctctggagattcttccaggttgctgtgtgtgtcartgtggttggtttctttttatttttgatatattctgtggtatggatgtgccaaagtttgtttagccatttactcgttgaaggatatcttggtagtttctaa

SEQ ID NO: 486552 - DNA, 201 bp, Homo sapiens
aagcatagagcctttaaggattggcttttttcctcggcatacttctctggagattcttccaggttgctgtgtgtgtcaatgtggttggtttctttttattyttgatatattctgtggtatggatgtgccaaagtttgtttagccatttactcgttgaaggatatcttggtagtttctaagttttgactatcatgaataaag

SEQ ID NO: 486553 - DNA, 201 bp, Homo sapiens
agaagtgacattgctgggttatataatagttgtaggcttaattgtttgagaaactgccaaactgttttcaaaaaaagatgtcccaagtgaaacttactggycaattagtcaaccaataataagtatacttaaaaattttgttaagtattcagtaccaagctccatgtcatatgagatacagtagaagtgtaaggcgtatag

SEQ ID NO: 486554 - DNA, 201 bp, Homo sapiens
gggagaaggaaaaaaaatgaagaggaagttaataagtgaggcttgtgcctgtaataaagaggaagatacctgtaggttacagaagctgacatgacaattayggcagattgaataatggcccccaacatgtccacatcctaatcagcctgtgaatacgggacctttcatgacaaagggactttgcagatgtgattcagttaa

SEQ ID NO: 486555 - DNA, 201 bp, Homo sapiens
cgcagccttgctgataccctgattttagtctggtgaggcccatctgaactctgacctttagaattgtaagatgcatacatttgtgttgttttaagccacaragtttttggtgatttgttacagcagcaaaaggaaatgaattcaaacaagttcttatgctttttctcagctgttcctcaaggtacggggaggaaagcacac

SEQ ID NO: 486556 - DNA, 201 bp, Homo sapiens
gagcagttatgattctgcatttcagaaaaatgccaacacacaggaaaaaagggaaaatggcaggaggctaatagaccttcttcagccatgcatagatctgsaagaatctatctgttgctcaaagtctttttgttttttttggtcaaagggatttggaaaatacttcttttctaggtatctcagtaggaactttactctctc

SEQ ID NO: 486557 - DNA, 201 bp, Homo sapiens
tttaactatataagcctttgctaataaaagattaagaagtatgtggcttagcatcttttaattatttttttctagcaacttgaatatacaatgtttgaaawctctggttggatcaacattattttgctcagaggtttgtggactttgcatactgattctttcctgtttccaagtacatttgcttttaggctatttttattc

SEQ ID NO: 486558 - DNA, 201 bp, Homo sapiens
gcttaaattcctattcacattttggagtggccaccaactgtggactgtcaatagtctaatgtggtctgaagagaaagggagagctgctctagaaatcagasacctccctgccagaacttgttctcttccacaattggtagtagaatcttgaacaagtaacttggctcttgcaagattcaatggtctattcatttagatagg

SEQ ID NO: 486559 - DNA, 201 bp, Homo sapiens
tctaccagtcagggcctgggccagcccaaatctctaagctcattgccttcccacctccagcagagcagtcttgtccactgtgtgtgctacacaaataccaycttcttccatgtgtgctgtgatgtgggaaaggatggaaaacactttcttggagaaggaggagctttgagctgtgcccttccagaacaagactaaaggaaa

SEQ ID NO: 486560 - DNA, 201 bp, Homo sapiens
tcatttcatagggatttaagagaggaaggagcttgaaatgcttcaaatgcttcctttacagacagggtaactaggttatagtgctagttgatttgcagggycagacctaaaacccaggtcaccactattgccatgtttagctattttaatgcaagattttttagaaaagtgggatgtggaattggacaataatagtaaaaa

SEQ ID NO: 486561 - DNA, 201 bp, Homo sapiens
tgcaatactttatggatgttttcagaggcagctcttataattttcagttgacgaccttaacaaggtattggttacatgaaatgtatgttcattctcaacckcccacctgttttattatttctctccagaaacaaatatttttctggacttcaaacaaataggacttcaaattcctatttcccatttagtgcatgttactta

SEQ ID NO: 486562 - DNA, 201 bp, Homo sapiens
tgtctagcaccgtgccttaaacacaaatgctccaactcactctgaaatgctggagaacatgaagtcaattttagtactgctaaaatgcagtgaaagtacamccaagaatagagcttttagcaggtatgtatattacaactgacaaccaagaaaactattatattagaaaagtgggtgataaaataatagaaaggctttcag

SEQ ID NO: 486563 - DNA, 201 bp, Homo sapiens
aaagctttgcagttatttaaaagtggataacttttgcaattcagtaaactgttactgagtcttgatatacaaaagacactattcaagaccctgttcttttmtagggtcaacccctcttcactcccacattcccagtggttttcaacccctttaccagcttggtttttcactacaaaaatataaaagtgtcctttttgctga

SEQ ID NO: 486564 - DNA, 201 bp, Homo sapiens
aaaatataaaagtgtcctttttgctgacattgacttaagataaccttaggcaagtttggagtcaagacctaagctcaaaacccaaatttacacctgactakccatgagctatggaaattaatttaactcacttaattgtaacttttccaatatataaaatggggaaacatttatagggattttgtgaagataaaatgaaat

SEQ ID NO: 486565 - DNA, 201 bp, Homo sapiens
gatagattgtagaagtactggagattggtaaatgataaagcttttagaagaaaacatagggtaatatcttcataaacttggagtaggcaacagtttctcamacaggatataaaagaactagcaataaggggaaaatctggtaaagtcaactacattaaaattaagaatttttttattatccaaagacaccattaacagaat

SEQ ID NO: 486566 - DNA, 201 bp, Homo sapiens
attggtaaatgataaagcttttagaagaaaacatagggtaatatcttcataaacttggagtaggcaacagtttctcaaacaggatataaaagaactagcamtaaggggaaaatctggtaaagtcaactacattaaaattaagaatttttttattatccaaagacaccattaacagaataaaaggaaaatttatcaataata

SEQ ID NO: 486567 - DNA, 201 bp, Homo sapiens
tctgtcacctccctaattagttgggaggctgaggcaggaggatcacttaaaccaaggagtttgaggttaccatgaactatgactgcaccacagcactctakcctgaacaacaaagcaggaccccatctcaaaaaacaaagacaaaaaactatggcttcaatattcctttcttttggatcactccctctgggggatgccgga

SEQ ID NO: 486568 - DNA, 201 bp, Homo sapiens
caacagtttctcaaacaggatataaaagaactagcaataaggggaaaatctggtaaagtcaactacattaaaattaagaatttttttattatccaaagacmccattaacagaataaaaggaaaatttatcaataataggaagatattgcaatacatgtatctgacaaaagcatatataaataactcccataaatcaataag

SEQ ID NO: 486569 - DNA, 201 bp, Homo sapiens
tctgaaaccctatcagtgactttagctttaggttataattttgtttccaatttaaaaattagtttccttatatttgcatggtgcctggcagctttcagatwcttccatcatccatgatctcatccggtcctcccaacaagcatatagtaggcagagcaggcatacttattttctttcttttttttttcctttttttttttt

SEQ ID NO: 486570 - DNA, 201 bp, Homo sapiens
tcatttgggtgatttccagaggacttgtttgatgcaatttatttcaatgattccaacagataaatagcatgaataatccatttaaaggcctcattcattaygaagtgtgacagggtaccttctcatttaagttttccactgggcaagccactgcttactgttggattattcacttatgaatactagaggcctcggacattt

SEQ ID NO: 486571 - DNA, 201 bp, Homo sapiens
gatctcatccggtcctcccaacaagcatatagtaggcagagcaggcatacttattttctttcttttttttttccttttttttttttgagacagggtctcaytctgtcacccagattggagtgcagtggcccgatctcggctcaccgcaacctctgcatcccaagctgagacgattctcctgcctcagcctcccgaggagct

SEQ ID NO: 486572 - DNA, 201 bp, Homo sapiens
tgaatttttgaataataaattttaaaaaatttaaaggtggaaataaaatcaggaaataaagctggagcccattggacaaaatcttacctgaagttactttktgttctcttctcttctccactctccctgaaatgagaagtggaagataagttacagcatggagtcatgagaatatgatgaaaataagatgaaagcccagtt

SEQ ID NO: 486573 - DNA, 201 bp, Homo sapiens
aatgtccactggccaattcatgttgctgaacttgttaaaaacagtcttagctccttgacgtttttcaatcaacttctctgttggtgaccctgtggacttayttaaagcttgatcccctccttgtgaatgactggtctttgttaagagcctagtagatctctcagaattgagtagaagattttcctttttttctcgtacatc

SEQ ID NO: 486574 - DNA, 201 bp, Homo sapiens
accagcaaattctggaatgaggtttagacttggtgctaaaggtgtgaggggcaggtagcatgcagtctggctcctttttattaatagttagctgaaacttyacctttctatttcagaggaggtggacagcttttttactaccttatgtgctagggaagaatgaaagttcaagtgaaaggggaggctgggaataggctgcag

SEQ ID NO: 486575 - DNA, 201 bp, Homo sapiens
ataaaagaactagcaataaggggaaaatctggtaaagtcaactacattaaaattaagaatttttttattatccaaagacaccattaacagaataaaaggaraatttatcaataataggaagatattgcaatacatgtatctgacaaaagcatatataaataactcccataaatcaataaggtaaagtcaatctctcagaaa

SEQ ID NO: 486576 - DNA, 201 bp, Homo sapiens
tagcaataaggggaaaatctggtaaagtcaactacattaaaattaagaatttttttattatccaaagacaccattaacagaataaaaggaaaatttatcamtaataggaagatattgcaatacatgtatctgacaaaagcatatataaataactcccataaatcaataaggtaaagtcaatctctcagaaaaatgacaaag

SEQ ID NO: 486577 - DNA, 201 bp, Homo sapiens
tgcatttgatatatttaatgaatagccattgactgagggaatcaaccatgctcccaaatgaggaatgtgtcttatattaattaaaataggagtcaataacrtgcaagatatagcctatatttcctttattactgccatttggcaaattgaggacgaaagctctaacaattcaaatctctctcggaggtaagtttagtaact

SEQ ID NO: 486578 - DNA, 201 bp, Homo sapiens
gaagtgaatttcacgtgattcatgttggaagtcacagaagagtgggctttgggagccaaggctgagaagagagaagaaaatactctcggtctctcaacccmtaatgagtctttggagctgtcttttcacaggtgcctggaattttgtccaattggataggtttttccagatgtttcaaatgttattcatgggagatgttta

SEQ ID NO: 486579 - DNA, 201 bp, Homo sapiens
aaagtaaactggttgtcaactatcacatcacaatgtctgtattttaatactgttggttgcaagacttacctttaaatagataatcatgaaaaaattaagcmacattcccatctcattttcttttgaatgtaatgattggatgaaaagggcataactgatgtgaaagtgagaaagctaaatgtatgaatttattttaattaa

SEQ ID NO: 486580 - DNA, 201 bp, Homo sapiens
atacggttttaagaaataaaattgagattcatagtcatttgggaaagtaaactggttgtcaactatcacatcacaatgtctgtattttaatactgttggtygcaagacttacctttaaatagataatcatgaaaaaattaagcaacattcccatctcattttcttttgaatgtaatgattggatgaaaagggcataactga

SEQ ID NO: 486581 - DNA, 201 bp, Homo sapiens
cctgaaaagcatccactacatatacggttttaagaaataaaattgagattcatagtcatttgggaaagtaaactggttgtcaactatcacatcacaatgtstgtattttaatactgttggttgcaagacttacctttaaatagataatcatgaaaaaattaagcaacattcccatctcattttcttttgaatgtaatgatt

SEQ ID NO: 486582 - DNA, 201 bp, Homo sapiens
atcagtccctcctctcagtctggcagggagacacacaggacagattcggagtgagagttgccataggaataaggcaaagtccagtctccattcagatgaaragggccaaagttggcctgggggtgtcaggaaaaactgccaaaaggctccagcttttaaactgagacacagcttacagaattttccctttctagttcccat

SEQ ID NO: 486583 - DNA, 201 bp, Homo sapiens
tcactttcaagctatatcccagagttcatcaagactacattaagacaggatggatactctttcctccaggaagccacctctgtttccctacccactctacstgttaagcttaggtgtgtctcctctgtgcttctatataacccttcactatagagttaggatgttttgttatggttatatatttacttgtctttcttccaa

SEQ ID NO: 486584 - DNA, 201 bp, Homo sapiens
ctcatatgttcattgcagcactattcacaatagcaagacatgaaatcaacctaggtgcccatcaatagtggattggataaagaaaatgtggtacatatacmccatggactactatgcagccatgaaaaaatgaaaccatgtcctttgtaggaacacagatgcagctagaggccattatcctaagcaaattaatatccagga

SEQ ID NO: 486585 - DNA, 201 bp, Homo sapiens
gtgtaattagggtcaaagaaataaaatgaatagatgcttgtctttgcatttgtttttaatgagtggtgagttgctttcttgagcaggcaactgggtacaamccaggcagaaataaaatgggagttgtagagggcactggcgggggtgggtgtctggcatgacactaggagattaaagcaccttggagaaaggactgatgtg

SEQ ID NO: 486586 - DNA, 201 bp, Homo sapiens
atgggagtgattggtagctcttgcttatcacaggagtagtgggttggtagaaacttgggaaggatggcgggcataggtacacatgccaaattagcgttctmtatgattgttggcaatttctgggcactgtgagctgcaacactgctcctatgcaaagatcgacttggtaaatgaaaatctatcttacctcacaactttaag

SEQ ID NO: 486587 - DNA, 201 bp, Homo sapiens
atgactattgagggaacctaatgaggcatcagacttaacactttggccaacttagctttcttccaaactgtgcattttctttaactaagaaggtagtacayacagcattatggaaatagcatttagaagcaatttagaaattatttagaaataatttctcccccaaggagcaataatgaaggtaatcatacctgtgaggga

SEQ ID NO: 486588 - DNA, 201 bp, Homo sapiens
acctcaccctctcatagaaatcaggcaattgacaagctacaaatcagatagggcaaattagtaaaaattccactagtaaagggatttttctcatagccctrgtgacctgtgttccctatcaaagatgctgttgccttaaagattttccatttgttgaaaagtgttttattaagcaagtaactgaacaaagcattaaagtga

SEQ ID NO: 486589 - DNA, 201 bp, Homo sapiens
aaaaaaactatatttggttttatatagttatggacaaactgcatatccaatgttatagtctgcttttgtttcccacataaggtaaaataagaaatttcctytatttccatttttttctgccctcttatcattcaaaactcatgttcttcctcatcttcctttggtagctccccatgttttgctgatttgatttacaaggcc

SEQ ID NO: 486590 - DNA, 201 bp, Homo sapiens
tcctcatcttcctttggtagctccccatgttttgctgatttgatttacaaggcctcatctgcattctaatgacatgtttctgccactagaatccatctctyttcttcttctaagagttaatttaattgtctatatttgtcattttaccaagagctccttcaagtaggagccacgtctatttgtctttttgtacacagagat

SEQ ID NO: 486591 - DNA, 201 bp, Homo sapiens
tcctttggtagctccccatgttttgctgatttgatttacaaggcctcatctgcattctaatgacatgtttctgccactagaatccatctctcttcttcttmtaagagttaatttaattgtctatatttgtcattttaccaagagctccttcaagtaggagccacgtctatttgtctttttgtacacagagatcagatcagt

SEQ ID NO: 486592 - DNA, 201 bp, Homo sapiens
catgttttgctgatttgatttacaaggcctcatctgcattctaatgacatgtttctgccactagaatccatctctcttcttcttctaagagttaatttaaktgtctatatttgtcattttaccaagagctccttcaagtaggagccacgtctatttgtctttttgtacacagagatcagatcagtgcttggcataaactgc

SEQ ID NO: 486593 - DNA, 201 bp, Homo sapiens
ttttgctgatttgatttacaaggcctcatctgcattctaatgacatgtttctgccactagaatccatctctcttcttcttctaagagttaatttaattgtmtatatttgtcattttaccaagagctccttcaagtaggagccacgtctatttgtctttttgtacacagagatcagatcagtgcttggcataaactgctcaa

SEQ ID NO: 486594 - DNA, 201 bp, Homo sapiens
tgttccaatcttgaaaactcagactattgttacaaatttagatttcctgatggcatgatttgttgtcatttgaaatgattaggagccccctaacattcccmtagaatatgggctctatccattagttatccttaacctcaccctctcatagaaatcaggcaattgacaagctacaaatcagatagggcaaattagtaaaaa

SEQ ID NO: 486595 - DNA, 201 bp, Homo sapiens
gaatgcagagctgggaagagaggagcacaatcagttttctccagacagctttccagatattataagctggctccagcaagccacagcctaggttccatttstggttccaccagttaataaatggggcctaaagcaagtaatttaaccttcccaatctcagctttccaatttttaaaatgttgaccataaacaaactttaca

SEQ ID NO: 486596 - DNA, 201 bp, Homo sapiens
gcatgacctcactgaatgcagagctgggaagagaggagcacaatcagttttctccagacagctttccagatattataagctggctccagcaagccacagcmtaggttccatttctggttccaccagttaataaatggggcctaaagcaagtaatttaaccttcccaatctcagctttccaatttttaaaatgttgaccata

SEQ ID NO: 486597 - DNA, 201 bp, Homo sapiens
tttttcttatattcacattctctaatagcagagttggattattgcattttttctagtttctcaagttaagaagtagattgggaaattagaattggttacasgctgaattttacatgttaaaggcttttgacttaaaaagatattggtaagaaagagccaagggtttctttttacaaggccaaaagcataaatatgcataac

SEQ ID NO: 486598 - DNA, 201 bp, Homo sapiens
gactacattaagacaggatggatactctttcctccaggaagccacctctgtttccctacccactctacctgttaagcttaggtgtgtctcctctgtgcttmtatataacccttcactatagagttaggatgttttgttatggttatatatttacttgtctttcttccaaagaagactatgagctcctttaaaggaagaggc

SEQ ID NO: 486599 - DNA, 201 bp, Homo sapiens
gcttaggtgtgtctcctctgtgcttctatataacccttcactatagagttaggatgttttgttatggttatatatttacttgtctttcttccaaagaagamtatgagctcctttaaaggaagaggcaaatgtaataaattattacaatccctagcgcctagaagtgtaacagattcacaatacattcttattgactgtaag

SEQ ID NO: 486600 - DNA, 201 bp, Homo sapiens
tttgttatggttatatatttacttgtctttcttccaaagaagactatgagctcctttaaaggaagaggcaaatgtaataaattattacaatccctagcgcmtagaagtgtaacagattcacaatacattcttattgactgtaagaaaccagtgcttaatccaactatataaaaaaaatgacccatgaatgaagataataat

SEQ ID NO: 486601 - DNA, 201 bp, Homo sapiens
cctccctttgccaaatgagggcaaagacactgagtataggtaaacaatagtccatttcaggacccgtgcccaggagaacatgcctaccaaatgcaaagctmtagggcaccaagtgccggtttgtggacccacagtagcctgcaaggattaactctagctttaaaatcacacggcactgcagtttggcacaaaagcagccct

SEQ ID NO: 486602 - DNA, 201 bp, Homo sapiens
tctaggcatgtgaaacatttttagaattcttgtattttataaatttatcaacttagtttatcaagtatgatgacaacattaatgcatccagtttccttagmttaagcctcaatttattgtgaagttcaaaaacataaagaattacaaaaaccaaaaccaaaaagccttgtccagaatcaagattaaaatttcagagatgaa

SEQ ID NO: 486603 - DNA, 201 bp, Homo sapiens
ctgaattctgagtccctcaacactgaaaagattacagtgatccactttctacttcctcgtctcttcatccacatgtaattaagaagggaagaaactataamacatgaaacacatatgtatgttgtagttaaaatagtttcttaaaacagttctgattacaaaattgtggataaatttatcaaagctaaactccttttacct

SEQ ID NO: 486604 - DNA, 201 bp, Homo sapiens; identical to SEQ ID NO: 486308

SEQ ID NO: 486605 - DNA, 201 bp, Homo sapiens; identical to SEQ ID NO: 485738

SEQ ID NO: 486606 - DNA, 201 bp, Homo sapiens; identical to SEQ ID NO: 486329

SEQ ID NO: 486607 - DNA, 201 bp, Homo sapiens; identical to SEQ ID NO: 485740

SEQ ID NO: 486608 - DNA, 201 bp, Homo sapiens; identical to SEQ ID NO: 485742

SEQ ID NO: 486609 - DNA, 201 bp, Homo sapiens; identical to SEQ ID NO: 486331

SEQ ID NO: 486610 - DNA, 201 bp, Homo sapiens; identical to SEQ ID NO: 485745

SEQ ID NO: 486611 - DNA, 201 bp, Homo sapiens; identical to SEQ ID NO: 485746

SEQ ID NO: 486612 - DNA, 201 bp, Homo sapiens; identical to SEQ ID NO: 486335

SEQ ID NO: 486613 - DNA, 201 bp, Homo sapiens; identical to SEQ ID NO: 485747

SEQ ID NO: 486614 - DNA, 201 bp, Homo sapiens; identical to SEQ ID NO: 485748

SEQ ID NO: 486615 - DNA, 201 bp, Homo sapiens; identical to SEQ ID NO: 486337

SEQ ID NO: 486616 - DNA, 201 bp, Homo sapiens; identical to SEQ ID NO: 485749

SEQ ID NO: 486617 - DNA, 201 bp, Homo sapiens; identical to SEQ ID NO: 485750

SEQ ID NO: 486618 - DNA, 201 bp, Homo sapiens; identical to SEQ ID NO: 486338

SEQ ID NO: 486619 - DNA, 201 bp, Homo sapiens; identical to SEQ ID NO: 485751

SEQ ID NO: 486620 - DNA, 201 bp, Homo sapiens; identical to SEQ ID NO: 486339

SEQ ID NO: 486621 - DNA, 201 bp, Homo sapiens; identical to SEQ ID NO: 486340

SEQ ID NO: 486622 - DNA, 201 bp, Homo sapiens; identical to SEQ ID NO: 486346

SEQ ID NO: 486623 - DNA, 201 bp, Homo sapiens; identical to SEQ ID NO: 485761

SEQ ID NO: 486624 - DNA, 201 bp, Homo sapiens; identical to SEQ ID NO: 486101

SEQ ID NO: 486625 - DNA, 201 bp, Homo sapiens; identical to SEQ ID NO: 486348

SEQ ID NO: 486626 - DNA, 201 bp, Homo sapiens; identical to SEQ ID NO: 486350

SEQ ID NO: 486627 - DNA, 201 bp, Homo sapiens; identical to SEQ ID NO: 485765

SEQ ID NO: 486628 - DNA, 201 bp, Homo sapiens; identical to SEQ ID NO: 486354

SEQ ID NO: 486629 - DNA, 201 bp, Homo sapiens; identical to SEQ ID NO: 485766

SEQ ID NO: 486630 - DNA, 201 bp, Homo sapiens; identical to SEQ ID NO: 486355

SEQ ID NO: 486631 - DNA, 201 bp, Homo sapiens; identical to SEQ ID NO: 486356

SEQ ID NO: 486632 - DNA, 201 bp, Homo sapiens; identical to SEQ ID NO: 485767

SEQ ID NO: 486633 - DNA, 201 bp, Homo sapiens; identical to SEQ ID NO: 485768

SEQ ID NO: 486634 - DNA, 201 bp, Homo sapiens; identical to SEQ ID NO: 485769

SEQ ID NO: 486635 - DNA, 201 bp, Homo sapiens; identical to SEQ ID NO: 485770

SEQ ID NO: 486636 - DNA, 201 bp, Homo sapiens; identical to SEQ ID NO: 485789

SEQ ID NO: 486637 - DNA, 201 bp, Homo sapiens; identical to SEQ ID NO: 485791

SEQ ID NO: 486638 - DNA, 201 bp, Homo sapiens; identical to SEQ ID NO: 485793

SEQ ID NO: 486639 - DNA, 201 bp, Homo sapiens; identical to SEQ ID NO: 485794

SEQ ID NO: 486640 - DNA, 201 bp, Homo sapiens; identical to SEQ ID NO: 485545

SEQ ID NO: 486641 - DNA, 201 bp, Homo sapiens; identical to SEQ ID NO: 486369

SEQ ID NO: 486642 - DNA, 201 bp, Homo sapiens; identical to SEQ ID NO: 486370

SEQ ID NO: 486643 - DNA, 201 bp, Homo sapiens; identical to SEQ ID NO: 485547

SEQ ID NO: 486644 - DNA, 201 bp, Homo sapiens; identical to SEQ ID NO: 485549

SEQ ID NO: 486645 - DNA, 201 bp, Homo sapiens; identical to SEQ ID NO: 486108

SEQ ID NO: 486646 - DNA, 201 bp, Homo sapiens; identical to SEQ ID NO: 485824

SEQ ID NO: 486647 - DNA, 201 bp, Homo sapiens; identical to SEQ ID NO: 485826

SEQ ID NO: 486648 - DNA, 201 bp, Homo sapiens; identical to SEQ ID NO: 485561

SEQ ID NO: 486649 - DNA, 201 bp, Homo sapiens; identical to SEQ ID NO: 486114

SEQ ID NO: 486650 - DNA, 201 bp, Homo sapiens; identical to SEQ ID NO: 486393

SEQ ID NO: 486651 - DNA, 201 bp, Homo sapiens; identical to SEQ ID NO: 486115

SEQ ID NO: 486652 - DNA, 201 bp, Homo sapiens; identical to SEQ ID NO: 486394

SEQ ID NO: 486653 - DNA, 201 bp, Homo sapiens; identical to SEQ ID NO: 486396

SEQ ID NO: 486654 - DNA, 201 bp, Homo sapiens; identical to SEQ ID NO: 486399

SEQ ID NO: 486655 - DNA, 201 bp, Homo sapiens; identical to SEQ ID NO: 485834

SEQ ID NO: 486656 - DNA, 201 bp, Homo sapiens; identical to SEQ ID NO: 486402

SEQ ID NO: 486657 - DNA, 201 bp, Homo sapiens; identical to SEQ ID NO: 486403

SEQ ID NO: 486658 - DNA, 201 bp, Homo sapiens; identical to SEQ ID NO: 485836

SEQ ID NO: 486659 - DNA, 201 bp, Homo sapiens; identical to SEQ ID NO: 485838

SEQ ID NO: 486660 - DNA, 201 bp, Homo sapiens; identical to SEQ ID NO: 486406

SEQ ID NO: 486661 - DNA, 201 bp, Homo sapiens; identical to SEQ ID NO: 485840

SEQ ID NO: 486662 - DNA, 201 bp, Homo sapiens; identical to SEQ ID NO: 486407

SEQ ID NO: 486663 - DNA, 201 bp, Homo sapiens; identical to SEQ ID NO: 485844

SEQ ID NO: 486664 - DNA, 201 bp, Homo sapiens; identical to SEQ ID NO: 486409

SEQ ID NO: 486665 - DNA, 201 bp, Homo sapiens; identical to SEQ ID NO: 485847

SEQ ID NO: 486666 - DNA, 201 bp, Homo sapiens; identical to SEQ ID NO: 485852

SEQ ID NO: 486667 - DNA, 201 bp, Homo sapiens; identical to SEQ ID NO: 485856

SEQ ID NO: 486668 - DNA, 201 bp, Homo sapiens; identical to SEQ ID NO: 485571

SEQ ID NO: 486669 - DNA, 201 bp, Homo sapiens; identical to SEQ ID NO: 485572

SEQ ID NO: 486670 - DNA, 201 bp, Homo sapiens; identical to SEQ ID NO: 486424

SEQ ID NO: 486671 - DNA, 201 bp, Homo sapiens; identical to SEQ ID NO: 486426

SEQ ID NO: 486672 - DNA, 201 bp, Homo sapiens; identical to SEQ ID NO: 486428

SEQ ID NO: 486673 - DNA, 201 bp, Homo sapiens; identical to SEQ ID NO: 486430

SEQ ID NO: 486674 - DNA, 201 bp, Homo sapiens; identical to SEQ ID NO: 486432

SEQ ID NO: 486675 - DNA, 201 bp, Homo sapiens; identical to SEQ ID NO: 485863

SEQ ID NO: 486676 - DNA, 201 bp, Homo sapiens; identical to SEQ ID NO: 485866

SEQ ID NO: 486677 - DNA, 201 bp, Homo sapiens; identical to SEQ ID NO: 485868

SEQ ID NO: 486678 - DNA, 201 bp, Homo sapiens; identical to SEQ ID NO: 485870

SEQ ID NO: 486679 - DNA, 201 bp, Homo sapiens; identical to SEQ ID NO: 486440

SEQ ID NO: 486680 - DNA, 201 bp, Homo sapiens; identical to SEQ ID NO: 485876

SEQ ID NO: 486681 - DNA, 201 bp, Homo sapiens; identical to SEQ ID NO: 485879

SEQ ID NO: 486682 - DNA, 201 bp, Homo sapiens; identical to SEQ ID NO: 485882

SEQ ID NO: 486683 - DNA, 201 bp, Homo sapiens; identical to SEQ ID NO: 485885

SEQ ID NO: 486684 - DNA, 201 bp, Homo sapiens; identical to SEQ ID NO: 485890

SEQ ID NO: 486685 - DNA, 201 bp, Homo sapiens; identical to SEQ ID NO: 485892
  misc_feature (1)...(201): n = A,T,C or G

SEQ ID NO: 486686 - DNA, 201 bp, Homo sapiens; identical to SEQ ID NO: 485894

SEQ ID NO: 486687 - DNA, 201 bp, Homo sapiens; identical to SEQ ID NO: 485895

SEQ ID NO: 486688 - DNA, 201 bp, Homo sapiens; identical to SEQ ID NO: 485896

SEQ ID NO: 486689 - DNA, 201 bp, Homo sapiens; identical to SEQ ID NO: 485897

SEQ ID NO: 486690 - DNA, 201 bp, Homo sapiens; identical to SEQ ID NO: 485898

SEQ ID NO: 486691 - DNA, 201 bp, Homo sapiens; identical to SEQ ID NO: 485900

SEQ ID NO: 486692 - DNA, 201 bp, Homo sapiens; identical to SEQ ID NO: 486120

SEQ ID NO: 486693 - DNA, 201 bp, Homo sapiens; identical to SEQ ID NO: 485902

SEQ ID NO: 486694 - DNA, 201 bp, Homo sapiens; identical to SEQ ID NO: 485584

SEQ ID NO: 486695 - DNA, 201 bp, Homo sapiens; identical to SEQ ID NO: 486451

SEQ ID NO: 486696 - DNA, 201 bp, Homo sapiens; identical to SEQ ID NO: 486452

SEQ ID NO: 486697 - DNA, 201 bp, Homo sapiens; identical to SEQ ID NO: 486453

SEQ ID NO: 486698 - DNA, 201 bp, Homo sapiens; identical to SEQ ID NO: 485909

SEQ ID NO: 486699 - DNA, 201 bp, Homo sapiens; identical to SEQ ID NO: 486454

SEQ ID NO: 486700 - DNA, 201 bp, Homo sapiens; identical to SEQ ID NO: 486455

SEQ ID NO: 486701 - DNA, 201 bp, Homo sapiens; identical to SEQ ID NO: 486126

SEQ ID NO: 486702 - DNA, 201 bp, Homo sapiens; identical to SEQ ID NO: 486457

SEQ ID NO: 486703 - DNA, 201 bp, Homo sapiens; identical to SEQ ID NO: 485914

SEQ ID NO: 486704 - DNA, 201 bp, Homo sapiens; identical to SEQ ID NO: 485917

SEQ ID NO: 486705 - DNA, 201 bp, Homo sapiens; identical to SEQ ID NO: 485920

SEQ ID NO: 486706 - DNA, 201 bp, Homo sapiens; identical to SEQ ID NO: 485923

SEQ ID NO: 486707 - DNA, 201 bp, Homo sapiens; identical to SEQ ID NO: 485926

SEQ ID NO: 486708 - DNA, 201 bp, Homo sapiens; identical to SEQ ID NO: 485931

SEQ ID NO: 486709 - DNA, 201 bp, Homo sapiens; identical to SEQ ID NO: 486127

SEQ ID NO: 486710 - DNA, 201 bp, Homo sapiens; identical to SEQ ID NO: 485589

SEQ ID NO: 486711 - DNA, 201 bp, Homo sapiens; identical to SEQ ID NO: 485590

SEQ ID NO: 486712 - DNA, 201 bp, Homo sapiens; identical to SEQ ID NO: 485937

SEQ ID NO: 486713 - DNA, 201 bp, Homo sapiens; identical to SEQ ID NO: 485595

SEQ ID NO: 486714 - DNA, 201 bp, Homo sapiens; identical to SEQ ID NO: 485940

SEQ ID NO: 486715 - DNA, 201 bp, Homo sapiens; identical to SEQ ID NO: 485941

SEQ ID NO: 486716 - DNA, 201 bp, Homo sapiens; identical to SEQ ID NO: 485942

SEQ ID NO: 486717 - DNA, 201 bp, Homo sapiens; identical to SEQ ID NO: 485944

SEQ ID NO: 486718 - DNA, 201 bp, Homo sapiens; identical to SEQ ID NO: 485945

SEQ ID NO: 486719 - DNA, 201 bp, Homo sapiens; identical to SEQ ID NO: 485947

SEQ ID NO: 486720 - DNA, 201 bp, Homo sapiens; identical to SEQ ID NO: 485950

SEQ ID NO: 486721 - DNA, 201 bp, Homo sapiens; identical to SEQ ID NO: 485953

SEQ ID NO: 486722 - DNA, 201 bp, Homo sapiens; identical to SEQ ID NO: 485954

SEQ ID NO: 486723 - DNA, 201 bp, Homo sapiens; identical to SEQ ID NO: 486130

SEQ ID NO: 486724 - DNA, 201 bp, Homo sapiens; identical to SEQ ID NO: 486131

SEQ ID NO: 486725 - DNA, 201 bp, Homo sapiens; identical to SEQ ID NO: 485597

SEQ ID NO: 486726 - DNA, 201 bp, Homo sapiens; identical to SEQ ID NO: 485598

SEQ ID NO: 486727 - DNA, 201 bp, Homo sapiens; identical to SEQ ID NO: 485599

SEQ ID NO: 486728 - DNA, 201 bp, Homo sapiens; identical to SEQ ID NO: 486133

SEQ ID NO: 486729 - DNA, 201 bp, Homo sapiens; identical to SEQ ID NO: 486134

SEQ ID NO: 486730 - DNA, 201 bp, Homo sapiens; identical to SEQ ID NO: 485965

SEQ ID NO: 486731 - DNA, 201 bp, Homo sapiens; identical to SEQ ID NO: 486487

SEQ ID NO: 486732 - DNA, 201 bp, Homo sapiens; identical to SEQ ID NO: 485966

SEQ ID NO: 486733 - DNA, 201 bp, Homo sapiens; identical to SEQ ID NO: 486488

SEQ ID NO: 486734 - DNA, 201 bp, Homo sapiens; identical to SEQ ID NO: 485600

SEQ ID NO: 486735 - DNA, 201 bp, Homo sapiens; identical to SEQ ID NO: 486135

SEQ ID NO: 486736 - DNA, 201 bp, Homo sapiens; identical to SEQ ID NO: 486489

SEQ ID NO: 486737 - DNA, 201 bp, Homo sapiens; identical to SEQ ID NO: 486136

SEQ ID NO: 486738 - DNA, 201 bp, Homo sapiens; identical to SEQ ID NO: 486490

SEQ ID NO: 486739 - DNA, 201 bp, Homo sapiens; identical to SEQ ID NO: 486491

SEQ ID NO: 486740 - DNA, 201 bp, Homo sapiens; identical to SEQ ID NO: 485974

SEQ ID NO: 486741 - DNA, 201 bp, Homo sapiens; identical to SEQ ID NO: 485975

SEQ ID NO: 486742 - DNA, 201 bp, Homo sapiens; identical to SEQ ID NO: 485977

SEQ ID NO: 486743 - DNA, 201 bp, Homo sapiens; identical to SEQ ID NO: 485982

SEQ ID NO: 486744 - DNA, 201 bp, Homo sapiens; identical to SEQ ID NO: 485985

SEQ ID NO: 486745 - DNA, 201 bp, Homo sapiens; identical to SEQ ID NO: 485987

SEQ ID NO: 486746 - DNA, 201 bp, Homo sapiens; identical to SEQ ID NO: 485988

SEQ ID NO: 486747 - DNA, 201 bp, Homo sapiens; identical to SEQ ID NO: 486137

SEQ ID NO: 486748 - DNA, 201 bp, Homo sapiens; identical to SEQ ID NO: 486138

SEQ ID NO: 486749 - DNA, 201 bp, Homo sapiens; identical to SEQ ID NO: 485994

SEQ ID NO: 486750 - DNA, 201 bp, Homo sapiens; identical to SEQ ID NO: 485995

SEQ ID NO: 486751 - DNA, 201 bp, Homo sapiens; identical to SEQ ID NO: 486140

SEQ ID NO: 486752 - DNA, 201 bp, Homo sapiens; identical to SEQ ID NO: 486511
  misc_feature (1)...(201): n = A,T,C or G

SEQ ID NO: 486753 - DNA, 201 bp, Homo sapiens; identical to SEQ ID NO: 486512

SEQ ID NO: 486754 - DNA, 201 bp, Homo sapiens; identical to SEQ ID NO: 486514

SEQ ID NO: 486755 - DNA, 201 bp, Homo sapiens; identical to SEQ ID NO: 486515

SEQ ID NO: 486756 - DNA, 201 bp, Homo sapiens; identical to SEQ ID NO: 486141

SEQ ID NO: 486757 - DNA, 201 bp, Homo sapiens; identical to SEQ ID NO: 485996

SEQ ID NO: 486758 - DNA, 201 bp, Homo sapiens; identical to SEQ ID NO: 486142

SEQ ID NO: 486759 - DNA, 201 bp, Homo sapiens; identical to SEQ ID NO: 485997

SEQ ID NO: 486760 - DNA, 201 bp, Homo sapiens; identical to SEQ ID NO: 485998

SEQ ID NO: 486761 - DNA, 201 bp, Homo sapiens; identical to SEQ ID NO: 486516

SEQ ID NO: 486762 - DNA, 201 bp, Homo sapiens; identical to SEQ ID NO: 485999

SEQ ID NO: 486763 - DNA, 201 bp, Homo sapiens; identical to SEQ ID NO: 486143

SEQ ID NO: 486764 - DNA, 201 bp, Homo sapiens; identical to SEQ ID NO: 486000

SEQ ID NO: 486765 - DNA, 201 bp, Homo sapiens; identical to SEQ ID NO: 486001

SEQ ID NO: 486766 - DNA, 201 bp, Homo sapiens; identical to SEQ ID NO: 486144

SEQ ID NO: 486767 - DNA, 201 bp, Homo sapiens; identical to SEQ ID NO: 486145

SEQ ID NO: 486768 - DNA, 201 bp, Homo sapiens; identical to SEQ ID NO: 486146
  misc_feature (1)...(201): n = A,T,C or G

SEQ ID NO: 486769 - DNA, 201 bp, Homo sapiens; identical to SEQ ID NO: 486147

SEQ ID NO: 486770 - DNA, 201 bp, Homo sapiens; identical to SEQ ID NO: 486148

SEQ ID NO: 486771 - DNA, 201 bp, Homo sapiens; identical to SEQ ID NO: 486016

SEQ ID NO: 486772 - DNA, 201 bp, Homo sapiens; identical to SEQ ID NO: 486150

SEQ ID NO: 486773 - DNA, 201 bp, Homo sapiens; identical to SEQ ID NO: 486149

SEQ ID NO: 486774 - DNA, 201 bp, Homo sapiens; identical to SEQ ID NO: 486018

SEQ ID NO: 486775 - DNA, 201 bp, Homo sapiens; identical to SEQ ID NO: 486152

SEQ ID NO: 486776 - DNA, 201 bp, Homo sapiens; identical to SEQ ID NO: 486017

SEQ ID NO: 486777 - DNA, 201 bp, Homo sapiens; identical to SEQ ID NO: 486151

SEQ ID NO: 486778 - DNA, 201 bp, Homo sapiens; identical to SEQ ID NO: 486154

SEQ ID NO: 486779 - DNA, 201 bp, Homo sapiens; identical to SEQ ID NO: 486019

SEQ ID NO: 486780 - DNA, 201 bp, Homo sapiens; identical to SEQ ID NO: 486153

SEQ ID NO: 486781 - DNA, 201 bp, Homo sapiens; identical to SEQ ID NO: 486155

SEQ ID NO: 486782 - DNA, 201 bp, Homo sapiens; identical to SEQ ID NO: 485616

SEQ ID NO: 486783 - DNA, 201 bp, Homo sapiens; identical to SEQ ID NO: 486020

SEQ ID NO: 486784 - DNA, 201 bp, Homo sapiens; identical to SEQ ID NO: 485617

SEQ ID NO: 486785 - DNA, 201 bp, Homo sapiens; identical to SEQ ID NO: 486156

SEQ ID NO: 486786 - DNA, 201 bp, Homo sapiens; identical to SEQ ID NO: 486529

SEQ ID NO: 486787 - DNA, 201 bp, Homo sapiens; identical to SEQ ID NO: 486530

SEQ ID NO: 486788 - DNA, 201 bp, Homo sapiens; identical to SEQ ID NO: 486531

SEQ ID NO: 486789 - DNA, 201 bp, Homo sapiens; identical to SEQ ID NO: 486163

SEQ ID NO: 486790 - DNA, 201 bp, Homo sapiens; identical to SEQ ID NO: 485630

SEQ ID NO: 486791 - DNA, 201 bp, Homo sapiens; identical to SEQ ID NO: 486166

SEQ ID NO: 486792 - DNA, 201 bp, Homo sapiens; identical to SEQ ID NO: 486167

SEQ ID NO: 486793 - DNA, 201 bp, Homo sapiens; identical to SEQ ID NO: 486027

SEQ ID NO: 486794 - DNA, 201 bp, Homo sapiens; identical to SEQ ID NO: 486168

SEQ ID NO: 486795 - DNA, 201 bp, Homo sapiens; identical to SEQ ID NO: 486029

SEQ ID NO: 486796 - DNA, 201 bp, Homo sapiens; identical to SEQ ID NO: 486028

SEQ ID NO: 486797 - DNA, 201 bp, Homo sapiens; identical to SEQ ID NO: 486169

SEQ ID NO: 486798 - DNA, 201 bp, Homo sapiens; identical to SEQ ID NO: 486031

SEQ ID NO: 486799 - DNA, 201 bp, Homo sapiens; identical to SEQ ID NO: 486030

SEQ ID NO: 486800 - DNA, 201 bp, Homo sapiens; identical to SEQ ID NO: 485636

SEQ ID NO: 486801 - DNA, 201 bp, Homo sapiens; identical to SEQ ID NO: 486170

SEQ ID NO: 486802 - DNA, 201 bp, Homo sapiens; identical to SEQ ID NO: 486032

SEQ ID NO: 486803 - DNA, 201 bp, Homo sapiens; identical to SEQ ID NO: 486172

SEQ ID NO: 486804 - DNA, 201 bp, Homo sapiens; identical to SEQ ID NO: 486033

SEQ ID NO: 486805 - DNA, 201 bp, Homo sapiens; identical to SEQ ID NO: 486171

SEQ ID NO: 486806 - DNA, 201 bp, Homo sapiens; identical to SEQ ID NO: 486174

SEQ ID NO: 486807 - DNA, 201 bp, Homo sapiens; identical to SEQ ID NO: 486173

SEQ ID NO: 486808 - DNA, 201 bp, Homo sapiens; identical to SEQ ID NO: 486175

SEQ ID NO: 486809 - DNA, 201 bp, Homo sapiens; identical to SEQ ID NO: 485638

SEQ ID NO: 486810 - DNA, 201 bp, Homo sapiens; identical to SEQ ID NO: 486035

SEQ ID NO: 486811 - DNA, 201 bp, Homo sapiens; identical to SEQ ID NO: 486176

SEQ ID NO: 486812 - DNA, 201 bp, Homo sapiens; identical to SEQ ID NO: 486177

SEQ ID NO: 486813 - DNA, 201 bp, Homo sapiens; identical to SEQ ID NO: 486549

SEQ ID NO: 486814 - DNA, 201 bp, Homo sapiens; identical to SEQ ID NO: 486178

SEQ ID NO: 486815 - DNA, 201 bp, Homo sapiens; identical to SEQ ID NO: 486179

SEQ ID NO: 486816 - DNA, 201 bp, Homo sapiens; identical to SEQ ID NO: 486180

SEQ ID NO: 486817 - DNA, 201 bp, Homo sapiens; identical to SEQ ID NO: 485647

SEQ ID NO: 486818 - DNA, 201 bp, Homo sapiens; identical to SEQ ID NO: 485649

SEQ ID NO: 486819 - DNA, 201 bp, Homo sapiens; identical to SEQ ID NO: 486181

SEQ ID NO: 486820 - DNA, 201 bp, Homo sapiens; identical to SEQ ID NO: 486182

SEQ ID NO: 486821 - DNA, 201 bp, Homo sapiens; identical to SEQ ID NO: 486183

SEQ ID NO: 486822 - DNA, 201 bp, Homo sapiens; identical to SEQ ID NO: 486185

SEQ ID NO: 486823 - DNA, 201 bp, Homo sapiens; identical to SEQ ID NO: 486184

SEQ ID NO: 486824 - DNA, 201 bp, Homo sapiens; identical to SEQ ID NO: 486186

SEQ ID NO: 486825 - DNA, 201 bp, Homo sapiens; identical to SEQ ID NO: 486187

SEQ ID NO: 486826 - DNA, 201 bp, Homo sapiens; identical to SEQ ID NO: 486189

SEQ ID NO: 486827 - DNA, 201 bp, Homo sapiens; identical to SEQ ID NO: 486188

SEQ ID NO: 486828 - DNA, 201 bp, Homo sapiens; identical to SEQ ID NO: 486190

SEQ ID NO: 486829 - DNA, 201 bp, Homo sapiens; identical to SEQ ID NO: 486191

SEQ ID NO: 486830 - DNA, 201 bp, Homo sapiens; identical to SEQ ID NO: 485650

SEQ ID NO: 486831 - DNA, 201 bp, Homo sapiens; identical to SEQ ID NO: 486192

SEQ ID NO: 486832 - DNA, 201 bp, Homo sapiens; identical to SEQ ID NO: 485651

SEQ ID NO: 486833 - DNA, 201 bp, Homo sapiens; identical to SEQ ID NO: 486193

SEQ ID NO: 486834 - DNA, 201 bp, Homo sapiens; identical to SEQ ID NO: 485652

SEQ ID NO: 486835 - DNA, 201 bp, Homo sapiens; identical to SEQ ID NO: 486194

SEQ ID NO: 486836 - DNA, 201 bp, Homo sapiens; identical to SEQ ID NO: 486195

SEQ ID NO: 486837 - DNA, 201 bp, Homo sapiens; identical to SEQ ID NO: 486047

SEQ ID NO: 486838 - DNA, 201 bp, Homo sapiens; identical to SEQ ID NO: 486196

SEQ ID NO: 486839 - DNA, 201 bp, Homo sapiens; identical to SEQ ID NO: 485656

SEQ ID NO: 486840 - DNA, 201 bp, Homo sapiens; identical to SEQ ID NO: 486197

SEQ ID NO: 486841 - DNA, 201 bp, Homo sapiens; identical to SEQ ID NO: 486198

SEQ ID NO: 486842 - DNA, 201 bp, Homo sapiens; identical to SEQ ID NO: 486199

SEQ ID NO: 486843 - DNA, 201 bp, Homo sapiens; identical to SEQ ID NO: 486573

SEQ ID NO: 486844 - DNA, 201 bp, Homo sapiens; identical to SEQ ID NO: 485663

SEQ ID NO: 486845 - DNA, 201 bp, Homo sapiens; identical to SEQ ID NO: 486201

SEQ ID NO: 486846 - DNA, 201 bp, Homo sapiens; identical to SEQ ID NO: 486202

SEQ ID NO: 486847 - DNA, 201 bp, Homo sapiens; identical to SEQ ID NO: 486203

SEQ ID NO: 486848 - DNA, 201 bp, Homo sapiens; identical to SEQ ID NO: 486206

SEQ ID NO: 486849 - DNA, 201 bp, Homo sapiens; identical to SEQ ID NO: 486205

SEQ ID NO: 486850 - DNA, 201 bp, Homo sapiens; identical to SEQ ID NO: 486204

SEQ ID NO: 486851 - DNA, 201 bp, Homo sapiens; identical to SEQ ID NO: 486209

SEQ ID NO: 486852 - DNA, 201 bp, Homo sapiens; identical to SEQ ID NO: 486208

SEQ ID NO: 486853 - DNA, 201 bp, Homo sapiens; identical to SEQ ID NO: 486207

SEQ ID NO: 486854 - DNA, 201 bp, Homo sapiens; identical to SEQ ID NO: 486210

SEQ ID NO: 486855 - DNA, 201 bp, Homo sapiens; identical to SEQ ID NO: 485676

SEQ ID NO: 486856 - DNA, 201 bp, Homo sapiens; identical to SEQ ID NO: 486212

SEQ ID NO: 486857 - DNA, 201 bp, Homo sapiens; identical to SEQ ID NO: 486213

SEQ ID NO: 486858 - DNA, 201 bp, Homo sapiens; identical to SEQ ID NO: 486214

SEQ ID NO: 486859 - DNA, 201 bp, Homo sapiens; identical to SEQ ID NO: 486215

SEQ ID NO: 486860 - DNA, 201 bp, Homo sapiens; identical to SEQ ID NO: 486216

SEQ ID NO: 486861 - DNA, 201 bp, Homo sapiens; identical to SEQ ID NO: 486217

SEQ ID NO: 486862 - DNA, 201 bp, Homo sapiens; identical to SEQ ID NO: 486218

SEQ ID NO: 486863 - DNA, 201 bp, Homo sapiens; identical to SEQ ID NO: 486220

SEQ ID NO: 486864 - DNA, 201 bp, Homo sapiens; identical to SEQ ID NO: 486219

SEQ ID NO: 486865 - DNA, 201 bp, Homo sapiens; identical to SEQ ID NO: 486222

SEQ ID NO: 486866 - DNA, 201 bp, Homo sapiens; identical to SEQ ID NO: 485683

SEQ ID NO: 486867 - DNA, 201 bp, Homo sapiens; identical to SEQ ID NO: 485687

SEQ ID NO: 486868 - DNA, 201 bp, Homo sapiens; identical to SEQ ID NO: 486229

SEQ ID NO: 486869 - DNA, 201 bp, Homo sapiens; identical to SEQ ID NO: 486231

SEQ ID NO: 486870 - DNA, 201 bp, Homo sapiens; identical to SEQ ID NO: 486233

SEQ ID NO: 486871 - DNA, 201 bp, Homo sapiens; identical to SEQ ID NO: 486234

SEQ ID NO: 486872 - DNA, 201 bp, Homo sapiens; identical to SEQ ID NO: 486236

SEQ ID NO: 486873 - DNA, 201 bp, Homo sapiens; identical to SEQ ID NO: 486237

SEQ ID NO: 486874 - DNA, 201 bp, Homo sapiens; identical to SEQ ID NO: 486239

SEQ ID NO: 486875 - DNA, 201 bp, Homo sapiens; identical to SEQ ID NO: 486241

SEQ ID NO: 486876 - DNA, 201 bp, Homo sapiens; identical to SEQ ID NO: 486244

SEQ ID NO: 486877 - DNA, 201 bp, Homo sapiens; identical to SEQ ID NO: 486245

SEQ ID NO: 486878 - DNA, 201 bp, Homo sapiens; identical to SEQ ID NO: 486246

SEQ ID NO: 486879 - DNA, 201 bp, Homo sapiens; identical to SEQ ID NO: 486247

SEQ ID NO: 486880 - DNA, 201 bp, Homo sapiens; identical to SEQ ID NO: 486248

SEQ ID NO: 486881 - DNA, 201 bp, Homo sapiens; identical to SEQ ID NO: 485704

SEQ ID NO: 486882 - DNA, 201 bp, Homo sapiens; identical to SEQ ID NO: 486249

SEQ ID NO: 486883 - DNA, 201 bp, Homo sapiens; identical to SEQ ID NO: 485705

SEQ ID NO: 486884 - DNA, 201 bp, Homo sapiens; identical to SEQ ID NO: 485706

SEQ ID NO: 486885 - DNA, 201 bp, Homo sapiens; identical to SEQ ID NO: 486250

SEQ ID NO: 486886 - DNA, 201 bp, Homo sapiens; identical to SEQ ID NO: 486253

SEQ ID NO: 486887 - DNA, 201 bp, Homo sapiens; identical to SEQ ID NO: 486254

SEQ ID NO: 486888 - DNA, 201 bp, Homo sapiens; identical to SEQ ID NO: 486256

SEQ ID NO: 486889 - DNA, 201 bp, Homo sapiens; identical to SEQ ID NO: 486258

SEQ ID NO: 486890 - DNA, 201 bp, Homo sapiens; identical to SEQ ID NO: 485709

SEQ ID NO: 486891 - DNA, 201 bp, Homo sapiens; identical to SEQ ID NO: 486260

SEQ ID NO: 486892 - DNA, 201 bp, Homo sapiens; identical to SEQ ID NO: 486272

SEQ ID NO: 486893 - DNA, 201 bp, Homo sapiens; identical to SEQ ID NO: 486276

SEQ ID NO: 486894 - DNA, 201 bp, Homo sapiens; identical to SEQ ID NO: 486279

SEQ ID NO: 486895 - DNA, 201 bp, Homo sapiens; identical to SEQ ID NO: 486282

SEQ ID NO: 486896 - DNA, 201 bp, Homo sapiens; identical to SEQ ID NO: 486283

SEQ ID NO: 486897 - DNA, 201 bp, Homo sapiens; identical to SEQ ID NO: 486284

SEQ ID NO: 486898 - DNA, 201 bp, Homo sapiens; identical to SEQ ID NO: 486285

SEQ ID NO: 486899 - DNA, 201 bp, Homo sapiens; identical to SEQ ID NO: 486286

SEQ ID NO: 486900 - DNA, 201 bp, Homo sapiens; identical to SEQ ID NO: 485720

SEQ ID NO: 486901 - DNA, 201 bp, Homo sapiens; identical to SEQ ID NO: 486289

SEQ ID NO: 486902 - DNA, 201 bp, Homo sapiens; identical to SEQ ID NO: 485719

SEQ ID NO: 486903 - DNA, 201 bp, Homo sapiens; identical to SEQ ID NO: 485723

SEQ ID NO: 486904 - DNA, 201 bp, Homo sapiens; identical to SEQ ID NO: 485722

SEQ ID NO: 486905 - DNA, 201 bp, Homo sapiens; identical to SEQ ID NO: 485724

SEQ ID NO: 486906 - DNA, 201 bp, Homo sapiens; identical to SEQ ID NO: 486293

SEQ ID NO: 486907 - DNA, 201 bp, Homo sapiens; identical to SEQ ID NO: 485725

SEQ ID NO: 486908 - DNA, 201 bp, Homo sapiens; identical to SEQ ID NO: 486295

SEQ ID NO: 486909 - DNA, 201 bp, Homo sapiens; identical to SEQ ID NO: 485726

SEQ ID NO: 486910 - DNA, 201 bp, Homo sapiens; identical to SEQ ID NO: 485728

SEQ ID NO: 486911 - DNA, 201 bp, Homo sapiens; identical to SEQ ID NO: 485727

SEQ ID NO: 486912 - DNA, 201 bp, Homo sapiens; identical to SEQ ID NO: 486298

SEQ ID NO: 486913 - DNA, 201 bp, Homo sapiens; identical to SEQ ID NO: 485729

SEQ ID NO: 486914 - DNA, 201 bp, Homo sapiens; identical to SEQ ID NO: 485730

SEQ ID NO: 486915 - DNA, 201 bp, Homo sapiens; identical to SEQ ID NO: 486299

SEQ ID NO: 486916 - DNA, 201 bp, Homo sapiens; identical to SEQ ID NO: 486300

SEQ ID NO: 486917 - DNA, 201 bp, Homo sapiens
cttggtgtgccatctgctggacaaaggaagaacagccctttttttgcccctgtccctaagggcagtttctgttttcattttcacttgagccatggcagaaraccagcgggtgtgcagtttgcagatcctacctcacctatgatgcccaattccatcctcactgtgtcccacgttgccctctctgtgttggggactggggag

SEQ ID NO: 486918 - DNA, 201 bp, Homo sapiens
tctttatgagcaaaaagtcccatgttttagaattttgtatgaagatactgtcatgagtgtttctagggcagtgcccaggggtgcgtggcacctgcttaacygtgcttctctcagccacgtgcatagcatttctgtatatttacacactgctgagctgtgtttattttttaactttgttatgttttcgtgctttctcatcaa

SEQ ID NO: 486919 - DNA, 201 bp, Homo sapiens
tttaataccgaacattcaattacctaggtaataccagctgagaaaattgatggagtatttgctgcctgtcagagtggctcttttgacaaactagaagctgyggtcaaggtaaagtcagcttactaactttggggaaaggaatattaagtcatcataccaaaagttttttttattataggatttaatagatgagggtcatgc

SEQ ID NO: 486920 - DNA, 201 bp, Homo sapiens
cagcaactcagctcgtcaatcaactccatgatgtggttgtagaaaataacttatctgataaacagaagtctattatcacagaaaaacttgccgtaagtagrtactttgcacatgtcaatggaacatttaactacctgaaggatgctaatttcttaaatttttctcgtaggaagttgacaaatgcctagcagatggtgctga

SEQ ID NO: 486921 - DNA, 201 bp, Homo sapiens
gcagatggtgctgatgaacatttgcaactcatcagcctttgtgcaactgtgatgcagcagttatctcagaattgttaacgtgaatatatctggatgggggkttttgtaaataatgaagttgtaataaaaataaaatgaccaaaagcacctttaaagtgaatatacaatttatttaacattcaaacttcattaagacatgtg

SEQ ID NO: 486922 - DNA, 201 bp, Homo sapiens
ggggacatcagtgatcgtaagtctcctgggcccgttattctcagattaggtgacggagctaagacttcgagaccatctcgtcctttttgtatcgcggaaasctgaggaacgagccggcggcggtgacctgcacgagaagccaggctaactggtaacctgctggaggaactgcaagcccgcttcgccttccccactcctgcc

SEQ ID NO: 486923 - DNA, 201 bp, Homo sapiens
cctcccagcagctgggggagtgagtatctcagtcctgaaaggtagcataccagagcatccactacacctgcattttctgatttttttttctatttatttgktatttttctagagatggggtctcagctgtgttgcccagactggtctcaaactcctgggctcaagtgatcttctcaccttggcctatcaaagtgctagggt

SEQ ID NO: 486924 - DNA, 201 bp, Homo sapiens
ttcttcagacaaacttaagctaaaggggcaacaattgaaatgtgtaggaattacaaggtttagcttttctattactttttgagttaattatcttttaatayatcagagacccgaaactgaggtggatttcatacatataatgcaaattctgcaacataaatctctgcatgatgacaagattttagtcttctagctaatact

SEQ ID NO: 486925 - DNA, 201 bp, Homo sapiens
ttgaaattataactcccaaggtgatggtatcaggaggtggggcctttgggaggtgactggttcaatagagtggaaccctcatgaatgggagaaatgccttyataaaggagatggctggagaaaactagttagccctttccaccaagtgaggttacagcagtaagacagctgtcaatgagggagtgaaccctcaccagccac

SEQ ID NO: 486926 - DNA, 201 bp, Homo sapiens
taatcctctttgtttctatgacgtttttcaccttcacggtaggccttccatatgacaagactggtaccactaatcctctttaattttctggatattgtggrctttttaaaccaatctcattagtggcatctttacatggagagattgagagaaagggcacttcccctttaaagaaatcagtctttttggttgatcttggcc

SEQ ID NO: 486927 - DNA, 201 bp, Homo sapiens
gccttccatatgacaagactggtaccactaatcctctttaattttctggatattgtgggctttttaaaccaatctcattagtggcatctttacatggagasattgagagaaagggcacttcccctttaaagaaatcagtctttttggttgatcttggccactgttctgaggaatcgttatagccgctaggggaaaacttaa

SEQ ID NO: 486928 - DNA, 201 bp, Homo sapiens
cctgtattcccagcactttgggaggctgaggtgggaggatcccttgagccaaggagttcaagactaaacatagggagatctcgtgctctctctctctttcyctctctctctctctctatatatatatatatacacacacacacacacacacacacacacacacatcatgcaggtacagttttgtatcatctgtttcaaagg

SEQ ID NO: 486929 - DNA, 201 bp, Homo sapiens
cacttttctgttcttgtagccctcagtacagtgcattcagagtgtcctaggtcatggggtgatgtcctttattatgtaacatctttgcacaaggctaagtktattttcgggctgtactttctcataatggttccccaccaccacccccgctttcctatggtgctgattcgcaataaaagtttcaataaaagcttttttttt

SEQ ID NO: 486930 - DNA, 201 bp, Homo sapiens
ttgggaggctgaggtgggaggatcccttgagccaaggagttcaagactaaacatagggagatctcgtgctctctctctctttctctctctctctctctctmtatatatatatatacacacacacacacacacacacacacacacacatcatgcaggtacagttttgtatcatctgtttcaaagggcaacgcactaaataaa

SEQ ID NO: 486931 - DNA, 201 bp, Homo sapiens
tttgtaatgcattaggagttggccaggcagaaagaagaggatcagactccaggtcatgggagcaacatatgttcgggccagaaagtgccaagctgttagargccattgtaagctagagcctggaaggtgaaggaggtggtaggcagatcatggaagtcctttaggccatggtaaaaagctgagggttttttggtttgtttt

SEQ ID NO: 486932 - DNA, 201 bp, Homo sapiens
gggaggctgaggtgggaggatcccttgagccaaggagttcaagactaaacatagggagatctcgtgctctctctctctttctctctctctctctctctatmtatatatatatacacacacacacacacacacacacacacacacatcatgcaggtacagttttgtatcatctgtttcaaagggcaacgcactaaataaagc

SEQ ID NO: 486933 - DNA, 201 bp, Homo sapiens
aggtgggaggatcccttgagccaaggagttcaagactaaacatagggagatctcgtgctctctctctctttctctctctctctctctctatatatatatayatacacacacacacacacacacacacacacacacatcatgcaggtacagttttgtatcatctgtttcaaagggcaacgcactaaataaagctgtactcaa

SEQ ID NO: 486934 - DNA, 201 bp, Homo sapiens
aacgccttcacttccagatttctaagtggggctcaggaattataatagatgtccacagctgcatggtcttctctctccacaacacgcagacactattagargtaaaagccacgtgtcctcaagagggcaaggcaaagcatcttcagatgtctctgcccttaaagcacacgcgttctgctctgcgacgaagcaggacaagga

SEQ ID NO: 486935 - DNA, 201 bp, Homo sapiens
agaacaagctataatccatgtgtgcccaaacttggaagttcacaaagccattaaagggctttaaaagcacagttgttagcaccttggttgcttagtggtgrctggagttactctggccctttccgttctcccaaagccttcccagaaaagtatggaacttaggtgtggaacagaaatgactgggggcacgggggccagttg

SEQ ID NO: 486936 - DNA, 201 bp, Homo sapiens
ttctttaatttttgtgggtataacagattcgagcaatgcagaaaggaagtaaaacattatttcactctttcagaatgtgtttggttacggtaaaaacaagkgggggttccacctatttccgattatgaaaaagtttctcatttcattgctgatgtttaagaatggtcattggtattttagtagaaggaacacttgagagtt

SEQ ID NO: 486937 - DNA, 201 bp, Homo sapiens
taatttttgtgggtataacagattcgagcaatgcagaaaggaagtaaaacattatttcactctttcagaatgtgtttggttacggtaaaaacaaggggggkttccacctatttccgattatgaaaaagtttctcatttcattgctgatgtttaagaatggtcattggtattttagtagaaggaacacttgagagttttctg

SEQ ID NO: 486938 - DNA, 201 bp, Homo sapiens
gtgggaggatcccttgagccaaggagttcaagactaaacatagggagatctcgtgctctctctctctttctctctctctctctctctatatatatatatayacacacacacacacacacacacacacacacacatcatgcaggtacagttttgtatcatctgtttcaaagggcaacgcactaaataaagctgtactcaact

SEQ ID NO: 486939 - DNA, 201 bp, Homo sapiens
tatagtcccagctagttgggaagctaaggtgggaggatcatttgagcccaggagttcaaggctgcagtgagccatcatcatgccactgttctccagcctgrgtgacagagcaagaccttgtctccaaaaaaataaaaagaaaagaaattgtatatgttatgtaatgtctacatttttttaaatgcatggaaaaaagccaaa

SEQ ID NO: 486940 - DNA, 201 bp, Homo sapiens
gggaggatcccttgagccaaggagttcaagactaaacatagggagatctcgtgctctctctctctttctctctctctctctctctatatatatatatatayacacacacacacacacacacacacacacacatcatgcaggtacagttttgtatcatctgtttcaaagggcaacgcactaaataaagctgtactcaacttt

SEQ ID NO: 486941 - DNA, 201 bp, Homo sapiens
tgtcagaaggagacttaagaaaagccattacatttcttcaaagcgctactcgattaacaggtggaaaggagatcacagagaaagtgattacagacattgcyggggtaagagtactggatattctgaatttctttttagttggcttttttgtggcttttaggaaattttcatccaacaaatactgggtgtttagcaagtgcc

SEQ ID NO: 486942 - DNA, 201 bp, Homo sapiens
cgctctgtcaccaggctggaatgcaatggcgtgatctcagctcactgcaacctccacctaccgtgttcaagcgattctcctgcctcagcctcccaagtagstgggattacaggcacctgccatcatacctggctaatttttgtatttttgtagagatggagtttaaccatgttggccaggctggtcttgaactcccgacct

SEQ ID NO: 486943 - DNA, 201 bp, Homo sapiens
caccctcccaattagctgggattacaggcacctgccaccatgcccagctaatttgtatatttttagtagagacggggtttcacgatgttggttgaccaggytggtatggaactcctgaccccaggtgatccgccccccgcttagccttccaaagtgctgggattataggtgggagccaccgcacccagccttcagttttta

SEQ ID NO: 486944 - DNA, 201 bp, Homo sapiens
tattttaacaacagagtcccccaccttcccttccccacagaaagtctctgaaggtaggtaagcattgactctgccatgaaaataggtccctggccaggcgmgatggctcacacctgtaatcccagcactttgggaggccggggcaggaggattacttgagcccaggagttccagaccagcctaggcaacatggtgaaaccc

SEQ ID NO: 486945 - DNA, 201 bp, Homo sapiens
attacaggcacctgccaccatgcccagctaatttgtatatttttagtagagacggggtttcacgatgttggttgaccaggttggtatggaactcctgaccycaggtgatccgccccccgcttagccttccaaagtgctgggattataggtgggagccaccgcacccagccttcagtttttagattttataagaaatgcctt

SEQ ID NO: 486946 - DNA, 201 bp, Homo sapiens
tttatcaatgcatttggaactcattaaacatttttgtgacatatgatctttgttctataactcctgcactagaaatagattctaagttcgttagggacttwgaccacttttctgttcttgtagccctcagtacagtgcattcagagtgtcctaggtcatggggtgatgtcctttattatgtaacatctttgcacaaggcta

SEQ ID NO: 486947 - DNA, 201 bp, Homo sapiens
cctgaccccaggtgatccgccccccgcttagccttccaaagtgctgggattataggtgggagccaccgcacccagccttcagtttttagattttataagaratgcctttggcagttaaatcaattttagcagatgttcttatacatgaaaactattttgccagttgtatataaacaaaaggcatatccaacttacagtaat

SEQ ID NO: 486948 - DNA, 201 bp, Homo sapiens
gtaggaagttgacaaatgcctagcagatggtgctgatgaacatttgcaactcatcagcctttgtgcaactgtgatgcagcagttatctcagaattgttaaygtgaatatatctggatggggggttttgtaaataatgaagttgtaataaaaataaaatgaccaaaagcacctttaaagtgaatatacaatttatttaacat

SEQ ID NO: 486949 - DNA, 201 bp, Homo sapiens
gaaaataacttatctgataaacagaagtctattatcacagaaaaacttgccgtaagtaggtactttgcacatgtcaatggaacatttaactacctgaaggrtgctaatttcttaaatttttctcgtaggaagttgacaaatgcctagcagatggtgctgatgaacatttgcaactcatcagcctttgtgcaactgtgatgc

SEQ ID NO: 486950 - DNA, 201 bp, Homo sapiens
aagtgaggagcgtctctgcccagccgccatcccatctaggaagggaggagcgtctctgcccagctgcccatcgtctgagatgtggggagcgcctctgcccygccgccccgtctgggatgtgaggagcgcctctgcccggccgcgaccctgtctgggaggtgaggagcgtctccacctggcagccaccccgtccgggaggga

SEQ ID NO: 486951 - DNA, 201 bp, Homo sapiens
ctcctgaccccaggtgatccgccccccgcttagccttccaaagtgctgggattataggtgggagccaccgcacccagccttcagtttttagattttataaraaatgcctttggcagttaaatcaattttagcagatgttcttatacatgaaaactattttgccagttgtatataaacaaaaggcatatccaacttacagta

SEQ ID NO: 486952 - DNA, 201 bp, Homo sapiens
tacagtcataggatggaatatcatatgactattaaaatgttatttacagtggttttgataatatgccaagatacttattataaatgcaaagtggaaaatcratttaaaattttatatgtggggccaggtgtggtgcctcacacctgtaatcccaacattttgggaggccaaggtggaaggatcacctgagaccagcctggc

SEQ ID NO: 486953 - DNA, 201 bp, Homo sapiens
tggatattgtgggctttttaaaccaatctcattagtggcatctttacatggagagattgagagaaagggcacttcccctttaaagaaatcagtctttttgrttgatcttggccactgttctgaggaatcgttatagccgctaggggaaaacttaatcttcatccactgaccagaacaagctataatccatgtgtgcccaaa

SEQ ID NO: 486954 - DNA, 201 bp, Homo sapiens
ttttttaattcaaaagagtaaaggaaaacaattcattcaatttattttgaaaggttttaaagaattataagaagataattttttcagaaattgattttaagaactggtattccacatacagttcttgaatgtactacatatattagactagtgtataattaaggtttaataattttaccctgtttcaaagaatttaaatta

SEQ ID NO: 486955 - DNA, 201 bp, Homo sapiens
catgtaaatgtttatgtccataaacatgcttaggataccatgctgattaggaaaaatagagatgaaactaaatcacaactcttgttttttatttaaatgtgtgtgtgtgtgtgtgtgtgtgtgtgtgtgtaaaagactagagggaagtttcaaaaacagtgctttgacagtgtgcccacttttttcttttgatttctcaaa

SEQ ID NO: 486956 - DNA, 201 bp, Homo sapiens
agccattaaagggctttaaaagcacagttgttagcaccttggttgcttagtggtggctggagttactctggccctttccgttctcccaaagccttcccagraaagtatggaacttaggtgtggaacagaaatgactgggggcacgggggccagttggcagagtgtatgtctagtctcacctagaaacatctttaataccga

SEQ ID NO: 486957 - DNA, 201 bp, Homo sapiens
gttcacacctgtaatcccagcactttgggaggccgaggcaggtggatcacaaggtcaggagatcgagaccatcctggcgaacatggtgaaaccccatctcyactaaaaatacaaaaaattagctgggtgtggtggcgggcgcctgtagtcccagctactcgggaggctgaggcaggagtatggcgtgaacccaggaggcag

SEQ ID NO: 486958 - DNA, 201 bp, Homo sapiens
tcgcctgtgaaaccatctgggccttgataacgttcagctaaactggtcctgtttaagttttacatttctgatgaggttaatttaagtaacctatattttcstaggaaattacttatttatatccaggttttcaaatttttttgcatagggatgtgcaaagtcgtttcttagggatttttaattttttgcttcagttccttt

SEQ ID NO: 486959 - DNA, 201 bp, Homo sapiens
aaaagctgacgctggagacacactagctctttgctgcagctcctgctactgcttctatggcctggcacccttcagcatcctccctcaattccagggcctcrgcagtttgatgaaaccacactaggtacacccagaactggaaggtgaagggaactgacagcacaaggcggcactcacccgcaggccactctgagaacccgg

SEQ ID NO: 486960 - DNA, 201 bp, Homo sapiens
aagcaaaatgtggtagacacataaaatggaagatattcagccttaaaaatgaatcaaattctgataaatgctacaacatgaatgaaccttgaaagcattaygctacgtgaaataagccagacaccaaaggatgaatattgtatgattccacttatatgagacacctagaataggaaaattcatacagaaagtagaatagag

SEQ ID NO: 486961 - DNA, 201 bp, Homo sapiens
catcttcttccaaaaagaatttgaggtagtttaccataaaatcatcagggtaatgagaacaaatcctattaatgtaagacaaaatatagaaactgagatayaaagcagagaagaaggaagagaaggcagattacctgagcaaaactcaactgttatcctcctaggaaccagggaagtgttcatattcatcagatcttttat

SEQ ID NO: 486962 - DNA, 201 bp, Homo sapiens
aggactgtattctgtgtttaatgaaacaggttcctggaagggtatctgccctgcttgccacagccccatcaatctcctatacctcccctggccagcactcrtccacactcgtggcctggcatgacaaccatctcctcagctagctcccccagcctcccagcccccatccaaactctgctctgggcagcctggatcctgtaa

SEQ ID NO: 486963 - DNA, 201 bp, Homo sapiens
tgtgccagcaggtatgcctgcctctcggagagagctggaagcagaattaacagttaagccctcgttttccttcttctttagtgacttggaagccactgatmatcttaaaccttccagacaggcagtttgtaatgaaagaaatctcttgagactgggtggtgagtgagtctcttgagactgggtggtgagtgagtcttttga

SEQ ID NO: 486964 - DNA, 201 bp, Homo sapiens
gtgaaaatgatatagaccattggcaatgtgggctcaagagtgaccaaaggtctaggaggaagacaaagatgtgggagagtcaacagcatgaaacaggaagracagaagcctggaaatctgagttcgggttcttgaaaagtaaaaatctgtaatgctttctgacatgcataatgtgatgataggatagcaggagtaagtgaa

SEQ ID NO: 486965 - DNA, 201 bp, Homo sapiens
ggctgtaaccatttttaaatataaatgcctgataaagcaaagttggagtatcatttaaataataatagaatataaaatataattatgataagaatagaatstaaatgagctattatttaatgatcaatgaggagtatgtttaattaaatttttaccttacagatcatcatggtaaactctgtctctgaccttcacggctac

SEQ ID NO: 486966 - DNA, 201 bp, Homo sapiens
aacaaacaaacaaaaaacaaaccaaaaaaatacagagaatttcttaaggcctttttgtgattactgattattgtcctaattcaaatctgatttctttgttygttatcttgtagcttagaagcaagaataccaaaatcattaaactagagttatatatttcctctttctcatccaaaaatggcttaaagagagaaatggttt

SEQ ID NO: 486967 - DNA, 201 bp, Homo sapiens
ttctaagttcgcgtggttgtggcaggactcggttccttgcaactataggactgatttcccttccttgctgcctgtcagctgggagccactctcagttcctrcggctgcccacattccattccatctggccccctccatctcaaaagtcagcaaaggggaatctcctttgtgttgaatcttttttatgcttccagtctctga

SEQ ID NO: 486968 - DNA, 201 bp, Homo sapiens
gatcatgccactccactccagcctgggtgacagagtgagactccatctcaaaaacaaaacaaaacaaaacaaaacaaaaaaacaccaaaataaaacaaacaaaaaaaaaaaatctggactgaaattgtaaaatcctgatgacatcatgaaaattttccctgaaaatgcctctgagaagcttggcctttgcttttccaaacc

SEQ ID NO: 486969 - DNA, 201 bp, Homo sapiens
ggatgtagagagagggcctctcggaggtaaccagacagaagaggacattgtatccaggtgttatggagtcagctagggcttgggcagggaagagaagagcrtcactgatgggtgagacacagcagcacaagaagccgaggagggaggcaggcactgaggtttgggacaagctcctcagctgtggcatgactgcctgtgatc

SEQ ID NO: 486970 - DNA, 201 bp, Homo sapiens
ttccattccatctggccccctccatctcaaaagtcagcaaaggggaatctcctttgtgttgaatcttttttatgcttccagtctctgaccacttgacccakatagatctgagttcatatgattaggacaggcccaactggattacctatcaaatgaacagcaaaatccttccacagcatcccctaaattagtgtttgattg

SEQ ID NO: 486971 - DNA, 201 bp, Homo sapiens
catgccactccactccagcctgggtgacagagtgagactccatctcaaaaacaaaacaaaacaaaacaaaacaaaaaaacaccaaaataaaacaaacaaaraaaaaaaatctggactgaaattgtaaaatcctgatgacatcatgaaaattttccctgaaaatgcctctgagaagcttggcctttgcttttccaaacctac

SEQ ID NO: 486972 - DNA, 201 bp, Homo sapiens
aagatctggatctggcctggcacagtgtctcacacctataatcccagcagtttgggaggcaaaggcaggaggattgcttgaaagtagcagtttgagaccascctgggtaacatagcaagacctcatctctaccaaaaaaaaaaaaaggcgttagctgggtgtgatggtgcatatctgtagccctagctacttgggaggctg

SEQ ID NO: 486973 - DNA, 201 bp, Homo sapiens
tgtcctgggtgacagagcgagactccatctcaaaacaacaaaaacaacaacaacaaaagagaaaaaatatattccaaagattactgtcagtaatcaaaatrtctggaatgggctgggtgcagtggctcatgcgtgtaatcctagcactttgggaggctgaggtgggcagatcacctgaggtcaggagttcgagaccagcct

SEQ ID NO: 486974 - DNA, 201 bp, Homo sapiens
aattggccttttagtaaaagaaatgcttgcatttatattccatgcagctctaaaatcatggtgaagacctaaaattattttaagacaaaattctcaaagcratttaatttgtccaagtgtttacctcgattaagaatattaagtgaatttggatttaaaatattatctttattttaccaagtaatattaacatcctttaaa

SEQ ID NO: 486975 - DNA, 201 bp, Homo sapiens
tcccagcttccccctccagtgtctccttctgctataccaatatggcgtttctcctttagcctctccacctttcttcccaactcttcctcacatatggatakgtgtgtgtgtgtgtgtgtgtgtgttgctggaagctcagcagcagttaagaaaatgagtgggaaaagccaagaccctctttagtaggtgggatgaggaaat

SEQ ID NO: 486976 - DNA, 201 bp, Homo sapiens
ctaccttttaaggaatactaaaggaagttattcaggctgaaagcaagtgatcccaggtggtaattcaaatccatatggaaaacaaagagcatcagtaaagrtaattatgtaattatgtaagacactgtaaatgcatatttcttcattcttttaactgatttaaaaagcaattatgttaaacaaaagtacaaatggtcccca

SEQ ID NO: 486977 - DNA, 201 bp, Homo sapiens
aggatggaatctgaaatgtggaagctctatagaaaggaatatttgactgaatatggggaaagggctgccttattttctggacaccctagcagagaattacrttggcttggaggcagtggaggccctggatatggtttggatttgtgtccctgcccgaatctcaggtcaagttgtaatcccgtgttggaggtggggcctggt

SEQ ID NO: 486978 - DNA, 201 bp, Homo sapiens
gctggaattacaggcatgccccaccatcacacccggtaattttttttttgagttggagtctcactctgttgcccaggctggagtgcaatggcgcgatctcrgctcactgcaacctccgcctcccaggttcaagcgattctcctgcctcagcctcctgagtagctgggactacaggtgcccaccaccacactcagctaattt

SEQ ID NO: 486979 - DNA, 201 bp, Homo sapiens
tttcaccataaatttctttgcaggcaccaggaggatttcatagcacatgtgtagaggccaggtgggctggaaggtgacaagaacacaggctttggaagtcrgatagggatggattcaaatcttggctctaacaagtaccagctgtatgaccctagtcacgtttcgtagcctttctgaatatggtccccctcatctgtaaag

SEQ ID NO: 486980 - DNA, 201 bp, Homo sapiens
acagatctaccttttaaggaatactaaaggaagttattcaggctgaaagcaagtgatcccaggtggtaattcaaatccatatggaaaacaaagagcatcartaaagataattatgtaattatgtaagacactgtaaatgcatatttcttcattcttttaactgatttaaaaagcaattatgttaaacaaaagtacaaatgg

SEQ ID NO: 486981 - DNA, 201 bp, Homo sapiens
tctgaaccaatggcctgagctgtaccttggcccctttcagccatggctggagcaactggcatgcagggcaacaagtccctagactgcatagagcaggggtycccgggctgggcccacaaaaccactttttcctcctaggcctgagcctgtgatgggaggggttgccacaaaggtccttgacatgccctgcagacattttcc

SEQ ID NO: 486982 - DNA, 201 bp, Homo sapiens
tgaccaaaggggttcattataaataatacaagatactcctatcactcaagaaattataagagttttaggaactctgtaccaggaaccagggacaaagactraatacatttcttactataccacagttttcttctacattttcttccaagtttaatgtttcatgtttagatctatgatccattttgacttaatttttgtata

SEQ ID NO: 486983 - DNA, 201 bp, Homo sapiens
ctgtgtctaagaaggcatggaacccaggccattaacatctaaggatgtcatcttgttggagggtcatggctttgtgtacatgtgtgaaattttcaaacacmcagagaagcagatagactggcacaatgaactccaagtgtccatcattcaatttcaacaaccattagctttctgcctttcttgtttcatctggcccacctc

SEQ ID NO: 486984 - DNA, 201 bp, Homo sapiens
ttggtgggagtgagtggaggagggaggaattcttttttttttttggagacagagtctcattctgttgcccaggctggagtgcagtggcacaatctcagctyactgcaacctccgcctcccaggttcaagctattctcctgcctcagcctcccgagtagctgggactacaggtgtgtgccaccatgcctggctaattttttg

SEQ ID NO: 486985 - DNA, 201 bp, Homo sapiens
ataaagacattcctggataaacaaaaacagataattaattgctaacagatctaccttttaaggaatactaaaggaagttattcaggctgaaagcaagtgaycccaggtggtaattcaaatccatatggaaaacaaagagcatcagtaaagataattatgtaattatgtaagacactgtaaatgcatatttcttcattcttt

SEQ ID NO: 486986 - DNA, 201 bp, Homo sapiens
atgctccttcctgattctgaaaaacagtagtttcaaccacttacagaaggtcttctataaaagcagaacttgctgcagggttttgactgtgggccgtactragacccttgctgaggggccagcagggaacagaccaggacagggtggaggaaccacctgatttcagccttgacctctccccataagggtgctgtgtctaag

SEQ ID NO: 486987 - DNA, 201 bp, Homo sapiens
ctggagtgcagtggcacaatctcagcttactgcaacctccgcctcccaggttcaagctattctcctgcctcagcctcccgagtagctgggactacaggtgygtgccaccatgcctggctaattttttgtctttttagtagagatggggtttcaccgtgttagccaggatggtctcgatctcctgacctcatgatctgcccg

SEQ ID NO: 486988 - DNA, 201 bp, Homo sapiens
ctgtgagtaccagcttacgtgtgcttttcactgtctctccttgttttctggaagatggggtgggggagttaaagatcaactgccaggaggtcaccctgtgmctgcctgaccttggggtggttgggatttctcagccacagggtggggaagaaggagtgtggaagggcgaaggctgggatttctcctgttgaccaccttacc

SEQ ID NO: 486989 - DNA, 201 bp, Homo sapiens
caccgcgcccagccaggagggaggaattctacattaaagtaaataaagaaaatagtttttagatagagataatgctgttaaagaattaaagtgtgggagagggcctaggtgactgggcgaataggttgtagagaatgacttaagatatagtcgccagggaagcgctgtgaggaggtgacccaggaactcagctctgcatga

SEQ ID NO: 486990 - DNA, 201 bp, Homo sapiens
ggagcaactggcatgcagggcaacaagtccctagactgcatagagcaggggtccccgggctgggcccacaaaaccactttttcctcctaggcctgagcctktgatgggaggggttgccacaaaggtccttgacatgccctgcagacattttcccctttgtcttggtgattaacatttggctccatcttacttatgcaaatg

SEQ ID NO: 486991 - DNA, 201 bp, Homo sapiens
tggcgtgaacctgggaggcagagcttgcagttagcggagatggcgccactgcactccatcctgggtgacagagcgagactccgtctcaaaaaaaaaaaaawatatatatatatatatacacacacacacacacatacacatatatgtatatacacatatatatacacacacacacacacacatacatatatatacatatat

SEQ ID NO: 486992 - DNA, 201 bp, Homo sapiens
gactccgtctcaaaaaaaaaaaaatatatatatatatatatacacacacacacacacatacacatatatgtatatacacatatatatacacacacacacayacacatacatatatatacatatatatatataaataaattagcctgggcatggtggcgggcgcctgtaatcccagctactcaggaggctgaggcaggagaa

SEQ ID NO: 486993 - DNA, 201 bp, Homo sapiens
ggggttcttgttttcacttgatctgtttatcagcacttgtgattttgtatgacatatgagctaatgacagaacttacagggttgttttaaaacaatgcatrttaagggaatgatgccgtacctgtaatattagccttctggtgatgcctatttttattgtttcttatttgaatttttgcttgtttgatagataaatgtgtt

SEQ ID NO: 486994 - DNA, 201 bp, Homo sapiens
gagatgagcttctgttagcccccaccattttgcagatgaaggtgccaaaagaatgccacaagactagaaagcattatggatactttatttctgaattagastaataaatttaaaaagacataggctaatcatcttatctcctataccaggaacaactctgggcactgccattcaagagggaattcctaaatttgcttaagt

SEQ ID NO: 486995 - DNA, 201 bp, Homo sapiens
ctctactaaaaatacaaaaattagccaggcatagtggcatgtgcctgtagtcccagctactctggaggctgagacaggagaattgcttgaacccgggagamggaggttgctgtgagccaagatcacgccactgcactccagcctgggcgacagagcgagacccctgtctcaaaaacaaacaaaaaaacaaaacaaaacaaa

SEQ ID NO: 486996 - DNA, 201 bp, Homo sapiens
ggcaggaggattgcttgaaagtagcagtttgagaccagcctgggtaacatagcaagacctcatctctaccaaaaaaaaaaaaaggcgttagctgggtgtgrtggtgcatatctgtagccctagctacttgggaggctgaggcaggagggttgctggagcccgggagttcaaggctacagtgagccatgatcatgccactgc

SEQ ID NO: 486997 - DNA, 201 bp, Homo sapiens
tcagaataacaaggactttctctttgggaatattagagaactttacgaatttcacaacaggtatataataattcatgttatcagaaagaatggagagtaasagaagggtggaaatgagactgatggaattgagagatgaaaacacttagatgttttcaggtttaagcaagtggtttggagtcagtggattggattggggtg

SEQ ID NO: 486998 - DNA, 201 bp, Homo sapiens
agatgtagcaattactgttaatggaagagactcattttgctgaccgagtgacttccctgagaagtggacaggtatcagctggtttgggtttgtccccctcrtagtgtaatttacagtggttagaccccttaaactcgatgccgtcccatgacaatttcccattgtctgggaatccttgtagacaccttacaagctcagacc

SEQ ID NO: 486999 - DNA, 201 bp, Homo sapiens
tatttttctttttgtgaacctaaggcaacagatcgaacaacttaaagttgtgagtgatttcagggtaattgtagtaatacctcagaatacagctttttttyctgaatcaatgtgtagaagataagagcaagaaggcctggagaacatttttctaggcacctcttgaaaccttatgtgattgtacttaaaaaattaattacc

SEQ ID NO: 487000 - DNA, 201 bp, Homo sapiens
gggtacaaacttgcagttatgagatgagtaagtcctggagatgtaacgcacagcatggcgactatcatggaataatactgtactgtacacttgcaatttgycaagacagtatatcttgtatctgccctttgaatggaaaacatgagttggcctcccaactttatctgactttatccaaggtgagaatgagtccaatttgac

SEQ ID NO: 487001 - DNA, 201 bp, Homo sapiens
aggctccctgatagagcgagtgaagctggcaagctgacgccagaggcttggagtgtgctttctctccgggagattggcagatatgtgcccacctctcagcrtctttgataccatgagaatacaggttgaacagcacgttgagtcctccttgctctctagctccgaaacagtcacataacatttcctgtctcagagtcttgt

SEQ ID NO: 487002 - DNA, 201 bp, Homo sapiens
gttcccggataatttttgtatttttaatagagacgggatttcaccatgttggccgggctggtctcgaactcctgacctcaggtgatctgcccgcctcagcytcccaaagtgctgggattacaggtgtgagccaccaaacccagccaaaagtgaccttttagctgggccttaaaaatgggaatgacagaaaatctactattc

SEQ ID NO: 487003 - DNA, 201 bp, Homo sapiens
cgagtgaagctggcaagctgacgccagaggcttggagtgtgctttctctccgggagattggcagatatgtgcccacctctcagcatctttgataccatgasaatacaggttgaacagcacgttgagtcctccttgctctctagctccgaaacagtcacataacatttcctgtctcagagtcttgtgctgcaggttgaaagt

SEQ ID NO: 487004 - DNA, 201 bp, Homo sapiens
ctggaagaatggaaagccatggcagtttccatggagacctgggttcctaagtctgccccgaagcattacatgaacctgctcagaatcttgccttgcgatgwgggcgatactttctgaaagcaacttagcaataatatacatcaagaatacttaaaatacgaactctttgattcagtaattattttacgactctagcctaag

SEQ ID NO: 487005 - DNA, 201 bp, Homo sapiens
ggatgatcgcttgagctcaggagttcgaggctgcaagcttcaggaagctatgatcacaccactgcccttcagcctgggtgacagagcaagaccttgtctcaaaaaaaaaaaaaaaaaaagaccctgtgaaaattttgaaataggcaaaattgcatttaggatccagtctcttatctttctctattcatttctcatttccac

SEQ ID NO: 487006 - DNA, 201 bp, Homo sapiens
tctcttatctttctctattcatttctcatttccacaaagcctcaggaacactgaggcttgttcctcaagcctgcccttcccctccaacggggcttcagtcyatacgatgtcctaaaaccttcctctcctcatcctttcctccaggaatcgccctcccaaggcagctgatctggactaaaggtagaggcagtctgagctagt

SEQ ID NO: 487007 - DNA, 201 bp, Homo sapiens
actgaggcttgttcctcaagcctgcccttcccctccaacggggcttcagtccatacgatgtcctaaaaccttcctctcctcatcctttcctccaggaatcrccctcccaaggcagctgatctggactaaaggtagaggcagtctgagctagttcaccacaatgcatgaatgatgggcagtccgaaagccctttaactctcc

SEQ ID NO: 487008 - DNA, 201 bp, Homo sapiens
tcctaggttccgtgggtgcagcggtgagccagacagtccagaatctgccctcatggagcttacattctactggagagagacagttcactaaaaagcaatcwaataaataataacatcagatagtaacaagtgatataaaaaagaaaacaagatataatagaaagtgactggggatgctactttagctagaatggtctggaa

SEQ ID NO: 487009 - DNA, 201 bp, Homo sapiens
agccgagatcgtgccactgcactccagcctgggtgacagaatgagattccatctcaaaaaaaaaaaaaagactgaaacactgctctaaggaacagatcaahatcagtaatttccccctttggacaggctggtcatttctggactgaatgctctagaggaaggtgagaaagacgtcagaaaatatcagtttctgatggtggc

SEQ ID NO: 487010 - DNA, 201 bp, Homo sapiens
ttacaggcgtgagccaccacgcccagcccatattgttttacaagtagaattctagaaaatattattggattagagagtgtaagtgtgaagtttttaaataygttttggtcagattgccttctgggaaacttacacccatcaacaggatgtggggttcttgttttcacttgatctgtttatcagcacttgtgattttgtatg

SEQ ID NO: 487011 - DNA, 201 bp, Homo sapiens
cgtgggagagtttttagttcctgtccacacataactaaaggaaagaaagataaaatcttctgtaccatctttatgctgcattttgttctatattccaagtwttttttcctggcttcttctcgtcatctgtttcctgttaagtatagctaggaccaatcttcagaagccaaactgccttgttgagagagatcaggaataaaa

SEQ ID NO: 487012 - DNA, 201 bp, Homo sapiens
acgcctgtaatcccagcactttggaaggccaaggtgggcggatcacgtggtcaggagatcgagaccatcctggccaacatggtgaaaccctgtctctactratattacaaaaaaattagctgggcatggtggcatgcgcctgtagtccccagctactcaggaggctgaggcaggagaatcacttgaacccgggaggcggag

SEQ ID NO: 487013 - DNA, 201 bp, Homo sapiens
atatagagaaaacaaaacataaaatgacagacatggatcccactatatcagtaatattaagtgtgaatggataaatgatccaatcaaaaggcagaaattgwcaggctaggtttaaaaaataagagccaactatatagtgtctcctggagacacactttatattcaaagatacaactagtatattcaaagatataaaaaagt

SEQ ID NO: 487014 - DNA, 201 bp, Homo sapiens
ggaattgttagcagttagttaccccctggttcttccaagtgaaaggaaggaaagcccagggggtttaggcattgcttttaagcagctcaccacttcccacycccaagtgaaaatgatatcctttagttcatgtgatagagatggtccttaaaaagttgtgcataattggccaagcgcggtggcttacgcctgtaatcccag

SEQ ID NO: 487015 - DNA, 201 bp, Homo sapiens
atatgaaaaactatagaataaccactaataaaattacttaaaatataatgaaaatattatcaaaggaattaaaatgctatactagaaatttttattaatgyaaaagaaagcagtaaatgaaaaaatatgagatatagagaaaacaaaacataaaatgacagacatggatcccactatatcagtaatattaagtgtgaatgg

SEQ ID NO: 487016 - DNA, 201 bp, Homo sapiens
tgtagtcccagctactcaggaggctgaggtgggaggatcacttgagcccaggaggtcaaagctgcagtgagcctagatcacatcactgcactctagcctctgtgacagagcgagagcctatctcaaaaataaataagtgcataaatacatgaatagatataaaaaattaaataataaatcagttcccaaccccactgctag

SEQ ID NO: 487017 - DNA, 201 bp, Homo sapiens
gaacttagggattctaactcccagctccagaagcatacactgagcctcaaatcttctaagattgtccagagtgagagtcttatctcttgtagagaaagagytgaaattgtggaaaatcagatacaagctcttatcatgggagcggctgacctgcaatgaaaggtgcatgcacagcctcaccaggtgtctactgttaaaatg

SEQ ID NO: 487018 - DNA, 201 bp, Homo sapiens
tggtatgtcattaggttttaatttgcttttccctagtaactaatggttgagcatctctttatgtgcttctttgccatctttatctcttctttggtgaagtktctgttcaaatcttttgctcattgttttcttattattgacttttgagagtttttatgtatatcctagatatatgtccttttaatgctttgtaaatatttt

SEQ ID NO: 487019 - DNA, 201 bp, Homo sapiens
gtggacatgtgttttcatttctcttgggtaaatacctaagagtgtaatggttaggccatatggtaggtgtatgtttaattttttaggaaatttctaaatastttccaaagtgattatagtatcttccattcccatagtaatgtatgagagttccacttgtgccatgtcctcaccaatacttggtattgtcagtcttttaaa

SEQ ID NO: 487020 - DNA, 201 bp, Homo sapiens
gggggaagggaagaaggtgagattcacttaagacggttcccagtcccctaagactatgcggaagcctcagatgaggcatacaaggcaatgtttgccctttycaagatctgtccccacctcccttcctgaaccctttcagaataataactaggatcaaatgacaacatgacctgactggagaaggggcacacaggcctgtgg

SEQ ID NO: 487021 - DNA, 201 bp, Homo sapiens
gtaaggataatgaacatgcctatcaccgccaaaggtttgttcacactgctttgcattccctttctcctgcccctccctcacccaccccaggtgaccaccartctcctttctgtcactataggttagtttgcattttctagaatttcataagagataatacactatgtacttttttttttggtctggcttctctcctctgca

SEQ ID NO: 487022 - DNA, 201 bp, Homo sapiens
ctgggaaaatatgatcaagacctacacacctttatatatttttatagtattctctttatgcatatatgtgtatttaaaaatcactatgtaaaatcaattcmaattagcttaaatttgagagtgctgttttttgttttttaaaattttagaccaaggaaatccacagtttgaaatgagcacgaggtgagtactgattttttt

SEQ ID NO: 487023 - DNA, 201 bp, Homo sapiens
aataattttaaaaacattttttcaaagttactcctttcaagctttccattagcagtttcagcctcggtgtactctgccatttgtcagttatgagaccttgmcctcttgggccttagttttcctctatgtaaaatgagggtactagaacctcctccataagatcgttatgaagcagatgattagcacatgcggagggcttgg

SEQ ID NO: 487024 - DNA, 201 bp, Homo sapiens
atatggagatagacccaggtgaactaggaggctcggctaaggtactcaatattaaatattacattttatataactaactattaatggtgtttgtctatggktcggaggatttatagcaattttacttggtggtctttattatctagattttctaaaatagtatgtatcctataactcacagtcaagaaaaaaaacaaaaaa

SEQ ID NO: 487025 - DNA, 201 bp, Homo sapiens
tgaatgtcctggaaacaatacacagggcaggaaacagtgtaaataacataggaggaggaggctgtgagaaaagaatggttaaaacatgagcaaataacatyctgccctaatttcattcccagccagtttgcatgcaaataggatgaaccagcttacagaatttggagattttacacgcaaaaagcaaaggaccttttttga

SEQ ID NO: 487026 - DNA, 201 bp, Homo sapiens
aaaacagttggaagtatattcgtttcctagggctgatgtcgcaaggaaccacaaagtacgtgacttaaaacaacagaaatttattccctcacagttttgamggctagacgtccaaaggcaaggtgagagcaggcccacgttccctctgagggctctcaggaagaatccttccttacctcgtctgagcttctggtgactgcc

SEQ ID NO: 487027 - DNA, 201 bp, Homo sapiens
gcctgctttcccctaaagcatctcacagccccatctcctgctggtcaccacttcctcctgttttcttcagttcagggagagatcacattgccaacccccamccctggcacattgtttttatgctgggggccctatggtcagctgctggtacctctctggattcacatcctctgattacttgcctatgaaggtgcagcagca

SEQ ID NO: 487028 - DNA, 201 bp, Homo sapiens
taattttaaaagtccatctgtgcctcagtgacttgagaattaattggtgtgtctgtctattcataaatgagcaacaaacttttaattatagtggatttacrttgtttaatatctagtgaaattaatcacttctccccatcccttaagctttgccttcttttctagtgttttcctaactgttctttcctgttttctatttgt

SEQ ID NO: 487029 - DNA, 201 bp, Homo sapiens
tttttttgccgtgaagaatttttatgtcatcaaatgtattgatttttcttttattgtatctgaattttgagtcattgttagaaagctttcctaaatctagsttatagagtaattcatccatgctttcctgtaatgtagtatgctttctatttttactgtcagctctgatgagattgtttgtggttggtatgaagtatagat

SEQ ID NO: 487030 - DNA, 201 bp, Homo sapiens
actcttctgccactaaccaacattctcatatccactcaagtctgtttttagttaggatcagttttaaacaggcacgggcttcttcgagaccatagaacttygtgtttcgtagagtaggtgtccatcttaatacatgttggtcattaaaaatggaagtcttcttattttacaaaatagtttcttttagtcccatttttctga

SEQ ID NO: 487031 - DNA, 201 bp, Homo sapiens
caagttaaggagttgaggcacagtgagcaggaagaggccattttcctgcaagagggtttgaggagcagagtgaggagcagattgatctggtggtggtgtgyaggatggattggagagagcaggaaagggaggcagggagaccaattaggggattctacactgagacaggtgcaaaacgaagagggatgatggcatgagaac

SEQ ID NO: 487032 - DNA, 201 bp, Homo sapiens
gtatctatcagtacttcatacctttttatggctgagtaacagtccattgtatggatataccatctttgtttatccattcattagttgatgaagatttgggktttttcccctttttggatactgtaagtaaagctgctgtagatatttttgtacagatttttgtatgaatctttatttccagttttctttggtgtatatatg

SEQ ID NO: 487033 - DNA, 201 bp, Homo sapiens
gagtttcaccatgttggccaggatggtctcaatctcttgaccttgtgatccgcccgcctcagcctcccgaagtgctgggattacaggcgtgagccactgcrcccagctgacctggcttctatttctatctaacgcagggtctgaagttttcaacagagcatatttggggaattacagagcatcccagttcaccagaacaga

SEQ ID NO: 487034 - DNA, 201 bp, Homo sapiens
ctagattttgggcacccaactgaggcctgaaatcagaaggcactccttggttttattaagagtaaatggtggcactggcaagtaagtcttacatgtcacgrgaatttaagtaaattgtagtaaagggcaggaaacaaagttaatatgccaggctcttgtccttctctatttaaaaactaggggtctgatgttacttcttcc

SEQ ID NO: 487035 - DNA, 201 bp, Homo sapiens
ccaaggagggtagatttgcttcagagccctcagggaggataccagagaggctagattttgggcacccaactgaggcctgaaatcagaaggcactccttggktttattaagagtaaatggtggcactggcaagtaagtcttacatgtcacgagaatttaagtaaattgtagtaaagggcaggaaacaaagttaatatgccag

SEQ ID NO: 487036 - DNA, 201 bp, Homo sapiens
gaataggaaaatggcaggatacttggggttgggaaatgctatctttgtgcctgaaattaattaggatctcgcattgtgagtgggttgggcaggtacagaarggcttcccacagtaattcattcttcagcagacctctatgagagcccacagcatgtagggtgcggtgtacgatgctgtaaaggactgaaaaacctcaagac

SEQ ID NO: 487037 - DNA, 201 bp, Homo sapiens
gtcctttacttttgctatcacagttctgtatttctttccttaaaatcaatatataaaaagattcaatttcttgagcttccttgaccctggaatttctttgygaattatgtatagtactgtacataaggaactattgaattacaaaccttcccacatgaatcttatggtattaaaataaataaatattcaaaaatacacaga

SEQ ID NO: 487038 - DNA, 201 bp, Homo sapiens
gagccccaactcctagcttacatatggagctagtgacctgaaacctgggaggtgagaaccaaggggcgacatctagagcaggactgtttaatagaaatacagtgtgggccacacatgtactttaaaattttatggtaaccatattaaaaaggttaaaataaacagatacaatgaattttaattatatattttaaatttacc

SEQ ID NO: 487039 - DNA, 201 bp, Homo sapiens
tttctctgcctgtctcttgtggcagcttgaatccttttgaaaataattgatgaagaaatcaactgctcaatactcttaggcttgtagagtccccagtttcmcctcatacacaccaatgaagcccaggtttggtggagggtagggctcccaggggtgagtgggaggctcctaactgaaacaatggaaaatgtcaaaccaagg

SEQ ID NO: 487040 - DNA, 201 bp, Homo sapiens
ttaagctggcacttggcccaccccttacaagactttcagaaaaaaaaaaaaaaaggcttttagaaagcaaatttgggaaaggcctgtctgttcagaacaakggatataactagcatttgctcagcaccctctatatacatctccatatatattatctcctttaacctccacaccaaaaagctgagagtagaccaagactca

SEQ ID NO: 487041 - DNA, 201 bp, Homo sapiens
tttacccccaagttaaggagttgaggcacagtgagcaggaagaggccattttcctgcaagagggtttgaggagcagagtgaggagcagattgatctggtgrtggtgtgtaggatggattggagagagcaggaaagggaggcagggagaccaattaggggattctacactgagacaggtgcaaaacgaagagggatgatggc

SEQ ID NO: 487042 - DNA, 201 bp, Homo sapiens
atagtttgcacagtagattttgttgacaatctacattttgatggcaatgtacattttaattttcaacaagacttttgggttaatgcagggtctgctggatytcgagtctcctgaagatatggagatagacccaggtgaactaggaggctcggctaaggtactcaatattaaatattacattttatataactaactattaat

SEQ ID NO: 487043 - DNA, 201 bp, Homo sapiens
aaatgaaggaattgactcagagaggatcatcttttttgtttttttttttgagatggagtttcgctcttgttgcccaggctggagtgcaatggtgtgatctygactcactgcaacctccgcctcccgggttcaagcgattctcctacctcagcctcccgagtagctgggattacaggcatgtgccaccacgcccggctaatt

SEQ ID NO: 487044 - DNA, 201 bp, Homo sapiens
gaccttttctcacctctaagtatttgcacttttaccccccacctggaataagtctttagtatatttctcacagaaatagtacacacctttgaaacccaatrcaatgccatctccttcatggtatcatttctgatcttgctggtgggacatgatgactcctgactctgaattccaaagtaagctttgttctgctcgcattgt

SEQ ID NO: 487045 - DNA, 201 bp, Homo sapiens
gtcagcaaatctcagacttcatatcatttcactgttaaatgcttcaatttgtgtttctaacagagaaggccccctttttataaaatgtgactaccatgccrttattacacccaccgaatgaacagtgacgaaggagttctttgaacttttagtgaattcagggtggaagtggtattgggatgaagaagctctggtctagat

SEQ ID NO: 487046 - DNA, 201 bp, Homo sapiens
ccacactcagcaaatttttgtatttttagtagagatggggttttgccatgttggccaggctggtctcgaactcctgacctcaggtgatctgcccatctcakcctctcagagtgctgagattacaggcccggccacaagatttgatggttttaaaagtggcagtttccactgcaccctctctctcccttgccaccctgtaaa

SEQ ID NO: 487047 - DNA, 201 bp, Homo sapiens
gtagcaagagaattatgtaacaaacccctgtggacccatcaaccagcttcaataattatccacattttgtcagcatgtttcatctaccccccacttccacmccatgcatagttttagtgaaggggagtgctggagtatttgtcagcaaatctcagacttcatatcatttcactgttaaatgcttcaatttgtgtttctaac

SEQ ID NO: 487048 - DNA, 201 bp, Homo sapiens
tagtggtgtggcacgatcttggctcactgcaacctttgactccctggttcaaatgattctcctgcctcagcctcctgagtagctgggattacaggcacgcmccaccacgccaagctaatttttaaaaaaatttttagtagagacagggttttaccatgttggccaggatggtctcgatctcctgacctcgtgatccacccg

SEQ ID NO: 487049 - DNA, 201 bp, Homo sapiens
aatctgtgcatgccaaaaatggcaaagaagcaggaagcctccacagacctctgtgaggccagggcaggtgtgtaacaggcaccagcgccttggtgggtcayggttctgctcacctgttcctgggagaaggaaaaacccttttactggtgagaacactgagactcagagtgtacttgccctgatcacctatctagaaggtgg

SEQ ID NO: 487050 - DNA, 201 bp, Homo sapiens
actaaaaatactattagagaaggccaggtgtggtggctcatgcctgtaatcccagcactttgggaggccgaggtgggtggatcacttgaggtcaggagttygagaccaggttggccaacatggtgaaaccccgcctctactaaaaatacaaaaatcagctgggtgtggtggctggcaggtgcctgtaatcccagctactcg

SEQ ID NO: 487051 - DNA, 201 bp, Homo sapiens
gcgaaactccaccttaaaaaaaaaaaaaaaaaagagacaagtttctccctaatctgtgcatgccaaaaatggcaaagaagcaggaagcctccacagacctytgtgaggccagggcaggtgtgtaacaggcaccagcgccttggtgggtcatggttctgctcacctgttcctgggagaaggaaaaacccttttactggtgag

SEQ ID NO: 487052 - DNA, 201 bp, Homo sapiens
tagagatggggttttgccatgttggccaggctggtctcgaactcctgacctcaggtgatctgcccatctcagcctctcagagtgctgagattacaggcccsgccacaagatttgatggttttaaaagtggcagtttccactgcaccctctctctcccttgccaccctgtaaacatatgctttgcttccctttcatcttcca

SEQ ID NO: 487053 - DNA, 201 bp, Homo sapiens
ggagtctgggtagctggcctcttatcagggcttcctgtacttctcagctatggctacaggccatcctttgtgttccaaaggctcatgtgtgttccctattaaaaaaaaaaaaaagcttcaagtagcctaacatttctacagaaattacacttaattaatatagctaatttaaaaatctttgccagatacttgaaatcattg

SEQ ID NO: 487054 - DNA, 201 bp, Homo sapiens
ctgggtgtggtggctcacgcctgtaatcccagcactttgggaggccaaggtgggtggatcacctgaggtcaggagttcgagaccagcctggccaatgtggygaaaccccgtctctactaaaaatacaaaaattagctgggcatggtggcaggcgcctgtaatctcagctactcgggaggctgaggcaggagaatcgcttgg

SEQ ID NO: 487055 - DNA, 201 bp, Homo sapiens
tgtggtggctcacgcctgtaatcccagcactttgggaggccaaggtgggtggatcacctgaggtcaggagttcgagaccagcctggccaatgtggtgaaamcccgtctctactaaaaatacaaaaattagctgggcatggtggcaggcgcctgtaatctcagctactcgggaggctgaggcaggagaatcgcttggacccg

SEQ ID NO: 487056 - DNA, 201 bp, Homo sapiens
acaactgtttcatatattcttttctcatacacccacacatatgtgcataaacatatcacacgcttggttttttctttcttttttaaaatctgactataatytcaccacttgtaggatttttgtgtccttgacattgtatcttaaatctttttcggtgaatgtgggtctttatacttgtataatgattggttccattttttc

SEQ ID NO: 487057 - DNA, 201 bp, Homo sapiens
gatataagatatacagatggcaaaaaacacatgaaaatatgctcaatatcagtagtcatcagtgaaattgtgtacctgttagagtgactaaaaaaaatgaygataccaagacatggtgaagatgacaagggactggatatcttacacgcactgttggtaggaatgtaaaatggtacagccatgttggaaaacagttggcag

SEQ ID NO: 487058 - DNA, 201 bp, Homo sapiens
tttggatgtttcatattgagtccatgtcattgcttttattgcttttcttcccccaacacttggcttattacaagggatttccaatttttaaaaaatattgkctgggcgcagtggctcacgcctgtaatctcagcactttgggaggccaaggcagatggatcgcttgagcccaggagtttgagaccagcctgggcaacatgg

SEQ ID NO: 487059 - DNA, 201 bp, Homo sapiens
ctgcactctagcctctgtgacagagcgagagcctatctcaaaaataaataagtgcataaatacatgaatagatataaaaaattaaataataaatcagttcscaaccccactgctagcctaggatattaaatcagttcccaaccccactgctagctaggatatcttttctggtgcatgcttgctgtattgccagttgaggta

SEQ ID NO: 487060 - DNA, 201 bp, Homo sapiens
gtttaagaccagcctggccaagatggtgaaaccttgtctctactaaaaatacaaaaattagccgggcgtggtggtgtgcacctgtaattctagctactccrgagtttgaggcagagaattgcttgaacctgggaggcggaggttgcagtgagcgagatggtgccactgcactccagcctggccgacagagtgagactctgt

SEQ ID NO: 487061 - DNA, 201 bp, Homo sapiens
ctgttttcttgagctttctattccattcctattttcacaaggctgccctgcctcctactttactgagtgggcaaacgcaccctctgatgttacctcctccrgcttcccctctggctgctgagttccacttagaactctcctgatcatcttcctttctttattcccccttgtctgggaggaagatgtgctcacacttctttc

SEQ ID NO: 487062 - DNA, 201 bp, Homo sapiens
gcagtcaagtttggcactctctgcggtttcgggcatccactggggatcttggaagtagaccctgaggataaagggggactactgtacctgtcattataaawgtgtctagatccaaggaatgtacaacagccaaagtgaaccatgatgtgagctacagactttgggtgaatatgatatattcagtgtatacgttcatccatt

SEQ ID NO: 487063 - DNA, 201 bp, Homo sapiens
caatcaaaaatgcctgcagacacgcccgcatttctccagggcggggtgggaatcggttgagagccgcttagcccgagccttggaggagccggagccgctcmaacccggcgggggccgcagactgggagctcccggtccgcctcccagcatccctgcgagcgttcatggggtgttcgtgttagtgccaagattgcttcgttg

SEQ ID NO: 487064 - DNA, 201 bp, Homo sapiens
tgcgcgcctagctccgcacgggggacctcggagctgctctaaggcgcctgcagaggcgagcagagcccgcagcccacgccttctcgaccgcgcacttcgayattcggagccgggcaattctttgctgcgtgggcttctctgtgctcccacggtaggatgtttagtagcacccctggcctctacccactaggtgccaggaat

SEQ ID NO: 487065 - DNA, 201 bp, Homo sapiens
catgctcattgttcaatatttggaaaatacagaaaagtacaagaaagaaagtctataatcccattttctaataataatcagttaccttttgagctatatcyctctagctttttgttcctttggcatttttacatagttaagattatatgatctagctttctttatatgtataatacatattacagatagaattatatagat

SEQ ID NO: 487066 - DNA, 201 bp, Homo sapiens
ggaccatgagtgcccagggcagccaagtgttctttaatacatatgttcatggggggagggtgtgagatactgagccctccaaagtgagggtctgggcaggyggtgccacgaggaactttctggaggtggggggaggggaatattccatttctttctttctttctttccttttttttttttttttttttgagacgatgtctt

SEQ ID NO: 487067 - DNA, 201 bp, Homo sapiens
aatatttggaaaatacagaaaagtacaagaaagaaagtctataatcccattttctaataataatcagttaccttttgagctatatctctctagctttttgytcctttggcatttttacatagttaagattatatgatctagctttctttatatgtataatacatattacagatagaattatatagattatattctgcttat

SEQ ID NO: 487068 - DNA, 201 bp, Homo sapiens
acttccacagttcaaatcctccctgcactctgaagcagtgtgtgtccctgatgtcagcagtggtgcaacccacaaaccaccctagcatttggatgcggtcrcattttcttttgaggacataaaccaagagctgtggagtatttccctgggtctgagcagcgttaaaagagtagatttccagggctatgtgcacctgccagc

SEQ ID NO: 487069 - DNA, 201 bp, Homo sapiens
tagcatttattaagtatttcttcattgattggcaatgcctcactctttacatattgttatttttgaatttataatctatttcttggtcttgtttcattctttttattttattagtgctaacataataactttaaaatacctgccaggagaaattctctttttcaagcatttgtttttttaaaaaccttttttttgagacat

SEQ ID NO: 487070 - DNA, 201 bp, Homo sapiens
agcatttattaagtatttcttcattgattggcaatgcctcactctttacatattgttatttttgaatttataatctatttcttggtcttgtttcattctttttattttattagtgctaacataataactttaaaatacctgccaggagaaattctctttttcaagcatttgtttttttaaaaaccttttttttgagacatg

SEQ ID NO: 487071 - DNA, 201 bp, Homo sapiens
ttagatttctttatccatggtttgaatgtatgtggccctccaaaattcatatgttgaaacctaacccccgaggtgatggtattagaaagtggggcctctgkgaggtggacaggtcatgaggaatccacctttgtgaatggaattagtgcccttataaaagaagcttcagacagctgcctccctcttccatctctcctgcca

SEQ ID NO: 487072 - DNA, 201 bp, Homo sapiens
gcatttattaagtatttcttcattgattggcaatgcctcactctttacatattgttatttttgaatttataatctatttcttggtcttgtttcattctttttattttattagtgctaacataataactttaaaatacctgccaggagaaattctctttttcaagcatttgtttttttaaaaaccttttttttgagacatgg

SEQ ID NO: 487073 - DNA, 201 bp, Homo sapiens
catttattaagtatttcttcattgattggcaatgcctcactctttacatattgttatttttgaatttataatctatttcttggtcttgtttcattctttttattttattagtgctaacataataactttaaaatacctgccaggagaaattctctttttcaagcatttgtttttttaaaaaccttttttttgagacatggt

SEQ ID NO: 487074 - DNA, 201 bp, Homo sapiens
actgattacagaggcatgagccaccatacctggccttgttatttatgtttctgaatagatccttattcagttactattacgtagaaagttgtaaaatacaygttgaaggagaaatgatctcttcactgaaaggttgagggctgcagcgcctcctgcataaagatacagtagaaagttaacagtctgtgttaccttctgaaa

SEQ ID NO: 487075 - DNA, 201 bp, Homo sapiens
atttattaagtatttcttcattgattggcaatgcctcactctttacatattgttatttttgaatttataatctatttcttggtcttgtttcattctttttattttattagtgctaacataataactttaaaatacctgccaggagaaattctctttttcaagcatttgtttttttaaaaaccttttttttgagacatggtc

SEQ ID NO: 487076 - DNA, 201 bp, Homo sapiens
tggccaatggcaaggcttactctgaaattttagcttgaatgatacaaagatgagaagcttgtgtaaaaacatttattacttgctgattggctatttcacaytgtgctctttctttaactatggaaacacattattaataaataccattaagcatgaggaaccaaaataaaatgcatcaggaaaaggcagcctctctctgag

SEQ ID NO: 487077 - DNA, 201 bp, Homo sapiens
cctgggctaaagcgatctcctgcctcagcctctcaatgtgctaggattacaggtgtgagccactgtgcctggccaaaaaaccattttcttaacccttctascctctagccttttatattcttttttttttttttttttttttgatggagtctcgctctgtagcccaggctggaatgcagtggcgtgatctcggctcactgc

SEQ ID NO: 487078 - DNA, 201 bp, Homo sapiens
tgacagtttcttataagttaaatatacacctaccctttgactcatcaataccatttctagatatttgtctgagagaaaggtaaacatgtctacacacaggsctttacatgaagattcacagcaacttcatttaaaacagcccaagttggggaagaacctgaatgtccatcagtaggagaatgaacaagcagtagctgtcca

SEQ ID NO: 487079 - DNA, 201 bp, Homo sapiens
cctgcctcaacctcccgagtagctgggactacaggcacccgggaaaaacccaccacgcccggctaatttttttttgcatttttagtagagacggggtttcrccatgttagccaggatggtcttgatctcctgacctcgtgatctgcctgcctcggcctcccaaagtgctgggactacaggcatgagccaccgtgcccggcc

SEQ ID NO: 487080 - DNA, 201 bp, Homo sapiens
ctctgtctaacctcctttctcatctcatcatactattccatattattgcatgtatactgaatatacaataataataattattattattgttttgtccacagcaccatttccagccaataggcttcactgtttatgggccagtgatatgtgaattaataataaatatatacagaatccataagtcattacttattccataaa

SEQ ID NO: 487081 - DNA, 201 bp, Homo sapiens
ggggtttcaccatgttagccaggatggtcttgatctcctgacctcgtgatctgcctgcctcggcctcccaaagtgctgggactacaggcatgagccaccgygcccggcctatattctttcaaataaacttgataatcatttcattaattccccccatccccacaaacttactgtacttttaacaacaacaaagaactagct

SEQ ID NO: 487082 - DNA, 201 bp, Homo sapiens
agggcacacccagagcagctgcagtttgtctcaggagagacgtgtcacccaagggcttggatgagactcccccacctccgcagccccccctcctgctttgyctcctaggatagaacaaagcatgataggatgaggtgggacagatgaggacttcacacactctaagggtaaatattgttccgtccgcttgtgtttgaattg

SEQ ID NO: 487083 - DNA, 201 bp, Homo sapiens
ttatttttagttttattagttgattttcatttctttgtagctttctggttatttaattttatagtttcagttactggtttatagttactttattttcaaarttatttagttgttcattttcagttatttatatgtagttgttttgttttaggagttacagatgttcaaattaatttgcttggaatttatttatttatttat

SEQ ID NO: 487084 - DNA, 201 bp, Homo sapiens
taaactttctcttttcagaacaagcttcattttctcaggtcctcatatacctgaagcagaagttaggatgcagatggaacacacagatgctcatgggtccrcaatgcagccaaaattctatctctactggacataattgaaatgttaatttcttgtccctttgaaggagactgtcatgtatcaaacatagcacagaggaaa

SEQ ID NO: 487085 - DNA, 201 bp, Homo sapiens
cctgctttcccctaaagcatctcacagccccatctcctgctggtcaccacttcctcctgttttcttcagttcagggagagatcacattgccaacccccacmcctggcacattgtttttatgctgggggccctatggtcagctgctggtacctctctggattcacatcctctgattacttgcctatgaaggtgcagcagcat

SEQ ID NO: 487086 - DNA, 201 bp, Homo sapiens
gcaaaagcctttagagctgaaacaatcaccccaatcacatcctaaatgtcactgtggttgtaattggaacattggtctctttaattagttactgcttttcygctgaatgctgagtctttatgttcgggaggtgcagagcgctggcttatctctttggcatctttaatggtggtgcaatgtggggagggccagggacaagtg

SEQ ID NO: 487087 - DNA, 201 bp, Homo sapiens
cactttgggaggccgaggcaggcagatcatgaggtcaagagagtaagaccatcctgtccaacgtggtaaaactccgtcgctactaaaaatacaaaaattarctgcgtatggtggtgcgcgcctgtagtcccagctacttgggaggctgaggcagaagaatcgcttgaacctgggaggcggaggttgcagtgagctgagatc

SEQ ID NO: 487088 - DNA, 201 bp, Homo sapiens
ggtccagtttcagttttctgcatatggctagctagttttcccaacaccatttattaaatagggaatcctttccccattgctttgtttttgtcaggttcatyaaagatcagatggttgtagatgtgtggcgttatttctgaggcctctgttctgttccattggtctatatatttgttttggtactagtaccatgctgttttg

SEQ ID NO: 487089 - DNA, 201 bp, Homo sapiens
ttgggggtgggagatgactgaaaggtgcagcacaagggaggtctttgtggcgatgggacagttttgcatcttgcttgtactggtgggtacaggaaacaacrtatgtgggaaaatgacagagctacacacacattataagcatatcaaattcctggtcttgatattgtactgtaattatgtaagatgtaaccattggtggtg

SEQ ID NO: 487090 - DNA, 201 bp, Homo sapiens
tcgtttgagggtttagcagtcttttgaatgctccttcctgattctgaaaaacagtagtttcaaccacttacagaaggtcttctataaaagcagaacttgcygcagggttttgactgtgggccgtactgagacccttgctgaggggccagcagggaacagaccaggacagggtggaggaaccacctgatttcagccttgacc

SEQ ID NO: 487091 - DNA, 201 bp, Homo sapiens
tgactattgtaatcacaggctcccacagcttctgcttttcatttctggactcaggctctgtgtggacgcatttatacagatgtttcctgcttctttgtgcagtaagtttgtgacagtcatattaactcttactacctggaatggaaacacgggcacccaaaagaagctcttgctgaggccagcttccctagattcactctc

SEQ ID NO: 487092 - DNA, 201 bp, Homo sapiens
ccactgccatatgccacgcgttaatgcagatataaggatgtggggaatcctttgttgctgtgagggaaagacaccacacctgtctcacggctttgctcagrtgtttctctgtggcacacctctgcccctcttctaggcctgactcatgcacattcatcaaccctcaactctgacctcatctcttcgatgaaaccttccttc

SEQ ID NO: 487093 - DNA, 201 bp, Homo sapiens
gtgtggtttagaatgtacacagtggccaggtgtgtggtattttgcctgctttccacctgccttctatgatttagaggtaaacagcagctttgtgactgagrggctgcctggcgtctgataccacttgtggagattaggaagttgattgctttaaccaaacccacttgaaaaatatgttttttcttttacacctttttcttt

SEQ ID NO: 487094 - DNA, 201 bp, Homo sapiens
tctgtctaacctcctttctcatctcatcatactattccatattattgcatgtatactgaatatacaataataataattattattattgttttgtccacagsaccatttccagccaataggcttcactgtttatgggccagtgatatgtgaattaataataaatatatacagaatccataagtcattacttattccataaaa

SEQ ID NO: 487095 - DNA, 201 bp, Homo sapiens
tgggaaaggccttccctccatgggtttgcattgcttatgagcccccacccctcccttgactatagtgtggtttagaatgtacacagtggccaggtgtgtgrtattttgcctgctttccacctgccttctatgatttagaggtaaacagcagctttgtgactgagaggctgcctggcgtctgataccacttgtggagattag

SEQ ID NO: 487096 - DNA, 201 bp, Homo sapiens
gttgaaattgaattatcacttccctttgccttgtgtgggtaacaaagagacaagtttctgccaggcgcaatggctcacacctgtaatcccagcactttggraggccgaggtgggtggatcacctgaggtcggaagttggagaccagcctgaccaacatggagaaaccctgtccctactgaaaatacaaaattagccgggcg

SEQ ID NO: 487097 - DNA, 201 bp, Homo sapiens
ctccgggagattggcagatatgtgcccacctctcagcatctttgataccatgagaatacaggttgaacagcacgttgagtcctccttgctctctagctccraaacagtcacataacatttcctgtctcagagtcttgtgctgcaggttgaaagtgatgtttgaggcggagcctgtcactttgagggttgcccaaatgactg

SEQ ID NO: 487098 - DNA, 201 bp, Homo sapiens
gaggcaggagaatcgcttgaacccgggaggtggaggttgcagtgagccgagatcatgccattgcactccagcctgggcaacaagagcgaaactccaccttaaaaaaaaaaaaaaaaaagagacaagtttctccctaatctgtgcatgccaaaaatggcaaagaagcaggaagcctccacagacctctgtgaggccagggca

SEQ ID NO: 487099 - DNA, 201 bp, Homo sapiens
gaggactgcttgagcacaggagttcaaggctgcagtgagctatgattatgccactgcactctagtctgtgtgacagagcaagatcctatatcttaaaaaagagaaatcaaaaaaatgctcaggtatgaacaaataatactgaagctctatttctgagtatgccactgtcctagaccactgggagattgtactctgaaaact

SEQ ID NO: 487100 - DNA, 201 bp, Homo sapiens
cctgagtatctgggattaccagcacctgccaccacacccagctaatttttatatttttagtagagacggggtttccatgttggccaggctggtctcgaacytcaggtgatctgcccgcctcagcctcccaaagtgctgggattacagggatgagccactgcacctggcctcgtctgttgctttttatatccttcctcaagt

SEQ ID NO: 487101 - DNA, 201 bp, Homo sapiens
ggactgcttgagcacaggagttcaaggctgcagtgagctatgattatgccactgcactctagtctgtgtgacagagcaagatcctatatcttaaaaaagagaaatcaaaaaaatgctcaggtatgaacaaataatactgaagctctatttctgagtatgccactgtcctagaccactgggagattgtactctgaaaactct

SEQ ID NO: 487102 - DNA, 201 bp, Homo sapiens
gagtgactaaaaaaaatgacgataccaagacatggtgaagatgacaagggactggatatcttacacgcactgttggtaggaatgtaaaatggtacagccaygttggaaaacagttggcagtgtcttataaagttaaacatacatttaatatacgactcagtaatcgcaacccaagaaaatgaaaactcacggtcactcaaa

SEQ ID NO: 487103 - DNA, 201 bp, Homo sapiens
gtctagatttatcccctttacccaaaacaatgggggaattcattgaaggggatcttggggcttaagctggcacttggcccaccccttacaagactttcagaaaaaaaaaaaaaaaggcttttagaaagcaaatttgggaaaggcctgtctgttcagaacaagggatataactagcatttgctcagcaccctctatatacat

SEQ ID NO: 487104 - DNA, 201 bp, Homo sapiens
acctagcatcagagcacaggttgtttggttcatgccttaatctaactagatgtttaactcctgtagaaacaataaccagttcattcattttttgttattgtttttgttttgttttgttttgttttgagacagggtctccatctgttgtccaggctggagtgcagtggcacagtcatggctaacgacagcctcaaactccta

SEQ ID NO: 487105 - DNA, 201 bp, Homo sapiens
gggaaaaaagatttgtgaataggctgggtgtggtggctcacgcctgtaatcccagcactttgggaggccaaggtgggtggatcacctgaggtcaggagttygagaccagcctggccaatgtggtgaaaccccgtctctactaaaaatacaaaaattagctgggcatggtggcaggcgcctgtaatctcagctactcgggag

SEQ ID NO: 487106 - DNA, 201 bp, Homo sapiens
tgtgtttttgtagagatgggctttcaccatgttggccaggctggtctcgaactcctgacctcaggtgatccacccgcctcagcctcctaaagtgctgggaytacaggcatgagccaccacacccagccagtaattttgaggattaaatgacataatgtatgaaaaacacttagtattgcaactgctgaataagtgtttctc

SEQ ID NO: 487107 - DNA, 201 bp, Homo sapiens
gaatacgtccgtctggcatccacatacagagatctttttatgagcattctattcccccctcttcaatgtatatgacatgttcccaccctaggattttgagrgagagggtagtatttactgggcttcatttccaagtaacagtttagcttggagctgtgctttatattcgtgtagtctcaggtagaaagaaagaaggcatga

SEQ ID NO: 487108 - DNA, 201 bp, Homo sapiens
ttttctccctcagtgccttgggaaaactgacccagattttaaaaagaaagatcatgtttcctggtcattttctgtggctttgcagtagaatctaaaaaagmagcagaagaaagagggaggagaatgagcattatgtgatatttcataagggtttcaaaacctctgtttataaaactaacatatcatccatatttaaggttt

SEQ ID NO: 487109 - DNA, 201 bp, Homo sapiens
tctcagctacttgggaggctgaggcaggagaatcgcttgaacccgagaggcggaggttgtggtgagccgagatcgtgccattgcactccagcctgggcaayaagagtgaaactccatctcaaaaaataaataaataaataaattaaataaataaataaatataaaaattctttatgattatttgtaaaaacagagtctagg

SEQ ID NO: 487110 - DNA, 201 bp, Homo sapiens
tatggtaaaggaattggactctgaggacagtcgcctaaattgctcagtaaacccgcactacaagattccaagctgtcccttggcatcttcaggaatcttgratttattcctcagggttctgaatgtgggactgacccactgtctggacaaaccagaaagtcaagggccagaacatatatgggcagaggaaaagtcctggag

SEQ ID NO: 487111 - DNA, 201 bp, Homo sapiens
gccagatacttgaaatcattgaggatcaaaatcgaaatggtcctgcttgttttggaatttttctttgaagggtgaggctgttatcacattggctccctttsgggtgttagtgaatatgacccagccagagggcctctgagcccaaatctggcaccatggaccagctcttcccaaatgagtgtaagtgctctttctgctgat

SEQ ID NO: 487112 - DNA, 201 bp, Homo sapiens
gaggccgaggcagacggatcagttgaggtcaggagttcgagaccagcctggccaacatggtgaaaccccgtctctactaaaaatacaaaaattagctgggygtggtggcatgtgcctgtaatcccagctactcggtaggctgaggcacaataattgcttgaacctgggaggcggaggttgcagtgagcggagatcacacca

SEQ ID NO: 487113 - DNA, 201 bp, Homo sapiens
agacacagcatactcaaacttagaggatgcaatgggagcaatgctgagagggaaatttatagctgcaaatgcttacattaagaaagaagaaagatctcaartcaataacccaatcttccacactgaagacactaggaaaagaaaagcaacctaaatataaagtagaaggaagaaaatagtgaagattagaggaaattaatg

SEQ ID NO: 487114 - DNA, 201 bp, Homo sapiens
tcctcttcctcataatttctaatgactcaccttcttcatagttctgtttccttctcgtttattccactgcctgctttcccctaaagcatctcacagccccrtctcctgctggtcaccacttcctcctgttttcttcagttcagggagagatcacattgccaacccccacccctggcacattgtttttatgctgggggccct

SEQ ID NO: 487115 - DNA, 201 bp, Homo sapiens
cttgtttggtttgctttgtttttttaggaggggttaggattatctgacctctagggtctcttttagccctgaaatctggtgaaatttacatccatggcatycgttttaacttttccttctgtgatcttaatcttgggcaaggggagaccaaagtagaccctggtaacgaatatgacatttttctctctcctcctgacactt

SEQ ID NO: 487116 - DNA, 201 bp, Homo sapiens
ataataacccagctggcttctgtcacccatcagtcacgagcaaggaatgtggaaagggactggaaaacaatgacaaacaagcctcagttttgactctcttrtgcacacaggagggacagagtaaacatggtcgggtggatggaaaactgagcagctgtgttgcctttgttccttaggctattgctttattttcatttttta

SEQ ID NO: 487117 - DNA, 201 bp, Homo sapiens
taggaggctcggctaaggtactcaatattaaatattacattttatataactaactattaatggtgtttgtctatgggtcggaggatttatagcaattttayttggtggtctttattatctagattttctaaaatagtatgtatcctataactcacagtcaagaaaaaaaacaaaaaaattaaaggcaattttaaagtaggg

SEQ ID NO: 487118 - DNA, 201 bp, Homo sapiens
caacttagtagctgtttgaaaaaataatacatataaattaaaatattattttttctctcatttttattcttaaataactacaactatcttaaaccttgcartcaaactagatatcaccacctttatgtcttgttccacattgatttgcacactgtttttgctttttattccagcaagtaccaaacccccagctttataaag

SEQ ID NO: 487119 - DNA, 201 bp, Homo sapiens
tcaggtcacatggtaaatggaaatgcagaggtattggcactggaaacttcttttcatataactcttcaggtagcataagggctccctgtctttctgttcawgtgtctcagtggagttcaaaagagcaaagaaaatgagtcttttttaaaaattgaataattagaactcatcacctatctaatgtcctcccagcatccagaa

SEQ ID NO: 487120 - DNA, 201 bp, Homo sapiens
tactcaggaggctgaggcaggagaatcgcttgaacccgggaggtggaggttgcagtgagccgagatcatgccattgcactccagcctgggcaacaagagcraaactccaccttaaaaaaaaaaaaaaaaaagagacaagtttctccctaatctgtgcatgccaaaaatggcaaagaagcaggaagcctccacagacctctg

SEQ ID NO: 487121 - DNA, 201 bp, Homo sapiens
gtgcccagggcagccaagtgttctttaatacatatgttcatggggggagggtgtgagatactgagccctccaaagtgagggtctgggcaggcggtgccacraggaactttctggaggtggggggaggggaatattccatttctttctttctttctttccttttttttttttttttttttgagacgatgtcttgcgctgttg

SEQ ID NO: 487122 - DNA, 201 bp, Homo sapiens
tagggtgaagagcatcagtatcagacagctgagtctgaaagccaggcttgctagtgtgatatcaggcaagttattctgttctatcagccttggtttcttcygctgttaaaaggagataacatctgtttcgttaggttaagtgagacagaaaacaaataagtctgacaaatgataggaactcaataaatagcagctatgact

SEQ ID NO: 487123 - DNA, 201 bp, Homo sapiens
ctacactccagcctgggtgacaaagtgagactccgtctcaaaaaaaaaaaaaaaaatcaagttatcatgttggattatttcccttcagattcattcatttrcctgcctattctcagaataggcaagcaccactttatgtaaaagtctgctctagtatttgctctctatggaaggtcttaagtctctctggaatttgttcat

SEQ ID NO: 487124 - DNA, 201 bp, Homo sapiens
ccaggaaacttacagctcatattcatccttcgtccatctcgctttatccagaggacattcactgacattggcattaaatactatcgaaatgagtttaaaaygaaagtgccggtaagcaagacctttcatcttgtctcatttggttagggcttctggctaagatggcatttgggcagggtttctgggcaagataagattcaa

SEQ ID NO: 487125 - DNA, 201 bp, Homo sapiens
agtaatataatatatttaacaagagcacaggggaggtgggtaggagaaaagctgcatttggaataaagaaatgactccagagggtagctcaaatccatagsaacaaatgaagagaaccaggaatagtaaataaggttaatgttacaaactctataaatatatacttgttctcctttcttgtctcagattctgtaataaaca

SEQ ID NO: 487126 - DNA, 201 bp, Homo sapiens
acctatgacccaaccagaagaaatgaaaacacaaattcacaaaaagacatacacaagaatgtccatcagctggtcagcggaaaagtatatacaagttgtgkcacatttatataatgtaaataccattaagcaataaaaaagagtgaagtactgatgcgttcaacaacatggatacatttcaaatatattctcttgagagaa

SEQ ID NO: 487127 - DNA, 201 bp, Homo sapiens
aggtgacgaacgctttggcctcacatggaaggagaatggaagagcaaaagaagcaaactcactccctcaagccctttatgttttgttttgttttgattttrgagatggggtctctctctgtcacccaggctagagtgcaatagcttaggatcatagctcactgcagcctcgaacttctgggcttgagcgatcatcctggcc

SEQ ID NO: 487128 - DNA, 201 bp, Homo sapiens
aattcaaatccatatggaaaacaaagagcatcagtaaagataattatgtaattatgtaagacactgtaaatgcatatttcttcattcttttaactgatttraaaagcaattatgttaaacaaaagtacaaatggtccccagcttacaatgattcaacttacaactttttgactgtacaatgggtttatcaggatgtaactt

SEQ ID NO: 487129 - DNA, 201 bp, Homo sapiens
gaatctctgctagggcagtgtggaggagaaataagagtccccagtggggaactgcctagtgaagctgtgagaagagggccaccatcctccagaccccacartgacagatccaccgacagcttgcactgtatgcccagaaaagctgcaggcattcaacgccagcctgtgaaagcagctgcagtggctgtaccctgcagagcc

SEQ ID NO: 487130 - DNA, 201 bp, Homo sapiens
ggggaggaattcaagctggctgcaaagatttgcataagtaataaggagctgaatgttaatagccaagataatggggaaaatgtctccagggcatgccagagaccttcatggcagcccctcccatcacagtcccagaggcctaggaggaaaagatggttgtatgggccgggcccaggggtccactgctctgtgtagccttgt

SEQ ID NO: 487131 - DNA, 201 bp, Homo sapiens
attaaaaatttactagaggagcttaacagtggatttgaactggaaaaacaaagactcaaggaactgaagatagatttgatagagattatgcaatctgaagragagagaaaaatgaatagagccttagaaaaatgtgagacactagtaagtgcactaatataaatggaatgtaaagagaggagctacaggaggagcagaaaa

SEQ ID NO: 487132 - DNA, 201 bp, Homo sapiens
acagtcaacattgataacatgcagccagaaaaatactagactgagaaattcagcccgtggctcattattatacaatgttgttagcagctgaaatgtctagrgtccatgcctcagctgttggtactgaaagaagagtctaattagagtagggtatctgctaatcaggtgggaatgtgcccagtggggatggctggacatgtt

SEQ ID NO: 487133 - DNA, 201 bp, Homo sapiens
agactaaaaccagcctctttttaatctccctatcagaatcaggtcctctataccatttccaaggtgaggtgattattcactaattttatcaactaaatctrttgtctttccatcaagacagcatgttggtgaatgttaatctctccatattgttacaattgtctgaccttccaggccatcgaaaactttgccttgaccttg

SEQ ID NO: 487134 - DNA, 201 bp, Homo sapiens
attctgtgtggaattcaggcctcattttgggtttgatggtctcatcgtgatttattttaaaactttttctaatcaaagccatgctaagacaatggttctcracctcaactgcattttaggattgcctagggagattttaattcccaatgtccagactataattcagatgaattacatcaggatttctcggggtgaaacctg

SEQ ID NO: 487135 - DNA, 201 bp, Homo sapiens
cctagggcccagcccttctttagttaaatgagggagaaaaaagaaagcattttaccaccatgtggtttaaaatcaatttcctgctattcatttgtgtagarctaatggggcagaattaacatgaagggcaaatgtctcacattgagaagtacaggagcacccccttatccactgtttcactttccaggttttagttactct

SEQ ID NO: 487136 - DNA, 201 bp, Homo sapiens
cccgcttccctgcagggcccgcgagagcagggaaagcagctgccagctccaggcagtcattttaccccaggtgccacttaccctgcagaggggctggaacmaactaatcattttacctggaggtaccacttaccctgcggaggggctagagcttgtcaggtttttcagttcctgtgtcgcctcccagccctgcccacccca

SEQ ID NO: 487137 - DNA, 201 bp, Homo sapiens
acactcacaagagactcatgcagaaaaaccacagcgctaacttattctttatataatatacttatgtttgctcaataacacattccttttcttgaaacaartttacaatttacttggaaaatcagattataaacagaagattcttatcaggcttggagtcagcaccagagagttggctggatgatcttacagtggtgtcat

SEQ ID NO: 487138 - DNA, 201 bp, Homo sapiens
tttcatagacagctggacaaggtgagcaaaacacagccaagaacatgatgtctgcaagattttctgtgaagaagcttccatcatactcgtcctcccttccktgtgtgattgctgagaggcttgagtgctttatgtgaaaagatgttcgagaggcattaaaaactgtgcagatcctggggtgtagaagtatacctggcacga

SEQ ID NO: 487139 - DNA, 201 bp, Homo sapiens
ttggagcacacagtaccaggcagctctcagcctcatgatgctctgacttctgacgcctggctgtgggtgttcactttgcaggagcccctggaaaaggcccwgctgctggcactggttggggaccagctcatccaaagccaccattatgcagcagatgccatcaggccccggtgtgtggagctcaggcacctctgtgacgat

SEQ ID NO: 487140 - DNA, 201 bp, Homo sapiens
acgctttggcctcacatggaaggagaatggaagagcaaaagaagcaaactcactccctcaagccctttatgttttgttttgttttgattttagagatgggrtctctctctgtcacccaggctagagtgcaatagcttaggatcatagctcactgcagcctcgaacttctgggcttgagcgatcatcctggccaggttgctg

SEQ ID NO: 487141 - DNA, 201 bp, Homo sapiens
gatcatagctcactgcagcctcgaacttctgggcttgagcgatcatcctggccaggttgctgggactgcaggcacacaccaccatgcctggctgatttttwaattttttttagagagggggttttgctgtgttgcccagactggtctcaaactcctgggctcaacctatcctcctgcctgggcctccctaaatgctgggat

SEQ ID NO: 487142 - DNA, 201 bp, Homo sapiens
gttttgtttgaaactgtgtcttgctctgtcacccaggctggagtgccgtggctccatcaggactcactgcagcctcaacctcctgggctcaagtgatcctmctgccttggcctcccagtagatggtttctgagtccctgttgctggccaggcacttccctattctggaacagctgtactcatagcagcctcataaaactgt

SEQ ID NO: 487143 - DNA, 201 bp, Homo sapiens
ctagaggagttcttgttagggatttaatggatcaagtaagataacgcacacattaaaaacaaaaaacaaaaacaaccttacttcatgcccattgggttagstattacgtttttttaaaaaaagaatgataatctaaatgttgaccagaaagtggagaaatcagagcctttgtgcactgttggcaatataaaagatgcggct

SEQ ID NO: 487144 - DNA, 201 bp, Homo sapiens
cagcctcataaaactgttaatgtgaagtcaccaaggcagtcttgtaaaactcctgaagaggctatgatcgtggaaattggttgcttaaaatggagtttgtrtcagaatacaggaaatgcttcttgtgcagttaaaagaccatgtatttctttgaaagaacggttttaagcatctatagataagaacacaaatgtatacaga

SEQ ID NO: 487145 - DNA, 201 bp, Homo sapiens
cacattcctcaaatgccaggcatacacggatgagccagccctttttctgtaacctgcttctctgtgtccttgctgtacaggccctgtctcttaaggagcakagtcagaaaagtgggcactgtttcaatggactgacattcatgctcgacacattggttcctctgtcactattagataaaacttgcaggcagtttgacctca

SEQ ID NO: 487146 - DNA, 201 bp, Homo sapiens
tgctctaggattttgatagacagggcacatatggctcacatgggggcttccaataactagaaacccatagtcatcaagatgggccatgtcgccgggcgcartggctcacacctgtaatcccagcactttgggaggccgaggcaggcagatcacctgaggtcgggagttcagcctgaccaaccctgtctctactaaaaatac

SEQ ID NO: 487147 - DNA, 201 bp, Homo sapiens
catcaaggagagtacgagcaagtgctcagggcacacgcacaacggcacctccacctcgtctgccagttggatcctgttccaaggtggtggtggggctcccrttttctgaggaaagggaactttggtaggcaatgagctatctctcagtttataagcagtccttaccctgccaccaacgggaccctgtctgcacagggaaaa

SEQ ID NO: 487148 - DNA, 201 bp, Homo sapiens
taatgacccttggcttttgtgtgctttgcaagattctgtctcctcatacttaatctaataaaacctgtgaaatgggtggggtactcattactacccctatyttacaaatgaaggaattgactcagagaggatcatcttttttgtttttttttttgagatggagtttcgctcttgttgcccaggctggagtgcaatggtgtg

SEQ ID NO: 487149 - DNA, 201 bp, Homo sapiens
ttctggagtaggatgggacacaaggaacaaaggtaccagcttgagagggtccaggacttctgtgtgatcagagtggggaggtctaaaactcttcccacagrgaatgagctctaggctgtgtgaagaccacacaggtggctgggcctagaggaagtgattcagtgtttgcgtgcagaggtgatcccttgatttgttttagaa

SEQ ID NO: 487150 - DNA, 201 bp, Homo sapiens
tgtttcatctggcccacctccccatacacacactccatccctgtggatcctctgtgggtttgttctagattcccggatagagtagcatcactcgctttctygccactttcttccctagtaggcactctcatctctcatctgttataccagcagagtcctcggggggaaataaacttatttcaataaagatttctgattgca

SEQ ID NO: 487151 - DNA, 201 bp, Homo sapiens
catctggcccacctccccatacacacactccatccctgtggatcctctgtgggtttgttctagattcccggatagagtagcatcactcgctttctcgccaytttcttccctagtaggcactctcatctctcatctgttataccagcagagtcctcggggggaaataaacttatttcaataaagatttctgattgcaacttc

SEQ ID NO: 487152 - DNA, 201 bp, Homo sapiens
agcttttatagttagccacattgacgtggtccagctatttgtccaaatcagacaaagtgcactgagttatagtttataagttaaataaccacactaatggsaggttctcttagtccctctagctcgtcctctgagaacgtctgaggaaccttatacggagacagagttgaactcccggggaaaggaagatgatgagactaa

SEQ ID NO: 487153 - DNA, 201 bp, Homo sapiens
cacagcacctctggggcctgggcctggggagggagccggggttcttacctgtgtgacccgcctgtatatgtcaagtgcacccacatgcctgctcgcccccsctcttaccacctactgactgtttttttcccttccgtcagtttcttcctcttcctcataatttctaatgactcaccttcttcatagttctgtttccttctc

SEQ ID NO: 487154 - DNA, 201 bp, Homo sapiens
atttccagattttgatgggggggtcttgatgggaaggtccagcctcttgaaccttgaggaatgttatactcaaatctcactcaccccttaggcttcacccrggactagaacaggctgaggcctatcctgccagaagagggtgggatctcatacatattattccctttgctgtttggtgcaatctgatctttcccaaaggag

SEQ ID NO: 487155 - DNA, 201 bp, Homo sapiens
tttttgtatttttttagtagagaaggggtttcaccatcttggccaggctgatcttgaactcctgacctcaggtcatctgcccttctcggcctcccaaagtkctgggattacaggtgtaagccacggcacccggccactaataccatactcttctgtaagatgtttctcacttatgctgctgtccagtttctccaacagctt

SEQ ID NO: 487156 - DNA, 201 bp, Homo sapiens
ggtcttcccaacattttcggctctttgactatttcatagacatgctttttatctttgggaatttcctttttgcaatagatttccttttgttttgttttcarcttggtacagttgaccctcagtatccatggggaattggttccaggacccttgcagataacaaagtccacagatgcccaagtctcttatgtaaaatggtgt

SEQ ID NO: 487157 - DNA, 201 bp, Homo sapiens
tgggtttgttctagattcccggatagagtagcatcactcgctttctcgccactttcttccctagtaggcactctcatctctcatctgttataccagcagastcctcggggggaaataaacttatttcaataaagatttctgattgcaacttctaagctgaaacttgacgatccagccttctggaattttcagcatctgaaa

SEQ ID NO: 487158 - DNA, 201 bp, Homo sapiens
tttttccctcactctttcttttttactttggagattttgatgactatttatcctgagtgggaggtatataaactaaaaaaataagcttcaatttggaggtktcaccataaatttctttgcaggcaccaggaggatttcatagcacatgtgtagaggccaggtgggctggaaggtgacaagaacacaggctttggaagtcgg

SEQ ID NO: 487159 - DNA, 201 bp, Homo sapiens
gttagtagcaggaggggtcccagaatggatgggattctggtgttggctcactgcaggccaaatggccatgaggacctcattattggtgttaagtggcgtgytgagagtcctggtacctggcctgctgtagcagttcaattgctcagaccttcacctgtggtgacctgggatcagatacaggtggatggggacacgccagct

SEQ ID NO: 487160 - DNA, 201 bp, Homo sapiens
ctggtgttggctcactgcaggccaaatggccatgaggacctcattattggtgttaagtggcgtgctgagagtcctggtacctggcctgctgtagcagttcrattgctcagaccttcacctgtggtgacctgggatcagatacaggtggatggggacacgccagctggtgcaatgtctctagcatttgagagctttgaggaa

SEQ ID NO: 487161 - DNA, 201 bp, Homo sapiens
ggcgtgctgagagtcctggtacctggcctgctgtagcagttcaattgctcagaccttcacctgtggtgacctgggatcagatacaggtggatggggacacrccagctggtgcaatgtctctagcatttgagagctttgaggaaaatattatctatcaggaaggtagagttgggaggctgttgctaagagcctcccgttgat

SEQ ID NO: 487162 - DNA, 201 bp, Homo sapiens
ggaattctacattaaagtaaataaagaaaatagtttttagatagagataatgctgttaaagaattaaagtgtgggagagggcctaggtgactgggcgaatrggttgtagagaatgacttaagatatagtcgccagggaagcgctgtgaggaggtgacccaggaactcagctctgcatgacccagggaagaacaatccagag

SEQ ID NO: 487163 - DNA, 201 bp, Homo sapiens
tttccaagctctttgtttaaaaacccccatgttccctccacaaattgaagagtggaattgctttctactcttcccctgctagcacggataatacaatctcrctctctcttatcacaagtcgtcattatttttgacttctttccacaaacggtgagcgctaagactcttttgctggttataatttcttctgttgcttttatt

SEQ ID NO: 487164 - DNA, 201 bp, Homo sapiens
atagtttttagatagagataatgctgttaaagaattaaagtgtgggagagggcctaggtgactgggcgaataggttgtagagaatgacttaagatatagtygccagggaagcgctgtgaggaggtgacccaggaactcagctctgcatgacccagggaagaacaatccagagaagggtcgagtcaggagctagtttggtga

SEQ ID NO: 487165 - DNA, 201 bp, Homo sapiens
gacagcaatggaatgtgctgtgaacctccactccctttcctttcccatactatactctcatgccttatgaacatttatttacctaatgcttattaagcacmgaccatgctgtcttatctggtcatatatttccgtagaagcttcaggagtcagatcctgatagggaccaggcacctccagaattctctcttcaacaaaaga

SEQ ID NO: 487166 - DNA, 201 bp, Homo sapiens
tttttagatagagataatgctgttaaagaattaaagtgtgggagagggcctaggtgactgggcgaataggttgtagagaatgacttaagatatagtcgccrgggaagcgctgtgaggaggtgacccaggaactcagctctgcatgacccagggaagaacaatccagagaagggtcgagtcaggagctagtttggtgaccag

SEQ ID NO: 487167 - DNA, 201 bp, Homo sapiens
ttcaccatgttggccaggctggtctcgaacacctgacctcgtgatccacccatctcggcctcccaaagtgctgggattacaggcgtgagccaccacgcccrgcccatattgttttacaagtagaattctagaaaatattattggattagagagtgtaagtgtgaagtttttaaatatgttttggtcagattgccttctggg

SEQ ID NO: 487168 - DNA, 201 bp, Homo sapiens
tccctccaaacccaggggctttcctctcaccccggctatggaaccccctctttcctctagttagtcttccactcatttccttcttgctccctctgctgcasccacactggcctccttcctgctacccaaacttgtcaaacacgccttcacctcccagccaagtactgcacggcttgtccctgacttcaggtctcagcttgt

SEQ ID NO: 487169 - DNA, 201 bp, Homo sapiens
actcaaaaccaaaatcaaacacagaaattgggagagagaaaaatatagattaggaggtccctacaatatcaaatcttaccaaaatttctttcacttcagartgaagaaatctttgaaagccatcatgaaagggggaaccctgagctggagcagcaggccaggctcggagacctttccccccgcaggtaagactgcacatcc

SEQ ID NO: 487170 - DNA, 201 bp, Homo sapiens
tctatttctcctctgtgtctctccttcacctccaatttcatccagccctaggaaatcaacgcagcagctcaagtgagcttttatagttagccacattgacrtggtccagctatttgtccaaatcagacaaagtgcactgagttatagtttataagttaaataaccacactaatggcaggttctcttagtccctctagctcg

SEQ ID NO: 487171 - DNA, 201 bp, Homo sapiens
tcgagagactcaaaaccaaaatcaaacacagaaattgggagagagaaaaatatagattaggaggtccctacaatatcaaatcttaccaaaatttctttcayttcagagtgaagaaatctttgaaagccatcatgaaagggggaaccctgagctggagcagcaggccaggctcggagacctttccccccgcaggtaagactg

SEQ ID NO: 487172 - DNA, 201 bp, Homo sapiens
cccaaagtgctgggattacagacatgagccaccatgccagccccagggaaggttttctaggtgggaagtgacatggtaaaattagtctgaaggtggtgtctaagatgatagaaagggacttgggaggaagctaagttgtacaggtgaaacaaaacacggatctaaaatataggggtgacataaatccaggaaactaaagta

SEQ ID NO: 487173 - DNA, 201 bp, Homo sapiens
ttttgtggcatgagcattggtcttggagtctgaagacttctaatgactcttttttttttttttgagacggagtctcgctctgtcgcccaggctggagtgcmgtggcgctatctgggctcactgtaagctccgcctcccgggttcacaccattctccagcctcagcctctggagtagctgggactccaggcgcccgccacca

SEQ ID NO: 487174 - DNA, 201 bp, Homo sapiens
aattttgtggcatgagcattggtcttggagtctgaagacttctaatgactcttttttttttttttgagacggagtctcgctctgtcgcccaggctggagtkccgtggcgctatctgggctcactgtaagctccgcctcccgggttcacaccattctccagcctcagcctctggagtagctgggactccaggcgcccgccac

SEQ ID NO: 487175 - DNA, 201 bp, Homo sapiens
ctcgttctgttgcccaggctgatcatgaactcctgggctcaagtgaccctcctgcctcagagtcccagagttctgggattacagggatgagccaccccctyctaccccaatctggcctggatggctttttaaaatgtttcctccagagtcatctgcctcattaacagtgggttttatcttagaagctctctttgattttgt

SEQ ID NO: 487176 - DNA, 201 bp, Homo sapiens
ctgatatgtagtgttttctttgtcattacattttagaaattctgaaattttactttacattttccctttaccaaagagttattaatagtaaatttttaaarttttcaagcattttctttgtggccttacattgtgatcaatttctgtggatgttccatgtgtactttagaagatggtgaatcctctgttactggcatgtaa

SEQ ID NO: 487177 - DNA, 201 bp, Homo sapiens
ttcagatgttttcagattttggaatatttgcgtatacctaatgagatatcttggggatgggacccaagtctaagcacacgattgacttatatttcacatayatatatcctgaaggtaattttatacactattttaaataattttgtgcatgaaacagagtttgtatacattgatccatcagaaagcaaagatgtcactctc

SEQ ID NO: 487178 - DNA, 201 bp, Homo sapiens
caatatataaaaagattcaatttcttgagcttccttgaccctggaatttctttgtgaattatgtatagtactgtacataaggaactattgaattacaaacmttcccacatgaatcttatggtattaaaataaataaatattcaaaaatacacagaaatcattaccacatctctattctgtttccaaaaacagctgagggcc

SEQ ID NO: 487179 - DNA, 201 bp, Homo sapiens
aaacctttttccttctttctcctgggccttcaaacctgcataaagtctttcttaggcttagaattcttttcactattgtttctttgagtatttctcccctycaactctattttctgtttctgtttctatttttcatctctttatcactttactttttactcatatatatatgtactgaattgtctattcatgtttttgcgt

SEQ ID NO: 487180 - DNA, 201 bp, Homo sapiens
tcggaggatttatagcaattttacttggtggtctttattatctagattttctaaaatagtatgtatcctataactcacagtcaagaaaaaaaacaaaaaawttaaaggcaattttaaagtagggatttgcagcccaaatggaagtggtaatatattttcttccttccacataatttttttttttttagacaaagtctcact

SEQ ID NO: 487181 - DNA, 201 bp, Homo sapiens
gatccccatgtgcagccagggatgagagtgtctgtgctaggagcggatagggagaagctatggtgagacagaacagacatttgaggggtgtgaagaagaaracctggaatccgacttagcttttggataaagtgaggtggcagtgaatgtgcagaaattgaaagttggagggagggctgttcccacgtcctttacttttgc

SEQ ID NO: 487182 - DNA, 201 bp, Homo sapiens
taagactcttagggcctcagagcccatgaccagtgaatccagcaggggattaaatatgcagatgatgtaagacagcaaaagtcagcccaggaggtgggcaygatggctcacatctgtaatcccagcactgtgggaggctgaggtgggcagatcagttgagctcaggagttcaagaccagcctggccaacatggtaaaaccc

SEQ ID NO: 487183 - DNA, 201 bp, Homo sapiens
tttttgcacacatttcagattttttttttctttctgtttttgagatggagtcttgcactgtcgcctgggctagagtgcagtggcaagatctcggctcactrcaacctccgcctcccaggttcaagtgattcttctgcctcagcctcccgagtagctaggattacaggcgcccaccaccatgcccggctaatttttttgtat

SEQ ID NO: 487184 - DNA, 201 bp, Homo sapiens
tcgcaacccaagaaaatgaaaactcacggtcactcaaaaatctgttcatgaatatttatagcagctttattcttaatcagtaaaacctagaagcagggccmggtgtggtggtggctcacgcctgtaatcccagcacttttgggaggctgaggcaggcagatcacttaaggtcaggagttcgagacagcctggccagcatgg

SEQ ID NO: 487185 - DNA, 201 bp, Homo sapiens
ttcactgacattggcattaaatactatcgaaatgagtttaaaacgaaagtgccggtaagcaagacctttcatcttgtctcatttggttagggcttctggckaagatggcatttgggcagggtttctgggcaagataagattcaacaggtagagagggagaaaagggttctctgggctgagggaaccgcatgtgtgaaggca

SEQ ID NO: 487186 - DNA, 201 bp, Homo sapiens
atacagtagacttaaaacaaaaaaagtcactagagatacacaaggatattttatagtgataaaaggcttaatctatcaccaagatataataattacaaacrcctaaaaatggagctccaaaatacatgaagcaaaaactgacagaattgaaaggagacatagaaaattcaactattggccgggtgcggtggctgacgcctg

SEQ ID NO: 487187 - DNA, 201 bp, Homo sapiens
cctttcatcttgtctcatttggttagggcttctggctaagatggcatttgggcagggtttctgggcaagataagattcaacaggtagagagggagaaaagsgttctctgggctgagggaaccgcatgtgtgaaggcatagaggcaggaagtacacaatggactgaggcccatgggaagcctcatttttgttggagcacgta

SEQ ID NO: 487188 - DNA, 201 bp, Homo sapiens
ccgatacctgcttttgggaaggagtttttagtgtgcctaaaggaagccaaaaagggcaaaccataatggatccagagtggctggggaaaacctgagaaagyggcatgagaaactggatattttgcttatcgagagactcaaaaccaaaatcaaacacagaaattgggagagagaaaaatatagattaggaggtccctacaa

SEQ ID NO: 487189 - DNA, 201 bp, Homo sapiens
gagagctttgaggaaaatattatctatcaggaaggtagagttgggaggctgttgctaagagcctcccgttgatgcactgaagggagaaagtaacagggtcrgactaattatcgatttaaaacacaggatcagaatcagggggcctccctgccaacatttagcctctcatctcctacagcagaggcagactgggctggtaaa

SEQ ID NO: 487190 - DNA, 201 bp, Homo sapiens
caattctgagcatgtcaaagacttcctaagtctctctaccttactgacttctctggtcactgaagaggggcagttggggagtgctggaaagttaatgcccsgggagtaacctgcaaccactgagttaaaggatttggtagataaatatctcagcttccagatccgcagtggggcaattctgaggtgtgttccacacagtat

SEQ ID NO: 487191 - DNA, 201 bp, Homo sapiens
gtttgtggaaaggaccctgtgccaaatacatcatttattctttccctcttacacatttacacacgttctcagtcagcttagcattggtggcagatagtttrcacagtagattttgttgacaatctacattttgatggcaatgtacattttaattttcaacaagacttttgggttaatgcagggtctgctggatttcgagtc

SEQ ID NO: 487192 - DNA, 201 bp, Homo sapiens
gcgcctgccaccacgcccggccgatacctgcttttgggaaggagtttttagtgtgcctaaaggaagccaaaaagggcaaaccataatggatccagagtggstggggaaaacctgagaaagcggcatgagaaactggatattttgcttatcgagagactcaaaaccaaaatcaaacacagaaattgggagagagaaaaatat

SEQ ID NO: 487193 - DNA, 201 bp, Homo sapiens
gggaaccctgagctggagcagcaggccaggctcggagacctttccccccgcaggtaagactgcacatccgtgggtgcagggggcgagggggtgcggggcaygggtggcgaggatcctctcttttacacctcagcacctgtctttcccagataagaatcataatatttatcctctatactaaccttcatttatgtacctgag

SEQ ID NO: 487194 - DNA, 201 bp, Homo sapiens
aggatttctcggggtgaaacctggattttcagcggtgtctaaatctcaccggtgatccccatgtgcagccagggatgagagtgtctgtgctaggagcggayagggagaagctatggtgagacagaacagacatttgaggggtgtgaagaagaaaacctggaatccgacttagcttttggataaagtgaggtggcagtgaat

SEQ ID NO: 487195 - DNA, 201 bp, Homo sapiens
tctctgacctttacccctccttagtgataagtcattgacactagcacatctgcaggcaagcattctcagacactccaaacaggatatgagggcctatcatkgctggttttctaggtgtgagcttgagagaaaggtttgggccaccacgataagttgtctgttgaattaacctctataaggcatttaggtagctcttgccca

SEQ ID NO: 487196 - DNA, 201 bp, Homo sapiens
gcattttaggattgcctagggagattttaattcccaatgtccagactataattcagatgaattacatcaggatttctcggggtgaaacctggattttcagyggtgtctaaatctcaccggtgatccccatgtgcagccagggatgagagtgtctgtgctaggagcggatagggagaagctatggtgagacagaacagacat

SEQ ID NO: 487197 - DNA, 201 bp, Homo sapiens
ctgtaagatacgaatggagcctggggaccagggattatctcctcattacagcttcaagaaggccatgaaggtaaagggagtcctattgcatctgggagtcrccctatgcagaaaagagagagatcgttttccttattttacagatgaggaagctgcagtgtagagaggtgaagttaacttgccaaataccacaccacaggg

SEQ ID NO: 487198 - DNA, 201 bp, Homo sapiens
atggacaagaagacaggcactggggactggtggaggtcgggaaggaggaagagggagaagctacggaagacgcttggttttaggagccttacaattatctygtattactctaagtctggtgtgtggagtattctgtgtggaattcaggcctcattttgggtttgatggtctcatcgtgatttattttaaaactttttctaa

SEQ ID NO: 487199 - DNA, 201 bp, Homo sapiens
acctctggttttctctccctcctcactctttggtatggggtttccctcttttccctaatccagctttctccttatctccttgcttctttacagaccacccmctccaacccccttctcactttttcagtggagtcaaactgttctagaatcccatttacctgttgatgtacatggcatttcagtgatggtttatcttccttt

SEQ ID NO: 487200 - DNA, 201 bp, Homo sapiens
attcttttcttgtttactgtaactttcttttctggtaccgggacctctggttttctctccctcctcactctttggtatggggtttccctcttttccctaawccagctttctccttatctccttgcttctttacagaccaccccctccaacccccttctcactttttcagtggagtcaaactgttctagaatcccatttacc

SEQ ID NO: 487201 - DNA, 201 bp, Homo sapiens
tcatgaaagggggaaccctgagctggagcagcaggccaggctcggagacctttccccccgcaggtaagactgcacatccgtgggtgcagggggcgaggggrtgcggggcatgggtggcgaggatcctctcttttacacctcagcacctgtctttcccagataagaatcataatatttatcctctatactaaccttcattta

SEQ ID NO: 487202 - DNA, 201 bp, Homo sapiens
catagaggcaggaagtacacaatggactgaggcccatgggaagcctcatttttgttggagcacgtaaacagtaatcttttggaggaaagagtaagaaacarggactagatcttcagtgtgaggaggcaggttttggattttattcagtagacagtggggatccagggaaggttttcttttttctttttctttttttttttt

SEQ ID NO: 487203 - DNA, 201 bp, Homo sapiens
tacaccctgccatgggcagaggggatgtcctcccaccccacagaggccccatccttccctttctctccctaaggctgctccagcagggagtttagctccayggacacctttgaagactgtgaaggcgcagaagacatggaaaaggagagcagtgctctgagtgtaattacttcccttttgtttctttcatcttcttccctc

SEQ ID NO: 487204 - DNA, 201 bp, Homo sapiens
ctccagccttcatcctgggttagcatctccacagcctccctccaggcttggagcacacagtaccaggcagctctcagcctcatgatgctctgacttctgaygcctggctgtgggtgttcactttgcaggagcccctggaaaaggcccagctgctggcactggttggggaccagctcatccaaagccaccattatgcagcag

SEQ ID NO: 487205 - DNA, 201 bp, Homo sapiens
aagccatcatgaaagggggaaccctgagctggagcagcaggccaggctcggagacctttccccccgcaggtaagactgcacatccgtgggtgcagggggcragggggtgcggggcatgggtggcgaggatcctctcttttacacctcagcacctgtctttcccagataagaatcataatatttatcctctatactaacctt

SEQ ID NO: 487206 - DNA, 201 bp, Homo sapiens
cagtggcctcttatcaggcaaaaaaggagaagcagtgttgggtggttggttaatatcagtggtagagtcttttgaaagggctggtttctgtgaaagccttwgggaagaaagcctaattgtggttagcaagggagggggataacgaggcgtgtaagactgctcattccatcatggcctagaactcggttttcaaggttattc

SEQ ID NO: 487207 - DNA, 201 bp, Homo sapiens
gttctcttagtccctctagctcgtcctctgagaacgtctgaggaaccttatacggagacagagttgaactcccggggaaaggaagatgatgagactaaatytgaagtcaaggtaaaattacctttattttacttatagaacttcctgacaagagggaagattgctgtcacaattatcaataaatcaacaaattgtgtttcc

SEQ ID NO: 487208 - DNA, 201 bp, Homo sapiens
aaagcaatggcaacaaaagacaaaattgacaaatgggatctaattaaactaaagagcttctgcacagcagaagaaactaccatcagagtgaacaggcaacytacaacatgggagaaaattttcgcaacctactcatctgacaaagggctaatatccagaatctacaatgaactcaaacaaatttacaagaaaaaaacaaac

SEQ ID NO: 487209 - DNA, 201 bp, Homo sapiens
gtccagtgcaacctgtggccccacatcctgagtcttcaccaaaatgggtgtcatcaaaaaccagccagccctccacctcgggtaggttatttgaggaaaaraagctttgtggcttttgtgtttcatcagcaccatgaggactgtgactggttgtctacaatggataatggtcgctgttttaacagatactatttaaaacaa

SEQ ID NO: 487210 - DNA, 201 bp, Homo sapiens
gacaatgacttttttatgtgcattttcacctggcatttctaattgcccttcttttttccctatttacagaagtggcatatacctttattgcattattactrtcttgcagattctttattatagagtgtgtaatgcatacacttacttcttgaagatattcttttgaggccctctggtctgctcttataattcaggattgtt

SEQ ID NO: 487211 - DNA, 201 bp, Homo sapiens
tcagagaaatgcaaatcaaaaccattatgagatatcatctcacaccagttagaatggcaatcattaaaaagtcaggaaacaacaggtgctggagaggatgyggagaaataggaacacttttacactgttggtgggactgtaaactagttcaaccattgtggaagtcagtgtggcgattcctcagggatctagaactagaaa

SEQ ID NO: 487212 - DNA, 201 bp, Homo sapiens
cttcttgaaaatctggcaggcagtattccttgactaacacttagctgcctgtggcgcccaggctatggtattttcttgcctaccttgctccctccctcctyctatagacagctccatgcaggatacacataggaatttgttgtagtttctcctttcaacctctaatgacccttggcttttgtgtgctttgcaagattctgt

SEQ ID NO: 487213 - DNA, 201 bp, Homo sapiens
cgccaccacgcccagctaattttttgtagttttagtagagacagggtttcaccgtgttagacaggatggtctcgatctcctgacctcgtgatccacctgcmtcggcctcccaaagtgctgggattacaggcgtgagcccccgcgcccggcctctaatgactcttaactctgcatatagggtgtgacttttgcaagttattt

SEQ ID NO: 487214 - DNA, 201 bp, Homo sapiens
ataaaggtatttgaaaggaaaacaagagaagcaaggaaaagcaatggcctaacactgatgtgagggctctttttaagtcatatattaatttgaatgtattkaatgaatattgatttgcctacattcttcagtggagttcctatccttggcattttatctcttgcactccaacaggtaaaatgaagcagttggatgagattt

SEQ ID NO: 487215 - DNA, 201 bp, Homo sapiens
cattcttcagtggagttcctatccttggcattttatctcttgcactccaacaggtaaaatgaagcagttggatgagatttctagactttttttccaaactrtaatccagaatatgaccaagggatttcttttccttcagagatgtgaatattttcctgtattagagtcctaaaagctcctaagagtctcttaagttcatag

SEQ ID NO: 487216 - DNA, 201 bp, Homo sapiens
tgtaaaactcctgaagaggctatgatcgtggaaattggttgcttaaaatggagtttgtgtcagaatacaggaaatgcttcttgtgcagttaaaagaccatrtatttctttgaaagaacggttttaagcatctatagataagaacacaaatgtatacagaaaaggaaaagaaacaagacatttttagcttttaacaattgtt

SEQ ID NO: 487217 - DNA, 201 bp, Homo sapiens
tggttgtatgggccgggcccaggggtccactgctctgtgtagccttgtgacatggtgtcctgtgttccagccactccagctgtagctgtggctaaaagggrccaagttacagctcaggccattgcttcagagggtgcaagccccaagctttggcagcttccatgtggtgttgagcctgtaggtgcacagaacaagaggtga

SEQ ID NO: 487218 - DNA, 201 bp, Homo sapiens
tccttcagagatgtgaatattttcctgtattagagtcctaaaagctcctaagagtctcttaagttcatagatcatttttggataataaccttgacttctgyccacctcctggttatttctgccttctgacttcctttaattgtcaatgcatcctgaagccagcttgccaagttgcttaagcccagtgcttcatgaaggcat

SEQ ID NO: 487219 - DNA, 201 bp, Homo sapiens
cagcacttttgggaggctgaggcaggcagatcacttaaggtcaggagttcgagacagcctggccagcatggtaaaaccctgtctctgctaaaaatacaaawattagctgggcatggtggcttgcgcctataaccccagctactggggaggctgaggcatgaggattgcttgaagtcgggaggcggaggttgcagtgagcca

SEQ ID NO: 487220 - DNA, 201 bp, Homo sapiens
tttcgttctacagcaattggtttctgagcacctaagacccatattaacaacactcacaagagactcatgcagaaaaaccacagcgctaacttattctttayataatatacttatgtttgctcaataacacattccttttcttgaaacaaatttacaatttacttggaaaatcagattataaacagaagattcttatcaggc

SEQ ID NO: 487221 - DNA, 201 bp, Homo sapiens
tgtccacctcctggttatttctgccttctgacttcctttaattgtcaatgcatcctgaagccagcttgccaagttgcttaagcccagtgcttcatgaaggcataagaggctgattgtactcaggttttccatgaatgcttaactgttgctgtggtcccacttgatgccagggctcgtagaaacatattggtattgaggcct

SEQ ID NO: 487222 - DNA, 201 bp, Homo sapiens
attggagacggggttctaccatgttggccaggctggtctcaaactcctgacctcaggtgatcctcccacttcggcctcccaaagtgttgggattacaggcrtgagccactgcaccccgccgaatattccatttcttgatctgtttgatggttacatcagtgtatatttgtcaaaattcctcaaactgtatgcttaaggctt

SEQ ID NO: 487223 - DNA, 201 bp, Homo sapiens
tgactagtgcttagaattacccgaacagctgtgttctgataattggagatgatcctgaccccctgtgccttctgagtagttctcatttctcctctctttcycaactagttcttctcattctctttcttatttttctttttgtgaacctaaggcaacagatcgaacaacttaaagttgtgagtgatttcagggtaattgtag

SEQ ID NO: 487224 - DNA, 201 bp, Homo sapiens
acctgtcttcttgtgcttagtcagttcctgggcggggggccacagatcaggtaaacccatttattgatctggatggtgccagctgatccatcaagtgcagrgtttgcaaaatatctcaagcactgatcttaggagcagtttagggagggtcaggaccttgcagcctccagctgcatgactcctaaaccatcatttctaatc

SEQ ID NO: 487225 - DNA, 201 bp, Homo sapiens
acctaaggcaacagatcgaacaacttaaagttgtgagtgatttcagggtaattgtagtaatacctcagaatacagcttttttttctgaatcaatgtgtagdagataagagcaagaaggcctggagaacatttttctaggcacctcttgaaaccttatgtgattgtacttaaaaaattaattacctacatgtcaaaatcaaa

SEQ ID NO: 487226 - DNA, 201 bp, Homo sapiens
ctatacaacatgatggtttgatatacttacaccctgtgaaatgattactgcaatcaagttaatgaatacattcattaccattgtgtgtgtgtgtgtgtgtrtatgtatatatatataatccaaaaacagttgagctcattgaagtagaagggtggttgccaggggctggagtctagaggaagtagggagatgttggtcaca

SEQ ID NO: 487227 - DNA, 201 bp, Homo sapiens
ctgaagcttaaccagtgcctacaactacagcattttgagcacgatttttgtaaggtattcttttcttgtttactgtaactttcttttctggtaccgggacytctggttttctctccctcctcactctttggtatggggtttccctcttttccctaatccagctttctccttatctccttgcttctttacagaccaccccct

SEQ ID NO: 487228 - DNA, 201 bp, Homo sapiens
tatagttagccacattgacgtggtccagctatttgtccaaatcagacaaagtgcactgagttatagtttataagttaaataaccacactaatggcaggttytcttagtccctctagctcgtcctctgagaacgtctgaggaaccttatacggagacagagttgaactcccggggaaaggaagatgatgagactaaatttga

SEQ ID NO: 487229 - DNA, 201 bp, Homo sapiens
tgtgagagtttgataaggtggtggttggggatttggatttgagactggttgttttgcgtatgaaagacctgctcccagctaaccccttccctgtctctaaraagtggttagccctggggtgggggtggcggggcagtctcttcctagtcatggaggccacaaatgccagagcctcaagagtacagaaaataagaaaatgtg

SEQ ID NO: 487230 - DNA, 201 bp, Homo sapiens
aagggggagccatagaaagtttgagattgccagtcgaaatggacttgagaaatacatcctgcaggtaacgctcatgccttccccatgggtctcctctactytttccttattgtgttcccatgacttgacaagtgttttctatctcattagtctaacggtcactgggagaataaaaactctgcaattaatactcatggtagt

SEQ ID NO: 487231 - DNA, 201 bp, Homo sapiens
tccatagtagtgttagagcatctcacacaaaaggcaggtgcaatactacacagtgaggaaatgctctggcaaagtcagagagatcgtctatggtaaaggarttggactctgaggacagtcgcctaaattgctcagtaaacccgcactacaagattccaagctgtcccttggcatcttcaggaatcttgaatttattcctca

SEQ ID NO: 487232 - DNA, 201 bp, Homo sapiens
gaagggaacatgatctctaggagtcaggacaccccggtcctggccctgactcagctcccacagggccttaagccagtccccacaaggcacacagcctggtrgtcaattaccatccctggcggggcaccctgtgagccgcactttcctccgcagagaaccaggggctttgcctgcaggatgctctctaaggttttctggttc

SEQ ID NO: 487233 - DNA, 201 bp, Homo sapiens
tcactttattttatagataaataaactgacgttcagtgtaaagaggtgacttatccaaagtcatttggtcaactagtggcagcattgagactaaaaccagmctctttttaatctccctatcagaatcaggtcctctataccatttccaaggtgaggtgattattcactaattttatcaactaaatctgttgtctttccatc

SEQ ID NO: 487234 - DNA, 201 bp, Homo sapiens
aatatgatcatctaggcccctctcaggcatgctctgatccagctttgttaccggccatttctcttaagagccctggttccttttggtgttgaaaatattaragtccaagatctggatgcaagatgtgctattactacttggtatctttgtttttaggctctttcagcagacagaagctgtaaatatatgcacgtatatgca

SEQ ID NO: 487235 - DNA, 201 bp, Homo sapiens
tcaagtgagcttttatagttagccacattgacgtggtccagctatttgtccaaatcagacaaagtgcactgagttatagtttataagttaaataaccacaytaatggcaggttctcttagtccctctagctcgtcctctgagaacgtctgaggaaccttatacggagacagagttgaactcccggggaaaggaagatgatg

SEQ ID NO: 487236 - DNA, 201 bp, Homo sapiens
ttctaaacacctctctcattactccctctcagactgctctagagcctcatagctgagcgtgttactgtactgatagctctgtgaatgtttgctttgggagyggaaggatggcagagctcaacctcaaggtcctccgcctacattgggaatatgtgatgctcacctgacacgtgcatatttcctttgggcttgaacacgtgt

SEQ ID NO: 487237 - DNA, 201 bp, Homo sapiens
caacgcagcagctcaagtgagcttttatagttagccacattgacgtggtccagctatttgtccaaatcagacaaagtgcactgagttatagtttataagtyaaataaccacactaatggcaggttctcttagtccctctagctcgtcctctgagaacgtctgaggaaccttatacggagacagagttgaactcccggggaa

SEQ ID NO: 487238 - DNA, 201 bp, Homo sapiens
tctactttcgaaagattctgtgagaatttcgtgaggacttgagaggggaccaaacagcttccttttggtcttagtgacaatgatgtcttctcaagcatatkgtctattggcctatttatagccaggcactgccagggggttgcttttcccactgacgtgttaattctaaacacctctctcattactccctctcagactgct

SEQ ID NO: 487239 - DNA, 201 bp, Homo sapiens
atccagccctaggaaatcaacgcagcagctcaagtgagcttttatagttagccacattgacgtggtccagctatttgtccaaatcagacaaagtgcactgrgttatagtttataagttaaataaccacactaatggcaggttctcttagtccctctagctcgtcctctgagaacgtctgaggaaccttatacggagacaga

SEQ ID NO: 487240 - DNA, 201 bp, Homo sapiens
agtaaagggcaggaaacaaagttaatatgccaggctcttgtccttctctatttaaaaactaggggtctgatgttacttcttcccagtggaatgacctcatatgtgtatgatggcttttctttgttcatttgcctgggtgattgttttagaatacctcctcactgttctgcctttgcgtcatctattctgttttgttcagat

SEQ ID NO: 487241 - DNA, 201 bp, Homo sapiens
acttctccccatcccttaagctttgccttcttttctagtgttttcctaactgttctttcctgttttctatttgtctagcttcataaaaaagaaaagaaaarcttgttgatcttgtcattgggactgtgttaaatttataaatcagtgtagggcaaagtgaaatttttctggtgttaaaatcatcctatcaaaaagaagtgt

SEQ ID NO: 487242 - DNA, 201 bp, Homo sapiens
aattagatctattggtttttccattctctaccttattcatttctgcctttatcttttgttttttttatttttgagatggagtctcgctctgttgcccaggytggagtgcagtggcgtgatcttggctcactgcaagctccgccccctgggttcacgccattctcctgcctcagcctcctgagtagctgggactacaggcac

SEQ ID NO: 487243 - DNA, 201 bp, Homo sapiens
aagagcaaaattaatggatcttatggtaagagtatgtgtagttttgttatggtaagagcatgtgtagttttgtgagaaactgcccaactgtcttctaaagyggctgtgccgtgttgcattcccaccagcagtgaacgagagttcctgttgctctttgccagaatttggtgttgtcaatatttaggattttgatttttctaa

SEQ ID NO: 487244 - DNA, 201 bp, Homo sapiens
gttctaatgtttcttgtaggctaagcttgccctggataatttgctggaagagcaagcagagtttacaggcattggagacagcgtgatgcacgtggagcagmttcttaaggaacacaaaaaactggaggaaaaaagccaggtttgctttctgacatttttgtgtactgggagggaggttgctgtggacaatgatggatcatg

SEQ ID NO: 487245 - DNA, 201 bp, Homo sapiens
gtgtagttttgttatggtaagagcatgtgtagttttgtgagaaactgcccaactgtcttctaaagtggctgtgccgtgttgcattcccaccagcagtgaaygagagttcctgttgctctttgccagaatttggtgttgtcaatatttaggattttgatttttctaatatatatatggtagtatctcattgttgttttaatt

SEQ ID NO: 487246 - DNA, 201 bp, Homo sapiens
caggagttccagatcagcctggccaaggtggtgaaagtccatctctactaaaaatacaaaaattaaccgggtgtggtggtgtgcacctgtagtcccagctrctcaggaggctgaggcaggagaattgcttgaacccaggaggtggaggttgcagtgagctgagatcacaccactgcactctagcctgggtgatggagcaat

SEQ ID NO: 487247 - DNA, 201 bp, Homo sapiens
tcttggttcactgcaacctctgcccctcccaggttcaagtgattctcctgcctcagcctcccaagtagctgggattacaggtgcccgccatcatgcccagmtaattttttgtatttttttagtagagaaggggtttcaccatcttggccaggctgatcttgaactcctgacctcaggtcatctgcccttctcggcctccca

SEQ ID NO: 487248 - DNA, 201 bp, Homo sapiens
tgctgtccagtttctccaacagcttgaatttctgtgctatagataaacataagcttcctctttttcttatcactgttactcataggggtgtctgccggcctttttttttttttctggacattttgaaaaatatctttacatcatggagaagagaataagtggaaaaccacagtgagtattacttgtaggtcttggtcccat

SEQ ID NO: 487249 - DNA, 201 bp, Homo sapiens
atggttcttggacttggccatcatagttacagctgggcatgggagtattgcgagatgtcctagtggatcacctgagcatcagacatgtccctctcggcctytgttaagcagcagccctacctcctcaccacgactaggacccgtttctccttccactatggtaactgctctctttgcctgctggtctattgacatgaggag

SEQ ID NO: 487250 - DNA, 201 bp, Homo sapiens
cagcttcaaaagaaatcagagactgttggttttcagaaataagtaaattattgatggaacaacaaaataatatcaaaggtaggttacccctgctgactttygtctgtcgagttatactgatttcagctcagtgggggatgtgcaaattggggatattgtgaaagaaaatggtttgctgggaaaacaactgtggccacattt

SEQ ID NO: 487251 - DNA, 201 bp, Homo sapiens
tgttactctgagaagagacaatttccctctgaatttctcccagtttcttcctgatacctcctgtgttctgaaatgcagattctagtgcaattgggcctcaraaagaactggaccctttacaatgtgaaagtcaccaagtgcaatgattctagccaaagtgacccattttaaaagatgacccatttcaaaacccatgagtta

SEQ ID NO: 487252 - DNA, 201 bp, Homo sapiens
ataactagttactatttggtactaattgcctagtctgtttgctcaaggaggaaggaggcaatgtgaaatgtgaatttataactcacattttaaggtgaaayattagatatctttgcaactgttacatttccaatataagacctctaaaaaagaaaagaaattctacctaatggctgtcttcaagtgtttttgtgctggggc

SEQ ID NO: 487253 - DNA, 201 bp, Homo sapiens
gagacagaacagacatttgaggggtgtgaagaagaaaacctggaatccgacttagcttttggataaagtgaggtggcagtgaatgtgcagaaattgaaagytggagggagggctgttcccacgtcctttacttttgctatcacagttctgtatttctttccttaaaatcaatatataaaaagattcaatttcttgagcttc

SEQ ID NO: 487254 - DNA, 201 bp, Homo sapiens
gacaatggttctcgacctcaactgcattttaggattgcctagggagattttaattcccaatgtccagactataattcagatgaattacatcaggatttctmggggtgaaacctggattttcagcggtgtctaaatctcaccggtgatccccatgtgcagccagggatgagagtgtctgtgctaggagcggatagggagaag

SEQ ID NO: 487255 - DNA, 201 bp, Homo sapiens
gctacggaagacgcttggttttaggagccttacaattatctcgtattactctaagtctggtgtgtggagtattctgtgtggaattcaggcctcattttggktttgatggtctcatcgtgatttattttaaaactttttctaatcaaagccatgctaagacaatggttctcgacctcaactgcattttaggattgcctaggg

SEQ ID NO: 487256 - DNA, 201 bp, Homo sapiens
atagttctaatagttcagctacaggtgaattctgcacccccagcttaatttgaaagttagtgagctgcaaaaaaaaaatttttaacatatatagatatatrcaagtcttgaatcctttttggaattttgagttttcttgaagcataacaaacctataccttcaggtgagtgagtgttggtttacttctggactgttctaat

SEQ ID NO: 487257 - DNA, 201 bp, Homo sapiens
ataataatgagatggtcacaattgacaccactgaccgaagacacaggtgttctagccataggcctatatggatgcctgtggaaatgaatgctaacctaacmtcactttctcattctttcttgaaaggttattagttcaactggatgaaacagaaaaagcctttagtcacttttggtctgagcatcatctgaagcttaacca

SEQ ID NO: 487258 - DNA, 201 bp, Homo sapiens
gaccttgctctttcctctgtaccgtgcttcttcccaaaggagagaaaaaaaatgttttcacttttagaattctactttcgaaagattctgtgagaatttcrtgaggacttgagaggggaccaaacagcttccttttggtcttagtgacaatgatgtcttctcaagcatattgtctattggcctatttatagccaggcactg

SEQ ID NO: 487259 - DNA, 201 bp, Homo sapiens
taatcccagcactttgggaggccgaggcaggcggatcacgaggtcaggagatcaagaccatcctggctaacacggtgaaaccctgtctctactaaaaatamcaaaaaaaaaaaaaaaaaaaaaaaaattatctgggcgtggtggcgggcgcctgtagtcccagctactcgggaggctgaggcaggagaatggtgtgaaccc

SEQ ID NO: 487260 - DNA, 201 bp, Homo sapiens
gtgagtgaagtggaatcagccttttcaggagagaatatgtagacctagatgttctggagcaaccaagaacagattggaacagccaatattgggtcttggtrgggccaaggaagaagaatatttgagacaacaaaggaaaaaagaatacgtccgtctggcatccacatacagagatctttttatgagcattctattcccccc

SEQ ID NO: 487261 - DNA, 201 bp, Homo sapiens
ggattgagatgggaggattgcttgagccctggggttctgataaataaataaatatatatatatatatatatatatatatatatatatatatatatatatayttaagaaaataaatatcacacacaccacaatgcttctttgctattttgggatcagaacatatttacctcaatctcttatacttacatatttatatttagt

SEQ ID NO: 487262 - DNA, 201 bp, Homo sapiens
tggaagggaatggagaggtgagtgaagggttgctatcactggctgaaggccagacattgtactgggtgctgtgtgtacctgagtccatccctagtcctcaraaccttgtgaggatgatgttttccgttttatcagcagtgccatgagactcagaggttgagtttccccaagggtcatacaactagtaaatgttggagctgg

SEQ ID NO: 487263 - DNA, 201 bp, Homo sapiens
tgagtgagaacatgtggtgtttggttttctgttcctgtgttagtttgctaagaatgatggtttccagcttcatccatgtccctgcaaagaacatgaactcrttctttttttatggctgcatagtattctatggtgtatatgaaccacattttttttatccagtctatcattgatgggcatttgggttggttctaggtcttt

SEQ ID NO: 487264 - DNA, 201 bp, Homo sapiens
ctgtgtgtgtgtgtgcgtgtgtgtgaactctaagagtctgccaaagttcccttagaataaatggtgaccatgaccacaccaggttaggaagaaatctgtgktatagcagtgcggtttctcttccctttcctatagaatattctggttttagcaagaaacacttgagacatgtcttatggggcagtcatttgcatgcccttt

SEQ ID NO: 487265 - DNA, 201 bp, Homo sapiens
ataatagtgcttatacagtattaccaagtgccaggcgttgtcctgagcattttacatgtttgtacatatatgcatacacacacacacacacacacacacayacacacacacacacacacacacacatttaatcttcacatcaacctcataggtagatactattttattatttcagatttacaaacgaagagtctgagaaac

SEQ ID NO: 487266 - DNA, 201 bp, Homo sapiens
atttagttgttcattttcagttatttatatgtagttgttttgttttaggagttacagatgttcaaattaatttgcttggaatttatttatttatttatttwtttttcgagacggagtctcgctctgtcgcccaggctggagtgcagtggtgtgatctcggctcactgcaaaccgcctcccgggttcacgccattctcctgc

SEQ ID NO: 487267 - DNA, 201 bp, Homo sapiens
ttcttgagacggagtctcgctctgtcaccaggctggagtgctgtggcgtgatctcggctcactgcaacctctgactccctgattcaagcgattctcctgcytcaccctccctcgtagctgggattacaggcatgtgccaccacgcccggctaatttttgtatttttagtagagacgaggtttcatcatgttggccaggatg

SEQ ID NO: 487268 - DNA, 201 bp, Homo sapiens
tatgttgtgatagaaaatcaaaacagtagctgctgttagggatgaggggtggtggagactaattggaaggagacaaaaggaactttctaggaaatattccatatatatatatatatattttttttttttgagatggagtttcactctgttgcccaggctggagtgcagtggcacaatcttggctcactgcaacctctgccc

SEQ ID NO: 487269 - DNA, 201 bp, Homo sapiens
atttattagtttttaaatgagttttgttagtttcagttgtattttatttttagttttattagttgattttcatttctttgtagctttctggttatttaatyttatagtttcagttactggtttatagttactttattttcaaagttatttagttgttcattttcagttatttatatgtagttgttttgttttaggagttac

SEQ ID NO: 487270 - DNA, 201 bp, Homo sapiens
ccccatgttactcacacagcccccactgatctgctctggggagggcctggggcccagaacgtggcttgttgggggcttggggcagcagcccaggagacgcyacttgtgctgcctgctcacccagataactgcagctccctccactgccgcctaccgccctctggccatgcctctgcccagaatgccctccctctccagtcc

SEQ ID NO: 487271 - DNA, 201 bp, Homo sapiens
gcgtgtatgctgtgttagggggtaaaatttgcatctccctgaggttgcactctaaggtgtatggaaaacctggctctagactaaaccaggccccccgtggtgctccaggcatccccaccctcacctgtggcacccggagctcctgctgtcactggcccaggtgggtcctgtgtctttctctgcgttgtcagggcctgcgct

SEQ ID NO: 487272 - DNA, 201 bp, Homo sapiens
gaatcacttgaacccgggaggcggaggttgcagtgagccgagatcgtgtcactgcactccagcctggcaatagagcgagactccgtctcaaaaaaaaaaaagaaaaagaaaaaaaaagttgtgcattgagaaaaatctagtttgaaagacaataaaaatagaatttgcccatttaatatctatggattgagagctaccgct

SEQ ID NO: 487273 - DNA, 201 bp, Homo sapiens
ttattttacagatgaggaagctgcagtgtagagaggtgaagttaacttgccaaataccacaccacagggctagaatccatagccgggtctgtctgactccmgggtcagagcttatgggccagggctggcataggagtgcctttgtactagagaaaaaagactatatggcagccagtctggacaaactaattagtaaaagta

SEQ ID NO: 487274 - DNA, 201 bp, Homo sapiens
catctgcctaaaatttgcgaaatcactttcattcaggggcccactttctctcagttgctctctcagtctttccacagtgctcatccagataacaaccatcytctgaagccccaaaacaagggccctctggcctcctccaccatacatctggaaggaactggaggcttaaagcaaggtaacagaattcttgatggcagattt

SEQ ID NO: 487275 - DNA, 201 bp, Homo sapiens
catttctgatgaggttaatttaagtaacctatattttcgtaggaaattacttatttatatccaggttttcaaatttttttgcatagggatgtgcaaagtcrtttcttagggatttttaattttttgcttcagttccttttgccatttcttattttgtgtacctgtgctttccccttcctccccttctcttttttcttctta

SEQ ID NO: 487276 - DNA, 201 bp, Homo sapiens
tgtttaagttttacatttctgatgaggttaatttaagtaacctatattttcgtaggaaattacttatttatatccaggttttcaaatttttttgcataggratgtgcaaagtcgtttcttagggatttttaattttttgcttcagttccttttgccatttcttattttgtgtacctgtgctttccccttcctccccttctc

SEQ ID NO: 487277 - DNA, 201 bp, Homo sapiens
gtaaataccattaagcaataaaaaagagtgaagtactgatgcgttcaacaacatggatacatttcaaatatattctcttgagagaaagaagctagacactraacagtatgattatgattccttttagaaaaatttcaaaataggcaaaactatgttgtgatagaaaatcaaaacagtagctgctgttagggatgaggggtg

SEQ ID NO: 487278 - DNA, 201 bp, Homo sapiens
gaaatttcatactgtcctgatcagccacctaaaaaagtaaatagcaatttttaaaaatagattcacctgatttaacacccaggaggtctgtggaatcattragtaatattaaaagggtttcattgtggtcctcttcaaaagtgaacatcagcctatccatttctgcaccctggacttctgggagaatgtcatctctgaagg

SEQ ID NO: 487279 - DNA, 201 bp, Homo sapiens
caagtctgtttttagttaggatcagttttaaacaggcacgggcttcttcgagaccatagaacttcgtgtttcgtagagtaggtgtccatcttaatacatgytggtcattaaaaatggaagtcttcttattttacaaaatagtttcttttagtcccatttttctgagattgcggaagaatggaacaccctgtagaacgagga

SEQ ID NO: 487280 - DNA, 201 bp, Homo sapiens
gaaagtaacctttggaatctcagggatcaaagggaaaaccagctgcctattcctgagcagctgtgcccggcaagctccaatgccagcttgctttgcacgtmctacagttgtttgcaagtctgagcttcttgctagactttgtgcccacaagtccaactgctcccacacccattgtgcatctatctgactcattaaaggtgc

SEQ ID NO: 487281 - DNA, 201 bp, Homo sapiens
ggcaatgtgaaatgtgaatttataactcacattttaaggtgaaacattagatatctttgcaactgttacatttccaatataagacctctaaaaaagaaaaraaattctacctaatggctgtcttcaagtgtttttgtgctggggctttagctatatggaactttatttcaagccatgggcaacaattagaagccatttgga

SEQ ID NO: 487282 - DNA, 201 bp, Homo sapiens
atgttgtgatagaaaatcaaaacagtagctgctgttagggatgaggggtggtggagactaattggaaggagacaaaaggaactttctaggaaatattccatatatatatatatatattttttttttttgagatggagtttcactctgttgcccaggctggagtgcagtggcacaatcttggctcactgcaacctctgcccc

SEQ ID NO: 487283 - DNA, 201 bp, Homo sapiens
ccagaggcaaatctacctatttgaaaggggaatagtgttctgtaagatacgaatggagcctggggaccagggattatctcctcattacagcttcaagaagrccatgaaggtaaagggagtcctattgcatctgggagtcgccctatgcagaaaagagagagatcgttttccttattttacagatgaggaagctgcagtgta

SEQ ID NO: 487284 - DNA, 201 bp, Homo sapiens
tggttgaataataataagaaaaaccaggattcagaaacaggatgacgatataacccagtgtctgcctgttgcccagtggcagttcctacgtcccattctgkacattgtctttagaagcaacacttgatagagggtttataacacagaggtacaaaaagtagaagatggtgtaaaacaagaggtatatgtaacatgtttctg

SEQ ID NO: 487285 - DNA, 201 bp, Homo sapiens
caaaacagtagctgctgttagggatgaggggtggtggagactaattggaaggagacaaaaggaactttctaggaaatattccatatatatatatatatatwttttttttttgagatggagtttcactctgttgcccaggctggagtgcagtggcacaatcttggctcactgcaacctctgccccacacaggttcaagcaat

SEQ ID NO: 487286 - DNA, 201 bp, Homo sapiens
caggaacagctgctctgagctttggcttgggcctttcctgtgataacactggttctaccttagagccttgcagggccgggaagggtcagcctgagtcagcstcctcctcagagtgctcagtcaatgctcagagcgtgtgcgggaggataaggaagagtgagaaggacaagcaggttaagtacagaatggaaacctttctgg

SEQ ID NO: 487287 - DNA, 201 bp, Homo sapiens
catagctcactgcagcctcgaacttctgggcttgagcgatcatcctggccaggttgctgggactgcaggcacacaccaccatgcctggctgattttttaattttttttagagagggggttttgctgtgttgcccagactggtctcaaactcctgggctcaacctatcctcctgcctgggcctccctaaatgctgggattat

SEQ ID NO: 487288 - DNA, 201 bp, Homo sapiens
ctcaaactcctgacctcaggtgatccgcttgcctcggcctcccaaagtgctgagatttacaggcatgagccactgcactggacctacaaaaaatttttttwaaaaattagctgggcatggtggtgggtgtctgtaatcctagctatttggcaggccaaggtgaaaggattgcttgagctcaggaggttgaggctgccgtaa

SEQ ID NO: 487289 - DNA, 201 bp, Homo sapiens
ctaccttcaatcatccttttctgggtcaacttcggcttttcacattcctctcccatcccccacagggaacaggcaaggtttcccaaaataaaggcacagasgcacaaatccaattctgatggatgtactttcatcagataattaccataaatatgagcctcaggccaccatcggccactgtgcggttaccacatcggtgta

SEQ ID NO: 487290 - DNA, 201 bp, Homo sapiens
agataattatgtaattatgtaagacactgtaaatgcatatttcttcattcttttaactgatttaaaaagcaattatgttaaacaaaagtacaaatggtccycagcttacaatgattcaacttacaactttttgactgtacaatgggtttatcaggatgtaacttcatcataagttgaagagcttcttatgacttatgatgg

SEQ ID NO: 487291 - DNA, 201 bp, Homo sapiens
aagtaacaaaagccttttcaggattctgagcaaagagcctcctaaattaaaaaaataaataaataaaagtttttgaatgcaggggctggaagggaatggaraggtgagtgaagggttgctatcactggctgaaggccagacattgtactgggtgctgtgtgtacctgagtccatccctagtcctcagaaccttgtgaggat

SEQ ID NO: 487292 - DNA, 201 bp, Homo sapiens
cactttgggaggccgaggtgggtggatcacctgaggtcaggagtttaagaccagcctggccaagatggtgaaaccttgtctctactaaaaatacaaaaatyagccgggcgtggtggtgtgcacctgtaattctagctactccagagtttgaggcagagaattgcttgaacctgggaggcggaggttgcagtgagcgagatg

SEQ ID NO: 487293 - DNA, 201 bp, Homo sapiens
tgcttccctcatataaaggcaaagggttttgactctttttggagaagcttaagtaataacaaccattttataccccctaccatgtatcgagcacctactgyattcctaccaggaacataattatgtcatctatttataatcctcaagacaacctctgaggaaggtattaatggcctcattgtgcagaggcagaaactgata

SEQ ID NO: 487294 - DNA, 201 bp, Homo sapiens
ggtggtcccataaaattataaaactctatttttactgtactttttaaaaaaagtttttcctttcctttccttttccttttcctttcctttttttcttcttyttttttttttttttttttcaagacagggtcttgctctgtcacctgggcaggagtgcagtggtgtgatcatggctcagtgtaacctcagactctggggctc

SEQ ID NO: 487295 - DNA, 201 bp, Homo sapiens
ctttcaggtgtacagagaaccaagcactatatttgcagagtgcttccctcatataaaggcaaagggttttgactctttttggagaagcttaagtaataacraccattttataccccctaccatgtatcgagcacctactgcattcctaccaggaacataattatgtcatctatttataatcctcaagacaacctctgagga

SEQ ID NO: 487296 - DNA, 201 bp, Homo sapiens
aggagtgcagtggtgtgatcatggctcagtgtaacctcagactctggggctcaagctatcctcccacctcagcctcttcagtagctgggactacaggtgcscaccaccatgcccggctgatttttttttttaatttattttttgtagagacaggggtttccttgtattgcccatgctggccttgaactcctgggctcaaac

SEQ ID NO: 487297 - DNA, 201 bp, Homo sapiens
ggtggctcacacctgtaatcccaaaactttgggaggttgaggtgggtggatcacctaaggtcaggagttcgagaccagcctggccaacatggtgaaacccwgtctctactaaaaatacagaaattagctgggcatggtgggtgtgcctgtagtcccagctactctggaggctgaggcaggagaattgctgaggcagaggtt

SEQ ID NO: 487298 - DNA, 201 bp, Homo sapiens
actgatgggtgagacacagcagcacaagaagccgaggagggaggcaggcactgaggtttgggacaagctcctcagctgtggcatgactgcctgtgatctaraggtgaagggagactgcggggaaagatcaggccccagccagaagagtgcaggggcaggcagcagggtgggtgggaaacaaggcaaagcctcagtcccggc

SEQ ID NO: 487299 - DNA, 201 bp, Homo sapiens
tggaagcagaattaacagttaagccctcgttttccttcttctttagtgacttggaagccactgatcatcttaaaccttccagacaggcagtttgtaatgamagaaatctcttgagactgggtggtgagtgagtctcttgagactgggtggtgagtgagtcttttgagactgggtggtgagtgaagaacggtgggaagcagc

SEQ ID NO: 487300 - DNA, 201 bp, Homo sapiens
tgctctctcggctcactgcaacctctgcctcccaggttcaagcgattctcctgcctcagcctcccaagtagctgggattacaggcgactgccaccacgccyggctaatttttgtatttttagtagagacagggtttcaccatgttggtcaggctggtctcgaattcctgacctcgtgatctgcctgcctcggccccccaaa

SEQ ID NO: 487301 - DNA, 201 bp, Homo sapiens
ccacagcacctctggggcctgggcctggggagggagccggggttcttacctgtgtgacccgcctgtatatgtcaagtgcacccacatgcctgctcgccccygctcttaccacctactgactgtttttttcccttccgtcagtttcttcctcttcctcataatttctaatgactcaccttcttcatagttctgtttccttct

SEQ ID NO: 487302 - DNA, 201 bp, Homo sapiens
tctactaaaaatatgaaaaattagctgggcgtggtggcgggtgcctgtcatcccagctactcaggaggctgaggcaggagaatcgcttgaacccgggaggyggaggttgcagtgagctgagatcgcgccactgcactccagcctgggcaacaagagcaaaatttgtctcaaaaaaaaaaaaaaaagaaaagaaaaagtgac

SEQ ID NO: 487303 - DNA, 201 bp, Homo sapiens
aatttttgtatatgatgtgaattaggggcccaagttcctttttttacatgtggatatccattgtcctagaaccattgattgaaaagactattctttccccrctttgaatggtcttggcatctttgttgaagataaattggctttaggtatagaattccttgttgaccctctttttctttaagcactttgaatatgtcatcc

SEQ ID NO: 487304 - DNA, 201 bp, Homo sapiens
gaggttgcagtgagccgagatctcgccactgcactctgtcctgggtgacagagcgagactccatctcaaaacaacaaaaacaacaacaacaaaagagaaaraatatattccaaagattactgtcagtaatcaaaatatctggaatgggctgggtgcagtggctcatgcgtgtaatcctagcactttgggaggctgaggtgg

SEQ ID NO: 487305 - DNA, 201 bp, Homo sapiens
caacagacacatgaaaaaatgctcatcatcactggccatcagagaaatgcaaatcaaaaccacaatgagataacatctcacaccagttagaaaggcaatcwttaaaaagtcaggaaacaacaggtgctggagaggatgtggagaaataggaacacttttacactgttggtgggactgtaaattagttcaaccattgtggaa

SEQ ID NO: 487306 - DNA, 201 bp, Homo sapiens
aagctgtaaatatatgcacgtatatgcacatatacatgtacacatttgtaattacaaatatcctagaaatcacaacttcatactgataccttaaatttcastccatgtaagatgtatatttaagtgagggtaaagtcaaggggagaacagtgtatccagtaagttcccatttggataaaataagagggctatatgtatgat

SEQ ID NO: 487307 - DNA, 201 bp, Homo sapiens
ataccttgcttaccaaaaaaggcaaatcataggaaagtatattaacatcagagctagcctggcacagtgatatgacctgtagtcccagctacttgggaggstgagatgggaggattgagatgggaggattgcttgagccctggggttctgataaataaataaatatatatatatatatatatatatatatatatatatata

SEQ ID NO: 487308 - DNA, 201 bp, Homo sapiens
caccattttgcagatgaaggtgccaaaagaatgccacaagactagaaagcattatggatactttatttctgaattagactaataaatttaaaaagacatargctaatcatcttatctcctataccaggaacaactctgggcactgccattcaagagggaattcctaaatttgcttaagttcacagtgtaaccatcagcaaa

SEQ ID NO: 487309 - DNA, 201 bp, Homo sapiens
atttgccattctttcaggtaaggggcacattcatttgcatttccagattttgatgggggggtcttgatgggaaggtccagcctcttgaaccttgaggaatrttatactcaaatctcactcaccccttaggcttcacccgggactagaacaggctgaggcctatcctgccagaagagggtgggatctcatacatattattcc

SEQ ID NO: 487310 - DNA, 201 bp, Homo sapiens
atatctaagctagcactttattttaaaaagtaacttattaatcacacattgatggtacaccttgtatttagcaaatgtttgcatgttgataaaatctcctrtgtcttctttcttaaatccagttgctgattttgtaaaatacagttgtgataaagcagcattacgggggggaaaaagctatattccaactggtgttaaatg

SEQ ID NO: 487311 - DNA, 201 bp, Homo sapiens
gcattctgaaagtgtttgtctttacctagaatgatttgtacacactcgtggtcaactgaacatgaatgtcagtagtagtctaattatgggaagggtaaacrtgttagattaaggctcttaaagctctaaaccatataaactatggacttgtatcatgatttaactgttcttagatctttcttacacagtgattcattcctc

SEQ ID NO: 487312 - DNA, 201 bp, Homo sapiens
accagcctggccaagatggtgaaaccccatctctactaaaaatacaaaaattagccgggcgtggaggtgggcgcctgtcagctactcgtgaggctgaggcrgagaattacttgaactcaggaggtggaggttttggtgagctgagatggcgccactgcactccaacccgagcgacagagcaagattccgtcccaaaaagaa

SEQ ID NO: 487313 - DNA, 201 bp, Homo sapiens
gtcaggagttcaagaccagcctggccaagatggtgaaaccccatctctactaaaaatacaaaaattagccgggcgtggaggtgggcgcctgtcagctactygtgaggctgaggcagagaattacttgaactcaggaggtggaggttttggtgagctgagatggcgccactgcactccaacccgagcgacagagcaagattc

SEQ ID NO: 487314 - DNA, 201 bp, Homo sapiens
cctggccaagatggtgaaaccccatctctactaaaaatacaaaaattagccgggcgtggaggtgggcgcctgtcagctactcgtgaggctgaggcagagarttacttgaactcaggaggtggaggttttggtgagctgagatggcgccactgcactccaacccgagcgacagagcaagattccgtcccaaaaagaaaaagc

SEQ ID NO: 487315 - DNA, 201 bp, Homo sapiens
ggtgagctgagatggcgccactgcactccaacccgagcgacagagcaagattccgtcccaaaaagaaaaagcagtttttgccatcagcaaggatatctccwccactttaatggacaggcctcatttttggcagctatgctgtttgagatgtagactgaatatccaaggttcctccctagctcaagtttttacttgtgatta

SEQ ID NO: 487316 - DNA, 201 bp, Homo sapiens
ttcttggccaggcatggtggctcacacctgtaatcccagcactttgggaggccgaggcaggtggatcacgaggtcaggagttcaagaccagcctggccaasatggtgaaaccccatctctactaaaaatacaaaaattagccgggcgtggaggtgggcgcctgtcagctactcgtgaggctgaggcagagaattacttgaa

SEQ ID NO: 487317 - DNA, 201 bp, Homo sapiens
catttttggcagctatgctgtttgagatgtagactgaatatccaaggttcctccctagctcaagtttttacttgtgattacacacaccacattgaattccrtcttcagaggcaaagatttgggcttcatatctcaacagcaaaagggcctgttcagcaattcccttcattttagactcatatgacctcagcgattgcatga

SEQ ID NO: 487318 - DNA, 201 bp, Homo sapiens
ggctaatttttgtatttttagtagagatggggtttcaccatcttggccagtctgatctcgtactcctggcctcaagtgatccaccagcctcagcctcccaragtgctgggattacagacgtgagccaccgtgcccagccaggtttccttctttaccttctaagaaacatttaaacataatgtgcctgagaaggttaatttg

SEQ ID NO: 487319 - DNA, 201 bp, Homo sapiens
ttgttagggttaaattggtgcaccttatacttggttgcatactagactcactggaatgatttgactttcgtcatagttgcagaggcactctgaaaccctaygtatgtgcttcaccagggacagccccacgcatgggaggtggtggccagccatcaccccagggtgaatttctctaagagcagtcctaggccagggggtgag

SEQ ID NO: 487320 - DNA, 201 bp, Homo sapiens
gtaggctggagacgcctacccttatcaggccaggcaagcactggggagcctggccgtaccagtcattgttgaggctgcaggaatggcagggagccctaagytccagtggccactggtgcagtcctcagagagcagttggcacaccgcctcaggctgagcctgcccattcttgggcacccagaagttccactcttaggtata

SEQ ID NO: 487321 - DNA, 201 bp, Homo sapiens
aagaccagcaagcagcatgacctcgtggttactgatcttatgaagaacacttgtctttcatatttgggactgtgttaaggttttctggaatatttttggtygtagtaacgattctgctttaggagctttcttctctagtgttgcacagacctgagtgatttgaccagcagcgctgcggtaacggaagaccactcgtgtctt

SEQ ID NO: 487322 - DNA, 201 bp, Homo sapiens
tgctgctcttaccaagaaacaccctcccaggcacaccctgaagtcatgtttcatctgggtgccccacgatgcagcaaaggagacatgaaattaaccgtcaygtacactgtatttattattcaattcaaaacattttctaagttcccctgggatttcttctttgagctacatgttagccggaggtgtgttgttgaatatcaa

SEQ ID NO: 487323 - DNA, 201 bp, Homo sapiens
tagatgtgccgtggcactcacagcccttggggctccctcctctgaggctgggtcagggtgaggaggtttacctgaaacaaccgcggagcttgcttttgtcyctggcccctgcagccctggagagtcggacagtgaggtggcctgggtggacctgccttccactgcacccggcagtgcgtgcgggtgggatggacgcggcgg

SEQ ID NO: 487324 - DNA, 201 bp, Homo sapiens
gcccggcctttttttttttttttggtagatggagtctcgctctgtcgcccaggctggagtgtggtggcgtgatcttggctcactgcagcctccacctccckagttcaaacgattcttctgcttcagcctgctgagtagctgggattacaggcacctgccaccacgccctgctaatttctgtatttttagcagagatggggt

SEQ ID NO: 487325 - DNA, 201 bp, Homo sapiens
ttgctgagcagtcccatcggatttttctttattaaataggattgtgttttattgtaagaaggtttccctaagacaaataacgaaggaaattctgggtccargagtacagactgtagcttctgtcatctcttgccaagttcgtagccctcagatggtgtctgtctttcccctttgcttgcggggccttttaccacagcactt

SEQ ID NO: 487326 - DNA, 201 bp, Homo sapiens
ccaggccaactcctgatgaagcagattcctgtgggtgacaagtgtcagaagatagaataggaccttagggtcaggaaggatttcttgaacaaaaaaggggraaaacagattgagagattcagaaagctgtaatatattctgtgacctcaaaggtgacttggaggagggctgttgttcagcgacgggcgtgtagtgaacact

SEQ ID NO: 487327 - DNA, 201 bp, Homo sapiens
ctttgtcttaatttaaggaaaaagatcctcccgggttttatttctctctttcttgagtggactgtttccctataattaaaagaggtggtgagtcctggggyagcttccgcgcctccctgtccacgtgctaacagatcaggacgcccccagcacccctgcctgcttttgctggtggcagtgacgggaccccgactcctcact

SEQ ID NO: 487328 - DNA, 201 bp, Homo sapiens
aaaaaaaaaaattaggctgggtagggtggctcacacctgtgatcccagcactttgggaggctgtagcaggcggattgcttgagtctgggagtttgagaccracaagatcctgactctataaaaattttaaaaaatagctgggcgtggtattgcacacctgtagtcccagctactcaggaggctgaggtggggggatcagct

SEQ ID NO: 487329 - DNA, 201 bp, Homo sapiens
gaagctcagcgtccctgcacgtgtgcggtcttgtctgcctaggcatgtgtgcgggccctggggctgctgccagcagaacggactgggatacgctggatttktaaaacgtgaccctttttgtttgcttttaatttttaatttttatttatttatttatttttgagactgagtctgactctgtcacccaggctggagtgcagt

SEQ ID NO: 487330 - DNA, 201 bp, Homo sapiens
gagcctggccgtaccagtcattgttgaggctgcaggaatggcagggagccctaagttccagtggccactggtgcagtcctcagagagcagttggcacacckcctcaggctgagcctgcccattcttgggcacccagaagttccactcttaggtatacaccagaagaattcttcctcgactgtttgtgctgaaggacaaggt

SEQ ID NO: 487331 - DNA, 201 bp, Homo sapiens
ctcaggctacagccagggctgtgaaggagccgaggtcatagagtggctgccctggcgtagggagggaggacacgggtccccgccatttcagaagctcagcrtccctgcacgtgtgcggtcttgtctgcctaggcatgtgtgcgggccctggggctgctgccagcagaacggactgggatacgctggatttgtaaaacgtga

SEQ ID NO: 487332 - DNA, 201 bp, Homo sapiens
ttttgtaaactacaacaaaagtgactagctagtaaaggaaatcacagaacataaaatacaaacccatgtcattattattaatattttgaggcagagtctcrctttgtcactcagactggagggcagtggtgcgatctcggctcactgcaacctctgcctcctgggttcaagcgattttcctgcctcagcctcccaagtagc

SEQ ID NO: 487333 - DNA, 201 bp, Homo sapiens
atttttagtagagatggggttttgccgtgttggtcaggctggtctcaaactcctggcctcaagcaatctgcattcctcagcctccaaaagtgctaggattmcgggcatgagccatcatgcctggttatcgggggaacccgcccccaatatttcaatgtaggttctttctattttccataagtgtcggccagctgagaaata

SEQ ID NO: 487334 - DNA, 201 bp, Homo sapiens
tttgttaccactgagtccccagctctgagaacagagcgaggcatgtgatcgatgcatcgtaactgttgagcaaatgaatgctgagctgtgatggcaccgaygtgtccggggagaggacgcacccggctgtgtggacatgtgcccagggcccaggacagcgccacggaagaggacacacccggctgtgtggacatgtgccca

SEQ ID NO: 487335 - DNA, 201 bp, Homo sapiens
tggatggatcagttgtggtctattcacagaatagaatgtgaccacactggagatgaatgaattgtagctacaatctgcagtgtagacgaatcttaggaacrtaggcgtttcagaagcagatcaagccaggcacgatgctgtgtgcctatagtcccagctactcagagcctgaaggtgggagatcacttcagcctgggagtt

SEQ ID NO: 487336 - DNA, 201 bp, Homo sapiens
tgaccaggctggtcttgaactcctgacctcaagccatctgcccaccttggcctcccaaagttctgggattattttttaagcagttttgataggtgtgtacmtagtagtgctttgtggtttaatttgcatttcccagggagtgggggcactgcctgtcttctcacgcctcagttgcttgttgctgtgacggtcgcccactcc

SEQ ID NO: 487337 - DNA, 201 bp, Homo sapiens
ctgtagagataaagctgaggaggaggctgtgtgtgatggctctggctcggaccaaccagatgagcctcctgaagcccccttccctgcctgcctgctgaccygtggccccagctcactcattgccctcagcagccacccgaggctgtgcagaagggtaggttcaggttgaccaggaagctgccaaaagggacatggatatga

SEQ ID NO: 487338 - DNA, 201 bp, Homo sapiens
ggggccctgtgctggccccgggtccgccccagaggagtccacacagcaccacctccagaaggggctgggcccggggtcctgcaggcggcaccttttggtaragtttgtttccctggaaaatggggaaaatgtttcaagccaggtgaggggggaagttaacactgaaatatgtattgtttttaaaaatcaaatgcacacgca

SEQ ID NO: 487339 - DNA, 201 bp, Homo sapiens
tctctcctgccgtgcgggcacccgagtctctcctgccgtgcgggcacccgagtcactcctgccgtgcgggcgcccgagtcactcctgccgtgcgggcaccygagtctctcctgccatgtgggcacccgggtcactccacgcctgcagggttcccagcattgcagagcccatgcgttgatgccagcaactctacactcctga

SEQ ID NO: 487340 - DNA, 201 bp, Homo sapiens
tggtctcgatctcctgacctcgtgatccacccgcctcggcctcccaaagtgctgggattacaggcatgaaccaccgtgcccggcctttttttttttttttkgtagatggagtctcgctctgtcgcccaggctggagtgtggtggcgtgatcttggctcactgcagcctccacctccctagttcaaacgattcttctgcttc

SEQ ID NO: 487341 - DNA, 201 bp, Homo sapiens
tggccattctcacggtggtgattgtgattagacgacccccgggaagcccagacactcggggcctggagttcctccccctgcctgacctagaagcagaacckttttcagcgctctgccctgttggctttaaggctttgtcttaatttaaggaaaaagatcctcccgggttttatttctctctttcttgagtggactgtttcc

SEQ ID NO: 487342 - DNA, 201 bp, Homo sapiens
gtctgtgttcctgcacttttcccgggctctgagctggattgatggggccagtctcccccctcccatcttgaggtcgttctccacattccttccagcacacstgtcctttccatagccctttttggacctttagaaccacagatgataggaccagcccaatgagccacagtcagagagtagattgtgcatgtgtgagcaccc

SEQ ID NO: 487343 - DNA, 201 bp, Homo sapiens
tggagggtccgggtgctgcgggcagagttcagcgcttgtccaccctcccttagctctgactcagtgcatcctactgtggggacatctcgtgaggggacacraaatgactgatctcaccctttcccagtattcagagctgtgaacccctgtggcgcaggactggcctgtgtctgttattttggttgtaaatcattctcctgt

SEQ ID NO: 487344 - DNA, 201 bp, Homo sapiens
tgagccggctgccagcactaggtcctgggcagctttgtttgtcccacttttctttgtttcttctcactaaaatgatcacgaagacctttgacaagaggagrgatatgcactgtgatattaaattagaaataatttatcaaaatcagacctctcctaaaagaataagaaattcattgtttggcccatcctgaaaggtgaggt

SEQ ID NO: 487345 - DNA, 201 bp, Homo sapiens
aaactcctggcctcaagcaatctgcattcctcagcctccaaaagtgctaggattccgggcatgagccatcatgcctggttatcgggggaacccgcccccartatttcaatgtaggttctttctattttccataagtgtcggccagctgagaaataaagagaaagagtacaaagagaggaattttacagctgggccccccgg

SEQ ID NO: 487346 - DNA, 201 bp, Homo sapiens
aaaagtgctaggattccgggcatgagccatcatgcctggttatcgggggaacccgcccccaatatttcaatgtaggttctttctattttccataagtgtcrgccagctgagaaataaagagaaagagtacaaagagaggaattttacagctgggccccccgggtgacatcacatatcggtagggccgcgatgcccgcctga

SEQ ID NO: 487347 - DNA, 201 bp, Homo sapiens
ttttcttctcggtcactttgcaagccggggacccctggccagtgatgccccacctgggccctgcttggccacactggcgtgccccaactcacctgtgttayagcttgtactgtgttcggccattcccgagctcatgtaccgcactcaagatcaaggatacactggacattgaagggtgaggagggcggagaagaactttat

SEQ ID NO: 487348 - DNA, 201 bp, Homo sapiens
aagacaggcttaagaaattatcaaagtattatttggaaactggtaaatgtccatgaaatcttcacaatttatgttcctttgccacagctccagccggtccmtctgttcagggtccctgacttcccacaacacctggcttctattacttttttaaaattagcttttttctttttttcgagatggagtctcactctgttgccc

SEQ ID NO: 487349 - DNA, 201 bp, Homo sapiens
caacatagcaagaccctgtctcaaaggaaaaaaaaagcagattacagaaaagtaaatccagtgctaggccgtatttttaagctcaaaaaattaaaactaawtagcgtttagggataaacatgaggtaattttttagaagcaagagaatagcattgaatttaaggtatatatggggaaaatgaaacttccaagttattgata

SEQ ID NO: 487350 - DNA, 201 bp, Homo sapiens
ttttcctcagttccccttgcttggagggtggataccactgagcctggttgtacagctgcctccgtgaccagcacctttgcccaaggtctccctgttaacartcgtcagagctggaacttgaactcgagtcttctctagaccaggtttcttctaagtatttggcatcaccaggaagagccctgtacaaggtgctggtggttt

SEQ ID NO: 487351 - DNA, 201 bp, Homo sapiens
gggcccgggacagcgccacggaagaggacgcacccggctgtgtgcacatgtgcccagggcccgggacagcgccacggaagaggacgcacccggctgtatgsacatgtgcccagggcccgggacagcgccacggaagaggacgcacaggacagcgccacggaagaggacgcacccggctgtgtgcacatgtgcccagggccc

SEQ ID NO: 487352 - DNA, 201 bp, Homo sapiens
ccagggcccgggacagcgccacggaagaggacgcacccggctgtgtgcacatgtgcccagggcccgggacagcgccacggaagaggacgcacccggctgtrtggacatgtgcccagggcccgggacagcgccacggaagaggacgcacaggacagcgccacggaagaggacgcacccggctgtgtgcacatgtgcccaggg

SEQ ID NO: 487353 - DNA, 201 bp, Homo sapiens
ggggagaggacgcacccggctgtgtggacatgtgcccagggcccaggacagcgccacggaagaggacacacccggctgtgtggacatgtgcccagggcccrggacagcgccacggaagaggacgcacccggctgtgtgcacatgtgcccagggcccgggacagcgccacggaagaggacgcacccggctgtgtgcacatgt

SEQ ID NO: 487354 - DNA, 201 bp, Homo sapiens
cagagtctcgctttgtcactcagactggagggcagtggtgcgatctcggctcactgcaacctctgcctcctgggttcaagcgattttcctgcctcagcctyccaagtagctgggattacaggcgtgcaccaccatgcctggctaattatgcctggctaatttttgtatttttagtagagatggggttttgccgtgttggtc

SEQ ID NO: 487355 - DNA, 201 bp, Homo sapiens
gtaaaggaaatcacagaacataaaatacaaacccatgtcattattattaatattttgaggcagagtctcgctttgtcactcagactggagggcagtggtgygatctcggctcactgcaacctctgcctcctgggttcaagcgattttcctgcctcagcctcccaagtagctgggattacaggcgtgcaccaccatgcctgg

SEQ ID NO: 487356 - DNA, 201 bp, Homo sapiens
ttttagtgagacagagtctcgctctgttgcccaggctggagtgcagtggtgcggtctcagctcactgcagcctctgcctcctgggttcaagtgattctccygcctcagtcttctgagtagctgggactataggcgtgcactaccatacctggctgatttttgtatttttattttttatttattgttgagacagggtctctt

SEQ ID NO: 487357 - DNA, 201 bp, Homo sapiens
ggtgggtggatcacctgaggtcaggagtttgagaccagcctggccaacatggtgaaaattgggaggccgaggcgggcggatcccaaggtcaggagatcgakacatcctggctaacacagtgaaaccccgtctctactaaaaataaaaaaaaaaaaattagccgggcgtggtggcgggcgcctgtagtcccagctactcggg

SEQ ID NO: 487358 - DNA, 201 bp, Homo sapiens
cttcgtgctgtccagctggtgggccaaggtgagggcgagctgcctgccgtgcgggcacccgagtcactcctgccgtgcgggcacccgagtctctcctgccrtgcgggcacccgagtcactcctgccgtgcgggcacccgagtctctcctgccgtgcgggcacccgagtctctcctgccgtgcgggcacccgagtcactcct

SEQ ID NO: 487359 - DNA, 201 bp, Homo sapiens
ggcgtgaacccgggaggcggagcttgcagcaagccgagatagtgccactgcactccagcctgggagacagagcgagactccgtctcaaaaaaaaaaaaaaagagttctgactgaaggttggaacttagccctccagaaatgaagactgcgaataacgctgatggcagctcgtcacttgcagcaggttgcagcacgtgctgc

SEQ ID NO: 487360 - DNA, 201 bp, Homo sapiens
gaaccaccacgcccggccagagtgtgtagcttttgtaaaagttttggaaatggcctcagataatttcagaggtttttaaataaagaacgctcaaaatggarcaaaatggagagcccctgataggcctcctgcgtggaggtttgcagtaagccagaggcacctgtgggtcccagggagagacgggctgctccatggatgctc

SEQ ID NO: 487361 - DNA, 201 bp, Homo sapiens
gcctggtttctgcagaatgtccatggtggccgctgcagagttgcagaggtccctgtagagataaagctgaggaggaggctgtgtgtgatggctctggctcrgaccaaccagatgagcctcctgaagcccccttccctgcctgcctgctgacccgtggccccagctcactcattgccctcagcagccacccgaggctgtgca

SEQ ID NO: 487362 - DNA, 201 bp, Homo sapiens
gaccattgtgggtcccttgggaggccagcagccagactacggaatccacatgtggaccatgggaagtcagtctcttgcgtgtcctagaccttgtgggtggygccctgcataggggagcagggggaacgggtctgatgtccctgtgctggctgagggctcagagctgcccgcactccgtagctcatgggatgtgctgggcct

SEQ ID NO: 487363 - DNA, 201 bp, Homo sapiens
aggctgcgtccgcgcgctccacatcagtctcagagtggaggcgagcccaggccagaggcctctaccccggacgaggctgcaggtgcctgacgggaggagtsactgcagctcagcagagggagtgtgtggagtgtgcggccctgcctggcttttattttgctcctcctgttattgggagggattagcagcagagcgaatgtt

SEQ ID NO: 487364 - DNA, 201 bp, Homo sapiens
gcttttattttgctcctcctgttattgggagggattagcagcagagcgaatgtttggatctttgctgagcagtcccatcggatttttctttattaaatagsattgtgttttattgtaagaaggtttccctaagacaaataacgaaggaaattctgggtccaggagtacagactgtagcttctgtcatctcttgccaagttc

SEQ ID NO: 487365 - DNA, 201 bp, Homo sapiens
tatgcattagccgtaatccccaggacagccatgcagggtgggtcttaaacagttttttagattctcgagtataaaggtataatattgaagaataagcacamataatgtcatcatacatgttaaagtgacaacacaggatttacaaaattacccttttttccccaaaattacctcttacgatgtggtttctgttggtgctgt

SEQ ID NO: 487366 - DNA, 201 bp, Homo sapiens
tgttgagcaaatgaatgctgagctgtgatggcaccgacgtgtccggggagaggacgcacccggctgtgtggacatgtgcccagggcccaggacagcgccayggaagaggacacacccggctgtgtggacatgtgcccagggcccgggacagcgccacggaagaggacgcacccggctgtgtgcacatgtgcccagggcccg

SEQ ID NO: 487367 - DNA, 201 bp, Homo sapiens
cctgaagaggattagcagctagtctgttatcagtcacaggcagttcaacccagaagatttaaggattagattacccaacaaccttgagtgtagattttgtytctcatcaccctttgcattaactttgggtgcatgtgtgttaatgaggaagtgtgttctgctttattcttggtacatcacagacatttaatagatacaggt

SEQ ID NO: 487368 - DNA, 201 bp, Homo sapiens
caaggcttagccattgcactccggatgtgctgagccctgcgttttccccaaatgtgggaaacttgactgcgtaatttgtggtagtggagggactgtgttcrcactgtcccccccgcccaaaaaaataaaaatacaaaaatcagtcgggcgtggtggctcacgcctgtcatcccagcactttgggaagccgaggtgggtgga

SEQ ID NO: 487369 - DNA, 201 bp, Homo sapiens
gtgacgggaccccgactcctcactctcgggccgcagacaatgctgtgagcaagtgtggccatgggcacagaatgtccctttggacgccgctgctgggggcygccaggggccctctggggtcgtgctttgaggcccgtccggttcacgagggggtccgggcagcactgactgcttccgacctgcaggaggcgtaggagcggc

SEQ ID NO: 487370 - DNA, 201 bp, Homo sapiens
tgtcgacaggctggagtgcagtggcgcgatctcggctcattgcatcctctgcctcccggcttcaagtgattctcctgtctcagcttccccagtagctgggmctacgggcatgtgcaccatcacgcctggctaatttttgtatttttagtagagtcggggtttcaccaggttggcgaggctagtctcgaactcctgagctcg

SEQ ID NO: 487371 - DNA, 201 bp, Homo sapiens
agtccaggaggtcaaggctgccgtgaggtgtgattgagccactgcactcctacctgggtgatatagtgagactctgtctctaaaataaaataaaataaaayaaatgacagtggtccatatagtaccttattcagaaaaggcttgatgtacaagaaaataagttatttgtgatcaggacagagaagaattactgccttttgt

SEQ ID NO: 487372 - DNA, 201 bp, Homo sapiens
agcgattctcctgcctcagcctcccgagtagctgggattacaggcacgtgccacctcacctggctaatttttatatttttagtagagacggggtttcaccrtgttggccaggctggtcttgaactcactgacctcaggtgatccgcctcagcctcccaaagtgctgggattacaggcgtgagccactatgcccggcccagg

SEQ ID NO: 487373 - DNA, 201 bp, Homo sapiens
ttttttttttttttttttttttgagacggagtttcactcttgtttcccaggctggtggagtgcaacggtgtgatcttggctcaccgcaacctctgccttcygggttcaagtgattctccagcctcagcctcctgagtagctgggattacaggcgtgtgccaccacacccagctaattttgtatttttagtagagatggggt

SEQ ID NO: 487374 - DNA, 201 bp, Homo sapiens
gagattttacatttttgccagtcgcaataaattttgttagttctttcttgatgtgttctttaaaataataatgctttttttttttgggtgggggacagagkcttgtgctgtcgcccaggctggagtgcagtgacgcgatctcggctcactgcaagctccgcctcccgggttcacgccattcccctgcctcagcctcccgag

SEQ ID NO: 487375 - DNA, 201 bp, Homo sapiens
cgcggtgttagccaggatggtctcgatctcctgaccttgtgatccgcccatcttggcctcccaaagtgctgggattgcaggtgtgagccactgcgcctggscttttttttttttttttttttggttgggggacggagtctcactctgtcacccaggcttgagtacaacggtacggtttccgctcatggcaacctctgcctc

SEQ ID NO: 487376 - DNA, 201 bp, Homo sapiens
gaatcacttgaacccaggaggcggaggttgcagtgagccgagatcgcgccactgcactccagcctgggcaaaaagagcaaaactccatcttataaaaaaaataaaaataaaaattagctggttgtggtggtgggcgtccgtaatcccagctactcaggaggctgaggcaggagaatcccttgaacctgggaggtggaggtt

SEQ ID NO: 487377 - DNA, 201 bp, Homo sapiens
ctcacctgcccaatgaggaaagacagccaggtaaggggtggcttggaagggtgcatgggacccttgtaaatcttttcgcaactttgaatctataattattytgaagttaaaacgtttctaaaaagtcagatctgttgggggcacagtggctcatgcctgtaatctcagcactttaggaggctgaggcggacggatcacttg

SEQ ID NO: 487378 - DNA, 201 bp, Homo sapiens
attgatggggccagtctcccccctcccatcttgaggtcgttctccacattccttccagcacacctgtcctttccatagccctttttggacctttagaaccrcagatgataggaccagcccaatgagccacagtcagagagtagattgtgcatgtgtgagcacccagctactggggacgggggctctcccacgacccctcct

SEQ ID NO: 487379 - DNA, 201 bp, Homo sapiens
tcgctgggtctctacgtggccgagcagtttggggaagagaacgtgaacacctacttcgtgctgtccagctggtgggccaaggtgagggcgagctgcctgcygtgcgggcacccgagtcactcctgccgtgcgggcacccgagtctctcctgccgtgcgggcacccgagtcactcctgccgtgcgggcacccgagtctctcc

SEQ ID NO: 487380 - DNA, 201 bp, Homo sapiens
atgaggccaggagtttgagactagcctggccaacatggcgaaaccacgtctctactaaaaatacaaaaatttgggcaggtgcagtggctgacacctgtaaycccaacactttgggaggctgaggtggatagatctctcgagttcaggaatttgagaccagcctgggtaacatgaggaaaccccatctctgcagaaaataca

SEQ ID NO: 487381 - DNA, 201 bp, Homo sapiens
ttgcactccggatgtgctgagccctgcgttttccccaaatgtgggaaacttgactgcgtaatttgtggtagtggagggactgtgttcacactgtccccccygcccaaaaaaataaaaatacaaaaatcagtcgggcgtggtggctcacgcctgtcatcccagcactttgggaagccgaggtgggtggatcacctgaggtca

SEQ ID NO: 487382 - DNA, 201 bp, Homo sapiens
cgattgctggttttatgccttttcttccgtgataggaagtatgtccagactcatctggctggggatcctcaggagagcctgcggggggcagcagaggcccrcctgggccagggcgtgcaccagaccagaatcctgcggatttagtattgtgagggtagaagaccagcaagcagcatgacctcgtggttactgatcttatga

SEQ ID NO: 487383 - DNA, 201 bp, Homo sapiens
cctgcggggggcagcagaggcccgcctgggccagggcgtgcaccagaccagaatcctgcggatttagtattgtgagggtagaagaccagcaagcagcatgmcctcgtggttactgatcttatgaagaacacttgtctttcatatttgggactgtgttaaggttttctggaatatttttggtcgtagtaacgattctgcttt

SEQ ID NO: 487384 - DNA, 201 bp, Homo sapiens
tgtgttaaggttttctggaatatttttggtcgtagtaacgattctgctttaggagctttcttctctagtgttgcacagacctgagtgatttgaccagcagygctgcggtaacggaagaccactcgtgtcttcagactcgttctgttcctgggggtgcttgcttgttctaggccccctttgtatggagaggttcaaaccttg

SEQ ID NO: 487385 - DNA, 201 bp, Homo sapiens
cgagactccctctcgaaaaaaaaaagtgatgtgcgcttgggactgggagggcgaggcccgaggtacctgggtgcccgatgcccaggagggcatgagtgtcrtgttggataacctgctctccaagtaatagggttttgagaatgtttttttttttttttaattgagacagagtctgactctgtcgcccaggctggagtgcca

SEQ ID NO: 487386 - DNA, 201 bp, Homo sapiens
ggtgccatcttggctcactgcaacctccacctcctgggttcaagtgattctcctgcctcagcctcccaagtagcttacagtagggattgcgggcacctacsaccacgcccagctaattttgtatttttagtacagatagggtttcaccatgttgaccacctggtctcaaactcctgacctcaggggatccgcccaccttgg

SEQ ID NO: 487387 - DNA, 201 bp, Homo sapiens
tggctcactgcaacctccacctcctgggttcaagtgattctcctgcctcagcctcccaagtagcttacagtagggattgcgggcacctacgaccacgcccrgctaattttgtatttttagtacagatagggtttcaccatgttgaccacctggtctcaaactcctgacctcaggggatccgcccaccttggcctcccaaag

SEQ ID NO: 487388 - DNA, 201 bp, Homo sapiens
agacaatgctgtgagcaagtgtggccatgggcacagaatgtccctttggacgccgctgctgggggctgccaggggccctctggggtcgtgctttgaggccygtccggttcacgagggggtccgggcagcactgactgcttccgacctgcaggaggcgtaggagcggccctgcgggccctttcacggcagctgctgctgtat

SEQ ID NO: 487389 - DNA, 201 bp, Homo sapiens
tttcaccatgttgcccagaatgatcaaacttctaggttcaagcagtctccccacctcagccttccaaagtgttgggattacaggcatgaactgccatggcyggctggaaagtctttacatttgaaattcattttaagttaggaggaaaggcctagcacactggctcatatctgtaatcccatcactttgggaggctgaggt

SEQ ID NO: 487390 - DNA, 201 bp, Homo sapiens
gagtctctcctgccgtgcgggcacccgagtcactcctgccgtgcgggcacccgagtctctcctgccgtgcgggcacccgagtctctcctgccgtgcgggcrcccgagtcactcctgccgtgcgggcgcccgagtcactcctgccgtgcgggcacccgagtctctcctgccatgtgggcacccgggtcactccacgcctgca

SEQ ID NO: 487391 - DNA, 201 bp, Homo sapiens
ctgccgtgcgggcacccgagtctctcctgccgtgcgggcacccgagtcactcctgccgtgcgggcacccgagtctctcctgccgtgcgggcacccgagtcwctcctgccgtgcgggcacccgagtcactcctgccgtgcgggcgcccgagtcactcctgccgtgcgggcacccgagtctctcctgccatgtgggcacccgg

SEQ ID NO: 487392 - DNA, 201 bp, Homo sapiens
tctagatgttgggtgttctgtgaagatcaggtcatggtggttgatagtgttgttcagaacatcgatgtttttcctgatttttggtctgttctgtcgatttstgagaaagtattaaaattaaagttgggtcttgcatttttatccattctgtcagtcccttactttaattggagttttttgtccactaacattgaatttaat

SEQ ID NO: 487393 - DNA, 201 bp, Homo sapiens
gtgtcctagaccttgtgggtggcgccctgcataggggagcagggggaacgggtctgatgtccctgtgctggctgagggctcagagctgcccgcactccgtrgctcatgggatgtgctgggcctgcctttggcgccatgctgcagactccagtgggcctggtttctgcagaatgtccatggtggccgctgcagagttgcaga

SEQ ID NO: 487394 - DNA, 201 bp, Homo sapiens
gagtcactcctgccgtgcgggcacccgagtctctcctgccgtgcgggcacccgagtcactcctgccgtgcgggcacccgagtctctcctgccgtgcgggcrcccgagtctctcctgccgtgcgggcacccgagtcactcctgccgtgcgggcgcccgagtcactcctgccgtgcgggcacccgagtctctcctgccatgtg

SEQ ID NO: 487395 - DNA, 201 bp, Homo sapiens
tgttctctagatgttgggtgttctgtgaagatcaggtcatggtggttgatagtgttgttcagaacatcgatgtttttcctgatttttggtctgttctgtcratttctgagaaagtattaaaattaaagttgggtcttgcatttttatccattctgtcagtcccttactttaattggagttttttgtccactaacattgaat

SEQ ID NO: 487396 - DNA, 201 bp, Homo sapiens
aaggcgcctgaaggcgaggagacggagttctacgtgtcccccgaggatctggaggcacagctgcagtctgacgagaggggtgagtgcccgccccagggccygtgtgtgtgtgtggggcagagccagaatgggccctgaatggtgtcaacctgtcttgtcaaacaggagggcactgacactgtgccgcgagtgtttgtggtg

SEQ ID NO: 487397 - DNA, 201 bp, Homo sapiens
tttagtctgcattttaccaagaaccattgcacatactttatcctggccgactcagcgttgaactggtcacagctcggtaacacctttgtatgtgtaatgtrctccttatagcttaaagttatggtattcatgttctcttgccaacaaaaaatagcacttagtagaaactgacacactgtccacagttccatagggagtcag

SEQ ID NO: 487398 - DNA, 201 bp, Homo sapiens
gttgtgtgtgtgtcttttcctcagtaccagatggtcttgattactgtagatatatagtatatgtcttgaaatcaatagggtaaattctctaacttttgttmtttttattaatgttgctgtggctaatctgtctgctacatttccttatacatttaaaaaaatcagtatcagtttctgcaaaaaaaaatcctcttggattag

SEQ ID NO: 487399 - DNA, 201 bp, Homo sapiens
ggctggcaggcgagaaggaaaacccaggccaactcctcctcccacccctttctattcgggacccccgtggactgggacgacactcacctgcacagggcagygcagttggcttcatggagcccccagctcaggtgctgctcttaccaagaaacaccctcccaggcacaccctgaagtcatgtttcatctgggtgccccacga

SEQ ID NO: 487400 - DNA, 201 bp, Homo sapiens
tagtcccagtgacttgggaggctgaagcagaagaatcgcttgaacccgggaggcagagattgcagtgaactgaggtcacaccactgcactccagcctgggyaaacagagcgagactccacctcaaaaataaaaattaggaaagggtaggtatgtgtaaaataggtgaaggatggggatcaatcagaggaaagtgtggcaaa

SEQ ID NO: 487401 - DNA, 201 bp, Homo sapiens
aaattagctgggtgcagtggtgcgtgcctgtagtcccgtgcctgcggcatgggaatgggttgagcctgggaggcggaggttgcagtgagttgatgacttargatttttcttctcggtcactttgcaagccggggacccctggccagtgatgccccacctgggccctgcttggccacactggcgtgccccaactcacctgtg

SEQ ID NO: 487402 - DNA, 201 bp, Homo sapiens
ggaccacagacatgagccaccatgcctatttaacttaaaaacaaaaacaaaaaaccgggcacggtggctcatgcctgtaatcgcagcactttgggaggccragggggggattgactgaggccaggagtccgtgaccagcctggacaacatggcaaaaccctgtctctaaaaatacaaaaattagctgggtgcagtggtgcg

SEQ ID NO: 487403 - DNA, 201 bp, Homo sapiens
acaaagccagaccgtgtctctatagaaaattttaaagttagctgggcatggtggcacattcctgtagtcttagctgcttgggatgctgagaagggaggctytcttgagtccaggatttcaaggctgcagtgagccaagatcgcaccactgcactccagcctgggcaacagagaaaaaccttgtttctaaaaaaaaaaatta

SEQ ID NO: 487404 - DNA, 201 bp, Homo sapiens
ttgaaacatgaaagctgattttctgagcagcagatacggtcagtggcaaagctgcatctgaagggcggcctgggaaggggccctgtgctggccccgggtcsgccccagaggagtccacacagcaccacctccagaaggggctgggcccggggtcctgcaggcggcaccttttggtagagtttgtttccctggaaaatgggg

SEQ ID NO: 487405 - DNA, 201 bp, Homo sapiens
ttgttgaggctgcaggaatggcagggagccctaagttccagtggccactggtgcagtcctcagagagcagttggcacaccgcctcaggctgagcctgcccrttcttgggcacccagaagttccactcttaggtatacaccagaagaattcttcctcgactgtttgtgctgaaggacaaggtttaagtttttaaaatttcca

SEQ ID NO: 487406 - DNA, 201 bp, Homo sapiens
cacacgtggaccattgtgggtccctgggaggccggcagccaggccacggaatccacacgtggaccattgtgggtcccttgggaggccagcagccagactayggaatccacatgtggaccatgggaagtcagtctcttgcgtgtcctagaccttgtgggtggcgccctgcataggggagcagggggaacgggtctgatgtcc

SEQ ID NO: 487407 - DNA, 201 bp, Homo sapiens
acctccaccttccatgctcaagcaatcctcctacctcagcttcccaagtagctaggaccacaggtgtgcaacaccatgctcagctaatttatttttaaaaycttatttaagtcatatggaccctgaaacattgcaaaaattccacattacaccggattttaaataaacagcaatatgatcagttctcctgtgtttgataag

SEQ ID NO: 487408 - DNA, 201 bp, Homo sapiens
gctcactgcaacctccaccttccatgctcaagcaatcctcctacctcagcttcccaagtagctaggaccacaggtgtgcaacaccatgctcagctaatttmtttttaaaatcttatttaagtcatatggaccctgaaacattgcaaaaattccacattacaccggattttaaataaacagcaatatgatcagttctcctgt

SEQ ID NO: 487409 - DNA, 201 bp, Homo sapiens
ggagaacctcatgatatcatgcaaatcaagaggttccaatcttcgtgtttactttaagaatattcgtgaaactgcccaggccatcaagggtatgcatataygaaaagccatgaagtacctgaaagatgtcactttacagaaacagtgcgtaccattccgacgttacaatggtggagctggcaggtgtgcccaggccaagca

SEQ ID NO: 487410 - DNA, 201 bp, Homo sapiens
agcaatcctcctacctcagcttcccaagtagctaggaccacaggtgtgcaacaccatgctcagctaatttatttttaaaatcttatttaagtcatatggaycctgaaacattgcaaaaattccacattacaccggattttaaataaacagcaatatgatcagttctcctgtgtttgataagagctactttcccaagcacag

SEQ ID NO: 487411 - DNA, 201 bp, Homo sapiens
agatggggttttgccatgctggccaggctggtctcgaactctcgacctaggtgatccgcctgcttcagccttccaaagtgctgggattacaggtgtgaggmactgtgcctggccagtgtttagtgttaatagtggttatttctggaatgatgggatctggggctgctttttttcttttggtttaactgtatttttccaaaa

SEQ ID NO: 487412 - DNA, 201 bp, Homo sapiens
ccccatctgccctgagaccttggcattcaaggcgcccaggggtccagccgcctatatcttactacgcgtggccaccctttcctgcggatgccccctgcccrccgcccactttcccacctttgcccgagctgtgccctcagccaggaccaccgtccccctggtccgccccgtcacaatcctgctctgagaaggccatggtca

SEQ ID NO: 487413 - DNA, 201 bp, Homo sapiens
agctccatgtgggcaaagtcagaccagccatgtgctcaggacacctccagcacctgcacagtgcccggcacacactaggtgctaggtcacgtctatcaatkcatgagttaggagagcctgggtcccatgagttcttggacaaatcactttcctttccagcctgaggtcccggctaggctcacggccagagacccaaaggtg

SEQ ID NO: 487414 - DNA, 201 bp, Homo sapiens
ttgtcccagctactccggaggctgaggcaggagaatcgcttgaacccgggaggcggaggttgcagtgaaccgagatggtgccactgcactccagcctggcracagagcgagactccgtctcaaaaacaaaaacaaaaataaataaataaaataaaataaaagaaagaaagaaagaaaagaaagtgctcccacaatgccaac

SEQ ID NO: 487415 - DNA, 201 bp, Homo sapiens
aattagctgggcgtggtggcacgtgcctgtaatcccagcgactagggaggctgaggcaggagaatcgcttgaacccgggaggtggaggttgcagtgagccragatcgcgccactgcactccagcctgggcaacaagagcaaaactccatctcaaaaaaaaaaaaagaaatataataatataacaatggtacaaaatcatac

SEQ ID NO: 487416 - DNA, 201 bp, Homo sapiens
gaagcccacactccctctgcccccacagctcccaaatcctctggtttaaggcctaggagggctcacagtcctccccgcgtccccgcgtgcccggcctggcyggtctgacctgcagtagctgtcgctgaccatcccatagaccacgatctcctcacacagctccagcgcgaggatcatggtgaaccagccggtgctgaggaa

SEQ ID NO: 487417 - DNA, 201 bp, Homo sapiens
ctacaaaaaattagctgggcgtggtggcacgtgcctgtaatcccagcgactagggaggctgaggcaggagaatcgcttgaacccgggaggtggaggttgcrgtgagccaagatcgcgccactgcactccagcctgggcaacaagagcaaaactccatctcaaaaaaaaaaaaagaaatataataatataacaatggtacaa

SEQ ID NO: 487418 - DNA, 201 bp, Homo sapiens
aatggaaggttcacactgtggaataatatgtaacagggtaaaatcaatgatctacaattacatggatgaatcttagagacacaaggagtgaaaaagaggtmttggaagataagtaaaaactacacaataggggccgggcgcggtggctcatgcctgtaatcccagcactttgggaggggaggcaggcggatcacttgaggt

SEQ ID NO: 487419 - DNA, 201 bp, Homo sapiens
gctgcccagggctgagcctgacttcgtctccctggaggatccctctcggctggaacgggtcagaggccatggagtgtgtgcccaggacgtggctcggcacmggcaccagggcgggggtctaggggtgccggcctgttggggagcggcttgctcacgctggggaggcggcagccccgagcgctgggccaggagcatggactc

SEQ ID NO: 487420 - DNA, 201 bp, Homo sapiens
gagggcacaatggtgagaagttccctatggattcactcactgcccacaatggctggtgaggtgatgattccttccccggagaggcaactccatccttgctrgggccacatggagacagggacatgcccaaatggcccgtgctcccagggtagatgaggatcataagtccacagtagaactgtgaccaggaagtcccacagc

SEQ ID NO: 487421 - DNA, 201 bp, Homo sapiens
ccacccctgccccacccctgccgcaagctcacgacaggaagaagctggccttgctcttggaggtgctgaggaactgcaggtaggggccgccggggcccagsgcagcctgatagtcctcctccgccaggcccagggagcggcgcagccaggcaaaggcggggccggccagcgtgcccagctcgaagccctgcaggggaggaa

SEQ ID NO: 487422 - DNA, 201 bp, Homo sapiens
agaaagaaagaaagaaaagaaagtgctcccacaatgccaacagctgttagtcttgtggttaatcactgttcaaggcccgcctctccagtgtgtcagtgaarcactcctcccctgaccccagtgcagcgactttcccggaatatcaaggaatgtgtgggaatgcgttctaagcatcacccacgcactgaatccaggcaatgc

SEQ ID NO: 487423 - DNA, 201 bp, Homo sapiens
catctgtcaccaccaaggaagggcagggccagcccagggcagatgaaccccacgaaaaatgctggctccacatgtcaagtgcctgctatgtcctaagccayggggatagtccactgtctgaatctgtgaggtggggacaattttaaccttttacaaatgacaaaacaggcccagagaggggtactaatctgccaagaccac

SEQ ID NO: 487424 - DNA, 201 bp, Homo sapiens
tcccgcctgccatgtctctgggcccaggctcactccagcaggatttgcttcagggctggcttcccttcttgggccccaagaacgacagcaaccatctcaayaacagtaataacaaggatgagaaacagagcagcttactctctgccaggcactttgcaaacacacctcattgaatccttatggtggcctatgagttgggta

SEQ ID NO: 487425 - DNA, 201 bp, Homo sapiens
tgcggtaggtgcggccgccgagcacccggtccatgtgcctgccctggccccacaccatgtagagcgtgtctcgggccttctggaagtagtgtgaatagttscgcagcagcagcggcacgcttgtgtgtgagacgacacgcagggtgctgcgctggcccacatccgcctcaaagcccacggtgggcgcctggttcatgcgga

SEQ ID NO: 487426 - DNA, 201 bp, Homo sapiens
atatcaaggaatgtgtgggaatgcgttctaagcatcacccacgcactgaatccaggcaatgcatggtaggagctcttgttgcccattttacagataaggaractgaggttcagagaggcaaagcgccttgcggggccgcccagagccggctccagagccttgtttacagggagctgcccagggctgagcctgacttcgtct

SEQ ID NO: 487427 - DNA, 201 bp, Homo sapiens
tccaggacggatgggcgaacacgatgggcctcttcttggcccagcgggagaagaccgccttctcagtgatgaagcggtgggcgcttcggggcgcctgctcrtgtgccaggtacatctgacactcatctagccggcccttctcaaagtagtggtaaggcactgaggggtggctcttctccctgcggggtggggaacagggct

SEQ ID NO: 487428 - DNA, 201 bp, Homo sapiens
acccagcacgtggcaggaggcaggatccataaattaaatgtttttgtggagtgtgatggcttgggatgggacatcccggaggcctcgcaacggcatggcgrctggcaggacgacggaagctactcagtcctccaggacggatgggcgaacacgatgggcctcttcttggcccagcgggagaagaccgccttctcagtgatg

SEQ ID NO: 487429 - DNA, 201 bp, Homo sapiens
cactccccttcaagtcatgaggcctgagatggctccaagtgtcgccagaatggggcgggaaggaaccttaggtccacccagcacgtggcaggaggcaggawccataaattaaatgtttttgtggagtgtgatggcttgggatgggacatcccggaggcctcgcaacggcatggcgactggcaggacgacggaagctactca

SEQ ID NO: 487430 - DNA, 201 bp, Homo sapiens
tggcaggaggcaggatccataaattaaatgtttttgtggagtgtgatggcttgggatgggacatcccggaggcctcgcaacggcatggcgactggcaggaygacggaagctactcagtcctccaggacggatgggcgaacacgatgggcctcttcttggcccagcgggagaagaccgccttctcagtgatgaagcggtggg

SEQ ID NO: 487431 - DNA, 201 bp, Homo sapiens
agcaggactctgtggcgctgactcagccctgtgggatccagatgggtggaaatgtggagtcagactccagttcctgctgcaattccctgccacctccgagyttcactggcccatcacctcctgagtgatgggcgtgacaacactctatgtcacaacttcctgctaaagtaaggacaagaaatttccactcagctcatgcca

SEQ ID NO: 487432 - DNA, 201 bp, Homo sapiens
gcagtgaaccgagatggtgccactgcactccagcctggcgacagagcgagactccgtctcaaaaacaaaaacaaaaataaataaataaaataaaataaaakaaagaaagaaagaaaagaaagtgctcccacaatgccaacagctgttagtcttgtggttaatcactgttcaaggcccgcctctccagtgtgtcagtgaagc

SEQ ID NO: 487433 - DNA, 201 bp, Homo sapiens
ccacatccgcctcaaagcccacggtgggcgcctggttcatgcggaacacgcactcggcactgtcgatctcagcacccaggcctgagcccagcatttggccrgagctggacaccacggcacagctgcggcagggctcgcggaccagcggctgcagggcaggcagggagaaagagacagagaggcatgaacacgcagcttaca

SEQ ID NO: 487434 - DNA, 201 bp, Homo sapiens
aaattagcctggcgtggtggcacatgcctgtaatcccagctactcgggaggctgaggcaggagaatcgcttgaacctgggaggcagaggttgcggtgagcygagatcacgccattgcactccagcctgggcaacaagagcgaaactccgtctcaaaaaaaaaaaaaaaaaaaaaaaaaaagaaggatgcaggtcagtatgt

SEQ ID NO: 487435 - DNA, 201 bp, Homo sapiens
cctggggtggccccatctgccctgagaccttggcattcaaggcgcccaggggtccagccgcctatatcttactacgcgtggccaccctttcctgcggatgycccctgcccgccgcccactttcccacctttgcccgagctgtgccctcagccaggaccaccgtccccctggtccgccccgtcacaatcctgctctgagaag

SEQ ID NO: 487436 - DNA, 201 bp, Homo sapiens
tactaaaaaaatacaaaattagccaggtgtggtggtgcatgcctgtagtcctagctaccctggaggttgaggcaggagaatcgctggaccctaggatgtgsaggttgcagtgaccgagatcgtgccgctgcactccagcctggtgacagtgcgagactccatctcaaaaataaataaataaaaataaaagcaaaagtcaag

SEQ ID NO: 487437 - DNA, 201 bp, Homo sapiens
tactacgcgtggccaccctttcctgcggatgccccctgcccgccgcccactttcccacctttgcccgagctgtgccctcagccaggaccaccgtccccctsgtccgccccgtcacaatcctgctctgagaaggccatggtcagtacagcatgtcagctgccagtgcgaatcccggtttcaccacttactggctggggggcc

SEQ ID NO: 487438 - DNA, 201 bp, Homo sapiens
aaaattagctgggcgtggtggcacgtgcctgtaatcccagcgactagggaggctgaggcaggagaatcgcttgaacccgggaggtggaggttgcagtgagccaagatcgcgccactgcactccagcctgggcaacaagagcaaaactccatctcaaaaaaaaaaaaagaaatataataatataacaatggtacaaaatcat

SEQ ID NO: 487439 - DNA, 201 bp, Homo sapiens
ctcagttctcacatttctcaaatggggatgagtctaccctcccagggaggctcccagtcagcatgaaggaatgacagttaccactactgagatgaagacaggaagacggtgccaatgatgatgacgtcagcgtcctggaagtggaatgaccagctaaaaagggcaaggaccctttctaaagcaaaaattaggctgggcgcg

SEQ ID NO: 487440 - DNA, 201 bp, Homo sapiens
tctttctttctttctctcttttctttctttctctctctcttttctttctttctctctcttctctctttctttcccttccttcctccccttctttcttccctttttttttttttttggagatggagtctcacctgtttctttctttttttagagaaggtcttactctgtcacccaggctggagtgcagtgaaacaaacacgg

SEQ ID NO: 487441 - DNA, 201 bp, Homo sapiens
cagtcacaactccaaggccccttcaccaatgaaccccaggctctcggctgccccaaccagggcggccagcctgagaagtgtggcaccaaaaggtggtaggrgcggctggggagggaggaccaggactggcacaaggtcatgatgctggtgagttgggggccatcagccccagggacaaaggccacttgacagacctggagg

SEQ ID NO: 487442 - DNA, 201 bp, Homo sapiens
cagatcccgagagccagggttcgagtcctggctctgcctcttgcaagctggatgactctgggccagagatggacgctgtgagcctcaagagcccgtgtgtwaaacgcagacggtcacatccgccttccagaacaagtgcgtagatcaagagatggagactgcagggaccctgctagtggtcctgggctcctggtgagggag

SEQ ID NO: 487443 - DNA, 201 bp, Homo sapiens
gtcacaactccaaggccccttcaccaatgaaccccaggctctcggctgccccaaccagggcggccagcctgagaagtgtggcaccaaaaggtggtaggggyggctggggagggaggaccaggactggcacaaggtcatgatgctggtgagttgggggccatcagccccagggacaaaggccacttgacagacctggaggtg

SEQ ID NO: 487444 - DNA, 201 bp, Homo sapiens
ggactggcacaaggtcatgatgctggtgagttgggggccatcagccccagggacaaaggccacttgacagacctggaggtggggtgagcccccaaatgccrtgaattactcagggagtggaggggggagacacggctcccccctccactccccttcaagtcatgaggcctgagatggctccaagtgtcgccagaatggggc

SEQ ID NO: 487445 - DNA, 201 bp, Homo sapiens
ctgtgggaggctcacctggccgtgcggaagatgaggctgctgcccgggcccctctcatcctcgtggagacgttggaaggctatcaggaggctgtaatccarcacgttgagctcccggaggaaggtggtatccagttccatctggcggaggaaccagctccgctggggccctgccggagcatcagtgcccccacctgagcgc

SEQ ID NO: 487446 - DNA, 201 bp, Homo sapiens
tagagacgaggtttcaccatgttggcccggctggtttcaaactcctgacctcaagtgatccacccaccttggcctcccaaagtgctgggattacaggcgtragccaacgtgcccggcccctcagccatctttctttggtgggatctgataggtcagtggagtggcagtgtgcattgcagctgaatggcttccccgaggtcc

SEQ ID NO: 487447 - DNA, 201 bp, Homo sapiens
ggactctgtggcgctgactcagccctgtgggatccagatgggtggaaatgtggagtcagactccagttcctgctgcaattccctgccacctccgagcttcmctggcccatcacctcctgagtgatgggcgtgacaacactctatgtcacaacttcctgctaaagtaaggacaagaaatttccactcagctcatgccagcac

SEQ ID NO: 487448 - DNA, 201 bp, Homo sapiens
gccaacatgatgaaaccccgtctctactaaaactacaaaaaattagctgggcgtggtggcacgtgcctgtaatcccagcgactagggaggctgaggcaggrgaatcgcttgaacccgggaggtggaggttgcagtgagccaagatcgcgccactgcactccagcctgggcaacaagagcaaaactccatctcaaaaaaaaa

SEQ ID NO: 487449 - DNA, 201 bp, Homo sapiens
gaccaccgtccccctggtccgccccgtcacaatcctgctctgagaaggccatggtcagtacagcatgtcagctgccagtgcgaatcccggtttcaccactyactggctggggggcctcgagcaagccatgtgacctctctgagcctcagtttcctcatctgtgaaatgggaacaataagagtcggtaactcaaggggttgt

SEQ ID NO: 487450 - DNA, 201 bp, Homo sapiens
ttgacctcgtgatccttccaccttggcctcccaaagtgctcggattacaggcgtgagccaccgggcctagccctaatttttgtatttttggtagagcccarggtttcaccatgtcagccaggctggcctcaaactcctgacctcaagtgatcctcccgccttggcctcccaaaatgctgggattacaggcgtgagccaccg

SEQ ID NO: 487451 - DNA, 201 bp, Homo sapiens
tagctgggcgtggtggcacgtgcctgtaatcccagcgactagggaggctgaggcaggagaatcgcttgaacccgggaggtggaggttgcagtgagccaagrtcgcgccactgcactccagcctgggcaacaagagcaaaactccatctcaaaaaaaaaaaaagaaatataataatataacaatggtacaaaatcataccat

SEQ ID NO: 487452 - DNA, 201 bp, Homo sapiens
tgtaaaaccagctagcaccagtcctcctctgaggatggcaaggttccgctggtgggactttttttctcactttacagatgacgaaagtaaggcctgagccrgactagactccctcacagcagccacccagggctgccctctgccttcctgttttgcagggagaccaaacccactttctttctttctttttttttttttttg

SEQ ID NO: 487453 - DNA, 201 bp, Homo sapiens
tccacctccgcctaccagactccatcccgcccttacctctgcctgacacctgttgagagctcctcgctccgtgctgtggctccgctgccagcctgctcctwgcttcgccagctcagggctctcctcccccctcccattcctgcagaaacttctgggtccacctggcactgggcaggaggaagccgggcacaaaagcggtgc

SEQ ID NO: 487454 - DNA, 201 bp, Homo sapiens
aacattccagggagagggaacagcaggtgcaaagtcctgcaggtagaaataggcatggatgtctgagccccagacggccagtatgggtagaacagggagaytgaaggagacacaaagtcacagaggcaggcagaggcaggatcacgcagggcaggcaggccaggagtggtgggggcgggaagcctaagtcaaggtggcagc

SEQ ID NO: 487455 - DNA, 201 bp, Homo sapiens
atgaattactcagggagtggaggggggagacacggctcccccctccactccccttcaagtcatgaggcctgagatggctccaagtgtcgccagaatggggygggaaggaaccttaggtccacccagcacgtggcaggaggcaggatccataaattaaatgtttttgtggagtgtgatggcttgggatgggacatcccggag

SEQ ID NO: 487456 - DNA, 201 bp, Homo sapiens
cccagagcaccaagtcgccctggaacttcctgggtgatgagttgtacgagcagtcagatgaggagcaggactcggtgaaggtgagtgcggccggtgtgggygggacttcccggtgccttcctgggcgcaagaggccaagaggaagtgtgccaggcctgggctgtgggacctcccgcctggtgctcctctgcccacagtttc

SEQ ID NO: 487457 - DNA, 201 bp, Homo sapiens
ggtcaagagatcgagaccatcctggccaacatagtgataccccatctctactaaaaataaaaaaattccggaggctgagacaggagaatggcgtgaacccrggaggcggagcttgcagagagctgagatcgcgctactgcactccagcctgggcaacagagaaagactccgtctcaaaaaaaataaaaaatacaaaaaaaa

SEQ ID NO: 487458 - DNA, 201 bp, Homo sapiens
agcctgggtgacagagtgagaccctgtctcaaaaaacaaaagaccgggtgaatcacagccaatagtgagtactgtgaagggcagagtggtgggaggatgcrcattaataggggtccgggggcccctctgaggacaggacatttaaacagaggcctcagatatccagggagagagctgtgcggatgtgacagaaggccccac

SEQ ID NO: 487459 - DNA, 201 bp, Homo sapiens
ctctcactgcaggcttcatcaccatgacgccccagctcttcatcaactacaagctcaagtctgtggcccaccttccctggcgcatgctcacctacaaggcyctcaacacattcatcgacgacctgttcgcctttgtcatcaagatgcccgttatgtaccggatcggctgcctgcgggacggtgaggcccggtgggcaggtg

SEQ ID NO: 487460 - DNA, 201 bp, Homo sapiens
tagtgataccccatctctactaaaaataaaaaaattccggaggctgagacaggagaatggcgtgaacccgggaggcggagcttgcagagagctgagatcgygctactgcactccagcctgggcaacagagaaagactccgtctcaaaaaaaataaaaaatacaaaaaaaatacaaaaattagctgggtgtggtggcacgtg

SEQ ID NO: 487461 - DNA, 201 bp, Homo sapiens
tggagtcttactctgtcacccagactggagtccagtggcatgatctcggctcactgcgacctccacctcccaggttcaagcgattcttttgcctccgcctmccaagtagctgggattacaggcgcccgccaccacgcccggctaatttttgtatttttagtagagatggggtttcaccatgttggccaggttggtctcgaa

SEQ ID NO: 487462 - DNA, 201 bp, Homo sapiens
tccaaaagttcagaaatgttgctctttctaagcttctgtgccttcggttcttttccttttcttttttaaaaaatttaattaattaattgattaattttttkgggacaagctctctatctcccaggctggagtgcagtggcgcaatcacgtctcactgcagccttgaccgtcagggctcaagtgactctctcacctcagtcc

SEQ ID NO: 487463 - DNA, 201 bp, Homo sapiens
agggtctgcatgcagaccagggcagtgccagctacccccacacactggcaaacggtggcatctgggctccctccccagatgtggtctttagggacatcttmtctccttgccagccctgtgactaccttctcagggcctccctgacttggtcactagccccaggtcaggcgccagcatgtgctaagtcagaaggaagtcagg

SEQ ID NO: 487464 - DNA, 201 bp, Homo sapiens
tcctgcctcagcctccggagtagctgggactacaggcgcccgccaccatgcccagctaatttttttgtattttttagtagagacagggtttcaccatgttrgccaggatggtctcaatctcctgacctcgtgatccgcccgccttggcctcccaaagtgctgggattacaggcatgagccgccgcgcccgtcctcgttcat

SEQ ID NO: 487465 - DNA, 201 bp, Homo sapiens
ggactcaccaccttgctgcttctctcctcaggatcttcatcatctgggccatcagcagttggttccgccgagggccggcccctcaggaccaggcgggcccyggaggagccccacgcgtcgccagccgcaacctgttccccaaagacactttaatggtaactgccgggtggtagggcagacttgggaggtgatggggtgtgg

SEQ ID NO: 487466 - DNA, 201 bp, Homo sapiens
atcctctcacctcagcctctcaaagtgctggaattacaggcatgaaccaccccacctggctggactttctgacctgcactgagaggtgactcccacagagwcctcaagcccagcccccaggccttgccacgagatccaaggaaggaccagggcctggcaggcccagcagggggatctgcttccaagggcttggatctaagt

SEQ ID NO: 487467 - DNA, 201 bp, Homo sapiens
agtcccagctacttgggaggctgaggtgggagaatcagcatgagttttggccaggacaaacattcaaaccatagcattgtccgtcctcttgttttcgagargttaataattgttgtcatctttctgcttgcctggctctttttttttttttttttgagacagggtctcactatgtcgcccaggctggagtgcagtggacta

SEQ ID NO: 487468 - DNA, 201 bp, Homo sapiens
tgccagctgcctgcagagcctttgagagggtgctcggggtccatctccttgtcttctcctggccctgtccccctgagagagctttccagggctccaccctyccaagctcccaccctgtcctatccccttcccatgtcctctccctctcccacaccaccacccctggggaccccaggactgacttctacacgccagcatcgg

SEQ ID NO: 487469 - DNA, 201 bp, Homo sapiens
aggtcacattgatctcagcaggtgagtgcaaggtggatgccaggagaccgtgagccgttgctggtgggcaggggtccgggctctggaggctgcaggtgccrgcaggtctcacgtcccctcctttcccacctcccaaccacagtgatcaacaaatacaagcgcagacgatttcagaaaaccaagaacctgctgacaggagag

SEQ ID NO: 487470 - DNA, 201 bp, Homo sapiens
caaccacagtgatcaacaaatacaagcgcagacgatttcagaaaaccaagaacctgctgacaggagagacagaagcggacccagaaatgatcaaggtaaaygggcagggttgtcagggcctatagggaccaagccaggccattcacagctcatcccagaccactggggctgtcatctgtcaccaccactgaaccaccatgc

SEQ ID NO: 487471 - DNA, 201 bp, Homo sapiens
ggcaaggagacttgatgagataatgaggaagacttgggcagagaggggccagctggaggtagcagggagtagcacccaggagcccacagactgggtttccrtctgcgtacttgccacacactatgtgaccccttggcatgagccccgtttgcctcatctgcaaaatggggtggtaacatgacccattgcataaggttgaca

SEQ ID NO: 487472 - DNA, 201 bp, Homo sapiens
catgttggtggcttcaggccttttttggaaccgtctgctgcctctttatagtcatgtattcaactggtcatcaccgagcctgtgcaggcgccccatgtgtrttcaaacaggccctgcccctacccgcatttccgcacagagtttgcagactggttgcagggacagacagcaggcaggtaaaccactggctaagtggttttg

SEQ ID NO: 487473 - DNA, 201 bp, Homo sapiens
tagtgagaccccatctcagaaaaaaaagaaagcaaagattaagattttctcgggaaccctggggaggaagtgtacagagagtgatagtccccgagcacttycacctgcctctgaggtccttccccccatgttgcctcagagggctgaggactatgggcctgtggaggtgatctcccattggcaccccaacatcaccatcaa

SEQ ID NO: 487474 - DNA, 201 bp, Homo sapiens
gcgtcccggccccctcgcctcccctccctgtcgccctttccctggacagatcaggccggggcggtgggaggcccgcctcaggtcagggcccagcgtgtgaygtaggggccggggcaggccagggtttgtttgtggaggcgctgtctgtccctctgtccctctgtgtttccagccatctcgccctgccagcccagcaccact

SEQ ID NO: 487475 - DNA, 201 bp, Homo sapiens
catgagttttggccaggacaaacattcaaaccatagcattgtccgtcctcttgttttcgagaggttaataattgttgtcatctttctgcttgcctggctctttttttttttttttttgagacagggtctcactatgtcgcccaggctggagtgcagtggactatctcagctcaccacaatttccacctcccaagttcaagc

SEQ ID NO: 487476 - DNA, 201 bp, Homo sapiens
acagccaggccccagagcccaagctcagcctggctccaagcacacacacgagaatatggctttagtaggaactgcaggattcatagttgctgtcactcccrgtgggctggggagccgggcagttaatctgtggttaacctgcagtgggcactaagagacttcctctctctgcgggtggtcctgtgttgggggggtggtccc

SEQ ID NO: 487477 - DNA, 201 bp, Homo sapiens
tgtcctatccccttcccatgtcctctccctctcccacaccaccacccctggggaccccaggactgacttctacacgccagcatcggtccgcaatcaagtgycatccagcccacaaactgttttcaaaaaatgtcttatcacttgccagcttttgaaattgaggcagtatcacttaaaagccacaatttctggcttatttta

SEQ ID NO: 487478 - DNA, 201 bp, Homo sapiens
aaatgtcttatcacttgccagcttttgaaattgaggcagtatcacttaaaagccacaatttctggcttattttataaaactgggttacatggtcacccacrgggcagccgtgggctggagctgagccacagctgcccccttcagtggggacctgcctgccctttgcctcagtcccctctgctgaggtcaaggcgcccttta

SEQ ID NO: 487479 - DNA, 201 bp, Homo sapiens
tgaggcaggagaattgcttgaacctaggaggcagaggttacagtgagctgaagtcatgccactgctctctagcctgggcaacagagtgagactccatctcaaaaaaaaaaaaaaaatgaggatgacgtttctgctaataagcagtaggccctgggccaagaagtggtgaggcttttcttccttctttagggaagtgacatc

SEQ ID NO: 487480 - DNA, 201 bp, Homo sapiens
cacccacagggcagccgtgggctggagctgagccacagctgcccccttcagtggggacctgcctgccctttgcctcagtcccctctgctgaggtcaaggcrccctttagctcctcatggtgtggcctagaaatgtcccctgtcctccagtctctgtagaggggccctgttgggtctctccagacatctgaggcctgcgggt

SEQ ID NO: 487481 - DNA, 201 bp, Homo sapiens
tggccagcctgccgctccgcgtctccttctgcccactctcgctttggcgctggcagctctatgctgcccagagcaccaagtcgccctggaacttcctgggygatgagttgtacgagcagtcagatgaggagcaggactcggtgaaggtgagtgcggccggtgtgggcgggacttcccggtgccttcctgggcgcaagaggc

SEQ ID NO: 487482 - DNA, 201 bp, Homo sapiens
cctggctcccagtgtcccttcacccactccccgcagcactcccttggcctctgcctcttcccctagtgccatctccccgtctcttctgtctttgtgagtcrccctcctctctctccccatctgcccatctctgacccagtctcctcctggctggcccaccttcagcctccctctacaggcggccccaggggcagccctcgg

SEQ ID NO: 487483 - DNA, 201 bp, Homo sapiens
aggttctaaggctgaccatactgatggccagcgtttgaggagaagcagccacatgccaggcactgtcctgggtaccctccccagtagctccttgagccctrtgggagccagaggctcagggatgtcacttgcccagtcacacggttcctaaggggcagatggttccagccccaactctcatcttctaggccctgcaggcca

SEQ ID NO: 487484 - DNA, 201 bp, Homo sapiens
ggaggatcacctaagccccggagtttgagaccagcctgggcaacaaagcgagattcgtttctacacaattttttttaagaattagctgggcatggcagcgygtgcctatggtctcagctactcgggaggcttgggcctgaaaggtcaaggctgccgtgagccatgatcacaccactgaactccatcctaggcaacagagtg

SEQ ID NO: 487485 - DNA, 201 bp, Homo sapiens
gttggccgtaagacccctggaattggaactctaaaaacacagaaaggatatgagctcaggagacttgaacgaaagagttgtcttaggaagaggggtcagamgacaagggtgctgggcaaaaggctagttcttcgaatcagaatacggtggccagaaaggttcctctgacgaaagaggggcgtggttcgaagccgtacagtg

SEQ ID NO: 487486 - DNA, 201 bp, Homo sapiens
cggaggccgagaggggactgagggggttcttccccagccggggggcctcccacggggcgtgtcctacctcttgtcacggaatcccgtgcactgggggctcyttggccagagggaccttgaatacccggcccaggcagggccggaccgcccgggaggccggacggtgccgggaacagggccctgttgcgggtcggttcccct

SEQ ID NO: 487487 - DNA, 201 bp, Homo sapiens
ccatagccggaagtggccttcctgagaggcgtggctgcggcactcttgccggatagggtggcccggcggggctaggaaagcgtgaaatctcgcgcgattgygctgcgaagtcggggacggggcggggctggcggcgggggcggggacccggagcgggaagatggcggcggcgcaggaggcggacggggcccgcagcgccgt

SEQ ID NO: 487488 - DNA, 201 bp, Homo sapiens
gcctttatctctcccgtgttaaatgcagaggttggacaggagggccagccatatccctgctgtcaggggacgaagagaggagactgacatgtaaacagttrtaatcctgaatgattaggttggtgacaaaagtctgtgtcagggactgggggagcccagagaaagagcaagtggtatcacttgggtaggacacatggatga

SEQ ID NO: 487489 - DNA, 201 bp, Homo sapiens
ttgggtaggacacatggatgaaatttgtgtgatagagcccactgtatctgctctgaatcttttcagcattctcagccagggcctggcttcagggacagctyaggaaatgtttgttgagttagtgctggaatgaaggctcagttcctgtcttcaagggtttcccagtcttgctgaaaggaggtcgtttcccctctgggtttc

SEQ ID NO: 487490 - DNA, 201 bp, Homo sapiens
tcagacccattgaaacccatacttggacccctaaatttcccaatagctaggctggccttgaggagggggccttgtgcctgtctgatttcccttccccagcygacccccgccccatagatctcctcatcagaatgtggctttctctgtctcagcctaagggtctcacccagacgacccagacgtcaaagggagctcctcagg

SEQ ID NO: 487491 - DNA, 201 bp, Homo sapiens
aagggtctcacccagacgacccagacgtcaaagggagctcctcagggaggcctctctgaccacccactccaaagtggatccctgttcccaactcagttgcwgtcacttccccctgcttgttttccatgtaccatttttaattatcctgtttaccgttctagtgtgtttccttctagatccccagctctgggtaagcagggc

SEQ ID NO: 487492 - DNA, 201 bp, Homo sapiens
acagtgggttttttttttttttttttttgagatggagtctcactctgtcgcccaggctagagtgcagtggcataatcttagctcactgcaacctctgcctyccgggctccagtgatcctcctgcctcagcctcacgactagctgggattacaggcatgtgccaccacgtccagctaattttttgtatttttagtagagatg

SEQ ID NO: 487493 - DNA, 201 bp, Homo sapiens
aagtgcagggtactaagctaggctgactcatggaaatttcccggcaaccctgtgaagcaggaactgttattattctcatttaacatgtgaggaaactgagacagagagaaggaaagtgatttacccaaggccacatcgcatgagagattcagactcaggctctacggctgtggactctcgcagccctaggctcaaatccaa

SEQ ID NO: 487494 - DNA, 201 bp, Homo sapiens
agtgcagggtactaagctaggctgactcatggaaatttcccggcaaccctgtgaagcaggaactgttattattctcatttaacatgtgaggaaactgagacagagagaaggaaagtgatttacccaaggccacatcgcatgagagattcagactcaggctctacggctgtggactctcgcagccctaggctcaaatccaac

SEQ ID NO: 487495 - DNA, 201 bp, Homo sapiens
ctccagtctctgtagaggggccctgttgggtctctccagacatctgaggcctgcgggtaccctggcctcctgcccgggccaaatggtgcccctgccccacrtgctgcagatgtgaagttcgacgccgtgagcggtgactactatcccatcatctacttcaatgactactggaacctgcagaaggactactaccccatcaac

SEQ ID NO: 487496 - DNA, 201 bp, Homo sapiens
gtgcagggtactaagctaggctgactcatggaaatttcccggcaaccctgtgaagcaggaactgttattattctcatttaacatgtgaggaaactgagacagagagaaggaaagtgatttacccaaggccacatcgcatgagagattcagactcaggctctacggctgtggactctcgcagccctaggctcaaatccaacc

SEQ ID NO: 487497 - DNA, 201 bp, Homo sapiens
tgcagggtactaagctaggctgactcatggaaatttcccggcaaccctgtgaagcaggaactgttattattctcatttaacatgtgaggaaactgagacagagagaaggaaagtgatttacccaaggccacatcgcatgagagattcagactcaggctctacggctgtggactctcgcagccctaggctcaaatccaacct

SEQ ID NO: 487498 - DNA, 201 bp, Homo sapiens
ccccagcaggccttctcagctttggggtggagggcacatttctgttctatttctgtctgggtagctagaagcagaatgtggacacagtcattctggttttkttttttgttttttgtttttttttgagacagcgtctcgctctgtcacccagtctggagggcagtggcgcaaccttggctcactgcaacttcacctcccagg

SEQ ID NO: 487499 - DNA, 201 bp, Homo sapiens
caggagaatcgcttgaatccaggaggcggaggttgcattgagctgagatcacgccattgcactccagcctggtgacacagcaagactccgtctccgtctcaaaaaaaaaaaaaaatagataaaattcaaagaacagtgtgggcaacataatgagacttcgttgctacaaaaattaatagccaggtatggtggtgagcacct

SEQ ID NO: 487500 - DNA, 201 bp, Homo sapiens
aggagaatcgcttgaatccaggaggcggaggttgcattgagctgagatcacgccattgcactccagcctggtgacacagcaagactccgtctccgtctcaaaaaaaaaaaaaaatagataaaattcaaagaacagtgtgggcaacataatgagacttcgttgctacaaaaattaatagccaggtatggtggtgagcacctg

SEQ ID NO: 487501 - DNA, 201 bp, Homo sapiens
tggcaacatagggagacctcatctctacaaaaaaaaattttattttattttatttattttatttcattttatttatttattattatttttttttgagatgragtcttgctctgttgcccaggctggagtgcagtggtgcagtctcggctcactgcaagctctgcctcccgggttcacgccattctcctgcctcagcctcct

SEQ ID NO: 487502 - DNA, 201 bp, Homo sapiens
gcctggtggcacacgcctgtaatcccagctacttgagaggctgaggcaggagaattgcttgaacccaggaggcggaggttgcagtgagccgagattgtgcyactgcactccagcctgggtgacagagcgagactctgtctccagaaaaaaaacagaaacgtccccaggccagggcagaggttgggagatggagcgtgggca

SEQ ID NO: 487503 - DNA, 201 bp, Homo sapiens
ttcttcctgttgagtgagcttaacgagagctcgttgactgagctgtgtgccagtgctccaggtagtccctgcagtggtgccctcgggtcagtgctgtgggmacttcgcatcctctaggtggggccctgaggctcagagagaagctgagctcacacggccatggcaggtagagcgggcgtctgagtctgtctgactccagca

SEQ ID NO: 487504 - DNA, 201 bp, Homo sapiens
ccatctggaagaatgcagtgtcatacgggcacaggagctggtgccgaccccagccagccatctaccagctgtcgctgggagacgggacccttctgcctagragctggcttggctggggtccagtgagaaatgaggcacaagaaggctgtcctccccagtgtcatgcagcagggggcgcaggcctcacttggcaccagtgct

SEQ ID NO: 487505 - DNA, 201 bp, Homo sapiens
tggagctggcccccgggggattcccagcaagtgcctcactcccaggactgaggggattttctcaccaggggattttttgggtcacacatggggcaggggamctgggaacggtggggaagggcaggggctggttctggcttgtggggtgggagccagcgtagcaactgaccatggcacccacctcatccacagctggaccga

SEQ ID NO: 487506 - DNA, 201 bp, Homo sapiens
gccaggtgtggtggcgggcgcctgtagtcccagctactcaggaggctgaggcaagagaatggtgtgaacccaggaggcggagcttacagtgagcccaggtsgtgccactgcactccagcctaggcgacagcgagactccgtctcaaaaaataaaacaaaaataaaaaaataaaacaatcattcctttggctagaatgtctt

SEQ ID NO: 487507 - DNA, 201 bp, Homo sapiens
taacacagtgaaactgcatctctactaaaaatataaaaaattagccgggcatggtggcaggcgcctatagtcccagctactcgggaggctgaggcaggagratggcgtgaacctaggaggcggagcttgcagtgtgccaagatgccgccactgcactccagcctgggtgacagagcgagacacagtctcaaaaataaaaaa

SEQ ID NO: 487508 - DNA, 201 bp, Homo sapiens
gcccgccacagcgcccggctaattttttgtatttttagtagagacagggtttcatcgtgttagccaggatagtctcgatctcctgacctcgctatccacgyacctcgggctcccaaagtgctgggattacaggcgtgagccaccgcgcctatcctgaccccatctctgtaaaaaactaaaaaattagctgggtgtgatggc

SEQ ID NO: 487509 - DNA, 201 bp, Homo sapiens
aaagtgctgggattacaggcgtgagccaccgcgcctatcctgaccccatctctgtaaaaaactaaaaaattagctgggtgtgatggcgcacacctgtagtsccagctattagggaggccgaagagggaggatcgcttgagcccaggaggtcaaggctgcaatgggccgtgatgatactactgcactccagcctaggcaaca

SEQ ID NO: 487510 - DNA, 201 bp, Homo sapiens
ctgaggcaggagaatcgcttgaacccgggaggcggaggttgcagtgagccgagatcatgccattttactccagcctgggcaacaagagtgaaactctgtcycaaaaaaaaaaaaaaacaactcatgatccctgatgtagtcactgatcacattctagactagagcagaactgcctgcctggtgtcctccaagagtgtcaca

SEQ ID NO: 487511 - DNA, 201 bp, Homo sapiens
acagtgagactaaggcgcttctagaaggtcatcctggttaggtttgtaactttatgtagaagttacaagacactgctgacacagggactggtatggttgtrgttttaatgtaaaatagttctatgggttaattagtcctggtgcggatgacttctgccccactgctgtcttaacacactgcagagcataccatttcaggca

SEQ ID NO: 487512 - DNA, 201 bp, Homo sapiens
gtacccacgtatccctgaggcacccggggccggccatctgtctgccggacccatgctttacagcctgtgccacatcctctgtgtcccccatctgccataamtgcttcctgggcgagtccggagtccccagggctacctggaaattccccctgcccggcctgccagaccaggtgtggtgggtgagggcggggagcagggctg

SEQ ID NO: 487513 - DNA, 201 bp, Homo sapiens
tggtgagaccagggctcagagaggagcatgctgacatggatccttggcagcatctaggcggagcactggaaggagctccagactggagcccagggcccttktcagtttcctgagcatggctgtgagccagttccttcccggtgtcagggcaggggcctggaggaggtggtcttgaagtgcatgccacagatcttccttccc

SEQ ID NO: 487514 - DNA, 201 bp, Homo sapiens
gccttcggttcttttccttttcttttttaaaaaatttaattaattaattgattaatttttttgggacaagctctctatctcccaggctggagtgcagtggygcaatcacgtctcactgcagccttgaccgtcagggctcaagtgactctctcacctcagtcccccaagtagctgggactacaggcatgggccaccatgccc

SEQ ID NO: 487515 - DNA, 201 bp, Homo sapiens
acctacaaggccctcaacacattcatcgacgacctgttcgcctttgtcatcaagatgcccgttatgtaccggatcggctgcctgcgggacggtgaggcccsgtgggcaggtgggagctcccaccggaacagggccctgaggcagtctttagggcccaggcctgagggggtgccacggccccagatggggtgctcagtctga

SEQ ID NO: 487516 - DNA, 201 bp, Homo sapiens
caagataaataagaaaaacagcagttcagatggctctgcgtgccatggacagaaataaagctgggatggggataggaagtgaggggtgggtagaagagttscaattaaatagggtagtctagaaggcctctctgaggaggtgacgcttgaacaaagacctgaaggaagtgagagagggagtcccaaagatacacgagggaa

SEQ ID NO: 487517 - DNA, 201 bp, Homo sapiens
atcccatcatctacttcaatgactactggaacctgcagaaggactactaccccatcaacgagagcctggccagcctgccgctccgcgtctccttctgcccrctctcgctttggcgctggcagctctatgctgcccagagcaccaagtcgccctggaacttcctgggtgatgagttgtacgagcagtcagatgaggagcagg

SEQ ID NO: 487518 - DNA, 201 bp, Homo sapiens
ttctcaactccgcgattccatgctctgaggccgttcctagagtggtctggcgttcaggtctcgttgtagtgtttgaggtgtgcgcagtgattaattgggakttttctagctgtggggaagtcagtattagcagggcacggccgacagacccattttacagacgggaattcaaggaacagtgagactaaggcgcttctagaa

SEQ ID NO: 487519 - DNA, 201 bp, Homo sapiens
accactcagctcagcgccaggcacagaggaggtgctcagtgtttgtggaatgagcggatcttgaaacagaggctgggctgaggtggaattccctgatgccrtggtggatccaggtaatcagtgaagacatgccgcaaaacctagcttcctcctgctcttgcctagccctggtggtctcagctacttcttggaccctttagc

SEQ ID NO: 487520 - DNA, 201 bp, Homo sapiens
cggcctcccaaagtgctgggatttcaggcgtgagccaccacgtccagccttgtggtataatttagatggtataacgttcacctgttcttaggatagagtcyattggctcctggtccgtttatgcagttgtgtggtgcagccatcaccacagtctggtctgagaaagcttctgtcccctcaaaaagttcccttttacagtct

SEQ ID NO: 487521 - DNA, 201 bp, Homo sapiens
caggtccttgctcactggcaggtctaggaaaacaggtccagggttgaggaactctgggcccatccccaacacgtgagacctctgtcacctgggtccatccscagcacataaaacctgtgtcacccaaaagaaaaagcaaattcatttggttaaaataggttaaatcagggtctttggatgttatatttcaaaagtatgttc

SEQ ID NO: 487522 - DNA, 201 bp, Homo sapiens
cagcatgctctacggcttcctgctgaccttcggtgagcggtccggccgccccaggagagagcaggccccatgctgcgcagggctcacagccccagtgtagragacagacccatccccagacagggacaacctagggtgggcagagctgggatatagggaggcccgagggcacacatggccccatctggggtcagagaggac

SEQ ID NO: 487523 - DNA, 201 bp, Homo sapiens
tccagtggcatgatctcggctcactgcgacctccacctcccaggttcaagcgattcttttgcctccgcctcccaagtagctgggattacaggcgcccgccrccacgcccggctaatttttgtatttttagtagagatggggtttcaccatgttggccaggttggtctcgaactcctgacctcaagtgttggcttcccaaag

SEQ ID NO: 487524 - DNA, 201 bp, Homo sapiens
cggctgcctgcgggacggtgaggcccggtgggcaggtgggagctcccaccggaacagggccctgaggcagtctttagggcccaggcctgagggggtgccayggccccagatggggtgctcagtctgagggggctcggccccgcccttgcatcacgccctctccacccaggcccacctggctgtggacgggccagcccgacc

SEQ ID NO: 487525 - DNA, 201 bp, Homo sapiens
tgggatttcaggcgtgagccaccacgtccagccttgtggtataatttagatggtataacgttcacctgttcttaggatagagtctattggctcctggtccrtttatgcagttgtgtggtgcagccatcaccacagtctggtctgagaaagcttctgtcccctcaaaaagttcccttttacagtctctgctgctcccaatcc

SEQ ID NO: 487526 - DNA, 201 bp, Homo sapiens
aggatcagggaaatttggcctttggggaaatcctaaagtacgtgctcacagttgttccttttcactgctcagtggtagtctgcagacatgacacagtttawtctttcagtccttgaaggatatttggattgtttttagtttttgtctgttgccaataatgctgctatgaacattcatgtacaggcttttctgtggctgtat

SEQ ID NO: 487527 - DNA, 201 bp, Homo sapiens
ttataggcgtgagccactgcgcctggtctggcttcatgttttctgcctcctgggtagccattcaggatgggtttgctggattgtgtagtaggtgcacatawgacttgttcaataactgccatattttccgaagtagctgtacttttactttcccccctagcagcatacgagggttcctgtttttccacatccctgccagca

SEQ ID NO: 487528 - DNA, 201 bp, Homo sapiens
ttgccccgaaccctagactggaccaggtgcctctcagggctcctgcattcctgccccgttctggacagtcactgtctagagatgaatctttctcccccacygggctgttaaaccccaggaggacagcaaaagactctctaggtcaccactgtccctaggtcacagaggtgctctgcgagtgttttcctcctaaaagaagag

SEQ ID NO: 487529 - DNA, 201 bp, Homo sapiens
tgcaagagtgtgtggagcctgctgtcatgaggctgggcttcgcagcctggcctaggatgccagccctgcctctacctctacctcggttttctacatgtggrgtgggaggatcctgtcggtggccggaagggtcctgggtggcggaatctctaagcctagggaggagagccttctgccagcagttgctgtggtggctgatat

SEQ ID NO: 487530 - DNA, 201 bp, Homo sapiens
accttgctgcttctctcctcaggatcttcatcatctgggccatcagcagttggttccgccgagggccggcccctcaggaccaggcgggccccggaggagcyccacgcgtcgccagccgcaacctgttccccaaagacactttaatggtaactgccgggtggtagggcagacttgggaggtgatggggtgtggaggggtgga

SEQ ID NO: 487531 - DNA, 201 bp, Homo sapiens
tcgcgctactgcactccagcctgggcaacagagaaagactccgtctcaaaaaaaataaaaaatacaaaaaaaatacaaaaattagctgggtgtggtggcaygtgcctgtagtcccagctactcaggaggctgagggcaggagaatcgtttgaacccaggaggcagaggttgcggtgagctgagatcgtgccactgcattcc

SEQ ID NO: 487532 - DNA, 201 bp, Homo sapiens
ggcgggccccggaggagccccacgcgtcgccagccgcaacctgttccccaaagacactttaatggtaactgccgggtggtagggcagacttgggaggtgakggggtgtggaggggtggaatgtggaggagtgatgtcagcagtcgggacagaccaggtccttgctcactggcaggtctaggaaaacaggtccagggttgag

SEQ ID NO: 487533 - DNA, 201 bp, Homo sapiens
tgtagagacgggatttcatcatgttgcccaggctggtctcaaacttttgagctcaagcaatccgcctgcctcagcttcccaaagtgctgggattacaagcrtgagctgctacacctgacccaattatactttttttttttttttttttttttgagatggagtctcactctgttgcaaggctggagggcagtggcgcaatct

SEQ ID NO: 487534 - DNA, 201 bp, Homo sapiens
acgccattctcctgcctcagcctcccgagtagctgggactacaggcgcccgccacagcgcccggctaattttttgtatttttagtagagacagggtttcaycgtgttagccaggatagtctcgatctcctgacctcgctatccacgcacctcgggctcccaaagtgctgggattacaggcgtgagccaccgcgcctatcct

SEQ ID NO: 487535 - DNA, 201 bp, Homo sapiens
tctatttgtatgagttaggtcttacctacttcttttagtacaaaaatatcctaaaggatggtaatttttttttatcacctatactggatgaaatgaaaagytgactctatgtgggtccctagaaatgacttggaaaggtcttctggagttacttgagcccctttctgagtgagtgtgtctgcagaatgtgctgcgttggta

SEQ ID NO: 487536 - DNA, 201 bp, Homo sapiens
cacaggtgggggcagctctcggtttctggccccatggctgcttgactggcactgaaggacctttcctccagtccgctccttgctgagagcatgtggagttygggctccaggcttggcccttccctgggctcacatggtctgtgaccacaagccagtccctgagatctctgggcttcactttcccctacctgaaaaaggtag

SEQ ID NO: 487537 - DNA, 201 bp, Homo sapiens
tactggatgaaatgaaaagttgactctatgtgggtccctagaaatgacttggaaaggtcttctggagttacttgagcccctttctgagtgagtgtgtctgmagaatgtgctgcgttggtatgtcccacccggctgacgtccatgtggtgagatctttggagaaccaggcagaagtggcttgagggggtgtgacctacaggg

SEQ ID NO: 487538 - DNA, 201 bp, Homo sapiens
gcccaagacagctgctgaagattcagccatcacatccacactccaggcaacaggagagaagaataaatcaagaaggaatatttcttctctttaaggacacttttttttttttttttttgagatggagtcttactctgtcacccagactggagtccagtggcatgatctcggctcactgcgacctccacctcccaggttcaa

SEQ ID NO: 487539 - DNA, 201 bp, Homo sapiens
caacacattcatcgacgacctgttcgcctttgtcatcaagatgcccgttatgtaccggatcggctgcctgcgggacggtgaggcccggtgggcaggtgggrgctcccaccggaacagggccctgaggcagtctttagggcccaggcctgagggggtgccacggccccagatggggtgctcagtctgagggggctcggcccc

SEQ ID NO: 487540 - DNA, 201 bp, Homo sapiens
ggctggtctcgaactcccgacctcaggggacccacctgccttggcctcccaaagtgttgggattacaggcgtgagccaaaaaatttttttaaattagccaratatggtggtgcgcaacctgtagtgtcctccgactcaggaggctcaggtagaaggatcatttgagtccaggaggtcaaggctgcagtgaactgtgatcag

SEQ ID NO: 487541 - DNA, 201 bp, Homo sapiens
cggcccagccggcacccaatgcctggcaggtcatcaaaggtgtgctgtttaggtgagcagacgggacttgggtttgttcaccgaaaacattcaaataaaawtaaggaagaaaggaaaagtcagctgatcagctgaggatggtgatcattactgtatggtagagttgctttttttctttttttttttgtatgatggaatgtt

SEQ ID NO: 487542 - DNA, 201 bp, Homo sapiens
ccgtcttcttcggcgttttccagtcattcgtggtcctcctctacatcctggacaacgagaccaacttcgtggtccaggtcagcgtcttcattggggtcctyatcgacctctggaagatcaccaaggtcatggacgtccgggtaaggctggggcgccatgctgtctcgggagctgcaggggttgggagggggtagtgtggcc

SEQ ID NO: 487543 - DNA, 201 bp, Homo sapiens
ctgaggacccagccccaccccagggtgtgaggatgcaggccaagggggcctgagggagctgcagtagggtctcagcacctcctcagcctcctggttccccsctaccccctgcgcacagatatccagttctggaacagccggcagtccctggagggcctgtccgtgcgctccgtcttcttcggcgttttccagtcattcgtg

SEQ ID NO: 487544 - DNA, 201 bp, Homo sapiens
agacgtggtggctcagcctcctgtggctgcggttagatgctcagccgggcggggtcaagagaggggtgtccgtggtgagaccagggctcagagaggagcaygctgacatggatccttggcagcatctaggcggagcactggaaggagctccagactggagcccagggcccttgtcagtttcctgagcatggctgtgagcca

SEQ ID NO: 487545 - DNA, 201 bp, Homo sapiens
ctttagccagcctgcagaggctctgaagagcaggcctgagctctgttcccttcctgtcccaacagaacctgcatgtgtacatctcagagcacgagcacttyacagacttcaacgccacgtcggcactcttctgggaacagcacgatcttgtgtatggcgactggactagcggcgagaactcagacggctgctacgagcact

SEQ ID NO: 487546 - DNA, 201 bp, Homo sapiens
ctgcctccgtgtgcccctcagctcagccccagcaagtgtgtgctcagagcatctttgttcttcacggcagcagctaccttccctcactgtctcaggtgccragaggggcaggtgccagcctccactggcatcagtgacaagcccagggcacagcccacccgggggtcctcgcttcatgctcacacaggctatggggatggt

SEQ ID NO: 487547 - DNA, 201 bp, Homo sapiens
ctctggttgtctgagcaccatgggggccccctcaccttgtccctcctcagccagcagaggcccagggcaagggacaggaggacaggggttctccttcaccrcagaacccaaacctcaggtctcacccctgtggcctgtgattatgaataaagattatctttgtaaagatccgtgccagcctgctgcttgcccgtatcaaca

SEQ ID NO: 487548 - DNA, 201 bp, Homo sapiens
ctcacacaggctatggggatggtgggctccaggtcagctctgcaaggggcttgtctctgtggcacccacactcctgccctgccagggaggctctggttgtytgagcaccatgggggccccctcaccttgtccctcctcagccagcagaggcccagggcaagggacaggaggacaggggttctccttcaccacagaacccaa

SEQ ID NO: 487549 - DNA, 201 bp, Homo sapiens
ctaagtcataacacatttctattcgatttactttaaaattatgttccactggcaattcacgtctttttactttataaatacctgctatgattttctactaycctctaccccatgtattttattgcttgttatcctcttttttttttttttttaattcagggctaccagtgctaacactaatagctaatatttttgaagtat

SEQ ID NO: 487550 - DNA, 201 bp, Homo sapiens
gccaagatatgactcctctacccaacctcttaaccactgagctgcactgcctctcaggagcagtgcaagagagggagtgtttttgcattttatcttccatrttataatagacatgtatatttttagataaagctctccaaaacagaaatgcccagtgaacactgctgctttcctcccgtttctctaagacaaaacatgaaa

SEQ ID NO: 487551 - DNA, 201 bp, Homo sapiens
caccccccaaaaaataatgtgttaccagctgtctgaggatcccttagtccagtcaagttgacatataaaatgatatactttccataatcagggacatgaayatctgtctattttcaacataattcatctgttaaaatgtttgataagactgactgcaactagggaatatgagaaaacataattttattcatgataaatttc

SEQ ID NO: 487552 - DNA, 201 bp, Homo sapiens
taagtaactgtaatagcagtctgttagaaaggttggatgtgttattggaaatgccagtaggtttgcttagcccatttcaagtgtttctctgaggaccaaargctgcctcactaatgatggtatcagaaaagcataaggcaagccagcagtcaactgcttttcaatcctcccttggttcataagatttgccatgatttcttc

SEQ ID NO: 487553 - DNA, 201 bp, Homo sapiens
ggtatcagaaaagcataaggcaagccagcagtcaactgcttttcaatcctcccttggttcataagatttgccatgatttcttctaatatatatatatgccstttggacccatattataacccaaataaatttggcatgccaatgttcctcttctttgctttttgaaaatcagaatattaatttttatgcattttgactaac

SEQ ID NO: 487554 - DNA, 201 bp, Homo sapiens
gagtgaagttcatgtgtagatgtgattgtataataaaaacgaacaaaccaaaaagagtttccttaaaatcacacagctggtaaaaagcctaatcaacatcytacccagagtgtcagactccagtattcactttcaactctttttgccctgctcactccccagaagacaaggcagtaattcacaaagaggacaatgattggt

SEQ ID NO: 487555 - DNA, 201 bp, Homo sapiens
tttgtacccaagggtgttgttcctgtagtaagagtgcctcttctgattttcaagcttcttattgttcacaaccggtacaaaaaatatgaaagcccgctctraattttccatctccaaagaattcgcagggattggggatgaaagccaggtgaaataatctccaattccatcatcctgccctacagcagacatagcacaaat

SEQ ID NO: 487556 - DNA, 201 bp, Homo sapiens
tgtagtaagagtgcctcttctgattttcaagcttcttattgttcacaaccggtacaaaaaatatgaaagcccgctctgaattttccatctccaaagaattygcagggattggggatgaaagccaggtgaaataatctccaattccatcatcctgccctacagcagacatagcacaaatttcttttcagcaaattagctgaa

SEQ ID NO: 487557 - DNA, 201 bp, Homo sapiens
tgccttaatgtatttatgccagggcctctctagcaacttgaaggcgactctcctagtctcttacaacttttatacgatgcacagaggtgtggggagccagrcagcctccagaagatcgggccaggtgctcggcgtggtgctgaccgtgtgggcagccagtctgctgctctcggcgctcccgctgtgcggctggggcgcctt

SEQ ID NO: 487558 - DNA, 201 bp, Homo sapiens
gtgaccctgggcaagtgtttgacctctctggctatgagttcttttttcataaaataagaaattaaaatgccatggtttctgataagtgccatgatcctagrtgctatataatgtctttctaaaattgaatgattcagattatcaacagactacttcaccttcttaggagaaaattttgctgcaactctttttatattataa

SEQ ID NO: 487559 - DNA, 201 bp, Homo sapiens
aataagaaaataatttagaaatatagaaataccgaaagtgaaatgccaagccactattcactcccagaggaagaaattcttggtgtgtagcctctcaaacytttttctatgactgtcatatacaggtatgcttgtatgtctgtgaatctattttcattcctatacatgcttaattttctgggctgatttctcatgactatt

SEQ ID NO: 487560 - DNA, 201 bp, Homo sapiens
ctttaattgttttgcccacttcccttttccatttttctgctagattgtttatcttactggttgagaagaattctccatagcatcactattaaactttgttytatatagactacaaatatatccttctgagctgcctttagtctttcacttttgtttatagtatatatttctatacagacatttcaaagttttttgcaatca

SEQ ID NO: 487561 - DNA, 201 bp, Homo sapiens
tttcttggctggctgtcttccttcatggatttaccaaatcttgcaatgaacaccctgtattaattgctgtagctacatattatacttgggaatccaccttrttgtttgtttccaagttttcttggttatctgcaagcatttacccctgcaactatatcttaagagaaactttcaaaataaaatttcagtggaacttttatt

SEQ ID NO: 487562 - DNA, 201 bp, Homo sapiens
tctcaagtcttcttttttctcaccccatctaagttaggcaccccagcctgggtctattgtttcagtctttgataacaaaaatgttttctcaggatggaaarttttcaatataaccctttaacttgtggtttatcactcagaaagcaaggttttaaaattgtaaatcttggccgggcacgatggctcacgcctgtaatccca

SEQ ID NO: 487563 - DNA, 201 bp, Homo sapiens
gagtttcaatatatcttaattcagtttccactaatgtaaagttacactgtacaatgcaattatcaagaaattaataactaatctctaaattttatttcagytttaccaattgttctctttctggttctggatctaatccctgatgataaatcgtacttgtttttatgtctccttacctccaatttgtaacagcttctcagt

SEQ ID NO: 487564 - DNA, 201 bp, Homo sapiens
ctcagcacaatcagagttttggaagtatggtccaattcttttcttccctcacaagagaaaatctggagctaaggatttttcctacccaaacactttgcatkgagcaagggagtggggctgtggcatgtgttaacttactatttcaaaccacagtttctggtctcattagctcccaggtagctataatatgccagatttcat

SEQ ID NO: 487565 - DNA, 201 bp, Homo sapiens
ttgatttggactggatgggcattctttgcctttccaaattgtcgttttaaggcccatacctcaaagttgattccttctttaattagggacaacaaataggwaatttgttccccatattcctgtagataatggccccagctttggctaatatgtccctccctaataagggtgtgggacttttgggcataacaagaaaggcat

SEQ ID NO: 487566 - DNA, 201 bp, Homo sapiens
gggtctgctatctgtcatgtaatgctgtaccagagtaggttctaatatgatatcttattgcctcaaggagatcagtcttatgatctctattttaatgtcartgctggtcagttgtgcctaaactccaacaggaagagagtataacaaggagtgtctgacctccctttttgtcatggctgagaattcagtttttcaggtttc

SEQ ID NO: 487567 - DNA, 201 bp, Homo sapiens
caaaggatgactcagagagtctcaggtggccaggcaaagaaatgccacaggagcagggtggctgcagagagtctccagtagagcaatgcctagcagagtcrtggggtggggccactgcaaaaagtccccaccagggcaatgcctagcaggtctgtgaaggtggggccaccacagagtctctacttagtcaatgtctcatga

SEQ ID NO: 487568 - DNA, 201 bp, Homo sapiens
tcagtaagtccgtaagacaggagatagagctgaagaagattattctcaagacttgatattcaacgttgttttcccttttaggttttggacttacttgaaaygtattacttctttcttcttgcctatttctcccttttgagatgaaaatgtctgtgtcatgcctatctcaccattgtattttgaaagtagataatttgtttg

SEQ ID NO: 487569 - DNA, 201 bp, Homo sapiens
cttggaaaaagcacctttggattgaaaaggcatcattcagaaggaaccaaccaagagagactgggcaagacagggatggaagttctcactcctgtcatggrctctatccagaagtggcagcttggttttcaggttttagactgcccttggcttgaaggttggatttcactggggacttgtccctgtctgcctaaggaattt

SEQ ID NO: 487570 - DNA, 201 bp, Homo sapiens
tgattggttcctgtggtttcatctcccctcaacctccccttgaactatttgcttcagtttctaacctattaattttatttccttgaatatgccatgctctktctttctacaagacctttgcaccctctacccagattcttcttagaggagtcttcaaagattatctgctaatgtgcattttcaagtgatctcatgtgtaat

SEQ ID NO: 487571 - DNA, 201 bp, Homo sapiens
ctactaaattaaaatttctcaaagtagagactataaatgtatctttttaataagctctgcttgtatttgtatgtggtcagttcagcaccaatctaagactrgcatttgtaaacaacatgtctaaagaataaagattagaggtctggaccctggaagaacaaataggttcaatcagtgcatttaatgttcctcgaatacttt

SEQ ID NO: 487572 - DNA, 201 bp, Homo sapiens
gcttaataagtgtttcctattgaaagagggtataaattagaagtgtataagcatcattaaatcatccttacaggtttctttctagttcataaaggtctatraaactcataaacatgggtttataatctgctttcttttcattcttgttgtatcttcccacctcagacattttcattgtaggctgcgtagtggctttgattt

SEQ ID NO: 487573 - DNA, 201 bp, Homo sapiens
catctccaaagaattcgcagggattggggatgaaagccaggtgaaataatctccaattccatcatcctgccctacagcagacatagcacaaatttcttttyagcaaattagctgaaaatctagtcatctctagctaaaaatatctaaacaccaagcacaaacagatccaagttcaacacataagctcagctatgcactcac

SEQ ID NO: 487574 - DNA, 201 bp, Homo sapiens; identical to SEQ ID NO: 54020

SEQ ID NO: 487575 - DNA, 201 bp, Homo sapiens
tatgcttgaggtgttcctaattgctatatgtaattaaagagcctgaacatatagaagctatgagaaagtgagtttagtttactgaaaataagatctcaccsgaggctttatgtaaacgcctggggctttttaatcttcacagttttctaaatgtcctttaagtttcagcactctgagtgcaaagtacattgtctcaatgca

SEQ ID NO: 487576 - DNA, 201 bp, Homo sapiens
caaaaacttatttctcacagttctggaggctggaaagtccaagatcaaggcactggcaaagtcggtgtctggtaaaggtctgctttttagttcagagacarccgtcttctcactgtgtcgtcgcatggtagagaaagggcaaacaagctcccttgggctgttttacaagggcactaatcctactcatgagggctctaccct

SEQ ID NO: 487577 - DNA, 201 bp, Homo sapiens
ccccagcaatggacacaggcactatgtcctaggctgccctcacttcattctcaacgagagccattctgtattgtttccagatcccaccaccctcatcccarccctaatcctgccccactaatttcagtccgcattgaaaacagaccaagtcatcaaaaatcagttccctgaaggagcaattttttgaatgactaattcact

SEQ ID NO: 487578 - DNA, 201 bp, Homo sapiens
acaggcactatgtcctaggctgccctcacttcattctcaacgagagccattctgtattgtttccagatcccaccaccctcatcccaaccctaatcctgccscactaatttcagtccgcattgaaaacagaccaagtcatcaaaaatcagttccctgaaggagcaattttttgaatgactaattcactgaatgtaataaatt

SEQ ID NO: 487579 - DNA, 201 bp, Homo sapiens
gcttagtcttgctttggctatgtgggctcttttttggttatacaagaattttaggattgtttttctagttctgtgaaggaatgatggtggtgttttgatgrgaattgcattgaatttgtagatttcctttggcagtatggtcattttcacaaaattgattctacccatacatgagcatgggatgtgcttccatttgcttgt

SEQ ID NO: 487580 - DNA, 201 bp, Homo sapiens
ttgtctttcacctctcagtattttattgtctttgcagctgttgtgaaaggggttgagttctaggtttgattctcagcttggtttctgttggtgtatagcakagctactgatttgtgaacattaatttgtatcctgaaactttgcagaatttatttaccagttctaggagctttttagatgagtcgttagggttttccagga

SEQ ID NO: 487581 - DNA, 201 bp, Homo sapiens
aaaatgagaatattagataattaaagacatttgaaaagataacattttgttcttcattttatacagctataaaattggattttgaggggtttctattattycttccactgaaattatctcctctacttctcttaattgtgaaccctataaaataacaaaatttatttgtccattaaattatttatccctgtaattttagga

SEQ ID NO: 487582 - DNA, 201 bp, Homo sapiens
tctaaatctttaacctttttagcaattgtaaatggtactgcattttttattttgatgtccaagagttcattgctagtcatagaagtacaaatgattttgtrcatgtatcttatatcctgtgaccttgcttagctcaatcattagcttgaggattttttgtcgattccttgggattttctacataaatcaatcatgtcatct

SEQ ID NO: 487583 - DNA, 201 bp, Homo sapiens; identical to SEQ ID NO: 272145

SEQ ID NO: 487584 - DNA, 201 bp, Homo sapiens
gccaagattgtgccactcactccagcctgggtgacagagtgacattccatctcaaaaaaaaaaaagaaaaagaaaagaaaagaaaaaccttaatttgtagyttgaaggcctttgaggattaaatgtgaaatgtgttaaaattcttagcacttttcatgcctcttacagacccttgatgaaggccctcattttcttgccctt

SEQ ID NO: 487585 - DNA, 201 bp, Homo sapiens
gtgaatgggaaattagctataccccagttgagactctcattctagtcaaccaaaccattagggcaaatttttgaaatagtgccctctacccaacttgtctyctgtctcttaacctaaaaatagaacaaaccccaacacatactccagatgatgaacgctgaggctaactaccagcatccagcatcagcaacacacactcag

SEQ ID NO: 487586 - DNA, 201 bp, Homo sapiens
agatcctcagtggcatcatggaaaggatttggaatgtgagctgaatttagatcacagttaaaactttaccttcctatattacctgggcaagttagttaatstcttcacatataaatttgtttgtctgtaaaatgtaaataattttaccacccgtgtgattatattatatatttcgcatgtagtagatttcacatgtaatat

SEQ ID NO: 487587 - DNA, 201 bp, Homo sapiens
taaacaaacattatgatgttctggtatttggaggaaccgactcacagacataggatcaatggtaagtatacgtagtttttattttatagtcaaatacacartcaaaatatactctaaagatggcatcaatctttttatttctgctggggtttttttctgtttatgttttatggagggcattctgaaaagctaaaatgacca

SEQ ID NO: 487588 - DNA, 201 bp, Homo sapiens
gctgccctcacttcattctcaacgagagccattctgtattgtttccagatcccaccaccctcatcccaaccctaatcctgccccactaatttcagtccgcrttgaaaacagaccaagtcatcaaaaatcagttccctgaaggagcaattttttgaatgactaattcactgaatgtaataaattttctagtgtgccaacaat

SEQ ID NO: 487589 - DNA, 201 bp, Homo sapiens
tttaaaaagcttgatttctcagataaaaatattgtagcaattgttgaactgccacatgtataaggtatagttatcagaaaagcaagtatatgaggagcaaygagaacacatcagttctttgggttattttctgttagattgtgacaatgtgaatggaacggatgagatcatgtgaatagcaacaggtgctggggtccagtg

SEQ ID NO: 487590 - DNA, 201 bp, Homo sapiens
ttcttgccttcttcctgattttagtggaaaggtttctgatgttttcctattaagaaagatgacagctctcactactttgtgaggcagataatttaaatttctgctgctgctgctgctgtgatgatgatgatgatgatagctagtatttattgaatacttgctatgtttcacatgaggttctaagtactttacaaaaaattg

SEQ ID NO: 487591 - DNA, 201 bp, Homo sapiens
atttataataatggttttctaaaactgactacacgttagaattatctaatgatgtcctgtttcatatagactaattaagttaaaaaattctgagtgtggakacctgatccttgtattttttaaattttctccaagagattctgatgagaacctaggttggaaaacactggttttgagcaaaatatctgctggattcaaaaa

SEQ ID NO: 487592 - DNA, 201 bp, Homo sapiens
tcttgccttcttcctgattttagtggaaaggtttctgatgttttcctattaagaaagatgacagctctcactactttgtgaggcagataatttaaatttctgctgctgctgctgctgtgatgatgatgatgatgatagctagtatttattgaatacttgctatgtttcacatgaggttctaagtactttacaaaaaattgc

SEQ ID NO: 487593 - DNA, 201 bp, Homo sapiens
aatggttttctaaaactgactacacgttagaattatctaatgatgtcctgtttcatatagactaattaagttaaaaaattctgagtgtggagacctgatcyttgtattttttaaattttctccaagagattctgatgagaacctaggttggaaaacactggttttgagcaaaatatctgctggattcaaaaaataaaatag

SEQ ID NO: 487594 - DNA, 201 bp, Homo sapiens
cttgccttcttcctgattttagtggaaaggtttctgatgttttcctattaagaaagatgacagctctcactactttgtgaggcagataatttaaatttctgctgctgctgctgctgtgatgatgatgatgatgatagctagtatttattgaatacttgctatgtttcacatgaggttctaagtactttacaaaaaattgct

SEQ ID NO: 487595 - DNA, 201 bp, Homo sapiens
gattttagtggaaaggtttctgatgttttcctattaagaaagatgacagctctcactactttgtgaggcagataatttaaatttctgctgctgctgctgctgtgatgatgatgatgatgatagctagtatttattgaatacttgctatgtttcacatgaggttctaagtactttacaaaaaattgctcacttagtattcac

SEQ ID NO: 487596 - DNA, 201 bp, Homo sapiens
attttagtggaaaggtttctgatgttttcctattaagaaagatgacagctctcactactttgtgaggcagataatttaaatttctgctgctgctgctgctgtgatgatgatgatgatgatagctagtatttattgaatacttgctatgtttcacatgaggttctaagtactttacaaaaaattgctcacttagtattcaca

SEQ ID NO: 487597 - DNA, 201 bp, Homo sapiens
ctaacttgaagtcctgaccatatgacttctttacaaacaatgagatgagtaccctgagagatgctgcttccagcaactaaagattgaattaaatcattaayaaatacatgataaaaacaggaatacattgtatacattttgtattaactagggtttcctagagaaacaatagataaatgatagctagctagctagatagac

SEQ ID NO: 487598 - DNA, 201 bp, Homo sapiens
tgagacagggtctcactctgccatctaggctggagtgcagtggtatgatcatagctcaccatagcctccaactcctggactcaaaagatcccctgccttarcctcgtaagtattgagattacaggtgtgagccatggtgcctggcctgcttcccattttaaaaactgaaaatatttgcacagttttaatgttcccatttgc

SEQ ID NO: 487599 - DNA, 201 bp, Homo sapiens
ggagagaaatgatttctcagggttgttttaaattatacttatctaattgtgagcaagcttgaatagtttttatatatttaaggaacttctatctttttctstattataaattgttattattttttccaatttttatagagatttctttttcttcatcttctaatttttaagagttctttacatattagaaatattagttct

SEQ ID NO: 487600 - DNA, 201 bp, Homo sapiens
gttcttcatccattatatcctatgttacaaatatttttcagcatttatcagataccttttgatttttgtttatagtatttttttaccatgcacaatttttkgtttataataaaaattatcaatctttttattaattgcatttgaatttttttaataatagttagaaatccagtttaaaatggaattcacccatgctttttt

SEQ ID NO: 487601 - DNA, 201 bp, Homo sapiens
cataatttacaaataatattaacatagatattaacatagatattactttgtattgtaatttccatacaactacctgattctcacagaatactttggttgatttttacaaaaatcttataaccattgccaacctgtagttacaactgacaatataaatgttggttaacatttatatatactaatgagtaagataaaaattaa

SEQ ID NO: 487602 - DNA, 201 bp, Homo sapiens
taacactagtttgccttttataaatcaaagttataacataatgagggaaaaagtgttccaattttaattagagtccttctcttatgtttattggagttacrttcagctctgtgaataggatgagacgtcattttgtacgttaatttgagcaaatggtgaaaattaagcagagttgacttgatccaatcttcctgctgtttg

SEQ ID NO: 487603 - DNA, 201 bp, Homo sapiens
ggagcccatcaccaaggacagggagccagctccgtagcagaggtccccgctgtccatcaggagaaggaactggaaagggaactgaggcagcgtgcgtggaraaaaggcttgagaagtacaaagtataattttaggttaggtctgaagttctcttgcccttgcagatgcacatggtggtccagaacgtcgtggggtttcaga

SEQ ID NO: 487604 - DNA, 201 bp, Homo sapiens
agttcgataccaacccggccaacatggcgaaccccatctttacaaaaatacaaaaattatctgggtgtcatggagcacacctgtaatctcggctactcagraggctcaggcacaagaatcgcttgaacccaggaggcagaagttgcagtgagccaagattgtgccgctgcactccagcctgggcaacagaaaacagaaaga

SEQ ID NO: 487605 - DNA, 201 bp, Homo sapiens
tacaaaaatcttataaccattgccaacctgtagttacaactgacaatataaatgttggttaacatttatatatactaatgagtaagataaaaattaaatarctaaggtatatgctaaactcacttgtcaatgagtaattttttattgaattacacaatagttttcaaatatacaatttcctgtgcatctcttcccaagtct

SEQ ID NO: 487606 - DNA, 201 bp, Homo sapiens
tcctgccctggcctcccaaagtgctagggttacaggcatgggctaaagcccaaaaagtaacttataaatgatttcctgctttcctactatttttaaaattatatatatatatacttatatatatataattttacatatattgtgtttttagaatcatattttgtttacatttagatatatatatatcaaggtttaaaaaac

SEQ ID NO: 487607 - DNA, 201 bp, Homo sapiens
cctgctttcctactatttttaaaattatatatatatatacttatatatatataattttacatatattgtgtttttagaatcatattttgtttacatttagwtatatatatatcaaggtttaaaaaacattacctttaactggtagagtgtatatgttctttaaggtattcatggttttagtcttgctctagaaattacgat

SEQ ID NO: 487608 - DNA, 201 bp, Homo sapiens
ttcactattgagtgtaatgttagctatgataatctcatgtatggcttttcatgttaaggtaatttccctctatttctagtctgttgagagtttttaacatraaaggatgttgaattttaacaaatgcttttttgcatctattaagatcatgtggttcttatcttttattctgtcagtgtggtgtattaccttaattgattt

SEQ ID NO: 487609 - DNA, 201 bp, Homo sapiens
gtgttcggaggagccgccgagactccactccaactaccaggaaatttcccgtggagcttcaattcctgggacccctcctactgcggggagagtggtttccytgtccccagaggatgctccaggcccgagtctgcggcgctctgggggatgctctccgagctccgacaccgtgttcggaccgggtgcgcccgctgccgctgg

SEQ ID NO: 487610 - DNA, 201 bp, Homo sapiens
gtgttagcttgccatttcaaaccacagtcattattctcagtagccccaggtggctgtagtgttcctggttccatcagctctccaaggcaagtgagacagargccagtatctcaggtggcctccaaaaaaaattcaaatgctgaatgtatggtcttgtcctttcttccctcctcagagaaaagctgggagctaggatctccc

SEQ ID NO: 487611 - DNA, 201 bp, Homo sapiens
atggagctttgaggaaatccatttgctcttcctcctcacctggattaactcccactcccattcctgaggaagtgcttttatgcaagatgaagtggttctttgtgtgtgtgtgtgtgtgtgtgtgtgtgtgtgtgtgtttcatatgtgtgaaatgttaccataaccctggttcttctgacagtagtcaatttatcagaaaga

SEQ ID NO: 487612 - DNA, 201 bp, Homo sapiens
tggagctttgaggaaatccatttgctcttcctcctcacctggattaactcccactcccattcctgaggaagtgcttttatgcaagatgaagtggttctttktgtgtgtgtgtgtgtgtgtgtgtgtgtgtgtgtgtttcatatgtgtgaaatgttaccataaccctggttcttctgacagtagtcaatttatcagaaagaa

SEQ ID NO: 487613 - DNA, 201 bp, Homo sapiens
tgataggtattgttttatatatattcagttaatggttttaaatgttaacatatgttgtagcataatcctgagattctctcggctatttcccttaatagggaaaaaaaaggagaaaaatatactttagctccttcttccaaaaaagaaaagctgaatttatcccagttgaataggagggaaatacatacattattataaaat

SEQ ID NO: 487614 - DNA, 201 bp, Homo sapiens
cagccatggtgggagtatttatagcatgcaagtcagaaaatgcgacaaattaggactcgtgatgtgcagcaacacaatattatatagtattttcaacatayagatacaatagatggaaataatctcaagaacatgagtaataacaaaatatattagaataattgggagtgatgagttttgagtatttattgcctttgtttt

SEQ ID NO: 487615 - DNA, 201 bp, Homo sapiens
gaaggaaaaaaagacttttgttggtcacttcagatatatgattgagctctcgaacagctcataaattttttaaactggtcaggaaaacaaactctaagcayccaaaagatattttctgtggctgtttttgttgttttgtttgtttgtttattttttcccttttttgttagacacaaaacttaaaattgattttcccatttt

SEQ ID NO: 487616 - DNA, 201 bp, Homo sapiens
gctaacagggtgaaacccccgtctctactaaaaatacaaaaaatagctgggcgtggtggcaggcacctgtagtcccagctactagggaggctgaggcaggygaatggtgtgaacccggaaggtggagcttgcaatgagccaagatggcgccactgcactccagcctgggcgacagagcaagactcctcataaaaaaaaaaa

SEQ ID NO: 487617 - DNA, 201 bp, Homo sapiens
gcaacacttacttctctccttcctctcaccatatccaaaagacacaataatcagtgggaaagactcaaacacccaagttacaaggctggcattattatacrttttaaactcaaggtcataccttctgactcaattttagtgctcttaaaaacaacaacaacaacaatgacaaaaaatatatatataatataataaaaataa

SEQ ID NO: 487618 - DNA, 201 bp, Homo sapiens
aggctgaggcaggtgaatggtgtgaacccggaaggtggagcttgcaatgagccaagatggcgccactgcactccagcctgggcgacagagcaagactcctyataaaaaaaaaaaaaaagaaagaaagaaagaaagaaatttgtgaaagttattgcattggagatctttggatgtgtgactgtcccttatacagctcctaag

SEQ ID NO: 487619 - DNA, 201 bp, Homo sapiens
tttagcaagttggtatcccagcactcactattctttctaaaatcttctgatatttaaaaatccttcctcattatagttttttacctacatgaactatagayttgctgatttaagacaatatatttctgccttgtaatctgtaagaaggcaattatttgttttataaataaagaagggaggagttaactacaataataaata

SEQ ID NO: 487620 - DNA, 201 bp, Homo sapiens
ggagcctggtcattggctttaatgttcctccttttaaaaccccatatctgacattggcttagctcaaaagatactgagcttgaatttgcttgggatttatktggacacctggtctaatagcaagtggttaagctagtaggttttcatttaaaaaaactctatatgaataatttaattcttaaatgcttttatagagttgga

SEQ ID NO: 487621 - DNA, 201 bp, Homo sapiens
cttacaacttttatacgatgcacagaggtgtggggagccagacagcctccagaagatcgggccaggtgctcggcgtggtgctgaccgtgtgggcagccagyctgctgctctcggcgctcccgctgtgcggctggggcgccttcgtgcgcacgccctggggctgcctggtggactgctccagctcctacgtactattcctct

SEQ ID NO: 487622 - DNA, 201 bp, Homo sapiens
ctgagaatgcattagtgtatgctgcattaactgtcctattaattgtcctttgctcagagtatgcaagtatattattctttaacagagatgaaggttaaatwtaaacagtccatctcaggctattttagggttgcaaaatctagaggatatcaaagtatactctgccatcaattcaacgacaaagttattttatataattag

SEQ ID NO: 487623 - DNA, 201 bp, Homo sapiens
tgagaatgcattagtgtatgctgcattaactgtcctattaattgtcctttgctcagagtatgcaagtatattattctttaacagagatgaaggttaaattwaaacagtccatctcaggctattttagggttgcaaaatctagaggatatcaaagtatactctgccatcaattcaacgacaaagttattttatataattagc

SEQ ID NO: 487624 - DNA, 201 bp, Homo sapiens
aacgacaaagttattttatataattagccatgaactggccatttttcctatgtcatagtgatggcatttaatatttagaatgtctagatatttttcaaatkaccagaaaattttttattgttaagaatgccattaagttttattagtagtagatggcagatgcatttgtctttaaaataaccttagaacttataataatga

SEQ ID NO: 487625 - DNA, 201 bp, Homo sapiens
tagaacttataataatgatgtgtctctaaagattaatatccagaacaacagtgacagagaaaattaataataaacccttatgggccacttataaaaacatrtaacataaaggaaacaattcacaaacctcaaaactctaacattctaataaatcttagcattttgccactaaactagtgaacgagcccggtcttacaacat

SEQ ID NO: 487626 - DNA, 201 bp, Homo sapiens
taaataaataagtacatttaatttataaaagaaagtaaacaaataactttgtgctccaaaagacatcattaagaaaatgaatagataagccataaactggaaaaaaaaacctttgcaagtgatatatctgataaaggacttttatatccagaatatataaagaactcttacaaaccagacaacctaatttagccagttttt

SEQ ID NO: 487627 - DNA, 201 bp, Homo sapiens
ttaaacagtataacttaattttacttgactatgttactagaaaaggtcagtaaaaatataaatgagacagtatataaaatatgaacatctgtttctacttytattttttctttgaatcaaacttgttcttgtttgtgttctggctcaaacaacaatgaatgatactaataaattctatttttcagtcaacagaattggttt

SEQ ID NO: 487628 - DNA, 201 bp, Homo sapiens
acatgtaatcccagctactccagtggctgaggcacaaggatcactggaacccgggaagcagaggttgcagtgagacaaaatcatgccactgcactccattytgcatggcagaggggactccatctcaaaaaaaaaaaaaggggggggggatatatcaatataatgagatcctgttaagcaatataaagaaatgaactcctg

SEQ ID NO: 487629 - DNA, 201 bp, Homo sapiens
tctagggaaatggatctgaaatagaaaacctttatcattctgatgaacaaaatgaatttctaaatgtctcaacctcagaacctagctttcaacaataacamttttgtttttgtccccagcgttccggttatgcccttgccattcccttgtgtgcattccaggggactgtgtctctccatgcacctacagggaaaaccctat

SEQ ID NO: 487630 - DNA, 201 bp, Homo sapiens
aagctgaggcaggagaatcatttgaacccacgaggtggaggttgcagtgagccaagatcacaccactgcactccagcctgggtgacagaatgagactcagwaataataataataataataataataataataataataattacagagcagatcaagatcttctagcccaaagttcactgttcaatattagcttacaaagac

SEQ ID NO: 487631 - DNA, 201 bp, Homo sapiens
aattatgttccactggcaattcacgtctttttactttataaatacctgctatgattttctactatcctctaccccatgtattttattgcttgttatcctcttttttttttttttttaattcagggctaccagtgctaacactaatagctaatatttttgaagtatacagtcttctaaatactttacacatttgttttattt

SEQ ID NO: 487632 - DNA, 201 bp, Homo sapiens
ttgtcctgatgtaggggaccataccctatggtggggaactggccctttaaaatagccatcaaacgatgatacctgcctaaaccctggaaggtaccatgaasagggatcctctgggcactaccccaaaaatttaagacttctaaatagggaatcttgatcctgcctagtgggaataaccttgcttgcaagatgagaaaagaa

SEQ ID NO: 487633 - DNA, 201 bp, Homo sapiens
aggacttttgggctgagtgtgttcactcatgcctgtaatcgcagcactttaggaggccaaggtgggcggatcacttgagtccaggagttcgataccaaccyggccaacatggcgaaccccatctttacaaaaatacaaaaattatctgggtgtcatggagcacacctgtaatctcggctactcaggaggctcaggcacaag

SEQ ID NO: 487634 - DNA, 201 bp, Homo sapiens
tgtcatggagcacacctgtaatctcggctactcaggaggctcaggcacaagaatcgcttgaacccaggaggcagaagttgcagtgagccaagattgtgccrctgcactccagcctgggcaacagaaaacagaaagagactctgtctcaaaaaaaaaaaaaaaagaaaagaaaagaaaagaaagaaagaaagaaaatagaag

SEQ ID NO: 487635 - DNA, 201 bp, Homo sapiens
tgttcaaggtgtgtttagttgtcacattttgcaaattttccagtttttcttcagctactgatttctagttttattctattgtgattggaaaagaggagaakgtatattctgctgctctttggtgaaatgttttgtatagatctgttagattaatttgttctatactgttgttcagatcctgtttccttattgatttttttc

SEQ ID NO: 487636 - DNA, 201 bp, Homo sapiens
tcgaacagctcataaattttttaaactggtcaggaaaacaaactctaagcacccaaaagatattttctgtggctgtttttgttgttttgtttgtttgtttrttttttcccttttttgttagacacaaaacttaaaattgattttcccattttgctttcatccattaattgaacaaacatttgttaagtgcctactatatgt

SEQ ID NO: 487637 - DNA, 201 bp, Homo sapiens
tgtttccttattgatttttttcaaatgttatattattaaaagtgagatattgaagtctctcacaattatcatattatttatttcttttatcagttatgttrcattttgcattgtatatttaagtgctctgatgttggatgtgtatacattcatagttgttatatctttttggtgagttgatcattttatctttgtataata

SEQ ID NO: 487638 - DNA, 201 bp, Homo sapiens
aattttcactgttaatagctttcttgggaagaaaacacacacacaaattctgatgttaggaatattttaagcatatatcttcaatattattcatccaggascaaagtaagtcctgatgcaggaaaggagtgagtttcacagctttctgagcccctacttgacccaggaagcccagctggaacctcctctcagtctcccctc

SEQ ID NO: 487639 - DNA, 201 bp, Homo sapiens
taaatctaaacttaataagtttattaagtttattaataataataagttatgtaaacttaataagttgtcaaacttaagaagtttacataaattgatccaayataagttggatcttgttttttttcatccattcagctacattatgtcttttgattgaggagtttaatccctttatatttagagtaattaatgtacttcctt

SEQ ID NO: 487640 - DNA, 201 bp, Homo sapiens
caagtgaaacctgaggtcttgcactagtctctgctgaccatttgttttttgtattcctagcattcggttattgcaaggactgttacattttcttactaaamcttgagcttttaaatgtctaacaatatcctgtaatcctttgagagctttaggccttaaggtatattgcctttaataaggaaaagtggtggggtcttttag

SEQ ID NO: 487641 - DNA, 201 bp, Homo sapiens
ttttcttactaaaccttgagcttttaaatgtctaacaatatcctgtaatcctttgagagctttaggccttaaggtatattgcctttaataaggaaaagtgstggggtcttttagcttgatttggactggatgggcattctttgcctttccaaattgtcgttttaaggcccatacctcaaagttgattccttctttaattag

SEQ ID NO: 487642 - DNA, 201 bp, Homo sapiens
ctgtattactgagtcatttattaattataatagttctttggtagagtctttagggttttctatatataagatcatgccatctgcaagcatggataactttmactttttctttctcacctacatgcctttttttcctgcctaattactcaggccaggatttctctactatgctgaataaaagtagcgagagtgggcatcctt

SEQ ID NO: 487643 - DNA, 201 bp, Homo sapiens
gatcatttttcatcagaatgattcatcattttcaatatcagtgtgatttgagtaaagcattaggcccagcttccttccatgctgtcactgcccacaggtarttgtggccactgtgcgtggagggaggtggtggccagtaatgcctgggaaactccttggggcgacattatggagctgaaaacacccttggaggagtccgag

SEQ ID NO: 487644 - DNA, 201 bp, Homo sapiens
atgtatttgagaatttcctaatgtatggctaagtttttgttatgtaaggcttctttagagactgaaagagtttttaagattgtatgtatttaaagaccatsattttgtaaatgagaaaaattaggcacagggtggaaagataattttctgaggcataatttctttgcataactgacaaaaagtaaatgaagatagttttaa

SEQ ID NO: 487645 - DNA, 201 bp, Homo sapiens
ttctgcatggcagaggggactccatctcaaaaaaaaaaaaaggggggggggatatatcaatataatgagatcctgttaagcaatataaagaaatgaactcytgatacatcctaccacatgaaaaacttcaaaaacagtatgcaaagtaagagaagccagacccaaaaaactacatattgtgtgatttcttttatataaatg

SEQ ID NO: 487646 - DNA, 201 bp, Homo sapiens
tacaatgcatgcagttaactttctggaagcacagtgaaagcataaaagctagttccagtccactgcacaccattgatacttgccagtttagccaatggaarattctctctctctctctctctctctctctctctctctctctctgtctctctcacacacacacacacaaattttgtcagaggtgttaatgaataagagcta

SEQ ID NO: 487647 - DNA, 201 bp, Homo sapiens
accagtgtccaggaggaagtccacttcctggacctcaacagtcaaccttacctgggactctgtgtgggtgatggcatgagctggcacttgccccaggcacmttcagtcctgttgctgaatcatctggttgggtgcctctggtccagagggccttcatcctctggagcagtgcaccttccaaaccttcctttcaaaccttct

SEQ ID NO: 487648 - DNA, 201 bp, Homo sapiens
tggaaggggtcccaagtgggtagccagtgttagatttttcaattacattttaaactctttaaggagggaaatacgtgcagtgggaagatgttaccagagcragaaacaaagacaattaacatgtctcagatcttgaggagaaccggaattgtaacttaagtttatctactttatgaccttgcagtggcatggcaaaggaga

SEQ ID NO: 487649 - DNA, 201 bp, Homo sapiens
ccgcccatggtgagagagagacatggatcagaccaagagaaaaaaagctgtaagttttattgagcagagtgacagtacaaagcttccacagcatggaaggkgtcccaagtgggtagccagtgttagatttttcaattacattttaaactctttaaggagggaaatacgtgcagtgggaagatgttaccagagcaagaaaca

SEQ ID NO: 487650 - DNA, 201 bp, Homo sapiens
atttagatgatatttagataagactttggacttagactttaaagttgattctgaaacaagttaagacttttggggtctactggaatggaatgatgtatttygtatgtgagaaaaacatgaattttgaggatccaagagtggaatgctatggtttaaatcatgatgtcttctccaaaactcatgttgtaacttaatgcccaa

SEQ ID NO: 487651 - DNA, 201 bp, Homo sapiens
gaaccaaccaagagagactgggcaagacagggatggaagttctcactcctgtcatggactctatccagaagtggcagcttggttttcaggttttagactgyccttggcttgaaggttggatttcactggggacttgtccctgtctgcctaaggaatttgtctgtttcctgtcactatcaggattaacatccttataaatgg

SEQ ID NO: 487652 - DNA, 201 bp, Homo sapiens
gaatatggaaatctagcaagatatttctccatgtcttttttggggtgacagtaaattaaccaagaaagtgtttgctccatgtgacatcacagctctgtcatttttttttttttttttttttgagacggagtcttgctctgtcgcccaggctggagtgcagtggcatgatctcggctcactgcaggctccgcctcccgggtt

SEQ ID NO: 487653 - DNA, 201 bp, Homo sapiens
acatcacagctctgtcatttttttttttttttttttttgagacggagtcttgctctgtcgcccaggctggagtgcagtggcatgatctcggctcactgcargctccgcctcccgggttcacaccattctcctgcctcagcctctggagtagctgggactacagatgcccgccaccacgcccggctaattttttgtattttt

SEQ ID NO: 487654 - DNA, 201 bp, Homo sapiens
tgtgtctttatagcagcatgatttataatcctttgggtgtatacccagtaatgggatggctgggtcaaatggtatttctagttctagatgcctgagccatygccacactgacttccacaatggtcgaactagtttacagtcccaccaacagtgtaaaagtgttcctatttctccacatcctctctagcacctgttgtttcc

SEQ ID NO: 487655 - DNA, 201 bp, Homo sapiens
ctttgtatattatgaataatgtggtgataaacatttttatacatgattcctgatgcacataaacacattttatttatttttttgtttttttatttcaatargtttttagggaacaggtggtatttggttacatgaataagtcctttagtggtgatttctgagattttggtgcacccatcacccgagtagtgtacactgtac

SEQ ID NO: 487656 - DNA, 201 bp, Homo sapiens
tttatttttgagatcatttttatcaggtatagtattcttagcaggggtcttttctttcagcactttgaatttattctcatctaccttctctggcatgcaawgtttctgctgataaatctgttgataaccccacggagatttccttgtatggaatgagtcacttttctcttgctgctttcaaattctctctttgtcttcaaa

SEQ ID NO: 487657 - DNA, 201 bp, Homo sapiens
tttgttgccattggttttggtgttttagacatgaagtccttgcccatgcctatgtcctgaatggtattgcctaggttttcttctagggtttttatggtttyaggtctaacatttaagtctttaatccatcttgaattaatttttgtataaggtgtaaggaagggatccagtttcagctttctacatagggctagccagttt

SEQ ID NO: 487658 - DNA, 201 bp, Homo sapiens
gtatttggttacatgaataagtcctttagtggtgatttctgagattttggtgcacccatcacccgagtagtgtacactgtacccaatgtgcagtcttttakccctagctagcccaaccctttcccctgagtgtccaaagtccaatgtatcattcttacacctttgcatcctcatggcttaactcacacatatgaatgagaa

SEQ ID NO: 487659 - DNA, 201 bp, Homo sapiens
tccaagagcctagtatagtgcctagtgtgaaattaatactccataagaatgaacgaatgaatgaatggatgaatgccctggggttcaaccactttctcccrtattttcctacaagtgatttacctttttatggagctttgaggaaatccatttgctcttcctcctcacctggattaactcccactcccattcctgaggaag

SEQ ID NO: 487660 - DNA, 201 bp, Homo sapiens
aagtgaaattgttggtttattttttactctatatgtgcagtgattagatatacagtggctaccaagaaaatgtgttgccacagccttgattcttgttaaaytgccagcagttttacccaccattgctttagtaccttcagtaaaaatgttaccatggtgaaaatgataaataaaaccttagtatagtcattaaaatagctt

SEQ ID NO: 487661 - DNA, 201 bp, Homo sapiens
aagtagttttttccaattctgtgaagaaagtcattggtagcttgatggggatggcattgaatctataaattaccttgggcagtatggccattttcacaatrttgattcttcctacccatgagcatggaatgttcttccatttgtttgtatcctcttttatttcattgagcagtggtttgtagttctccttgaaaaggtcct

SEQ ID NO: 487662 - DNA, 201 bp, Homo sapiens
tcctcatggcttaactcacacatatgaatgagaacgtatgatgtttgatttttcattcctgagttgcttcacttagaataatagtctctaattccatgcargttgctgtgaatgccattattttgttcctttttatggctgagtagtattccatgtatatatatatatatatatactacaatttctttatcaactcgttga

SEQ ID NO: 487663 - DNA, 201 bp, Homo sapiens
tcacctggattaactcccactcccattcctgaggaagtgcttttatgcaagatgaagtggttctttgtgtgtgtgtgtgtgtgtgtgtgtgtgtgtgtgtktttcatatgtgtgaaatgttaccataaccctggttcttctgacagtagtcaatttatcagaaagaattctcctttctagtgtctgtggtatgaatgataa

SEQ ID NO: 487664 - DNA, 201 bp, Homo sapiens; identical to SEQ ID NO: 272142

SEQ ID NO: 487665 - DNA, 201 bp, Homo sapiens
acatccaattgaatgagtgcttatcattaggatataaaaaattatttcatttcttaggattcatttattcctgatgaaattttattttcttgttaaattasaatcagtgtatgctttctttcaagctagtttatcctcttttattttgttagaaaaacagaaataaaggataaaatatggaaataaatttggatacatatc

SEQ ID NO: 487666 - DNA, 201 bp, Homo sapiens
gaggcaggacaaccgcttgaacccaggaggcagaggttgcagtgagccaacatcgcgccactgcactccagcctgggtgacagagtaagactccaactctwaataaataaataaatatagtaacttaagtatcaagatatattcatttcagaagcttacgttttggccataaaatcaatgtaaaatgaggtttcatgcaga

SEQ ID NO: 487667 - DNA, 201 bp, Homo sapiens
cttgagttgatttttgtgtaagatgaaagatgaggatccagtttctttcttctacatgtggtttgccaattatcccagcaccatttgttgaatagggtatmttttccccactttatgtttttgttttctttgtcaaagatgagttgactataagtatttggttttatttctgggttccctattctgttccattcgtctatg

SEQ ID NO: 487668 - DNA, 201 bp, Homo sapiens
gtgattttaattttttttagaagagcttttatacttagatatttttcaaggaaaaaaagtgatttcattgaggctactttgccaaaatagccatagaatgytggaataggaagacataagagatactttggggtttatttagcccaacttctttcttttatttttatttttatttcttcttatactttaagttttagggta

SEQ ID NO: 487669 - DNA, 201 bp, Homo sapiens
attaaattatttatccctgtaattttaggactgtaaggagccaaacagattgtctgtcttttgctattcaaagtatggttcctacaccagcagcttcagcrtcatctgaaaacttttagtaagtgcagaatctcaggttcaacaatagactccctgaatcaaaatttgcatttgcacaaaacaagtttttaatttaatgaa

SEQ ID NO: 487670 - DNA, 201 bp, Homo sapiens
tccaatggagttatattcccaaggagaggattatggctacctatgctgagtcacacaggtcaccaggaaagtgggggaaagtcaacagtcacaggcctcamccctctcccaaatgcagcccacagtcctagaggcccatctcactcccactgtgccccactaacagccttgcgtctatttccaggcagccagtgaccaggc

SEQ ID NO: 487671 - DNA, 201 bp, Homo sapiens
gagatctgatgattttataaggggcttttcccccttttgctcagcacttcttgctgccactatgtgacgagggatgtgcttgtgtcctcttccgtcatgaytctaagtttcctgaggcctccccagccatgctgaactgtgagtcaattaaatctctttcttttataaattacctagcctcgtgtgtgtctttattagcag

SEQ ID NO: 487672 - DNA, 201 bp, Homo sapiens
tagtcacctatatcatcctcgtgattaccccttacagattacagctatcttgaatcttactcatattttttgttgtattcttctatcacaaatgtatgtayttctaacatactatattgtttagctttgctaattttgagccttctaaagatggtatcatgctatatatagtcttctggggcctgcttttgttcatttaac

SEQ ID NO: 487673 - DNA, 201 bp, Homo sapiens
atgaagatgcctaaacttgtctctgagtaatttctgacattttaactgaaatgaccatactagaaaaaatccacttaaaacctatttatagcctccacccrgtcatcttaacaaaaataatcatctggaatatactttatttttgactacatccatttgtttgaagtgcttagtttattactagctgttcagaaaattgaa

SEQ ID NO: 487674 - DNA, 201 bp, Homo sapiens
gtggtttggctgtgtctccacccaaatctcattttgaattgtagctcccataattcccatgtgttatgggagggacccagtgggagatccttgaatcatgrggggtggtttcccccatactcttcttgtggtagagaataagtcccacaatatctgacagttttataaggggaaactcctttcacttgattttcattctct

SEQ ID NO: 487675 - DNA, 201 bp, Homo sapiens
ttgtaaaacaggttagaaatatttccaaaagttaaatatatccatgccttatgcttcagcaatgacactcttggttacacatcctagaattgcactgtccratacattaaccactagtcacatgtggttgtttacatctaaataaattaaacattttttaaatttaaaacttcattcctcaggtgcactaaccacagctca

SEQ ID NO: 487676 - DNA, 201 bp, Homo sapiens
gcctagcataaagcatcccatattgtacatttgtcatctgttgtttggacccaattatgtcttatctctgttaaatttcatcctgcttcctttaatttacyctttcttaatttcaatagcctttcctaatgctgtaaaaaatgctttcagatgctgctcctaagatctggcttctatactatgataccaaaatttgtgtca

SEQ ID NO: 487677 - DNA, 201 bp, Homo sapiens
agacattttgaggttatgaagatattatgcttcatatcacaacttgccaactaactttagcatgcactgatgaatcttacctgcaacaattattatgcgayggtaattttctatttctacgattcttcttttggtttcattctttgtatattatgaataatgtggtgataaacatttttatacatgattcctgatgcacat

SEQ ID NO: 487678 - DNA, 201 bp, Homo sapiens
aacttttgggctcgaggatcctcctacctcagcctcctgagcagctggaactacaggcacacaccaccatgcctggctaaagtttagtttagtttattttygtagaaacagggtcttactatgttgcccaagctgggctccaactcctaggctcaagcaatcctcctgccctggcctcccaaagtgctagggttacaggca

SEQ ID NO: 487679 - DNA, 201 bp, Homo sapiens
aagaagtgggcctattccttattttgaccttttgatttaaacataggtttccaaagacctactttgttgctttagtatttttgcaagccacagattattayatttatttagacttcctaacatcaaacttcccatcttttgcaatgagtaatttgttgcataggtctccctcaggccggatctgatctgcactaattttaa

SEQ ID NO: 487680 - DNA, 201 bp, Homo sapiens
gtttagtttattttcgtagaaacagggtcttactatgttgcccaagctgggctccaactcctaggctcaagcaatcctcctgccctggcctcccaaagtgmtagggttacaggcatgggctaaagcccaaaaagtaacttataaatgatttcctgctttcctactatttttaaaattatatatatatatacttatatatat

SEQ ID NO: 487681 - DNA, 201 bp, Homo sapiens
tctttaaggtattcatggttttagtcttgctctagaaattacgataaaacttgattttaaaggtatttcccaaaatctgccttcttaacttgctgctcacrttctaagaataagtcagttcttcttagaagtattatttattgctttttttggtcagtatctcaatcttcatatctgttctggttttttagcaagttggta

SEQ ID NO: 487682 - DNA, 201 bp, Homo sapiens
ttagtggaaaggtttctgatgttttcctattaagaaagatgacagctctcactactttgtgaggcagataatttaaatttctgctgctgctgctgctgtgmtgatgatgatgatgatagctagtatttattgaatacttgctatgtttcacatgaggttctaagtactttacaaaaaattgctcacttagtattcacaaaa

SEQ ID NO: 487683 - DNA, 201 bp, Homo sapiens
cccatgcttttggcattacatccatgaaatcattgccaatagtaacatcataaagttttttccctatattttcttctgatagttttacagtttcaggactyatgtttaagcacttaaaccattttgagcaagggtccactttcattcttttgcatgtggatgtgcaattttcccagcaccaattattgagaatatgatact

SEQ ID NO: 487684 - DNA, 201 bp, Homo sapiens
agtgccaaataagaccaagcccttgttctcaagtaactcagagatcagaaggaacaggagggcacagataatgacagtacctcaagaaaattgagttctayagtttgtgcaaaagtgttacaggcacgggtaattttgccaaaaagagaagtgaagtcattacagctttcactgtgagccttgaaaggaataatagttcac

SEQ ID NO: 487685 - DNA, 201 bp, Homo sapiens
ggaggtattgctacctccacctagatttcaaaggatgactcagagagtctcaggtggccaggcaaagaaatgccacaggagcagggtggctgcagagagtmtccagtagagcaatgcctagcagagtcgtggggtggggccactgcaaaaagtccccaccagggcaatgcctagcaggtctgtgaaggtggggccaccaca

SEQ ID NO: 487686 - DNA, 201 bp, Homo sapiens
taagtatacgtagtttttattttatagtcaaatacacaatcaaaatatactctaaagatggcatcaatctttttatttctgctggggtttttttctgtttatgttttatggagggcattctgaaaagctaaaatgaccattgtttttacttacttttaaaattatttgtaaggccaggcatggtggccatggctgtaatcc

SEQ ID NO: 487687 - DNA, 201 bp, Homo sapiens
ccaagctggctgtcctcaactgctctttccctctctgccctctcttagactggtcttttctgacccttcttaaaatttgattcttgctctgttttttcatytatgagcctgtcctttaccagacacctcacctgagagttggtttaggtgtctggtcttcccaatttgactctcaactttccccaattaataggagttgga

SEQ ID NO: 487688 - DNA, 201 bp, Homo sapiens
tagtaagtgcagaatctcaggttcaacaatagactccctgaatcaaaatttgcatttgcacaaaacaagtttttaatttaatgaagtccagtttatcaaawatccttttatggatcatgatttttgtgtcaagtctaataaccccttcctagccttagatctcaaagattttctcctatatctttcaaataaaatttttag

SEQ ID NO: 487689 - DNA, 201 bp, Homo sapiens; identical to SEQ ID NO: 272144

SEQ ID NO: 487690 - DNA, 201 bp, Homo sapiens
aggccaaaggccctgaaagcaggagcatggatgttagagagcagggaaagatggatgttccagctaaaacagggagcaaatttgtgttttctatggctttwtgttctatttaggccctcagtggattggatgatgcccaccagcattggtgagagcaatattgtttgctgggtctgctgactgaaatgctcatctcttcta

SEQ ID NO: 487691 - DNA, 201 bp, Homo sapiens
attgggaattgttttataagaaaaaattataacattattttttagctatccaaatcttaacatcagctatatgagaattcaatcgcagtggttttgcttcyttttttgtccttaatcttttgttttcttcggcatgtcttttacaggagtagcttgtccatagaacacagtctccctaaggcaggttctaggtgaaatcaa

SEQ ID NO: 487692 - DNA, 201 bp, Homo sapiens
aacattattttttagctatccaaatcttaacatcagctatatgagaattcaatcgcagtggttttgcttctttttttgtccttaatcttttgttttcttcrgcatgtcttttacaggagtagcttgtccatagaacacagtctccctaaggcaggttctaggtgaaatcaaagagtagaaggtgatatctcctgaggggat

SEQ ID NO: 487693 - DNA, 201 bp, Homo sapiens
gaaggaattggtttgcactacaaagggcttcctgtgcagtaaggagatgaatacaagctcaaccttgaaactctgatcttctgtttttaaatgtctgtacmaacagccttttcttatgacaacagagtcacactatgagacagtgccacccaggtttctcaacagagtatgcccttgacatcaggtatgaatctctggtgg

SEQ ID NO: 487694 - DNA, 201 bp, Homo sapiens
gactcagtaataataataataataataataataataataataataattacagagcagatcaagatcttctagcccaaagttcactgttcaatattagcttmcaaagacatgctttataaatttaaggacaaaacatcctttgcctaaaatcccttttatttaatattcttgttgaaaggccacactatcaaatattcacta

SEQ ID NO: 487695 - DNA, 201 bp, Homo sapiens
tgccctgctcactccccagaagacaaggcagtaattcacaaagaggacaatgattggtttattggaattttacaaaacatttgtacccaagggtgttgttsctgtagtaagagtgcctcttctgattttcaagcttcttattgttcacaaccggtacaaaaaatatgaaagcccgctctgaattttccatctccaaagaat

SEQ ID NO: 487696 - DNA, 201 bp, Homo sapiens
caaaagatattcatcaaaggctttatttatatatccatttggagaaagtccataggagaatttgccaggaatgaagatgaagaggaggcagcaatgattcrtattttgccctcttctgcccaagagaaatattgataactattctatagttgtgccatagccaaaaacagtggtcatcctgatgttagaattccaatgaca

SEQ ID NO: 487697 - DNA, 201 bp, Homo sapiens
catctgaaaaatgaggcatttgagaaaaacaggaagattggagctaaatagcctcaggtctttttcagccctaaaaatgctatagtttgtaattctttcakacattgcacagccccaagttccactttgaaaagcttctgtctccagagtattagagttttccccatcccagtcatatcaacacaacttttaggcttccat

SEQ ID NO: 487698 - DNA, 201 bp, Homo sapiens
aaggtctcactgtcacccgggttggaatgcagtggcgtgatcatggctcactgcagcctctatctcccgggctcaagtgatgctcccacctcagcctccgyagtagctggcactacagaaacacacactaccatgcccacctaatttaaagaatttttttagagacagggtccctctatgttgctcaggcttgtctcaaat

SEQ ID NO: 487699 - DNA, 201 bp, Homo sapiens
ttaaaaaattctgagtgtggagacctgatccttgtattttttaaattttctccaagagattctgatgagaacctaggttggaaaacactggttttgagcawaatatctgctggattcaaaaaataaaatagctataggaattttctttcagctctttctgctaatggagcctggtcattggctttaatgttcctcctttta

SEQ ID NO: 487700 - DNA, 201 bp, Homo sapiens
gtaagtatacgtagtttttattttatagtcaaatacacaatcaaaatatactctaaagatggcatcaatctttttatttctgctggggtttttttctgtttatgttttatggagggcattctgaaaagctaaaatgaccattgtttttacttacttttaaaattatttgtaaggccaggcatggtggccatggctgtaatc

SEQ ID NO: 487701 - DNA, 201 bp, Homo sapiens
agccaatggaaaattctctctctctctctctctctctctctctctctctctctctgtctctctcacacacacacacacaaattttgtcagaggtgttaatraataagagctagcaaatgtaaactgtgtaccaaaacaaaatatatatatattcacttaccatatgagcctaattatttgattctctagacaatagaagat

SEQ ID NO: 487702 - DNA, 201 bp, Homo sapiens
accttactaaactctctaatttttttagattacttctttagaattttctaggaagataatattttcatctgtaaattacaataatgtctcttcctactcattttatatatatatatatatatatatatatatatatatatatatatatatatgtcttatttttttcttgattttttgcacagctaggacctccagaacaat

SEQ ID NO: 487703 - DNA, 201 bp, Homo sapiens
agagctagcaaatgtaaactgtgtaccaaaacaaaatatatatatattcacttaccatatgagcctaattatttgattctctagacaatagaagatcattytgggttttgttgggggagttgtttatttttatttgtttgcttgcttgtttctaccaaaagatgaacagaaaacacacatacacatatatatccccaaatt

SEQ ID NO: 487704 - DNA, 201 bp, Homo sapiens
ccttactaaactctctaatttttttagattacttctttagaattttctaggaagataatattttcatctgtaaattacaataatgtctcttcctactcattttatatatatatatatatatatatatatatatatatatatatatatatatgtcttatttttttcttgattttttgcacagctaggacctccagaacaatg

SEQ ID NO: 487705 - DNA, 201 bp, Homo sapiens
actatctgacttcaaaactcgctataaagacacagtaattatgacagttcatgactggcataaagatagacatatagatattataaatgaaacagaattaragttcttacatttatgggcaattggtttttcacaaagatgccaaacaattgaataggcaaagtttagacttttcaacaaatggtgctgggacacttggat

SEQ ID NO: 487706 - DNA, 201 bp, Homo sapiens
aatgataaagttcagtgttaggatggtcaacctccagcacatacagatagactggggtcaagttaagggcaatagagtcaggtggaatagagttagggaaygctgagtaatggattatagcctgcctgcctctgttcctgcctgtcagctccacaggcattgctgggaaggaggcaaggactatgctttctgaatgctgtt

SEQ ID NO: 487707 - DNA, 201 bp, Homo sapiens
tactaaactctctaatttttttagattacttctttagaattttctaggaagataatattttcatctgtaaattacaataatgtctcttcctactcattttatatatatatatatatatatatatatatatatatatatatatatatatgtcttatttttttcttgattttttgcacagctaggacctccagaacaatgtta

SEQ ID NO: 487708 - DNA, 201 bp, Homo sapiens
aggtaacatagatcagtggatttttctaaataactcattaactaaagcatacttttccaaaataacctgaaaaacaagtgtttttaaaagtattttattaraatctatatagttcacatatcaatatgctttcctgcaattcaaaataggcaaaaatgattatttctttattttaaatatctctgcacattgaggcaagtt

SEQ ID NO: 487709 - DNA, 201 bp, Homo sapiens
ctaaactctctaatttttttagattacttctttagaattttctaggaagataatattttcatctgtaaattacaataatgtctcttcctactcattttatatatatatatatatatatatatatatatatatatatatatatatatgtcttatttttttcttgattttttgcacagctaggacctccagaacaatgttaga

SEQ ID NO: 487710 - DNA, 201 bp, Homo sapiens
gttcacatatcaatatgctttcctgcaattcaaaataggcaaaaatgattatttctttattttaaatatctctgcacattgaggcaagttataaaaatcartgtccccacacattaaaaaaataagctatgcttagacttgtttttcttgctgtttgtcttattattttttcagtttttttaaggtcatgccatagaggtt

SEQ ID NO: 487711 - DNA, 201 bp, Homo sapiens
tgggaggccgaggcgggaggatcacaaggtcaggagatcgagaccatcctggctaacacagtgaaaccccgtctctaataaaaaaatacaaaaaaattagscgggggtggtggtgggtgcctgtagtcccagctactcgggaggctgaggcaggagaatggcacgaactcaggaggcagagcttgcagtgaaccgagatcg

SEQ ID NO: 487712 - DNA, 201 bp, Homo sapiens
ttgcttgatataatgataataatgtactctctaataagaaaccctggttctttagatgtgatctcatttatttttcaccattcccatgagatggaagaagrcacagatttttgaagcttaattaagacaaccagagatagtagatgattgaactggggaaataatttaggctcactgactcatactctaccaaaattgaag

SEQ ID NO: 487713 - DNA, 201 bp, Homo sapiens
ttcaatagtccatcccacgtttgccatttttgctacctactgaagttcagatcttgttttttctttccacgtatgattttaaaaaccttctattggtgctsccttccaccacactctcctttctccaattcatcttagatcctcagtggcatcatggaaaggatttggaatgtgagctgaatttagatcacagttaaaact

SEQ ID NO: 487714 - DNA, 201 bp, Homo sapiens
aatattaaataagaaagtgcatagacagtgcttaggaagaaggttgatacaaggctcttattcagcaggatcagtaaatattttgggggatggatatcaakcctaaaaatctgttactcagttgttagagttttcatcattaaaaacaacaagctggccagatgctgtggctcatgcctttaatcctagcactgtgggagg

SEQ ID NO: 487715 - DNA, 201 bp, Homo sapiens
aaatttagccaggcatggtggggcacacctgtaacactagctactcgggaggctgaggcatgagaatcacttgaaagaggcagagattgcagtgagccaarattgtgccactcactccagcctgggtgacagagtgacattccatctcaaaaaaaaaaaagaaaaagaaaagaaaagaaaaaccttaatttgtagcttgaa

SEQ ID NO: 487716 - DNA, 201 bp, Homo sapiens
cagtcatttgggttactcatgagttagtgacagaattctaccttctagggcagaaaaccaacaactgactcttagctagagcagatttcttttaaaataamaacatgatacaaataatagaaagagcacttaactgagagttaagaaacctgagtcctgatgccagtcctgatactacctatgtgaccctgggcaagtgtt

SEQ ID NO: 487717 - DNA, 201 bp, Homo sapiens
aggggggggggatatatcaatataatgagatcctgttaagcaatataaagaaatgaactcctgatacatcctaccacatgaaaaacttcaaaaacagtatrcaaagtaagagaagccagacccaaaaaactacatattgtgtgatttcttttatataaatgtccataaaatttaaatatatataaccagaggcatgtcagt

SEQ ID NO: 487718 - DNA, 201 bp, Homo sapiens; identical to SEQ ID NO: 422880

SEQ ID NO: 487719 - DNA, 201 bp, Homo sapiens; identical to SEQ ID NO: 422881

SEQ ID NO: 487720 - DNA, 201 bp, Homo sapiens; identical to SEQ ID NO: 422883

SEQ ID NO: 487721 - DNA, 201 bp, Homo sapiens; identical to SEQ ID NO: 422885

SEQ ID NO: 487722 - DNA, 201 bp, Homo sapiens
acggcgactgcgtcagacaactgctgcgactccgccctgccctcaggttcattgcgcatgcgtccggcagcgcctgcccaggtgtgctcggagcgtagctrtagcaacggggcgggccttggttcgcctggggcgtggtcgctgtctggggctcccacgtggttcgcctcatgggcctggagctgggcttctctcgcctcc

SEQ ID NO: 487723 - DNA, 201 bp, Homo sapiens
ggctgcgtcctacggcgactgcgtcagacaactgctgcgactccgccctgccctcaggttcattgcgcatgcgtccggcagcgcctgcccaggtgtgctcsgagcgtagctgtagcaacggggcgggccttggttcgcctggggcgtggtcgctgtctggggctcccacgtggttcgcctcatgggcctggagctgggctt

SEQ ID NO: 487724 - DNA, 201 bp, Homo sapiens
  misc_feature (1)...(201): n = A,T,C or G
tgctcctgcccttgggcgaatccgctgcgtcccacggtcctgactgtggcatttctgcgtgtctggagagctcccccggcagcgacgtcctgcttagcacntggctcgtctaactctgttcccctggcctcctgctcttctaggggtcatctttaggtttctgctggtctctgccccctgtgacacttgctggtacccaaa

SEQ ID NO: 487725 - DNA, 201 bp, Homo sapiens
gggctgcgtcctacggcgactgcgtcagacaactgctgcgactccgccctgccctcaggttcattgcgcatgcgtccggcagcgcctgcccaggtgtgctmggagcgtagctgtagcaacggggcgggccttggttcgcctggggcgtggtcgctgtctggggctcccacgtggttcgcctcatgggcctggagctgggct

SEQ ID NO: 487726 - DNA, 201 bp, Homo sapiens
ctgggaaccggcagaagccccatccggcgcggccttttggaggctccgcgctgcgccctccggccaggcctgtttattccatcgtgggcgaggcggggccsccgccaccagcggaccaggcctgcagggcctgcgggcctgggcaggacgagggcggcggcgcccggcaacccggtccccgcccggcgatcccggccccgg

SEQ ID NO: 487727 - DNA, 201 bp, Homo sapiens
gggggtctaaaccgaacaggagaggtgcaggggaccaggaggtgtcctggcacaaaggttcgggggtctccctggcaaggggtcccagggcctggagcccraggcccagccaaaagcacacagcatcaaaacatgtttttagtgggaagctccaggccctgcccctccccgggggcctcgaggtcggggagcaggtgggcg

SEQ ID NO: 487728 - DNA, 201 bp, Homo sapiens
ggtctgaaatggactttaattggcttttgtctctagaattacccacccgttcctgcgctctacggttctccatgccccctccagtttgggggtctaaaccraacaggagaggtgcaggggaccaggaggtgtcctggcacaaaggttcgggggtctccctggcaaggggtcccagggcctggagcccgaggcccagccaaa

SEQ ID NO: 487729 - DNA, 201 bp, Homo sapiens
tgttagccaggatggtctcgatctcctgaccttatgatgtgcccgcctcggcctcccaaagtgctgggattacaggcgtgagccactgctcccggccttctttttttttttttttttttgagacagagtctcgcactgtcgcccaggctggagtgcagtggtgaatcggctcactgcaagctccgcctcccgggttaaagc

SEQ ID NO: 487730 - DNA, 201 bp, Homo sapiens
acccccgaccaagacctaccaagggcgaggccgtcgccttgccctccccggggctccaggggcgacatgtgcaccgggtcggatgacacaggggagcccakggaggtgtggggcgtgggcgtgggggttcctggagtggaggggaggcccagctccagcccctgcccccgtgccgagaagcccagggtggctgcgagagag

SEQ ID NO: 487731 - DNA, 201 bp, Homo sapiens
ccttctccagaccttggttggctggcttggtttccttggtaacctgacactcagggccctcaggctgtccgccttccttcaaggcagttccagcagccgcrgtggcaggtgggcacaggagccaacgccaggcaccgcacaccctccacaacctggggcagcagcctccagtatcagtgggccgggacttgggcacgttaa

SEQ ID NO: 487732 - DNA, 201 bp, Homo sapiens
tgggggtctaaaccgaacaggagaggtgcaggggaccaggaggtgtcctggcacaaaggttcgggggtctccctggcaaggggtcccagggcctggagccsgaggcccagccaaaagcacacagcatcaaaacatgtttttagtgggaagctccaggccctgcccctccccgggggcctcgaggtcggggagcaggtgggc

SEQ ID NO: 487733 - DNA, 201 bp, Homo sapiens
ggcactgggaatgggaggagttgcctagggagggccctgccaggtctcccggtgaggcagacacgaagctgcagaggccggtgaactgaggactggcaccygccacccacccgggctcagcacagcagctgcagccccgtttcctgaataggtggcctccgcctttcctggctgagcacactctgattctcggaagcctct

SEQ ID NO: 487734 - DNA, 201 bp, Homo sapiens
gcacaggagccaacgccaggcaccgcacaccctccacaacctggggcagcagcctccagtatcagtgggccgggacttgggcacgttaaacattaaacctstgccagcaggtccacctgggcccacccgccaacttggcacctggggagtgaggcagtccccgctcctgtgctgataccccaccgtccaccacgccaaagg

SEQ ID NO: 487735 - DNA, 201 bp, Homo sapiens
ggtctgcgaatgtgggtgtcaggctgggcagtgggtgggctggggggatacttgctgggagggaaccccaggagatggttcgcccctccctgcaccctgasgcactcaccggggccaggcccgggcactcgtacaccgtgaagtctccgtcctcattctcctcatccgaggaggccgtgtccagctccttgggtggctctt

SEQ ID NO: 487736 - DNA, 201 bp, Homo sapiens
ccctccccaggtcattgggagaacgggggcagctgtcaggggtggggctggtggcagggctccaccggtacccactgtgggctgcacagtctgggtggacrctcccaggttggcaggaggtgcatccacacagacccttacagccacttctcggtgctcctctcaacacctcctccaggaagccgctgctgctcccacccc

SEQ ID NO: 487737 - DNA, 201 bp, Homo sapiens
ctggaggccctctccctcccagattgccatggtgacagcgcgggcgcttcctgtgaggggcagtgcttcccggaaagtggaggcagggcaagggaggaggygctagggaaacgtccaaagaccgggcacggggaggaaggagtggggtctctcgccccaacccatgtccataaagggctggccagcacagccccttctgct

SEQ ID NO: 487738 - DNA, 201 bp, Homo sapiens
gtggtagtttgggtgagcatctgcctgatgttttggtccctgtctgaaaggaaggagggagcagaccctcccagggttcccagcttggactgttagaggaraactggcctcagcaagaggactgttcagcacctctgggagcacctgggagattgggctcactctttctcatcgtcccttcttaccggtcgcgccctgcag

SEQ ID NO: 487739 - DNA, 201 bp, Homo sapiens
gctgctctccccagcccccttcctgcctccctctggtcaccagagtcatccggcctctcagtgatgtatttaggaaacacgcctggggaattgcatccccytctctctttcggttcctgtgaggagccccaggagagcctgttctgcatttccttgcgacagaccccctcgaggacggtgccagactcggaggccccccca

SEQ ID NO: 487740 - DNA, 201 bp, Homo sapiens
aggtggaccggcgcagcgtccacagcgagcactcggcacggagcctgcacagcgcacacagcctggccagccgccgcagcagcctcagctcccactcgcamcaggtacgcggcggcgcctcacagacacgcggacggttgtgtttagaaccaccatcctgtttgcaatgtacctaaagttttactgctgtgcctggggaat

SEQ ID NO: 487741 - DNA, 201 bp, Homo sapiens
gaattgtttgccgaaaagaatgatgtgactttcttagtcatttaggatgatttaaggatatagtattcctggtcatttaagaatgttcattcattgaagcyggagctgtctctgccacaggagagccacatggtcggtagtaaccagggcctctccaagcccagctgtgagtcactgcccagtgagtcccgcgcttccttt

SEQ ID NO: 487742 - DNA, 201 bp, Homo sapiens
tttgaaaattaattccaccatcctttcagattctggatggaaagactgaatctttgactcagaattgtttgccgaaaagaatgatgtgactttcttagtcrtttaggatgatttaaggatatagtattcctggtcatttaagaatgttcattcattgaagccggagctgtctctgccacaggagagccacatggtcggtag

SEQ ID NO: 487743 - DNA, 201 bp, Homo sapiens
cccttcttaccggtcgcgccctgcagcccagagaagtgaccacactggagacgcattcgcagtacttctctaacgttgcacgtcagagggccctgagtgtygggtgtgctgtgttgtgcctcggccccaggggtctcggtctcagctcctgggcagctgcgtggcacatggggacggggcctccggcactcccattcctct

SEQ ID NO: 487744 - DNA, 201 bp, Homo sapiens
tggctaccctgccgacaccgtctggcctgccatggagcaaggtgtgtgctcagcaggacagagggataccggctaaccccactggggcggccacccagccyggcatctgaacacgggagtcagggctgggattggaattgtgatgtcctggcctggctctgacccaatccgtccttccgagaagcagggtgtgtcaggacg

SEQ ID NO: 487745 - DNA, 201 bp, Homo sapiens
gtgttgacaggatattcgcggaggcctcctgttagaactggggagttgactcgagcgtgtttcccagtggatggggcggcgtggtgggcagcgctgcgtgrttagccctgtttgtgattagcgtgcttgtgttttatgctgaaaatggataaaagcagcaaatatctacaaatacccactaccacagggactttgaaactc

SEQ ID NO: 487746 - DNA, 201 bp, Homo sapiens
aacgaagccttcagcttgtcagcgccaatggcccgtgtggttcattatgtggaccagcccctgccacgctgcagccgagcactgctcaccctgggggcagkcatgcagaggtcatgctgttgatttcattccaggcctgcgccacctccgggagctcaaggctagggaggattggccagaggaagcacctggtgctgaact

SEQ ID NO: 487747 - DNA, 201 bp, Homo sapiens
cttggagaaaggccagtccctgtgacggggcagccctctctgtccctcggtcagctcgtgtgaatcctgggacctcttccggtcggctctgcccgctgttytggggtcgactgccacgacttttgattcaagaagcttcctccaggcgggagcggctatttttcctaaatgagaattgttacattgcaaattgttgaataa

SEQ ID NO: 487748 - DNA, 201 bp, Homo sapiens
aacacgcctggggaattgcatccccctctctctttcggttcctgtgaggagccccaggagagcctgttctgcatttccttgcgacagaccccctcgaggayggtgccagactcggaggcccccccagggtgggatcgtgccgactcgggtcccacgcagccacctctgtctctctcacccgctcccgaaacaaagagaccc

SEQ ID NO: 487749 - DNA, 201 bp, Homo sapiens
catgtgggaagatgttcagccttggtttctgcagatcatgctggtgtggcggtagctgggtgggaaggtggtgtgcctgttgatctgtgcgccacacacaygtcccgccttctcgtgactgagatcatagttgctctctttcccgttgacagggatagtgccgcaggaggcgcctgttggaaactcactttccgagctaag

SEQ ID NO: 487750 - DNA, 201 bp, Homo sapiens
tgggatgaaaagaaaaaccagtgggtgaatttaaatgagccagaagaggaggtaaattgtcattctagttcctgttgggtgtgaggtgtgagtggagggarcagcctcatgtggccctgtgatatttgggtggctgttgccccttttggagcctcctgactgtgccatcccagtgggtttctgtgcacacagtgggtgtct

SEQ ID NO: 487751 - DNA, 201 bp, Homo sapiens
atccgcccgcctcagcctcccaaagtgctgagattacagcagtgttcctttaaatggccttaaagggggttttgctgttcagtctccacatacatggggcractggatcgaccctgaggtgtcctagtcaatgagtgggttctgtcattttgctctttccaaattggtttttccaatgacgggcctgggtcgtggcctcgc

SEQ ID NO: 487752 - DNA, 201 bp, Homo sapiens
gttgcctttaggtagctagggccctccagatctcatggcttcctggtgtcgtgctggtttccaggaagaagctgggtttctcgaggagtccttggagcatwaagtcctggggtggtgtcgcttctttagtgatatctgaggcatttcttcttttgcatgttactgtattaatcattaattccttgctcacagatccaggtc

SEQ ID NO: 487753 - DNA, 201 bp, Homo sapiens
acctttgatcctctttctatgagtctctcctaaatctcccgttaaaagaatgacctggccagcatgcagagagcctggggttggtttgtggttttttttttgatttgcctgtttctgcatgagtgtgccgcgtgtgcagtgtgaaactctcttcctctcggagtgtcttcagtgagaccccagggacgttcgggacggaat

SEQ ID NO: 487754 - DNA, 201 bp, Homo sapiens
tgaggcatagaactacttgaacccgggaggcagaggttgcagtgcgccgagatcgcgccattgcactccagcctgggggacagagcgagactctgtctcaraaaactaacaaaccaaaatgaagtgcatcatgtgaagaataaagtaaagtttcctaataaccgaattctccacacatgggaaacacagagggctgtatct

SEQ ID NO: 487755 - DNA, 201 bp, Homo sapiens
ccaattccttctaacttgttcgtgccaaccccaggtaggtagcacgagcaccagcccctccaggtcagcccccagtctcctgacctttgatcctctttctrtgagtctctcctaaatctcccgttaaaagaatgacctggccagcatgcagagagcctggggttggtttgtggttttttttttgatttgcctgtttctgca

SEQ ID NO: 487756 - DNA, 201 bp, Homo sapiens
acgtgcacggcgctgccgaggtgacgggggctggcatgcgcctcttcctgcagcttctgcaggcttctgtcacatgtattggggttctgcctcagtatttsgggagagaaaatggatttcactacttaaaataaagtttgaaatcatggctgtggtccacacaggccatgttccatgtaacagcctcgacagagccttcac

SEQ ID NO: 487757 - DNA, 201 bp, Homo sapiens
gtgggtttctgtgcacacagtgggtgtctgaagctgtgtttccctctgcagaagaaagccccgcccccacctccaacctcgatgcccaagactgtgcaagmtgccccgcctgccctcccagggcctcctggagcccccgtgaacatgtactctagaagagcaggtaagggtggccttggagtgggagcttgcttgaacgat

SEQ ID NO: 487758 - DNA, 201 bp, Homo sapiens
gtcagcacacctggcaaattttttatgttttgtagagacggtctcaccttgttgcctaggctggtcttgaactactaggctcaagcgatcttcccacctcrgcttcccaaggcactgggattacaggcttgagccaccgtgcccagcttctcttttctgaatgaaagttgcacacctactgggtggcagtccacagggcac

SEQ ID NO: 487759 - DNA, 201 bp, Homo sapiens
cgttttgtttttcctcatgttagtgctgtggagacgagaaatggggagattggaggccgcacctcgccatggtcttgtccaacttgaacaacaacatggaygtcgagtccaggacgatggctaccatgggcgacactctgggtaggtcaggggtggagatgggcattgggtgtcgcggatggagcgccgaaggcccggttg

SEQ ID NO: 487760 - DNA, 201 bp, Homo sapiens
ggctgcactttccgtgagcacttttcgtggtacaatccacatgacccactttctcccctgggggacgttggttcagaggttggtagcacttggggagagtrtcttaacacagtttcttgacagcagctctggaacttagtatttctgccccgagttttgccacactgagactttgagtagctcctggtggactcaaccctg

SEQ ID NO: 487761 - DNA, 201 bp, Homo sapiens
tactttgtcacattttcttaaactgtttgttttccataaagttcatcgagtgggcacccagactccttgttgagttgtaagatgatggtagtgaggactaygaaattgtttctaaaattgtttcttaaagtgaaagtgcttctaaatagctttcatccttaaaatatgaagagttggtgaaaacactggcagggaaagatg

SEQ ID NO: 487762 - DNA, 201 bp, Homo sapiens
tcccagggttcccagcttggactgttagaggagaactggcctcagcaagaggactgttcagcacctctgggagcacctgggagattgggctcactctttcycatcgtcccttcttaccggtcgcgccctgcagcccagagaagtgaccacactggagacgcattcgcagtacttctctaacgttgcacgtcagagggccct

SEQ ID NO: 487763 - DNA, 201 bp, Homo sapiens
tgcttctctgccctcatgtctgggttttaacaaagagctgtggtagtttgggtgagcatctgcctgatgttttggtccctgtctgaaaggaaggagggagyagaccctcccagggttcccagcttggactgttagaggagaactggcctcagcaagaggactgttcagcacctctgggagcacctgggagattgggctcac

SEQ ID NO: 487764 - DNA, 201 bp, Homo sapiens
gcctcctctcactgatgcaaagctttaaggcttctctgactgttctgaaactcttcgtattcttgtcaagtctaaagagactgaagaaaagatttaaataytaataaaaatcagtagataatttctgtaggttctgctggaggaatacaaactgtttggtgttttaaatttaagtgtagaaattgtagaatgtggaattag

SEQ ID NO: 487765 - DNA, 201 bp, Homo sapiens
aagatgcccagggccagcctggcctcgaaagagcccagcaggagctggtgccaccccagcaacaggcttctcccccacaactacccaaagccatgttttcrgagctgtcaaatccagaaagtctgcccgcacagggacaggcccagaactcagcacagtcaccagcaagtctggttctggtcgacgcgggtcagcagctgc

SEQ ID NO: 487766 - DNA, 201 bp, Homo sapiens
cagtctaccagctcatgtccggacggatgcctgccgcgtccacggtgagtggcactgcctggtggcttgcacaggctccactgcctgtgtggagtttgctygtgggtgacgctgtcacaggccgtgaggtgcctggtgagcccagctgtgtggaattgaaatggcgctggcttccggggatgaggcttcgttttgtttttc

SEQ ID NO: 487767 - DNA, 201 bp, Homo sapiens
attgcatgttccggtgcttaaaacattggctctgcacgttgctttgattttcaccatttttctctgaaccattaaataactaaatccagtgttgcaagaastgtcttggatctgcttctgtagcttatgtaaaagtactgtaaatcccacccagaagcggtgtctgtatctgcacttgaagtgacagctgctgtgcagcgc

SEQ ID NO: 487768 - DNA, 201 bp, Homo sapiens
ttctgtggcctgatgaggaccatgggtgattttgtgtacccaaagcgctggggactgcccaccgtgtggcccagtcactgggaaggagccccagagagcckgctgtctgacatgatggctcagggtggtcatccaggttgaaaactgaccgtgtgatgtttgatttgggcttcatttcgtgtgtaggagcacggttagact

SEQ ID NO: 487769 - DNA, 201 bp, Homo sapiens
gaacctggctgaatgagtggagggcgctgtgttctcaatcagcgcctccgaggagccgtggggttccttcggcattagttcacggtttttgagagaggccytagttactgcagtgaatttctttcctgttgcaaagacgcttccagcctcactttactttctgtggcctgatgaggaccatgggtgattttgtgtacccaa

SEQ ID NO: 487770 - DNA, 201 bp, Homo sapiens
gcctcacacactcttgactgcaggcttcctgggctggggcccagcactcctgccctggtcctctacaaacgaggccgaggctcccaggaccactgcccccmagctggcccctggctgtcacctgcttttcagcatccagactagtcgattttggtattgtcctgctccctttaccatgtggttagtgcctttacaaaaatt

SEQ ID NO: 487771 - DNA, 201 bp, Homo sapiens
cttatgtatggtagagacggaaggtagaatgcagggtgccgggcgggacagagctgtttgggaagacggagatctggggatagtggcggtgatggttgctyagcacggtgaatgtgcttaaaacttaaaaatgattaaagtggcaaattttacagtatgtatattttacaatttttaaaattggaaaaagtaaaattaatt

SEQ ID NO: 487772 - DNA, 201 bp, Homo sapiens
ttgtttgtttgttttgagacagggtctcactctgtcagccaggctggagtgcattggcatgatcttggctcactgcaacctccgcctcccaggttcaagcrattctcctgcctcagcctctccagtagctgggattacaggtgcccaccccactcccagctaattttttgtatttttagtagagatggggtttcaccatgt

SEQ ID NO: 487773 - DNA, 201 bp, Homo sapiens
ttgcccggcattttgaagacggctcacttgccatcacccggtggtgacaggggcctttgatttttgcccgtgtctagatggcttcccagttacgactcttygatccccagctgaaagagaagccagaagaggagtccttggccgcacccacgtggctggttcacctgcagcaggtggagcggcagattaaggtacagcctt

SEQ ID NO: 487774 - DNA, 201 bp, Homo sapiens
gctctgctttctgagttcacgccattctccttcctcagcctcccgagtagctgggactacaggcacccacgaccacgcccggctaattttttgtatttttrgtagagatggggtttcaccgtgttagccaggatggtcttgatctcctgaccttgtgatctgcccacctcagcctcccaaagtgttgggatgacaggcgtg

SEQ ID NO: 487775 - DNA, 201 bp, Homo sapiens
cgcgccattgcactccagcctgggggacagagcgagactctgtctcaaaaaactaacaaaccaaaatgaagtgcatcatgtgaagaataaagtaaagtttyctaataaccgaattctccacacatgggaaacacagagggctgtatctgcctccgacacacactgacttggacagcccgccttccacttctcaaaggggag

SEQ ID NO: 487776 - DNA, 201 bp, Homo sapiens
gtgcagtggcacgatctccgctcactgcaagctctgctttctgagttcacgccattctccttcctcagcctcccgagtagctgggactacaggcacccacsaccacgcccggctaattttttgtatttttagtagagatggggtttcaccgtgttagccaggatggtcttgatctcctgaccttgtgatctgcccacctca

SEQ ID NO: 487777 - DNA, 201 bp, Homo sapiens
ttttttttttttttgagaccgagtctcgctctgtcacccagactagagtgcagtggcacgatctccgctcactgcaagctctgctttctgagttcacgccrttctccttcctcagcctcccgagtagctgggactacaggcacccacgaccacgcccggctaattttttgtatttttagtagagatggggtttcaccgtgt

SEQ ID NO: 487778 - DNA, 201 bp, Homo sapiens
ctgcctcagcctcctgagtagttgagattacaggtgtttgccaccatgcacagctaatttttgtatttttagtagagatggggttttgccatgttggccargctggtctcaaactcctgacctcaagtgatccatcctcctcggtctcccaaaatgcttggattagagtgtgagtcactgtgcccggccttactttcttaa

SEQ ID NO: 487779 - DNA, 201 bp, Homo sapiens
gtaagggtggccttggagtgggagcttgcttgaacgattaactgtcccagagagagaggccaatgtgtagctgttgtgcgtggggaggaggtggcttcccrcacgtccctgcgtgcttttcctctgacgcagtgagcgcagagcatttggaagctggaggccacctggcgcgttcacctcaatttgcttccctcccctttg

SEQ ID NO: 487780 - DNA, 201 bp, Homo sapiens
ccactacctgtcagacccacccgcaagggaccagacggcagccgctgctttgtcactgtggtgtgtgcctgctgccggctcacagatcctttctcccagcygtggactttgggactgctttcagtgtggggctgggatccgtcaggccccaggagcctccttgcctatctattggcgaatgcgcttgtttttcttaggtgc

SEQ ID NO: 487781 - DNA, 201 bp, Homo sapiens
acggatgaaaaggaagtgaaatgaaaaaccatctcctcggtcccaccagccgtgtttcccgcactcctgaccacaggaggctggcagctgctgcctggggyggtgtggacatgggccaccccaccgggcagcgacctgggtgctccctggcgacgtccagctgcagccacatctgtcctccatgcagtgtgtgcggcacag

SEQ ID NO: 487782 - DNA, 201 bp, Homo sapiens
cccgcttcctccaggctcctttcacggcgattttgcctacggcacctaccgcagcaatttcagcagtggccccggcttcccagagtatggctaccctgccracaccgtctggcctgccatggagcaaggtgtgtgctcagcaggacagagggataccggctaaccccactggggcggccacccagcccggcatctgaacac

SEQ ID NO: 487783 - DNA, 201 bp, Homo sapiens
ttaaactcctgacctcatgatctacccgcctcagcctcccaaagtgctgggattacaggtgtgatccaccaagcctggcctttttttttttttttttttttccctaagacatagtttcgctctgtcgcctaggctggaatgcagtggcgccatcttggccactgcaacctccgcctcccaggttcaagtgattctccagcc

SEQ ID NO: 487784 - DNA, 201 bp, Homo sapiens
cgtgccttcgtaaacataaacggatgaaaaggaagtgaaatgaaaaaccatctcctcggtcccaccagccgtgtttcccgcactcctgaccacaggaggcyggcagctgctgcctggggcggtgtggacatgggccaccccaccgggcagcgacctgggtgctccctggcgacgtccagctgcagccacatctgtcctcca

SEQ ID NO: 487785 - DNA, 201 bp, Homo sapiens
ctctgggagcacctgggagattgggctcactctttctcatcgtcccttcttaccggtcgcgccctgcagcccagagaagtgaccacactggagacgcattygcagtacttctctaacgttgcacgtcagagggccctgagtgtcgggtgtgctgtgttgtgcctcggccccaggggtctcggtctcagctcctgggcagct

SEQ ID NO: 487786 - DNA, 201 bp, Homo sapiens
gaaactggcattttaggttggtttgaatggctcagtgagaccgggcactgtgggtcactcctgcaatcccagcactttaggaggctgaggtgggtggatcrcttgaccccaggtgttcgagaccagcctcggcaacatggtgaaaccccatgtctatgaaaaatataaaaaattagccaggtgtggtagcgcgtgcctgta

SEQ ID NO: 487787 - DNA, 201 bp, Homo sapiens
tcactctccgtgttgacaggatattcgcggaggcctcctgttagaactggggagttgactcgagcgtgtttcccagtggatggggcggcgtggtgggcagygctgcgtggttagccctgtttgtgattagcgtgcttgtgttttatgctgaaaatggataaaagcagcaaatatctacaaatacccactaccacagggact

SEQ ID NO: 487788 - DNA, 201 bp, Homo sapiens
tcagaattgtttgccgaaaagaatgatgtgactttcttagtcatttaggatgatttaaggatatagtattcctggtcatttaagaatgttcattcattgargccggagctgtctctgccacaggagagccacatggtcggtagtaaccagggcctctccaagcccagctgtgagtcactgcccagtgagtcccgcgcttcc

SEQ ID NO: 487789 - DNA, 201 bp, Homo sapiens
cagttttcccctctgtaaaatgggaataacagtagccccagattgcaagcctgtcatgggcacacacaggcacctggtagagagctgcaggggtctagagycaacagggttgtgcggctggacccacgtgtgaggcacttttcacttctctctgaggagcactttacgtggaagagggcgtttgtaacccaggccagaaca

SEQ ID NO: 487790 - DNA, 201 bp, Homo sapiens
ccggccttctcggtccggctggcgtctctggtgccttctgtgcgcgtccttgacttctgcaagcgctcccggtcgctgagcccccgccgtgtgtcgtgtcrtctctccgcagcttcaaggggcctcttggatgcggcccacttctgctacctcatggcccaggcgggatttggtgtttacacgaagaaaactacaaagctt

SEQ ID NO: 487791 - DNA, 201 bp, Homo sapiens
cctgtgttcggatcctgcggctgccttcagccctggcttgcgcaggctctggggaatcctttctgctccttcccccgctttggttggggagcacacgtctygcatgtttgttcagcctccgtgcttgtgcgtggcatggactcaactctctgggcctggtgtggtcagatccccgcaggcactgcctgtcttagccttgtt

SEQ ID NO: 487792 - DNA, 201 bp, Homo sapiens
taattgtgagaaaattcccaggatttgagctactgtgtgtcaccctgtcacctgggaagcggggtttgaagttaagatcatattccgattcaaagccttcyagctccgggtgagggtgagcagacaggtgtttcctagaggccctgagaggcgagagcacggaggagagacagccagggagcattctcactgttccgtttt

SEQ ID NO: 487793 - DNA, 201 bp, Homo sapiens
tgacattgccgcctctgcttgaaggccagccattcctctgtttgccattacagaagaggggtttggaaagacctgtggcactgtggcttcagctgagtagscctttaagccaggtcagagtcctcctgggccctagagcagaggaggctgttgttgattttcatctccactcagggaggtgcgcagagccctgcgaggggt

SEQ ID NO: 487794 - DNA, 201 bp, Homo sapiens
gtggagatgggcattgggtgtcgcggatggagcgccgaaggcccggttgtctgtggcgttggcagaaatcaccagaacccggccttctcggtccggctggygtctctggtgccttctgtgcgcgtccttgacttctgcaagcgctcccggtcgctgagcccccgccgtgtgtcgtgtcgtctctccgcagcttcaaggggc

SEQ ID NO: 487795 - DNA, 201 bp, Homo sapiens
gacctcctgagcccaagcaatcttcccacttcaacctcccgaggagctgggactacagacatgccccatcaaacccagctaattttgttcattttttttttgtagagacgagggtctcactatgttggccaggctggtctcgaactcctggcctcaagggatcctcctgccctggtctcccaaagtgctaggattacaggc

SEQ ID NO: 487796 - DNA, 201 bp, Homo sapiens
tccctacgagaccctaacacgcccactgacgacctgaccctgctgctcagtgatggcagctttctgccctagatcctctttttctttctttttaaaaaatrtatttatttatttattgagacagggtcttgctctgttgcccaggctggagtgcagtggtgcgatctctgatctcagctcactgcagccataacttcctgg

SEQ ID NO: 487797 - DNA, 201 bp, Homo sapiens
gccacacaggaaggccttgcagtcagaagggggcccgccccgaggagcaaggctgccgtggcttgctgggtactgccccggggaatggggctgggcctccyccatgggcctcgagcatcatggtttgtgtgcgtgtgaccaggtgcacacctgacccctcagacctgtgtaggttccagaaggagcccaggcactttttat

SEQ ID NO: 487798 - DNA, 201 bp, Homo sapiens
tgtaaacgtgtacaacccgtcccattctgacagcctcgcttctcagcaaagtgttgccagtcatcccagacaatctgggcctggggcgcctaaccttgacygtttttatcagcaggtcacgaaagatgcccagggccagcctggcctcgaaagagcccagcaggagctggtgccaccccagcaacaggcttctcccccaca

SEQ ID NO: 487799 - DNA, 201 bp, Homo sapiens
ctgcacacggcaccctggtgcctgatggtaataaggcaaaccattccagtcatcaggaagacacttacggagccctagactttaccttaagcaggactttrgaaaatcctgtaaacgtgtacaacccgtcccattctgacagcctcgcttctcagcaaagtgttgccagtcatcccagacaatctgggcctggggcgccta

SEQ ID NO: 487800 - DNA, 201 bp, Homo sapiens
tggaagcacaagtgtggtgttagttccacctgcacacggcaccctggtgcctgatggtaataaggcaaaccattccagtcatcaggaagacacttacggarccctagactttaccttaagcaggactttggaaaatcctgtaaacgtgtacaacccgtcccattctgacagcctcgcttctcagcaaagtgttgccagtca

SEQ ID NO: 487801 - DNA, 201 bp, Homo sapiens
agaaccacagcttccagacgggactggcagggaagggcctgcagcagctaggggcctggccaatccagagcctgccccagagcccaaggtgagcgggtacrgtgggaaaggggaaaggtacccagtgaggaggcacctccccatcctgccagacagggccttgccttctgcaagtcagtatccaatgtgtacgtagagtgt

SEQ ID NO: 487802 - DNA, 201 bp, Homo sapiens
aaaaaacaaatgactcccatgtgaagtagaacagctcagaccagtcgggagtggtggatgatgcctgtaatcccagctctttgggaggctgagctgggcgrgtcacctgaggtcaggagttcgagaccagcctggccaacatggtgaaaccccatctctactaaaaaaaaaacaaaatttacctgggtgtggtggcgggtg

SEQ ID NO: 487803 - DNA, 201 bp, Homo sapiens
aagttgcacacctactgggtggcagtccacagggcactgtgaggagccaggctgggccctccccggctgccatttctccctttgtgtggacaccaggcccrccgtgctcagctctgcgtggacaccaggcccgccgtgctcccgtgtggagctctgtcgacacgaggccctccgtgctcctgtattcgctttgccttttcc

SEQ ID NO: 487804 - DNA, 201 bp, Homo sapiens; identical to SEQ ID NO: 196572

SEQ ID NO: 487805 - DNA, 201 bp, Homo sapiens
gagctcactgcagtatctccttctccctttccccaaaggacagcctttcctgcctcagggaagaagagagagacagactacagtgatggagacccactagrtgtgcacaagaggctgccatccagtgctggagaggaccgagccgtgatgctggggtttgccatgatgggcttctcagtcctaatgttcttcttgctcgga

SEQ ID NO: 487806 - DNA, 201 bp, Homo sapiens
tggtctattttttttgcactcaaacgccttgatttcctgtgtgttttatgacttttattttattttttattatgtatttatttattcatttttttttgagmtagagtcttgctctgttgcccagactgaagtgcagtggcacgatctcagctcactgcaacatccaccttctgggttcaagtgattgtcccacctcagcct

SEQ ID NO: 487807 - DNA, 201 bp, Homo sapiens
cactacacctggctaatttttgtatttttaatagagacagggcttagccatgttggccgggctcgtctcaaactcctgacctcaggtgatccacctgcctyagcctctgaaagtgctgggattatagccatgaactacctcgcctggctgttgtgtgttttatgacttctaaatgagtgcatatactccttggacatttat

SEQ ID NO: 487808 - DNA, 201 bp, Homo sapiens
agcagagaaatcttaagacggtggccaaattaaagtgctggccttcagatgtctgtgatttctgcaactgaggacctaattatgcctgtctgcaaactaayaatgtaaaaggtaataattaaagtatcatattttcatgtgggaaaaaatttaaaagcctcattttgtattctatttatttctataaatacatacaaattc

SEQ ID NO: 487809 - DNA, 201 bp, Homo sapiens
agctactagggaggctgaggcaggagaatcgcttgaacctgggaggcggaggaggttgcagtgaactgagatcgtacccagcctgggcaacagtgcgaggytccgtctcaaaaaaaaccaaaaaacacaaaaacaaaaaacgacagagaaggccaaacaaaacacatctgtgggctggatgccgccatgcccaccggtttg

SEQ ID NO: 487810 - DNA, 201 bp, Homo sapiens
gagcaaaagcctcaacgtgcttttcttcagggtgatattttgctacaggagatcaagacagagacaacagaggcattactaagcgttgaaagctcatagtraggcccaatacatttttgttcaatggacaaacggattcatactgtccaagagtccaagaacctgcatgtagggaggagtcatattccttatgaagttggt

SEQ ID NO: 487811 - DNA, 201 bp, Homo sapiens
attttatttttgatttctataaattcttttttaaatattagctctacattttagaattccttgatttctgacattttggatccttcctttatttctttaartatgttacagatgtgtattttatattctatgcaaatatctgaaatttttcgtggatctcattttgtggtctattttttttgcactcaaacgccttgattt

SEQ ID NO: 487812 - DNA, 201 bp, Homo sapiens
attttggatccttcctttatttctttaaatatgttacagatgtgtattttatattctatgcaaatatctgaaatttttcgtggatctcattttgtggtctwttttttttgcactcaaacgccttgatttcctgtgtgttttatgacttttattttattttttattatgtatttatttattcatttttttttgagatagagt

SEQ ID NO: 487813 - DNA, 201 bp, Homo sapiens
actcctaggctcaagcgattctcttgtcttggctatacctcacttctgacttcattctgtctttttttcctctttttcatttactccttttcctctcatcwtatatatatatatatgcattacatgtctatgtaatttgattgaatgtttgaatgtatgggaatgttgagtaaatgtccgtgtgtgtgcacaggcagatca

SEQ ID NO: 487814 - DNA, 201 bp, Homo sapiens
ccatccagtgctggagaggaccgagccgtgatgctggggtttgccatgatgggcttctcagtcctaatgttcttcttgctcggaacaaccattctaaagcmttttatgctcaggtaagaaacagaggaaggaaatctagagtttccaattcagataagatccaggcacagcggtaaaggaggagaggctggctttggtttc

SEQ ID NO: 487815 - DNA, 201 bp, Homo sapiens
gctgtaaggatcctgcaccacctcaaaatacacaaatgccttgtacacaaatgccttgggcattgtgtacataagctcataaccacaccaaaatgtagaaygaaattttctaataagtgaagaacattttttttttttcaaattgaagcattcagagagaagaatcgacctgcactgccatccacacagatatcatggacg

SEQ ID NO: 487816 - DNA, 201 bp, Homo sapiens
ttgacatgttacattttattgtctttaagcatcaatttcaatccgatgacttttgttttctgtttgggatgcaatgatttttaagatttcaaacagttttwggcctttagcacagtacctcaagtacctaatggatatggtaataaacctcaagcttttttgaaaaaagtcaccagctgacagagctcccttctccactgg

SEQ ID NO: 487817 - DNA, 201 bp, Homo sapiens
atagtgaggcccaatacatttttgttcaatggacaaacggattcatactgtccaagagtccaagaacctgcatgtagggaggagtcatattccttatgaadttggtcactgactctcctgcaatgtcatataactaagaattctcttccacatccttgcttaatgactggaaatggccatttcactgtggccctccaatca

SEQ ID NO: 487818 - DNA, 201 bp, Homo sapiens
tctaatctactgaacactgaaccatcagcctaactctatgcaatatagtcatactaaaatatttctcataaaaaagttcttaacagtttgttcactatacraagacaaaaatctggtagaaaacttaagaaaacatggagctaacatatttattatagtttttttttttttcctttttgagatggagttttgctcgtcgcc

SEQ ID NO: 487819 - DNA, 201 bp, Homo sapiens
attaagccgaatctatgagtggaaaagagattttggtctgattttccaaagtgcctcaaagtatctttaaaattttattatactcaaaaatcttaaattayggacagtggaatgagacatttgaagctacttttgtatgtagatgtaatcaaacaaaaaactgattctaagtcagtttaatcccttttagcaattaatttc

SEQ ID NO: 487820 - DNA, 201 bp, Homo sapiens
agtaatttttctttttttttttaataaacagcgtgatgttacagactgcagagttaaagaaaagcagacattgacagtttctgatgagcataaacagtaartgcagtcacaggccaaacttcttgctaggaacagcaagactgggaagaggtcttaaatttagtgatactgttattattctatattctcaatatagtaaca

SEQ ID NO: 487821 - DNA, 201 bp, Homo sapiens
gcagtgtgtacacaaacagaattgtgtgcaagtatacacacaccaaatgcactaataatgaagaagagagaacaaaatgaatttcaaatgccgaattcggraacctcctcaaactattgcctttttcaaatggctggaccaacgattaaacttcagccaagtttttttcttaaggtcttccatatcattaaaaacaaggca

SEQ ID NO: 487822 - DNA, 201 bp, Homo sapiens
cccactagatgtgcacaagaggctgccatccagtgctggagaggaccgagccgtgatgctggggtttgccatgatgggcttctcagtcctaatgttcttcktgctcggaacaaccattctaaagccttttatgctcaggtaagaaacagaggaaggaaatctagagtttccaattcagataagatccaggcacagcggtaa

SEQ ID NO: 487823 - DNA, 201 bp, Homo sapiens
cacaaacagaattgtgtgcaagtatacacacaccaaatgcactaataatgaagaagagagaacaaaatgaatttcaaatgccgaattcgggaacctcctcraactattgcctttttcaaatggctggaccaacgattaaacttcagccaagtttttttcttaaggtcttccatatcattaaaaacaaggcatgccaactct

SEQ ID NO: 487824 - DNA, 201 bp, Homo sapiens
cgggaacctcctcaaactattgcctttttcaaatggctggaccaacgattaaacttcagccaagtttttttcttaaggtcttccatatcattaaaaacaasgcatgccaactctgactttataaatctaaaattcagtgatctgcacagtttctgagcttgaagtattgaattgtgactcatctatttttttttcccattt

SEQ ID NO: 487825 - DNA, 201 bp, Homo sapiens
aaaaagtttttgaaccttaaaattacttctctttgtttgaatttctaatcatcattcaaaagaacagtaaaaaaaggttacttgttcttgtgcaaactacraattagactggagtaggatattttaaagagctgaatcacttttggtattttgttataaatgttttcatttgttatgtcccagtatattcttattggaaaa

SEQ ID NO: 487826 - DNA, 201 bp, Homo sapiens
tgggaagccaagtttggaggatcgcttgaggccaggagttcaaggctgcagtgagctatgattgcaccactatactctagcctgggagacagagtgagacmctgtctctaaaaaaaagaaaaagtttttgaaccttaaaattacttctctttgtttgaatttctaatcatcattcaaaagaacagtaaaaaaaggttactt

SEQ ID NO: 487827 - DNA, 201 bp, Homo sapiens
atgttttcatgcctgtaaccctagcacattgggaagccaagtttggaggatcgcttgaggccaggagttcaaggctgcagtgagctatgattgcaccactrtactctagcctgggagacagagtgagaccctgtctctaaaaaaaagaaaaagtttttgaaccttaaaattacttctctttgtttgaatttctaatcatca

SEQ ID NO: 487828 - DNA, 201 bp, Homo sapiens
caacacctgtccttactgtgtgaaaaatatagcactgtagtcagagatgaggtaggtggaaaagtaccttatatagaacagcatcagttcaaactgtgcaktatgaggaggagcaaaggaagagcagagaaatcttaagacggtggccaaattaaagtgctggccttcagatgtctgtgatttctgcaactgaggacctaa

SEQ ID NO: 487829 - DNA, 201 bp, Homo sapiens
ctttccccaaaggacagcctttcctgcctcagggaagaagagagagacagactacagtgatggagacccactagatgtgcacaagaggctgccatccagtrctggagaggaccgagccgtgatgctggggtttgccatgatgggcttctcagtcctaatgttcttcttgctcggaacaaccattctaaagccttttatgct

SEQ ID NO: 487830 - DNA, 201 bp, Homo sapiens
cagaaagcagagaagataccagaggagggaacgagaagggcaaaagcaaagaagaccgtaccatgtcctaagctgaggcaggcggcaggcgtggtgcacargaagtctgagtgtgaggggctcttttctctccactgccaatgtaagtagaatgttctaaattcatagagatgcactgtatgccaatcaccaggtgatcta

SEQ ID NO: 487831 - DNA, 201 bp, Homo sapiens
ccatgacttgttggcaccaggaggagagccgggggacttcaatccagaaagcagagaagataccagaggagggaacgagaagggcaaaagcaaagaagacygtaccatgtcctaagctgaggcaggcggcaggcgtggtgcacaggaagtctgagtgtgaggggctcttttctctccactgccaatgtaagtagaatgttc

SEQ ID NO: 487832 - DNA, 201 bp, Homo sapiens
ctggctgttgtgtgttttatgacttctaaatgagtgcatatactccttggacatttatatacgtcttctttttttattttattttatttgagacgagtctygctctgtcgctaggctggagtgcagtggcgcaatcttggctcactgcaacctccgactccttgttcaaaggattctcctgccgcagcagctagaattaca

SEQ ID NO: 487833 - DNA, 201 bp, Homo sapiens
gctgcatttgtttggcttaagatttcattaagcttcttaaaatggagatacttctggaactcaaatggctactgagcagggaatggcaaatcagtgacacygtaggaagtggagggattttggcaaactagagaacacaccttccacaggggcagccactgctctgctgggcccgctgttcatctgcagggacgtgcatct

SEQ ID NO: 487834 - DNA, 201 bp, Homo sapiens
accaggccgggtgcagtggctcacgcctgtaatcccaacattttgggaggctgaggtgggtggatcatgaggtcaggcgttcgagaccattatggccaacrtggtgaaacactgtctctacttaaaatacaaaaattagctgggcatggtggccggcgcctgtaatcccagctactagggaggctgaggcaggagaatcgc

SEQ ID NO: 487835 - DNA, 201 bp, Homo sapiens
tctgcagattacatgtttgtacctcacttttttttaaacttttttttttaagaagtgggatctcactatgttgtccaggctagtctcaaactcctaggctmaagcgattctcttgtcttggctatacctcacttctgacttcattctgtctttttttcctctttttcatttactccttttcctctcatcatatatatatat

SEQ ID NO: 487836 - DNA, 201 bp, Homo sapiens
tgtgaactttttgagtcattctttccatgtggaattcaaaggagaatgtaaacaaattttcaggagggacgtgcaatatccctgaaagataacaaagttcktaacacttatttacatacaacattctctagttattgattaaacagatctctacagacttgcatgaggcaacatttcttaggcttgtttgctacaatatct

SEQ ID NO: 487837 - DNA, 201 bp, Homo sapiens
gtggatatgctgcctttccaacaggtgaatatgaaagaataagtcaaaccctgttcaggacgctgttaattccaaatgtgaactttttgagtcattctttycatgtggaattcaaaggagaatgtaaacaaattttcaggagggacgtgcaatatccctgaaagataacaaagttcgtaacacttatttacatacaacatt

SEQ ID NO: 487838 - DNA, 201 bp, Homo sapiens
ggagaatcgcttgaacctgcgaggcggagattgcagtcagccaagatcaagccattgtactccagcctggacaacgagcgaaactctgtctaaaaaacacacacacacacacacacacacacaaaacaatgttttcatgcctgtaaccctagcacattgggaagccaagtttggaggatcgcttgaggccaggagttcaag

SEQ ID NO: 487839 - DNA, 201 bp, Homo sapiens
ctattccgtttttgtaaatttgacttctacctaacaatatgcagttgctgggatttttttttccctaacaaattcaaaactgctaatttaaaatataaagygtgtgtttcaattaccacagttttccatttagataggagctacctgattcattccagcaaagagagagattatccctggagaacaaagtcaattcaaaat

SEQ ID NO: 487840 - DNA, 201 bp, Homo sapiens
gagaatcgcttgaacctgcgaggcggagattgcagtcagccaagatcaagccattgtactccagcctggacaacgagcgaaactctgtctaaaaaacacacacacacacacacacacacacaaaacaatgttttcatgcctgtaaccctagcacattgggaagccaagtttggaggatcgcttgaggccaggagttcaagg

SEQ ID NO: 487841 - DNA, 201 bp, Homo sapiens
cattgagattctacacttttctcaagggcacatctctattccgtttttgtaaatttgacttctacctaacaatatgcagttgctgggatttttttttcccyaacaaattcaaaactgctaatttaaaatataaagcgtgtgtttcaattaccacagttttccatttagataggagctacctgattcattccagcaaagaga

SEQ ID NO: 487842 - DNA, 201 bp, Homo sapiens
agaatcgcttgaacctgcgaggcggagattgcagtcagccaagatcaagccattgtactccagcctggacaacgagcgaaactctgtctaaaaaacacacacacacacacacacacacacaaaacaatgttttcatgcctgtaaccctagcacattgggaagccaagtttggaggatcgcttgaggccaggagttcaaggc

SEQ ID NO: 487843 - DNA, 201 bp, Homo sapiens
gaatcgcttgaacctgcgaggcggagattgcagtcagccaagatcaagccattgtactccagcctggacaacgagcgaaactctgtctaaaaaacacacacacacacacacacacacacaaaacaatgttttcatgcctgtaaccctagcacattgggaagccaagtttggaggatcgcttgaggccaggagttcaaggct

SEQ ID NO: 487844 - DNA, 201 bp, Homo sapiens
atcgcttgaacctgcgaggcggagattgcagtcagccaagatcaagccattgtactccagcctggacaacgagcgaaactctgtctaaaaaacacacacacacacacacacacacacaaaacaatgttttcatgcctgtaaccctagcacattgggaagccaagtttggaggatcgcttgaggccaggagttcaaggctgc

SEQ ID NO: 487845 - DNA, 201 bp, Homo sapiens
taagcgttgaaagctcatagtgaggcccaatacatttttgttcaatggacaaacggattcatactgtccaagagtccaagaacctgcatgtagggaggagwcatattccttatgaagttggtcactgactctcctgcaatgtcatataactaagaattctcttccacatccttgcttaatgactggaaatggccatttcac

SEQ ID NO: 487846 - DNA, 201 bp, Homo sapiens
gaatggcaaaagagaattatcacagttttttgcttatgtagtacactaaggattgtttggacacaaaaagtaatttttctttttttttttaataaacagcrtgatgttacagactgcagagttaaagaaaagcagacattgacagtttctgatgagcataaacagtaagtgcagtcacaggccaaacttcttgctaggaac

SEQ ID NO: 487847 - DNA, 201 bp, Homo sapiens
caaaaatatggtaagtattctactgagagattccatgtatgatttgcacttgcctctttggaagtagtgggtatgtggaattgtaccttgttgccagaaaktgtgtaggctatgttgaccaacggccctgtagttagactccttccaaaggcacattttcatcaggacaagccagtgcatcttgagatgatgagcatgaga

SEQ ID NO: 487848 - DNA, 201 bp, Homo sapiens
tctacttacctattgcatatacatacatacattcatacatatatgtatatacatatatttcttaaaatacaagcatataattctttatgcttaaaggaagyaaatatttaaacatacattcctttaatattcatcactttactggggtagaaaaattggcttttaaggtataatagtttcagattttcaatcaagtattct

SEQ ID NO: 487849 - DNA, 201 bp, Homo sapiens
agtaagtgcagtcacaggccaaacttcttgctaggaacagcaagactgggaagaggtcttaaatttagtgatactgttattattctatattctcaatatartaacacatgcatcttgctgtgtcaaatgctttctgggccatcattaaaaggacattaaaaacgtttttcttctaatgaatgcagtataccacaggacttc

SEQ ID NO: 487850 - DNA, 201 bp, Homo sapiens
tttcttctggaattctgaatagatattatgttacactatttaatctatctttcatgtctctgaacctctctttaatactttccatttaaaaatctctctgkattatactctggctatttttgcagatccagctctgtgttcactaattatcttctcagatgtatctaattgagtgttatgtctgttcattaaatttttact

SEQ ID NO: 487851 - DNA, 201 bp, Homo sapiens
cccaacttgggaaactcctaataaattctaaactcttccgaattttagaaccttgatatttctttacaccttttataaaagatgcctcttgactagggctwagcaagcagtgtgtacacaaacagaattgtgtgcaagtatacacacaccaaatgcactaataatgaagaagagagaacaaaatgaatttcaaatgccgaa

SEQ ID NO: 487852 - DNA, 201 bp, Homo sapiens
ttggcttttaaggtataatagtttcagattttcaatcaagtattcttagtcattactgaaaagaactcaaattcagctaaattttgattattagcaacacyggcttgcttttcaaaaggaatggcaaaagagaattatcacagttttttgcttatgtagtacactaaggattgtttggacacaaaaagtaatttttctttt

SEQ ID NO: 487853 - DNA, 201 bp, Homo sapiens
ctgcaccacctcaaaatacacaaatgccttgtacacaaatgccttgggcattgtgtacataagctcataaccacaccaaaatgtagaatgaaattttctartaagtgaagaacattttttttttttcaaattgaagcattcagagagaagaatcgacctgcactgccatccacacagatatcatggacgactggctggact

SEQ ID NO: 487854 - DNA, 201 bp, Homo sapiens
cctccaatcaaccctttcccatgagctatgtaatattttaccaccttctaagattgaaactgcccactaataacttcagcctgaagctatttcataattaraaactgttaagtatttggtattggtgacagtgcctttatctttttccctcttccatattcctagtgcttttacacacctaagtgccaccaagatagaaat

SEQ ID NO: 487855 - DNA, 201 bp, Homo sapiens
cttgagatgatgagcatgagaggtgatgagattcctgagtgagggtgaatcttggtggttacagcattatggtaatgctaacactgtttacactgtggttytccaaatacctgcatcttaaatactattaaagattcctgggcctcaagtcagacctaccaaatcagaatttctggaatgaagccctggaatccacagttt

SEQ ID NO: 487856 - DNA, 201 bp, Homo sapiens
ctcacctatcactgaggctggagtgcagtggcacaatcaagcttattgcagcctcaaacacctgggctcaagcaatcctcctggctcagcctcctgagtarctaggactataggtgtgccactacaactggatggtgttttaatttttattgtgtagagacagggtcttgctatgttgcccaggctggtctcgaactcctg

SEQ ID NO: 487857 - DNA, 201 bp, Homo sapiens
gggacagtcattttttaaatgtttttggccgggtgtggtggctcacgcctgtaatctcagcacgttgggaggccaaggcgggtggatcacctgaggtcagragttcaaggccagcctggccaacatggtgaaaccctgtctctacgaaaaatacaaaaaattggccaggcgtggtggtgggcgcctgtaatcccagccact

SEQ ID NO: 487858 - DNA, 201 bp, Homo sapiens
tgctatgttgcccaggctggtctcgaactcctgggttcaagtgattctcccacgttggtttcccaaagtgttgggactataggcatgagccaccacagccwgccctactctctatcttttaactggatcatttactccatttagttttattgtaattactgatatactgatgcaataacattattctatcatgttattttg

SEQ ID NO: 487859 - DNA, 201 bp, Homo sapiens
aaagtttaaagattttttctggaagtgatacatgtcaaattacatttcctactgcagtatttgagcagggacagtcattttttaaatgtttttggccgggygtggtggctcacgcctgtaatctcagcacgttgggaggccaaggcgggtggatcacctgaggtcagaagttcaaggccagcctggccaacatggtgaaac

SEQ ID NO: 487860 - DNA, 201 bp, Homo sapiens
taggtcactgaaaagatttgcaccttagaacaataatcattttaaggataacaagtaaaggtctgaaagcatgaggggctttatttgccttcacctcatawaagtctttgattttgaaccaatgcttttggatctcattgttgatgatacttgaatttactttgtaggagattttaacttcatgctgatgatgtatcaaat

SEQ ID NO: 487861 - DNA, 201 bp, Homo sapiens
ttaaaggagataaaccgccaaatagcaaataggtcactgaaaagatttgcaccttagaacaataatcattttaaggataacaagtaaaggtctgaaagcaygaggggctttatttgccttcacctcatataagtctttgattttgaaccaatgcttttggatctcattgttgatgatacttgaatttactttgtaggagat

SEQ ID NO: 487862 - DNA, 201 bp, Homo sapiens
ctgaaatttttcgtggatctcattttgtggtctattttttttgcactcaaacgccttgatttcctgtgtgttttatgacttttattttattttttattatktatttatttattcatttttttttgagatagagtcttgctctgttgcccagactgaagtgcagtggcacgatctcagctcactgcaacatccaccttctgg

SEQ ID NO: 487863 - DNA, 201 bp, Homo sapiens
gatctcattttgtggtctattttttttgcactcaaacgccttgatttcctgtgtgttttatgacttttattttattttttattatgtatttatttattcatttttttttgagatagagtcttgctctgttgcccagactgaagtgcagtggcacgatctcagctcactgcaacatccaccttctgggttcaagtgattgtc

SEQ ID NO: 487864 - DNA, 201 bp, Homo sapiens
caggcccgagggctggtggtgaagaattagatgaaggtgttgcaaaagataatgctaaaatagctggtgccacttaaagcaatcctgaagaaccagagagygaagatgcagatcactgcaccgtacccaaaaatgaaagtccctcacaggacattagtgatgcctgtgaagcagaaagtacagagaggtgtgggatgtcag

SEQ ID NO: 487865 - DNA, 201 bp, Homo sapiens
gacacattagattttgaggatgtcacagttcaatcatcaggcccgagggctggtggtgaagaattagatgaaggtgttgcaaaagataatgctaaaatagmtggtgccacttaaagcaatcctgaagaaccagagagcgaagatgcagatcactgcaccgtacccaaaaatgaaagtccctcacaggacattagtgatgcc

SEQ ID NO: 487866 - DNA, 201 bp, Homo sapiens; identical to SEQ ID NO: 487857

SEQ ID NO: 487867 - DNA, 201 bp, Homo sapiens; identical to SEQ ID NO: 487830

SEQ ID NO: 487868 - DNA, 201 bp, Homo sapiens; identical to SEQ ID NO: 487859

SEQ ID NO: 487869 - DNA, 201 bp, Homo sapiens; identical to SEQ ID NO: 487831

SEQ ID NO: 487870 - DNA, 201 bp, Homo sapiens; identical to SEQ ID NO: 487860

SEQ ID NO: 487871 - DNA, 201 bp, Homo sapiens; identical to SEQ ID NO: 487861

SEQ ID NO: 487872 - DNA, 201 bp, Homo sapiens
ggtgacagacactgtgaaatgcttaacatcatagttcattcaacaagcgtttatttaggcacctactaactgccaggcattgttataatttctgcagatayagctgtgaataaaacagacaaagctctgcctttaggagtttatactctagtgggcaaaattctctttgcgttaggtacatgaatttgggaatgactaaat

SEQ ID NO: 487873 - DNA, 201 bp, Homo sapiens
agctttggagtcagacagataggaactgaattacaaccagaggtaggacttgcctctccaggtctcagactccttacttataaaatagctgatcacacagaattgctgcaagtattaaacaagatcacgtaagcaacatgcctagtgcatggtaggtgctcaggaaacattccatgattaaatgagctgtagattgcgatg

SEQ ID NO: 487874 - DNA, 201 bp, Homo sapiens
cttgaatccaggaggcggaggttgcagtgagctgagatcatgccactgcattccagcctgggtgacaccgtgaggctctgtcccaaaaaataaaaaacttaaaaaaaaaatcagaaggcagaataaaatttggaggagaagaaaaaatatttgatttgttccaagttgagttttgacattgtgaagtaaaatgtgatgatc

SEQ ID NO: 487875 - DNA, 201 bp, Homo sapiens
attaaatttaaaaacactttttgaggcaggaccttgctctgtcacccagtctggagtgcagtggtgcaagcatggtttactgtaatcttgtcttcccaggytcaaatgatcctcctgccccagccccccactgagtagctggaactatgggtgtgtgccaccatgcctggctaaaattttttagttttgtagagatggggg

SEQ ID NO: 487876 - DNA, 201 bp, Homo sapiens
ggtttgggtgtggcctgagattctatatttcatacactctcctagggatgtcattgtggctggtctgggaactacaatttgaggagcaagagtctagatgmtcccctcattttaaataagaaactaaagttttaaaaggcttaatcaatcagtgacaaatccagggtcagcatttggttttaggattctcagtccacattc

SEQ ID NO: 487877 - DNA, 201 bp, Homo sapiens
tgaatgatagttttgttggatatagtattcttggttaacagttgtttcctttgagcactttttaatatgttgtcctacttcctttggacctccattgtttstgatgagaaatcagcttttaatcttattgaggttcccttgtaacagagaagtcattttcctcttgctatttttaaggttttccttgtctttggctttcag

SEQ ID NO: 487878 - DNA, 201 bp, Homo sapiens
taacaaataagcattagatggcagaggaaaaggaggtgtttgacaatatgagaaagagaagaggtgctgagttgatacactgacggcagctacaaagaagragatccagaacttgtggatggactaacaatagactgttttggaggctagagaatgaaagaataaaaggacaatgacgcatcaaggtgaggataaacgtaa

SEQ ID NO: 487879 - DNA, 201 bp, Homo sapiens
ctttgaaattaaccagtcaacatcttcattacattcccttacccctttagggaagaggttagaaaaaaagaggggctgggaagcatgtttgaagctgcgtgtgtgtgtgtgtgtgtgtgtgtgtgtgtgtgtgtgagagagagagagaaggagaagaaggaggaggaggagaaagagaaagagagagaaagagaaagagag

SEQ ID NO: 487880 - DNA, 201 bp, Homo sapiens
tttgattggattattgaatcctttcacatttaatgtcattattaatagagtttatgtctgccatttgacttttttctatatgtcttttttatacttctatwaccctgtactgctttttttgcataagtgagtattttgtagtgtagcatcttggtatctttactgattgatttttttcactatattttgggagttattttc

SEQ ID NO: 487881 - DNA, 201 bp, Homo sapiens
acaatatgttgtaaaataatcaggaagtgatgaattttgagtatttattaactttgcttttaacataacatatttaattataaacctacataattaagcamtagctagaatgtgacaaccagttctcaaaattcctaaaaatttaacaactgtctctccatgagctggttcaagacaggctccaacacatcatgggatctt

SEQ ID NO: 487882 - DNA, 201 bp, Homo sapiens
tttgaaattaaccagtcaacatcttcattacattcccttacccctttagggaagaggttagaaaaaaagaggggctgggaagcatgtttgaagctgcgtgtgtgtgtgtgtgtgtgtgtgtgtgtgtgtgtgtgagagagagagagaaggagaagaaggaggaggaggagaaagagaaagagagagaaagagaaagagaga

SEQ ID NO: 487883 - DNA, 201 bp, Homo sapiens
cttttagggaaaagcctgtatctcttccattagatggggtgggggattctgtccttggcagggactttatgtattctgtgttccttcattacctacagagraactctgtgtatactatattaactggttttaaaaaggctttctccacctcaggtttcaaaccagagcccagactggaaatatcacttgatgcagccatca

SEQ ID NO: 487884 - DNA, 201 bp, Homo sapiens
gaagacagtgagtgattaacagacaatacatggaacacagaattttcttggtttttaaattcaagtgtgttttattcagcttatgagaagagggaactgayagaatttatattatttgggccaaaatgttgctttgtgtgtttttgcctgaatcatccaattgttttctttagtggacttggccagtggaaggcagtgtgc

SEQ ID NO: 487885 - DNA, 201 bp, Homo sapiens
tcctgctgtcatggcctcagatctaggttgaacatacctactacttgggcacagggaaccaagcaataggtatactctatatgaattattatccaaagacygtaacaggaattcctgcacctcttcactgggtcccctggagttctgtcctatttgtgataaagcaaaccgggactttctctgtccttgtactagttacca

SEQ ID NO: 487886 - DNA, 201 bp, Homo sapiens
ttatcctgtggcaattaccagtttgggtactagtatgatttgacacgaattttataaaactatactgattctttatccagctaatgatctacacgtacatrtaagttcaaaagtttttgcaatctacagatgagtctgagtcatgttcaaaattaaatttttatcaggataggacaaaaagatggttgacctatatgggta

SEQ ID NO: 487887 - DNA, 201 bp, Homo sapiens
ggactatagacatgagccactgcacctggccttgctcaatatatttttaaatgaatggataaataaatgagagagaaaatggagcatatatgttaatttcygaaaacatctgtgcctatatttcaagctaaataatttttaaattattttttattttaacttttagtagagatgaggtcttgctgtgttgcccaggctgct

SEQ ID NO: 487888 - DNA, 201 bp, Homo sapiens
agtttaatgcctctgagacatctaagagaaatccaggaggcagtgacagtcctgtgtctgaaacctgggagacatgatgactggagatacagattttggaatcatctttttatgggagttgatgacattacctaggaatagtaggtaaagtaagaaagtaagacagtctagtatctttggagtttcagtgtttttacacat

SEQ ID NO: 487889 - DNA, 201 bp, Homo sapiens
gtttaatgcctctgagacatctaagagaaatccaggaggcagtgacagtcctgtgtctgaaacctgggagacatgatgactggagatacagattttggaatcatctttttatgggagttgatgacattacctaggaatagtaggtaaagtaagaaagtaagacagtctagtatctttggagtttcagtgtttttacacatt

SEQ ID NO: 487890 - DNA, 201 bp, Homo sapiens
tgattaacaataatgatatcaacaatccttaaggatgttgaaaggcacaccatatccacatggtgaacctcctcttccctcattttgaaaagataattttycctggacatcaaccaccagcttgtttcttaaataaacagtacaacagtacagcaagtaaaatagaggataaggctatttttgttcttaaagccatcatct

SEQ ID NO: 487891 - DNA, 201 bp, Homo sapiens
tccagccttggtgacaagtgtgaaactccatctcaaaaaaaaaaaaaaaaaaaaaaagagtatggatggcaaagacttgcaagtgcctcccagagtccatygtgcccttacttcttagtaacgaagactcattttgggtggctgggggagacacattgttacccagtaaaagactacatttccctggttcccttgcagcta

SEQ ID NO: 487892 - DNA, 201 bp, Homo sapiens
ttcagtaatcctgaggaatttggagcatgtctatcaaatgccttcctttaggaaggaaaccacactgtaggtcctgtaatcacagaccctgccctggcttmtgtcagcataaacacgcctctcgttacagaaaccaccctcagtttcacaccagaagcttctctaaaagtttgttcttcatccccacagtgagacatagct

SEQ ID NO: 487893 - DNA, 201 bp, Homo sapiens
actaaatcactcactccgggggaagccagccaccgtgtcgtgaggacatttaagcagccctagagagaggtccgcaaggtgagaaactgaggccgcctgcygacagccatgtgagggagccaccttggaagcagatctagccccagtcaaacctccagatgcctgcagctccaagcaacaccttgactaccgcctcacaag

SEQ ID NO: 487894 - DNA, 201 bp, Homo sapiens
cgatccactcctcatggttgtagtccagggagccatcaaactcctccgtcagctgggaggggtccaccagctttgtgaggccctccacagataccatgctygtctggaaggggcagacacagacaaggatactcagtgatgtcaggggaagaacagggcagaaataggatgagggaaaggacaagataaatccacataata

SEQ ID NO: 487895 - DNA, 201 bp, Homo sapiens
aataactctcctgcctcagcctcacaagtagctgggactattcgtgagcaccaccatgtctggctaattggatttggtttgatagtattttgttggaaatytttgcatccatatttataagagatattggtctgtagttttcttgtgtgacagatttatctggatttggtatcagggtaatactggccttgtaagctggga

SEQ ID NO: 487896 - DNA, 201 bp, Homo sapiens
tctaggtcttgcatctcggatggcagaccaccttcactgcacatcttgcaccaggcatccactcccgacaggaactggaaggagatgcagggtggatcagkgggggagcactgggggtgaggagttgggtggattatggagagagggtcagataccttgggaagaaacatcaggacttctgaaagccttcagagaccactg

SEQ ID NO: 487897 - DNA, 201 bp, Homo sapiens
ttataatactattttctcgtaaggtaagtaataatatcccctctttcacttctgagtctagtaatttttttcattggttgttctaggtaaaggtttgtaartttggttgaccttttcaataaaccagcttttggtttcattaaatttctctattgttttcctattctctagttaatttctactctaatctttattatttcc

SEQ ID NO: 487898 - DNA, 201 bp, Homo sapiens
tttgctttgtgtattttggtacttttttgttaggtgtatatgtgcttatagttgttacatcttcctgatagagtgacattcttcttctttaaaaagttgcyttttatctttagtaactttttgctgttcttttaaaatgcacttaagaatctgttattaatatagtcacttggctattcttctgattgctgtttgcataat

SEQ ID NO: 487899 - DNA, 201 bp, Homo sapiens
ggacaacaacggagcaaggtctcagggaaggcataaggcgggggtccagcccacagcagatggggctgcccccctctctgaggcaggctgttgaactccamgagagaggaggaaatggagatacgtggtggagagggaagagttcagcctgcctgagggacatggttctttgggtggaacagtagacaagaggcagtccag

SEQ ID NO: 487900 - DNA, 201 bp, Homo sapiens
agagatagttcctgaagtcaatgcttgaaatttgttctggccccaggagatctctttccctgattgtctctggcaaactaacctgcctgaaatgctgcctrtgtcgccaatggatctaccaatcttctaatttgctttcaccagaacctccctaagagcatttttgtaagtggcttaaacttttccatcctctgttgcaca

SEQ ID NO: 487901 - DNA, 201 bp, Homo sapiens
tttaatgcctctgagacatctaagagaaatccaggaggcagtgacagtcctgtgtctgaaacctgggagacatgatgactggagatacagattttggaatcatctttttatgggagttgatgacattacctaggaatagtaggtaaagtaagaaagtaagacagtctagtatctttggagtttcagtgtttttacacatta

SEQ ID NO: 487902 - DNA, 201 bp, Homo sapiens
acagtctacttccctatttaacaaaatacttatcatcagcccagtctcctcctatataggatgtgtagttggagaataaatatatttctattttaatatcrgcgaaggaaaagagaattagggagttgaatttaccactgatactggagaaaaataaattaaaacccaggaacaaaagcaaatttatatatttcatttcaa

SEQ ID NO: 487903 - DNA, 201 bp, Homo sapiens
ttagcagtggtgtgttagaaaatgtttaacaaccagcatatatatgtatgtgtgtatatgactatatattacatatacacaggtaagttcatttacaaatyctactgatataaagaatgtataaaacacaatttacagagaacaacagcatatacaatactctgtattgtatatttaatgtagccagttgattctcacagg

SEQ ID NO: 487904 - DNA, 201 bp, Homo sapiens
gcatcacatgagaagatctgtcaccaatcttgaggtgacttctctagtcccatctctagcatcacatgagaagatctgtcaccaatcttgaggtgacttcyctagtcccatctctagcatcacatgagaagatctgtcaccaatcttgaggtgacttccctagtcccatctctagcatcacatgagaagatctgtcaccaa

SEQ ID NO: 487905 - DNA, 201 bp, Homo sapiens
agtctgtctaatgaggcatggtggcttaaccaagcagcagtcccttggcacctcgagggccactgcccttttgcaaagggcttggtagatttcctgagaayctggtttgagcaattttgtacagtcttgaacgacagtcccacggtgtgtcatttttgtcatggtagaaataaggaatcttcccacccccacaaaagaatt

SEQ ID NO: 487906 - DNA, 201 bp, Homo sapiens
tatctgaccactaggacaagagccccctctggcttctttccatctccctcctccaatcgataccaaccaaccaaccaaacaaacaaataaattaaagtgtktgcatcctaagtcctttaatatctgagtctcttgggaagcagtggagacttcaggttcttccaggctaaagatctagtgatttggcttcaagacagtttc

SEQ ID NO: 487907 - DNA, 201 bp, Homo sapiens
atcacatgagaagatctgtcaccaaacttgaggtgacttctccagtcccatctctagcatcacatgagaagatctgtcaccaaacttgaggtgacttctcyagtcccatctctagcatcacatgagaagatctgtcaccaaacttgaggtgacttctccagtcccatctctagcatcacatgagaagatctgtcatcaaac

SEQ ID NO: 487908 - DNA, 201 bp, Homo sapiens
actggagcaacagcagaaaaaacaacagagcccttctttctttattctactatcctcaccccatctgctccttccaggcctatctacagcccctcccatgwgagatcaaccctcccaagaaatgctggagaaagagggcgtcagagaggagagttgagagtgctctgcctgccgcacacatggccagggaccagggaccag

SEQ ID NO: 487909 - DNA, 201 bp, Homo sapiens
ccaaacttgaggtgacttctccagtcccatctctagcatcacatgagaagatctgtcaccaaacttgaggtgacttctccagtcccatctctagcatcacrtgagaagatctgtcatcaaacttgaggtgacttctccagtcccatctctagcatcacatgagaagatctgtcatcaaacttgaggtgacttctccagtcc

SEQ ID NO: 487910 - DNA, 201 bp, Homo sapiens
tttaatctactctctatcctacctccaaaatgatcttctactccccaaagtctaggggttctaagggtcagagaaaggtatatttttctccctcccctcawaaagcttacagtctagatgagaatactcaacgcacatgaactagagatcaacaaaagacaatagaggaaatggtatagccaataaaaattgagagattac

SEQ ID NO: 487911 - DNA, 201 bp, Homo sapiens
tttgaagtaaacaatgataattatgtctaaagaattgatcattgatagaaagacagtgctggcaattttatttaaaatctgatcaatttcaatagagcaayaccctgacttttgtgatagcagctaccaaaaacctatgggaagatgcacaatttgaaaatcctcaggaagcaaaaatactataaccagaattaaatgcac

SEQ ID NO: 487912 - DNA, 201 bp, Homo sapiens
atgaactcctctataaactgtccccatatccaggaatccaagataacggaattaaagactgcttggttattctctgcagagtatgccaaggtttctcaccyacccattgtaggacaagagaaaaggtgggagcagagaaaaggtgggggcatttccaagatatgcctttcccatgttctggaaatgctcaaactctcctac

SEQ ID NO: 487913 - DNA, 201 bp, Homo sapiens
tgctaagttattcagttttcctaccccaaacttcactgtctttagaacaatcctgttccatccaacagccattatgtgtgacatgtagccaagagaattargaagtgactggtgggcatgactaggtgaactctgcggcctgccaggcacttacactcttcatgaatgcaggtccctcaggaggcagggcagcaggcatca

SEQ ID NO: 487914 - DNA, 201 bp, Homo sapiens
gcaaaaatactataaccagaattaaatgcacagcatataattttcatgaggaatgcctttctgtaaaatgaaggctgttttttttttttttttttgagacrgagtctcactctgtcactcaggctggagtgcagtggcgcagtctctgttcactgcaagctctgcctcccaggttcacgccattctcctgcctcagcctcc

SEQ ID NO: 487915 - DNA, 201 bp, Homo sapiens
gaagtgattctatccacccactgtgtttgttttgaaactgattcctttctaactcaccaggttacctaaagtgctcatacatcacaggtagtggtgatagkggtagatttattgtcttttttgttactttaagcactgctgttggatgggtcctcaaagtaacagagaacattagcttgtcagtgattattatgatccaac

SEQ ID NO: 487916 - DNA, 201 bp, Homo sapiens
aggagaatcgcttgaacctgggaggcggagggttgcagtgagctgagatcgcgccattgcactctagcctgggcaacacgagtgaaactccatctcaaataataataataataataataataataataataataataataaaactttgtgggggtgcttgtaaggatttaataaatccacaggtaaaaagaacccaaccca

SEQ ID NO: 487917 - DNA, 201 bp, Homo sapiens
ggagaatcgcttgaacctgggaggcggagggttgcagtgagctgagatcgcgccattgcactctagcctgggcaacacgagtgaaactccatctcaaataataataataataataataataataataataataataataaaactttgtgggggtgcttgtaaggatttaataaatccacaggtaaaaagaacccaacccag

SEQ ID NO: 487918 - DNA, 201 bp, Homo sapiens
gagaatcgcttgaacctgggaggcggagggttgcagtgagctgagatcgcgccattgcactctagcctgggcaacacgagtgaaactccatctcaaataataataataataataataataataataataataataataaaactttgtgggggtgcttgtaaggatttaataaatccacaggtaaaaagaacccaacccagt

SEQ ID NO: 487919 - DNA, 201 bp, Homo sapiens
ggactccccttcctaatcttgaaagcaaagtccagggtagtcagtctccagttggatgctcatgatatctgaccactaggacaagagccccctctggcttytttccatctccctcctccaatcgataccaaccaaccaaccaaacaaacaaataaattaaagtgtttgcatcctaagtcctttaatatctgagtctcttgg

SEQ ID NO: 487920 - DNA, 201 bp, Homo sapiens
tggcttggatgaagtttattcaccagtaactcagccagaaagttccattaggattttgcatagcagatgggatgggagactgggtggggtattgtaaatgsgggtggaggccagaggcccaaaaggtgaaactttttaaaagggcaaatgtcaagtagggggctacattctcatttctacccacacaaaaacagtcttccc

SEQ ID NO: 487921 - DNA, 201 bp, Homo sapiens
ttagggttgggagattagagttgggagaccacctgcctgcctcagaatcttgatttttctcataccagatctgatttttccttggtgctgtcatttgtaaycttccctcaaaacaaagagagaacacactgtagttttttttctgcaactggtctgatttgcacaccatcaagtggcaatatgtgcctttggcgagcaaat

SEQ ID NO: 487922 - DNA, 201 bp, Homo sapiens
gcctctcatagtgctaagccagggagattccatgggctgggaatggtggactcactccagtgtgactagaatggcagatttaaaattagactggttttcargttcagtgaaatgagattatgcaagtttttgcagacatctctaaacatgagctgaattacatcagattttctctgaaattacacaatgtacttataacat

SEQ ID NO: 487923 - DNA, 201 bp, Homo sapiens
ctttaaattataagttctttggtacattatagagttacttcaattcacaggccattaatttctatcaatgaatgaacaatcaacattaagtcaatgcagayggttgattgaaaaatgtacctgacctgaccaccccctcatctaaattgggtccttttcttaaactctgtcctaacatcccttactcttccaacataagac

SEQ ID NO: 487924 - DNA, 201 bp, Homo sapiens
ccatgagacataatcatctctgtcttgttcaccactatatgctcagtatccaatacaatgtctgatctttaattatatgttaaatgagtgaataaagaagwgataaggttcttagaaccttaagttggggaggttgattgacaggttttaggattcccctgaatctccggaaactgtctttaaaaatgtgtttatgcatac

SEQ ID NO: 487925 - DNA, 201 bp, Homo sapiens
tgttgggtaatgtgaaaattctggcacagaatttgtaaaactcaccagggaaaatccacaaggcacacaaataatcagacttgactagatttgagttcacrttcttaatcacctgttaccaattgctttgctgctctacactaaagggagacagaaatgagaaatatctacaggagaccagtgggaagaaaatgagtcttt

SEQ ID NO: 487926 - DNA, 201 bp, Homo sapiens
ataggactgcacaatgtccccagccacttcaaattggacgtggttctgtgactggcgttggccaacggaatgtgagcaaatgtatcacttctagttggaargtttcagagccagcatgtgtccagcatgtgtccttgggtacatgctttgcctggcaagactggcagcatctgagctggcagatctgagctggtgactata

SEQ ID NO: 487927 - DNA, 201 bp, Homo sapiens
gacgtggttctgtgactggcgttggccaacggaatgtgagcaaatgtatcacttctagttggaaagtttcagagccagcatgtgtccagcatgtgtccttsggtacatgctttgcctggcaagactggcagcatctgagctggcagatctgagctggtgactataccatcagcccaggtctctctgggtggctatgataag

SEQ ID NO: 487928 - DNA, 201 bp, Homo sapiens
gaaagggtggagccaagacaactgcaggaagcaggcagagccctggctgagcattgtctggtttccactttgtctctggacttccttggacctgagccaakaaatcctctttattattaaagccagtttaagttggactttctgtaatattctgtccagagcaggaaattctactattttctccttaaggcagccctttaa

SEQ ID NO: 487929 - DNA, 201 bp, Homo sapiens
accagctctctggagccagaactgcagccttatccaattatgtcccttgaacagaagagtgagttactacttcaattacattcaaccagtatttatgggayacctgctatgtgccagggaccgctggaggtggcatgaggcaaaaatgactaaaatatggttcttgagtattagtggcttaaaggctaatgtggaaagttg

SEQ ID NO: 487930 - DNA, 201 bp, Homo sapiens
atatgttgcccaggctggtcttgaactcctggcctcaagcaaccctcccatctcagcctcccaaagtgccaaaatgcagtttctgactcagtcggtttggrtgtggcctgagattctatatttcatacactctcctagggatgtcattgtggctggtctgggaactacaatttgaggagcaagagtctagatgctcccctc

SEQ ID NO: 487931 - DNA, 201 bp, Homo sapiens
cacatctcagtagagagaaaaagacctgctctggggattagatggtctcatgtgatgtcaggaaccaaggtttcctaagggacaatcacaagtcttctctrgacctaaacttgctgcctactagcatataatcctcacccctgcaaggctggctgtctgcaagggtcatagtcatctctgttacattcagtggaactggct

SEQ ID NO: 487932 - DNA, 201 bp, Homo sapiens
gaggtagggtagcacagctgtagagttgtggagcattatcctaaaggcattggaaaatcattaaagttcttgatctgggtggttatgtgaccaaagtagcrttttaaagatgaatagcaataaaggacagggtggattggaaggaaggaaagaccaaaggcatgcaatcaaattaggaagctactacagctcagggtagta

SEQ ID NO: 487933 - DNA, 201 bp, Homo sapiens
agaatcgcttgaacctgggaggcggagggttgcagtgagctgagatcgcgccattgcactctagcctgggcaacacgagtgaaactccatctcaaataatwataataataataataataataataataataataataaaactttgtgggggtgcttgtaaggatttaataaatccacaggtaaaaagaacccaacccagtg

SEQ ID NO: 487934 - DNA, 201 bp, Homo sapiens
ggcaactgtcctagattccaggatgcttccagatggcaaatcctacatcggctctataggatttaatttagggggagaaagctaagaacattttttttttwaaaaacctattcagcttgtgccaggcataccaattgataagtttgaataagatattcattaccatctcaatgtaaatgttgaaagtaagtggcaatatta

SEQ ID NO: 487935 - DNA, 201 bp, Homo sapiens
actctgctcacccttagactatttaagcaacactgccttattcatgaatccacctctcagatcagtctctgctttggaattctttgacccttagactattkaagcaacattgccacgtactcttgtgtacagggctttaagagtatgcactgtttcaatgcctatagcaactgcaaaggaaccgcagcaaacatgtatgtt

SEQ ID NO: 487936 - DNA, 201 bp, Homo sapiens
gaggtcaggagatcgaggccatcctggctaacacagtgaaacctcatctctactaaaaatacaaaaaaattagccgggtgtggtggtgggcacctgtagtmccagctactcaggaggctgaggcaggagaatggcgtgaacccaggaggtggagcttgcagtgagccaagattgtgtcattgcactccagcctggctgaca

SEQ ID NO: 487937 - DNA, 201 bp, Homo sapiens
gctgaggcaggagaatggcgtgaacccaggaggtggagcttgcagtgagccaagattgtgtcattgcactccagcctggctgacagagcgagactccgtcaaaaaaaaaaaaaaaaaaaaaaaaaccctgaggtccttgatataatcacaactgtcaattaacagggttgggagggatcttggtcattcctttttatactt

SEQ ID NO: 487938 - DNA, 201 bp, Homo sapiens
ctgaggcaggagaatggcgtgaacccaggaggtggagcttgcagtgagccaagattgtgtcattgcactccagcctggctgacagagcgagactccgtcaaaaaaaaaaaaaaaaaaaaaaaaaccctgaggtccttgatataatcacaactgtcaattaacagggttgggagggatcttggtcattcctttttatacttg

SEQ ID NO: 487939 - DNA, 201 bp, Homo sapiens
ttaaatttatatctattttcacaggcagaagaactgtgcaaaaaaaaaaaaaagaaaaagactaaatttgagtgacaaaatataaaagctgacattgaagtttttttttttaagtcagtgtactggaagcccatactttcaaatgacaaccaggagcttttaagcaagcaaagactagacaagacaggtgatgaagtcatt

SEQ ID NO: 487940 - DNA, 201 bp, Homo sapiens
attagagaaatggaatggttccacacatatatgtagtctaatatgtatagttccaacacacacacacataaatctatcacaatacgtacagacaaacatamtaaaggcatattttaaaaaaaatcttcctagttttacttcacagactctttgttaaaacagatgatgtcatggttgccaaaattgtaagtatgctcttta

SEQ ID NO: 487941 - DNA, 201 bp, Homo sapiens
cttttcttccatggcgatgagggcagtggtgctcagggagatgagaagggaggatgtcccagaggacaatacccctgcctacctctgtgttgactcctagsgctttctccagtgagtatcggtactttcccatcctcagggagaaatctctgtagtgcttgtccaccgtggtcacccatttccttatctccgtggcatgaa

SEQ ID NO: 487942 - DNA, 201 bp, Homo sapiens
gccgagattgtgccactgcactccagcctggggaacagagcaagactctgtctccggaaggggaatatcacactctggggactgtggtggggtggggggargggggagggatagcattgggagatatacctaatgctagataacgagttagtgggtgcagcgcaccagcatggcacatgtatacatatgtaactaacctgc

SEQ ID NO: 487943 - DNA, 201 bp, Homo sapiens
ttcctactaggaaaaaaaatgagtgttgtaatagtcatcctcataattattacaaagcaacagagattaagagtaattctcccaaaggcacaaagcataaraaaatagatctggaaatcagacctacctggcatccaagatcttgctgtacttagtgtgtgggaacatttgcatgtgtgtgtacacatatatgtgcatgtg

SEQ ID NO: 487944 - DNA, 201 bp, Homo sapiens
cccttacccctttagggaagaggttagaaaaaaagaggggctgggaagcatgtttgaagctgcgtgtgtgtgtgtgtgtgtgtgtgtgtgtgtgtgtgtgwgagagagagagaaggagaagaaggaggaggaggagaaagagaaagagagagaaagagaaagagagagaaagagaaagaaagaaaagagaaagagaaagag

SEQ ID NO: 487945 - DNA, 201 bp, Homo sapiens
tcccttacccctttagggaagaggttagaaaaaaagaggggctgggaagcatgtttgaagctgcgtgtgtgtgtgtgtgtgtgtgtgtgtgtgtgtgtgtragagagagagagaaggagaagaaggaggaggaggagaaagagaaagagagagaaagagaaagagagagaaagagaaagaaagaaaagagaaagagaaaga

SEQ ID NO: 487946 - DNA, 201 bp, Homo sapiens
ccaaggtttcctaagggacaatcacaagtcttctctggacctaaacttgctgcctactagcatataatcctcacccctgcaaggctggctgtctgcaaggktcatagtcatctctgttacattcagtggaactggctgcagaggcagaatgtgtgcatacatgaatgcatgcgtgtgcatgtatacatacagtcaagtgag

SEQ ID NO: 487947 - DNA, 201 bp, Homo sapiens
tcctcacccctgcaaggctggctgtctgcaagggtcatagtcatctctgttacattcagtggaactggctgcagaggcagaatgtgtgcatacatgaatgyatgcgtgtgcatgtatacatacagtcaagtgagatgaagactacactggttccaggcccagctctgtcactaactccacatgagactgtggaaaagtcac

SEQ ID NO: 487948 - DNA, 201 bp, Homo sapiens
gatagatgttacatgtaagtcatttggggtttttttttccttttcttttggggttttgtttttaaccaagctaagtaatttttttttctgctggctaaaayccagtgaaaatatacaaatctagttcttaatacagtaaatgttaaatgaatctacttaaatgcaaattaggaaaacaaacagaaacctttttctcctttc

SEQ ID NO: 487949 - DNA, 201 bp, Homo sapiens
actctaattttgaaagcttaccaatcctccaatcctacaatgacttatctaaacttacctcccacttccctggctgccaatttgtggcttccttttgtgtycttcacagcctattgtgacaatctaaacatggacctcagccctttacccttcatccatcaaaccctctccatgtgaatatccacccgggcccacaacttc

SEQ ID NO: 487950 - DNA, 201 bp, Homo sapiens
gaatatccacccgggcccacaacttcaacaacaataatactatgtcttatttcatgtgcctgtgccaagagccttcatagtgtatgtcacataatcctcayaataatgctacaaagaagatattgttaattccattttaaacatggtgaaaactcagtattaagaagccaaataaattggctaagatcccacagcttgtaa

SEQ ID NO: 487951 - DNA, 201 bp, Homo sapiens
tattgttaattccattttaaacatggtgaaaactcagtattaagaagccaaataaattggctaagatcccacagcttgtaagtgatgaagataaattggamtctagtgtccatctgaacctaaatcccatgcaagttcctgtttcataatgctctctaacaataacttcccagataattgacaagaataaatacatgccag

SEQ ID NO: 487952 - DNA, 201 bp, Homo sapiens
agccagtgacttctgaggtgtcctggcctaaaagctgtgtctaaataggggactagaaataagctgggtcaattggggttgtttccctgaggatttaaackgtacagacagggatctgggtgattgcttgcagagtagaagtgaaatcacagaaagcagagaggaagaagaaaaaggaagctgtggtatagaaatggtaga

SEQ ID NO: 487953 - DNA, 201 bp, Homo sapiens
ggactatctatagtcacacagtgcctgctatggtttgaatgtgcccccaaatttcatgtgttgaaaacttaatccccaagttcatatgttgatggcatttrgaggggaggcctttgggaggtaattaggattagatgaggtcatcaaagtgggaccccccccatgatggaattagtgactttagaaggagaggaagaggaa

SEQ ID NO: 487954 - DNA, 201 bp, Homo sapiens
tttaagtgagcaagtaaagaagttctaccatttcatcctgtgtagggtcgttgtcaaaaatcttcataggtggtgggaggggtgtgtgtgactcttcatcyggctcatcttcaccccaacctttcttgctcttctagaacaaaagagcagcattagttactgtgtcacaaacatgccagtggttctggacttgacattaac

SEQ ID NO: 487955 - DNA, 201 bp, Homo sapiens
ttatatgtaaaatgggaataatcatagctgcctgaaagaagcgatagaaagatacaaagagaaaatgtgtgtaaaggcactttatgtaatgtttaggacayaaaaagtgtaggtgctggtggcaggaagagtattgatattagcaataataaaatgtactccagaaaggtaaacctggcatcactgtgcaggtgaattggg

SEQ ID NO: 487956 - DNA, 201 bp, Homo sapiens
tccaagtatcttttgcagccaaattgttttattcactgccatgcagacacactatattatgctcattccatccctatattggtgtccacatttccccccaycatgaaatacccacactcaaatctccagattattcccatccttcaaaattgaagtctcatctcctcctgatgcctttcttgaccaaataagcccatactg

SEQ ID NO: 487957 - DNA, 201 bp, Homo sapiens
gttactgtgtcacaaacatgccagtggttctggacttgacattaacaaaaataatacataggaggagagttcctctctcaactcactcttaactgttcagycgcaatttcctcttttgatacatggatacacctgcttatttcaaatgagagtgagcaccagtggggaacacacacacacacacacccccaaaaagaagca

SEQ ID NO: 487958 - DNA, 201 bp, Homo sapiens
acactaggattaataaaaagataaaaatatacctaccataccaaagtctaaaccaaggctcaattagatcaatataatcttttgtaatttaattgtattcytgaataagactttaagatatttagggaaagataaactatcaagagcctctacagtgtatcatctacaatatccactatacaatgtaaattataagatata

SEQ ID NO: 487959 - DNA, 201 bp, Homo sapiens
agaatctcagcttcatccagcctaactttggctacagtctctcaaaccttccagtatgggcgttcattagttttcatgaaggcccatttaatcactgactractcctagattaaactttttctttgagcggaaaccctgcctattgtaatcttcatctgttcatcatagttatctggagtaactctggatgatctattcct

SEQ ID NO: 487960 - DNA, 201 bp, Homo sapiens
cagaatatttgtatttggaagcataaaaattgagcttctaaaattctctggtatgaaggataactcacagcgttgctatactcagggaatattaggagctygactaacttggttggcatctctttaaggaaaaagctgtaatcttatctcagaaaattccttgctggctgtggtcttgggtgtgttgacattgtttctgaa

SEQ ID NO: 487961 - DNA, 201 bp, Homo sapiens
aaaaaagggaggaaaagcaacagatgaaacaaatagaaaagaaaaaaacaaggtgatagatttaaatctaaacatatcagcaatcacattaaatataaatygtctaaataacacaatcaaaaggcagagattgtcagattagataaaaaagcaagtcccaattatatgctgtctacagggaatgcactataagtacaaaga

SEQ ID NO: 487962 - DNA, 201 bp, Homo sapiens
aacaacgatactaattgctttggtgttttctttgataacaagccacctctgtccacaaggtgaagagcaaacccatcacttatactggggatccaactagycttctgaatatccagggacacagctgtcccactgccccttggttctcagcaaccactgagtatgccaccacagaacaggccctgggaggacatgccatat

SEQ ID NO: 487963 - DNA, 201 bp, Homo sapiens
gactgcttcccttggctccccttcatctggcaggctacagatcacatccccatagttgcatctttgggagtggcacgtgcagccatcagggctgcacagawctcagtggcactttcacagtgatctgcaccagccccccaggcaccatgcgacagcatggtagaaatggcaggaggagcactgggctatgagtcaagagtc

SEQ ID NO: 487964 - DNA, 201 bp, Homo sapiens
tctctctcttttcttggagatggagtctcgctctgccacccaggctagagtgcagtagcgtgatctcagctcactgcaacctccacctctcaggttcaagyaattctcctgcctcagcctcctgagtagctgggactatagttgtatgccgtcacacccggctaattttttgtattttagtagagatggggttttaccatg

SEQ ID NO: 487965 - DNA, 201 bp, Homo sapiens
gcattcattccctcagtgtcagaaaaggctgtgaagcagtaacaaccaagattcttaatgcattcccaatattaaaattcaacttaattaagtagggctattttttttttcctgagcagcaatcaaactttaattaatactctattaaagggaattcctggggggggacacaagcatgcatacacctaatgagttcatctg

SEQ ID NO: 487966 - DNA, 201 bp, Homo sapiens
ggagttttttattctggcttcacatccaggctcagccgataattgtatgactttggggagtaaaatcatttctttgagcctcagtttcctcatcttatctyttccaacttcatctttcttattttccaggtacaggtgtcatctcctctccacagtcttctccaaggcccagcacaaggctttatatagaagggaggagga

SEQ ID NO: 487967 - DNA, 201 bp, Homo sapiens
aaatctagttgaagcaaagacctacattcccaagacaactgaccattcatttattagttgctgcccctagctaacacccaaaccacaagctgccgttgctygacctccctgcaggaaccctggtcattcagaagtaccagggtgaagctgaaaaagaagggggaacaaatagctttaaatcaagggacacaccctctacag

SEQ ID NO: 487968 - DNA, 201 bp, Homo sapiens
tccatgccagccctcagggaggtttcctggatgatccctaagaggaggcaagatggatctgggaggagggaatgagtagattcccaagacagcttaaaacycaaagagattttacgttcaacattaattaaatgtcatttctaaaatttttaaatccctggcactgtgagaaagatttacaatgctaaagcaaaaagggct

SEQ ID NO: 487969 - DNA, 201 bp, Homo sapiens
tagacgcctgtagaccagtcctgcagtggcttcccaacgttccagacccataagcaggagtagtcaggaataatagaaatggggatgcattaaatgtgagrtcctagtgacagtgatcattagtgtttatttcatatcctttatttgttttcttgtttaagctcttttagggtccctgtgccctaccagcaaatcttgcta

SEQ ID NO: 487970 - DNA, 201 bp, Homo sapiens
aactcccattaatgttgatattttgacctcctcccacgaaccacaaatgttcttaaggcatctacaatgatgaatccttctcaggttttcaatttactttrcctagatgtatcagaggaatcactatctatggcagcaatagtcttatgaaatgtacttcttaaataataagacttgaaagtcaaaatcagtccttgatcc

SEQ ID NO: 487971 - DNA, 201 bp, Homo sapiens
acagatgcacagatgacacagaagatcaggcagtacccactaccccttcctaaggagcagggaaaaatttagctaagctcagacttctctgctgggaatgygtgcctggggctgccccaggttctgatctctggctgctctttagttgctgatgctgctatttttagctgaacagtggccccttcccagcctcctctccaa

SEQ ID NO: 487972 - DNA, 201 bp, Homo sapiens
tctgggcggaagagcaaacacaaaggtcccaaggcaaggcctggggtggccttggtggagtaagccggggggatcagtaagaaaggaagtcagaaaagctrctgggagctgggtcaacaagcatgtggtaagccagtgctatgcctctggcttttacctggagtgaaaacccactggaagattctgagccagagtgattca

SEQ ID NO: 487973 - DNA, 201 bp, Homo sapiens
acagtatgaagattcttaaaaggaataccacaaaatagaatatcagcaacactactccagaaggtatgcccagtgttgtatgggctcaagagtaaagtccycaacattcaacttgcttttttatttttatttttaaagttattttgcattaaaaaacagatacagagtcataatttgcaccttttattcccaaggtaggat

SEQ ID NO: 487974 - DNA, 201 bp, Homo sapiens
tagattagaaacatctacttagttaatcgcttcttcagagggattggcatgttatgctcatcccatcttttttggaaaatggctgccattagctgctagakaacttattttactatctttctagataaaacagttaagtgacagatttggaataactacaacaataatatcgttctctcgtcaaatcatcccaagtccagg

SEQ ID NO: 487975 - DNA, 201 bp, Homo sapiens
ggagcacttggtccaacttggcagagatagggttagggaaaagcatggatggcttctgggtggcaacacctggacagcacttgaaagacaacaggatttcrtcaggcaaagaaggtgtagtttgcaagggcattttaatcagaggaaatagcttgagcaaaggcctggaggtttaaagcagcagcataaaatgagggattg

SEQ ID NO: 487976 - DNA, 201 bp, Homo sapiens
ttcagagggattggcatgttatgctcatcccatcttttttggaaaatggctgccattagctgctagataacttattttactatctttctagataaaacagytaagtgacagatttggaataactacaacaataatatcgttctctcgtcaaatcatcccaagtccaggcaggtgttatttattaggattcccaccttagga

SEQ ID NO: 487977 - DNA, 201 bp, Homo sapiens
tctgggtggcaacacctggacagcacttgaaagacaacaggatttcgtcaggcaaagaaggtgtagtttgcaagggcattttaatcagaggaaatagcttragcaaaggcctggaggtttaaagcagcagcataaaatgagggattgtaagaagccatagtaggagatagggagataccagatcacaaagggcaaaagatg

SEQ ID NO: 487978 - DNA, 201 bp, Homo sapiens
ctgtctgtggtaaagaatcagttttacttgtttccaatctattttggaccagtacttttttttttttggaagaagatagagatggggtctcatgatgttgyccgggctggtttcgaactcctgagctcaagggatcctcccgcctcagccttcaaagcgctaggattacaggcatgagccatcatacctggccagaccaat

SEQ ID NO: 487979 - DNA, 201 bp, Homo sapiens
attttggaccagtacttttttttttttggaagaagatagagatggggtctcatgatgttgtccgggctggtttcgaactcctgagctcaagggatcctccygcctcagccttcaaagcgctaggattacaggcatgagccatcatacctggccagaccaatacttttatgaaatacatcacactcttggatgttgtggaac

SEQ ID NO: 487980 - DNA, 201 bp, Homo sapiens
tcactgtggattggacttagttcaaagaccttggctgtctgtggtcacacactgaacagcactgcttttactctaaagcataaatctccaggtggaactgyctggctccaccactgggcactgttatgactctgggcaggttaccttggtttctgtatctctgtatcttggtttcctcatcagtagggaatattagaacct

SEQ ID NO: 487981 - DNA, 201 bp, Homo sapiens
aagtccagtctcactctccattctagggccctcatgtttgtaccccctcttgccacctcatgacaaggtcacctccccagggaaatctgggacaagctggycaacccaatctctaaagaggatggaggaaaccaaaccctcttttatctctccaccagaacgcatatgttacagagtatatcttctcaccacatcagcagt

SEQ ID NO: 487982 - DNA, 201 bp, Homo sapiens
gttcctatagcaggacattcttatgctagagaaagcttactaaggagagactagaggtgaacaaaccaagagtgggatttcaaaggggccatgggatgggrgactgggggaagaacccttctgggattccagctagaggcagatttcctccaagagattaatattcctttgcgtgttttttttcttttttttattatactt

SEQ ID NO: 487983 - DNA, 201 bp, Homo sapiens
tgtggattggacttagttcaaagaccttggctgtctgtggtcacacactgaacagcactgcttttactctaaagcataaatctccaggtggaactgtctgrctccaccactgggcactgttatgactctgggcaggttaccttggtttctgtatctctgtatcttggtttcctcatcagtagggaatattagaacctatct

SEQ ID NO: 487984 - DNA, 201 bp, Homo sapiens
aaactcttggggtttcagatcaactaacttgggctacaaaaactagtgcacctacacatacaaaatctcattctcacctgtgcaagtgggaccaaaagctkcagactcctcccattacccctcatccacttgaaaaactggtcccaggaaagctgcattaaagagtttagagcccacgtcaaacgaaaataggctgaaaga

SEQ ID NO: 487985 - DNA, 201 bp, Homo sapiens
aaagaaaaacctaatactaccagttgccacctggtaatagattctccctatctccagtaagtaatgatagctctttaaccactcctaagaccaatgcctgmaatctcttcctagaataaggtagcctcatcctttggctatcaggcaattttccccctccctcaccatttggaagtttaagcagcacaggttattccctga

SEQ ID NO: 487986 - DNA, 201 bp, Homo sapiens
tctcccccttatccatgagggaagggatgcagtccaagatccccagtggatgcctgaaactacagatggtatcaaaccctatatatgtttttttctatacmtgtgtacctatgataaagtttaatttataaattaggccttaagagattaacaacaacaactaataatgaaattggacaacaataacaatatgccagcatc

SEQ ID NO: 487987 - DNA, 201 bp, Homo sapiens
gtgattgttaaaagacaatggggtccagttgctccatataaaccatacctgttttatctagatggtcaataggtctataaatgtccacctggtgttaatcrtaatactgaattggaaactttgactccaatggctgaaatcagaagaaatcacaaagatttctaatatccactaacaatttacagaggggtcctttgacct

SEQ ID NO: 487988 - DNA, 201 bp, Homo sapiens
acatctgtctgaagatattatatactcaaacattcctattttctttgctttccagaaataatttgctaatataaaaattatagaaatatcatatatacatytttgttcacactggaaattgaatatctagagaagggcacgtaatgggagggccaaaggtgaaaatttcctgggtagccaatggataaatccatatttgtt

SEQ ID NO: 487989 - DNA, 201 bp, Homo sapiens
gcagctatcacctatagatctcatctactggcaaatcaccttttccagtgtccctatttctgtaacaagtacttgtataaacctgaaacaaatttttatgygggtccaagtgctctgagtaccacgagagcacttccgaggtttcctgcaagctgcgtgtgttcagcaaactactcactgtctgctatattttatgaaact

SEQ ID NO: 487990 - DNA, 201 bp, Homo sapiens
ctttctctgctttttaaagctggaaattaagaaaatgtgaaaaaaataatttttatgagtattatttgagctatctggtggtcctgcttctgaaggagaarcatctatgaaacatcactcatgaagcacttaatgaacaccatctttccagtcactacactaggcactgcactatctcataggggagacaaccttcatctg

SEQ ID NO: 487991 - DNA, 201 bp, Homo sapiens
atattttatgaaacttacttgcttttgcagacgattggcaattttaatgatgggtttcttgagggaggtttttaagctatggaatataaatcaaaatattragtaaaataatgctgatatgaaatattttgccctgtgaacctaggttgtatttttcagcaaagtatatttcataccctttggtggtatgcaacagctgga

SEQ ID NO: 487992 - DNA, 201 bp, Homo sapiens
tatgatgcaaagacatgagaggaagcagacggaaagttgaccaagagataagcagagagggtagagtcacctcttctatgagcttcatttgggaaagaaastggtatcactgagcctctccccagggagattcccctagtttaacttggctgagccactgatccaggccctcccaatgactctcaccagcattctggggac

SEQ ID NO: 487993 - DNA, 201 bp, Homo sapiens
ttgtgagatgccaggaaggcgctaaaggttccttggggtaaagccacatcttgaagccttgatgtggttgtaaggaatcagagtgatggactgggtccccrtcttatttgtttttctttttttaccacacgtcccaagtacatctatagctaactaaagctttaccacggtattttctgaggaaagaactctgaaatgctc

SEQ ID NO: 487994 - DNA, 201 bp, Homo sapiens
ttggacacacggagtttaggaaccctctgaaaattgcaatagaggtgtccacagagccaatgggtttataaatatcgaacccaggggtgaaaccagagatragacatggatttggaagccatgagagtaggcgtggctgttgagactgagagagagtctaaattgttcagggagtttgtgtaaagtgagaagagaagatct

SEQ ID NO: 487995 - DNA, 201 bp, Homo sapiens
aaactgggaaaactgcagaggataaaaagaaacttctgggctactggccactaaaatacagcgatctttagcatggtaggaaccatccctccccagcacakcacaatcatcttgtcaatgactccttatgacccctaccaaagcttctgactcatttgggaccccccaactccctaatattcctccaaattagctgccatt

SEQ ID NO: 487996 - DNA, 201 bp, Homo sapiens
ctagataggtttagatacatgaatatttatcattgtgttacgattgcctacagtatctggtacagtaacatgctacacaggtctgtagccaaggaatgatrggctataccatacagcctaggtgtatagtagtctgtaccatctagatttgtgtaagtacattctacgaggtttgtacaatgaaattgccttatgacacat

SEQ ID NO: 487997 - DNA, 201 bp, Homo sapiens
gaaacaaaatagccccagtggggaagggcaaaggcaaggtcagcagctgagaagagccacagtgatgaaaccaagaaaggttgaacatacccccaccacamaagcagttaccccaggctcaagctcagcattgttctgatcaaagtttgtgtcaatgattatggttagtggacaactgatgaaaaggaagctatacaacta

SEQ ID NO: 487998 - DNA, 201 bp, Homo sapiens
ataaaaatgcctttggatgccctgtgaatccccatacacttacccaaagcccatgacatcagagacaagcaggaaggactacccaagtaaagaaagaatcrtagaaaccaatccctgcacctccccagtgaagtgattcagtttgggtaagtcccacctccttcctctctttacctctgagatgttcaggtggctggacta

SEQ ID NO: 487999 - DNA, 201 bp, Homo sapiens
agggatagagaccaaacaaccggccgcctttatctacaaggtggagtgtggaggttgcctttccattgtattttccctaagaccagaggaactggttcaaytgaaaagggaggcagtcagtcccctgcagtgcacaccctccacttgagagacagcctcaagactctcccctcagcccttttgggtgttgcaattgggcaa

SEQ ID NO: 488000 - DNA, 201 bp, Homo sapiens
aggacatctcaaccagaacaaagcaggcctgaggcagtttccacgaaactcctctctgtcctgctcttctttgaattaaagagtggtcccctcatataccmccaacactcacagtgtcagcacaacccccatcacacaggtcagcccatctccataatgtggtccaaatgttaccttcaagtaccacagaattaatgacag

SEQ ID NO: 488001 - DNA, 201 bp, Homo sapiens
catggtgtacaataatactctggcaaaatttaacagaatacaagctcctggttgcatattcagctgaggtcctgaggctatgtacggccaggttctggcayggctggcttctcagcaaaccatctggttagccatcttggtgcctgggccacttagtgctggagaatgaagatagctgctatggtgacagcaacaggaaat

SEQ ID NO: 488002 - DNA, 201 bp, Homo sapiens
tttaccaactcaacatcctttaccttaccacttcagtcagacttaactttgtgtttttataaattctgtacaactgaatccttatgcatttagaacatctrtatctattttttcccattaaattaaaagtacaaaagcaagggccacatcttagttcgtttctagttattgtcccccttcttttcccaatacggctgctcc

SEQ ID NO: 488003 - DNA, 201 bp, Homo sapiens
aagagtcactaaggggtccacagttctatggggtccattcataagcaggggctgcataggcagactttttacacacagcagttcaggtcttggcaccttcyactctcttgagagaaccgtggaagggagccaagcctcatgcctgagcattcttccccatccttcctccattctgttctccacacccacactcctcctgca

SEQ ID NO: 488004 - DNA, 201 bp, Homo sapiens
aaaagtacaaaagcaagggccacatcttagttcgtttctagttattgtcccccttcttttcccaatacggctgctcctgtcctggcagaatgtgtacagawatctgagccacagaaatgattccagatccagtggcatccacatagggcagggatccttctcatcttcagagcccattgggacattggccctcaacaggaa

SEQ ID NO: 488005 - DNA, 201 bp, Homo sapiens
agtaggagaggggagagcaggaacaagagggcaccggagcctttctccaaaaaaagcaggaaattacaaccaccccgtaaaggccttgcccttctggccamcccgaaggtcacagctctttgaagcctccctcccaacatgaagggctcaggcaattgaaccacacagagacatgacacgcccctctggaggcctgtccag

SEQ ID NO: 488006 - DNA, 201 bp, Homo sapiens
tcaaagcagaggactctatcccaagcaaaccactcaagcacaccaagtctcagctttcccatctgtgaaatgatgcccctatacgtgcccacctggcctaycacacacagtacatgggagacttggatgatgaaccatggactggatgattttgggtgggtctctgctctgggtcaaagattactatgtaaaaggaagggc

SEQ ID NO: 488007 - DNA, 201 bp, Homo sapiens
aagaatctacaccataatttccaacttctctcaaaaatcaattctgaattttgttccattaaggataattgaaaatgatttagagcaggttcatttggaasagagcatcagtgacactcttcatggtctcagcaggcacccatgactgaagagtaaatcataactgaaatagtgcagggagaaggaagggaagccaatgtt

SEQ ID NO: 488008 - DNA, 201 bp, Homo sapiens
gccacttattgtttatcaattatacctcaataaacctgcttttaaaaataaaaaaaagtgaatacacaggagcttatgtgctcacttgcttaattagatgktgagctgctccagacagaacttctggcctacccacccttttggtggctcacgacagctgttcaacattgattattaaatgaatgagtgacttgctttatg

SEQ ID NO: 488009 - DNA, 201 bp, Homo sapiens
gtgaagccacgtttgcacacgtcctcactgtggggaggtcagaggtcggtatggtcactctgggtagctgagactttggagtacacagtcaaaaagcaccyggaaacctgcactccccttgaccagaatcactctttcaacttcatgccaggtctcttggccaccttcaaactcagctcaaactgtactgccttagaaaac

SEQ ID NO: 488010 - DNA, 201 bp, Homo sapiens
tctctttaaactgatgccatctgatgacataccaggaattaataaccaggaggtgaagagagaggagtgactttccaccccttatctggacctattacagsccaggatcattttacacccaattcttgcttgcctcttggtcattcttagcacagggctattctagagctgagatatcgaatatggcagccacttgctact

SEQ ID NO: 488011 - DNA, 201 bp, Homo sapiens
gagaagatctgaggaacaaatcctggggaaaagggaaaagagtttaatcaggaccagccagaaagtcataaggaaaccaacagagcacgatgtcaaggaargcttggaaaaagagggctttaaaaggcagaagtgggtgacaggattaaatgcttcagaacagtcaattaagacctgttaagtggccaggtgcggtggcgc

SEQ ID NO: 488012 - DNA, 201 bp, Homo sapiens
tgagcaatgcaggaattctgaggtctaagctgcccttctcagggcaggtcaggccagggtcagacccaggcttccaggccactgggcaaagagccccaagmaaggtcagaagttcccaaaccttgcttaaatcatattcaaaaggtatataaaaagtgatatgctataaaaagtgatatgcattaaaaaaactgcatatac

SEQ ID NO: 488013 - DNA, 201 bp, Homo sapiens
ggtctaagctgcccttctcagggcaggtcaggccagggtcagacccaggcttccaggccactgggcaaagagccccaagaaaggtcagaagttcccaaacyttgcttaaatcatattcaaaaggtatataaaaagtgatatgctataaaaagtgatatgcattaaaaaaactgcatatactaatttttttactatatgtta

SEQ ID NO: 488014 - DNA, 201 bp, Homo sapiens
gggcaagactatcctttatttctctgctgcttcacattcctccacttgcccacttcatgacattaatttttctgcattttcctggctttcttcctcactattttttttttcatttgcctaagaatctttcatccttgttaagaagctagagtgtgaaaaagcatctatttaagctctcccaccttttccttctgcttgcat

SEQ ID NO: 488015 - DNA, 201 bp, Homo sapiens
attttccctcctcctgaccccagttcacttcaaaagggcttcagaggctagaagcagaagctggaagaaaaactgacctagtttctgggggacagttttcyacagctttaaaaccaaggcccgtggacccagggtatcatcatagttggattaagcaacatgggccagtgcttgggctgcaaagatttcacagtcttatct

SEQ ID NO: 488016 - DNA, 201 bp, Homo sapiens
ctcttaattacaagacccactgcttgtgctggcacattacaagagacgctgaagataaatgtaattaagtgagtaatctgggtgctagacaccaatttctrtcagaaccagccatgctgaggggataatgatattaatgatagcagcttttgctctgaagggaaatcttttcaggaatgtccttttccctacagagcttct

SEQ ID NO: 488017 - DNA, 201 bp, Homo sapiens
tcatacctactcgaagactgagtcaccttttcctataatgactttgccctagacctagactagaggtctaatctacctgggaggccctctggcctacatgyagccaatagagaagaaataaaatcctgaaatagggtgaaaggatatggctgggcatggtggctcatgcatgtaatcccagcattttgggaggcagaagtg

SEQ ID NO: 488018 - DNA, 201 bp, Homo sapiens
ccttgcaaaaaccctatgaagagattccatggtcttcatcttccagatgaagaaactgaagaaactgtactgtatatttaaattacacaccagatttcaaagacttggtacaaaaaaataatgtaaagcatctcaatttttatattgattgtatgttgatatgatatttggagctattgtggggtttttttgtttgtttgt

SEQ ID NO: 488019 - DNA, 201 bp, Homo sapiens
actaactggcatgttcaatcttccctggaacatgtggtacatagtgagaagaggtggatagcttccactgctggaagaccttagatgttaaatgttgggaracagttctccacggtctctgacatttctgcacatcttataagcgagaccctgatagcttttgttccagattatctttccaaggatgttcatatagtgaac

SEQ ID NO: 488020 - DNA, 201 bp, Homo sapiens
gtttttgtttttttttaagacagagtcttgctctgtcacctagattggagtgccatagcacaaacttggctcactgcaacctccgcctcccgggttcaagrattctcacgcctcagtctcccaagtagctgagactacaggcatgcaccaccaatgcctggctaatttttgtatttttggtagagatggggtttcgccata

SEQ ID NO: 488021 - DNA, 201 bp, Homo sapiens
tgaggtatgagctgacatcacacacaacagcaacacttgcagacttcgatgtttacaagtactttattagtgtctcagaacactctccactccataccaamactaactggcatgttcaatcttccctggaacatgtggtacatagtgagaagaggtggatagcttccactgctggaagaccttagatgttaaatgttggga

SEQ ID NO: 488022 - DNA, 201 bp, Homo sapiens
gaaaccatctgaatgtgatggttggcacaggtccacagagacatctatgtacttatttttgttgttttgttttgtttgtgtttttgtttttgtttttttttaagacagagtcttgctctgtcacctagattggagtgccatagcacaaacttggctcactgcaacctccgcctcccgggttcaaggattctcacgcctcag

SEQ ID NO: 488023 - DNA, 201 bp, Homo sapiens
atgttcaggaaaccaaataaaaacttacaatatagaatacagagacaaagtttaacatgctaggagtctggagttaccatgttattcaaagacagaattayataaggcaaatctagtcaagaaaatcattatggatgtatgcaaagggtaaacgacagggtttgcaatctttttaaatgaaaaaaaaatccaaaatgtcca

SEQ ID NO: 488024 - DNA, 201 bp, Homo sapiens
tgattaaggaattaatgaaaccatctgaatgtgatggttggcacaggtccacagagacatctatgtacttatttttgttgttttgttttgtttgtgtttttgtttttgtttttttttaagacagagtcttgctctgtcacctagattggagtgccatagcacaaacttggctcactgcaacctccgcctcccgggttcaag

SEQ ID NO: 488025 - DNA, 201 bp, Homo sapiens
tgcacctgcagaaagtaagcatcttctccccagcatcatggatgttcaggaaaccaaataaaaacttacaatatagaatacagagacaaagtttaacatgytaggagtctggagttaccatgttattcaaagacagaattatataaggcaaatctagtcaagaaaatcattatggatgtatgcaaagggtaaacgacaggg

SEQ ID NO: 488026 - DNA, 201 bp, Homo sapiens
ctgtttgattaaggaattaatgaaaccatctgaatgtgatggttggcacaggtccacagagacatctatgtacttatttttgttgttttgttttgtttgtgtttttgtttttgtttttttttaagacagagtcttgctctgtcacctagattggagtgccatagcacaaacttggctcactgcaacctccgcctcccgggt

SEQ ID NO: 488027 - DNA, 201 bp, Homo sapiens
ccatgggaagacccctctccactgcccagagattccagagattcagccattaccctataatcatctattattcaaattcagctttggaataaaaaagctayctgggaggtagataaattccccctccagggcattaagagtggatcacatcttactttttggtggcaggagtgtttatgaataacacctgtccaaactgct

SEQ ID NO: 488028 - DNA, 201 bp, Homo sapiens
tttcctgtttgattaaggaattaatgaaaccatctgaatgtgatggttggcacaggtccacagagacatctatgtacttatttttgttgttttgttttgtttgtgtttttgtttttgtttttttttaagacagagtcttgctctgtcacctagattggagtgccatagcacaaacttggctcactgcaacctccgcctccc

SEQ ID NO: 488029 - DNA, 201 bp, Homo sapiens
agaatggaatcatttcactaattattataaagtagaaacaaacaggtgaaattagttttattgcattacatttaacccagtagctccaaaagtttttttttaatctcatatttcatttcaaaacaatagctccaaatatcatttcaatatataaccaatataaaaattgagatgctttaaatatttacatatacagcatat

SEQ ID NO: 488030 - DNA, 201 bp, Homo sapiens
gacaatagtcatcagtaaccagaaacacttcaattagagagaggaggtacaatgtgtacattgcttctatatttaatttgaactccaaatatggtggcggkttttgtttgtttgtttgtttgttttgttttggaggtagggtcttgctctgtcatccaggctgaagtgcagtggcataatcagagctcactgtaacctcaa

SEQ ID NO: 488031 - DNA, 201 bp, Homo sapiens
gagccgagattgagccactgcactccagcctgggtgacagagcaaatgtcacctgtctcaaaaacaatgacaaaaacaacatcaaacaaacaacaacaacmcaaaaaaacaaacaaaacgtgtgtgaatgagacagagggggtaatgaggggaagagagagagaaggacctatatatgatgcccctctacactgcaaaatt

SEQ ID NO: 488032 - DNA, 201 bp, Homo sapiens
atagctaaaacccctggctccatgatcagcaatgattggtatggaatgtcaccagtactacaggcatccctgcagatatcctttgcagagaaaatactcartcagactatttccataagaatgcccttttcctggagcttgcctagaccttgcatcattataatgtctcttgtattaagtggggatcccataggctcgatt

SEQ ID NO: 488033 - DNA, 201 bp, Homo sapiens
gttgcagtgagccgagattgagccactgcactccagcctgggtgacagagcaaatgtcacctgtctcaaaaacaatgacaaaaacaacatcaaacaaacaacaacaacacaaaaaaacaaacaaaacgtgtgtgaatgagacagagggggtaatgaggggaagagagagagaaggacctatatatgatgcccctctacact

SEQ ID NO: 488034 - DNA, 201 bp, Homo sapiens
ctcccagggctcaaaacctgggcaaaaggccaatagtttgagacctaggttacaagtctgttttccttaaaagctttgagaaatagtcattaatctacttscatcctacataatggctcatttaaagctattaccctataagttagagaaatgtctgataatgggaagaatgttgctgttctcaagctaacacttactgag

SEQ ID NO: 488035 - DNA, 201 bp, Homo sapiens
tgaatgggaaaagataacatccctttccccacaggagcaatatgaagattctcatggagagagagcagaaactgagaatatcctgacagctgatgacacamcagatgctgtaaaagaagagatacaagcccacaactaatcctgcgctgggaagagcacatacctggaaacagaaacattttaggaggtactgctttgacc

SEQ ID NO: 488036 - DNA, 201 bp, Homo sapiens
tcctttggggagtgtgcaaaaataccaatgctcaaacctcatccctagaaattctgatttaattggctaaatgggagcttggacatcagtaggtttaagartccctcagatgattctaatgtgcaagtagagttgcaaactcctgctaatctccatccttgctactcaaagcatagctctcagaccagcagtattggcatc

SEQ ID NO: 488037 - DNA, 201 bp, Homo sapiens
gagaaaaatggcattgttttatagccagagaagcttctggatttggtggtgggtgcctgtaatcccagctacttgggaggctgaggcaggagaatcacttkaacccgggaggcggaggttgcagtgagctgagatcatgccactgcactctagcccagggaacagtgcgagactccatctcaaaaaaaaaaaaaaaaaaaa

SEQ ID NO: 488038 - DNA, 201 bp, Homo sapiens
cagtgtttcatcctacactttccaagtctgtgctcttcccgcaaaagtctctctgtggttctcctctctggcctccttgctaccgggagcacagattccamactaaagatacacacggctaggaaaatgaactgcctggcccaccctgcaaccggattcgccagtatgatcccactggcaccagttctttaaaacttttta

SEQ ID NO: 488039 - DNA, 201 bp, Homo sapiens
taggccttaccccagacctattgaggcagaatctgcattttcaaaatccccaggagatttgtgtgcattaaacttgagaaaccctattccaaagtactttstccttcaaatttggctcaaagtttaccacttccgggaagtcctccatcattatacttaccaattattatatatctgttgtataagtatctgttgttgaac

SEQ ID NO: 488040 - DNA, 201 bp, Homo sapiens
aattagtcaggcatagtggtacatgcctgtagtcccagctacttgagaggctgaggtgggagggttgattgagcccggaaggtcgaggctgcattgagccrtgatcgagccactgccctccagccaaggaaacagagtgagaccctgtctcaataaataaataaataaataaataaataaataaataaataagaattttag

SEQ ID NO: 488041 - DNA, 201 bp, Homo sapiens
ttactgaaaagatgcttttcagtctcttcagcttatacatctataggcttgttgtcaccacctctgtataaacaagccaaaatatagaaagcatttccctrcaggacttctagtgttctggaggggtgccaggagactataataggtcactgtttttataccaagccaaatttcttgtattgtttacacagagtgagaatc

SEQ ID NO: 488042 - DNA, 201 bp, Homo sapiens
agtttaaaaacatgttttccttgattatgaaagtaatacatcatccttgaaaaaaataaaaacatatgaagtaaataaaaaccatccactatccagtcacrtagaataaaccatcactaacatcttcaatctcagttttcttctccatacatgcactttaaaaacaaatctcagattatagtgtccatattgttttatcac

SEQ ID NO: 488043 - DNA, 201 bp, Homo sapiens
gaagttttcacgtgaaacagagattcccaagtgaggattctgaaagctagtctgaggccaggtttatactcaacccatgagtctcttctatagatctcaawttgtcactgaaaatggtgttggaggtttttggggagacataaatccaggctggctctgtaactacccaaatatgttactaataaatacagaaagatcatc

SEQ ID NO: 488044 - DNA, 201 bp, Homo sapiens
tattattcgttcattcaacacatgcttgttgagtgcttcctatatgccaggagctgttcctgatgctgagctatagcaagtgtaggagacagacaaagtcrctgaaattagaaacttgtcattctagttggggtagagagggagtcagataagaaactaacaaatgaatgagaaaaatttccagtagtattgaacagtttt

SEQ ID NO: 488045 - DNA, 201 bp, Homo sapiens
gcagaaatgaactcagataaaacctccaggaatgtgccaagtgcacagattctccagttggagcaactctcacagggccaggccagggggctgaggttggrtgggaagctcagggaatgtccctttggttctgggtgtcctttagaacactcagctggggccagagccctcctttctccctccccatctgcctcaggagaa

SEQ ID NO: 488046 - DNA, 201 bp, Homo sapiens
tgagtgcttcctatatgccaggagctgttcctgatgctgagctatagcaagtgtaggagacagacaaagtcactgaaattagaaacttgtcattctagttrgggtagagagggagtcagataagaaactaacaaatgaatgagaaaaatttccagtagtattgaacagttttaaagaattaaactgacggctgggctcgac

SEQ ID NO: 488047 - DNA, 201 bp, Homo sapiens
gacagagaccctgttgcctcttaaacctgagatggaaagtccttgacaggggtgttgttctgccctgtgctcacatcagtgacaggcactggtacatcttrccactaagcccaaactgggccaaagaatactttttcaaaaaaaggctctatgttgattctgccagttgatgagagatggtacacaaagtatgaataacat

SEQ ID NO: 488048 - DNA, 201 bp, Homo sapiens
gcctgaggacttcttcagaatgagtagctggtgacagttctctgagaagtgacatttaagctgagacctgaatgatgggagtgaaccagccacatgaagayggaaataaggctttctaccaaggtcatagactatgcagaaatcctaaggcagaaacgagtttgggatgttcaagcttcctgaaggaagttcttgtggctg

SEQ ID NO: 488049 - DNA, 201 bp, Homo sapiens
tttagcttaacttatatttgttgcatgcccaactatgtcaggttcggcaacgttaactgtgggtcttgcctttccttagagatgattgtcttccttatttycctgctcctcagactccatctctgttgctgtaattatgctgacctgagaattctttgtccctaacaacaaatattctgtgttgctaccaagagctggagg

SEQ ID NO: 488050 - DNA, 201 bp, Homo sapiens
ggtcaaagaaggataacagcaacaatgactttctagcagaaggaaagacatgtgacaacatgtgcaactgctagagtcctaaccacccctatatcccatcycagttgtaaagcagcagttcaggtggaaatggtcaatctgctgtgagtccatgggatttcattactgtcattggcaatatcatagtcccacctttaccta

SEQ ID NO: 488051 - DNA, 201 bp, Homo sapiens
cccagatcccacagagcccattctctctcttgcttcaggtcattactaaaaggctgccttatcagcacagccttccctgataccctattgagaactacaayacccacctccacatgctgccactctgattccctagccctgttaccttctctatagcacttactgccatctagccaactgtattgtttctttattttttga

SEQ ID NO: 488052 - DNA, 201 bp, Homo sapiens
cctgcctcagcctcccaaagtgctgggcttacagttgtaagccaccctgcctagtcaagccaattgtattcaccatgtctttttatttcctgtattatttsctttgatatctggggtattgctgatcctggagggatagccgccccccccagggttagttaatatctagagagaggcgacacctttcctatgcaaacccac

SEQ ID NO: 488053 - DNA, 201 bp, Homo sapiens
cagtttaaccccctcaccacttctacccaatcacataaagatattggcaggaaattaggtagtagcagtttgggcagtatcttggccctcattactcatcygtcacgctgccataagaacacaaacagcaatggtgaccagtcatggggatcctgcctcattgtgctccggggactccccttcctaatcttgaaagcaaag

SEQ ID NO: 488054 - DNA, 201 bp, Homo sapiens
ctataatctctgcctcccacactcaagccatactcccccctcagcctactgagtagctgggactacaggtgggtgccaccaaacccagctattttttttttcctagagatggggtttcgccatgttgcctaggctggtctcaaacacctgggctcaagcaatccacccaccttggcctcccaaagtgctgggattataggc

SEQ ID NO: 488055 - DNA, 201 bp, Homo sapiens
actataatctctgcctcccacactcaagccatactcccccctcagcctactgagtagctgggactacaggtgggtgccaccaaacccagctattttttttttcctagagatggggtttcgccatgttgcctaggctggtctcaaacacctgggctcaagcaatccacccaccttggcctcccaaagtgctgggattatagg

SEQ ID NO: 488056 - DNA, 201 bp, Homo sapiens
aacataatccatcacataaacagaatcaatgacaaaaaccacatgatatctcaatagaggcagaaaaggcctttgataaaattcaacaccccttcatgctaaaactctcaataaactaggtatctcaaaataataaaagctatttatgacaaacccacagccaatatcatactgactgggcaaaagctagaagcatttccg

SEQ ID NO: 488057 - DNA, 201 bp, Homo sapiens
tcccatggtttcaggcacatgatgtgaaattgcactagattccactgtagtaattaaaagacaaaacaaaaacaaaacaaaacaacaacaaaaaaaaaaccacgaaaactggaattaactggggccagcagagtaagtgagaagaaaccaggactgaacacacaaactaagtactcttgggagaatcatttaatctctcta

SEQ ID NO: 488058 - DNA, 201 bp, Homo sapiens
taatcactatgttgataactaaatgcaaaatgacccccttccccaaaactcctccagcccatgctgcagagggggtgtatgtatgtatatatgtgtgtgtrtatatatatatatatatatatatatatatacacatacatacacatacacacacttgggaacgggtctgtaagaggcagtaggaagatatatatcctactt

SEQ ID NO: 488059 - DNA, 201 bp, Homo sapiens
cataatcactatgttgataactaaatgcaaaatgacccccttccccaaaactcctccagcccatgctgcagagggggtgtatgtatgtatatatgtgtgtrtatatatatatatatatatatatatatatatacacatacatacacatacacacacttgggaacgggtctgtaagaggcagtaggaagatatatatcctac

SEQ ID NO: 488060 - DNA, 201 bp, Homo sapiens
ggcagaggcaggtggattgcttgaacctaggaatttgagacaagcctctgtaacatggcaaaactctgtctctacaaaaaatacaaaaaaaattgccaggygtggtggtgcacacctgtagtcccagctacccaagaggctgaggagggaggatcccctgagcctaggagttccaggctgaagtgatctgtgatatcacca

SEQ ID NO: 488061 - DNA, 201 bp, Homo sapiens
cacataatcactatgttgataactaaatgcaaaatgacccccttccccaaaactcctccagcccatgctgcagagggggtgtatgtatgtatatatgtgtrtgtatatatatatatatatatatatatatatatacacatacatacacatacacacacttgggaacgggtctgtaagaggcagtaggaagatatatatcct

SEQ ID NO: 488062 - DNA, 201 bp, Homo sapiens
acacgggtgataaaagatcaaggccacggtctagtgagggggacaaacacattccatattctgttaatgttaataaaatgtgaaaaatactataagagacrtatactgtgggctgacagtagaggagcacttggtccaacttggcagagatagggttagggaaaagcatggatggcttctgggtggcaacacctggacagc

SEQ ID NO: 488063 - DNA, 201 bp, Homo sapiens
aacacataatcactatgttgataactaaatgcaaaatgacccccttccccaaaactcctccagcccatgctgcagagggggtgtatgtatgtatatatgtrtgtgtatatatatatatatatatatatatatatatacacatacatacacatacacacacttgggaacgggtctgtaagaggcagtaggaagatatatatc

SEQ ID NO: 488064 - DNA, 201 bp, Homo sapiens
tgcaaaggggagaccaagccagccttgatctcatagaacaaaaaccaactagcacattgcagacttctcaccaactgatggtctctgcctccgctttctcytccattttgttccctctcccatctttttcacacaaactattcaaatgtctgggtcaaagaagataaagatcataatatgataatatatgaaaagttctga

SEQ ID NO: 488065 - DNA, 201 bp, Homo sapiens
cttagaaaccagcgttccctggccatctagtatagtcaggggaaaatctgacactgctgataacgtctacaagttcaaacataccaatgagtgatttaacrgaagaagaaaagtgcagtcacggaggacacatggctgccctgttatcactgttttgtgttagaagagtaagaacatttaaattacagtgcatagtactag

SEQ ID NO: 488066 - DNA, 201 bp, Homo sapiens
tgtcatcaaacctcagttattcagatgtgggtaaccatttccctttctgtggattactgggtctggagctagactgcttaggtttgaatctgtctcaatcrctactatctgtatcatctggagcaagttaattagtctctctttggctcattttccttatctgtaaagtaggaatcatattaattcctgccatatagagtt

SEQ ID NO: 488067 - DNA, 201 bp, Homo sapiens
ctctgaatacttgctttagctgatgcctacgcttctccaagagaaacctgggcagttatactcccacaccagggctagcaagtgcctgtctggtacaggtrtgtcagagcctagctcctttacctcattgcagagtaactctgaagtgtgatgcattttcaccgcctccccagtctccccagaaggctccagctagacttc

SEQ ID NO: 488068 - DNA, 201 bp, Homo sapiens
attcagcagatatccatcaggttaaacaagaagatatttggctgtcacctcattactcagccctgcttggctagaattctataattgtagatttcttctaagtgtgactgcaaagccccgccatttagtaatgcacatatagtcaaaagactatttacagtggaatgaccttttcagaaaaccatgaacttactcctggac

SEQ ID NO: 488069 - DNA, 201 bp, Homo sapiens
cctaccacagataaaagtaacaaaggaactatactgggaagaaagttattttcaaacctagctctggacttgaattattaagaaagctaaaaaaaaaaaaagaaattacaatttgggcttagagtggagatggtatttttcctactttggggtgaatatcaagtccttgagaaaaatcagagtgtttctatcggatttata

SEQ ID NO: 488070 - DNA, 201 bp, Homo sapiens
gccaccctgcctagtcaagccaattgtattcaccatgtctttttatttcctgtattatttgctttgatatctggggtattgctgatcctggagggatagcygccccccccagggttagttaatatctagagagaggcgacacctttcctatgcaaacccaccaatccagagcccacacccccaaccaccctctttatcaag

SEQ ID NO: 488071 - DNA, 201 bp, Homo sapiens
tcctctacttatcagtactcttcctggggagacagagcgaggactcatctgctcttcatggcccttgaaaaatttactatctattctagagacttaaagtrtgtgaatttgtaataaacatttaaaggttgcatgagagggtataaatttgtggcagggcatggtatctcatgcctgtaatcctagcactttggaaagaca

SEQ ID NO: 488072 - DNA, 201 bp, Homo sapiens
agtaacaatgaaataagtcagaacaacatctgcaaggtgaacaacaactacaccatacagaagcctgttgaaaatgttagtttctctctccatggcctcarggtctctccagtggagtcatttattgcaagaataggcttggaaggatttctgccattggagtaaatgtctggttctttttgcaaagactgagctcctcct

SEQ ID NO: 488073 - DNA, 201 bp, Homo sapiens
aggttctcgtcgaaccctgaaaaacatccatttccaccctgtggagtttctctactgccacagtcagggggccatgttccacccccctcttggagaaaggsctctcttattgttagtcctcagttactgaagggtttttttctctctgctaactccagagactgctgaacacttccatagacatctctgagaattgcaatt

SEQ ID NO: 488074 - DNA, 201 bp, Homo sapiens
taacaatgaaataagtcagaacaacatctgcaaggtgaacaacaactacaccatacagaagcctgttgaaaatgttagtttctctctccatggcctcaggstctctccagtggagtcatttattgcaagaataggcttggaaggatttctgccattggagtaaatgtctggttctttttgcaaagactgagctcctcctct

SEQ ID NO: 488075 - DNA, 201 bp, Homo sapiens
cctgggtgacagaatgagaccctgtcctaaaaaaaaaaaaaaaattaaaaaagagagattataaatttgtaaaactgaaggaaaatgcttagataacattmagtggaaaaaaagcaggatacaatgttaattataaaaactgaaccagctgtggaggcactgtggctcacaccagtaatcccaacattttgggaggctgag

SEQ ID NO: 488076 - DNA, 201 bp, Homo sapiens
gtacacctgacctggcagccacatctcaaacttctgggcaaggcctgggtgtctctctaggtgcatgttaggtcctgcccacacctgatgcccacagagtyatctcctgacccactgggctggctccaggtctgatagatccaggtgtagagggcttctgtgggtgggtgggtgtgtgaggaatgaatgaataggcgtgtc

SEQ ID NO: 488077 - DNA, 201 bp, Homo sapiens
accagctgtggaggcactgtggctcacaccagtaatcccaacattttgggaggctgaggcaggcagatcacttgaggccaggagtttgagatcagcctggycaatgtgtctctactaaaaatacaaaattagccaggcatagtggtacatgtctataatcccaactacttgagaggctgaggcaggagaatcacttgaacc

SEQ ID NO: 488078 - DNA, 201 bp, Homo sapiens
tggctccaggtctgatagatccaggtgtagagggcttctgtgggtgggtgggtgtgtgaggaatgaatgaataggcgtgtcacaactgatcgttttcactmatggtagcctagcagagatcacaatttagcagcccactattgaagacaatcccccaaagtggttttattaggcacagttgttgttgtctgtaaagttttt

SEQ ID NO: 488079 - DNA, 201 bp, Homo sapiens
agacaatcccccaaagtggttttattaggcacagttgttgttgtctgtaaagtttttatgtctttggagaaggcttaaaaaccactcttcaagccactccycgctcatttacaaacttacacaaccagtttgttggcctttggatttgccttctctgtcttagttgctactattatcccagctctgtttcacactttagga

SEQ ID NO: 488080 - DNA, 201 bp, Homo sapiens
tacatatgtaactaacctgcacaatgtgcacatgtaccctaaaacttaaagtataataataaatttaaaaaaaaaaacgtgaaagcagtcctgaccatctrtttgttcagagttcttactttgtgggggttttgggtctaccacccatgtttcaccccaactgtttcagagaagggatctctcggtgatagaatccaagtc

SEQ ID NO: 488081 - DNA, 201 bp, Homo sapiens
cattacagtttggccttagggagacaaatgccactttctcccatcttgacttccaatctcttcttcctgaacttctttccaggttcctgtctgagcaaatyccagagtgtctctctggattctcccctggccacatgagtgaaccaccttgcataccgcccattatcatctgaccacagggttaaattcaaatgctacctt

SEQ ID NO: 488082 - DNA, 201 bp, Homo sapiens
gcaaaggaacccaatagactagcatatgggaatattgactttctctgagacagaacctcaaagcaaggacacacatttttaatatccatgctcgtgggagrgttgtggggagagatgctccatttcaaaaattgactgggtctctccctataggtcagacacagcttggcctttgggctactatcctctggggaagtcgac

SEQ ID NO: 488083 - DNA, 201 bp, Homo sapiens
ttcctgtctgagcaaattccagagtgtctctctggattctcccctggccacatgagtgaaccaccttgcataccgcccattatcatctgaccacagggttraattcaaatgctaccttctattctttcctgatctttcttctacattattgcctgatcatcctctgtcagagcaatctcctcctcgctaaaacagacaaca

SEQ ID NO: 488084 - DNA, 201 bp, Homo sapiens
gacatagaggacatctgctggcacccatccatctccccagcatccatttctcttcatgggagcaccccagatttcacagctttgtgagttgaaaccctgtycttgctgagtctccactcccagggtaggtccgacaataagagaaatatttcactcagtggatcgttaactcaaggatgggcatatcacttaactcagggt

SEQ ID NO: 488085 - DNA, 201 bp, Homo sapiens
gcaaattccagagtgtctctctggattctcccctggccacatgagtgaaccaccttgcataccgcccattatcatctgaccacagggttaaattcaaatgytaccttctattctttcctgatctttcttctacattattgcctgatcatcctctgtcagagcaatctcctcctcgctaaaacagacaacacattatccatg

SEQ ID NO: 488086 - DNA, 201 bp, Homo sapiens
taatgtgcagattgtatctcataaaccaaggatctgtgactttggaataagagacaagtgccataatgcttggcaagaagccatggtaatgacaaacccakgtgagttatgccattggtatgttacaatgagaggaaacagaggatggtgagtttggctgactttctccaagggacccagccatgctacaataaactccaa

SEQ ID NO: 488087 - DNA, 201 bp, Homo sapiens
ggtaatttttactcacatttttacattcacaagcctcacaagcctcttcttccaagaagtcttctcttacagatacattccctccccaccctgctccatcygcactgggataaggggctcttcctatgcattgccatgaccctgtgctttcccacgtggcaactgtcatggctattgtggggtatctacagccaggctctg

SEQ ID NO: 488088 - DNA, 201 bp, Homo sapiens
gactttctccaagggacccagccatgctacaataaactccaacagtcccttgggataactgcacttatcctcaccctgaactcctgctcttctttccccgsggctggtctaccttttgggaagccttgcccactttctcttctaactcctacacacacatctcactgagaacagttcagttctgattttgctcttgcagcc

SEQ ID NO: 488089 - DNA, 201 bp, Homo sapiens
tatgtggaagtataatattaatctcatttgtactctctatatttgtattttgcaaggagtaaatttaaagattcttgacccatgggcagaggcacagttcdaagacagaaagctttgagccatatggatcagagctgatgagatcagatttggcttgtaagtccttcgttgtaccttctacaatgacagaatacattacca

SEQ ID NO: 488090 - DNA, 201 bp, Homo sapiens
aattgtccagcacctcttggatgcttctcccctcaaccacctctccaacccccatatgggtggcagtaaagtagcaatggctgaccacagagtttagggcrgaggaccctcacaggcagctcctggagcagaccctctcacccaagcctagagtttcttcccactcccacttgctctctttctgattctacaaccatgcca

SEQ ID NO: 488091 - DNA, 201 bp, Homo sapiens
ttagcaatttcaaaaagaactagaattcttaaagaaaaaaaaataagactatctgaacattctgaacatgtaagactcaactttaagttcctacaaatgggagagtctgaaaacaaactgccagcctgatatgagaacatgcgtgctcaacacaaccagggccatatctgcatgggacatggcgggagaaggatgagaagg

SEQ ID NO: 488092 - DNA, 201 bp, Homo sapiens
caagtttgcaagtctagaattttcagattctattcattcctttcttttcaagttctaggcattttcctatctctaccctataatttcttagtggtttctcyaaaaccacataggcaaattcctttagcatttcaggatacagttccttcaggcctgagatgcagagctactctcagagaggtcagggtgggtggacacaac

SEQ ID NO: 488093 - DNA, 201 bp, Homo sapiens
actgttttggaggctagagaatgaaagaataaaaggacaatgacgcatcaaggtgaggataaacgtaattctataatcatcatgctgaaacaaaaaaaaaaccctcagcattttttgtgtgctactcaataaagtctaaattcctttgaatggtgttcagcatctgccatgatgtgactcagccaatcattccagttttat

SEQ ID NO: 488094 - DNA, 201 bp, Homo sapiens
aatcatgtcaaatgcactgtcacacttaaagagatatatttatcaccaattcatttgtatatttgtatatgtatagtatatatatgtatgtgtatatgtayatatgtatatatataatgatgactcagtacatcattttctcaggaaggtcttacatatgtatctgtattatataaattatatgtatatatgcctgtgcat

SEQ ID NO: 488095 - DNA, 201 bp, Homo sapiens
gtggaggcatgaagactggggcagacgctatcttatctgagagttcctacttgctcctagataaaattgcttctccccaatgcttcttcttcttcttcttyttttttttttaaacagtcttgctctgtcgcccaggctggagtggcacaatctcggctcactgcaacctctgcctcctggtttcaagcgattctcctgcct

SEQ ID NO: 488096 - DNA, 201 bp, Homo sapiens
ccctggccccccacgtccccactggccccagtgtgtgttgttacccctcctgtgcccatgtgttctcattgttcaactcccacttatgagtgagaacatgyggtgtttggttttctgataaatgaaccaattttaactaaagttcatatattattcagattccctgtttttacttaatattctttctctcttccagaatcc

SEQ ID NO: 488097 - DNA, 201 bp, Homo sapiens
tacctttcactggattgaaagtatcgtggttttaaaaaatttctcttggccaggcatggtggctcacacctgtaatcccagtacttttggaggccaaggcrggaggatcaccttaggtcgggagttcaagaccagcctggccaacatggtgaaaccccatctctactaaaaatacaaaaattagctgggcgtagtggcacc

SEQ ID NO: 488098 - DNA, 201 bp, Homo sapiens
gcaggagaatcgcttgaacctgggaggcggaggttgcagtgagtcaagatcatgccactgcactccagcctgggtgacagtgagaccctgtccccccccccaaaaaaaattagcttggtgtggtgatgcatgcctataatcccagctactggggaggctgaggttgagcccgggaggtcaaggctgcaatgagctgagatc

SEQ ID NO: 488099 - DNA, 201 bp, Homo sapiens
cactgcccttaggactctgaccttttatttatttattaattattattcttatttttttgagactgtgtctcactctgtcacccaggctggagttcagtgamacgatctcggatcactgcaacctccgcctcctgggttcaagtgattctcttgcctcagcctcccgagtaattgggattacaggtgcacaccaccatgcct

SEQ ID NO: 488100 - DNA, 201 bp, Homo sapiens
atgtaaactggcactgcccttaggactctgaccttttatttatttattaattattattcttatttttttgagactgtgtctcactctgtcacccaggctgsagttcagtgacacgatctcggatcactgcaacctccgcctcctgggttcaagtgattctcttgcctcagcctcccgagtaattgggattacaggtgcaca

SEQ ID NO: 488101 - DNA, 201 bp, Homo sapiens
gaactttggtaaggaagcaggagaccagcagctacatcttggctagccctctaaatcgtgaggacctcaaatcttccagctgaatagacatatacaatgaragccaaactactgaaatttggggcaactttttttggtaaaaatgagacatattcacatattagtggtaaaagctaacttaccgaacacatgaggctctgt

SEQ ID NO: 488102 - DNA, 201 bp, Homo sapiens
gggaagcagagacccataacaagcaccactccagcagaccagtcagggggatgaagatttctgcttacctccttagtgtgtgctgctgggggctggttccwttggcctgggtgtgtgtttcagggtatcagcagtgtgaagatgtcagaatcctagtgtgaggaccaggaatccctagtgcttgggctgtgatggagcaca

SEQ ID NO: 488103 - DNA, 201 bp, Homo sapiens
tcgtggaacagctcctccatctgcacctgggcatcatcaagctgctgcaggaccgactcgatgtggctgatggagctgctgtggggtgttttgttgttggwcacagccgagtccctgtggcagagtggggagaaaaaagggagggagaggcctttccatgttaaaagtgacagaggaggagggggatcttcctcatctgag

SEQ ID NO: 488104 - DNA, 201 bp, Homo sapiens
ggccctgccatagcacagctttggtcctacagggctgacagtgcaggatgacttggaggaatgatcgggaggagtcttatccatgatgcctgggcagcctytagtacctgcagaccgttcaccataggcagacagaaaccagaaaagggaggaagaaaaagtagccccaagtaagtatccacttcacactttctcccagaa

SEQ ID NO: 488105 - DNA, 201 bp, Homo sapiens
acaaaacaaaaacaaaaagacctctcattgcaaacacctggaacagggatgtggtggtttctctttttctcttccaggcagagtgtggtaaagtattcaayagcacagactcaggtcccagggtcacacccaacattcccaggtatagccataaagtgacaggtccagaggcctaaaatcactcagcgggatctctgcatc

SEQ ID NO: 488106 - DNA, 201 bp, Homo sapiens
tcaatgctgcctttaaacaaaatattctacaaatcaagtcctctcaaaaagaacaaagacagtggctcacgcctgtaatcccagcactttggaaggctgcracaggcgacttgcttgagctcaggggttcgagaccagcctgggcaagatgttggaaccacgtctctacaaaaaaataccaaaagtagctgggcaaggtgg

SEQ ID NO: 488107 - DNA, 201 bp, Homo sapiens
cctttaaacaaaatattctacaaatcaagtcctctcaaaaagaacaaagacagtggctcacgcctgtaatcccagcactttggaaggctgcaacaggcgamttgcttgagctcaggggttcgagaccagcctgggcaagatgttggaaccacgtctctacaaaaaaataccaaaagtagctgggcaaggtggcgcatgcct

SEQ ID NO: 488108 - DNA, 201 bp, Homo sapiens
tcctccccatactctaactggtaaggccatggcggccaaggaatcctgaaatctcagcccttgaggtgtcacatactgtatggtagatagagaagaggacrtgagaaatgtgtggatggcagaaggggaagggaaagaagatgctaagagagagaaatctggctcacctcaaagatgaatttggagctgccaaagttggtc

SEQ ID NO: 488109 - DNA, 201 bp, Homo sapiens
tgaaaacaggctaatcttccaaggtgctttgtgtgtttggtttcaagtaaggggcatagctgggaaaggggaaacgactatttcattgtgtgctcattctrtgctggggctatagttcagtatttgccatacatcatttcattatatcctaacaataacttcataaactaggtatggttatctccatgtgacagaagatga

SEQ ID NO: 488110 - DNA, 201 bp, Homo sapiens
atcgtcttgacaaacacagacaatggtaggtgccaccctggcctcgactacccatgtaaactggcactgcccttaggactctgaccttttatttatttattaattattattcttatttttttgagactgtgtctcactctgtcacccaggctggagttcagtgacacgatctcggatcactgcaacctccgcctcctgggt

SEQ ID NO: 488111 - DNA, 201 bp, Homo sapiens
catcgtcttgacaaacacagacaatggtaggtgccaccctggcctcgactacccatgtaaactggcactgcccttaggactctgaccttttatttatttattaattattattcttatttttttgagactgtgtctcactctgtcacccaggctggagttcagtgacacgatctcggatcactgcaacctccgcctcctggg

SEQ ID NO: 488112 - DNA, 201 bp, Homo sapiens
tcatcgtcttgacaaacacagacaatggtaggtgccaccctggcctcgactacccatgtaaactggcactgcccttaggactctgaccttttatttatttattaattattattcttatttttttgagactgtgtctcactctgtcacccaggctggagttcagtgacacgatctcggatcactgcaacctccgcctcctgg

SEQ ID NO: 488113 - DNA, 201 bp, Homo sapiens
ctcatcgtcttgacaaacacagacaatggtaggtgccaccctggcctcgactacccatgtaaactggcactgcccttaggactctgaccttttatttatttattaattattattcttatttttttgagactgtgtctcactctgtcacccaggctggagttcagtgacacgatctcggatcactgcaacctccgcctcctg

SEQ ID NO: 488114 - DNA, 201 bp, Homo sapiens
tctgacactgccttgcagagcacttggatctgatactcttgacagagggggagctgtgcccaagagcgcccatcagataagtccgacctcctcttcctccyctggctgcctgccctgcaacttcttccatctgatcatctgattcctccacaactcttagccagccttaggcaccaagttcacatgaattaacatctacat

SEQ ID NO: 488115 - DNA, 201 bp, Homo sapiens
tgcccagaaccagggctttgattctaattcctcttacttcgttagagctcattattcctttgccaagcttcagctaattgtgccgttaaaccccttccctrtatgcccctttactccttccaagggttctaccctgtgccctgtccctgccctgactaccaccctcagactcctattgtatgggcatctattctaactcac

SEQ ID NO: 488116 - DNA, 201 bp, Homo sapiens
ggatacatacattcaaaaccataaaaatcaatttttttaagtctgttagcacaagaaaaataatttcattttttattttattcatttattttttttgagayggagtctcaccctgttgcccagggtgtagtgcagtggcatgatattggctcactgcagcctctgcctccgaggctcaagcaattctcatgcctcagcctc

SEQ ID NO: 488117 - DNA, 201 bp, Homo sapiens
ctggagtgcggtggcgcgatctcgactcactgcaagctccgcctcccgggttcacgccattctcctgcctcagcctcccgagtagctgggactacaggcgygcgccaccatgcccggctaatttttgtattttgcccagctaatttttttaattttttttttttttttttgagacagagtctcgctctgttgcccaggctg

SEQ ID NO: 488118 - DNA, 201 bp, Homo sapiens
gtttcgctctgtcgcccaggctggagtgcggtggcgcgatctcgactcactgcaagctccgcctcccgggttcacgccattctcctgcctcagcctcccgwgtagctgggactacaggcgtgcgccaccatgcccggctaatttttgtattttgcccagctaatttttttaattttttttttttttttttgagacagagtc

SEQ ID NO: 488119 - DNA, 201 bp, Homo sapiens
ggtgcaaacaaggaaggggaggcagcagctaagggtatgaaaactagaaccagcttcctaggcctgaatactggccccatcatttacttactgtggaaccyctctgtgcctcagttcccacaatgtaaaatgtgaataataattacagggttgtcttaaagcctaatagacataaatcacttaggatggtgccatacacag

SEQ ID NO: 488120 - DNA, 201 bp, Homo sapiens
aatcttgtcttcccaggctcaaatgatcctcctgccccagccccccactgagtagctggaactatgggtgtgtgccaccatgcctggctaaaattttttakttttgtagagatgggggtctcactatgttgcccagtctggtctcaaactcctagcctcaagccagcctcccaaagtgttgggattacaggtgtgagccac

SEQ ID NO: 488121 - DNA, 201 bp, Homo sapiens
aggtaacaaagcagtgtcccacatcctcaggcagttgctcgtacttctccagctctttgaggaagatgctgcaagaggagaaaaagactgaatcagacacytctgtgcagctgaccccccagaggattgcactgaggccagcacaaccataacttctcaattatttatacatggcttctctactgtctaagtgatagatgg

SEQ ID NO: 488122 - DNA, 201 bp, Homo sapiens
aacccaaatcccttttactgaagcttaagaccttttatgttttttctgttcccagtggatatcataaagaaaaaaaaaaacagacactattcagcatctayttgttcagtcttctgcccgaagttcttcagggctcacaattccattcaacatccttccaagcatgtgatgactgctcttaaaatcccctttactacctgc

SEQ ID NO: 488123 - DNA, 201 bp, Homo sapiens
gaagttcttcagggctcacaattccattcaacatccttccaagcatgtgatgactgctcttaaaatcccctttactacctgcccatcacctcccaaccacycctttacattcatctcttctttagctctctgaaatgcagtacttgcctcactcaacacctgcttcaagaacttaatcagcacattcaaaaattatcccag

SEQ ID NO: 488124 - DNA, 201 bp, Homo sapiens
tattcaaattcagctttggaataaaaaagctatctgggaggtagataaattccccctccagggcattaagagtggatcacatcttactttttggtggcagkagtgtttatgaataacacctgtccaaactgctcagaattttggtagcttaaaccattccttcatgtatcagatgttttaatttcaccacaaatcttcctt

SEQ ID NO: 488125 - DNA, 201 bp, Homo sapiens
taaggaaagagtcagactaaccaacatgtaatttcaatatcatgcaagaaatataatatagaggtacacatgggggacaaatattcagataatccaaaagmgatactaaaactccagctctaaggaagtctctaaaatgtgaaaaagcagtaagaagagaagaggtaatggattatgggatcattacctaggtcctagatt

SEQ ID NO: 488126 - DNA, 201 bp, Homo sapiens
ctctcccctcagcccttttgggtgttgcaattgggcaagcctcttcccaaagagtccacggactctgggccatgcactcaggctcaatacagaccttatcktttcaatctgttttcaaattgatgcctacaggctgagtggagactgttttcggttagagtgagcctgagggagcctcagggcatgcccaacacctcagac

SEQ ID NO: 488127 - DNA, 201 bp, Homo sapiens
tgagattgtcttgtccatggataaatgtgcatgtgaactcagaacatagcctatatgctaagattagaataattttaagttagggagtaaagagatttatratagctttatatatttcaaaaaatcagaaacaacctcaaatgttcaacctcagggatgtggttaaataaaccatatctactcaatgcattcattaaatat

SEQ ID NO: 488128 - DNA, 201 bp, Homo sapiens
aaaccaggggatgcccaaagttcaagggtaaggatggactgtgaagttctcaaatccaaggacattggaaaggactattaatccataaacacaaacaatcwctttaaacaagtcaggattgttgaatttaattaaaaacattttgttctgctctaagcgtttaataaaaggatttatggagaaattgctaggcttatatag

SEQ ID NO: 488129 - DNA, 201 bp, Homo sapiens
agtgagaaaccaggggatgcccaaagttcaagggtaaggatggactgtgaagttctcaaatccaaggacattggaaaggactattaatccataaacacaarcaatcactttaaacaagtcaggattgttgaatttaattaaaaacattttgttctgctctaagcgtttaataaaaggatttatggagaaattgctaggctt

SEQ ID NO: 488130 - DNA, 201 bp, Homo sapiens
gcagatgggtctctcaactggacttgtgggagtgtgtagttattttgctggataatctatggcaaatgatataatagcaaaaacttatcatgacaactaargtgcattgaatgccaggcactgctgtgttttgtctccattacctcattttaccctcacaatctaccttctgtgtaccctcttctcctcttggctagactt

SEQ ID NO: 488131 - DNA, 201 bp, Homo sapiens
ggctatgtgcataactgcacacactttcaaatggggtctagttaagggcataaggagtgctccatggagaatgcagacttaggtcctttttttttttttttgagacagggtttcactctgcaacccaggctggagcacagtggtatgatcatggctcactgcagcctcagcctcccagggtcaggtgatcctcccacctca

SEQ ID NO: 488132 - DNA, 201 bp, Homo sapiens
gggctatgtgcataactgcacacactttcaaatggggtctagttaagggcataaggagtgctccatggagaatgcagacttaggtcctttttttttttttttgagacagggtttcactctgcaacccaggctggagcacagtggtatgatcatggctcactgcagcctcagcctcccagggtcaggtgatcctcccacctc

SEQ ID NO: 488133 - DNA, 201 bp, Homo sapiens
tcctaagcttgacaccctgggggtgctgagtccacaaagcagtggttctcaaccctaagggaacatcagaatcactaagtttgttcttcttctttttttttccccctgagatagagtctcactcttttgcccaggctggagtgcagtggcgtgaacacagctcactatagccctgaaccctcaggctcaagcaatcctccc

SEQ ID NO: 488134 - DNA, 201 bp, Homo sapiens
ctcctaagcttgacaccctgggggtgctgagtccacaaagcagtggttctcaaccctaagggaacatcagaatcactaagtttgttcttcttctttttttttccccctgagatagagtctcactcttttgcccaggctggagtgcagtggcgtgaacacagctcactatagccctgaaccctcaggctcaagcaatcctcc

SEQ ID NO: 488135 - DNA, 201 bp, Homo sapiens
ttaagtatctcctaagcttgacaccctgggggtgctgagtccacaaagcagtggttctcaaccctaagggaacatcagaatcactaagtttgttcttcttctttttttttccccctgagatagagtctcactcttttgcccaggctggagtgcagtggcgtgaacacagctcactatagccctgaaccctcaggctcaagc

SEQ ID NO: 488136 - DNA, 201 bp, Homo sapiens
ttagaatttttagaaacggagtcttgctccattgcctaggctggagtgcagttgtgcaatcatagctcactgcagcaatgaactcaagccatcctctctcmcgtcccagacagctaggaccacaggtgtatgatcacatccggcttatttcatagattttaagtgtcttacccaaggtcatcatctagccagtgaccagga

SEQ ID NO: 488137 - DNA, 201 bp, Homo sapiens
acctttggtggggcataactggactgcaaagtctaccttgttggagtttaagtgctattaatcaatttcacagattttttaaagttagaatttttagaaayggagtcttgctccattgcctaggctggagtgcagttgtgcaatcatagctcactgcagcaatgaactcaagccatcctctctcccgtcccagacagctag

SEQ ID NO: 488138 - DNA, 201 bp, Homo sapiens
ctctgtcacccaggctgagtgcagtggtgccatcatagttcactgcaaacttgaattcatgggctcaaccgatcctcccacctcaacctcccgagtagctrggactacaggtgcatgtcactacacccagctaatattttaatttgtagagatgggatctccctatgttgctcaggctggtcttgatctcctgggctcaca

SEQ ID NO: 488139 - DNA, 201 bp, Homo sapiens
tgaccccttgaacaatcctggggatgattcaggctggaaacaccctgtactcagccctatagaagtatcagaacttagacaaagagcaggcagggaacttyacattaactgaccacctttggtggggcataactggactgcaaagtctaccttgttggagtttaagtgctattaatcaatttcacagattttttaaagtta

SEQ ID NO: 488140 - DNA, 201 bp, Homo sapiens
gggactacaggtgcatgtcactacacccagctaatattttaatttgtagagatgggatctccctatgttgctcaggctggtcttgatctcctgggctcacrcaatcctcctgccttggccttccaaagtgctgggattacagtggatggtgaattaaagtcaacaacagtgaatgtcataatggttcctttttgcagttac

SEQ ID NO: 488141 - DNA, 201 bp, Homo sapiens
gcctctgaaaacctatggaggcacaatggctcgcacttgtagtcccagctacttgggggttgctgaggcagaaggatcacttgaacctgggaggtcaaggmtgcagtgaggcctgatcatgccactgaactccagcctgggtaatagagtgagaccctgtctggtaaaaaaaagaaaaaagaaaaccaatggaaactagaa

SEQ ID NO: 488142 - DNA, 201 bp, Homo sapiens
actacaggtgcatgtcactacacccagctaatattttaatttgtagagatgggatctccctatgttgctcaggctggtcttgatctcctgggctcacacartcctcctgccttggccttccaaagtgctgggattacagtggatggtgaattaaagtcaacaacagtgaatgtcataatggttcctttttgcagttaccaa

SEQ ID NO: 488143 - DNA, 201 bp, Homo sapiens
ctgggattacagtggatggtgaattaaagtcaacaacagtgaatgtcataatggttcctttttgcagttaccaacacctttgtaaaggaacttggtgtcayggtttcacatattaaactccatttatcaaatgggctatattaatttaaggaccaaggaagagatatttacgtcaagtcataaggtttctggctgagaatt

SEQ ID NO: 488144 - DNA, 201 bp, Homo sapiens
gatggtaatcaggaaaagctttcaaaaggggacttttgtccacatacctaaagctaatgaaagttgactagaaacttaagtctcttggttgggcacggtgrctcacacctgtaatcccagtactttgggaggccgaggggagtggatcacttgaggtcaggagttcaagaccagcctagacaaaatggtgaaaccccgtct

SEQ ID NO: 488145 - DNA, 201 bp, Homo sapiens
actgattaggtcatgtattataaagatatataagacagatttttattttcgcagacctcttacctagctatacatagatatccatacacaatagagagaarcagagagagagagacagagagagagagagaaaaaatgaaaaagcaagattaagcatgcaaaataaagataaattcacaaggctgtatgtgattaattgcc

SEQ ID NO: 488146 - DNA, 201 bp, Homo sapiens
tattccccctttccctcaattcccagccttggttttgaatgtttctgaatcagacttagagggtccctggcccctcacattccttcttcatctgaattctsgtttctagagctcaaaaccacacggttccaggctgctctaattaaatacagagattgagaccatctgatgctaagattatgaccttaatgacgcgcagga

SEQ ID NO: 488147 - DNA, 201 bp, Homo sapiens
tatataagacagatttttattttcgcagacctcttacctagctatacatagatatccatacacaatagagagaagcagagagagagagacagagagagagagagaaaaaatgaaaaagcaagattaagcatgcaaaataaagataaattcacaaggctgtatgtgattaattgccagagggctggtatggactttagctga

SEQ ID NO: 488148 - DNA, 201 bp, Homo sapiens
taaattatctgaggaccttttaaaacatgcagactcctcccccaaccccagacctactgaatagagtctctggtggtgaggcctagcaatctgcatttttwaaaaagtgccccaggtgattcttgcgtacgtttaagtttgttctaaatgctgggggctcaactctagctgcacataaaaacataatgcctggctgcagcc

SEQ ID NO: 488149 - DNA, 201 bp, Homo sapiens
ggtggcttggatgaagtttattcaccagtaactcagccagaaagttccattaggattttgcatagcagatgggatgggagactgggtggggtattgtaaaygggggtggaggccagaggcccaaaaggtgaaactttttaaaagggcaaatgtcaagtagggggctacattctcatttctacccacacaaaaacagtcttc

SEQ ID NO: 488150 - DNA, 201 bp, Homo sapiens
atataagacagatttttattttcgcagacctcttacctagctatacatagatatccatacacaatagagagaagcagagagagagagacagagagagagaragaaaaaatgaaaaagcaagattaagcatgcaaaataaagataaattcacaaggctgtatgtgattaattgccagagggctggtatggactttagctgac

SEQ ID NO: 488151 - DNA, 201 bp, Homo sapiens
acagtcttcccccgctatcctagcgtgtgttaaagtgacatgaacagccttaggagcatctgcttatcctatttgggaaggttctgattttttttttcagragaagccacacaattgagaaccctccctctgtgatccttctcgccctcctgttcgccggctgctttgggggaaattggttgcttcctgcaagtctcttcc

SEQ ID NO: 488152 - DNA, 201 bp, Homo sapiens
ataagacagatttttattttcgcagacctcttacctagctatacatagatatccatacacaatagagagaagcagagagagagagacagagagagagagaraaaaaatgaaaaagcaagattaagcatgcaaaataaagataaattcacaaggctgtatgtgattaattgccagagggctggtatggactttagctgacaa

SEQ ID NO: 488153 - DNA, 201 bp, Homo sapiens
ggttctgattttttttttcagaagaagccacacaattgagaaccctccctctgtgatccttctcgccctcctgttcgccggctgctttgggggaaattggktgcttcctgcaagtctcttccacgacgttaagattagcagaataattaaatacagtcctaactgggcacagagagagttgttaattaatgagccaagctc

SEQ ID NO: 488154 - DNA, 201 bp, Homo sapiens
ttattcatgttcatacatgtagatctagttcattcatgttaattttttttttctttgagacagagtcttactctgttgcctaagctggtgtgcaatggcgygatctcagctcactgcaacctctgcctcccaagttcaaatgattctcctgcctcaacctctggtgtagctgggattacaggcatgcaccaccacaccctg

SEQ ID NO: 488155 - DNA, 201 bp, Homo sapiens
aagaaaatgacctaatgtctcaattccaccccattctccatatattaaccatatttttaatttacttccttctagtctacttgctgtgaatttttcttccsaccatccccaccccccaatcaccaatctgaaccagacattctggttccttggctctttcactaactagttgtgtgaccttaggccagttattatttaatc

SEQ ID NO: 488156 - DNA, 201 bp, Homo sapiens
ccacacaattgagaaccctccctctgtgatccttctcgccctcctgttcgccggctgctttgggggaaattggttgcttcctgcaagtctcttccacgacrttaagattagcagaataattaaatacagtcctaactgggcacagagagagttgttaattaatgagccaagctccggcccggagctacaaatccacgctgg

SEQ ID NO: 488157 - DNA, 201 bp, Homo sapiens
tcaaagaccttggctgtctgtggtcacacactgaacagcactgcttttactctaaagcataaatctccaggtggaactgtctggctccaccactgggcackgttatgactctgggcaggttaccttggtttctgtatctctgtatcttggtttcctcatcagtagggaatattagaacctatctcataaggttgctcctag

SEQ ID NO: 488158 - DNA, 201 bp, Homo sapiens
aaggtagcctcatcctttggctatcaggcaattttccccctccctcaccatttggaagtttaagcagcacaggttattccctgaagatgacacctgcctccttctatctatctacaggggtatccctcagaatgggagcctctgaaggactctatgaggaggtaattgaacaactgttgagattatggtctcagataccat

SEQ ID NO: 488159 - DNA, 201 bp, Homo sapiens
aggtagcctcatcctttggctatcaggcaattttccccctccctcaccatttggaagtttaagcagcacaggttattccctgaagatgacacctgcctccttctatctatctacaggggtatccctcagaatgggagcctctgaaggactctatgaggaggtaattgaacaactgttgagattatggtctcagataccatc

SEQ ID NO: 488160 - DNA, 201 bp, Homo sapiens
tttatttcacagatgggaaaacaggtttgctgtatctttctcctcgggtcataccttacagatcctgtgttctctagggagtccagtgctcttccatacargtaaacattgctcccagtgtttctgacaactttctgaattattctctacctctaggtatcccagggtaagagcgaagctagggagaaggaattagaactg

SEQ ID NO: 488161 - DNA, 201 bp, Homo sapiens
ttgtgaggacattcaataataaaccagaggagtataaactttattatgagactactgggaaatgacatgataaaaagagttttttttgttgttgttgttaytgctttgtttttaacgaatcttggcaactatatacagcacagccctgcgaaggaggaattagagcccagaaaaccacactagggctgtgcacagggaata

SEQ ID NO: 488162 - DNA, 201 bp, Homo sapiens
agcatctgaacaaatcaaaggtgagttgtctctgtgtatgctgatgcttctcatcatcaccatgatcttgggagaatacctgaccagctctacctcacccrcacataggccctctgacagtgccggtttgcatactgatatttaaatcaaacacaggactaggtatttaaacaaattattacagtggcttttcatacctac

SEQ ID NO: 488163 - DNA, 201 bp, Homo sapiens
attcattaaatatgcattaaatattatacaagtataatgccttgggaaattttccggtatattgttaagtgtgaaaaagattataaaatagttatgtacamccatgtctcaattgtgcatacagtgtctgtgtttgtgtgtgtataaaaaccatatatatatacatatatatatgtacacagcagttatctctgaaaagtt

SEQ ID NO: 488164 - DNA, 201 bp, Homo sapiens
gacatctcaaccagaacaaagcaggcctgaggcagtttccacgaaactcctctctgtcctgctcttctttgaattaaagagtggtcccctcatataccaccaacactcacagtgtcagcacaacccccatcacacaggtcagcccatctccataatgtggtccaaatgttaccttcaagtaccacagaattaatgacagag

SEQ ID NO: 488165 - DNA, 201 bp, Homo sapiens
aattagtagtaaatggaaagacttctcatgcttgtttgcagggtttgggttaaggctgcagtttcacccccacatagatcctcggtgaggagttgttctcmaggagcaagtgagacagggaaggcagtgtggcggtgagaggagggtgctgactgctctgtcctgcagaatcctgttgctgagagctcctagagctgtggc

SEQ ID NO: 488166 - DNA, 201 bp, Homo sapiens
tcgccctcctgttcgccggctgctttgggggaaattggttgcttcctgcaagtctcttccacgacgttaagattagcagaataattaaatacagtcctaaytgggcacagagagagttgttaattaatgagccaagctccggcccggagctacaaatccacgctggcctgtgaaaacccaggcagaaaaaaatgtgctcca

SEQ ID NO: 488167 - DNA, 201 bp, Homo sapiens
tgcttcctgcaagtctcttccacgacgttaagattagcagaataattaaatacagtcctaactgggcacagagagagttgttaattaatgagccaagctcyggcccggagctacaaatccacgctggcctgtgaaaacccaggcagaaaaaaatgtgctccagtcccacgagaaaattgtcacttggcaaaaatagttcct

SEQ ID NO: 488168 - DNA, 201 bp, Homo sapiens
aagcggggaggggccaggcggggagggagggcctaaggggcggagttccaaggtccagctgtgggcaggagacctggccagcagcggccggagcctcatgyaacgctgcctgtggcaccaacgctgtgggcacggggcaaacgggtggagtttgagcccttggcaccaaacaggtaggtactccttatgtgcaacttcctc

SEQ ID NO: 488169 - DNA, 201 bp, Homo sapiens
ggtagcctcatcctttggctatcaggcaattttccccctccctcaccatttggaagtttaagcagcacaggttattccctgaagatgacacctgcctccttctatctatctacaggggtatccctcagaatgggagcctctgaaggactctatgaggaggtaattgaacaactgttgagattatggtctcagataccatct

SEQ ID NO: 488170 - DNA, 201 bp, Homo sapiens
caatgggcgttggcttaaaaaatacaactagatggggccaaagaggtaagagaggggcagacttagatgctccaagactcaaggatgcccttttcttcctygcagcctcacccgttccctccccacagcctcctctgtattgaaaacaccgtccccaaccctttcctttccttccgtgtaatgctgattactaataatgat

SEQ ID NO: 488171 - DNA, 201 bp, Homo sapiens
ctaagtgactaatgggcaggtagcatatacagcatggagatgctggacaaaggaatgattcagattcacatcctgggcaggacggagtaggatggtgtgasatttcatcacactactcagaacagtgtgcaatttataacttatgaactgtttatttctgaaatttttcatttaatattttcagacctcagttgactgtgg

SEQ ID NO: 488172 - DNA, 201 bp, Homo sapiens
tttaaagctggaaattaagaaaatgtgaaaaaaataatttttatgagtattatttgagctatctggtggtcctgcttctgaaggagaaacatctatgaaacatcactcatgaagcacttaatgaacaccatctttccagtcactacactaggcactgcactatctcataggggagacaaccttcatctgttcaatatttgt

SEQ ID NO: 488173 - DNA, 201 bp, Homo sapiens
tgatcagctctccaactgtaatgacgtgaaaacacactctgggtttggaatcatacaaccaaccttcaaagctcagttttgccacctgctagctgtttgamcttaggcaagtcacttcaccttttatcttcagtttccccatttaaaaaaaaaatgtaaaagaattcctatattccacggttgtagattttctttaaaaaa

SEQ ID NO: 488174 - DNA, 201 bp, Homo sapiens
gagagcttgtgcactgaacatatcctaaccagtccattgtctgtgtcaaacattgtccttcttctacttaggtagcctttcattagtgtgatggttaataytgagtgtcaacctgattggattgaaggatgcaaagtattgatcctgggtgtgtctgtgagggtgttaacatttgagtcagtgggctggggaaggcagacc

SEQ ID NO: 488175 - DNA, 201 bp, Homo sapiens
aggcaagtcacttcaccttttatcttcagtttccccatttaaaaaaaaaatgtaaaagaattcctatattccacggttgtagattttctttaaaaaatttyctttaatagaggcagggtctcgggtcttgctatgttgccccagctagtcttgaactcctgggctcaagtgatcctcctgccttagcctcccaaaacatta

SEQ ID NO: 488176 - DNA, 201 bp, Homo sapiens
ttgtgcactgaacatatcctaaccagtccattgtctgtgtcaaacattgtccttcttctacttaggtagcctttcattagtgtgatggttaatactgagtrtcaacctgattggattgaaggatgcaaagtattgatcctgggtgtgtctgtgagggtgttaacatttgagtcagtgggctggggaaggcagacccaccct

SEQ ID NO: 488177 - DNA, 201 bp, Homo sapiens
tctgctatctttctgctgataagtttgcagaagcttttcattcactagacccctgtgatgccatgtggctctactgaatccaagccttcaagacttattawcagcacatgtcgtgtcagcagaactagaagtccggccacattaactgtgccttgcgttaccaggcgagacagatgactgcctaagatttctgttccatgg

SEQ ID NO: 488178 - DNA, 201 bp, Homo sapiens
agatcaattgagatcaggagtttgagaccagctgagcaacatagcgagacctcatctctactaaaaataataacaaaaattagcctggtgtggtggtgcgytcctgttgtctcagctacttaggaggttgaggcagcagaattgcttgagcccaggaggtcaaggctgcagtgagctgtgattccaccactgcactccagc

SEQ ID NO: 488179 - DNA, 201 bp, Homo sapiens
aaaattaatggcaagagtataaagtacaaattaaaaaccaaaagtaatctctattttgttgtttcaagtttgttccatgcaagcaactggagccatgcaamcatggcccaagttatgggaatctcagagctggaagcaatgtaattcatcacctagtgggtgtcctgacttgggataagaccatttccaagacactttaaa

SEQ ID NO: 488180 - DNA, 201 bp, Homo sapiens
cgcagtggctcatgcctgtaatcccagcactttgggagcccaagacgggcgaatcatttgagcttaggagttcaagaccagcctggacaacatggtgagaycctgtctctacaaagaatacaaaaattagctgggtgtggtggcatgcacctgtagtcccagctactcgggaggctgaggcaggagaattgcttgagcctg

SEQ ID NO: 488181 - DNA, 201 bp, Homo sapiens
ccaatgactggcattaagtaaatgggaagacaaatggatccctggacactgcaaataataaagagcccctaatgttctggtatgtacagttggctttctakaattaaaaaaaattttctgaagcgaattttatcatgaaatagttttaaaatacagaaaaatatagaaaaaaattgacatctatgtactcatcacctagat

SEQ ID NO: 488182 - DNA, 201 bp, Homo sapiens
gtcccagctactcgggaggctgaggcaggagaattgcttgagcctgggaggcggggttgcagtgagccaagatcacgccattgcactccagcctgggcaaygagagtaaaaccctatctcaaaaaaaaaaaaaaaaaaaagaaggaaaataaaaaggaattatcacatgacccagtgatccctcttctgagtacacatcca

SEQ ID NO: 488183 - DNA, 201 bp, Homo sapiens
cttcaaatgttagtactgaaaggacaggcttctcgctgacataagcactgcacatttacactgcaaggcagaaaatggccccctggcaatctcagccccasaagccccacagtcttttccctcacctgttcagaagttttgtaaaaggccacagaggcattgaccaattttagccggtcttccatcttcagcatgagctgc

SEQ ID NO: 488184 - DNA, 201 bp, Homo sapiens
tagatatagtgtaaacatttttccatatttactccaagttttttaaaaataaaagattacagatatagttgaagccttttatgttgcccagttgcaatccyactctctaattgccctcatcagagttaaattctcttctgaagctagtgtgcatctttcttatccatgttgttaaacatttacttttatgtgaatatagta

SEQ ID NO: 488185 - DNA, 201 bp, Homo sapiens
cgggaggctgaggcaggagaattgcttgagcctgggaggcggggttgcagtgagccaagatcacgccattgcactccagcctgggcaacgagagtaaaacyctatctcaaaaaaaaaaaaaaaaaaaagaaggaaaataaaaaggaattatcacatgacccagtgatccctcttctgagtacacatccaaagtaaatgaag

SEQ ID NO: 488186 - DNA, 201 bp, Homo sapiens
ccatatttactccaagttttttaaaaataaaagattacagatatagttgaagccttttatgttgcccagttgcaatcccactctctaattgccctcatcaragttaaattctcttctgaagctagtgtgcatctttcttatccatgttgttaaacatttacttttatgtgaatatagtattattttgtgttttatagttta

SEQ ID NO: 488187 - DNA, 201 bp, Homo sapiens
tgaggcaggagaattgcttgagcctgggaggcggggttgcagtgagccaagatcacgccattgcactccagcctgggcaacgagagtaaaaccctatctcaaaaaaaaaaaaaaaaaaaagaaggaaaataaaaaggaattatcacatgacccagtgatccctcttctgagtacacatccaaagtaaatgaagttactacc

SEQ ID NO: 488188 - DNA, 201 bp, Homo sapiens
gacagttcactgcagcctcaacctcctgggctcaggtgatcctcccacctcagccttctgagtagctgagactatagcctcatgccaccatgcccagctawtttttttaaattttttgtagagacagggtttcaccgtgctgcccagattggcctcaaactcctgatctcaagtgatccacctgcctcagcctcccaaagt

SEQ ID NO: 488189 - DNA, 201 bp, Homo sapiens
ccttatccatgagggaagggatgcagtccaagatccccagtggatgcctgaaactacagatggtatcaaaccctatatatgtttttttctatacatgtgtrcctatgataaagtttaatttataaattaggccttaagagattaacaacaacaactaataatgaaattggacaacaataacaatatgccagcatcactact

SEQ ID NO: 488190 - DNA, 201 bp, Homo sapiens
caccatcccacatcatacattttcatttctaaggagaagcagcaggaaatttgagattgtgtgaaaactgggtacatggtatatttcagggaggggctgtygctgaagtgactggtggctgggcaggtctctcactgacctttcacttgttgctcgggtccccgagtgtggctggcgacactgggcatgctgacgttgttc

SEQ ID NO: 488191 - DNA, 201 bp, Homo sapiens
tgtccggctaattttttgtatttttagtagagacggggtttcaccgtgttagccaggatggtctcgatctcctgacctcatgatccgcccacctcggactmccaaagtgctgggattacaggcatgagctaccgcgcctggccagttccttaagaagttctaagtgctgcccagtcaattaaagatgagttaagaaagcca

SEQ ID NO: 488192 - DNA, 201 bp, Homo sapiens
tgaggtgggagggttgattgagcccggaaggtcgaggctgcattgagccgtgatcgagccactgccctccagccaaggaaacagagtgagaccctgtctcaataaataaataaataaataaataaataaataaataaataagaattttagaaaaagaaagtggtaattacactaaagactagaactaggttttgttaacat

SEQ ID NO: 488193 - DNA, 201 bp, Homo sapiens
gaggtgggagggttgattgagcccggaaggtcgaggctgcattgagccgtgatcgagccactgccctccagccaaggaaacagagtgagaccctgtctcaataaataaataaataaataaataaataaataaataaataagaattttagaaaaagaaagtggtaattacactaaagactagaactaggttttgttaacatt

SEQ ID NO: 488194 - DNA, 201 bp, Homo sapiens
ctgttctttctccctctcttcacccaccccaacttgaaaacactgtgttcccaatcagataaagccagcacaagtgtatagagcagaaggcaagcagcacrgagggaggagagatccaaccatatcccaaatctttcccactcatctcctgggacgacaatggccactgtcccctcagcagcactggcccaactcctcaga

SEQ ID NO: 488195 - DNA, 201 bp, Homo sapiens
cctcttcaaagtcatcatgcctccctcatctagacacacacacacacacacacacacacacacacacacacacacacacagcttctcacctgagccacctsttcaaagtcatcatgcctcttctgcagggcccgggctcgatgtagggacttcccaactccagtgtgtttgctgagaaaggcctcaccatggttttcaatc

SEQ ID NO: 488196 - DNA, 201 bp, Homo sapiens
aggtgggagggttgattgagcccggaaggtcgaggctgcattgagccgtgatcgagccactgccctccagccaaggaaacagagtgagaccctgtctcaataaataaataaataaataaataaataaataaataaataagaattttagaaaaagaaagtggtaattacactaaagactagaactaggttttgttaacattt

SEQ ID NO: 488197 - DNA, 201 bp, Homo sapiens
gcagatgtagtaggccaggtgtaccacaatgtcaggcctgacatcaggcaccagtgtgactgcctctccctccacattaaccacagtcttcagtaacactsgaccatgacctcaggtacctgtctcttacactaacagacatatgccatttttttttcctttagggttattctcttcagatggacaggaaaagaattttac

SEQ ID NO: 488198 - DNA, 201 bp, Homo sapiens
ggtgggagggttgattgagcccggaaggtcgaggctgcattgagccgtgatcgagccactgccctccagccaaggaaacagagtgagaccctgtctcaataaataaataaataaataaataaataaataaataaataagaattttagaaaaagaaagtggtaattacactaaagactagaactaggttttgttaacatttt

SEQ ID NO: 488199 - DNA, 201 bp, Homo sapiens
tatgccatttttttttcctttagggttattctcttcagatggacaggaaaagaattttactaaatcacaatcatttccccacatttcttaaagctcaggayagagaaagaaggaacagcaaccatgccccaattcaggcctagagattcataggagacccttcttactgtgaccttttatagagcataggcttggtgagcc

SEQ ID NO: 488200 - DNA, 201 bp, Homo sapiens
atttaatattttcagacctcagttgactgtgggtaactgaaactgtggaaagtgaaacctcagatagacggcgactgttttagcatgtttccatgcaacayacataagtgctacctgcttcaactgaagacaaaaatcagaataaagcctaggagagcttgtgcactgaacatatcctaaccagtccattgtctgtgtcaa

SEQ ID NO: 488201 - DNA, 201 bp, Homo sapiens
tgctgggcgcggtggctcacgcctgtaatcccagcactttgggaggccgaggcaggtggatcacctaaggtcaggagttcgagaccagcctgaccaacatrgagaaaccccatgtctactaaaaatacaaaattagctgggcatggtggcacatgcctgtaatcccagctacttgggaggctgaggcaggagaattgcttg

SEQ ID NO: 488202 - DNA, 201 bp, Homo sapiens
tttcttaaagctcaggatagagaaagaaggaacagcaaccatgccccaattcaggcctagagattcataggagacccttcttactgtgaccttttatagarcataggcttggtgagccgtgatcatggttcctggtgagtgcagaggcaggccctgatctccttaactccactccaaccattcccttgctctcctttcccc

SEQ ID NO: 488203 - DNA, 201 bp, Homo sapiens
aaccccatgtctactaaaaatacaaaattagctgggcatggtggcacatgcctgtaatcccagctacttgggaggctgaggcaggagaattgcttgaatcygggaggcagaggttgtggtgagccgagatcatgccattgcactccagcctgggtaataagagcaaaactccgtctcaaaaaataaaaattaaaaaaatta

SEQ ID NO: 488204 - DNA, 201 bp, Homo sapiens
gagtgcagaggcaggccctgatctccttaactccactccaaccattcccttgctctcctttccccacaggggtgattctcacctgtagcactcacccccakatttggattctataggtttttttttttttaaatggagtttcactctgtcacccaggctggagtgcagaggcacatcttggctcactgcaatctctgcctc

SEQ ID NO: 488205 - DNA, 201 bp, Homo sapiens
gaggctgaggcaggagaattgcttgaatccgggaggcagaggttgtggtgagccgagatcatgccattgcactccagcctgggtaataagagcaaaactcygtctcaaaaaataaaaattaaaaaaattaaaaaattagctggatgtggtggtgcatgcctgtaatcccagctacttgggaggctgaggcaggagaatcgc

SEQ ID NO: 488206 - DNA, 201 bp, Homo sapiens
ctgtatagacatcggtaggaactgaatataccagaaatttattatatctgatataactaatttagaaatttaatttcttgtttctaaagtttcaactcatrcttacttcaatgttacacctaaaaaaaatgctactcccctttctggtttagtgtaaaatttgccaaacgattctgaaatcagaacacactgtacacaagt

SEQ ID NO: 488207 - DNA, 201 bp, Homo sapiens
ccagcctgggtaataagagcaaaactccgtctcaaaaaataaaaattaaaaaaattaaaaaattagctggatgtggtggtgcatgcctgtaatcccagctrcttgggaggctgaggcaggagaatcgcttgaacctgtgaggcagaggctgcagtaagctgagattgtgccattgccctccagcctgagctacaagagcga

SEQ ID NO: 488208 - DNA, 201 bp, Homo sapiens
atctccctccaactagaatcacctttgcaccaagaatcaccttttcttctagtgatgagtaacagatatggggagaaacagcttactacatatggatgaayaggaaccatcaggatattcaaatctggtctctggacaaaacactccatatccagctcacacatacaaggccatcctatgcctccttactatctgctcata

SEQ ID NO: 488209 - DNA, 201 bp, Homo sapiens
ttttctaatcacaaaatactgacttagccttgtttctactgaccccaaggcgatttggaagtagagaaggactacaattcccagacagaaaaagaagatarttctaatagtgttaggagcttagtgtccccaaagaccagtagcagtgtctttgcaaggggtaggctgggaccctagagagcaagcatatgtgcaggtggc

SEQ ID NO: 488210 - DNA, 201 bp, Homo sapiens
agtgtccccaaagaccagtagcagtgtctttgcaaggggtaggctgggaccctagagagcaagcatatgtgcaggtggcatccgaggcttccatggattgygggcatcacaaatatattacttatgaggctggctcactattttctacattggcttgagtagtacaactcaaaaatgaaaaaactcggtttcaatccattc

SEQ ID NO: 488211 - DNA, 201 bp, Homo sapiens
tcatgtgattgttaaaagacaatggggtccagttgctccatataaaccatacctgttttatctagatggtcaataggtctataaatgtccacctggtgttmatcataatactgaattggaaactttgactccaatggctgaaatcagaagaaatcacaaagatttctaatatccactaacaatttacagaggggtcctttg

SEQ ID NO: 488212 - DNA, 201 bp, Homo sapiens
tgttttatctagatggtcaataggtctataaatgtccacctggtgttaatcataatactgaattggaaactttgactccaatggctgaaatcagaagaaaycacaaagatttctaatatccactaacaatttacagaggggtcctttgaccttctgttcttttgtcttgctttagctccaatggcatgggaataattgcaa

SEQ ID NO: 488213 - DNA, 201 bp, Homo sapiens
cttgccccaggcagtaggcagtggagggggatgtagaggggaggggaggtaccttcaggagcagttgatatttggtgatcctttggacaggcttaattagrtaggaagagatggagttggccagaccatgccgctgttgtatctcctgcagggatgagaacaatgtgcaattagacacagaggggtgtgtgcatgtgtgtg

SEQ ID NO: 488214 - DNA, 201 bp, Homo sapiens
ccccagatttggattctataggtttttttttttttaaatggagtttcactctgtcacccaggctggagtgcagaggcacatcttggctcactgcaatctcygcctcccaggttcaagtgattctcctgcctcagcctcccgagtacctgggactacaggcaagcgtcaccaagcccggccaatctatgggttttaaaaagc

SEQ ID NO: 488215 - DNA, 201 bp, Homo sapiens
cccagatttggattctataggtttttttttttttaaatggagtttcactctgtcacccaggctggagtgcagaggcacatcttggctcactgcaatctctrcctcccaggttcaagtgattctcctgcctcagcctcccgagtacctgggactacaggcaagcgtcaccaagcccggccaatctatgggttttaaaaagct

SEQ ID NO: 488216 - DNA, 201 bp, Homo sapiens
ctcccaggctcaagcaatcctcccaccacagcttcccagtaattgggaccacagtgtgcgccaccacacctggctaattttcttttcttcttttcttttctttttttttgtagggacggggtcctactatgttgtctaggctaatctcaaattcctaggctccagccatcctcctgcctcagcctcccaaagtgctgggct

SEQ ID NO: 488217 - DNA, 201 bp, Homo sapiens
agtttataaggaaaatgtaaattaaataaggcctgttccatgagaaaagacaaagaagaacagggtgaattctagcagaagttggtttaattttctgtggmagaaaaaagaaatggaaacagaatagtactggacataaggttggggtttcttctttatgtgaaaaagaggaattgagacaatagtcatcagtaaccagaa

SEQ ID NO: 488218 - DNA, 201 bp, Homo sapiens
cccagtaattgggaccacagtgtgcgccaccacacctggctaattttcttttcttcttttcttttctttttttttgtagggacggggtcctactatgttgyctaggctaatctcaaattcctaggctccagccatcctcctgcctcagcctcccaaagtgctgggcttacagttgtaagccaccctgcctagtcaagccaa

SEQ ID NO: 488219 - DNA, 201 bp, Homo sapiens
tgagacaatagtcatcagtaaccagaaacacttcaattagagagaggaggtacaatgtgtacattgcttctatatttaatttgaactccaaatatggtggsggtttttgtttgtttgtttgtttgttttgttttggaggtagggtcttgctctgtcatccaggctgaagtgcagtggcataatcagagctcactgtaacct

SEQ ID NO: 488220 - DNA, 201 bp, Homo sapiens
cctagtcaagccaattgtattcaccatgtctttttatttcctgtattatttgctttgatatctggggtattgctgatcctggagggatagccgcccccccyagggttagttaatatctagagagaggcgacacctttcctatgcaaacccaccaatccagagcccacacccccaaccaccctctttatcaagctttcattt

SEQ ID NO: 488221 - DNA, 201 bp, Homo sapiens
gccgagatcaggacactgcactccagcctgggtgacagaatgagaccctgtcctaaaaaaaaaaaaaaaattaaaaaagagagattataaatttgtaaaastgaaggaaaatgcttagataacattaagtggaaaaaaagcaggatacaatgttaattataaaaactgaaccagctgtggaggcactgtggctcacaccag

SEQ ID NO: 488222 - DNA, 201 bp, Homo sapiens
ttatatactcaaacattcctattttctttgctttccagaaataatttgctaatataaaaattatagaaatatcatatatacatttttgttcacactggaarttgaatatctagagaagggcacgtaatgggagggccaaaggtgaaaatttcctgggtagccaatggataaatccatatttgttcataagcattgacagca

SEQ ID NO: 488223 - DNA, 201 bp, Homo sapiens
gctgtggaggcactgtggctcacaccagtaatcccaacattttgggaggctgaggcaggcagatcacttgaggccaggagtttgagatcagcctggccaaygtgtctctactaaaaatacaaaattagccaggcatagtggtacatgtctataatcccaactacttgagaggctgaggcaggagaatcacttgaacctagg

SEQ ID NO: 488224 - DNA, 201 bp, Homo sapiens
aaccctcacttgagttccctttgccaggacagaaagataaggaggaagcaaaaactcctttaaaaatctcccgtccctgatccatgcagaaatgaactcarataaaacctccaggaatgtgccaagtgcacagattctccagttggagcaactctcacagggccaggccagggggctgaggttgggtgggaagctcaggga

SEQ ID NO: 488225 - DNA, 201 bp, Homo sapiens
aaccaggttcaaggtaggggggtggttcaggccatactgagaggacacagatgtctccccagaatggccaacattcctcttctgtgaggacagagaggaasagctgctggcaacaaggacaggttcctggatatctgtactgagcagccgcctgagctggcctgagctcaggggcagatgagctatttatcaaagtgaaag

SEQ ID NO: 488226 - DNA, 201 bp, Homo sapiens
ttctactctgctacctagaagtaaccacagtgattcagtgtatatcttggctcattttcaatgcattcacccacatagacacacagtttgttcttgcacaatgatgtttatactatgtcgttgaatggttctgtatggatttttccccatttaacaaatgggagatcttcctatgtttggatcttctattttgctgtttgt

SEQ ID NO: 488227 - DNA, 201 bp, Homo sapiens
cctgagctcaggggcagatgagctatttatcaaagtgaaagatggctgcagctggaattgctaaaaacaaaccactccaggttttatctacttccaaaaaygtttacctctaagtaggtcaaagtgttcccaaagtagggcagtataagagtgccagtctatcactctgagtttcaattaaggtaaacttatgattgctaa

SEQ ID NO: 488228 - DNA, 201 bp, Homo sapiens
tctactctgctacctagaagtaaccacagtgattcagtgtatatcttggctcattttcaatgcattcacccacatagacacacagtttgttcttgcacaatgatgtttatactatgtcgttgaatggttctgtatggatttttccccatttaacaaatgggagatcttcctatgtttggatcttctattttgctgtttgtt

SEQ ID NO: 488229 - DNA, 201 bp, Homo sapiens
cagtccaaataaatgagaggtacttaacccatacgtccccagagaagacttcctcaatcaggactcctagcatcagaacatgattccccattcccatcctsaagtcctcctgctaaagcttaagccagtttcctttaccgttctacatgctgagcctggtccttcacataagaactctgcagaggtccctgatgcatgatc

SEQ ID NO: 488230 - DNA, 201 bp, Homo sapiens
ctactctgctacctagaagtaaccacagtgattcagtgtatatcttggctcattttcaatgcattcacccacatagacacacagtttgttcttgcacaatgatgtttatactatgtcgttgaatggttctgtatggatttttccccatttaacaaatgggagatcttcctatgtttggatcttctattttgctgtttgttt

SEQ ID NO: 488231 - DNA, 201 bp, Homo sapiens
caaaagacatacacattttcaatttttatagattttgccaaatggccctgaagaaagagaatcaatttatgttcccatgagtggatgaatatctatttggycttacctataattttgccaatctgaagggtgaaacataatcttatcgtttttatttgaatttttgattactagatgttatcttttgaaaagtttattgcc

SEQ ID NO: 488232 - DNA, 201 bp, Homo sapiens
ctgctctgatatactgctgtgctgactcactggactcactgccccatctagctgtctctggaagttaaaggcgagaaaattctctctatattccaccagtsgtggattctgaagcttgatatgtgggatcaagcaaaagtcagtgaaagcagatctgctgctcttctaagagtaaatattctagatattatttcaacctac

SEQ ID NO: 488233 - DNA, 201 bp, Homo sapiens
tacccacccaatccctctctttttacactttgggggcattatgatgggaattcaaagatgcttcaaaatttcatggggaataaccagtttgttttttactsaaatcttccctcttggtttttgtgttcagataacactggatcacttttttgtcacaattctttgcaagagactaatgacatctcatcctgctgaaactgg

SEQ ID NO: 488234 - DNA, 201 bp, Homo sapiens
gccctcaatgagctccgtaaagcaccgttaactctattagcttatctagtaatattttctccttttcttttcagatggtatgaacataaacaagttcagcyctagtaataagcacaaagactcaaaatagcactatacaaatgactgtatataactgaagactctcccacagaatgggcaaggctaacttccagttttgtt

SEQ ID NO: 488235 - DNA, 201 bp, Homo sapiens
ctggccagttccttaagaagttctaagtgctgcccagtcaattaaagatgagttaagaaagccacctttttctttactgcaagacttctgggaacctctartatgctaatgtagatgatgaccccagagggaacatagagcatttaccaaatttcattgagcttggctattattccctagatctggaagaaaaagggtgag

SEQ ID NO: 488236 - DNA, 201 bp, Homo sapiens
aaccggattcgccagtatgatcccactggcaccagttctttaaaactttttattttgacataatttcagatttagagaaaggttacacgactagtacaaayaattcctatatactctttactcagattcctccaatgttaacattttgcccttagctttttcatctttctctttccaaactgagaataagttacagagaag

SEQ ID NO: 488237 - DNA, 201 bp, Homo sapiens
tagagcctgtgctccagccacacccaactgcagacattcccaggatccagcctgcattttgaggctgctgtgcctttgctcacactcttccatctccctgmatcccaaaccctggctaaacatttctccatctatgctcccatagcactaatagacaccgttgtgaacttacctgtgcaatggctatttgtttgctggtgc

SEQ ID NO: 488238 - DNA, 201 bp, Homo sapiens
atgagaggtacttaacccatacgtccccagagaagacttcctcaatcaggactcctagcatcagaacatgattccccattcccatcctcaagtcctcctgmtaaagcttaagccagtttcctttaccgttctacatgctgagcctggtccttcacataagaactctgcagaggtccctgatgcatgatccgtccctccttt

SEQ ID NO: 488239 - DNA, 201 bp, Homo sapiens
gggatttgcagaggaatattaacaaatatgtcaggtagtgataaatgcaatgaagaaaagtaaaacagagaagggagtatacactgtgatgggagagggtrggagttagggaagacctctctaatcaggtgacattcaagcagaaggaagtgtgacagcaagacatccaagtctctgaggatctggggtatctggtgtgtt

SEQ ID NO: 488240 - DNA, 201 bp, Homo sapiens
gcacaggactcgtcagccacttcttaagagtgttggtggagcgcttgggacccggggaactgtggatggagttcagggagggctgggcctgcaggttggcyacggactcggacttgcctccattctcgcttgaggaatgagagtatgcatctgaggaaaacggacagacacagccatgtcagaggtggtgaaggcaggccg

SEQ ID NO: 488241 - DNA, 201 bp, Homo sapiens
gcagaaggaagtgtgacagcaagacatccaagtctctgaggatctggggtatctggtgtgttccaagcagagggaacaaaagatcaggccctgaggtgagygtatgcatggcttgattggtaatggctcagtgaggcaggctggtcaggtgaatggtagacagaataacgtccgccaaagatgtccacatcctcctctcca

SEQ ID NO: 488242 - DNA, 201 bp, Homo sapiens
ttgtttcatccccaggcttgggagatcccaggtcaaagctcttccgaccatcgcgaactttcttctgctttttgatgtttccatctgccttcccgctgttragccgacgcacaggactcgtcagccacttcttaagagtgttggtggagcgcttgggacccggggaactgtggatggagttcagggagggctgggcctgca

SEQ ID NO: 488243 - DNA, 201 bp, Homo sapiens
cgccaaagatgtccacatcctcctctccagaacctataaatatgttaccttatatggcaaaagagactgtgcaaatgtgattctgttagggacctcgaggyaaggggattatgctggatcattctggtgaggacagtgtaatggtgggtgttcttaaaagcagagaacctttcccactgtggcccaggggaaacattacca

SEQ ID NO: 488244 - DNA, 201 bp, Homo sapiens
tctctatcatctccagcttcttctcagaaagcagtcagtggcagcctttcttctctgggatcaaatcctgaggctctcattttagctctgagctccatcarctggttcatgtggctccaaagagcatattcaagtttgcccctgacttcccctctggatgataaggggcatcatcatcatgtagatgtcacagatttacag

SEQ ID NO: 488245 - DNA, 201 bp, Homo sapiens
atgcattcattaaatatgcattaaatattatacaagtataatgccttgggaaattttccggtatattgttaagtgtgaaaaagattataaaatagttatgyacaaccatgtctcaattgtgcatacagtgtctgtgtttgtgtgtgtataaaaaccatatatatatacatatatatatgtacacagcagttatctctgaaa

SEQ ID NO: 488246 - DNA, 201 bp, Homo sapiens
atctttatcagcttccttttgcataaatgtggaagctaaacccaggaagattaggtgacattctactcaaaataagtggcttctcatttcataccctgtcytcttcccaccccatctgattccctgagaactaaattctgttccgttttcaaagatttgccagtacccttttaaggaaaaaaaacagtagattacaataca

SEQ ID NO: 488247 - DNA, 201 bp, Homo sapiens
ccaccccatctgattccctgagaactaaattctgttccgttttcaaagatttgccagtacccttttaaggaaaaaaaacagtagattacaatacattaggytgggccatttttaactgaaattgctgacattcaacctgtttttttttttgttttttgttttttgttttttttttgagatggggtcttgctttgtcaccca

SEQ ID NO: 488248 - DNA, 201 bp, Homo sapiens
aataaaaggtaataaaaatgctactttagaacaaatagcaatatgaatgactgtagggaataaccaggaaaaaagtccagcctatacagagtctcagagtrgaaggcacttgcctctaagctctatgcccagagaggacaacagatcaggtgtctgtgagtgagaaaccaggggatgcccaaagttcaagggtaaggatgg

SEQ ID NO: 488249 - DNA, 201 bp, Homo sapiens
attacactaaaatccaacaggctctagaagtaataagctcccagtccctagaagtgctcaagtaatgcttagctgaccacttgtcaaggacattgtggaargggtttcttgtatttggaaagagagtgagctagaacacctttcacctgcttttcaattctaagatcccaggagccaaaagaagccaatgttctggagtca

SEQ ID NO: 488250 - DNA, 201 bp, Homo sapiens
atttggaaagagagtgagctagaacacctttcacctgcttttcaattctaagatcccaggagccaaaagaagccaatgttctggagtcaaattaaatctawtcaagaaccggttttatccagttataaaaagagtaagtttcaactctaactttttataattctgaaaaatgtcaaggagctccttttagactctctccat

SEQ ID NO: 488251 - DNA, 201 bp, Homo sapiens
ggagccaaaagaagccaatgttctggagtcaaattaaatctaatcaagaaccggttttatccagttataaaaagagtaagtttcaactctaactttttatrattctgaaaaatgtcaaggagctccttttagactctctccatctatctttaaacatacttttcttcaaaaagtatcagtactcaaataaattacaacatt

SEQ ID NO: 488252 - DNA, 201 bp, Homo sapiens
ttcttcaaaaagtatcagtactcaaataaattacaacatttcttattcaaatgcattatttttgggtttcagctattcttacccaacagtattataatttwtaaaaacaccataccacaccttttcattgcaaacatagggtaattcagctatgctaatataaaggaaaatgttgtgggctagtgtggaaacctgttctca

SEQ ID NO: 488253 - DNA, 201 bp, Homo sapiens
attgcaaacatagggtaattcagctatgctaatataaaggaaaatgttgtgggctagtgtggaaacctgttctcaccctcattgatcatactcccatgtayacttctgcttctatgaggaagtgagttctgaatctcaaaggactacctcacatctagtcaattaccagtacaatcctatacaaatgaagaggattgaagg

SEQ ID NO: 488254 - DNA, 201 bp, Homo sapiens
ttagcctcccatagtgaagccatgttaggcattatggcataaatgaaaaacctgagggtagggctcctaatgcagaattatactgaaaagtaagaggtagrgaaagacctttggaggactctcctggtaggcagaggagcctgaactttttggcattttggctcctggcagcagaaagtgcaggggacttccatcctgcag

SEQ ID NO: 488255 - DNA, 201 bp, Homo sapiens
ggaaaagataacatccctttccccacaggagcaatatgaagattctcatggagagagagcagaaactgagaatatcctgacagctgatgacacaccagatkctgtaaaagaagagatacaagcccacaactaatcctgcgctgggaagagcacatacctggaaacagaaacattttaggaggtactgctttgacctagcag

SEQ ID NO: 488256 - DNA, 201 bp, Homo sapiens
gtttcctttcttttaaaaaaaatgtgggtaaaaatctctattctttgtatctgtaggaataaaatgaataaacgatgtggcactgctccttgcaggctagmtggtatgcttgttttcatcatctcctctgccaggagaatgagcgaggtcacccacctgatgcctggacctccgtgatgtactggtgcagatcctgtccct

SEQ ID NO: 488257 - DNA, 201 bp, Homo sapiens
cttgctttcaattcctttggatatatactcagatgttggattgctagatgatatgataatcttatttttacttttttgaggaatcccatactgttttccayggcagctgtaccattttgcattcccaccagcagtgtacaagggttccaatttctccacatcctcataacacttgttattttctgtgtgtgcacattttaa

SEQ ID NO: 488258 - DNA, 201 bp, Homo sapiens
tcttttgcccaggctggagtgcagtggcgtgaacacagctcactatagccctgaaccctcaggctcaagcaatcctcccatctcagcctcctgaatagctrggactacaggtgcatgccactatgcccggctaatttttttctttttatttttttcacaaaagaacttaaaaatatactgatgtccaggtccttggcagct

SEQ ID NO: 488259 - DNA, 201 bp, Homo sapiens
tccatttgttctaggtggggtctgggcattgtcatttggaaaagctcccagatgattctcatgtgcagccagcgttgggaaccctgtgctagtggatcatyaagaaccatcctgtggttcttttgtccccatttctggggtgatagtcatggcctgagcactcacaaggtgcttagccctcacacatagtccctgcttcac

SEQ ID NO: 488260 - DNA, 201 bp, Homo sapiens
ccactctgtcctattccacaacccccagaggaacattttattctcaatctagttgtgcataacttataaggtaaagcacccactggagacaaattactgckgagagaagaaaaggcggtttgccaagcaggcagccagctggaataagagaaggaatagcttattgggtcttagctaaggccaacactctgggcagacccc

SEQ ID NO: 488261 - DNA, 201 bp, Homo sapiens
cacaacccccagaggaacattttattctcaatctagttgtgcataacttataaggtaaagcacccactggagacaaattactgctgagagaagaaaaggcrgtttgccaagcaggcagccagctggaataagagaaggaatagcttattgggtcttagctaaggccaacactctgggcagaccccagagagacagggaaag

SEQ ID NO: 488262 - DNA, 201 bp, Homo sapiens
tcctgtgcaattcttaccctgaatgcttccacctcccacttcgggatcacagattgactctgacactgctctctggctttccaccttgggtttgctcctgygaagttgcacatgtggcagccccagcagggagggagtgcacattttacccagcctcaggctaggaggccaggtctaggtcaggaagtctcatcttccctt

SEQ ID NO: 488263 - DNA, 201 bp, Homo sapiens
tataatagcaaaaacttatcatgacaactaaggtgcattgaatgccaggcactgctgtgttttgtctccattacctcattttaccctcacaatctaccttytgtgtaccctcttctcctcttggctagacttcaagcggaaccagattcctgagtttccttgattttcctcttgtgcctgcaatttcaaattcccacacaa

SEQ ID NO: 488264 - DNA, 201 bp, Homo sapiens
cttcctgacacagtccctccttagtcctcagaggacaggggggaaagcaggcaatgattaaattgggagtggagggcacgaggagaattaggacgtcggtyttagctgacatttttctcctggtggaaaaaaccctggaaggctggatgcagcacaaacaattcagcctgctgctgccatctagtggaggaaaggaagtca

SEQ ID NO: 488265 - DNA, 201 bp, Homo sapiens
ttgggagtggagggcacgaggagaattaggacgtcggtcttagctgacatttttctcctggtggaaaaaaccctggaaggctggatgcagcacaaacaatkcagcctgctgctgccatctagtggaggaaaggaagtcaggctttggaggtagaccagatggcactccagacaccggagtgttttaaatatgttctgagtt

SEQ ID NO: 488266 - DNA, 201 bp, Homo sapiens
tagcacaaagaaatgataaatgtttgaggtgatggatatcccatttactctgatttgatcgttatatactgtatacaggcatcaaaatgtcacatgtaccyaaaaatatgtacaactatgatacagcaataaaaaaagaattgctacatcaatggatataaactcttcctaaggtttttgttacaaattgcaaagctgcct

SEQ ID NO: 488267 - DNA, 201 bp, Homo sapiens
agtttatttaaacatttgaactttgactataactcctgagaataggaagaaaaaaaacgaaggtcagaatagttataacatctcagtttggaagaaagtctatgtttgggtagttaggggtctttccttctcttatgtttttaaagccaatccgtttattttataattcaaaatagacattggttacttcacattttaaaa

SEQ ID NO: 488268 - DNA, 201 bp, Homo sapiens
aaagatgtgcaataaatattggccaaaaagaagagaaaaacgtttccaatgatattgctaaccaaagtcaaggcacaggcaagaaaaagcaattggctatyttttttttttataatgtagatgctcagcatccaaacttcaaaaatcgggttgctattctccagttcttgtaccttgtgttgcccctaagagaaggataac

SEQ ID NO: 488269 - DNA, 201 bp, Homo sapiens
gtttatttaaacatttgaactttgactataactcctgagaataggaagaaaaaaaacgaaggtcagaatagttataacatctcagtttggaagaaagtctatgtttgggtagttaggggtctttccttctcttatgtttttaaagccaatccgtttattttataattcaaaatagacattggttacttcacattttaaaat

SEQ ID NO: 488270 - DNA, 201 bp, Homo sapiens
ggcagaggttgcagtgagccgaaatcgcgccattgcactccagcctgggtgacaagagagaaactctgtctcaaaaaaaaaaaaaaagaaaaagaaaaagaaaaaaaaaagagaacaatctgttcagtgtcttttggatttagcaataaataatacagttagcaaataaaaaccagagactcctgttggagtccctggtaa

SEQ ID NO: 488271 - DNA, 201 bp, Homo sapiens
cttgaaagcagaccacatttgaaagcaggtacatttaattccaaatggctccaggcagtgcattcacccccagaaacaacagatcaacacagtcaacaccygatttagagtttgggtactatctctacccttctcagttgggtcagtcctgcctctgttcagacgaagacaagccacatgcccaggaatgaaaaagagttg

SEQ ID NO: 488272 - DNA, 201 bp, Homo sapiens
gtgttctattgtgcaacattctgtccttctattacaaaggttgacacctaaaaatagtgactaaacaaagtataaatgtgtagcatacctccaggaattcragcagatttaatcaattgaaaggcattaatgattctaatgaatactaaagcatgtaatgaatgcaaacattgccttaatagcagcttgctaattgttcat

SEQ ID NO: 488273 - DNA, 201 bp, Homo sapiens
gtgagccgaaatcgcgccattgcactccagcctgggtgacaagagagaaactctgtctcaaaaaaaaaaaaaaagaaaaagaaaaagaaaaaaaaaagagmacaatctgttcagtgtcttttggatttagcaataaataatacagttagcaaataaaaaccagagactcctgttggagtccctggtaagattaacctcagt

SEQ ID NO: 488274 - DNA, 201 bp, Homo sapiens
caaaaaaaaaaaaaaagaaaaagaaaaagaaaaaaaaaagagaacaatctgttcagtgtcttttggatttagcaataaataatacagttagcaaataaaamccagagactcctgttggagtccctggtaagattaacctcagtgggccagagagaacaaaagccaatggcaggggtcgaggggaatggaggaggtaaggaa

SEQ ID NO: 488275 - DNA, 201 bp, Homo sapiens
agaattgcttgaacccgggaggcggaggttgcagtgagctgagatcgcaccattgcactccagcctgggtaacaagagcaaaactctgtctcaaaaaaaaatatatatatatatacttcagacagagggaacagcctgtgcaaaggccctgaggagtcaaacagcctggatgctggctgctcctccactgcagccagggga

SEQ ID NO: 488276 - DNA, 201 bp, Homo sapiens
tgcttgaacccgggaggcggaggttgcagtgagctgagatcgcaccattgcactccagcctgggtaacaagagcaaaactctgtctcaaaaaaaaatatatatatatatacttcagacagagggaacagcctgtgcaaaggccctgaggagtcaaacagcctggatgctggctgctcctccactgcagccaggggaggaag

SEQ ID NO: 488277 - DNA, 201 bp, Homo sapiens
gcttgaacccgggaggcggaggttgcagtgagctgagatcgcaccattgcactccagcctgggtaacaagagcaaaactctgtctcaaaaaaaaatatatatatatatacttcagacagagggaacagcctgtgcaaaggccctgaggagtcaaacagcctggatgctggctgctcctccactgcagccaggggaggaagc

SEQ ID NO: 488278 - DNA, 201 bp, Homo sapiens
gaaaccctgtccttgctgagtctccactcccagggtaggtccgacaataagagaaatatttcactcagtggatcgttaactcaaggatgggcatatcactyaactcagggtagacagcaccaaggaaagtcaatttgggggacttctgacttcttccttcctactgaacatgaaggtctatatgtgattttcactattgga

SEQ ID NO: 488279 - DNA, 201 bp, Homo sapiens
ggatttgaatcttgttttgtttgactccagtatttgtgcataaaactacaattttttttttttttttgcttcatagatgcatagaacacttgatcttgaaraaacattcatgcttcttcttgctagctcctcctgttagaactgagggtagaaagtttcagaggtgggaagtgacttgctctaggtcacacagtctgctgg

SEQ ID NO: 488280 - DNA, 201 bp, Homo sapiens
gaaggctggatgcagcacaaacaattcagcctgctgctgccatctagtggaggaaaggaagtcaggctttggaggtagaccagatggcactccagacaccrgagtgttttaaatatgttctgagttcacagttaaccatcaggaagcctgcagcaggtctccatgctgaccctcgtccccatcttcctctcctagaaatat

SEQ ID NO: 488281 - DNA, 201 bp, Homo sapiens
aggctggatgcagcacaaacaattcagcctgctgctgccatctagtggaggaaaggaagtcaggctttggaggtagaccagatggcactccagacaccggmgtgttttaaatatgttctgagttcacagttaaccatcaggaagcctgcagcaggtctccatgctgaccctcgtccccatcttcctctcctagaaatatct

SEQ ID NO: 488282 - DNA, 201 bp, Homo sapiens
caaacaattcagcctgctgctgccatctagtggaggaaaggaagtcaggctttggaggtagaccagatggcactccagacaccggagtgttttaaatatgytctgagttcacagttaaccatcaggaagcctgcagcaggtctccatgctgaccctcgtccccatcttcctctcctagaaatatctagcacaggtctgcat

SEQ ID NO: 488283 - DNA, 201 bp, Homo sapiens
atctgactcagctgtggctcctccctgggtgtgcctggtgtctccaggtcagcatgtgagtacttggtcgggggtcagagagccagaagttgctgtggagsgggagtgggtcagtggagaaaggatgagtctaaaccatatttggccaaaggtagaagaggactttcccgaatgtagtgtgatatgatgggaaaactggaa

SEQ ID NO: 488284 - DNA, 201 bp, Homo sapiens
atggactctgtagaatgccggcctagatgactgaaattctttctaactgagagactctctatcactgagcttctgcacctcagtagagctgctcctctgcraccacgccaggggctcagggttgcttcttgaggccaagctcacacatagctggggatgcaacttgcagccctttcagggcaacatggttgaatccaggga

SEQ ID NO: 488285 - DNA, 201 bp, Homo sapiens
gcagagctgctcctgcaacagtccctcccatcctctcctccagggatgctgtagggtaagattctaagaccaaagttattcctactcagggagatgctggragctgagtaggcagcacagaatctcggcatgcattcaggttatgtttttgattcttctctgatcttgtacccctgcttctggaatcttctctcatcttac

SEQ ID NO: 488286 - DNA, 201 bp, Homo sapiens
ttccttcctactgaacatgaaggtctatatgtgattttcactattggaaaaagcctactgcaaactataaatctaaccaatagtatatttagccaaaatgycatttctttttgcctaaaactggtatgtatggttattgaatacaagaagctctgatgggttgctgccaacagaacagaaatttttcttttcttttttttt

SEQ ID NO: 488287 - DNA, 201 bp, Homo sapiens
attttttttttttttttgcttcatagatgcatagaacacttgatcttgaagaaacattcatgcttcttcttgctagctcctcctgttagaactgagggtaraaagtttcagaggtgggaagtgacttgctctaggtcacacagtctgctggatatcttagccatttgggccaggcatctagttgtcaactgccttactcca

SEQ ID NO: 488288 - DNA, 201 bp, Homo sapiens
gtgacagagcgagactctgtctcaaaaaaaaaaaaaaaaaaaaaaaagatgggagagagttgagggtgtttaatcctaaggaaaaaaggttgcctgtatcrgaaaacctccagtgggacgaagcacactacatcacaaggcacttcactctgttttggacagctcataaaaatgcaacccatggttagaagttacacctga

SEQ ID NO: 488289 - DNA, 201 bp, Homo sapiens
agaaatttttcttttctttttttttttttttttgagacagagtcttgctatgttgtccaggctggagtgcagtggtgtgatcttggctcactataatctcygcctcccacactcaagccatactcccccctcagcctactgagtagctgggactacaggtgggtgccaccaaacccagctattttttttttcctagagatg

SEQ ID NO: 488290 - DNA, 201 bp, Homo sapiens
ttgagcccagaaggtggaggtggcagtaagccaaattgcactactgcactccagtctgggcaacagagccagaccctgtctcaaaaaaaaagaaaaaaagaaaaaaaaaaaaaaagcaaagacttgccatgccacgccgcaaacagtcaaaagagcatcccacagctgaagggagctcccaaagagagctccgggaatggc

SEQ ID NO: 488291 - DNA, 201 bp, Homo sapiens
cccctcagcctactgagtagctgggactacaggtgggtgccaccaaacccagctattttttttttcctagagatggggtttcgccatgttgcctaggctgrtctcaaacacctgggctcaagcaatccacccaccttggcctcccaaagtgctgggattataggcatgagccaccacactggccagaatagaaatttctga

SEQ ID NO: 488292 - DNA, 201 bp, Homo sapiens
agcccagaaggtggaggtggcagtaagccaaattgcactactgcactccagtctgggcaacagagccagaccctgtctcaaaaaaaaagaaaaaaagaaaraaaaaaaaaaagcaaagacttgccatgccacgccgcaaacagtcaaaagagcatcccacagctgaagggagctcccaaagagagctccgggaatggcggg

SEQ ID NO: 488293 - DNA, 201 bp, Homo sapiens
gataatggtagaaactaaaggaatacatccaagatcatcaactttgaacatgaatacaggataatagtacaaactaatacatacatataaaggtccttaayagtgacctggttgaagaattacttaagaatccaacacactgggaggagaccatctctttttaataacaattgtcatcgtgaatcagccataggatctacc

SEQ ID NO: 488294 - DNA, 201 bp, Homo sapiens
aagggagaaggaacaaagagggtgattaataggtacaaaatacagttacatagaaggaataagatctagtgtttgatagcacagtagagtgactctagttaacaataatttataatatatttcaaaatagctataagagaagatttggaatgtttccaacaaaaaaaatgataaatttctgagatgatggaaatctcaatg

SEQ ID NO: 488295 - DNA, 201 bp, Homo sapiens
agggagaaggaacaaagagggtgattaataggtacaaaatacagttacatagaaggaataagatctagtgtttgatagcacagtagagtgactctagttaacaataatttataatatatttcaaaatagctataagagaagatttggaatgtttccaacaaaaaaaatgataaatttctgagatgatggaaatctcaatgc

SEQ ID NO: 488296 - DNA, 201 bp, Homo sapiens
gggagaaggaacaaagagggtgattaataggtacaaaatacagttacatagaaggaataagatctagtgtttgatagcacagtagagtgactctagttaacaataatttataatatatttcaaaatagctataagagaagatttggaatgtttccaacaaaaaaaatgataaatttctgagatgatggaaatctcaatgcc

SEQ ID NO: 488297 - DNA, 201 bp, Homo sapiens
gcctcctcatctcttcactggataaaagcttaggctctggtgctagaccatctggctccagatcatactgactgtgtgccagtaggcaagtacttcatctstctacgtctcagtttcctgatatgtaaaagggaaataatgataattcccctctcaaagtgttgttgagaattaagttaatgcatgtaaaatacttataac

SEQ ID NO: 488298 - DNA, 201 bp, Homo sapiens
atgttttagggaaatgtaaacaatgtgacctaaatgttctcattggtcctattatctggcctttccatcacctgatccctccccttcctccccacatcctccttttattgatgatcccagagcaaagagtaaggtatcaacaacacatctcaacaggcccttacaacagaacatgtttcatggcagtagtttggatagctc

SEQ ID NO: 488299 - DNA, 201 bp, Homo sapiens
atttctagggacattcatcagctgatcacatctgagtattttctttccactcctttcacgtacaagtaactgtaagcagacagcagaccaggacaaaaaartgttagataagtgtaggtggatgacagtaaagataacatgaggcctcaccaagattcctatccagaacttgtctcatagtagacactcagtaaatatttg

SEQ ID NO: 488300 - DNA, 201 bp, Homo sapiens
caactcggggcagagaaatatcttaagatttctatgtcactagcctaatatctgccacacagtattcaaatatttgggaatcaacacaaaaagtgctcagmctaatttcctgtttgattaaggaattaatgaaaccatctgaatgtgatggttggcacaggtccacagagacatctatgtacttatttttgttgttttgtt

SEQ ID NO: 488301 - DNA, 201 bp, Homo sapiens
atggttggcacaggtccacagagacatctatgtacttatttttgttgttttgttttgtttgtgtttttgtttttgtttttttttaagacagagtcttgctmtgtcacctagattggagtgccatagcacaaacttggctcactgcaacctccgcctcccgggttcaaggattctcacgcctcagtctcccaagtagctgag

SEQ ID NO: 488302 - DNA, 201 bp, Homo sapiens
gcctaaggcctgctaagccttcttgatgctaattgtctgcctggcttccctccaagtgcctgctgctgagtcaccatccaactccttgtccttactttccyagtctctctcctttctgggtcctggccattcccagtggggcctgttcccctgctgaccaatccctgggtggacacggcctccttcaccctccgcaatgct

SEQ ID NO: 488303 - DNA, 201 bp, Homo sapiens
agcagagagagctaaatgattgtctaaaaaataagttctgggctgggcgcagtggctcgtgactgtaatcccagcatttcgggaggccgagggcggtggaycacttgaggtcaggagttccagaccagcctggccaacatgttgaaaccctgtttctaataaaaatacaaaaaattagccaggtgtggtggtgcacacctg

SEQ ID NO: 488304 - DNA, 201 bp, Homo sapiens
aaaaattctggcggtattagtgaattattatttaaatttgggaggaaaggagtacagaagaaattttaaacatcaattttgatggcatgttgtttggtaacagactgtatcaactgtatatatgcatatacattattatgtaagtgaatccttttttttaaagtaatcttcatggagttttgccctaactagaagaactga

SEQ ID NO: 488305 - DNA, 201 bp, Homo sapiens
cagttatctctgctcaaccctcagacagccccagggagtggaagcaccagacggcactgaggatggacctacaggtggggctaaaacaggaagatgggacycctagatccctcttctatcctatgcgcactttcctgaaaaatgaaattcagtgaaggcttaaatgtagaatggagagatggctagtatccttgtccctct

SEQ ID NO: 488306 - DNA, 201 bp, Homo sapiens
tagggagattttagaatcattcatgggagaaaccaaaagatgtacagatactcaaatactgacacttagagatccctctctgctcccaaaacctccagtgycctgccagatcacttcacagtgagaactttaagtcaacaagttccttcctttacacagaatattgagtcagcctttgtgcctcagtcataaatgtgaata

SEQ ID NO: 488307 - DNA, 201 bp, Homo sapiens
atagaaacctggcaaactaattcctggaaagaggccaagctctcctctggttgaccaggaaactctggttggtctaattattgttaggtaatctggggacrggcagcctgtctgccaggactggagatgggaagagggcacatgcggagcacctgagaggggaacaacctgcctctgtaaggggtctggctgggagcgggg

SEQ ID NO: 488308 - DNA, 201 bp, Homo sapiens
ggtaatctggggacgggcagcctgtctgccaggactggagatgggaagagggcacatgcggagcacctgagaggggaacaacctgcctctgtaaggggtcyggctgggagcggggtgacttacagattcgtgttcagaagaaacagcgcattctaaatgctttgattcagaaagcaaatactcctggtcactgtctctcag

SEQ ID NO: 488309 - DNA, 201 bp, Homo sapiens
gatctcctgacctcatgatctgcccacctcggcctcccaaagtgctgggattacaggcgtgagccactgcgcctggtcttaacttcttaattttcaattcrgactggctctccagggacaaaaagagtaaaggcagaggtctagtggcactaagtagccactagagggaagcaaaagctaggcttttctaaaggaaacacg

SEQ ID NO: 488310 - DNA, 201 bp, Homo sapiens
gtctgtgtattttatctgcttgatctcttgagggtgccccaaatgtgtcctggccatttctgcctctggatttccatggatgggcaatgttccatctcaaytgtttcccttttcctctccagaccctgtctttcctgcttttggaggtcaagtacaactctcaattccccacctctctcacattctttcacagtgatttct

SEQ ID NO: 488311 - DNA, 201 bp, Homo sapiens
gcctacagagaggagagtgggactatttcttcctattcatttctaaattatcaacactatctgtttaatcatctattctaaaatggtcccccaaatggccrttaagtttgctggttccttaaattctaggatcctcattcaccactcacttatccttatttgtttgtcttctgctggctggttcatctcctacgctacaat

SEQ ID NO: 488312 - DNA, 201 bp, Homo sapiens
tcatttctaaattatcaacactatctgtttaatcatctattctaaaatggtcccccaaatggccattaagtttgctggttccttaaattctaggatcctcwttcaccactcacttatccttatttgtttgtcttctgctggctggttcatctcctacgctacaatgcactcccatcttgggctgccttttactattactgg

SEQ ID NO: 488313 - DNA, 201 bp, Homo sapiens
ctgttaaactgcattatttaattataggtttctttattttgttttatttttgcattttatcttttaaaagctcaggatgtaagagttggttggtttggtgttttttttttgttttttttttttttggttttgggggtttttttgttttgttttgtttttgttttttgcttttttaatgcagccagtcattatcttcccagt

SEQ ID NO: 488314 - DNA, 201 bp, Homo sapiens
gctaagatcaagtgcaaaaagatgggcaatgtttttagggtagaagaaaacagtatgaagattcttaaaaggaataccacaaaatagaatatcagcaacaytactccagaaggtatgcccagtgttgtatgggctcaagagtaaagtcctcaacattcaacttgcttttttatttttatttttaaagttattttgcattaa

SEQ ID NO: 488315 - DNA, 201 bp, Homo sapiens
gtgggccaactgcacactcaaccaaggaggaagagagatgtgtgctcacaatgccagtttctatgatcagaggtcataccctaaacctaaaacaaatttcytaagtgtctctgaccattttgcctatttcttctctttcatttttcaccaaatgaagactgcaagtctttttattcatcagtcgtttctctttactagctg

SEQ ID NO: 488316 - DNA, 201 bp, Homo sapiens
gggcccaggacctgagagaaggtgtgcagcttgtccatgcagcttgcagtcatgggctccagtaaatgtcaataccttgggttgggctgttctaggattcmtagggcttctacttcccaggccagggtcctccctgaccctgtagaggccactgctgggcctggttgtgtgtccacaagtaaacctaaagtgtccacattt

SEQ ID NO: 488317 - DNA, 201 bp, Homo sapiens
aaaatttatattagattatcataaatgaagttttatttttaaatagccttctaaaaagcccctgttgataagcttcttctggttgcagtttattctttaamtactgttctaccagcattattgaacaactgctttcagcggggtaaaaatatctggtgcaatctgctccaatgctcattatccttgttaaaaggcagactc

SEQ ID NO: 488318 - DNA, 201 bp, Homo sapiens
atgcggtgtttggttttctcttcttgtgttactttgctgagaatgatggtttccagtttcagaatgatttttttaaagtgtgttcaagtttgataaaaaamaaaacaaaacaaaaaaaccacaagggttggatagagaaacaagtaaccagagattactgaataaagtacttaattgtgcccatgtttttctatttcttta

SEQ ID NO: 488319 - DNA, 201 bp, Homo sapiens
tccaggcctatctacagcccctcccatgagagatcaaccctcccaagaaatgctggagaaagagggcgtcagagaggagagttgagagtgctctgcctgcygcacacatggccagggaccagggaccagggatccagctctccagtagctcactcggcacatggagcctctcctatctcaggacagtaggctggtgcctgg

SEQ ID NO: 488320 - DNA, 201 bp, Homo sapiens
ttcagctgtcattagtattagtgtattttctgtgtggtccaagacaattctttttctttcaatgtggcccagggaagccaaaagactagacactcctgctytagaccaatcatagacctgtttccatctaaaaaaaaaaaatcctggaaggcctgagaagacattaaaaaaaaaacccctaagcccttggagttgctgcag

SEQ ID NO: 488321 - DNA, 201 bp, Homo sapiens
ttgtgttactttgctgagaatgatggtttccagtttcagaatgatttttttaaagtgtgttcaagtttgataaaaaaaaaaacaaaacaaaaaaaccacamgggttggatagagaaacaagtaaccagagattactgaataaagtacttaattgtgcccatgtttttctatttctttaagtctttctttaaattgtctgct

SEQ ID NO: 488322 - DNA, 201 bp, Homo sapiens
tgctggaaatgcaaaatctcaagttccaccctagacttacagagtcagagcctacattttaacaagaaccccaggtgaggccaggcatggtaggtcacatytataataccagcactttgggaggctaaggcaggcagacaacttgagcccaggagtttgagaccagcataggcaacatgacaaaaccctatctatacaaaa

SEQ ID NO: 488323 - DNA, 201 bp, Homo sapiens
ctaactactttcggtagcataaatactgtcaccaagatgccatctctaagatagccctaaaggacagagaagccagtctgcttatgcctctttatcccacstgcacccccactcacaggtacaaagccctgaacactggggaaatgctggtcaggaaacagaaaggaggggtgcgcccacctggggagctctgcatctgag

SEQ ID NO: 488324 - DNA, 201 bp, Homo sapiens
gtctgcaatgaaacacttttatagtcattgaaaatatcctggaaggctgggcgcggtggctcacacctgtaatcccagcactttgggaggccaaggcaggyggatcacaaggtcaagagatcgagaccatcctggccaacatggtgaaaccccatctctactaaaaattcaaaaatcagttgggcgtggtggcgcacgcct

SEQ ID NO: 488325 - DNA, 201 bp, Homo sapiens
aaacaccgtccccaaccctttcctttccttccgtgtaatgctgattactaataatgataacagtgcctcatattgatcagctctccaactgtaatgacgtraaaacacactctgggtttggaatcatacaaccaaccttcaaagctcagttttgccacctgctagctgtttgaacttaggcaagtcacttcaccttttatc

SEQ ID NO: 488326 - DNA, 201 bp, Homo sapiens
ttcctggtatcacatattcttaaatgcagcaagatcatagagaaaaagcatggatatcactcctggccttaaaatttaagtgggctccctttgtgtacaayaaaatcctaactccttcacaaacatcctctagtacctgcctttctgatctcaccttattccacagcaactacagtctgcaggcccagccacacagtggct

SEQ ID NO: 488327 - DNA, 201 bp, Homo sapiens
tttccatactaattgattaattatcttactgattcattgaacaatacttacaaagtgcttattatgtgccaggcactcctttaggccctggggatacagcrctgaacacaacaaacacttttgccctcatggagtttgtattcttgaggatgtaatcaagataatgacaaaataatcaagatgttacatagtgagatctat

SEQ ID NO: 488328 - DNA, 201 bp, Homo sapiens
aatcagggcataaagactagttaaacatgaaattgctgacttgaaaagtcagtttggggctctgtgattatggaaggcactctggcaggtatctaaatatgaaattgtccagcacctcttggatgcttctcccctcaaccacctctccaacccccatatgggtggcagtaaagtagcaatggctgaccacagagtttaggg

SEQ ID NO: 488329 - DNA, 201 bp, Homo sapiens
acagaaggggaagcaagtagcctcctctccacttgtgttgccaccactcctctaaaatcgagaggcagaagagagccccgagaagcactgggaaaggacawgtcaccaagaggtatgagtcctcatcatgcagcgatgaagactccaacaaacatccaactagaatataaagcacaatgagacactaggctggggtaactg

SEQ ID NO: 488330 - DNA, 201 bp, Homo sapiens
gtgaaaagctgtgaaaaaaatataccccagacttagaaaagcctctcaggctcccagatgtaacccctcccatgtaacatgctgagtcacttttgcatgcmttctctcatgcattgttcaccacaattctctaaggcatgaactacagaatgaaagtttctgtccccctgccccaaatttatatgttgaaattctaagtac

SEQ ID NO: 488331 - DNA, 201 bp, Homo sapiens
tctgacttctgcacaagatcctttactctttaagaaaaaaggattgcatctaattcagtattattttctcagcatttagcatggtgattggcatatgtaacttcttaataaaaattatttgaataaatgaatgcaaaacatcaatccttcttgttacatttcttttttccctctccagagtataaaaggaaactagcttgt

SEQ ID NO: 488332 - DNA, 201 bp, Homo sapiens
ctgacttctgcacaagatcctttactctttaagaaaaaaggattgcatctaattcagtattattttctcagcatttagcatggtgattggcatatgtaacttcttaataaaaattatttgaataaatgaatgcaaaacatcaatccttcttgttacatttcttttttccctctccagagtataaaaggaaactagcttgtc

SEQ ID NO: 488333 - DNA, 201 bp, Homo sapiens
tgacttctgcacaagatcctttactctttaagaaaaaaggattgcatctaattcagtattattttctcagcatttagcatggtgattggcatatgtaacttcttaataaaaattatttgaataaatgaatgcaaaacatcaatccttcttgttacatttcttttttccctctccagagtataaaaggaaactagcttgtca

SEQ ID NO: 488334 - DNA, 201 bp, Homo sapiens
taaattggagccttcctaaactggtaggtaatcctaacctgaatcaaatttaaatgggaaaatcttatcagatatttgacaggttgaggcaatatggagargcaatagagtcgcaaattaaaggaagacaataacaaggcaagtctcacccacaaatctgcaaccaatttgaaatttatgaagggtgatctctgagctgcc

SEQ ID NO: 488335 - DNA, 201 bp, Homo sapiens
cttgcaaaactgaaactctgttatcaattaaaccaggggtgtccaatcttttggcttccctgggccacattggaagaagtcttgggccacacataaaatayactaatgatagctgatgagctaaaaaaaaattgcaaaaaaaatcataatgttttaagaaagtttaccaatttgtgttgggccgtattcaaagccatcatg

SEQ ID NO: 488336 - DNA, 201 bp, Homo sapiens
tcacttgagcccaggaagtggaggttgcagtgagccaagatcacgccattgcactccagcttgggcaacaggagtgaaatcctatctcaaaagcaaaacaaaacaaacaaacaaacctccataaatggggaaattaagatggttgctagctatactgaactggctcctcctattcatcatttaaatgcattcatacagatc

SEQ ID NO: 488337 - DNA, 201 bp, Homo sapiens
cacttgagcccaggaagtggaggttgcagtgagccaagatcacgccattgcactccagcttgggcaacaggagtgaaatcctatctcaaaagcaaaacaaaacaaacaaacaaacctccataaatggggaaattaagatggttgctagctatactgaactggctcctcctattcatcatttaaatgcattcatacagatcc

SEQ ID NO: 488338 - DNA, 201 bp, Homo sapiens
acttgagcccaggaagtggaggttgcagtgagccaagatcacgccattgcactccagcttgggcaacaggagtgaaatcctatctcaaaagcaaaacaaaacaaacaaacaaacctccataaatggggaaattaagatggttgctagctatactgaactggctcctcctattcatcatttaaatgcattcatacagatcca

SEQ ID NO: 488339 - DNA, 201 bp, Homo sapiens
ccatgaagaaggatcatcaggaatagcagaatacagaaagagacccacatttgtggtaatcatttcacaatgtgtgtgtgtgtgtgtgtgtgtgtgtgtgygcgcgcgtgtgtatatatgaaatatatacatatatacatacataaaaatggaatatatttaccatgtaccacatggtatatatatcaaagtatgatatat

SEQ ID NO: 488340 - DNA, 201 bp, Homo sapiens
gacacatagccccaacagaaggcctgtcacacagtagacactcaatgtctgttgacgaatgagtcaatgaacttttctcagttactgccctgcaccacacacacacacacacacacacacacacacacacacatagttcatctctgatcagaccttcttttcacagctcacctcaactgctgcagacagagtcagtgtgac

SEQ ID NO: 488341 - DNA, 201 bp, Homo sapiens
tgtgtgcgcgcgtgtgtatatatgaaatatatacatatatacatacataaaaatggaatatatttaccatgtaccacatggtatatatatcaaagtatgayatatatgtcatatatatatcaaagtatgatatatatgtcatatatatatcaaagtatgacatatatgtcatatatatatcaaagtatgacatatatgtca

SEQ ID NO: 488342 - DNA, 201 bp, Homo sapiens
atacatatatacatacataaaaatggaatatatttaccatgtaccacatggtatatatatcaaagtatgatatatatgtcatatatatatcaaagtatgayatatatgtcatatatatatcaaagtatgacatatatgtcatatatatatcaaagtatgacatatatgtcatatatatcaaagtatgacatatatgtcata

SEQ ID NO: 488343 - DNA, 201 bp, Homo sapiens
gccctccagacttacagcatttgaagctcaaggtcaaagcaatttatgttcaaccttccagccattagaggctgagtgccagtacaggaaaagccccttcytaccattttagggacctttgtgcttctagttacatatgtgcgtgttagaagacaatgtgtaataataacgctgcaggctgccaggagaaagcgcaggtcc

SEQ ID NO: 488344 - DNA, 201 bp, Homo sapiens
ttgtggatcttctttaccagtcctggaccgcttacctgcagttatctgttatgtgaaagaaaaataaacttctctgttatttaagccggtgtcacctgggscttttcttttatatgcagccaagccttctgatcctgatctagatgacagagtcttatgaaggtagacaaggaaaggttggagatgttttttaatctctgt

SEQ ID NO: 488345 - DNA, 201 bp, Homo sapiens
agggcttcttcatctccctctgtaacagaccatcttccccaagcagagagctaaaaccctgctctatcacaactgttcacaagctcactttaattgctagstttagttgagctatctgcccttcctttaactttgttatatacaaaaaagtatatacaagctctttaaaaatcaagattcttgaagaagtccctttccttt

SEQ ID NO: 488346 - DNA, 201 bp, Homo sapiens
gtcatgatcacagactcttcacgccacatctcaggtggccactggatataccccagagtaggaccacaaagggatctaatgaaagagagtggagaggtgcraacctcaccaatactggaaaacaaggatctcttacacagagggcagagtctcccagggatcccgcccaagtgtgagttcatgaataaggtttccttctgg

SEQ ID NO: 488347 - DNA, 201 bp, Homo sapiens
cacagctccaactggcaaagggtggcttggagggctggctgacactgcccctcccaagctagaaccagggctggccttggagacatgagattcaggatcayggccggggagctttttagatggctggaagatagtcactttttctttcctctactttccaaacttcctattcaccatttattatatgattttaaagtgcat

SEQ ID NO: 488348 - DNA, 201 bp, Homo sapiens
attaaaactgtcagaacatattaaaggaacttattaggatgaaatactttgaactaaagggaaccctggagatgatgtaatacaagcatatactttatagrcaaggaaactgaagcccagagggatgatgtgatttgcccaaggtggcatagccagttagtgcaaaagttaagattctagaattttgctaggtcatgagat

SEQ ID NO: 488349 - DNA, 201 bp, Homo sapiens
gtgttgccaccactcctctaaaatcgagaggcagaagagagccccgagaagcactgggaaaggacatgtcaccaagaggtatgagtcctcatcatgcagcratgaagactccaacaaacatccaactagaatataaagcacaatgagacactaggctggggtaactgggattacttctcaccagtgtgctgttggagggag

SEQ ID NO: 488350 - DNA, 201 bp, Homo sapiens
cttgagcccaggaagtggaggttgcagtgagccaagatcacgccattgcactccagcttgggcaacaggagtgaaatcctatctcaaaagcaaaacaaaacaaacaaacaaacctccataaatggggaaattaagatggttgctagctatactgaactggctcctcctattcatcatttaaatgcattcatacagatccac

SEQ ID NO: 488351 - DNA, 201 bp, Homo sapiens
tggtctccctcatctagacacacacacacacacacacacacacacacacagcttctcacctgagccacctcttcaaagtcatcatgcctccctcatctagmcacacacacacacacacacacacacacacacacacacacacacacagcttctcacctgagccacctcttcaaagtcatcatgcctcttctgcagggcccg

SEQ ID NO: 488352 - DNA, 201 bp, Homo sapiens
ctactcccacgttcaggacaactgagagtcccagagagaactgtcccctctctcttcccctgactactcccctattgcccactgttgataataactccttscctgtgtctctctcacaaacacatacagtcacattctatagtgaaacaggaaattgaactaatagaactacatctccatcagagaccaatcaatgccatt

SEQ ID NO: 488353 - DNA, 201 bp, Homo sapiens
acatcacactctggggactgttgtggggtggggggaggggggagggatagcattaggagatatacctaatgctaaatgatgagttaatgggtgcagcacaycagcatggcacatgtgtacatatgtaactaaccggcacattgtgcacatgtaccctaaaacttaaagtataataataataaaaaaataaaaattaaaatt

SEQ ID NO: 488354 - DNA, 201 bp, Homo sapiens
tggcaacagggaggaccagatcaacaggcttattagaatgaactaaggtgtctaccatgattatttttctaagctggtcagttaataaacagtacctgctmtcaaattgaatacaaaatagtaataataacctctctttctcaccgtacactaaaagcatttccaaatgaattactgatccaaatgtgagaagtaaaacaa

SEQ ID NO: 488355 - DNA, 201 bp, Homo sapiens
ttcaagcaggaaactcctgggctttcttgaacacacacccagaaggctccacaaataccactggcctcaacttctacagagtaagaacactctatctcatytatttcatgtttatttaatggctgcttggattgttttcctggaagccttcagtccagggtgccatctcaaactacagacttccagacgacagaggcccaa

SEQ ID NO: 488356 - DNA, 201 bp, Homo sapiens
cgctgaaggtagggcaaacaacttgtgttttaacaagtcctccagattattctgatgtgtgctcaagtttgagttccactgacttaggccctggggatataaaaaaaaaaatgaaaaacccataatctaaactatcagttcttagccctggctgcaattaaaataagctggggagcttttaaaataataccagtctgggcc

SEQ ID NO: 488357 - DNA, 201 bp, Homo sapiens
ggtcacatgaccaaggatgtagagaagtacaatctaactgtgtgcccaaacatgtaggcagctagaagtacttaatgaatggtactaatgactaccacagrtagatattatcctaattctctgaataaagaaactgagactcagaaaagtatttagtcactagttaaatgagtcaagaatatactaattaatacattttcc

SEQ ID NO: 488358 - DNA, 201 bp, Homo sapiens
aaaaaaataaaggaatcctactgaaaaatccttctgattgatatatatcttttcaagtttggaaaatttcactcatgattaatttttttttaatagagaamaaaaaacagaatcattaagttgaggactggtaaaagcaaggaaatctctcccaattcttggccagacattcacaaaaccatgattctctcctattcaaca

SEQ ID NO: 488359 - DNA, 201 bp, Homo sapiens
ggctggaggtggaagtgggggtgttgaaacagaggaactggacattacgctttctaagagttcccagatgattctagcatacattgagaggtgagaacagytggtttctggtccagaatccaaaacactttgtggtagctacaggaatgttgacagtcccaagaagataatctcatttgtctacttttgtttttgttgttt

SEQ ID NO: 488360 - DNA, 201 bp, Homo sapiens
gtgttcactgaaatagcacctttaatttccgtcaagaatttttcctttgcattcacaacttggctaacagtctaacacaaggctttctgcctatcttgccttttttttttttttgagatggagtcttgctttgttgtccaggctggagtgcagtggcgcaatctcggctcactgcaacctccgcctcccatgttcaagcga

SEQ ID NO: 488361 - DNA, 201 bp, Homo sapiens
tgctgggattacaggagcatttctgaattcttttatattctgctaagagaaggtgctgcataaatacacattgaatgaatagttagctaattatgtgaaaatatatatatatatatatatatatatatatatatatttttagtattcctatctggattgtaagtttcttgaaaagtagggattcttctgttcacatttctg

SEQ ID NO: 488362 - DNA, 201 bp, Homo sapiens
gccatttaactgcagtgcaattagaaaggatattggccaggacacagccttattagtaggtttttgttgttgtttttgttttgtcttatacaatgcttccmcagtggctccttctttcatcatggtcaaagcaagcacaactattcccattcacgtgtttcctccagcccacccagctggctacagagacatgttttccag

SEQ ID NO: 488363 - DNA, 201 bp, Homo sapiens
aatattatacaagtataatgccttgggaaattttccggtatattgttaagtgtgaaaaagattataaaatagttatgtacaaccatgtctcaattgtgcayacagtgtctgtgtttgtgtgtgtataaaaaccatatatatatacatatatatatgtacacagcagttatctctgaaaagttggattacagattttgttaa

SEQ ID NO: 488364 - DNA, 201 bp, Homo sapiens
accaattttctcttagaaactctggaagcacagccctgctgacccctagatttcagccccatgaaacggatttctggcttccagaactgtgcaataatgastttctgttgttgcaagccactaagctcatggaaatttgttgcaccatcaatgggaaactaatacactccataaacaaatacacattgctgtgtaccaata

SEQ ID NO: 488365 - DNA, 201 bp, Homo sapiens
gatagctttatatatttcaaaaaatcagaaacaacctcaaatgttcaacctcagggatgtggttaaataaaccatatctactcaatgcattcattaaataygcattaaatattatacaagtataatgccttgggaaattttccggtatattgttaagtgtgaaaaagattataaaatagttatgtacaaccatgtctcaat

SEQ ID NO: 488366 - DNA, 201 bp, Homo sapiens
tttcccatttatgtatgatttttctcagaaaaaaaaatcaaggttctcttcctagttgcaataatttaaaaatgaactatttcccatggtatatctcaaawaaataaataaataaaatttttaaaaaaatttaaaaaaaggaaagaaaaagaaaaaaggaaagaaaaatccctggacctgctcagtgacatcagctgcaca

SEQ ID NO: 488367 - DNA, 201 bp, Homo sapiens
atcctcaactctactcaccagaggacagactaagttatacttttcacctgacaaactgaagcaggcctataaaccctgcctcaaaatgtatgtgatggggraaagccatgaacctcatgaaactgtacacaaaccattgcatatctgtccatatgtgtccatttttctgagagacaatctttaagtccagttgtcaacaga

SEQ ID NO: 488368 - DNA, 201 bp, Homo sapiens
aggtaataaatgatacacctatcaccattcagtagattagataatcagacatggaaagagaagcataggattcgggttgaagacagtaaatatgtgtgctrcttcttcccaggttgagtatatccctggttgattctgctgagacatttaatttaaaaaaaagaaaaaaagaaaaaagaaagatagaaatagagtacatcc

SEQ ID NO: 488369 - DNA, 201 bp, Homo sapiens
gacctagcataaccagggcccagcataagctagaaaatttgccatgattgggaaaacatttgactcataatgtctgctatttctttagaaagaagcataayaatgttaagtgctaaataggaaagaaggggtgatctgaatatctcatgaagccaaaatccttctccagaattctggagggtagactgggtaatcctcaac

SEQ ID NO: 488370 - DNA, 201 bp, Homo sapiens
aaccaagagacatatcgcaaaagcatacagtaggccctctgtatccacaggttctacatcctcagattcaccaaactctgacaaaaaatactgtatttgtsggatgcgaaacccatgggcacagaggtctgactttttgtatctgaagattcaataaggccgactatgggacttgaacatccttaaagtttggtacccgca

SEQ ID NO: 488371 - DNA, 201 bp, Homo sapiens
cccctttccctcaattcccagccttggttttgaatgtttctgaatcagacttagagggtccctggcccctcacattccttcttcatctgaattctggtttytagagctcaaaaccacacggttccaggctgctctaattaaatacagagattgagaccatctgatgctaagattatgaccttaatgacgcgcaggaaaagt

SEQ ID NO: 488372 - DNA, 201 bp, Homo sapiens
accagtttgttttttactcaaatcttccctcttggtttttgtgttcagataacactggatcacttttttgtcacaattctttgcaagagactaatgacatmtcatcctgctgaaactggcttgagttacatgtttgagaaagacccaactcttactttagaaatcaaataccagtagaccctaaagtagtccactataggc

SEQ ID NO: 488373 - DNA, 201 bp, Homo sapiens
ttgtgatcttagcaagaacatctgagaaaacagccatccctttcaacaagatttctaagttgatggaatgttagcctaaagcagctgggggtattttgctrtaacaatgtgggaagaagctctccgagaatgaagccaatacagggaaaagatgagagagagaggtaggtttcccatgatatcatttgaatagctagagag

SEQ ID NO: 488374 - DNA, 201 bp, Homo sapiens
tccccagagaattctgcaatggtgatccatccacttcagtctgtgctctcctctcctaccctcagcaccagcttcgtgtcactatcttgaattctagtgcrtaccccacctcccccaacaccctgagagtccaatagggagggagattctgagtcccccattagagtatgctcacctggaaggcagaggggcctctctcct

SEQ ID NO: 488375 - DNA, 201 bp, Homo sapiens
gctgggattacaggagcatttctgaattcttttatattctgctaagagaaggtgctgcataaatacacattgaatgaatagttagctaattatgtgaaaatatatatatatatatatatatatatatatatatatttttagtattcctatctggattgtaagtttcttgaaaagtagggattcttctgttcacatttctgt

SEQ ID NO: 488376 - DNA, 201 bp, Homo sapiens
ctgggattacaggagcatttctgaattcttttatattctgctaagagaaggtgctgcataaatacacattgaatgaatagttagctaattatgtgaaaatatatatatatatatatatatatatatatatatatttttagtattcctatctggattgtaagtttcttgaaaagtagggattcttctgttcacatttctgta

SEQ ID NO: 488377 - DNA, 201 bp, Homo sapiens
tgggattacaggagcatttctgaattcttttatattctgctaagagaaggtgctgcataaatacacattgaatgaatagttagctaattatgtgaaaatatatatatatatatatatatatatatatatatatttttagtattcctatctggattgtaagtttcttgaaaagtagggattcttctgttcacatttctgtat

SEQ ID NO: 488378 - DNA, 201 bp, Homo sapiens
gggattacaggagcatttctgaattcttttatattctgctaagagaaggtgctgcataaatacacattgaatgaatagttagctaattatgtgaaaatatrtatatatatatatatatatatatatatatatttttagtattcctatctggattgtaagtttcttgaaaagtagggattcttctgttcacatttctgtatc

SEQ ID NO: 488379 - DNA, 201 bp, Homo sapiens
ggattacaggagcatttctgaattcttttatattctgctaagagaaggtgctgcataaatacacattgaatgaatagttagctaattatgtgaaaatatakatatatatatatatatatatatatatatatttttagtattcctatctggattgtaagtttcttgaaaagtagggattcttctgttcacatttctgtatct

SEQ ID NO: 488380 - DNA, 201 bp, Homo sapiens
agggaccagttacaagcagatggcctaagcacagataccaagtctgacctggttaggggccagagctgtgcagatagctgagcagcaggcaagccaatgasagagcaagtcaaagacagggtatctgtcagacatagaagatgaggagccagaaaaaggctgcaggcatggtgaggatgagagcgaggaaaaggaaagcac

SEQ ID NO: 488381 - DNA, 201 bp, Homo sapiens
taaatcatcaaaataatgtctgaacaagctggtagtacactgtcaaataaattcttgcatatagttaagtatagccctagaaacaataccctttatttttyaaatccttacccttagctgaacagtgataggggagacaaaagattagtctgcaatcatcaagcctacgctgttatttctttgtaaagtttatttcagctc

SEQ ID NO: 488382 - DNA, 201 bp, Homo sapiens
aaaaagtaaaaagatgctgaccattactaatgatcagggaaatgttaagtaagcaataacagcatgccacattttacctacaagatttcccccagcaaaaacacacacacacacacacacacacacacacacacacacacacacaacaaaacaaccaacctagtaggagactaaattgatataatattcttataagtcaat

SEQ ID NO: 488383 - DNA, 201 bp, Homo sapiens
aaaagtaaaaagatgctgaccattactaatgatcagggaaatgttaagtaagcaataacagcatgccacattttacctacaagatttcccccagcaaaaacacacacacacacacacacacacacacacacacacacacacacaacaaaacaaccaacctagtaggagactaaattgatataatattcttataagtcaatt

SEQ ID NO: 488384 - DNA, 201 bp, Homo sapiens
tctctgtagggaactttgattccattctttccagtggtctctgttctctccaactcttgagctatctgagcaaagagggaagctcttcttaagcagaccaygcaccctaccctgtccatggtgtctccaagcccataccccactcctcactccaagtcggcttgggttccattcctagcctcggactccagagttatattt

SEQ ID NO: 488385 - DNA, 201 bp, Homo sapiens
aaagtaaaaagatgctgaccattactaatgatcagggaaatgttaagtaagcaataacagcatgccacattttacctacaagatttcccccagcaaaaacacacacacacacacacacacacacacacacacacacacacacaacaaaacaaccaacctagtaggagactaaattgatataatattcttataagtcaattt

SEQ ID NO: 488386 - DNA, 201 bp, Homo sapiens
aggctaagggcctaatttgtcacaccaaaccagaggaacattccttatagtgtcagagggatctccggataggatgtttcccaccttgaccccaacaagarcatctcttaacctgggaagagcatatgttttgtgtggaagtgatgccaaaaaagcctcctgtgtggcaaggagccccgtgtgagagatgaggacgttaca

SEQ ID NO: 488387 - DNA, 201 bp, Homo sapiens
ttcacatttccactttgattatggaaagattttgatcctatgaagttctgggtatctgctgtgatccaccctatgcagacaggaacaccaatggatctcawactattcagcctgttaatggctcattataagccctatttggagaagggcggataaagccaacttgttaattcacagccattttaatttggatttgaatag

SEQ ID NO: 488388 - DNA, 201 bp, Homo sapiens
gagaaatatatgaagacagttacaaaggtaggatgaataagattgactgaacaattcttcacatttccactttgattatggaaagattttgatcctatgamgttctgggtatctgctgtgatccaccctatgcagacaggaacaccaatggatctcaaactattcagcctgttaatggctcattataagccctatttggag

SEQ ID NO: 488389 - DNA, 201 bp, Homo sapiens
agctaattttctgaaactcttgactgttcctgacattcacaggccaagagctatcttccatgaccacagactataccataatcctcacagtcacaaaagcmtaggcaagaaccataagtaattccatatgaatccaccctccatatgagaaaaagaaaattaagcagtggtgttaatgtggatggtgacataatgaaacaa

SEQ ID NO: 488390 - DNA, 201 bp, Homo sapiens
ttgtggggaaccagcatagattttgtgccaactattaatgcactttaatgcagtcactttacatggactactttatgtaatcttcacaaccatcttatgargtcattcccagggatggcacataactctcaagagcgttctttggaagtgatggctcagacgagggcacaagctaaaggaggcagagacatctctcttgct

SEQ ID NO: 488391 - DNA, 201 bp, Homo sapiens
ttcaggaagacatgaataaaaggtaataaaaatgctactttagaacaaatagcaatatgaatgactgtagggaataaccaggaaaaaagtccagcctatasagagtctcagagtagaaggcacttgcctctaagctctatgcccagagaggacaacagatcaggtgtctgtgagtgagaaaccaggggatgcccaaagttc

SEQ ID NO: 488392 - DNA, 201 bp, Homo sapiens
cacaaaataccacagtgcatcacacataatgcaggtgtttttcaaaatttaacttccctgttatatatagcatatatgcatgcgtatatcagggcataatstacagtctttttctttggttcatgataaaaatggtttgaaaaacaccaccttgctcattctccctcaacaggatggtagctctgggaaggtctaggtctt

SEQ ID NO: 488393 - DNA, 201 bp, Homo sapiens
agataatccaaaagcgatactaaaactccagctctaaggaagtctctaaaatgtgaaaaagcagtaagaagagaagaggtaatggattatgggatcattayctaggtcctagattggacaagacaggtgatgagtctctggtgggtctaggagaagagaggagactaactaagacacaatgggattttcccaagacctaga

SEQ ID NO: 488394 - DNA, 201 bp, Homo sapiens
ccataaatgaccatcctctgccctgcactatagtaagctggacagcttccttagggtgcctgccctaactgctcaatcaccatctgggctggactcacttstctgcctcagtatatcactggcatgtacctccctgttctgccattgtccaccactgcatctggctccctcgctagactctaagctcattgatggcagggg

SEQ ID NO: 488395 - DNA, 201 bp, Homo sapiens
tttgcatatctatattgcttaattctctcaattaccctaaggggtacatattgtttcccacattttatggatgaaaaactgaggatcagagaaagcaaatratgcacccaaggtcatagagctaggaaaggataaagtcaggatttgaatatgggtctatcctattccaaagcctgtgcatgaagcctcatacatatagat

SEQ ID NO: 488396 - DNA, 201 bp, Homo sapiens
atccatagtggtgactatttccaccaatccatataaggttggtacagagattggccagatgcttaccaagctcattctctcttctgaagcacacgactgtyacatttcccaaccgcccttgcagttaggaacagttgtatgactgagctctggtcaatggaaggtgagcagaagtatcatatgccacttccaggactggct

SEQ ID NO: 488397 - DNA, 201 bp, Homo sapiens
tgactttgagcatattacctaatctttttaagactcagtgtctttatctgtaagatgaggaaaatattattgctattagcataaagcaacccagaacctgrcccatggtaaagctcaataaatgttaggtatttttgtgagttggtgacacacttaacacaagtcgacattatcaaacttgcccggcattctcaggctgtt

SEQ ID NO: 488398 - DNA, 201 bp, Homo sapiens
ttccaccaatccatataaggttggtacagagattggccagatgcttaccaagctcattctctcttctgaagcacacgactgttacatttcccaaccgcccytgcagttaggaacagttgtatgactgagctctggtcaatggaaggtgagcagaagtatcatatgccacttccaggactggctcataaaatcatcccacat

SEQ ID NO: 488399 - DNA, 201 bp, Homo sapiens
atccatctccagaacatttttcatcttgcaaaactgaaactctgtacccaacaggcactaattccccattccctccagcccctggcaatcatcattctttytacatctaaaaagttgactactcaaggtatttcatttaaatggaatcatatagtatttgtccttttgtgtctggcttgtttcacttatcctaatgtcctc

SEQ ID NO: 488400 - DNA, 201 bp, Homo sapiens
taattatgcagccattagattatttataaagctttgtaatagcttaaatacttatataaagtaaaaaattttttaagaggacaagacgtacagttgtatawataactgtgtgaacatcatcaacaacttagcaaccctattcataggaaacagaaggaaaattcgttgaaatgttaacactggtattgttgggtggtgcac

SEQ ID NO: 488401 - DNA, 201 bp, Homo sapiens
ccaaaagtacagataaatatataatgtattttgtctcaaagaagaattaaaatcattcttgagagaaataacatgacaatacataagatggggcaggcagyaaactaatagataattaggggttaaaatttcttgatacgatatagatgctgaagaaaaggagtaaaaacagaataatagtagctaattattattaaatat

SEQ ID NO: 488402 - DNA, 201 bp, Homo sapiens
ttcctgtttgattaaggaattaatgaaaccatctgaatgtgatggttggcacaggtccacagagacatctatgtacttatttttgttgttttgttttgtttgtgtttttgtttttgtttttttttaagacagagtcttgctctgtcacctagattggagtgccatagcacaaacttggctcactgcaacctccgcctcccg

SEQ ID NO: 488403 - DNA, 201 bp, Homo sapiens
ctcaaagtgttgttgagaattaagttaatgcatgtaaaatacttataacagtgcctagaattgattaataaatgctagttgttacttttactgtctttaasccacattattggaactgtttccccattgcctagccttctcttccatttcatcttccactcagttgccagagtgaatcttctaaaaggcaattttaattgt

SEQ ID NO: 488404 - DNA, 201 bp, Homo sapiens
accatcactggagaacttctctcgagaatgacagtaggactgggtaggacatgagcttcagggttgctgacaggatactagggcacagcgaaagctctgtygaaagctttggccacagtatctgtgccaggctccaagctgagtgaaggcagagtggagctaatgcaccatataaatggggtatgcccagggagggtggga

SEQ ID NO: 488405 - DNA, 201 bp, Homo sapiens
taaatgtgaaatatgtccaggattctgtacctggtgtttctatattctttcatctcctctccttaccctcctccactctcatcatctgacaccattgaatkgaggaacccaggtctgttatgaagcctggagaatgggaatttccagggcctcctcctaaggctgccctccctgggtccgcaggctctctcctctttctgt

SEQ ID NO: 488406 - DNA, 201 bp, Homo sapiens
tggggagtgggaagtataatagtaagggctcactcatttgttagataaattttgaataaatcttgagcaggaaaagaagttaaatctgagtaactcagccrtgtttttctgagaagttataaaattatatgatcttgtcataaatttttatcatcactgtttatactcacccaaagaccagtgattaacaattgaggagac

SEQ ID NO: 488407 - DNA, 201 bp, Homo sapiens
tttggctgtgtcactaattttggtttgggcagatcataaacctttgtaagtttcagtttctatagagcaagggagaactagattatctttaacgatttctytcgggcttttatatttgataattctatgattttccatacgtgagaaaccactaacaccaaaggcatttggagtgggggaagaagcttagaaagcatagaa

SEQ ID NO: 488408 - DNA, 201 bp, Homo sapiens
aatgatggggttcagacttaaaagcccagcagataagtcaccaaaaggtagtatacttccatggggatcaaacccaaaggagcctgccaatctcaacatayggctacctaaaaaataaatcccatttgggagatttccccctcactctaactcacaccgtcagaaatccatcactgccaccaccaacacacctgcaacata

SEQ ID NO: 488409 - DNA, 201 bp, Homo sapiens
gggcccttctcccttaagagtagccaaagaaatggtaaaacagcctggatcaggacattccacacaggataaaaaattgttttattgtgtcagaagtggcraggatacccatgatgactcagggagagccattccttgacttatgacccaaggataattggcctggtcactttaatttgaagtaaacaatgataattatgt

SEQ ID NO: 488410 - DNA, 201 bp, Homo sapiens
actgtgaatacatttacccatgcttcctcaaaagctcattgagatgcttaagtgtgttatgacacttggtcttacttggccaccatttgattgaggcaaascttttcattgaagataaagaggaggtatggccaagagctgtcttcattctgcccagcatgcctcataactgtgctatacctctaatctgatcgctcagcc

SEQ ID NO: 488411 - DNA, 201 bp, Homo sapiens
taagtttttcaatggtaaagcatcacagatcttaaacagaaaaaacaggcggggcatggtggctcacgcctgtaatcccagcactttgggaggccgaggcrggaggatcacttgtatccagtagttcaagaccagccggggcaacatggccagatcccatctctacaaaaaatacaaaaattagctgggtatggtggcacg

SEQ ID NO: 488412 - DNA, 201 bp, Homo sapiens
atttaacttttaaagataagattttgaaggaaaatccaaatctcttggttggctccagaagaacccctaacatgcgagaacctacagatataagaataccsttgtgttttaatatgtaccctttgactattttccctcaaaatcctcatcgtcttgacaaacacagacaatggtaggtgccaccctggcctcgactaccca

SEQ ID NO: 488413 - DNA, 201 bp, Homo sapiens
tggttttcaggttcagtgaaatgagattatgcaagtttttgcagacatctctaaacatgagctgaattacatcagattttctctgaaattacacaatgtayttataacatgtcccctactatccctttatctttgcattaaaggagcaaccagcaggatatttcaaatgagggaaaactctacccctaaactttaggtatt

SEQ ID NO: 488414 - DNA, 201 bp, Homo sapiens
tccctgatccttgctatactttatgataaggagaaggctccacatttaatttaggatccttttgtaaagccacagcagatttacatgaagaatattgagcrctctgacgtaaagtttctactttcacgccatacctaaagtgatgaacccagaggatactgacaattaaatatacatgtatttgaaataaaactgacttta

SEQ ID NO: 488415 - DNA, 201 bp, Homo sapiens
ggttaaacaagaagatatttggctgtcacctcattactcagccctgcttggctagaattctataattgtagatttcttctaagtgtgactgcaaagccccrccatttagtaatgcacatatagtcaaaagactatttacagtggaatgaccttttcagaaaaccatgaacttactcctggacagaatagggaaggtgggct

SEQ ID NO: 488416 - DNA, 201 bp, Homo sapiens
gcctttacactggagaaaagcaatgtctaccttctctcaactctgatatgcatttgaagtatatttccataaatgaccatcctctgccctgcactatagtragctggacagcttccttagggtgcctgccctaactgctcaatcaccatctgggctggactcacttgtctgcctcagtatatcactggcatgtacctccct

SEQ ID NO: 488417 - DNA, 201 bp, Homo sapiens
ttcagatggagagtatcccaactaggataggtttgtaatgttccattcaataagcatttattttatgtttccagcatgcctgggctaaatggcaaatacaygcactggaactattacagtgcagatggctacttttgtaccattagctggaaaggattcagcagatatccatcaggttaaacaagaagatatttggctgtc

SEQ ID NO: 488418 - DNA, 201 bp, Homo sapiens
tggcccctgctgaggttagtggtagaatagggggtaggggcactggaactttgtctcttttgatcttctccctaagtccaaggagaggcaggaagcatgtytgtgggtaacctcctgggatctgctgggacagtagcaggctgacagtttgtgtaagaccccatgaaagtgcaatgtgaaactgaatcataaaggaaagag

SEQ ID NO: 488419 - DNA, 201 bp, Homo sapiens
ggctgccctgcctcttgttaactggcgtcatgctacggcttattataaagcagcagtgacactgcaggaatcctttgaatttccccttagttggacccttrccatctcctacccaagccttccttcccaattggtaaaacaaaatcttggtcatgacccactacattgatgtgataattcagggtttaaaaaccattgagt

SEQ ID NO: 488420 - DNA, 201 bp, Homo sapiens
tggggagctctgcatctgagaacacagtgcccatctcaggcaattctctcccttggaggggaaacccaatttctgctgagtttccagcctaataaaatacmgagtgtccatttcccccaataccaggaagctaccagactggataaaaaaccagtgaagactctgagattctgataaaaaccttcccacccttcccccaat

SEQ ID NO: 488421 - DNA, 201 bp, Homo sapiens
tattcttcctattggtgtgttactctcactgtgcaaggtaaaatatgttgtcacatttgtgaaacttgagtgattccactctttctgaggagggccactakgcagagaattctttagaagggagagtctgttctcacttgtctcatagtgtctctctacttctttctcccttttctggggccccatggcaggctcagctcc

SEQ ID NO: 488422 - DNA, 201 bp, Homo sapiens
ataaagatattggcaggaaattaggtagtagcagtttgggcagtatcttggccctcattactcatccgtcacgctgccataagaacacaaacagcaatggkgaccagtcatggggatcctgcctcattgtgctccggggactccccttcctaatcttgaaagcaaagtccagggtagtcagtctccagttggatgctcatg

SEQ ID NO: 488423 - DNA, 201 bp, Homo sapiens
tagagcaatggaaaacttcatatatattggcaggagtgtaaatttggtatcggcactttgaaaaatagttgacatcttcaagtaaaggtgaaaatatacayacacatcctatcacctaacaattttacttttagttttataccctagagaaattcaagtacacatgcacaggggtatgtataccagaatatccatagcagc

SEQ ID NO: 488424 - DNA, 201 bp, Homo sapiens
tgaaacatattacatacatgaccaacaaaggactaatatccagaatatatgaacttctaaaaataaataagaaaagccaaacaacccactgtacacacagrtaaaagcttgaaccagggacattataaaagagaaaatcaaaggcccaatacaaacaggaaaagatgttcaacttgattagtaagcagggaaacacgaatt

SEQ ID NO: 488425 - DNA, 201 bp, Homo sapiens
ccaccaggtccacaatccagaggaggatcactgatgaaccacttttactaacttggttggaactcaaatccatacgctttcatcccattagacgcctgtaraccagtcctgcagtggcttcccaacgttccagacccataagcaggagtagtcaggaataatagaaatggggatgcattaaatgtgaggtcctagtgacag

SEQ ID NO: 488426 - DNA, 201 bp, Homo sapiens
ttggggttggggctctctcttgagtgtgttggaaactggaggacttttaaaacttttttattatgaaaaattgcaaacaaatacagaagtggggagaatgktataatgaatgtccacgtaccatcatctagtttcaacaattatcaacatgtggccagtttttcatttatatcttctcactcttcccacccaccctcaaca

SEQ ID NO: 488427 - DNA, 201 bp, Homo sapiens
attccagagttgcctcagaggcagaagatggagaaaagcatgctgtagcctggcctaaacaggacccctaaaatctcatctaacactactcatcacccctstggcccctaccatgggaagacccctctccactgcccagagattccagagattcagccattaccctataatcatctattattcaaattcagctttggaata

SEQ ID NO: 488428 - DNA, 201 bp, Homo sapiens
atatatccactcatgtgttacttgactaatatctgtctcctctactggtaagctctgtgagaacagggactgtttactcacccacttcataatgcccagcrcttggaggcactcgaaaaatatttgctaagtaaacaaatccctatgaaaaccaaatggtgatttccgcctcatcagcctgtgctctacacaacaaggcaa

SEQ ID NO: 488429 - DNA, 201 bp, Homo sapiens
tctgggctccgagataactctgaaaacaagctttggtaagtgccaccctgagggatttagttcactatactctttaattatcatttcaaaatactctctgkttttttctaaaaatggcaatagtgtcctgatggatcaacatgattatatggctggctggggcttgggggcagtctattatggatatgcagcagaccagag

SEQ ID NO: 488430 - DNA, 201 bp, Homo sapiens
acaatccttccaggcaattctgatgtacactcaagtttgagaactacttctttagtgccccacaaaaagggaatgctaggaattgggcattggtacatgcyatgagaagctttttttttcttttcctttttctgtaaggagtaggaagcagcttgtgggacttttcaaattacacaatatgctggctattcagagctaggc

SEQ ID NO: 488431 - DNA, 201 bp, Homo sapiens
tgggtgacagtgagaccctgtccccccccccaaaaaaaattagcttggtgtggtgatgcatgcctataatcccagctactggggaggctgaggttgagccygggaggtcaaggctgcaatgagctgagatcacaccactgcactccagcctgggcaatagaatgagacctatctcaaaaaaaaacacaaaatgatacaaat

SEQ ID NO: 488432 - DNA, 201 bp, Homo sapiens
ctcacagaacaggctgtgactagcaactaaccaactgtttttcagtttttaagaaactgtttccaactgtgctaaagaggtgacagtcagcccagagtaayagggagaacaattaatacttacatagttcctaagctctgctgtggggggttgactggcatgcagctagggaacatgatcgtgaacccctaaatgtcagct

SEQ ID NO: 488433 - DNA, 201 bp, Homo sapiens
ctattgtcccatgaccctggcaaatccccctctgtgagaaacacccaagaattatcaataaaaaaataaattaaaaaaaaaaagaaatacaataaaatatrcaatcacaaaacatataaaatgtctctgtagccccatcagacattacacctttcacagtttggactttatgacattgcttatcatagcttagaagaaaca

SEQ ID NO: 488434 - DNA, 201 bp, Homo sapiens
ggtaatataatatgctttacgtgggtgtggtgcttcatagttgacaaagtgttttcatgtgtatcatttcatttaacccttataaatccctcaacagaaakttgaggctcaaagttgctccaagtcacacggctactaagttccagagctgaaaactgaaccacaaactctttgttgttaaattctattttccattacttt

SEQ ID NO: 488435 - DNA, 201 bp, Homo sapiens
tgccgacagccatgtgagggagccaccttggaagcagatctagccccagtcaaacctccagatgcctgcagctccaagcaacaccttgactaccgcctcasaagaaaccctgggccagaaacaccaggcaaagccaatcttggatttctgacccacagaaactactacataataaatattgttttaagtctctaagttttg

SEQ ID NO: 488436 - DNA, 201 bp, Homo sapiens
agggttccccatcctatctcctctctactcccatccttggagaggaagaggaagctccaagtctcatccatcacacccactcattgtgccccacctcttcyttctccccaccagggcccaggacctgagagaaggtgtgcagcttgtccatgcagcttgcagtcatgggctccagtaaatgtcaataccttgggttgggct

SEQ ID NO: 488437 - DNA, 201 bp, Homo sapiens
ctgtgttggccggccggtctccagcccctaaccgcgagtgatccgccagcctcggcctcccgaggtgccgggattgcagacggagtctcgttcactcagtrctcaatggtgcccaggctggagtgcagtggcgtgatctcggctcactacaacctacacctcccagccgcctgccttggcctcccaaagtgccgagattgc

SEQ ID NO: 488438 - DNA, 201 bp, Homo sapiens; identical to SEQ ID NO: 195841

SEQ ID NO: 488439 - DNA, 201 bp, Homo sapiens
gaatgctacaactctggaaccatttgcccttaacccaacatgccaatgcaagaatcttcacaaggtagccccaatctgtccctccaaccttaactcttatsacacagatgctccaggcagtctgatttagtcttcattccccaagcacaccctgtatttgctgatttccatcctcgtaattcagggctactaaagcttaac

SEQ ID NO: 488440 - DNA, 201 bp, Homo sapiens
caataaaaaaataaattaaaaaaaaaaagaaatacaataaaatatacaatcacaaaacatataaaatgtctctgtagccccatcagacattacacctttcwcagtttggactttatgacattgcttatcatagcttagaagaaacatgatgttggtatgacacacatatgcaaaaaaaactcactaaaaatgatcacctat

SEQ ID NO: 488441 - DNA, 201 bp, Homo sapiens
aggaaatatctgttgaattagttaattgatatcaagatggattacaaagtcctaaagaatccttcttgcctttcctctggcacaacaactattagtctttwttttacaaacaaggaaagtaaaccacaaaactcctacagatggaagcaaagttgatgacaatactcctctccccacctcttcctcctcccctcaatgtca

SEQ ID NO: 488442 - DNA, 201 bp, Homo sapiens
cctgtctgcctgaggtgccacctgtcactcctgctagaggagcacatgaatcttatcagaaatcagaatgctcaaggtcttaatcactgcaaatgcatacrtacatactgagattacaagtgttttctaaacatcacatttaaaataactggaaggagtataccaaaatgacaatttctgttgctattagaaggccaggat

SEQ ID NO: 488443 - DNA, 201 bp, Homo sapiens
gaggtgggagtgcttgtgatgagctgactactatggtgagaagacctcaaagcatccatcccaggatagcattactgggaagttttcagattcatagaaaraacattaagtattttttacacagccaaaaaaccacccctgcctgtctgcctgaggtgccacctgtcactcctgctagaggagcacatgaatcttatcaga

SEQ ID NO: 488444 - DNA, 201 bp, Homo sapiens
aaatggccattaagtttgctggttccttaaattctaggatcctcattcaccactcacttatccttatttgtttgtcttctgctggctggttcatctcctaygctacaatgcactcccatcttgggctgccttttactattactggtttggcactgggtaggaaaatacccaggtttcccctaaatttctcaaaatgtgtgt

SEQ ID NO: 488445 - DNA, 201 bp, Homo sapiens
ggcaggttctttctcctgattctaacgtccacccgttaatgcaacagaggccatgcctgttccctcatttctggggcagctctcctgaagtcaggaattgygttttttgttgtttttttttcttcatcttcatgcctgccagcaaacatccctcattccttcaactgtggagacatggattgtgggtgccttaatgtgctg

SEQ ID NO: 488446 - DNA, 201 bp, Homo sapiens
ttatattatttgggccaaaatgttgctttgtgtgtttttgcctgaatcatccaattgttttctttagtggacttggccagtggaaggcagtgtgcataatrgatatcagaaacacctgggttcaaatctcatctctgccactttctggttgtgtgaccctgggtaaattattcaacctcttggagtgacgttttcctcatc

SEQ ID NO: 488447 - DNA, 201 bp, Homo sapiens
tccctctcatgcggagccgaagctggactgtactgctgccatctcggctcactgcaacctccctgcctgattctcctgcctcagcctgccgagtgcctgcsattgcaggcatgcgccaccacgcctgactggttttggtggagatggggtttcgctgtgttggccggccggtctccagcccctaaccgcgagtgatccgcc

SEQ ID NO: 488448 - DNA, 201 bp, Homo sapiens
tagttttgtcaattgacaggtaaaaatgtgagtgcatttagaaatacaaataaatttcattacaaatatatttatcttaaagatgaatgcattttctagtyatgtagagcctgaagacacgaatgcttggagaaatacaataaaatagattggtgtaaggcaaaggacaaaagagtgtcctctccctctccctctccctct

SEQ ID NO: 488449 - DNA, 201 bp, Homo sapiens
gcagggaacaccaggttgggagggcagtggctggtggccaaggccaaatctaatagcttccagccaagcctggagggagggagtgtgcagaaggggcatcyaaccttggtggttggtccctaatttgaaaatctagaccttgctgaaaactgatttatttcaggtaattgttgtaggggtgtggcacaagaatgacatagc

SEQ ID NO: 488450 - DNA, 201 bp, Homo sapiens
cctcattgtgctccggggactccccttcctaatcttgaaagcaaagtccagggtagtcagtctccagttggatgctcatgatatctgaccactaggacaasagccccctctggcttctttccatctccctcctccaatcgataccaaccaaccaaccaaacaaacaaataaattaaagtgtttgcatcctaagtcctttaa

SEQ ID NO: 488451 - DNA, 201 bp, Homo sapiens
tggccctcattactcatccgtcacgctgccataagaacacaaacagcaatggtgaccagtcatggggatcctgcctcattgtgctccggggactccccttyctaatcttgaaagcaaagtccagggtagtcagtctccagttggatgctcatgatatctgaccactaggacaagagccccctctggcttctttccatctcc

SEQ ID NO: 488452 - DNA, 201 bp, Homo sapiens
ctgtgctttcaaatctttcagtttgttactcagaacttatgtcattaggaataaaaccccaatttcttctgaatgtgccatttgttccccaaaggaagcascaaatgtgggtgacagttcatggggttaataaaaggttcatggtaggctctctataatatcttggatattggctcctgccctctcccaattttctacatc

SEQ ID NO: 488453 - DNA, 201 bp, Homo sapiens
tttctatatagatcatcaaggtttctgccaatgtatatccttcccagtccttacaagatgcactccatcccttgccagaagcccgtcatcctggctctgtwgaacacagtccagaaaactttttaaataccatctacataggcatgcatgtttctcaaagcttcccttctttgctgtagttactgccatcacatggaacga

SEQ ID NO: 488454 - DNA, 201 bp, Homo sapiens
gtgacaggaagttcactttctccagaggcagcagcagtgttgctagacagcttccatgtgggcaggttctttctcctgattctaacgtccacccgttaatrcaacagaggccatgcctgttccctcatttctggggcagctctcctgaagtcaggaattgcgttttttgttgtttttttttcttcatcttcatgcctgcca

SEQ ID NO: 488455 - DNA, 201 bp, Homo sapiens
tgttttttccaatatcacagaaacctagaattcggggcaggaaagattcttagaagttatctaagcccaccttcaacccagtagaggaactttttctacascatccctaacagagggtcatctggtctccagtgacaggaagttcactttctccagaggcagcagcagtgttgctagacagcttccatgtgggcaggttct

SEQ ID NO: 488456 - DNA, 201 bp, Homo sapiens
tgtgaagttttagggctctacaattctacttattccaacaaaacagagtatcggttgatatccttccctccaaactgtcaagaaatgtgaaataaaatgargatggaggaaatatttaggttgatagaaaacttcaatggaattcaaaacctaaagatcacaaggtggaatggttagcctcagatgaattctaacgtcagg

SEQ ID NO: 488457 - DNA, 201 bp, Homo sapiens
ttccttatagtgtcagagggatctccggataggatgtttcccaccttgaccccaacaagaacatctcttaacctgggaagagcatatgttttgtgtggaartgatgccaaaaaagcctcctgtgtggcaaggagccccgtgtgagagatgaggacgttacaaagaggaacttgagacagatcagattttcattcaaaccca

SEQ ID NO: 488458 - DNA, 201 bp, Homo sapiens
aaaaaaggttgcctgtatcggaaaacctccagtgggacgaagcacactacatcacaaggcacttcactctgttttggacagctcataaaaatgcaacccayggttagaagttacacctgaattaagctaaaattggcttcactataccttttattcttatttcatctataggaagccttcaactatcaaactcatcacccc

SEQ ID NO: 488459 - DNA, 201 bp, Homo sapiens
gaggttcttttgaatcaagagactccacagcagggtggttgacagcctggactctggagctagactactagggcttgaatatgagctccaccattcactakgtctatcaacttgagctactcatttagtctctgtgcctcaaattccctatctataaatgagaattagaaatatatattaataactcatgggatgttgtga

SEQ ID NO: 488460 - DNA, 201 bp, Homo sapiens
agtctgatgaaaatcttagaggcaaggagggaaaaagtatcacttaggggtcctacagccacagtgctaatgtgcagctagctgtctgagggatgacccasatccacacatggaaagagggctaggaactggctctgggatggaaatgaggcctgatccccaccaggcctgatcccagagacatccgaggttcttttgaat

SEQ ID NO: 488461 - DNA, 201 bp, Homo sapiens
atcttgagagatgacagcatgggacttaacagcgttgcctggaagggagtgaagcttaaatatattctattaccagccaccagcaccaacatgatcaccawttgctgccacagagaccgccatttatggagcatctcctgagaatcaaattcttgattaggtactttccatatattatttctaatctccacatcactcttc

SEQ ID NO: 488462 - DNA, 201 bp, Homo sapiens
cagaccttaacttacttaggaagtctgagaagagagcacttagatgcatattggtgggggtggtaatactctgttctgaggccctggattttatgatgcaytgttttttccaatatcacagaaacctagaattcggggcaggaaagattcttagaagttatctaagcccaccttcaacccagtagaggaactttttctaca

SEQ ID NO: 488463 - DNA, 201 bp, Homo sapiens
cgaataagtcaggactgatccaagctgttacaccccaacaggatccttggtcctgggtaatgccccaaaatttccacctggagtcgaaggggactaaaaasaagttctcttaggatttaaggtatagacaaaatcttaagtgaaatcccagaccttaacttacttaggaagtctgagaagagagcacttagatgcatattg

SEQ ID NO: 488464 - DNA, 201 bp, Homo sapiens
agaggcaggaaacccttgcagtttttacccctcttctttcagctgtcttcctggttctctctgcttacacctattttctggtaatgctgcacaaagacagygcaggccataagcccaacttatgttttgctgaaatccgtagaacaagagcaaatgttatcaaataataggccacaagtaaaggcaccttgatttgattga

SEQ ID NO: 488465 - DNA, 201 bp, Homo sapiens; identical to SEQ ID NO: 195842

SEQ ID NO: 488466 - DNA, 201 bp, Homo sapiens
aatatgaagagtaagaaatccctgttgctttctctgacattatcttttacatccttctcttccttcctctccataggccaatgcttccttcacatccattytctttttctccagttgtctttatgcattcagattcatctttaaagaacatgaccagcaccaggctcttatgctcagaagttccccatgacccttgctccc

SEQ ID NO: 488467 - DNA, 201 bp, Homo sapiens
ggtgataggagctggtcagttaaaggagtgagaaggattaaggagacagcattgagacttgagagcatggcatgctcaggaaaactccaggacaacaggartacaagatgggatagagggaacacaggaggggtaaaaggtaaagccaaacaaagtaatgggcaggtcataaagggtttatattatcaagagtttgaactt

SEQ ID NO: 488468 - DNA, 201 bp, Homo sapiens
aaagcctgtatctcttccattagatggggtgggggattctgtccttggcagggactttatgtattctgtgttccttcattacctacagagaaactctgtgwatactatattaactggttttaaaaaggctttctccacctcaggtttcaaaccagagcccagactggaaatatcacttgatgcagccatcagaattaaaaa

SEQ ID NO: 488469 - DNA, 201 bp, Homo sapiens
acagaggaataactgggagaataaacagaaagtattagcaactgttagttagacaaccaagtgggtggattatttctgtttctttttgcttgtctgtatgytttacattgaaaaatatgtaactttgtaattaaacataaaaagataaataaagtagaaacttcctttagaaaaaaatcagaaggaaggttgactaacccc

SEQ ID NO: 488470 - DNA, 201 bp, Homo sapiens
caacagaacatgtttcatggcagtagtttggatagctcaggctctctcacgcagaaaatagaggcaggaaacccttgcagtttttacccctcttctttcakctgtcttcctggttctctctgcttacacctattttctggtaatgctgcacaaagacagcgcaggccataagcccaacttatgttttgctgaaatccgtag

SEQ ID NO: 488471 - DNA, 201 bp, Homo sapiens
ttgctgagtcaccatggctgacaaagtgctcccatctaagttccaggagaaatggggctggctgtcatacttgcttaatttagaaacaagaatatagctcyttggtgagactgagtccactgctagttccctcgcaggtacatccatgctccgtcccctggcagaaggctctgccccactctgccacagtgccagtccacc

SEQ ID NO: 488472 - DNA, 201 bp, Homo sapiens
atccttgctgagtcaccatggctgacaaagtgctcccatctaagttccaggagaaatggggctggctgtcatacttgcttaatttagaaacaagaatatasctccttggtgagactgagtccactgctagttccctcgcaggtacatccatgctccgtcccctggcagaaggctctgccccactctgccacagtgccagtc

SEQ ID NO: 488473 - DNA, 201 bp, Homo sapiens
caggcacccagcatcagaggcccctctaatgacacctgtgaagggaacagatatcccaaagacatgtacagttggctctcaattttccatgtgtatttcastacactggaaatatacaatggattacattgtattatataatacagtagataaattagattatacttggattatacctggttgataccacaaaagaatgaa

SEQ ID NO: 488474 - DNA, 201 bp, Homo sapiens
actgattgcacagtgactatccccctattcagagagtgtcacagtcagtgataagaatgctcaactctccctccactctgcctgaccacttcaggcacccwgcatcagaggcccctctaatgacacctgtgaagggaacagatatcccaaagacatgtacagttggctctcaattttccatgtgtatttcactacactgga

SEQ ID NO: 488475 - DNA, 201 bp, Homo sapiens
gttccatttgctactgtaaaatcaaagcataagcccttatttagcatggactaaataccaacaaaagttttaatattgctaattgtcctttttctaagacwacagtttattttacctttagtccaaatacagtccattaaacaaagactataaatccccaagccatttattgcctcagtcctgtgtctctgaagtcttaca

SEQ ID NO: 488476 - DNA, 201 bp, Homo sapiens
ctgaaacatttaaggagaagcacaggccacctggagaaggagcatatgttgcaattctggttccgttcccttcattgttctaggcaatgcagactctgccyacctttcattcccaatatcttctagaaatcctaactgctctgccatgccctctcgagactaagtggcctatatctcaacatcaattccaagaatatttga

SEQ ID NO: 488477 - DNA, 201 bp, Homo sapiens
gttgcagcttcttcgccttcgtcaaatcttcaatggaacctttgtgaagcttaacaagacttcaattaatatgctgaggactgtagaaccatatattgcakaggggtacccaaatctgaagtcagtaaatgaactaatctacaagcgtggttatggcaaaatcaataagaagcgaattgctttgacagataacactttgat

SEQ ID NO: 488478 - DNA, 201 bp, Homo sapiens
ctagggctgttctgacctcccttgttctctatacttcctcccagatccacaaaaacacatactttacagaagattcttagggtcaagcatccatatcccartgctgttcagagaaaactgtgcccttcacccctgccctcagaggacactattacattcagatggccatttcagccatctccctgcatccgacccacaccc

SEQ ID NO: 488479 - DNA, 201 bp, Homo sapiens
agctaaattctctgcaacagaaaccctagatagttttgtttttcttgtactcatcttccatgttgagagaaagaaaatattgtctggaaaggaaggtctgraaagacaaattatcttcaatgttttatcttcaatgtttgtggctgatgaaaaaggtcagggggacagtgggagctccaagagataagttcgcttggggca

SEQ ID NO: 488480 - DNA, 201 bp, Homo sapiens
gccactgggttaaagcagggtatgtcaattctggaaagcagatgaaggaagtcatccactcatgagagacatgcagggagacaaggggaatgacaggcaarggtagacctctacggctgtaggtcaggttaaagaaagctcttatgggattgcccacaatttctagtctatatgcccacagctgatgggagagaggtattt

SEQ ID NO: 488481 - DNA, 201 bp, Homo sapiens
ggctccctggaccattctactagaaggggtacagccttcgctgcctgaaggaacacccacacctgagaatcaccctgcctgaggtacagagcagaaaggcraagggaggacagtgcagccagatttgggtgttacctcgatggccagttggaactgctcgtgctcccgctgcagctgctctgcttccgacaaagagctggc

SEQ ID NO: 488482 - DNA, 201 bp, Homo sapiens
agcctcatcctttggctatcaggcaattttccccctccctcaccatttggaagtttaagcagcacaggttattccctgaagatgacacctgcctccttctatctatctacaggggtatccctcagaatgggagcctctgaaggactctatgaggaggtaattgaacaactgttgagattatggtctcagataccatcttgg

SEQ ID NO: 488483 - DNA, 201 bp, Homo sapiens
atttgaccattccctctgagtttgtgtgtatgtaagaactaaacaagtgtcctgtgtatccacagaattaaatctgaaccaatgtgcaatcttcccaatgsagcactccttcatagtcagagctgcaagagggtgaggaatggtcttgctttcctccaagttcaaaacagggagtttctcttcagccaatgagggtgaagc

SEQ ID NO: 488484 - DNA, 201 bp, Homo sapiens
ccctccacatatgacttcatagaggcccttatcctgtgcatgctgctctaggcaccctgctgtcccacaggcagggtctatgttagggggcagtgtatgtrtgattgcagcaagctcaggactggtaccctagccagctggaggaccctgagcccatgactggacccctttagacagcattctactctttttaaaagaaag

SEQ ID NO: 488485 - DNA, 201 bp, Homo sapiens
gtctgctggatatcttagccatttgggccaggcatctagttgtcaactgccttactccaggtcttttataaaaccatgagaactctggaagtgacaggaaraaaaatcctcccttgaagaagcaaacatcaaataatctggcttggaggcccagggtatcctgtgtgagtactaaaacccctaactcaggaataaggacca

SEQ ID NO: 488486 - DNA, 201 bp, Homo sapiens
caacacatctcaacaggcccttacaacagaacatgtttcatggcagtagtttggatagctcaggctctctcacgcagaaaatagaggcaggaaacccttgmagtttttacccctcttctttcagctgtcttcctggttctctctgcttacacctattttctggtaatgctgcacaaagacagcgcaggccataagcccaac

SEQ ID NO: 488487 - DNA, 201 bp, Homo sapiens
aagaaagtggcaaatataatctgacctgctaagttattcagttttcctaccccaaacttcactgtctttagaacaatcctgttccatccaacagccattaygtgtgacatgtagccaagagaattaggaagtgactggtgggcatgactaggtgaactctgcggcctgccaggcacttacactcttcatgaatgcaggtcc

SEQ ID NO: 488488 - DNA, 201 bp, Homo sapiens
agaaagtggcaaatataatctgacctgctaagttattcagttttcctaccccaaacttcactgtctttagaacaatcctgttccatccaacagccattatrtgtgacatgtagccaagagaattaggaagtgactggtgggcatgactaggtgaactctgcggcctgccaggcacttacactcttcatgaatgcaggtccc

SEQ ID NO: 488489 - DNA, 201 bp, Homo sapiens
ctgaatataccagaaatttattatatctgatataactaatttagaaatttaatttcttgtttctaaagtttcaactcatacttacttcaatgttacacctaaaaaaaatgctactcccctttctggtttagtgtaaaatttgccaaacgattctgaaatcagaacacactgtacacaagtcatcaaagagtgcaaacatag

SEQ ID NO: 488490 - DNA, 201 bp, Homo sapiens
tccctcatttttcttcttctttttcttttacttttcttaggagagactagcttcccattgtcaagtaaacccatttattcaatacttattgagcacctctrtgtatcagacacagtagtatctctagctacacatctaatgccacgtgtgtactacacatattagcactcccaatttagtgaaggagagaatcacagctca

SEQ ID NO: 488491 - DNA, 201 bp, Homo sapiens
gaagattaaaaaaatatagagagacaaaaatagtcttcaagattttggacaagttattctttgttccttagatagagaagccctagatgcggcagaagagrttaacaggaagattaataagctttggaggccatgaataagaaagtgtaaagaatgtcctttttgtacaggtgagtaacctcctgagccttagtttcctta

SEQ ID NO: 488492 - DNA, 201 bp, Homo sapiens
tggagaatgaagatagctgctatggtgacagcaacaggaaatggggccgggaagtggggggagctagaaatactattccttgacactaggaaacttgttgyccttgcaattactcttaacacaactttagactaaacttggcagatgcatcttggctcagaatattccatcttccatctcttagtcatccccaagtctcaa

SEQ ID NO: 488493 - DNA, 201 bp, Homo sapiens
acataaagctcttcagggaaagggcagaatccaaatagctgaagattggaccatgagacagggaagggtcatgaggttcaggctcccatcccatcattcarctaattttctgaaactcttgactgttcctgacattcacaggccaagagctatcttccatgaccacagactataccataatcctcacagtcacaaaagcct

SEQ ID NO: 488494 - DNA, 201 bp, Homo sapiens
agggcagtaccttgggctagctgggcatatgccttgtgcatcccaagacaaataaaggcaccaatcctgatgaggcttggatgtcccctggtatctgcagsaggccataagatctcagctccctctgtctcaaacctggctacatttccaggtggaataactcagatgtaatgatctgttcctgtcacaacttgagagtgg

SEQ ID NO: 488495 - DNA, 201 bp, Homo sapiens
ctggaaagcattgcccacctcaaatcacacctggaccagcaggaagggatgaaggaggaagaggaagaggagaaggaggaagaaagaggctacaaatgttrctgttctgaagctctccccaccaccgctgctgccaccatcactactccccacccccactgctgccaccatcactactccccacccccactgctgccacca

SEQ ID NO: 488496 - DNA, 201 bp, Homo sapiens
gcaaacccctgcctcccacttactatgccaccacttttagacctagtttaggagtctcttttccaatgcatcctttaccaactcaacatcctttaccttascacttcagtcagacttaactttgtgtttttataaattctgtacaactgaatccttatgcatttagaacatctatatctattttttcccattaaattaaaa

SEQ ID NO: 488497 - DNA, 201 bp, Homo sapiens
aatcctgttccatccaacagccattatgtgtgacatgtagccaagagaattaggaagtgactggtgggcatgactaggtgaactctgcggcctgccaggcrcttacactcttcatgaatgcaggtccctcaggaggcagggcagcaggcatcacagaacagttcttcccactggcaatagggctctcgcctgccctgtgaa

SEQ ID NO: 488498 - DNA, 201 bp, Homo sapiens
gttctaattcagtgcagatctccctcaactactgcaggcttcttcagtgctgtcctccccacgaccctggccccacgctttggctcctgttaggatggcaytggaagcagaggataaaatgaaagttcccaattgactgtcctcaaggtctcctcgacctcgggttctcctgtgtaatcctctgtctgagtcagagacaga

SEQ ID NO: 488499 - DNA, 201 bp, Homo sapiens
ctccaaactccatcttcttaaccctttactctctgaagaaacactggagcatctgataccaaatgaaaatgagttatttcatggtggtaagactgaaacaytaaaactgtcagaacatattaaaggaacttattaggatgaaatactttgaactaaagggaaccctggagatgatgtaatacaagcatatactttataggc

SEQ ID NO: 488500 - DNA, 201 bp, Homo sapiens
ggcaattctgccacttggatgaacctggaaggcactatgttaagtgaaataagctagacatagaaaactattgcatgatctcccttatatgtggaatcttaaaaaaaaaaagtcaaatatacagtgatggaaaataaaacactggttaccaggggctggagtagggggaagaaacagggagatgttggccagaggatacaa

SEQ ID NO: 488501 - DNA, 201 bp, Homo sapiens
gaagatggcaggacctcttctcatttactgctgtactcctagcatggagaacagcttctgctgtagagtaggtagggcctctgcacagttcatgaacgaartgggtgggaatatgccaacacaggggctaggcgtcccctggtgcagggagtggttcctctctctggctactgcccttgcatctagtggcctcccagtgtg

SEQ ID NO: 488502 - DNA, 201 bp, Homo sapiens
tgaggcaggcagtgctggagggagaggtgctggttacctcttactattgttcctctgtttggctggtgttttggggagctgaagtggctcctttaaagctyctttcaggtgaatgatcctttcttgaatcacttctcgaatgttcttgatccactcctgcttggtttcaatgttggaggcctagagtgccacagggagaaa

SEQ ID NO: 488503 - DNA, 201 bp, Homo sapiens
caggtcacagccatcttttcaaataaaacttaatccaaaccctcagattgtttcctcccccttaagcatgttttgaagcagacctggaatgacaggagagwaaataagaagtacaacagcaaaaccaccacacctgctaacataatttctccatggatatattctctcccagtgggcaaaatggagctgaggaatgattgc

SEQ ID NO: 488504 - DNA, 201 bp, Homo sapiens
caacgtcccaaatgttacagaaacaggtctacagcattgcccaaagagggtcatgcagactcagctgaaccctgccagcacaccctgaataacagttatcrcagcaggaggcagcagctgtggatggcaatgcctcagaacagaaatgagagacagatgggaaaggccaaggtgggttgcagggaatgggactctggttct

SEQ ID NO: 488505 - DNA, 201 bp, Homo sapiens
aggaagtaagagccctggcagtgatcctttgtgacttaggtacaggttcctcagaggttcttatagaccaaagaacggcaggagagctcttgaagcaagtyggcttcaagcaaggtcctaaaaaatgtgagcatgataaggctatccagctttatgccgcttttactctacttccctaccttacgttctcccatagtagtt

SEQ ID NO: 488506 - DNA, 201 bp, Homo sapiens
ttggagttcccattttagcctcttccatggcttccttcccttggtgatattttaaaattctaggcaggtgatgagccaaagtccaccggagctatttcaawccatatttggcattgccgaggctcagatatattgtgcaaaatagcccatggtgtgaaacaccatggagatatgtaattatagctgaagttgccagtattt

SEQ ID NO: 488507 - DNA, 201 bp, Homo sapiens
gccttggccagcagaagcccaaaactgaggtaattaccacctgtatttctcacctgcagcaaccttcacacttaggttccaaagagaagcttcaggaaagsaagtctgaagcgtagtggtccctgcccaccattgttagatctctgtgttggtgcccttccctaccgccctcttccattgtccctctgttccaaatccagt

SEQ ID NO: 488508 - DNA, 201 bp, Homo sapiens
ttcaacctctaagcctgtgatcatagattaaaactaaaagcaaataaacaaaaaaagaccacagcttacagttcacattctagactagcacagtaaatgctttttttgtttccttatcagcaggcggagaaatgtcttgctaaaactaacaaataattatgcctcacaaaagaagtagaggcagtatccctcataatagag

SEQ ID NO: 488509 - DNA, 201 bp, Homo sapiens
tgtcattctagttggggtagagagggagtcagataagaaactaacaaatgaatgagaaaaatttccagtagtattgaacagttttaaagaattaaactgayggctgggctcgacggctcacatctgtaatcccagcactttggtaggatgaggcgggcagatcacctgaggtgaggagttcaagaccagcctggccaacat

SEQ ID NO: 488510 - DNA, 201 bp, Homo sapiens
ttcttattattattttttattttttttgcagtggcatgatcgtgggtcactgcagccttgaactcccaggttcaagtgatcctcccagcttagcttcccamgtagctgggtcataggtacatgccaccatgcccaggtaatttttgtattttctgtagagacaaggtctccctatgttgcccaggctggtcttgagctcaa

SEQ ID NO: 488511 - DNA, 201 bp, Homo sapiens
tgcaggaggccataagatctcagctccctctgtctcaaacctggctacatttccaggtggaataactcagatgtaatgatctgttcctgtcacaacttgaragtgggcttttctcctgttaaaaatttattctgaacaaaattggtttatgaaaatgcctccagttgctcattggcagagaaaaaagacagatctgcctgg

SEQ ID NO: 488512 - DNA, 201 bp, Homo sapiens
tcttattattattttttattttttttgcagtggcatgatcgtgggtcactgcagccttgaactcccaggttcaagtgatcctcccagcttagcttcccaartagctgggtcataggtacatgccaccatgcccaggtaatttttgtattttctgtagagacaaggtctccctatgttgcccaggctggtcttgagctcaag

SEQ ID NO: 488513 - DNA, 201 bp, Homo sapiens
ttgtattcaccatgtctttttatttcctgtattatttgctttgatatctggggtattgctgatcctggagggatagccgccccccccagggttagttaatrtctagagagaggcgacacctttcctatgcaaacccaccaatccagagcccacacccccaaccaccctctttatcaagctttcatttttgggccaatatcc

SEQ ID NO: 488514 - DNA, 201 bp, Homo sapiens
caccctctttatcaagctttcatttttgggccaatatccacctgccctaatcaccccaggaccaggtatcagacaactagggacaaccccttgtccccccrgagccctctacaattactcaaactagccagtcctaaacctgcttaccttgcctcacctcttaaagactccagccccctagttccttttctctctttgcct

SEQ ID NO: 488515 - DNA, 201 bp, Homo sapiens
gctaaaagagtgcttagcacagaactaaagcactcaataaacatttgttggggaaaaaagatttcatagaaagtgctcagtaaatatgttctaaatattamatgaataaaaaggaagccaagatgcctgtttctgtgtgcatggatgaatacagaagccaagtgtagagtgaggtgaccttgggatttgagttccagttct

SEQ ID NO: 488516 - DNA, 201 bp, Homo sapiens
atgaggcttaacaaatatccacttaatgaagacaggcggagtaattgtccatcatcatgaagaaaaaaagttttttataaataaaaaatgaattcatctamacattatggagattttaaacactttataatatattctggcaatatacatattttaagtattctggaggcacaaccctaaaaagaaattgtggtagtgctg

SEQ ID NO: 488517 - DNA, 201 bp, Homo sapiens
ttttcaccagggtataatttttgagcagccccttaccttgacactaagtcccctatacctggccctaccccctcttaaccccacccctagtgagttcctgsctcaccccccaacaccctaaaagctgcctctcatctcctaaattttgctctgtttttcccttcactttccatatcctttcctctcgtgtacccactttcc

SEQ ID NO: 488518 - DNA, 201 bp, Homo sapiens
cagcagaaatgaaatggaaaccaaagcactacagggaaagaaagaactggaaaccaaaacccacatagccctcccattttccgcagccctcctcagacaamccccaaggtactctcttctggccttctctaccctctccttctttcccgctccccactccccttagtcaggctatatgaaaaacaattcatcttttaactt

SEQ ID NO: 488519 - DNA, 201 bp, Homo sapiens
ggaggaaaaaccttgtgatggctcagacactagtgggaacctgggaattacaagggaggtcaaagagctggagtcggggagccctgtgggaggtgaaggcwtgcatgtttggatcttgaaatggaacagggaggaccaagggctccaggtctttgctccaaatcagaataaactaggctgcccccatgcataactagctca

SEQ ID NO: 488520 - DNA, 201 bp, Homo sapiens
agggctccaggtctttgctccaaatcagaataaactaggctgcccccatgcataactagctcagaagctcaggaagctcacatatagggtggaagaatccytccacatatgacttcatagaggcccttatcctgtgcatgctgctctaggcaccctgctgtcccacaggcagggtctatgttagggggcagtgtatgtgtg

SEQ ID NO: 488521 - DNA, 201 bp, Homo sapiens
taaattatgtctgattacgtccatttaactgacatgcttgtgtggctgctgccttggaagctttcagtttttgtcttctcctgtggattctgaaaccttarccagaccacaaacctcctgaaggcaagaactgggtccctcccccattccccaccccattaatctgcaaattcagccaagagatcatttgaccattccctc

SEQ ID NO: 488522 - DNA, 201 bp, Homo sapiens
gcttcagtgttcctctttgtaaaatgggttagcaatgtcactggccaatgcctggccacttagtaagtacgagtaattattatcttgacccattatattaktgttatattcccattatccatagcaaatacttcatgtaaaattagtttcccctgctctcagcacctcaatgatcactttacattcacccctttgatctgt

SEQ ID NO: 488523 - DNA, 201 bp, Homo sapiens
caaattcagccaagagatcatttgaccattccctctgagtttgtgtgtatgtaagaactaaacaagtgtcctgtgtatccacagaattaaatctgaaccartgtgcaatcttcccaatggagcactccttcatagtcagagctgcaagagggtgaggaatggtcttgctttcctccaagttcaaaacagggagtttctctt

SEQ ID NO: 488524 - DNA, 201 bp, Homo sapiens
cagcctccaccttgggtcgctgaacaccactggctcctggatgcccagctgctgggtgttccctgcccctaggcaggatataccattactctattggcttkccttgtttgactggtcaaataaggcacccatctcttccataacacttaacgcttgatgatgtttgtcagtacctgcagctgatctgtcctcttggcacct

SEQ ID NO: 488525 - DNA, 201 bp, Homo sapiens
acttaagcataaccctaaccctaactttgaaaaagcagtgctagggacaataaaggacaagtgacaaaagaaggtccctactttcaagcaagggaagggaragaaactgccagttgttgtcagccccttctgtgagctaaataatgggctaggcattttacatgtgttatctcacagaatcctcactaccattgtgtttgg

SEQ ID NO: 488526 - DNA, 201 bp, Homo sapiens
gcaagtcttcattccaggcgtctagctctgctgtcacctgtgagggaaccactgtcatcagcacaggctcaccaggtccacgagagattgttaggttaagrctcacaattccaagccttattcatgaatccacccctcagttaagtctctgctttggaattcttcaacccttagactatttaagcaacattgccatgcact

SEQ ID NO: 488527 - DNA, 201 bp, Homo sapiens
gcacctggccatctcaaagcacaggcctactctttcccacatagctaagtagaccacaccatgctgaatcttgagagatgacagcatgggacttaacagckttgcctggaagggagtgaagcttaaatatattctattaccagccaccagcaccaacatgatcaccatttgctgccacagagaccgccatttatggagcat

SEQ ID NO: 488528 - DNA, 201 bp, Homo sapiens
ttattgagttgtaagagttctttatagattgcagacataactcccttatcagataaatatttgcaaatattttctcccattttgtggtttttcttttcatytcttgactgtcatttttgatgcacaaaattttttgttttgatgatgtccaacttatccatttttaatttagtgtaaggtaagggtccaacatcattcttt

SEQ ID NO: 488529 - DNA, 201 bp, Homo sapiens
acatgtgttatctcacagaatcctcactaccattgtgtttggtaatatctttatgcctattttataggtaagaaaatttttagcaagcatgcgcatttcayctcccagaggggaggattctggggttcattcttcctggactggaataccctacataatttccaggtgtcagcatttttccctgcagcccattctttctct

SEQ ID NO: 488530 - DNA, 201 bp, Homo sapiens
gagaagaactctggggctcagagaacttaagtgattttcacaaggtccagggccaaaagtggaaaaaacagattgaccccaaatgctatgcttttcttcamtatatcatatgtcccagcagaggggaaatcagaactaaaggggacatctcatatggagataggggactactaggggggtagatttttgaaagctaggaca

SEQ ID NO: 488531 - DNA, 201 bp, Homo sapiens
atttgaggagtattgccatcctaacaatattaagtcttctaatcaatgaacatgagattttttttcatttatttgtatctttaatttctttcaacaatgctttatagttttcagagtataagttttacacttttttcattaaatttattcccaagcattttattcttttttatgctattataaatggaatttttttcctat

SEQ ID NO: 488532 - DNA, 201 bp, Homo sapiens
gagagtatacatggaatatgcatgtgaaggagactcactaccctcacttattaggaattcttttgtccagtgctgggtgggtccttgatttatcgctacakgcacttactggttcctggaataaccagggctgcttctcatagttacttcatgaccaagtggtttccgcctctgattgctccagttattgttctccaggga

SEQ ID NO: 488533 - DNA, 201 bp, Homo sapiens
ttcttttgaatcaagagactccacagcagggtggttgacagcctggactctggagctagactactagggcttgaatatgagctccaccattcactaggtcyatcaacttgagctactcatttagtctctgtgcctcaaattccctatctataaatgagaattagaaatatatattaataactcatgggatgttgtgagaaa

SEQ ID NO: 488534 - DNA, 201 bp, Homo sapiens
gaggagtattgccatcctaacaatattaagtcttctaatcaatgaacatgagattttttttcatttatttgtatctttaatttctttcaacaatgctttayagttttcagagtataagttttacacttttttcattaaatttattcccaagcattttattcttttttatgctattataaatggaatttttttcctatttcc

SEQ ID NO: 488535 - DNA, 201 bp, Homo sapiens
attgcatgtcagggtcaccactgtgctaggcattggtttaaaaagactgagacaaaattactgccctgaggaaggtcacagtccagccagatagtgaggakagcaaaaaactgattatggcactgtgctaactaccataatagagatatgaccagagtaactaggtgactagaaaaggggcatccaatccaaaccaaggag

SEQ ID NO: 488536 - DNA, 201 bp, Homo sapiens
ttccaagcaagagataatgaggctctgatctaaggcagtggcaatggggatggaaggaaagaaacacacgaaagaggcagaatcaataagactttgcaatrttgcaatagactcaatgatgaggaagagcaagagaagaatcaagaatgactcccaagtttctggctcaagcaagtgggtggttggtggccttcactggta

SEQ ID NO: 488537 - DNA, 201 bp, Homo sapiens
tataagagatattggtctgtagttttcttgtgtgacagatttatctggatttggtatcagggtaatactggccttgtaagctgggacatgttccctcatcttttttttttttaatataagcttacaaaaaatgagtattaattctttaaatgtttggtagaattcagtgatgaagccatctgggcctgggcttttctttga

SEQ ID NO: 488538 - DNA, 201 bp, Homo sapiens
tcttggctcattttcaatgcattcacccacatagacacacagtttgttcttgcacaatgatgtttatactatgtcgttgaatggttctgtatggatttttycccatttaacaaatgggagatcttcctatgtttggatcttctattttgctgtttgtttcagatggctgaataccacaccactgtaaaattataccacaat

SEQ ID NO: 488539 - DNA, 201 bp, Homo sapiens
gtaaatcctagcattttgggaggccaaggtgggcaatcacctgaggtcaggagttcaagaccagcctggctaacatggcaaaactctgcctctactaaaartacaaaaattagctgagtgtggtggcgggcacctgtaatcccagctactcaggaggttgaggcaggagaatcacttgaacccgggaggcagaggttgcag

SEQ ID NO: 488540 - DNA, 201 bp, Homo sapiens
ccatgtttaaatgtctttatattctccacggggcctagcccactatcttgcataaagtagacatccaaatatttatgaaaaaaatgaaaacaggtaggcakatagacagataacctttaaaaagggctgagtttctagtttctgtcacttctgatatgactgccaaaatagccatcactgctatagtctgcctctcactaa

SEQ ID NO: 488541 - DNA, 201 bp, Homo sapiens
ctgatagagtgacattcttcttctttaaaaagttgctttttatctttagtaactttttgctgttcttttaaaatgcacttaagaatctgttattaatatartcacttggctattcttctgattgctgtttgcataatacatgtttttctatccttttactttccatctatttatatctttgaatccaaaatgtgcctcctg

SEQ ID NO: 488542 - DNA, 201 bp, Homo sapiens
agaagcccaaaactgaggtaattaccacctgtatttctcacctgcagcaaccttcacacttaggttccaaagagaagcttcaggaaagcaagtctgaagcrtagtggtccctgcccaccattgttagatctctgtgttggtgcccttccctaccgccctcttccattgtccctctgttccaaatccagtcttagcccatcc

SEQ ID NO: 488543 - DNA, 201 bp, Homo sapiens
atgtaaaagggaaataatgataattcccctctcaaagtgttgttgagaattaagttaatgcatgtaaaatacttataacagtgcctagaattgattaatawatgctagttgttacttttactgtctttaacccacattattggaactgtttccccattgcctagccttctcttccatttcatcttccactcagttgccaga

SEQ ID NO: 488544 - DNA, 201 bp, Homo sapiens
gtgtttctacatcttgagtttctggaacttaacctgacaccccttcatctcctttgcccacccccagtgttcctttgagcccttccctctgactggcccaytcctaccccttcgtgcttttagcaaaattatcttggggcttctaaatgctgctcacgtctcttttgaagtctccccactcccagtcaacagcgaggctgt

SEQ ID NO: 488545 - DNA, 201 bp, Homo sapiens
tacaatagtgtgtgtgtgtgtgtgtgtgtgtgtgtgtgtgtgtttacaacaaaatctagaaattctgacattctaaaaaatgctgcctgtttggagatggraagtgccacagaatcatggtttagggctgccaagaatcaaagatgacagagggcttggggcaaggtttctcagattagggttgggagattagagttggga

SEQ ID NO: 488546 - DNA, 201 bp, Homo sapiens
agaaaagtaaatcatatattgtttatgaaaatatgtgctgaactatacctcccaaaaagcaaaagaaggataaacataaaacccaggacagtgttattttkgggggaagtaggagagtcagaatggggaggagccctaggtagcattgaggatagaggtgatgttctgcttgtcaaattggagggtaggctctcaagtgct

SEQ ID NO: 488547 - DNA, 201 bp, Homo sapiens
gttacagagtatatcttctcaccacatcagcagttgttcctatagcaggacattcttatgctagagaaagcttactaaggagagactagaggtgaacaaaycaagagtgggatttcaaaggggccatgggatgggagactgggggaagaacccttctgggattccagctagaggcagatttcctccaagagattaatattc

SEQ ID NO: 488548 - DNA, 201 bp, Homo sapiens
gagaatgggaagagagtggggtcaaggtaccaattcccctgctccctgtcatggagtcaccatgtgttggtggcatcttccactgaaggccacagttcctstcaggcagcctctcacaaagctctcctctctcttagaagtggtaatgtttcccctccgtgctgtttccaggcctgcaatgcctgagggatccaaaccttg

SEQ ID NO: 488549 - DNA, 201 bp, Homo sapiens
agtatcttgtttatacatagaaattataagctatttatacatagggtttaaattcaaaatggataaagaaatcaacaatgatctttaaaaggtatgttttmgggaaatgtaaacaatgtgacctaaatgttctcattggtcctattatctggcctttccatcacctgatccctccccttcctccccacatcctccttttat

SEQ ID NO: 488550 - DNA, 201 bp, Homo sapiens
aaagccacagaggaaaaagaaatctgtctgagtgctgggtgatcagacagaaatagggtatccagagaaatctggtcactgcttaggacaaggtggggggrtctagatgcaggtagcacatatgaccgtgggcaagtcttttggcttctctggtgcctcatctgtagaaggcagatgaaaacagtactgtgcacattacag

SEQ ID NO: 488551 - DNA, 201 bp, Homo sapiens
tgtattaatttgtttttaagatgggagaggctgggcgcggtggctcacgcctgtaatcccagcactttgggaggccaaggcaggtggatcatttgaggtcrggagttcgagaccagcctggccaacatggtgaaaccccatctctactgaaaatataaaattagcagggtgtagtggctcatgcttttgatcccagctact

SEQ ID NO: 488552 - DNA, 201 bp, Homo sapiens
tagacaagaggcagtccagggtcagggtaggcttagggtactgaggagagggaaatgaaaccatcactggagaacttctctcgagaatgacagtaggactrggtaggacatgagcttcagggttgctgacaggatactagggcacagcgaaagctctgttgaaagctttggccacagtatctgtgccaggctccaagctga

SEQ ID NO: 488553 - DNA, 201 bp, Homo sapiens
tgggagaggctgggcgcggtggctcacgcctgtaatcccagcactttgggaggccaaggcaggtggatcatttgaggtcaggagttcgagaccagcctggycaacatggtgaaaccccatctctactgaaaatataaaattagcagggtgtagtggctcatgcttttgatcccagctacttggagggctgaggcaggagaa

SEQ ID NO: 488554 - DNA, 201 bp, Homo sapiens
tgttttggacagctcataaaaatgcaacccatggttagaagttacacctgaattaagctaaaattggcttcactataccttttattcttatttcatctatrggaagccttcaactatcaaactcatcacccctgccttccataaaacattctttacttaaaacaaaacatatccagttacttcaacttcacaatcatggta

SEQ ID NO: 488555 - DNA, 201 bp, Homo sapiens
tttattcagtgtccttcccagacacggaagggcaatgttccctaagcccagaagtttctggcaccacaagcgcaggtgcagttgaataaggcttaccccargctgttcggcttacgctggcaaatgggggagagctatgctcccagcccccttcgtcctactcagggaattttctacctgcctcattcctgactgccttcc

SEQ ID NO: 488556 - DNA, 201 bp, Homo sapiens
tcttcctcactattttttttttcatttgcctaagaatctttcatccttgttaagaagctagagtgtgaaaaagcatctatttaagctctcccaccttttcyttctgcttgcatttgcagctgctataattggtcatcatctctggcaagaagagaaagaaggaacttactgtgaaggtcactgcatcactgcatattaact

SEQ ID NO: 488557 - DNA, 201 bp, Homo sapiens
tggtttgctgcacccaccaacccgtcatttatattaggtatttctcctaatgctatccctccctcagccccctaccccacaacaggccccagtgtgtgatrttcccctccctgtgtccatgtgttctcattgttcaattcccacttatgagtgagaacatgcggtgtttggttttctcttcttgtgttactttgctgagaa

SEQ ID NO: 488558 - DNA, 201 bp, Homo sapiens
aggatagaaagaaagaacagattgagtgactgagacaactctggaatggattgtcttgtaagagagaaatcatgcatttgttgtttgagccattgtatcaytgggtctatttgttaccgcagccaagctttcagaaactaatacaagtagtccttaacttacctattttcgaagtgctggttacttaaaggggcacctgtg

SEQ ID NO: 488559 - DNA, 201 bp, Homo sapiens
gctttagataatatatatttgaacataaacgcttgctaatttttgactaaattagcgtacagaaaatctggcatttcagataatgaggccataaagcagamcactaacagagtaggcacagctgttatgtaaaccacaggcacttgaatactcgcctacctcataatagcaaatatctcaggacaatataacagtactaca

SEQ ID NO: 488560 - DNA, 201 bp, Homo sapiens
ttgagcacgcacaacctcagcagcttagactagaaaactgtagacacagattccctggtgtatcccttcctgggccttcactctgaatgttggattcctcyctagggaggctgtcatgactgcaaagcctttccccagtcagctcagcttctatgtcagccattcaaagagtgccatctgcaggatgaactgaggactcaa

SEQ ID NO: 488561 - DNA, 201 bp, Homo sapiens
catctgtaaaatgtgaacactttccttgcataagggatggggtaaagagaaaataaaataattaatgtaaaagcatttttcaaactgtaaaatgaatattracattgatcaatcattctaggcaacaatttacctaataggttagatgatctttaaagataatttccagttctaacattccacactactttcaaaactcaa

SEQ ID NO: 488562 - DNA, 201 bp, Homo sapiens
ccacagaaaaacaattaaatttcactaatagaggctaattaggatcaatataaattattacagaatttacaaatagatatataaagtattttttttcatcytcatgcaatgaggagacatttcagcttccttggcaatctattaggctttatctgttagacaaggatcaaggatctttaactaatacatgacttgtttgtg

SEQ ID NO: 488563 - DNA, 201 bp, Homo sapiens
atctgggctattcggcgagtactacaactactcctgctcccctacccaggtgccccagatgtaaaagaaagcctcctgttcccaaaggaagaccagctgcycagctgattgtgcatttgtccctcctcctgtggccagggggctatggtcaggggcatctccatgaccatagctgccagcagctgccagcagttggcaggc

SEQ ID NO: 488564 - DNA, 201 bp, Homo sapiens
ttttggtgtggaggccggggaggagatgagatgagtgtgtccagatcccttcctgcccatgggttctatgaaagcagggagtcttgtcttaccccacctgycccacctaccagtagcttgttcttgtaaacatatttcgtgtgtcctgaagaatctttgatctccttgctaaaaaccaaggagatctcaaagaggaacaag

SEQ ID NO: 488565 - DNA, 201 bp, Homo sapiens
gtagaaggaaaaagagcatcttagaatcaataaatatgggaactagtatttactgagtatttgttatattctaggcactgagctaagtgctttatacataytatttcatttaactctaaaacaaccctgtgaaataaatgcaagtataggaaagactagcattttatagaggaaaaactgagatacagagagcgtttacat

SEQ ID NO: 488566 - DNA, 201 bp, Homo sapiens
gtctgttgatgaatgagtcaatgaacttttctcagttactgccctgcaccacacacacacacacacacacacacacacacacacacacacctgaagtgtcyttcattcttcaaacagggtaccaaaacctttcccctgtttcccctactggggcagagctgacatgtctcctttttgcttggaccacctccatgctttttc

SEQ ID NO: 488567 - DNA, 201 bp, Homo sapiens
ggctgagtgccagtacaggaaaagccccttcctaccattttagggacctttgtgcttctagttacatatgtgcgtgttagaagacaatgtgtaataataaygctgcaggctgccaggagaaagcgcaggtcctcaagcggtgaggtggaaagtaccaaagaagctgcatggccaggatgtgggctgacttagtagttctac

SEQ ID NO: 488568 - DNA, 201 bp, Homo sapiens
ggtcctcaagcggtgaggtggaaagtaccaaagaagctgcatggccaggatgtgggctgacttagtagttctactttccattttaaggacactgaactggsggggaaagcgtgtacccagtctcactgttaacaatgtctgtggaaagcccagctggtaaagccagcaggcagaccaagttacccctgccccactggtgat

SEQ ID NO: 488569 - DNA, 201 bp, Homo sapiens
tcacctctcatgggacaccaggaagaatcacttttctctggggctgcttcaaggacagaccttgtttttccagagaactttccctgtggaggatgtccccrccctgactcctcaggtgtgaccccagtgtgacctatgtgctcctcttttgtgccctgcccaggggcactgcatagcctggtgacctgcaggacccccaag

SEQ ID NO: 488570 - DNA, 201 bp, Homo sapiens
tcacagaatcatgatcctttagagtattgcttataagttaccccaggctcctaccccacagcatatatagccttcctgaacacatctcataaacagcaacycaaacaaagaacaagagtgtccatgctttggctttctgtcattgatcttcttactcgagaacttttcagttcctgattaaatccactcctcttctcccag

SEQ ID NO: 488571 - DNA, 201 bp, Homo sapiens
cacaaccagggcttttattcttccctggaaacattaccagcacgtcactgactatgccttcctatttggaccagtatggcaaggcaacactatgtcctgaygctgttttgttggaatttcaggaccaataataaggaaataattcctggattgcagactttgcaaacaaaaacttgaaacagtaaaagcaaatgttacaag

SEQ ID NO: 488572 - DNA, 201 bp, Homo sapiens
ggcagagagtcacggaaagctctaccataatggcttaaacaagtaaggtgcttatttgtcttaagtaagaggttggacctggcattccagagctgcctcartggtggctgttgtcttatacgtggcctttgtctcttggtcacaagatggctgcagaatctcctggcatcatatccccattctagggaggaaggagggtga

SEQ ID NO: 488573 - DNA, 201 bp, Homo sapiens
ataaaacaaggcaaatactacctatcattcaggattggtataagacaagatatataatggaaacataagctctcaaaaatgtgtccattctttctttagcrtgaatttaaattcatgtgtctttgccgctgatggaaaggcattgtcccatgtgaaaggaatatcaggcatcagtgagaaggtggaggaacagttgggaaa

SEQ ID NO: 488574 - DNA, 201 bp, Homo sapiens
tagctctgtcattctcactccttcagcagcacccacctctctgtcccatatgggcaccctccctgccttactcctcattattttgttttacatggcagctratcacgcctgataaaataactggagagcagtatttcatctcgaaaatgaaaattttcaggacccgtttggaaaactccccaatgcagaaatataacagag

SEQ ID NO: 488575 - DNA, 201 bp, Homo sapiens
gcaccatctaatcagctgccagcgcagttagaatataaagcaggcagataaaacgtgaaaagactagacaggcctagcctcccagcttacatctttctccrgtgctggatgcttcctatcctcaaatattggactccacgttcttcagttttgggacttggactggctctccttgcttctcagcttgtagacaacctattg

SEQ ID NO: 488576 - DNA, 201 bp, Homo sapiens
agcagtagccctggggtgatgaggaatctaataatgtcattccctcctgccagcaccacctcgtggacaaggcatttttagatcacaccagcaggaagatytttttcaaagaccataaatgtgggcatctattttaccactcacctagaatccaaaagaagacaaaggactccttgcatcaggcaggaaggcagcccagca

SEQ ID NO: 488577 - DNA, 201 bp, Homo sapiens
aacccacatagccctcccattttccgcagccctcctcagacaaaccccaaggtactctcttctggccttctctaccctctccttctttcccgctccccacwccccttagtcaggctatatgaaaaacaattcatcttttaactttaaaaaatatcattatgatcatagcacatatatctgtgacaaagactgtgacctgtc

SEQ ID NO: 488578 - DNA, 201 bp, Homo sapiens
tgagaacataaacttcctgaaatctggggcaatatattagctgtattttagtctcacatagtacctatcacagtactttgcatataatgggtgtggtgtartttttgaagtaatcgagaatacccaggtcacacctgagcagtgagtctaatttcctctaccttgcaaaataaccaagagtaggcaggtttgaacttcagt

SEQ ID NO: 488579 - DNA, 201 bp, Homo sapiens
aaaaagcacccggaaacctgcactccccttgaccagaatcactctttcaacttcatgccaggtctcttggccaccttcaaactcagctcaaactgtactgycttagaaaaccctttctacatctgaccaatggtcctggcattctgccttctcccagcacttggcaaataacttggcctttcttacgcaggttgagtatcc

SEQ ID NO: 488580 - DNA, 201 bp, Homo sapiens
gtcagtctccagttggatgctcatgatatctgaccactaggacaagagccccctctggcttctttccatctccctcctccaatcgataccaaccaaccaamcaaacaaacaaataaattaaagtgtttgcatcctaagtcctttaatatctgagtctcttgggaagcagtggagacttcaggttcttccaggctaaagatc

SEQ ID NO: 488581 - DNA, 201 bp, Homo sapiens
cttcgtgcttttagcaaaattatcttggggcttctaaatgctgctcacgtctcttttgaagtctccccactcccagtcaacagcgaggctgtatgttccayatgctggaaggccagagcactgggttcaaccctctatttcatcacttaactcagggtgctaccccacaattatgcacatgctagacttccccagaccata

SEQ ID NO: 488582 - DNA, 201 bp, Homo sapiens
tgaggcaggagaatcacttgaacccaggaggcagaggttgtggtgagccaagattgtgccattgcactcagcctggataacaagagcaaaactccatctcaaaaaaaaaaaaaaaagaaaaatgtagggcagaaatgcaacaaccagctaacacatgataatgtttttagtaaccttcataatcacttctttcacttttct

SEQ ID NO: 488583 - DNA, 201 bp, Homo sapiens
acctcagtaagggcaggaagtttttattcatttcactgttgaatgttcagtgcctactacagtgcctggtgcaaacaaggaaggggaggcagcagctaagsgtatgaaaactagaaccagcttcctaggcctgaatactggccccatcatttacttactgtggaacccctctgtgcctcagttcccacaatgtaaaatgtg

SEQ ID NO: 488584 - DNA, 201 bp, Homo sapiens
ccttgatatttagagacactggaacagagacccctgggcaatagaggggtgagagagaggggatgctaagaagggtggaaaataagttttcctgaggggcwcttgagaggcaggatggaaatcccttagtaaaagccttgacgtgcagggaggatgaaagcctttaatacccattttgcattcttgcagatggcctaacaa

SEQ ID NO: 488585 - DNA, 201 bp, Homo sapiens
catcttgggctgccttttactattactggtttggcactgggtaggaaaatacccaggtttcccctaaatttctcaaaatgtgtgttcctgttcaccacaartcctcaatctacctggcatagagaagctctaaatacttgttgactacataatgaataaatgcatgaataaataggtagcaaatgttggtcaggagaggtg

SEQ ID NO: 488586 - DNA, 201 bp, Homo sapiens
cctttccatgctcatactcttgttctgagaatgactatggaaaggtatactcaggggcataagtgacagtgatttgtgcccctgaactggaatgggaaatrgtactcaataatggttgtcagtcagattctgggaaagatgtgcctttagtttcaaagaagtaatttatacactaaggcttaaaaataaattataaattgt

SEQ ID NO: 488587 - DNA, 201 bp, Homo sapiens
tctgagaaaccacacggatccaagggctctggcagtacctggcatacaaggagcactgggagagggctcagtgcccttgggttgagctgcaccaggagatmcaccttcaaatactaactcagatactaacttcccctgtcttagtagggcaagccatttatgctttcagtaacatgaaaatggagttttagctatagttaa

SEQ ID NO: 488588 - DNA, 201 bp, Homo sapiens
ctttagtttcaaagaagtaatttatacactaaggcttaaaaataaattataaattgttaatctagctgaatcccaataataaaacggaataccaaatccaktttaaaaatataacttcaacctaagtgcccatcaatggatgactggataaagaaaatgtggtatatatcaacaatggaatactattcagccataaaaaag

SEQ ID NO: 488589 - DNA, 201 bp, Homo sapiens
aggagtctcataacttctgccagcatccatgaaactgtggcaggctaacttgttagctagcaggtagggtaaatctcagaccttgacactttacagttctygacatcaggtaatagagtatacatgcctcccctctgaaacacctgctccagcccctctcattctccctatccaaagtacttccttctatcatactcttaa

SEQ ID NO: 488590 - DNA, 201 bp, Homo sapiens
cagcagaattgcttgagcccaggaggtcaaggctgcagtgagctgtgattccaccactgcactccagcctgtgcaacacagtgagacctctgtctcaaaamcaaaaccaaaaccaaaacaaaacaaaaaccatagccgctgaaagaatatggtgaaactttacaaattcagactgaagaaagggcacattatattagtata

SEQ ID NO: 488591 - DNA, 201 bp, Homo sapiens
gacaccggaaagggagaaggggctgggtgatgagaaattacttaatgagtacaatatatgttatttgggtgatggatatcctaaaagctctgactttaccrctacgcaatctacgtatataacaaaattatacttggactccgtatatttatacaaaaataaataaataaataaataaataaaggcataccctcagactta

SEQ ID NO: 488592 - DNA, 201 bp, Homo sapiens
tctcatctcctaaattttgctctgtttttcccttcactttccatatcctttcctctcgtgtacccactttccaggctacctcctacttatcctttaagctstgcctcaaaatcattggctatggaaagccttaactcgttaataacccattcaggctggagtgggtgtttctcttattctgttgaaactacaattattgcc

SEQ ID NO: 488593 - DNA, 201 bp, Homo sapiens
ctccactcccggcaggccccacaagggcttcagaactgcagccagcacatcagtagtgcccatttctcctgggactgaggtgttgcctctgataactcaaytgatgctccagtcagaagaggactcttcaaggggagttatgacagcccaagaagtgggggcatgctcgaaggcccatctgttcctgggactgattgcaca

SEQ ID NO: 488594 - DNA, 201 bp, Homo sapiens
catttctcctgggactgaggtgttgcctctgataactcaactgatgctccagtcagaagaggactcttcaaggggagttatgacagcccaagaagtggggrcatgctcgaaggcccatctgttcctgggactgattgcacagtgactatccccctattcagagagtgtcacagtcagtgataagaatgctcaactctccct

SEQ ID NO: 488595 - DNA, 201 bp, Homo sapiens
gggctcagagcctgttacctgctgtacatcctgctggaagacgcagagctgcagccgctggtggagccgcaccttgcggtgctgccagatgctctccagcygtcgctggtgatgtaacacctcatgcaccacgtccagcacctggtgcactgccttggagtagttggctgtggccgtgagggattcggagttcccagggct

SEQ ID NO: 488596 - DNA, 201 bp, Homo sapiens
ttgctatgttgccatccttaagtccatgagtatccaatgattacctcccacttataagtcggaacctgtggtatttggttttctgttcctgcaaataaccrtgtttaagtaattgttttccaagcctatgtatattttttgtacatttacaaatgttattctgagaaggggtccatatgcttcaccagaccaaaagagtcc

SEQ ID NO: 488597 - DNA, 201 bp, Homo sapiens
aactccatccagattgctgtgaatgccattattttgttcctttttatggctgagtagtattccatggtgtatttataccacattttctttatccattcatwggttgatagacatttaggctggttccatatttttgcaattgtgaattgtcatgcattacctttataacctcaacactatcctatgagacaggtgttacta

SEQ ID NO: 488598 - DNA, 201 bp, Homo sapiens
tccaaataggatagagtaactctgcttcaaagcaagaggcctaaggtcacagtcaaagacactttggtggacaaaggagattccaagatgttactgaacartccaacatctgactctgcctccaggaatctacagtataggtacagtagtctctccttatgcgtggttttattttccacagtttcagttacctgtgatgca

SEQ ID NO: 488599 - DNA, 201 bp, Homo sapiens
tactcttacctaggagccattggttcttagacttcaatgtgcatcaaactcacctagggtaatagttattaaaatgtaggttccaggtctcacttcttgayattctgattcagtctggggtgggacccaggaatctgtatcaggtgagtccgatgcaggtggtccaggaacccattttaatactcctctaactaatcctgc

SEQ ID NO: 488600 - DNA, 201 bp, Homo sapiens
atcactcacccagtcttttgtatctaccctagagaagcacttgtacatgtgtacaaggagacgctgtttatgatgattttaaacaccagaaataatcgaaraattgctaagaaaactatggaatatccacactgtgaaatacactatgcagaagatttccaggacatgctgcatgcagaaaacttgcaaaatgatatgtta

SEQ ID NO: 488601 - DNA, 201 bp, Homo sapiens
tcattctgtacattttgtaacacactagaccatttctaagcaattctggaagagtgccaggtgccatcgagtatcagatcatataatatgtacatgctaaratctcagaagcttctttgctccaccaataactactttacaaatgaccctgggagcaacttgacattcttgtgtcaatcatggggggaacactccttcaag

SEQ ID NO: 488602 - DNA, 201 bp, Homo sapiens
tatagttgttacatcttcctgatagagtgacattcttcttctttaaaaagttgctttttatctttagtaactttttgctgttcttttaaaatgcacttaaraatctgttattaatatagtcacttggctattcttctgattgctgtttgcataatacatgtttttctatccttttactttccatctatttatatctttgaa

SEQ ID NO: 488603 - DNA, 201 bp, Homo sapiens
ccccagcggaaatcttttctttttaaattgcttcccgtctgttttgtcccactctttgcttaacaagtcagaatgaagaaaagtattcttccaactctttycctctttattctaaagaaaagatgagcatcaattagctgcagctatgtgatgaacacgcaggaaagaaaaatttaccctttgtgtcttccgggatcccaa

SEQ ID NO: 488604 - DNA, 201 bp, Homo sapiens
cccatcccggctcaggtttggcctgttcccttcctaccttctcagcatcctgctcgaagagccgcagctgaaagcactggtccagcttgagcttgcgcacrtgccacatctggtgcaggtgctgccgggtggagtgcagcttgtccaggagactggtgatcttgggcaccaggctctggaagtcagcactgcccgggatgc

SEQ ID NO: 488605 - DNA, 201 bp, Homo sapiens
caaagagagaagcagttgggtcttccttaccaatctgggcaaaccttgaataaagtatgtaagtgataaggttgaagacagaacaggagattggacagcartattctcatggccctaagaatgaaccagtcactatcagtcactaccaccaacaaccttaacaacggcgacaaaaagatatggccaaatccctctcaaagt

SEQ ID NO: 488606 - DNA, 201 bp, Homo sapiens
agaggtctggaatcttgggaattcaaatctaagctaaatgtgaaatatgtccaggattctgtacctggtgtttctatattctttcatctcctctccttacyctcctccactctcatcatctgacaccattgaattgaggaacccaggtctgttatgaagcctggagaatgggaatttccagggcctcctcctaaggctgcc

SEQ ID NO: 488607 - DNA, 201 bp, Homo sapiens
atcaatcacgagttatttagtctacctccttgcctctgagacagataagagtatttcttctttataatgacccccagaaaaaaaatctttcatccttataytcattgtttcatgcactcaaagtttataagttcttcttcagatataacccaaatcccttttactgaagcttaagaccttttatgttttttctgttcccag

SEQ ID NO: 488608 - DNA, 201 bp, Homo sapiens
gacaagcagctgcaccatctgtgcctccattttctcatctgtagaatggggaatgtaacagtcccttgaaggactattgagaattacataaaatgatatawggaaatgcccagtatatagcagatgcccagtgttcatcacttcccttctttctccagaatgggcccctggttgactctgagttgagcagctgggctgctg

SEQ ID NO: 488609 - DNA, 201 bp, Homo sapiens
cttcctaagcatagtgtccattaatgaatgagctttcaaatcatataataaatagtgaataggaagtttggaaggttcagatggaagggaaggaggagttrgaagagaaagcctggagaattctaattccccacatccagaagtgtagataaggagtcaagaggaggcagcaggatcaagccatgtggtattcagaaagga

SEQ ID NO: 488610 - DNA, 201 bp, Homo sapiens
catataggtgtaacagcaattactgccctgttgaatggaacttggcaggccctagaaaggcagcctccttgacctgggaacttctggagctatggtatgcygtttacttggtttttcagacaggcactatctgtgccctatgcaggcttcccatgtccttgagcctgagggataccatgaagtgccccaaactctaaaaca

SEQ ID NO: 488611 - DNA, 201 bp, Homo sapiens
ccactctgcctgaccacttcaggcacccagcatcagaggcccctctaatgacacctgtgaagggaacagatatcccaaagacatgtacagttggctctcarttttccatgtgtatttcactacactggaaatatacaatggattacattgtattatataatacagtagataaattagattatacttggattatacctggtt

SEQ ID NO: 488612 - DNA, 201 bp, Homo sapiens
gaatgaggctaagggcctaatttgtcacaccaaaccagaggaacattccttatagtgtcagagggatctccggataggatgtttcccaccttgaccccaayaagaacatctcttaacctgggaagagcatatgttttgtgtggaagtgatgccaaaaaagcctcctgtgtggcaaggagccccgtgtgagagatgaggacg

SEQ ID NO: 488613 - DNA, 201 bp, Homo sapiens
ctccaaaataaaaaatagaaaaaaaataaaataaacacaggatactttggttaatccctttaaattaacaaaggtaattacctgatgcagagagaaaaaarcagacatttttagaagtggaaaggatcctagaggtaattcaggaagacatgaataaaaggtaataaaaatgctactttagaacaaatagcaatatgaatg

SEQ ID NO: 488614 - DNA, 201 bp, Homo sapiens
cctgcaggttggctacggactcggacttgcctccattctcgcttgaggaatgagagtatgcatctgaggaaaacggacagacacagccatgtcagaggtgstgaaggcaggccgcaaacctgggactgagacagctccatcctcaggaagctaggacacaaggcagaatgtccaggccagctgtagaccccagtccagaga

SEQ ID NO: 488615 - DNA, 201 bp, Homo sapiens
tgcaggcatttttacatcttacagataaagaaaccgaagctcacacaagaccacaaagcaagattttgctgagtcaagactgggacaggacttatctcacrtctagcccgaggcatttcccactggaaagctctgcccatgctgacctggcctcgctgggctccccgagggagggaggcgctgacctgagctgctggataa

SEQ ID NO: 488616 - DNA, 201 bp, Homo sapiens
actaggaagccgacctgaccctggcaggacagaatgccctctctccactagctccccttacctctttggtgtgtgtgtggaaggaaacagacatgtccagragaagcttccgctgctccaccctgcgcacgaagtcttggatgcgcacctccaggtgtcgagctgccttgtagatctcctcggggtcacattcccccgtct

SEQ ID NO: 488617 - DNA, 201 bp, Homo sapiens
gggagggaggcgctgacctgagctgctggataaggtcttcgccttccttgatgacattgagtgtggcatctagagtggcggtctgctgctgctggaactgyttgatcagttcctggactgcatccacagaatctgcacagacatcctccaacatctccttctgaaggtcttccatccatgtccacaactgtagagagagag

SEQ ID NO: 488618 - DNA, 201 bp, Homo sapiens
agattcccctttattcccagatactttagtataggtttccttaaaacaaggacatctcttatataaccataggacaataagcaaaatcagaaatttaacastgatatcctgtttttttcaaatattgacagttattccaataatgtccttcatagagaaagatcatgtcttttatgatctgcacatcttttataagtacag

SEQ ID NO: 488619 - DNA, 201 bp, Homo sapiens
tccgtctcaaaaaataaaaattaaaaaaattaaaaaattagctggatgtggtggtgcatgcctgtaatcccagctacttgggaggctgaggcaggagaatygcttgaacctgtgaggcagaggctgcagtaagctgagattgtgccattgccctccagcctgagctacaagagcgagactccatcacaaaacaaaacaaaa

SEQ ID NO: 488620 - DNA, 201 bp, Homo sapiens
attctttcagcagttcctgagtctcctctgtggtctctccagtggaggtatgtgttgagaggtaaaattcacctgtttcttggatccagtcaagcgcctawgggaggaaacaactcatccagtccccaaaaaggcagctgtcagtaggaaaacatgccatactacaatgaaggttattgttgggacaacttaatggaccca

SEQ ID NO: 488621 - DNA, 201 bp, Homo sapiens
gtccagtgcttctcctcgagccatttgcagtgaaggctcagtttgatttttttttctgcttttattctaatctgttatagactagtactttagtaaactayaatgaaaatgaattaccagcaaagtacaattttaaaaacaaaagttccaattttttaatttttagattcaacagacataaaattactctggcaaattgct

SEQ ID NO: 488622 - DNA, 201 bp, Homo sapiens
tatgcaaatagttcttgcttctttctgggagcaaagtctggcccacaggacagagtccataataacacgagacatttttagtaacatacaggaggccacaraagattcacatgtttctgtactatagatgcaaatctgttttcaccttgacctactgggataaggagtaaattgagaaacaaagaaaaagtagtgctaagg

SEQ ID NO: 488623 - DNA, 201 bp, Homo sapiens
tcccaaccctaaagccccattagactggtacttcccattgggctcaataaaccatgtggattgcctgaaccaccagtttccagaaaatagagagggaaacrcatccaccatccacatgacagtgagatatgaagaaatatgtgccttttcttgctagatcagcttttttggtggctgcggaaagaaaggaggggaggcacc

SEQ ID NO: 488624 - DNA, 201 bp, Homo sapiens
accttgcctcacctcttaaagactccagccccctagttccttttctctctttgcctgcatgcaacttcagtgttttcttctgtggcccggtgtgggatgcmccatcctcttggggaactgtgagtaatagactatcttttcagtcacctcctcatctgttggcatgactgaatttcaaatttctattaatattaatgtact

SEQ ID NO: 488625 - DNA, 201 bp, Homo sapiens
tctttacctttctgaacctcagtttactcatctataaaatgaggataactaccacccacctctgagataacaatacttacttaacccaatagtgacagctwattatatgacaataaatggcaatgacagtaatgactattaaatggcagtgaacagtattgtgttgtaatacagcaatggctgtgaggcctcaagcctgca

SEQ ID NO: 488626 - DNA, 201 bp, Homo sapiens
agtaatgactattaaatggcagtgaacagtattgtgttgtaatacagcaatggctgtgaggcctcaagcctgcaagacagccagccctcatcctcagactkcaatgccttgaatcatctgccggaatggattcactctcattttccttcccaggcagcaacaaagggagaatgcacgtctctcttctaagcagatttaaag

SEQ ID NO: 488627 - DNA, 201 bp, Homo sapiens
ccttagacggttggttatccatacagataacaaggcctcactcccagaggcctgcatttttaacaagctccccagagaattctgcaatggtgatccatccrcttcagtctgtgctctcctctcctaccctcagcaccagcttcgtgtcactatcttgaattctagtgcgtaccccacctcccccaacaccctgagagtcca

SEQ ID NO: 488628 - DNA, 201 bp, Homo sapiens
taaatggcagtgaacagtattgtgttgtaatacagcaatggctgtgaggcctcaagcctgcaagacagccagccctcatcctcagactgcaatgccttgartcatctgccggaatggattcactctcattttccttcccaggcagcaacaaagggagaatgcacgtctctcttctaagcagatttaaagcgctctatgccc

SEQ ID NO: 488629 - DNA, 201 bp, Homo sapiens
cttacaaatgaccccgattctctttatagcaaaattagtccttggttctaagaaatcttaagaagcaactaattcaattggcccccagagtctaatgagcrtgggtggaccttgacaggaatctcagtcattcttaaggactcattagaagagaggcaggagatttatagtggaatgagggctggtatcactggcttgaca

SEQ ID NO: 488630 - DNA, 201 bp, Homo sapiens
tgccggaatggattcactctcattttccttcccaggcagcaacaaagggagaatgcacgtctctcttctaagcagatttaaagcgctctatgccctttacycacttttataacctactactcatcagtcacagatgcagaagcatcctagctagtgcaaatacatgtatacactcataggtgtgtctggcaagcatgaaca

SEQ ID NO: 488631 - DNA, 201 bp, Homo sapiens
caaagggagaatgcacgtctctcttctaagcagatttaaagcgctctatgccctttactcacttttataacctactactcatcagtcacagatgcagaagsatcctagctagtgcaaatacatgtatacactcataggtgtgtctggcaagcatgaacacatgagttgcatgacatacttaggacttccacaaactcaggt

SEQ ID NO: 488632 - DNA, 201 bp, Homo sapiens
agactatcaggagggaggggaagaagggagacaggatgctgtaagttctccgctgacttccagcaactagtctctgggtgcttgggccttggttcagctgycctctacttatcagtactcttcctggggagacagagcgaggactcatctgctcttcatggcccttgaaaaatttactatctattctagagacttaaagtg

SEQ ID NO: 488633 - DNA, 201 bp, Homo sapiens
ttctcaaaatacaatctttcgctactaacactgtctatcccagcctctgcctcagaccctaccagaaattctgatcccggaggcctagagtggagccctgsaacaggcacccagagtgattctggcataccttattgtttgagaacaactgccttaggggctctggccagtctttggcttcaattatatcaggggtcaccg

SEQ ID NO: 488634 - DNA, 201 bp, Homo sapiens
cactggagcaacagcagaaaaaacaacagagcccttctttctttattctactatcctcaccccatctgctccttccaggcctatctacagcccctcccatsagagatcaaccctcccaagaaatgctggagaaagagggcgtcagagaggagagttgagagtgctctgcctgccgcacacatggccagggaccagggacca

SEQ ID NO: 488635 - DNA, 201 bp, Homo sapiens
ccgtggcctccaactgctgtttgtgcttctagtctctccttttaatctactctctatcctacctccaaaatgatcttctactccccaaagtctaggggttmtaagggtcagagaaaggtatatttttctccctcccctcaaaaagcttacagtctagatgagaatactcaacgcacatgaactagagatcaacaaaagaca

SEQ ID NO: 488636 - DNA, 201 bp, Homo sapiens
gtgtctgtttcataattccaagtcctagctcctgaaatatctgtgggagacagagaaaagaacggcttgttcttttggcagccaactccttccagttactrttttcaattaccaaggggatgaggtagagcacctccttgactgaaatcaaaagtaagaatacaaaaatttctacctctgcaatgcttggcatagtgggat

SEQ ID NO: 488637 - DNA, 201 bp, Homo sapiens
ataaccattttaaagtgtataatttagtggtattaagtacattcacagtgttgtggtgcaagcatcaccatcatccatctctagaactcttcatcttgcaraactgaaactctgttatcaattaaaccaggggtgtccaatcttttggcttccctgggccacattggaagaagtcttgggccacacataaaatatactaat

SEQ ID NO: 488638 - DNA, 201 bp, Homo sapiens
ggagacaggatgctgtaagttctccgctgacttccagcaactagtctctgggtgcttgggccttggttcagctgtcctctacttatcagtactcttcctgrggagacagagcgaggactcatctgctcttcatggcccttgaaaaatttactatctattctagagacttaaagtgtgtgaatttgtaataaacatttaaag

SEQ ID NO: 488639 - DNA, 201 bp, Homo sapiens
tactatctattctagagacttaaagtgtgtgaatttgtaataaacatttaaaggttgcatgagagggtataaatttgtggcagggcatggtatctcatgcytgtaatcctagcactttggaaagacaaggtgggcagatcacttgggcccaggaatttgagaccagcctgggcaacatggtgaaaccctgtctctacaaaa

SEQ ID NO: 488640 - DNA, 201 bp, Homo sapiens
cactttggaaagacaaggtgggcagatcacttgggcccaggaatttgagaccagcctgggcaacatggtgaaaccctgtctctacaaaaaaaaaattagcygggcacggtgacgacacatgcctgtggtcccagcgactcaggaggttgaggtgggagaatcacttgagcaggcaggcagaggctggagtgagccgagatc

SEQ ID NO: 488641 - DNA, 201 bp, Homo sapiens
attttctcctatgtcttccaaattattggctacaagtatgtattactttaaaaagtatgtcatacataaatacatgctcatgaaatttcataaaatacttyagaagattatagggtaaaaagttcatctctccccaacttactcccagttacttccccacacccaaatcaattctactctgctacctagaagtaaccacag

SEQ ID NO: 488642 - DNA, 201 bp, Homo sapiens
tagggtaaaaagttcatctctccccaacttactcccagttacttccccacacccaaatcaattctactctgctacctagaagtaaccacagtgattcagtrtatatcttggctcattttcaatgcattcacccacatagacacacagtttgttcttgcacaatgatgtttatactatgtcgttgaatggttctgtatggat

SEQ ID NO: 488643 - DNA, 201 bp, Homo sapiens
aaaatccaaaatctgaagtgctccaaaacttgaaactttaagagggtcaacatgatgctcaaaggaaatgattgttgcagcatttcggagtttggattttyggattagagatactcacccggcaagtagaatgcaaacattcccctccaccgcaaaaaaaaaaaaaaaatccaaagtccaaaacatttctggttccaagca

SEQ ID NO: 488644 - DNA, 201 bp, Homo sapiens
ccaggttcaaggtaggggggtggttcaggccatactgagaggacacagatgtctccccagaatggccaacattcctcttctgtgaggacagagaggaagarctgctggcaacaaggacaggttcctggatatctgtactgagcagccgcctgagctggcctgagctcaggggcagatgagctatttatcaaagtgaaagat

SEQ ID NO: 488645 - DNA, 201 bp, Homo sapiens
ctgtacttgcccaattgacacctgtttgcctctttctagctgtctcacttatccttaagagaggccccagctcagcctgcagccaccctctttttttttttccaggaagtattactgatcactgtcttgtctgaaccaggttcaaggtaggggggtggttcaggccatactgagaggacacagatgtctccccagaatggc

SEQ ID NO: 488646 - DNA, 201 bp, Homo sapiens
caggacatctcaaccagaacaaagcaggcctgaggcagtttccacgaaactcctctctgtcctgctcttctttgaattaaagagtggtcccctcatatacmaccaacactcacagtgtcagcacaacccccatcacacaggtcagcccatctccataatgtggtccaaatgttaccttcaagtaccacagaattaatgaca

SEQ ID NO: 488647 - DNA, 201 bp, Homo sapiens
gaaacacttcaattagagagaggaggtacaatgtgtacattgcttctatatttaatttgaactccaaatatggtggcggtttttgtttgtttgtttgtttkttttgttttggaggtagggtcttgctctgtcatccaggctgaagtgcagtggcataatcagagctcactgtaacctcaaaatcatgggctcccacctcag

SEQ ID NO: 488648 - DNA, 201 bp, Homo sapiens
ctataacccaccacactgacactatgtgtgggtgtttttgtttggggacaggagttgggggtcagagatgaggggattaagttaggggactcagaggagaygggataaattagggcaaggagtctaagtgaatgatctcccttctggagtctgtgaaaaaccacaaagtcagagaagcaaaagagcatggcatattgagaa

SEQ ID NO: 488649 - DNA, 201 bp, Homo sapiens
tgtacagttaagaccctcagacgccagtgtctagattttctatggcaaatgttctatgctcatccagcccccatggtcccctaacggacattgggatgtcyttctcctgtcagcacgtggagaaagcttctgaaactgagctccttttaataatagtttgtgctggaaagaatcagaaaaagcaactcatatatcctgata

SEQ ID NO: 488650 - DNA, 201 bp, Homo sapiens
gggcaaggagtctaagtgaatgatctcccttctggagtctgtgaaaaaccacaaagtcagagaagcaaaagagcatggcatattgagaaagttcaagtgaytaactctggttcaggcctttgaatgcaagagagtgcagctctgagtgccttggagagtcccattctgggctctgtccctctttttgcacaccccaccccc

SEQ ID NO: 488651 - DNA, 201 bp, Homo sapiens
tgctctctggccaaccaactcccgcagctgctccccagcctgccctcttccccaaggctgttctctcattcactgtgctcaaatgacagcagtttgagcagacccgtttacagtggaacataactaacaggtagcctgctttttttcctttaggtgatttaccttttaaaagatatttattagcccgaatcaaactttcaa

SEQ ID NO: 488652 - DNA, 201 bp, Homo sapiens
tgaaaccctgtccttgctgagtctccactcccagggtaggtccgacaataagagaaatatttcactcagtggatcgttaactcaaggatgggcatatcacytaactcagggtagacagcaccaaggaaagtcaatttgggggacttctgacttcttccttcctactgaacatgaaggtctatatgtgattttcactattgg

SEQ ID NO: 488653 - DNA, 201 bp, Homo sapiens
ggggtgattctcacctgtagcactcacccccagatttggattctataggtttttttttttttaaatggagtttcactctgtcacccaggctggagtgcagrggcacatcttggctcactgcaatctctgcctcccaggttcaagtgattctcctgcctcagcctcccgagtacctgggactacaggcaagcgtcaccaagc

SEQ ID NO: 488654 - DNA, 201 bp, Homo sapiens
aagtagtccactataggcaaaatggatccactgggcatgtttccaccgatactttttttttttttttgagcagagtctcactctgtcacccaggctagagygcagtggcacgatctcggctcactgcaacctctgcctcccgggttcaagcaattctcctgcatcagcctccggagtagctgggaatacagacgtgcacca

SEQ ID NO: 488655 - DNA, 201 bp, Homo sapiens
taaatctttttcatgtttcaaggccaagcttgctttccacaacccccttgaagcccacttggaccacatcagtgggacctttccatgaaccactgtattamtcacagggtgtctctcccattcctttgtgtccagctttagggcaaagggcctgctggaaacacacaacactcataaagagggcccattcatcagaaaaaa

SEQ ID NO: 488656 - DNA, 201 bp, Homo sapiens
ttaaatctttttcatgtttcaaggccaagcttgctttccacaacccccttgaagcccacttggaccacatcagtgggacctttccatgaaccactgtattrctcacagggtgtctctcccattcctttgtgtccagctttagggcaaagggcctgctggaaacacacaacactcataaagagggcccattcatcagaaaaa

SEQ ID NO: 488657 - DNA, 201 bp, Homo sapiens
gagccagctccccagccctcccctgcatcacagcgagagtgaaagtcgggcaattcctcaacaaagcaagggccagcaagacgcccagagagttaccctgmagggcagccagggctgtcacacatctggactcaaggaggcagctgtggggacttcagataagcaccaccccagcccccacattctgtctgacaggaaacg

SEQ ID NO: 488658 - DNA, 201 bp, Homo sapiens
ttatcaccccttagacacatgcatgccattatctcacttttggttgtttttcaccttcaaaaaggcagttataaatgcatttgccttctttcttccttctyacccgatatctatttcctttctatccttggttttcagttttcctgcctttcaacaccagtttcaagatagggaagaaaaatcatctttcatcaaacctgc

SEQ ID NO: 488659 - DNA, 201 bp, Homo sapiens
aatttttatttttgtttattttttggaaacagggtctcactctgtcacccaggctgagtgcagtggtgccatcatagttcactgcaaacttgaattcatgrgctcaaccgatcctcccacctcaacctcccgagtagctgggactacaggtgcatgtcactacacccagctaatattttaatttgtagagatgggatctcc

SEQ ID NO: 488660 - DNA, 201 bp, Homo sapiens
aaatactgtatttgtgggatgcgaaacccatgggcacagaggtctgactttttgtatctgaagattcaataaggccgactatgggacttgaacatccttaragtttggtacccgcaggggttcctggaaccaatcccctgtggctactgagggacaactgtatatgctaaataatcaattcagtttccatcatggtaaagg

SEQ ID NO: 488661 - DNA, 201 bp, Homo sapiens
caaaaaagggcggggaaaagggacctgaattaagttgaaccagagagaaaaacatgaacagatattaactaagaaaacgtgtacaagctgctctgggagasagagatgtgatggtggtctctgccatcttcagttttgggacagaagagtcccttgaaagcagaccacatttgaaagcaggtacatttaattccaaatggc

SEQ ID NO: 488662 - DNA, 201 bp, Homo sapiens
gagaggattgcttgtgtccaggagttcaagaccggcttgggcaacacagtgaggccttgtctcaaaaaaagaaaaggaaagaacaaggacaaaaaagggcsgggaaaagggacctgaattaagttgaaccagagagaaaaacatgaacagatattaactaagaaaacgtgtacaagctgctctgggagagagagatgtgat

SEQ ID NO: 488663 - DNA, 201 bp, Homo sapiens
tccatttcaaaaattgactgggtctctccctataggtcagacacagcttggcctttgggctactatcctctggggaagtcgacacctgcatattggcatgrcctgtagggagagccagggacaggaaggaagaatagctgaggaacatctcaagcagagccacacttcagttgcctgaatcaacaggtgggctccgggagg

SEQ ID NO: 488664 - DNA, 201 bp, Homo sapiens
cacacttcagttgcctgaatcaacaggtgggctccgggaggtaaaatccacaaggagaggtctgtgaattttaaggaaggattcaggagtgttgccatacrgagcaagaaaattaagtgaatcaattagaggctgccaaggctaccaggaggaggcaggtagaaggagatagatatctgggagggctttgaagactagaaa

SEQ ID NO: 488665 - DNA, 201 bp, Homo sapiens
ttgccatacggagcaagaaaattaagtgaatcaattagaggctgccaaggctaccaggaggaggcaggtagaaggagatagatatctgggagggctttgawgactagaaacagcctcctccggagagtcaatactattttaggagacaaacaagtgtgactgtggttaaagataatcacagtcagatgctggcaaaggtag

SEQ ID NO: 488666 - DNA, 201 bp, Homo sapiens
gtagacaaacatttccaggcctctgctatttagggtataaaagtctgtgtgtgtatgccaggcaatgcttgtgttaagagctttggcggcagagggtttayatatgcaaataaaaataataccccacaagaaaaggctgcttctggaagtgctaacccatcccatggtttcaggcacatgatgtgaaattgcactagattc

SEQ ID NO: 488667 - DNA, 201 bp, Homo sapiens
caaatggaaaggatgataagaaagtcaactgtggtgtttccacaaactattcttcaaatgttagtactgaaaggacaggcttctcgctgacataagcactrcacatttacactgcaaggcagaaaatggccccctggcaatctcagccccacaagccccacagtcttttccctcacctgttcagaagttttgtaaaaggcc

SEQ ID NO: 488668 - DNA, 201 bp, Homo sapiens
tctccccagcatccatttctcttcatgggagcaccccagatttcacagctttgtgagttgaaaccctgtccttgctgagtctccactcccagggtaggtcygacaataagagaaatatttcactcagtggatcgttaactcaaggatgggcatatcacttaactcagggtagacagcaccaaggaaagtcaatttggggga

SEQ ID NO: 488669 - DNA, 201 bp, Homo sapiens
ttgcttttatgtggcttggcaaatgttaatcagttatcaaacaatacacatttataaagcacatattctgttaccgagctagacattctggaagttccttraaggggcagggctccagaacacatcacatggaatgttgtcatctgccttctttttctcactttacccatccaacccctttcacagatgaaatgaggttaa

SEQ ID NO: 488670 - DNA, 201 bp, Homo sapiens
gggtaagcttcaagaacagggacaatggctgggcatggtggctcacacctgtaacctcagcactttgggaggtagagatgagaggattgcttgtgtccagragttcaagaccggcttgggcaacacagtgaggccttgtctcaaaaaaagaaaaggaaagaacaaggacaaaaaagggcggggaaaagggacctgaattaa

SEQ ID NO: 488671 - DNA, 201 bp, Homo sapiens
gtggagcctcagtgaaacatccagcaccatgggggctggaataatggcctgagggcagccggttatgatttttatctaggcaaaaacagtctgaagaagaaccaacaaagcctcaaacataaaagatgtgcaataaatattggccaaaaagaagagaaaaacgtttccaatgatattgctaaccaaagtcaaggcacaggc

SEQ ID NO: 488672 - DNA, 201 bp, Homo sapiens
gcctcctaggttgctgtgaagatatatttgtcaaggtagaaggacagaacatgttttatttaacagtttgttagcttgctacattaatttcacatattcasacaaagggtatgtgagcttccatttgtactcttgccctaggcaccacaatgttagaatcaggccttgcaagagacgagactggagtggatgcaggcttca

SEQ ID NO: 488673 - DNA, 201 bp, Homo sapiens
ggtggagcctcagtgaaacatccagcaccatgggggctggaataatggcctgagggcagccggttatgatttttatctaggcaaaaacagtctgaagaagaaccaacaaagcctcaaacataaaagatgtgcaataaatattggccaaaaagaagagaaaaacgtttccaatgatattgctaaccaaagtcaaggcacagg

SEQ ID NO: 488674 - DNA, 201 bp, Homo sapiens
tggtggagcctcagtgaaacatccagcaccatgggggctggaataatggcctgagggcagccggttatgatttttatctaggcaaaaacagtctgaagaagaaccaacaaagcctcaaacataaaagatgtgcaataaatattggccaaaaagaagagaaaaacgtttccaatgatattgctaaccaaagtcaaggcacag

SEQ ID NO: 488675 - DNA, 201 bp, Homo sapiens
aattcctggaaatgcatccatagggaaagatgttcagaagattaaatgaaagcaagttataaaagcagcatgtaaaaatgaacccatttaagtaaaaagcrgtaaacatacggaaaagaatatagtaagtgattaggtagtggttgtctctagatggttaggattatgctattttggtctttttgtttgcctaagttttga

SEQ ID NO: 488676 - DNA, 201 bp, Homo sapiens
tgcactccagcctggtgacagagcgagactctgtctccaaaaaaaattcctggaaatgcatccatagggaaagatgttcagaagattaaatgaaagcaagwtataaaagcagcatgtaaaaatgaacccatttaagtaaaaagcggtaaacatacggaaaagaatatagtaagtgattaggtagtggttgtctctagatgg

SEQ ID NO: 488677 - DNA, 201 bp, Homo sapiens
atgttggtcagactggcctcgaactgctgacctcaggtgatccacctgcctcagcctcccaaagtgctgggattacagacatgagctactgcacctggtcytttttttttttttttctttaagatggagctattgttttgaaatgaaatatgagatgaaaaaactgtgagctattgggttaaaagcaatacaataaaacta

SEQ ID NO: 488678 - DNA, 201 bp, Homo sapiens
atggagtgcaatggcgcgattttggctcactgcaacctccacctcttgggttcaagcgattctcctgcctcaacctcccaagtagctgtgattacaggcgmccaccaccatgcccagttaaattttgtattttcaccatgttggtcagactggcctcgaactgctgacctcaggtgatccacctgcctcagcctcccaaag

SEQ ID NO: 488679 - DNA, 201 bp, Homo sapiens
tacacaccagatttcaaagacttggtacaaaaaaataatgtaaagcatctcaatttttatattgattgtatgttgatatgatatttggagctattgtgggktttttttgtttgtttgtttttaagacggagtcttgctcttgtcccccaggatggagtgcaatggcgcgattttggctcactgcaacctccacctcttggg

SEQ ID NO: 488680 - DNA, 201 bp, Homo sapiens
cttgcaaaaaccctatgaagagattccatggtcttcatcttccagatgaagaaactgaagaaactgtactgtatatttaaattacacaccagatttcaaagacttggtacaaaaaaataatgtaaagcatctcaatttttatattgattgtatgttgatatgatatttggagctattgtggggtttttttgtttgtttgtt

SEQ ID NO: 488681 - DNA, 201 bp, Homo sapiens
ccagctggcacgacacactgcaaatgagatgcagacagccagaagggcagcaggatagcctcagaggaccacagcagcattgagagctccagagactctakaagattctcaggaattaagggaatcacattttgtactctccagaggggaagaggtgtgtcttgaagaaaaggtgatgaagcaaaagtatggtggaagggc

SEQ ID NO: 488682 - DNA, 201 bp, Homo sapiens
actgaggctcagagaagttgcttacagtcacaaggaaagggtaaaatcaggatttgaatcttgttttgtttgactccagtatttgtgcataaaactacaattttttttttttttttgcttcatagatgcatagaacacttgatcttgaagaaacattcatgcttcttcttgctagctcctcctgttagaactgagggtaga

SEQ ID NO: 488683 - DNA, 201 bp, Homo sapiens
taagaatccaacacactgggaggagaccatctctttttaataacaattgtcatcgtgaatcagccataggatctaccagatcagcaacttgttttgaacasggacactcccagggctcaaaacctgggcaaaaggccaatagtttgagacctaggttacaagtctgttttccttaaaagctttgagaaatagtcattaatc

SEQ ID NO: 488684 - DNA, 201 bp, Homo sapiens
ccctcagggatagatgcctgtatttccccaagtgcgcagatgaagacattgccataaagttaggtcaccagactaatgccatacatgtagtaagctctaaygtcaggagggggactcagtctgaccctcctaacccatgcttggctcttagaggtctgaactaaagacagagaattgcccacaaaaagctctagcttactt

SEQ ID NO: 488685 - DNA, 201 bp, Homo sapiens
ccccaagtgcgcagatgaagacattgccataaagttaggtcaccagactaatgccatacatgtagtaagctctaacgtcaggagggggactcagtctgacyctcctaacccatgcttggctcttagaggtctgaactaaagacagagaattgcccacaaaaagctctagcttacttagagaaaatgacgcatgagcacaag

SEQ ID NO: 488686 - DNA, 201 bp, Homo sapiens
atcataatgagttaaacgttacaaactaaatcagtttctatgctttgcagtttcactttctagtacctgacttggcaaagccattccacaaccagaattayagccactgccctgtcctgtctttgaaatacgtacccattgatacagaaaaacacaaataaagatgtgagccaggcaaccaaacaagagttgaaaccaata

SEQ ID NO: 488687 - DNA, 201 bp, Homo sapiens
tgccagcaatgccttctcactgtcctaacagaatggtggtctcccaggcctcctggtctccatcaggcaactggaggcatgtctccctcagcaccagctcytccttggaacttatacctccaagatgagagagggtgcagatttctgaagaactcagactggggaggaggcacgtccagggggtaggagcaaggagggaga

SEQ ID NO: 488688 - DNA, 201 bp, Homo sapiens
caaaaaactaagaaaagacattaccacagggaagcaggtgaaggaacagaatagaggacagtggtgggtgacacttctcaatgtttacttttctatctaahtttgattttaaaactgtgacaatacattaccttcaaaaattgaattaaaggatacacgatataaagtggttctgcattactctactacttacctgtacca

SEQ ID NO: 488689 - DNA, 201 bp, Homo sapiens
ctcccttctctcccccaggcactgatgcccacagctttcaattagtctgatttgtgtgtgtttaatgtatactggaatttaaattattctctttcctaagyattttctgtttcctcaaggaatgtttttttcattaggttcttcctccccaccttctttctggggcataaggctggaagacaatagaggctcattttttaa

SEQ ID NO: 488690 - DNA, 201 bp, Homo sapiens
tcagtttctatgctttgcagtttcactttctagtacctgacttggcaaagccattccacaaccagaattatagccactgccctgtcctgtctttgaaataygtacccattgatacagaaaaacacaaataaagatgtgagccaggcaaccaaacaagagttgaaaccaatataacataatgtgcagattgtatctcataaa

SEQ ID NO: 488691 - DNA, 201 bp, Homo sapiens
cttatcctcaccctgaactcctgctcttctttccccggggctggtctaccttttgggaagccttgcccactttctcttctaactcctacacacacatctcmctgagaacagttcagttctgattttgctcttgcagccctggcttgcatatgctggtagaagggtcatagtttaaatttagacttgaccacctcactggga

SEQ ID NO: 488692 - DNA, 201 bp, Homo sapiens
agtaagagccctggcagtgatcctttgtgacttaggtacaggttcctcagaggttcttatagaccaaagaacggcaggagagctcttgaagcaagtcggcytcaagcaaggtcctaaaaaatgtgagcatgataaggctatccagctttatgccgcttttactctacttccctaccttacgttctcccatagtagttagca

SEQ ID NO: 488693 - DNA, 201 bp, Homo sapiens
acttaggtacaggttcctcagaggttcttatagaccaaagaacggcaggagagctcttgaagcaagtcggcttcaagcaaggtcctaaaaaatgtgagcaygataaggctatccagctttatgccgcttttactctacttccctaccttacgttctcccatagtagttagcaaaacctttcggaaatactttttaaacttg

SEQ ID NO: 488694 - DNA, 201 bp, Homo sapiens
aaatcaagtcctctcaaaaagaacaaagacagtggctcacgcctgtaatcccagcactttggaaggctgcaacaggcgacttgcttgagctcaggggttcragaccagcctgggcaagatgttggaaccacgtctctacaaaaaaataccaaaagtagctgggcaaggtggcgcatgcctgtagtcccagctactagggag

SEQ ID NO: 488695 - DNA, 201 bp, Homo sapiens
ggtcctaaaaaatgtgagcatgataaggctatccagctttatgccgcttttactctacttccctaccttacgttctcccatagtagttagcaaaacctttyggaaatactttttaaacttggtagagaacacaaataatacccacttgcgggccagaagaggggtagtaacaagactcttggtagctatgtcagttcctca

SEQ ID NO: 488696 - DNA, 201 bp, Homo sapiens
gtggtttgggaagagcaatatagtccaacagcagcaccaagagtggctcttttcaggctcgatgcataacttccacatcctcactctggagaatacactayccaaggcatagagaaagcttaaaaaacatgaaagcattgggagatatacctaatgctagatgacgagttagtgggtgcgcgcatcagcatggcacatgta

SEQ ID NO: 488697 - DNA, 201 bp, Homo sapiens
taacaagactcttggtagctatgtcagttcctcaggcagggtcccgactgcccaatctaacccccaccccacccctgtccccagatagtctcagagcatcytgttcttttccttgagagtacttagaaatgtgtgtgaggccaggcgtggtggctacacctgtaatcccagcactgtgggaggttgaggtgggcagattgc

SEQ ID NO: 488698 - DNA, 201 bp, Homo sapiens
agctatgtcagttcctcaggcagggtcccgactgcccaatctaacccccaccccacccctgtccccagatagtctcagagcatcttgttcttttccttgaragtacttagaaatgtgtgtgaggccaggcgtggtggctacacctgtaatcccagcactgtgggaggttgaggtgggcagattgcttgagcccagctgttc

SEQ ID NO: 488699 - DNA, 201 bp, Homo sapiens
gatagtctcagagcatcttgttcttttccttgagagtacttagaaatgtgtgtgaggccaggcgtggtggctacacctgtaatcccagcactgtgggaggytgaggtgggcagattgcttgagcccagctgttccagaccagcctggccaacatggcaagaccttgtctctattaaatataagaaattagctaggcgtagt

SEQ ID NO: 488700 - DNA, 201 bp, Homo sapiens
gagtacttagaaatgtgtgtgaggccaggcgtggtggctacacctgtaatcccagcactgtgggaggttgaggtgggcagattgcttgagcccagctgttscagaccagcctggccaacatggcaagaccttgtctctattaaatataagaaattagctaggcgtagtggcgtgctactgtggtcccagctactcttgagg

SEQ ID NO: 488701 - DNA, 201 bp, Homo sapiens
caaagagctgggtcttccctcagactagatccagtactccaccctccctgttcctccaaacataagggcaggaccgtcctacacttcactatcttctctamagagatatataaaatttactacagatagaatggaatcatttcactaattattataaagtagaaacaaacaggtgaaattagttttattgcattacattta

SEQ ID NO: 488702 - DNA, 201 bp, Homo sapiens
tagtggcgtgctactgtggtcccagctactcttgaggcttaggtaggaggatggcttgggcctgggatgcggaggttgcagtgagccgagattgagccacygcactccagcctgggtgacagagcaaatgtcacctgtctcaaaaacaatgacaaaaacaacatcaaacaaacaacaacaacacaaaaaaacaaacaaaac

SEQ ID NO: 488703 - DNA, 201 bp, Homo sapiens
tatatcatgagaaaatgctattcattccccactttgttccacatcccttatttaccacaagagtcaggatgggttctccataacaagcattcaggaagaamctcaactcctctcagatcattcatttgtcagccacttagacaccttatgggactttggtcagcaatggaaactatgtttcatctcaagttccagctctaa

SEQ ID NO: 488704 - DNA, 201 bp, Homo sapiens
tgcactccagcctgggtgacagagcaaatgtcacctgtctcaaaaacaatgacaaaaacaacatcaaacaaacaacaacaacacaaaaaaacaaacaaaaygtgtgtgaatgagacagagggggtaatgaggggaagagagagagaaggacctatatatgatgcccctctacactgcaaaattatgacagcagttccttgt

SEQ ID NO: 488705 - DNA, 201 bp, Homo sapiens
cttctgggggctggaaagttgtactttttaaatgttcacatgtatatctttgcagtctcctgcagaaaccctctctcccacagagatggcataatcctaastaagttgctaaaacttccctagatcctaagaaaagcattccctgtttacttcacagggagtatagtctaagccacacacccccatcggccccaagaacag

SEQ ID NO: 488706 - DNA, 201 bp, Homo sapiens
gtgtgaatgagacagagggggtaatgaggggaagagagagagaaggacctatatatgatgcccctctacactgcaaaattatgacagcagttccttgtccyctttagatttctgattattgaggggaccaggagtcaggaggcctccagcaaggccccagaatactctggcagccactggcctcactggatctctgggaag

SEQ ID NO: 488707 - DNA, 201 bp, Homo sapiens
attttgaagaaaatacgtttaaagcctattataatatgcaacatgctagaaaatttattatttgcaaccatttagactcatggtaaaaaaatgtttaggtrtccactaaaatgcatgaaggggcataaaggtttcaatattcttttagagcatacagaagcaaaaaaaatctgatgcccactgaatgacagtatactttca

SEQ ID NO: 488708 - DNA, 201 bp, Homo sapiens
actaatgactaccacagatagatattatcctaattctctgaataaagaaactgagactcagaaaagtatttagtcactagttaaatgagtcaagaatatastaattaatacattttcctggaggagatattaacatgactatctgccttttggtggctggagtagtgagaagagaaatgtaccagtgatatgatctctaag

SEQ ID NO: 488709 - DNA, 201 bp, Homo sapiens
ctggggtccttggccctccagattccttccaaagagctgggtcttccctcagactagatccagtactccaccctccctgttcctccaaacataagggcagraccgtcctacacttcactatcttctctacagagatatataaaatttactacagatagaatggaatcatttcactaattattataaagtagaaacaaacag

SEQ ID NO: 488710 - DNA, 201 bp, Homo sapiens
gcatgaaaaggtgggaatgtgcaaagcacagaagagaatgccctgagggatgggagctgaatgcccaagtccagtctcactctccattctagggccctcaygtttgtaccccctcttgccacctcatgacaaggtcacctccccagggaaatctgggacaagctggtcaacccaatctctaaagaggatggaggaaaccaa

SEQ ID NO: 488711 - DNA, 201 bp, Homo sapiens
gttttattgcattacatttaacccagtagctccaaaagtttttttttaatctcatatttcatttcaaaacaatagctccaaatatcatttcaatatataaycaatataaaaattgagatgctttaaatatttacatatacagcatatctcaatttggactggcctcatttcaggtcctcagtagccacaaatggccagtgg

SEQ ID NO: 488712 - DNA, 201 bp, Homo sapiens
tgtccttggccctttaaaaaccccttcctgctctttagcacgcagtgagaaccctgcatcccctggggagtcctcccagatcatcccaggctgctatgctmacatcagcttctacgtaattattttagccagcaatctggcaggacctcgcagcactgttccccttattgtctttagcaactgatttttcttttctttttt

SEQ ID NO: 488713 - DNA, 201 bp, Homo sapiens
tcctgctctttagcacgcagtgagaaccctgcatcccctggggagtcctcccagatcatcccaggctgctatgctcacatcagcttctacgtaattatttyagccagcaatctggcaggacctcgcagcactgttccccttattgtctttagcaactgatttttcttttctttttttcccctttttgttatcactgtttca

SEQ ID NO: 488714 - DNA, 201 bp, Homo sapiens
tacatagaaggaataagatctagtgtttgatagcacagtagagtgactctagttaacaataatttataatatatttcaaaatagctataagagaagatttkgaatgtttccaacaaaaaaaatgataaatttctgagatgatggaaatctcaatgcctctgatttgaccactgcacattgtatacatctatcaaaatatca

SEQ ID NO: 488715 - DNA, 201 bp, Homo sapiens
gccctcctgatccccagccccatccgcctaccccagaggcctccccaacccttccctccctaccaccctccctcgcgctgagcgcgaccagtctggctaasagaaggcaccaaggccgccgacagccactcacctctacacgggaagcaacagcagcacttagcaaagagccaccccaaagagggacctcgggtgtaagcc

SEQ ID NO: 488716 - DNA, 201 bp, Homo sapiens
gtcaagtttaagtcttgtctgcaatgaaacacttttatagtcattgaaaatatcctggaaggctgggcgcggtggctcacacctgtaatcccagcactttrggaggccaaggcaggcggatcacaaggtcaagagatcgagaccatcctggccaacatggtgaaaccccatctctactaaaaattcaaaaatcagttgggc

SEQ ID NO: 488717 - DNA, 201 bp, Homo sapiens
catggttgccctgctccattctcacctctgtgtaggcttgggtcacctgctcatacaaggtctggtggtggtggattgccagctctaggtcttgcatctcrgatggcagaccaccttcactgcacatcttgcaccaggcatccactcccgacaggaactggaaggagatgcagggtggatcagtgggggagcactgggggt

SEQ ID NO: 488718 - DNA, 201 bp, Homo sapiens
ttgtattttcaccatgttggtcagactggcctcgaactgctgacctcaggtgatccacctgcctcagcctcccaaagtgctgggattacagacatgagctrctgcacctggtcctttttttttttttttctttaagatggagctattgttttgaaatgaaatatgagatgaaaaaactgtgagctattgggttaaaagcaa

SEQ ID NO: 488719 - DNA, 201 bp, Homo sapiens
tttcaccatgttggtcagactggcctcgaactgctgacctcaggtgatccacctgcctcagcctcccaaagtgctgggattacagacatgagctactgcayctggtcctttttttttttttttctttaagatggagctattgttttgaaatgaaatatgagatgaaaaaactgtgagctattgggttaaaagcaatacaat

SEQ ID NO: 488720 - DNA, 201 bp, Homo sapiens
ctcatcagtcacagatgcagaagcatcctagctagtgcaaatacatgtatacactcataggtgtgtctggcaagcatgaacacatgagttgcatgacatayttaggacttccacaaactcaggtcagagacccccaaactatcaggctcacatggaagaggggatttatgtggctgataacatcacccacccatttcttat

SEQ ID NO: 488721 - DNA, 201 bp, Homo sapiens
cattctatttgtagaatcattctatctgagtttatgtatcttgcacagagttacagcagagctgggattcaaattcattctggcacctgattccaagttcktaatcatcatgatatattgcctttcattccagaatgccacaaaatatactttttataccctacatatcagtctatatcctatgaattaaaggcattcgct

SEQ ID NO: 488722 - DNA, 201 bp, Homo sapiens
gctacttgtgaggctgaggcaagaggatcgcttgaaccaaggaggcggaggttgcagtgagccaagatcacgccattgcactccagcctgggtgacaagaktgaaactccgtctcaaaaaaacaaacctctaaaaaaagataggaaggaaatatgttaatatattgttattatctctaggtggtgcagttacaagagcttt

SEQ ID NO: 488723 - DNA, 201 bp, Homo sapiens
ctatttgtagaatcattctatctgagtttatgtatcttgcacagagttacagcagagctgggattcaaattcattctggcacctgattccaagttcttaawcatcatgatatattgcctttcattccagaatgccacaaaatatactttttataccctacatatcagtctatatcctatgaattaaaggcattcgcttatt

SEQ ID NO: 488724 - DNA, 201 bp, Homo sapiens
attcattcagaaaatgtaaacagaagtaaacaggagagacatgaaattcttggtactagaggatgtttctcataaatcctcttaaaacaaaaatagtacaytcttcctttcaaagggtatgaaactgagggtacttggtaacaagttcttgtaattccagacaccctttgattctggaactatttcaaggaatgtatccta

SEQ ID NO: 488725 - DNA, 201 bp, Homo sapiens
tttctgagaaaaaaaaacacacatggaaaaaaaagaccaaaagaatgtatgttgtgttaatactagttatctctaagtgatataattttatcttcacttawctgtattttcaaattttcccatttatgtatgatttttctcagaaaaaaaaatcaaggttctcttcctagttgcaataatttaaaaatgaactatttccca

SEQ ID NO: 488726 - DNA, 201 bp, Homo sapiens
ctagttctgagaacccagcatgcttaatttctcagttccttgtggactcataagtaaaataaggctaataacaccaaactcatagagagacaatgtacatmaagtccctataaataatcaattgcagctattatagccatgactgttgaaggagtttagggcttttactatccccttatttttcttaactattggttatga

SEQ ID NO: 488727 - DNA, 201 bp, Homo sapiens
aaacacagcttacatcaaagaaggtgcccgcatgctccaggataagctggttggaatcaggcttgtttttacagtaggtgacatacatctgaaatttgtcwgcctaaaaagaacaaagataataatagataagcattcattagttgttcccttctgtccaccatgctgaaggacccagcaagggctgtacagttaagaccc

SEQ ID NO: 488728 - DNA, 201 bp, Homo sapiens
catcagctgcacaatgagaaggccccagggtgagaagattcccaatacctcataactaagaaaaagaggggaggggtaaatcctgaggctccagccacagwgcttgctgatctcctggggaggagagataaaggctgatcattcactggtcctgcagaaaggcaaggtgggaagtgggactggagatatgtcagtcccagg

SEQ ID NO: 488729 - DNA, 201 bp, Homo sapiens
acctcataactaagaaaaagaggggaggggtaaatcctgaggctccagccacagtgcttgctgatctcctggggaggagagataaaggctgatcattcacyggtcctgcagaaaggcaaggtgggaagtgggactggagatatgtcagtcccaggacaagaattagtctgtttatataatctgatcctggaaagatctatt

SEQ ID NO: 488730 - DNA, 201 bp, Homo sapiens
ctttctgctatggtctagggtgtgttgacacagttttaggtaacattatcaatgagaaatgctcccatctctgatgttacttctctctctacctaggcggkccttccccagatcccacagagcccattctctctcttgcttcaggtcattactaaaaggctgccttatcagcacagccttccctgataccctattgagaac

SEQ ID NO: 488731 - DNA, 201 bp, Homo sapiens
acagcagctgctgcaggtttctgcaccttacctgctcagccttctggtggaacacagcagacatggcgaggatggtgctgcgttcatccagggcagcagcraagctcttccactcctggtccagctgggtggagatctgcttgatttgttgtgaggcataatgaccggcctcagagaggcgggaagccacggacatgatgc

SEQ ID NO: 488732 - DNA, 201 bp, Homo sapiens
aggaagctggactttatccccaatgcaatgggaagccactggagtgttttaaaaggggccggggtgtgacataggtgatgcaataggattcattttcattracaatctttaatttctgaccactctatgttatatagccagataaatctccctccaactagaatcacctttgcaccaagaatcaccttttcttctagtgat

SEQ ID NO: 488733 - DNA, 201 bp, Homo sapiens
ttccttcttgtccactctcccaagcacctagcacagggctggcatgcagtcagcataaacatttgtcaaataaattaaaacactgtgttacacaaaaagcratgttcaaagatgcaatgactgtgaaagggtaagcttcaagaacagggacaatggctgggcatggtggctcacacctgtaacctcagcactttgggaggt

SEQ ID NO: 488734 - DNA, 201 bp, Homo sapiens
aagtaaaaagatgctgaccattactaatgatcagggaaatgttaagtaagcaataacagcatgccacattttacctacaagatttcccccagcaaaaacacacacacacacacacacacacacacacacacacacacacacaacaaaacaaccaacctagtaggagactaaattgatataatattcttataagtcaatttg

SEQ ID NO: 488735 - DNA, 201 bp, Homo sapiens
cctgaattaagttgaaccagagagaaaaacatgaacagatattaactaagaaaacgtgtacaagctgctctgggagagagagatgtgatggtggtctctgmcatcttcagttttgggacagaagagtcccttgaaagcagaccacatttgaaagcaggtacatttaattccaaatggctccaggcagtgcattcaccccca

SEQ ID NO: 488736 - DNA, 201 bp, Homo sapiens
atctttcatccttatattcattgtttcatgcactcaaagtttataagttcttcttcagatataacccaaatcccttttactgaagcttaagaccttttatsttttttctgttcccagtggatatcataaagaaaaaaaaaaacagacactattcagcatctacttgttcagtcttctgcccgaagttcttcagggctcaca

SEQ ID NO: 488737 - DNA, 201 bp, Homo sapiens
agtaaaaagatgctgaccattactaatgatcagggaaatgttaagtaagcaataacagcatgccacattttacctacaagatttcccccagcaaaaacacmcacacacacacacacacacacacacacacacacacacacaacaaaacaaccaacctagtaggagactaaattgatataatattcttataagtcaatttgg

SEQ ID NO: 488738 - DNA, 201 bp, Homo sapiens
atcttcagttttgggacagaagagtcccttgaaagcagaccacatttgaaagcaggtacatttaattccaaatggctccaggcagtgcattcacccccagraacaacagatcaacacagtcaacacccgatttagagtttgggtactatctctacccttctcagttgggtcagtcctgcctctgttcagacgaagacaagc

SEQ ID NO: 488739 - DNA, 201 bp, Homo sapiens
aaaaggatgctagttctgatcctgctactaaaaggctggatctccattttctcctgtataaaaggagtaggaggaattaaatgattcctggtgttccttcyggctgtagctttccatgatttagtcccttctgcttgagaagacaccctcaggtttcagacctcagccttttccagagccttccttcaggaaaagcctggg

SEQ ID NO: 488740 - DNA, 201 bp, Homo sapiens
atcaggaaaagctttcaaaaggggacttttgtccacatacctaaagctaatgaaagttgactagaaacttaagtctcttggttgggcacggtgactcacamctgtaatcccagtactttgggaggccgaggggagtggatcacttgaggtcaggagttcaagaccagcctagacaaaatggtgaaaccccgtctctactga

SEQ ID NO: 488741 - DNA, 201 bp, Homo sapiens
tctcttgactgccaccatgtaagacatgactttgctcctcctcctctttctgccatgattgtgaggcctccatggccatgtgaaactgtgagtgcatcaarcctcttttttttctttttttataaattacccagtctcaggtatgtctttattagcggcatgagaacagactaatacaaccatcatcatcatcatctctct

SEQ ID NO: 488742 - DNA, 201 bp, Homo sapiens
ggtgactcacacctgtaatcccagtactttgggaggccgaggggagtggatcacttgaggtcaggagttcaagaccagcctagacaaaatggtgaaacccygtctctactgaaaatacaaaaaattagccgggcatggtggtgcacgcctgtagtcccagctattcaggaggctgacgcatgagaattgcttgaacctggg

SEQ ID NO: 488743 - DNA, 201 bp, Homo sapiens
agcacatccaaaagcttatccaccatgatcaagtcagctccatccctgggatgcaaggctggttcaacatacgcaaatcaataaacataatccatcacatraacagaatcaatgacaaaaaccacatgatatctcaatagaggcagaaaaggcctttgataaaattcaacaccccttcatgctaaaactctcaataaacta

SEQ ID NO: 488744 - DNA, 201 bp, Homo sapiens
actaatacaaccatcatcatcatcatctctctcccatcctctttatttccttgtcattttctttcgtctttatccttttaaaatactttgctctcgctctrtacgagccctttctttctcctgaaaagcagtacaatcctcatttttctagaacatgcagagaaaggctgggacacttagacagtggacacaccatccact

SEQ ID NO: 488745 - DNA, 201 bp, Homo sapiens
ataaaaatgatttcaagaacataggtaataacaatatgttgtaaaataatcaggaagtgatgaattttgagtatttattaactttgcttttaacataacayatttaattataaacctacataattaagcaatagctagaatgtgacaaccagttctcaaaattcctaaaaatttaacaactgtctctccatgagctggttc

SEQ ID NO: 488746 - DNA, 201 bp, Homo sapiens
caaaacattccacttcctcttggttcttttacttttgtccttttcctcagactttagaaggaggtatcctttaaatcctgcatgactggaagtcagatggycaagtccccttgccttgggaaccacagcagtgggctctgagtcattgcttcagagtcaagctactcaagccgcaggagacagccaagttctccctgagag

SEQ ID NO: 488747 - DNA, 201 bp, Homo sapiens
aatgaaaaagctaatacaaaatataaacagtattgcctcgactgagaaaacgttatacatacgagggaagcacacccaaatactaccagttattgagtgcttattattattattattattattgagatggagtctcactctgttgcccaggctggagtgtagtagcacaatcttggctcattgcaacctccacctcctggg

SEQ ID NO: 488748 - DNA, 201 bp, Homo sapiens
atgaaaaagctaatacaaaatataaacagtattgcctcgactgagaaaacgttatacatacgagggaagcacacccaaatactaccagttattgagtgcttattattattattattattattgagatggagtctcactctgttgcccaggctggagtgtagtagcacaatcttggctcattgcaacctccacctcctgggt

SEQ ID NO: 488749 - DNA, 201 bp, Homo sapiens
tgaaaaagctaatacaaaatataaacagtattgcctcgactgagaaaacgttatacatacgagggaagcacacccaaatactaccagttattgagtgcttattattattattattattattgagatggagtctcactctgttgcccaggctggagtgtagtagcacaatcttggctcattgcaacctccacctcctgggtt

SEQ ID NO: 488750 - DNA, 201 bp, Homo sapiens
cccatctgcctcaggagaaagaaagcagctgccccaagcataacttccccacccctacttctcccctactaacacacaagtgaatctgaacacatgtgcayacacacaacttctctaggtcctttacaaaagaaagtcccacaaatactcaccagacacgaaggccaccttttcctttaggataggaaggacatcagaagc

SEQ ID NO: 488751 - DNA, 201 bp, Homo sapiens
tcttcacagtcaggtcccaaagaaaccccacagggtaaaaatgggtctgtgagacaggtcacttccatggtggtcttcagctagagtcaggccagcgctcrtggcctccttggtctgtgcctcccacccgctctgttctcctacctttcaccaaggggaagaagcagtccatctccacgctgcttcgggagtgtgagatgc

SEQ ID NO: 488752 - DNA, 201 bp, Homo sapiens
ctaacacacaagtgaatctgaacacatgtgcacacacacaacttctctaggtcctttacaaaagaaagtcccacaaatactcaccagacacgaaggccacyttttcctttaggataggaaggacatcagaagctttcaaaccatcattccgaaaagaccctgtgggacaacaaaccagaaggaatcagggtgagaggagcc

SEQ ID NO: 488753 - DNA, 201 bp, Homo sapiens
gatactagggcacagcgaaagctctgttgaaagctttggccacagtatctgtgccaggctccaagctgagtgaaggcagagtggagctaatgcaccatatraatggggtatgcccagggagggtgggagatgttctattggatgatgagatcccagaaaagagggaaaggtgttgattttattcctctcatatccatcctc

SEQ ID NO: 488754 - DNA, 201 bp, Homo sapiens
acatccaccagagagctttggagggtggtggtggagggagtagaacaggagggcatggaggaaggggggagaaatatgggagagggttggtgagaggggaygaaggatgtgtgagagcagaggtaaggaggaagagaaggggaataaagaggaaaaatggtgtttagggcagagagatggcagaagatgaaaaggagagtt

SEQ ID NO: 488755 - DNA, 201 bp, Homo sapiens
ggaggcaggttaggggagggtggagggagaaaagagagaaaagaacaaatcaaaaagaaaaagacaagactgagaggaaatctaccttttccctccaagtragcagcactaagttagtagtcctcaaatttgagcgtgcaccacaaccacctggagggcttattaaaacacagactgctagagcccatccctcagttgtgg

SEQ ID NO: 488756 - DNA, 201 bp, Homo sapiens
taagttagtagtcctcaaatttgagcgtgcaccacaaccacctggagggcttattaaaacacagactgctagagcccatccctcagttgtggggtgaggcsgggcagggtggtcaatggtgcctgggaatctgcatttgtaacatgttcccaggtgaccacactttgagaacttctgctctaagtcattctgtgagtaggc

SEQ ID NO: 488757 - DNA, 201 bp, Homo sapiens
catggagagagagcagaaactgagaatatcctgacagctgatgacacaccagatgctgtaaaagaagagatacaagcccacaactaatcctgcgctgggargagcacatacctggaaacagaaacattttaggaggtactgctttgacctagcagcagaaggggtttccctccccttcaatttgacagtttcctcactgtg

SEQ ID NO: 488758 - DNA, 201 bp, Homo sapiens
tggctgcctcacaggtgtaaccagggttcccctccttccaggaattgtaacacagttctgccaagagcaaaagatatgctctattagtcattgattacagsaggcagggaggcaagccacccgtgggcctcacctacaagggagggggaagatactggtggagcctcagtgaaacatccagcaccatgggggctggaataa

SEQ ID NO: 488759 - DNA, 201 bp, Homo sapiens
ccagactcttgccagtatcttctgttgaatcttcttttatgtaacacaaagaaattacaacactggaagtgttatgtggttttttattggtctaattaagytttttaaaaaggaaattcccaccacacatctagatcacaagttttcttccccacagtgacaactccacagcactgaggcactgttgacaatggtttgagc

SEQ ID NO: 488760 - DNA, 201 bp, Homo sapiens
aaaaaaaagaaaaaaagaaaaaagaaagatagaaatagagtacatccctgggaggcaaagaaaaccaagagacatatcgcaaaagcatacagtaggccctstgtatccacaggttctacatcctcagattcaccaaactctgacaaaaaatactgtatttgtgggatgcgaaacccatgggcacagaggtctgactttttg

SEQ ID NO: 488761 - DNA, 201 bp, Homo sapiens
agggtctcactctgtcacccaggctgagtgcagtggtgccatcatagttcactgcaaacttgaattcatgggctcaaccgatcctcccacctcaacctccygagtagctgggactacaggtgcatgtcactacacccagctaatattttaatttgtagagatgggatctccctatgttgctcaggctggtcttgatctcct

SEQ ID NO: 488762 - DNA, 201 bp, Homo sapiens
agaagcagatgctggcaccatgctccttgtatgacctgtagaactgtgagccagacaaacctctttataaattacccagattcaggtattctttttttttwaatatactttaagttccagggtatatgtgcacaacgtgtgggtttgttacatatgtatacatgttccatgttggtgtgctgtacccattaactcgtcctt

SEQ ID NO: 488763 - DNA, 201 bp, Homo sapiens
tactaactgccaggcattgttataatttctgcagatatagctgtgaataaaacagacaaagctctgcctttaggagtttatactctagtgggcaaaattcyctttgcgttaggtacatgaatttgggaatgactaaatttcaagctccttgaagatagctttgtgtctcatgaaccttgctgttctcagtgtttagtaaaa

SEQ ID NO: 488764 - DNA, 201 bp, Homo sapiens
aacgggtggagtttgagcccttggcaccaaacaggtaggtactccttatgtgcaacttcctcccttcaaaggccaccacaatgggcgttggcttaaaaaawacaactagatggggccaaagaggtaagagaggggcagacttagatgctccaagactcaaggatgcccttttcttcctcgcagcctcacccgttccctccc

SEQ ID NO: 488765 - DNA, 201 bp, Homo sapiens
tttttttcatttatttgtatctttaatttctttcaacaatgctttatagttttcagagtataagttttacacttttttcattaaatttattcccaagcatyttattcttttttatgctattataaatggaatttttttcctatttccattttcaaattatttattttaagtgcatggaaagacaattaatttttgtttatt

SEQ ID NO: 488766 - DNA, 201 bp, Homo sapiens
tctcaggccatgtttctgggctaacatcctgttacagaggtgaagtttaatatttccaggtgaatgaatgcctacagagaaacttcgaacatcttacttayggtgcaagacttccattcaccatcccctcggcccaatatgcccagtagacctatcattcctttacttatatccctatccctatcttttaaatctttttca

SEQ ID NO: 488767 - DNA, 201 bp, Homo sapiens
agctctaatagttttttactgaatattttgggatttttcatatacatgcttgtgtcatctgaaaatatagttttacttctttccaatttggatgactcttrtttctttttcccgaataattgccctgaatagaccctccaatattgaatggaaggggcaagagtgtcgttgtcttgttcttgatcttaagcggggaagtat

SEQ ID NO: 488768 - DNA, 201 bp, Homo sapiens
tttatcccacctgcacccccactcacaggtacaaagccctgaacactggggaaatgctggtcaggaaacagaaaggaggggtgcgcccacctggggagctstgcatctgagaacacagtgcccatctcaggcaattctctcccttggaggggaaacccaatttctgctgagtttccagcctaataaaataccgagtgtcca

SEQ ID NO: 488769 - DNA, 201 bp, Homo sapiens
tgaggaagttatcttctattcctagtttgttgagtatttttattatgaataggtgttggattttgtcaaatgctttttctgggtctattgagatgatcacrtgatttttgttttttttttcctactgaagttaaaccaagctcacaattctgggatgactcccacttggtcgtggtgtgtaattctttctatatgttgctg

SEQ ID NO: 488770 - DNA, 201 bp, Homo sapiens
gcttgcaattatttatagcatctctttataatactattttctcgtaaggtaagtaataatatcccctctttcacttctgagtctagtaatttttttcattkgttgttctaggtaaaggtttgtaagtttggttgaccttttcaataaaccagcttttggtttcattaaatttctctattgttttcctattctctagttaat

SEQ ID NO: 488771 - DNA, 201 bp, Homo sapiens
gttacagaggtgaagtttaatatttccaggtgaatgaatgcctacagagaaacttcgaacatcttacttacggtgcaagacttccattcaccatcccctckgcccaatatgcccagtagacctatcattcctttacttatatccctatccctatcttttaaatctttttcatgtttcaaggccaagcttgctttccacaac

SEQ ID NO: 488772 - DNA, 201 bp, Homo sapiens
ttttaggtcatatagcagcaactctgggtactggtctcccacttcttttagagcttgttgttgttatttgcttatttgtttagtgactggattattgaaatctattcccactcccccacagctccacagtaagaagactccaatgttgctcccagggggagtacagcattggataggctcacaggcaccctgcaatggcag

SEQ ID NO: 488773 - DNA, 201 bp, Homo sapiens
tcttttaaatctttttcatgtttcaaggccaagcttgctttccacaacccccttgaagcccacttggaccacatcagtgggacctttccatgaaccactgyattactcacagggtgtctctcccattcctttgtgtccagctttagggcaaagggcctgctggaaacacacaacactcataaagagggcccattcatcaga

SEQ ID NO: 488774 - DNA, 201 bp, Homo sapiens
tttaggtcatatagcagcaactctgggtactggtctcccacttcttttagagcttgttgttgttatttgcttatttgtttagtgactggattattgaaatctattcccactcccccacagctccacagtaagaagactccaatgttgctcccagggggagtacagcattggataggctcacaggcaccctgcaatggcagt

SEQ ID NO: 488775 - DNA, 201 bp, Homo sapiens
gccacagcttgaggcccctcaccatccccgatcagtgactcacacatgctggggaccaaaaaacgttggctaagtcagtgaagtggaactggtggaactcrcccttctagacttgagctgagccaatgcctcctacaacccgggacacattctttcactgtgtaaagcaggatctggaggcataatctgctgcaggaacag

SEQ ID NO: 488776 - DNA, 201 bp, Homo sapiens
cactgcggaaggccgcagggtcctctgcctaggaaaaccagagacctttgttcacttgtttatctgctgaccttccctccactattgtcccatgaccctgscaaatccccctctgtgagaaacacccaagaattatcaataaaaaaataaattaaaaaaaaaaagaaatacaataaaatatacaatcacaaaacatataaa

SEQ ID NO: 488777 - DNA, 201 bp, Homo sapiens
ggtagggttctgtggagcagttgagagctgaatttcattatgtccttctataaatctgggctctcctaagcctgatcacctaggtcagggacttgagctcrgtctgcctcctagaatggataatggacaccggggctcagagcctgttacctgctgtacatcctgctggaagacgcagagctgcagccgctggtggagccg

SEQ ID NO: 488778 - DNA, 201 bp, Homo sapiens
acatgctagggaccaaaaaacaatggctaagtcagcaaaagccaagaaaggtgtgaaagagtatacttggagaagagaactgcactacttaagcctcacamtccatttgggatggactaaaggccacagcccagttgcagagtgaagcaggaaacagctgagaacagaaacaggctaagaagtggccatgattgcaccagc

SEQ ID NO: 488779 - DNA, 201 bp, Homo sapiens
tttaaatctttttcatgtttcaaggccaagcttgctttccacaacccccttgaagcccacttggaccacatcagtgggacctttccatgaaccactgtatkactcacagggtgtctctcccattcctttgtgtccagctttagggcaaagggcctgctggaaacacacaacactcataaagagggcccattcatcagaaaa

SEQ ID NO: 488780 - DNA, 201 bp, Homo sapiens
attgttttatagccagagaagcttctggatttggtggtgggtgcctgtaatcccagctacttgggaggctgaggcaggagaatcacttgaacccgggaggyggaggttgcagtgagctgagatcatgccactgcactctagcccagggaacagtgcgagactccatctcaaaaaaaaaaaaaaaaaaaaaagaagagaatc

SEQ ID NO: 488781 - DNA, 201 bp, Homo sapiens
tgctttccacaacccccttgaagcccacttggaccacatcagtgggacctttccatgaaccactgtattactcacagggtgtctctcccattcctttgtgyccagctttagggcaaagggcctgctggaaacacacaacactcataaagagggcccattcatcagaaaaaagggaagtttgtgggaggaatgaaaaacaga

SEQ ID NO: 488782 - DNA, 201 bp, Homo sapiens
tcttatgtttattttccttcatttgccaaatttagcaatagcatctgatttagagttttaactttcaaaccaccttattatctattgttagtattttatastctaattatagattacattggtattaaatatgttcatattcagctttgatgagctgattaagaggacacaagacaaccaatggcttttctttgcctaaat

SEQ ID NO: 488783 - DNA, 201 bp, Homo sapiens
gctgggatcatgccactgcactccagcctgggcaacaagagtgaaactctgtctcaaaaacaaacaaaccaaaaattttatttttaattaatttttttatktgtataaatttaaaggatacaaatgcaattttgttacacggatagattgcatagtggtgaagtcttggagctttcagtgtatctatcacaccataatagt

SEQ ID NO: 488784 - DNA, 201 bp, Homo sapiens
cagtactttgcaatcacaggttccctaaaggcctgccttaggaactgcagtgttaacagcgaccactggatcatatttatttttgtcagggggtgggggtktgctttttagtggctttgcttctgtctttaggatgagaatcccagaaacaaagatgtttgggatcagtggaacttgaaagatcatgcagtctggtagttc

SEQ ID NO: 488785 - DNA, 201 bp, Homo sapiens
gttggttatccatacagataacaaggcctcactcccagaggcctgcatttttaacaagctccccagagaattctgcaatggtgatccatccacttcagtcygtgctctcctctcctaccctcagcaccagcttcgtgtcactatcttgaattctagtgcgtaccccacctcccccaacaccctgagagtccaatagggagg

SEQ ID NO: 488786 - DNA, 201 bp, Homo sapiens
gagtgaaactctgtctcaaaaacaaacaaaccaaaaattttatttttaattaatttttttatttgtataaatttaaaggatacaaatgcaattttgttacrcggatagattgcatagtggtgaagtcttggagctttcagtgtatctatcacaccataatagtgtatactatacccactaaatttaattagccagatgtgg

SEQ ID NO: 488787 - DNA, 201 bp, Homo sapiens
ttcccaaattactttataatttataaaacaaattataaagtaaaattggttttactttataaactctgattttccctgcactgccctacactatcctccayccaaggcctagggtaagagtagagacacatagtcccagcagaaggcctgtcacacagtagacactcaatgtctgttgatgaatgagtcaatgaacttttc

SEQ ID NO: 488788 - DNA, 201 bp, Homo sapiens
acatagtcccagcagaaggcctgtcacacagtagacactcaatgtctgttgatgaatgagtcaatgaacttttctcagttactgccctgcaccacacacacacacacacacacacacacacacacacacacacctgaagtgtccttcattcttcaaacagggtaccaaaacctttcccctgtttcccctactggggcagag

SEQ ID NO: 488789 - DNA, 201 bp, Homo sapiens
catagtcccagcagaaggcctgtcacacagtagacactcaatgtctgttgatgaatgagtcaatgaacttttctcagttactgccctgcaccacacacacacacacacacacacacacacacacacacacacctgaagtgtccttcattcttcaaacagggtaccaaaacctttcccctgtttcccctactggggcagagc

SEQ ID NO: 488790 - DNA, 201 bp, Homo sapiens
aatccctgttgctttctctgacattatcttttacatccttctcttccttcctctccataggccaatgcttccttcacatccattttctttttctccagttstctttatgcattcagattcatctttaaagaacatgaccagcaccaggctcttatgctcagaagttccccatgacccttgctccctcttgtgtgccttacc

SEQ ID NO: 488791 - DNA, 201 bp, Homo sapiens
gacactcaatgtctgttgatgaatgagtcaatgaacttttctcagttactgccctgcaccacacacacacacacacacacacacacacacacacacacacytgaagtgtccttcattcttcaaacagggtaccaaaacctttcccctgtttcccctactggggcagagctgacatgtctcctttttgcttggaccacctcc

SEQ ID NO: 488792 - DNA, 201 bp, Homo sapiens
aatagctgaagattggaccatgagacagggaagggtcatgaggttcaggctcccatcccatcattcagctaattttctgaaactcttgactgttcctgacwttcacaggccaagagctatcttccatgaccacagactataccataatcctcacagtcacaaaagcctaggcaagaaccataagtaattccatatgaatcc

SEQ ID NO: 488793 - DNA, 201 bp, Homo sapiens
agagacacatagccccaacagaaggcctgtcacacagtagacactcaatgtctgttgacgaatgagtcaatgaacttttctcagttactgccctgcaccacacacacacacacacacacacacacacacacacacatagttcatctctgatcagaccttcttttcacagctcacctcaactgctgcagacagagtcagtgt

SEQ ID NO: 488794 - DNA, 201 bp, Homo sapiens
atcacactctggggactgttgtggggtggggggaggggggagggatagcattaggagatatacctaatgctaaatgatgagttaatgggtgcagcacaccrgcatggcacatgtgtacatatgtaactaaccggcacattgtgcacatgtaccctaaaacttaaagtataataataataaaaaaataaaaattaaaattaa

SEQ ID NO: 488795 - DNA, 201 bp, Homo sapiens
gtatatttaatgtagccagttgattctcacaggatgcttttgacctatggttgcaactgacaaacatgtatagttctgacacacatgctggttgatatttwcactatgttaaggagtgagacaaaggtgaaaagcacctgaatactacgccagaacatcacttgttcatcaaggatgtcagcaacttctttgctgaaccaa

SEQ ID NO: 488796 - DNA, 201 bp, Homo sapiens
ccccaacaagcgggctccacccggctaccattttgacctgcaagctgtgcttcagttgtaacatgaatcaaacactccagcagacagcatcctcagtcacytcccacaccacttctgtccccttggcgattagcgcccaagtggtggagtggaacccgtggcaacacattcccagggataccatttcaagggtgggttgga

SEQ ID NO: 488797 - DNA, 201 bp, Homo sapiens
gagacacatagccccaacagaaggcctgtcacacagtagacactcaatgtctgttgacgaatgagtcaatgaacttttctcagttactgccctgcaccacacacacacacacacacacacacacacacacacacatagttcatctctgatcagaccttcttttcacagctcacctcaactgctgcagacagagtcagtgtg

SEQ ID NO: 488798 - DNA, 201 bp, Homo sapiens
ttattgctccctttttcttgtgccctgcagcttatattaacttaagtttttatttcctcaatctcaaagccatgaggaatagtatttggagatattccaawacagttttcagagaccttgtgagtaacattcagtatcagtaagaaaatagattgtgtcaaagcaatggaaaaagctcagcctcatctcctttctccagct

SEQ ID NO: 488799 - DNA, 201 bp, Homo sapiens
agacacatagccccaacagaaggcctgtcacacagtagacactcaatgtctgttgacgaatgagtcaatgaacttttctcagttactgccctgcaccacacacacacacacacacacacacacacacacacacatagttcatctctgatcagaccttcttttcacagctcacctcaactgctgcagacagagtcagtgtga

SEQ ID NO: 488800 - DNA, 201 bp, Homo sapiens
tatctcatctgacatactaggtttcactgaccatttcatgcctttcattcaactccaggagaccacaaagaaaggcataagtcagctttggctgaatttcrgacaaattaactgcttagcaaatgcagacctgacggagaacaagtagtggccatagatgagtatgtgtaagtgggtgggtcaactgagctacaggtctcg

SEQ ID NO: 488801 - DNA, 201 bp, Homo sapiens
agacctaggggctaacaggtggtgttcagtggtagcagaaggcaagctctgggagcagagggacagcagggttattggataagagcttggatgggctttgsagacagattaaaacactggccctggctaaccaacagtatgaccttgggccagccacttcacctctctgagtttccatttcttcaactgtaaagtagtaat

SEQ ID NO: 488802 - DNA, 201 bp, Homo sapiens
acctaggggctaacaggtggtgttcagtggtagcagaaggcaagctctgggagcagagggacagcagggttattggataagagcttggatgggctttggasacagattaaaacactggccctggctaaccaacagtatgaccttgggccagccacttcacctctctgagtttccatttcttcaactgtaaagtagtaatta

SEQ ID NO: 488803 - DNA, 201 bp, Homo sapiens
aaagtacctgattctggcttcacagaacagctggctcctgccttggcatctaatcactcggtgagcaatgcaggaattctgaggtctaagctgcccttctyagggcaggtcaggccagggtcagacccaggcttccaggccactgggcaaagagccccaagaaaggtcagaagttcccaaaccttgcttaaatcatattca

SEQ ID NO: 488804 - DNA, 201 bp, Homo sapiens
gaccttgtctctacaaaaaataaaaatattagcctggggtagtggcatgcacctatggtcccagccacttgggaggctgaggtgggagcccaggagatccwggttgtggtgaaccatgatcaaaccactacactccagcctgggcaacagagtgagaccctgtatcaaaaaaaaaaaaaaaaaaaaaaaaagtggagggtg

SEQ ID NO: 488805 - DNA, 201 bp, Homo sapiens
tagcctggggtagtggcatgcacctatggtcccagccacttgggaggctgaggtgggagcccaggagatcctggttgtggtgaaccatgatcaaaccactrcactccagcctgggcaacagagtgagaccctgtatcaaaaaaaaaaaaaaaaaaaaaaaaagtggagggtgggggtggagggaaaaatacaagatagtcg

SEQ ID NO: 488806 - DNA, 201 bp, Homo sapiens
tcttgggcccagaagtcataaatgtataccaaatgactggatgattgatcagctgtttcttgtaccatttcctcttttgttcattaaatgccactggggcygttttcacttagtaagcctgtgctatctcagaaaagcactttcaccactttatgccaatgcttctcaaactttagtgactttctttatcacctagaacac

SEQ ID NO: 488807 - DNA, 201 bp, Homo sapiens
ttcccatcctcagggagaaatctctgtagtgcttgtccaccgtggtcacccatttccttatctccgtggcatgaatgtggcctttttccacaaagctatcrgccagctgaatcagaagcttcaccttctcctttgtttgctgccccaaaagatggccttaagttactggattacatttattctcctgccccttcaccccaa

SEQ ID NO: 488808 - DNA, 201 bp, Homo sapiens
ggagatcctggttgtggtgaaccatgatcaaaccactacactccagcctgggcaacagagtgagaccctgtatcaaaaaaaaaaaaaaaaaaaaaaaaagkggagggtgggggtggagggaaaaatacaagatagtcgctttccatactcttccaaatcaaaagataagttcagtgaaattcatccatattttcctcaaat

SEQ ID NO: 488809 - DNA, 201 bp, Homo sapiens
acaagatagtcgctttccatactcttccaaatcaaaagataagttcagtgaaattcatccatattttcctcaaatgtgatatttaaagaccacacaggtaytttatctaaatccttgactctgaccctagtgatgacaattacaaccactcagaattcaccagagaaatcccaatgtagctcacttagcttcaagtcaaaa

SEQ ID NO: 488810 - DNA, 201 bp, Homo sapiens
attcatccatattttcctcaaatgtgatatttaaagaccacacaggtactttatctaaatccttgactctgaccctagtgatgacaattacaaccactcasaattcaccagagaaatcccaatgtagctcacttagcttcaagtcaaaaatagccaaaacattccacttcctcttggttcttttacttttgtccttttcct

SEQ ID NO: 488811 - DNA, 201 bp, Homo sapiens
aatcaaaggtgagttgtctctgtgtatgctgatgcttctcatcatcaccatgatcttgggagaatacctgaccagctctacctcacccgcacataggcccyctgacagtgccggtttgcatactgatatttaaatcaaacacaggactaggtatttaaacaaattattacagtggcttttcatacctactcgaagactgag

SEQ ID NO: 488812 - DNA, 201 bp, Homo sapiens
aagtatgacaggtggtgagaagtgctacatcaaaacacaaagtacgggaagggattagggagtgctggggttggaaaagggggtgcagattgaacaggtgrtcagggccagtctcatgacatgacatgtgagccaaggcctagtggtggtgacgccatctggcgaagggccttctgggcggaagagcaaacacaaaggtcc

SEQ ID NO: 488813 - DNA, 201 bp, Homo sapiens
aatgaaaagtatgacaggtggtgagaagtgctacatcaaaacacaaagtacgggaagggattagggagtgctggggttggaaaagggggtgcagattgaasaggtggtcagggccagtctcatgacatgacatgtgagccaaggcctagtggtggtgacgccatctggcgaagggccttctgggcggaagagcaaacacaa

SEQ ID NO: 488814 - DNA, 201 bp, Homo sapiens
ccacttcctcttggttcttttacttttgtccttttcctcagactttagaaggaggtatcctttaaatcctgcatgactggaagtcagatggtcaagtcccyttgccttgggaaccacagcagtgggctctgagtcattgcttcagagtcaagctactcaagccgcaggagacagccaagttctccctgagagagaagggat

SEQ ID NO: 488815 - DNA, 201 bp, Homo sapiens
agagtcaagctactcaagccgcaggagacagccaagttctccctgagagagaagggatagagaccaaacaaccggccgcctttatctacaaggtggagtgkggaggttgcctttccattgtattttccctaagaccagaggaactggttcaactgaaaagggaggcagtcagtcccctgcagtgcacaccctccacttgag

SEQ ID NO: 488816 - DNA, 201 bp, Homo sapiens
cttgtgacacatgtggatgaccctcggcactgaggaaaaaagaaactacgaagttcctgatggaccatccgcatagtgaacaacaattatttggcatcccraaaagtccaccaatcctggcctcacatcatgatacccatggggaaaaaaaaaactataaaacttcaagaagaaaaatttttatagtcttagggtgggatg

SEQ ID NO: 488817 - DNA, 201 bp, Homo sapiens
aaatatgttgtcacatttgtgaaacttgagtgattccactctttctgaggagggccactaggcagagaattctttagaagggagagtctgttctcacttgkctcatagtgtctctctacttctttctcccttttctggggccccatggcaggctcagctccagcccagtgacatacaccaaatggaatcgcacatctccct

SEQ ID NO: 488818 - DNA, 201 bp, Homo sapiens
ggcaagtgaaggcaatacaggaggtagcatagttgctggtatctgcaaaccaaagtgaagaccgtccacagacatactgatctccctcaccctgccccaamaagcgggctccacccggctaccattttgacctgcaagctgtgcttcagttgtaacatgaatcaaacactccagcagacagcatcctcagtcacctcccac

SEQ ID NO: 488819 - DNA, 201 bp, Homo sapiens
aaatcccaaactttatactataatttttttaaaatttattttatataatagttgtacatatttttagagtaatgtgatattttgatacctgtatgtaatayacaatgatcaaatcagagtaactgggatatccaaaccttgaacctttctaactttataaacttgcaaagtttcatcagagtgacagctacagcggatgaa

SEQ ID NO: 488820 - DNA, 201 bp, Homo sapiens
ggtttggggcatttcaagagaaagcacaagaaaatatgaaggttgctggtgaggctctggtatagaacaacagggaattgttctgtgatggtgtttcaaaygggtgtgtgttcaaactctttattagacaagaggcctggtccctttagtaaagtgatcttgtgccaaaagccaattaaataactctaataggtatatata

SEQ ID NO: 488821 - DNA, 201 bp, Homo sapiens
acatcagaacagggagagattttgctcattaaatcattagctttagctttagaatgtggaaagtttcctggctaatcctgctacacatgggaatctggccytcaaacagtgaaagaagcccagggcatcaagagttcagttaaactcagagactggtcagcacattccctctcttgggaaactcctgggatggggcaatat

SEQ ID NO: 488822 - DNA, 201 bp, Homo sapiens
gatagaagaacatgttcaagagatctattgtacaacatagcatctatagttaacaatatatgtattcttaaaaaatcctaagggagtaaatataaagttcyctcaccacaaaaatgataactatgtgaggtgatgcatctcttaattagctatacattattcttcaatgtatatatatttcaaaacaacatgttgtacata

SEQ ID NO: 488823 - DNA, 201 bp, Homo sapiens
atatttttttatttttaattccattttccataaacttttcaaagtgctgtcatatatagacaatggaatactattcagcaataaaatacaataaaatggartactattcagcaataaaaaaggagatcctgtcatttttgacaacatgaatggacctagaatatgttatgctaagcgggatatgccaggcacagcaagata

SEQ ID NO: 488824 - DNA, 201 bp, Homo sapiens
catccatttccaccctgtggagtttctctactgccacagtcagggggccatgttccacccccctcttggagaaaggcctctcttattgttagtcctcagtkactgaagggtttttttctctctgctaactccagagactgctgaacacttccatagacatctctgagaattgcaattagatctctcctgcccccttcctgc

SEQ ID NO: 488825 - DNA, 201 bp, Homo sapiens
accggccgcctttatctacaaggtggagtgtggaggttgcctttccattgtattttccctaagaccagaggaactggttcaactgaaaagggaggcagtcmgtcccctgcagtgcacaccctccacttgagagacagcctcaagactctcccctcagcccttttgggtgttgcaattgggcaagcctcttcccaaagagtc

SEQ ID NO: 488826 - DNA, 201 bp, Homo sapiens
aagatcacaaggtggaatggttagcctcagatgaattctaacgtcaggatttcccacaagatttaatgaggagaagctacttttatttcttcaaagcctgytattcattctggctgaataaatgaggatgttgaggagagatggggaggagcactgctgaatacttgactttactctccactaggactttcggacaattat

SEQ ID NO: 488827 - DNA, 201 bp, Homo sapiens
cgcctttatctacaaggtggagtgtggaggttgcctttccattgtattttccctaagaccagaggaactggttcaactgaaaagggaggcagtcagtcccytgcagtgcacaccctccacttgagagacagcctcaagactctcccctcagcccttttgggtgttgcaattgggcaagcctcttcccaaagagtccacgga

SEQ ID NO: 488828 - DNA, 201 bp, Homo sapiens; identical to SEQ ID NO: 33550

SEQ ID NO: 488829 - DNA, 201 bp, Homo sapiens
cccaccttgccacccttcttttcccttttaaactggtctcattgcttggacctctgactccctcagtcttcatctgagggtcgctagccttttcagctccsgctcctacgatagccactcgcacgcctcctctcctagccacggagccagcagccactgccttcacaggccctaggcaggaggcacttaccaggccctgga

SEQ ID NO: 488830 - DNA, 201 bp, Homo sapiens; identical to SEQ ID NO: 195847

SEQ ID NO: 488831 - DNA, 201 bp, Homo sapiens
ggtagcttgaaatctgctatgataggagtatttacacaatagaaatcagcaaatgttacaaacaccacaaccagggcttttattcttccctggaaacattrccagcacgtcactgactatgccttcctatttggaccagtatggcaaggcaacactatgtcctgatgctgttttgttggaatttcaggaccaataataagg

SEQ ID NO: 488832 - DNA, 201 bp, Homo sapiens
gaacatgcatcttggtaggatgctctatcaaaactcacccacaagaggtactaaaaaaccaaatccaataatagatgatgccttccagtggccatcttgtmtatcttgcctcactccacccacctcaaacagctgaaacagatcttgacattctctaaagcttctacaattacccatctgatgtgtgttgctgtacaggct

SEQ ID NO: 488833 - DNA, 201 bp, Homo sapiens
ccaatttaggactccacagatcccagggaggacaaaatgtgggctgttcaacacaaatccagaaactctttaggatgcaagagtccaaggagccagaggtytaaggcattgggaaagatctttctgcatttctggggtggtgtggagtgtgtgagaagttgaggagaatgggctctggagccctggcagggagaattcttg

SEQ ID NO: 488834 - DNA, 201 bp, Homo sapiens
tgtgttatttcaagccgttaagttttggagcaatttgttacacagcaataaataactaatacacttcccaaaaagtcctctctctaacctccaaatatttrctgccctattgttttaatttctgaccaactaatgtcttccagcatccacgtttgtatttaattcccttcggataattttatcttgtatataattttcatc

SEQ ID NO: 488835 - DNA, 201 bp, Homo sapiens
atacgtaataatcaccctgtccattctcacacatctctacttgctggagactatttttctttatatctaaaatgctttagcaccttttcctataaaaggcwtatttttagaactccacattttttttaaagtaaagttttattttcctacagtccaaccgtgtgtgtttaggaaggtacatgggcctagaaattctgagaa

SEQ ID NO: 488836 - DNA, 201 bp, Homo sapiens
aactcactataaaatctccagctcttctgcttctttattactttgaattacattcattcttgggcctttggtttttaaattatgacattgtaattgtgcaygtgcaacagcctttttttttcttttgcaatacactccttttgtgtgcatgttgtcttctaaggagaattgtattcactttaaaggaaagagtccatctta

SEQ ID NO: 488837 - DNA, 201 bp, Homo sapiens
atatcagacgtagtagattgcagagtgaataacattaccaggaaaaaatgaataatattatcatttgataatgatcaaggggtcaattcatcaagaggatrtaataaccctaaacagttatgcttctatcaacaaaagttcaaactatgtaaagactgattaaacccacaaggagaaatagagaaatccataattatagtc

SEQ ID NO: 488838 - DNA, 201 bp, Homo sapiens
gtacaaagacacaagtagggtaagagtaaaaggacagaaaaagatacagcatgataacactagccagaaaaaaagctgggtggctatattaatatcagacrtagtagattgcagagtgaataacattaccaggaaaaaatgaataatattatcatttgataatgatcaaggggtcaattcatcaagaggatataataaccc

SEQ ID NO: 488839 - DNA, 201 bp, Homo sapiens
ataaaaaaaaacaaaacctgggaattctgtgcccagcacaagtattttcaaaaacaaaagtgaaataaagactttttcagatatacaaagatgaaagaatycttcactagcagatttgcaagacaagaaatgttaaaagaagtccttcaggaagaaagaaaatggtatcagatggaaatacagatccatacacaggaatca

SEQ ID NO: 488840 - DNA, 201 bp, Homo sapiens
caagtgctgtggctggtatgcaataggcatttactaaatgtttgttgaacaaacaagacacaaatgagtaggcctgtttgaataagttgagtcaacctgaytaaaattggagagtggcaaaaaatcaggttggataagtcagtgaagagctataagatacattttatagagagaatggaacaataaagacaggtgggaagg

SEQ ID NO: 488841 - DNA, 201 bp, Homo sapiens
tccacttcttgggaaccctgttgtctggtttttacggcctaagtgtgcacctctgagaccctccacaaacctacttgttatggaaatcgtagatctcttgratgttgccaaagatgatatgctctttattgaggatcccaggggggatctcctccacaccactggtcatttcccacaggtaggtctgtaagacagtaacag

SEQ ID NO: 488842 - DNA, 201 bp, Homo sapiens
acagctgatgggagagaggtattttaggaatccctcaaattgtccacctttaatcctaaagagtctcaggattccccccgcaagaaccctagagattgtarctttatattctgtagacaataaataaaaatttgtggcaaagtcaaagtgagcttgcttgcaaattaggtttgggaccaataagagataaataaaaagcca

SEQ ID NO: 488843 - DNA, 201 bp, Homo sapiens
tgtctggtttttacggcctaagtgtgcacctctgagaccctccacaaacctacttgttatggaaatcgtagatctcttggatgttgccaaagatgatatgmtctttattgaggatcccaggggggatctcctccacaccactggtcatttcccacaggtaggtctgtaagacagtaacagtttcatcactggcaagtctgg

SEQ ID NO: 488844 - DNA, 201 bp, Homo sapiens
tatttaattaagctgtctaataaagagcagaggctggttactttggccatgttccttatttaacttgacttatatttatactacaaaaatatctaaaaacrggtattttgaaagcccagtgactacagcatttccatggaaacacagcaaggaaagagaattctgtgatgacaatttctgcagggcaggtgctacaaatgc

SEQ ID NO: 488845 - DNA, 201 bp, Homo sapiens
tctctctgcaccttggctttctttatcagtaaaatggggataataacagtgctttcctcacagagagttgtgataaagattacaaataagttgatatatgkgtgtatacacaaatatattatctatcttacttatcaacagtgtctgacatatagtcaatacttatcagtgctacatattattacatttaaaatatagttt

SEQ ID NO: 488846 - DNA, 201 bp, Homo sapiens
atcattactcaaaacctgaaaagcaatttatctctctgtgtcttgccactctctgagcatcccctctttgttccttctctttccacccctctcctaagagraaggaaggaggtgccataggcaggaggactggtctggaacaatggttgtcaaacttgactgctcattagaatcctttggggagtgtgcaaaaataccaat

SEQ ID NO: 488847 - DNA, 201 bp, Homo sapiens
catcaggaaaaagggagagccatgcatttcgtagtaaattagagctaataatgaaccaaagccagcaacttttaaagcctttaaaagcaccccaaaacctyacctcctcatcctctaatttaatttaacctgcttctgatcatgagcagctttccagaaaaaaatgtaataggactcttgcttggtgtggtttttgctatg

SEQ ID NO: 488848 - DNA, 201 bp, Homo sapiens
taactgaaccttgctttgcatcaaaagaaactgagatcagactggaaaaatgacttaaacacaaggtgatacagttgatggttaagcttgagttggagccrggactcctagcttctcctgcttgtctccctccacagtttgggtcagccaacttcggcttgacagtgcataccctgacttttggcacgagcagctgcttta

SEQ ID NO: 488849 - DNA, 201 bp, Homo sapiens
gcagcctgacagggcggcctttccccagtggcctgaactgcacatcccttctctcaccacctggtggagctagcgctctgccgtgcagccatggatcaacmccccccttgtgtttcaaggggttgtaaaatcaatttatgggtggcaaccagaattttaaaaaagaggaggaggaagaaatagagcctaacacaaaatacc

SEQ ID NO: 488850 - DNA, 201 bp, Homo sapiens
ctggctcaggattaaagagagataggcagttccattcctgtgagcccttaccctgtagggagatcctccctgacccagtaagccaaatccaccccatcccyaccctattatcaaaccacagagagccaacaagcttagtaaaatgcagtggtttccattctttaagcatggactctccatagtcactccaccattcccctc

SEQ ID NO: 488851 - DNA, 201 bp, Homo sapiens
ttgcatgacaatgtgctctgaccttaagaaaggcctccttttgttccaaatgtttgctgatgaggggaatgacatggtcgatctctgctgctggccccagyttatctcgtccaccacaccagtcctcatctctccggtattcttgctctaagctctccaggacactacacacctagtgaatcatggaagaaaagactcagt

SEQ ID NO: 488852 - DNA, 201 bp, Homo sapiens
gaaagctacaacagccctcagcaggggacagatgttgcaactgagtcaacagtgacttggccaaggcttggtcatgcagaggtgaaagcaaatatccaggmattaaacatcagtcaggtggcccaggagcaagatgacatacagggaagtttggaaggagaaggagagaacttggaagttggctcagagcaagcctgtagt

SEQ ID NO: 488853 - DNA, 201 bp, Homo sapiens
agagaaaacacattttctaagtgtatttaagtctttagggaagagatgatggattctctgaaaaaatattgtacagagaggcagagtttcaggggccaggyacagtggttgacacctgcaatcccaacactttgggaggccaaggtgggcagatcacctgaggtcaggaattcgagaccagtctggccaacatggcgaaac

SEQ ID NO: 488854 - DNA, 201 bp, Homo sapiens
tcaagatgataaaatgcaactaggtattactggccagacaactttaaaagagcaaagtatagtgttttgaacaaaataagcactggaaatgatgaggagtyaaaactgaattactgaaaaatcatttattgatagcttttcctcatcatactgaatacaggtctccagtggcctgccagagagctcacttttgactacttt

SEQ ID NO: 488855 - DNA, 201 bp, Homo sapiens
ttccgtctaccggtcacagggctccctattcctgcctcctcaccctggcctgtttgttgtgatacaggcacaatttctactcccacaactgcacggacatscccaggcatgaaaataacatgagatgtactcagtgctatctgttatgtatttgttgagggctttgctgctgggaggatgtgattattctcttggacttct

SEQ ID NO: 488856 - DNA, 201 bp, Homo sapiens
tggcgtaaggctaatttgtcaagcacccttccgtctaccggtcacagggctccctattcctgcctcctcaccctggcctgtttgttgtgatacaggcacartttctactcccacaactgcacggacatccccaggcatgaaaataacatgagatgtactcagtgctatctgttatgtatttgttgagggctttgctgctgg

SEQ ID NO: 488857 - DNA, 201 bp, Homo sapiens
caaagagggaagctcttcttaagcagaccacgcaccctaccctgtccatggtgtctccaagcccataccccactcctcactccaagtcggcttgggttccrttcctagcctcggactccagagttatatttctctgccttggcaagatgacatttgttaaactcttcactcactcaaaggctaatttctgcatggtcagaa

SEQ ID NO: 488858 - DNA, 201 bp, Homo sapiens
aaattgtaagtatgctctttataaagctatgctaaagttatgggctggtgttattatactaaacaggctcaggctatacttaggaaagcataggatctggrgcctgcaaacctgaattaggtctctgctctgatacatttaggctggtggccctgggaaatcacctctctgagcctcagctgccttatctgtcaagtggac

SEQ ID NO: 488859 - DNA, 201 bp, Homo sapiens
gatgtagcattctccccaagcttttgggcctcccccacaagacaagggaataagaccccttgtaaaatccggacgttatagcctacaccagaggatgcagsatcctatcatgatttttctctccctcattttatgaggccctcacactcttgctctcctgcataccaggttgtccagtacttagggtgggacgaggaattt

SEQ ID NO: 488860 - DNA, 201 bp, Homo sapiens
agtgcacgaaaaagagagctcctcggggaaggggggaaggtaggagtgtcacaactcagtggctgactgtggctcatttgttcattgctttcagcacattycaaattattgctttttttcatgtgtccagttaaatagatttatctactatctagttttaactaaactaaccttcacaaaaagacacgtggtttaacgagt

SEQ ID NO: 488861 - DNA, 201 bp, Homo sapiens
attgtatgatgattctctgtttctgtgtctccctgttatgtcctcaatgtccaacatagtttttgctacataaggaggtgctcaccaaatgtttactgagytgaatttctatataggtaaaaggctgaccgaatggtctctttctaatataaaatgctaagggcctctgtgtgcaactaattgaagagttgagaccaccag

SEQ ID NO: 488862 - DNA, 201 bp, Homo sapiens
tttgcaaccatatgtggaatcagaatctcacctctctgattcctcacctggttctctctgataagtcatcttatttgaaataggttattcagcttgtgtcrtaatttgatccacggggtaaaacaagaagatgcttgatgttttaggtaaactaaagaattatcctctcttaattcctacctctcagccctcagcccccta

SEQ ID NO: 488863 - DNA, 201 bp, Homo sapiens
gtcaataagaactaaatgcacattaactgagcataacctgtacatattccatactattttgttctttttaaaattgctaaattggttagaaagctgaatgytaaagatgtggcttatcttaatttcaataaatatacgagacattttcccataatattcaagatgataaaatgcaactaggtattactggccagacaactt

SEQ ID NO: 488864 - DNA, 201 bp, Homo sapiens
gtcctatagtcgagacaacccccagtcctgtgcaattcttaccctgaatgcttccacctcccacttcgggatcacagattgactctgacactgctctctgrctttccaccttgggtttgctcctgcgaagttgcacatgtggcagccccagcagggagggagtgcacattttacccagcctcaggctaggaggccaggtct

SEQ ID NO: 488865 - DNA, 201 bp, Homo sapiens
aggaaagggtaaaatcaggatttgaatcttgttttgtttgactccagtatttgtgcataaaactacaattttttttttttttttgcttcatagatgcataraacacttgatcttgaagaaacattcatgcttcttcttgctagctcctcctgttagaactgagggtagaaagtttcagaggtgggaagtgacttgctctag

SEQ ID NO: 488866 - DNA, 201 bp, Homo sapiens
tttcaaacatcatcttatctatgaagtaagtgttgtgaatatggctaaagggatttcaggtgtcttgcctttgttccctgtgtggtcctggtgaggatgcygcagtttcagagacagcagtagtaaacattgggaattcagagtgctagaaggaggtactggtgtcatctccatcatgggcctcctctcactcatgaagaa

SEQ ID NO: 488867 - DNA, 201 bp, Homo sapiens
tggctagaatataaatgtgtgagctggggtgttcacttgaatgcatgaggtccccctgccatgtagggctgagctagggagtggagagagaaggcaggcasagcatgagtggaggctggtctactgtgctgccacatttgggcctgggagctcaaaggagtccaacaaatctaaatttaaatttggcctcctaggttgctg

SEQ ID NO: 488868 - DNA, 201 bp, Homo sapiens
ttaggatggtgccatacacagactgttctgtgtaagtctaagctgccataggagatgtcactggtgtccacccagggtccctttactaaccactatgcctkttctccagttccaagagttttggagctatcagctgatgcctgtaaccatctctgaatacttgctttagctgatgcctacgcttctccaagagaaacctgg

SEQ ID NO: 488869 - DNA, 201 bp, Homo sapiens
gattcagccctgatgaaaaagtgtttcagcaccaccaccactgcccagcgcccccactcagggcagattcatacagattaactcagagttggacctttcayaccactagccctggttctttgacgtgataaccacccttgtctcatctgccttggaaatggtccccatctctccattgccttccacatgaggaaaaggaag

SEQ ID NO: 488870 - DNA, 201 bp, Homo sapiens
tgatttagaggaggtacaatacaagtcccagtatttaaaccccaaactgtaagtactttattttgtgatgaagtaaaacaatttctcaatccaaaaggtakctatctttcaacccctttctgagttactttctgggccttcagcctatgggagactcctcagaaatgcagagaccctcaagcagtaatcatacttatggct

SEQ ID NO: 488871 - DNA, 201 bp, Homo sapiens
gcctgggcactgtcatttaaaaaaaaagtccccagacagactgcaaggtgagtagcccttcctgggactacacagagcactagctgcatacctgtgaatargcctgggtttcagctgcacacctgtgaaacaggcctgggtctcagaggcagtctgttcacagcacagatgaaaattcaaggacagactatgctgacaaaa

SEQ ID NO: 488872 - DNA, 201 bp, Homo sapiens
ctactccaccctcctcattcagccacaaacatccctgcttcaggagcagagggtggggtggaggtgacacaaagcaggcagaaacaaaccctgagtgtgaygggtagaataatttctgaagtttacaaggcacacctgtgagcctctctgcgtagaccagtctatcctaggagaaagatgggcaggaaaaggggagccctg

SEQ ID NO: 488873 - DNA, 201 bp, Homo sapiens
gatgacccctgacccttatctttactttctggaaatgcaatttaagatccatctgcagaagcagacgctctttctcacttccagtcttgatgcggatttgytgtagctcatattcattctgtatgtgtctctggtgttcaggatgctgggcttgggcaaaatgtctttctttgtgagcctcatggctcacctctgccacac

SEQ ID NO: 488874 - DNA, 201 bp, Homo sapiens
agcagtgtcaagaaatggtttataagattggtacggttcattgtttaccctgtccaatgctctgtaattcttgattagagtgaaatgttggtagacaactccctaccaaacaaccaaagaagaaaaatgtgttttgcctacctggagtcaggacttttctgaaagtggagctgagatacttagagagcaaagcaggaatct

SEQ ID NO: 488875 - DNA, 201 bp, Homo sapiens
cacagagtaattaaaataagcaagaaggtaaaggctctgtgtgtctaattctgcactcagctgagggagatgtgatggatgaaccccaagaaatgggcatsagccaagcctgtttccagaaaagcctttcccttattgtgagaactggtattagacaaagtaataatcattttcagttgaatcttgtgaaaaactgaattt

SEQ ID NO: 488876 - DNA, 201 bp, Homo sapiens
gtccaccatttctctaggggtgtttgggctatctatcttagatataaagtcctacataaaccctcagaaagaaaataagttgcatcaatcaatttcatttrttctgagtccattaacataatttttagtctaacgtctgtgccttcctttcttttcagtacttcagtttaatataattttggtaaaacttaaggttatgat

SEQ ID NO: 488877 - DNA, 201 bp, Homo sapiens
acttaggatggtgccatacacagactgttctgtgtaagtctaagctgccataggagatgtcactggtgtccacccagggtccctttactaaccactatgcstgttctccagttccaagagttttggagctatcagctgatgcctgtaaccatctctgaatacttgctttagctgatgcctacgcttctccaagagaaacct

SEQ ID NO: 488878 - DNA, 201 bp, Homo sapiens
gaaggaacatgatcaggtgattcagacagattaccctccaactgtgcagaaggagggtaaactggggtcagcccaaaggagtgtgtaagagtagaagaagkgtctttgctaaaatgactcttcaaggaagtcttccatggacaaccctatttaaacctgtaactgtcacccggcactctttataccccttctctttatttt

SEQ ID NO: 488879 - DNA, 201 bp, Homo sapiens
ctaggtatgtgtggggactagaggagcaaagagacagtaaaatgagtttagatgcatccttaggaagtaggtagagggaagtgtagacacgcccttccccmtgcggctccacctacctttgtagcagccctgtctccactgctcttcattccctacactgcagccatgttgaatgttgcatgcctctcctgctgtgatgag

SEQ ID NO: 488880 - DNA, 201 bp, Homo sapiens
ggctacagagacatgttttccagggacaggcagtgacaccaggccagcaacagcccatccactccagagggctgatgcccatccggatgttcagcagttayttgatatcacaacatggatgtgttcctttctcttcgatgttccttcttctttccttggcactgttctttctccctctcttcacccaccccaacttgaaaa

SEQ ID NO: 488881 - DNA, 201 bp, Homo sapiens
agaaacaatgagaaagaataagaagggatgtttaactgcttaaaacctggaagcaaatatatatatatataaaaaagaaaacatattatgaataataatamcaatgctgactactatgtattaagtgctgattaactgtcaggagctttgctaaacatattatgtgttaacttattaaatcctcacagtaacccaataggc

SEQ ID NO: 488882 - DNA, 201 bp, Homo sapiens
cttcttgttttcttcttcttctaaaacaaaaacaaaaacaaaacaaaaaacaaaacccataattcagttttcttcacttcacatgagccttttaaattaawcatatatttttttagcagaccaagaaattttgtgtttgtggccttagataaatgccaggcataatttatccttgcaagaaaacgcactgccttcctccag

SEQ ID NO: 488883 - DNA, 201 bp, Homo sapiens
tttattatggggcaggcaatgtgttaagtgtttgatcaactttatttaatcctcatagcactataggaggaaatgaaagcacagagaagtcatatagtttytcccatggtctcagagctggtggtggtagagctgagcatttaatgaccaagtccaatgctcttaaccatggtgttacaacaatagggctgctccaagaat

SEQ ID NO: 488884 - DNA, 201 bp, Homo sapiens
gtccccagagcaccttataaccactccaccatccccttctcatccaaaagttagattttaggcaatacaggttaagaattaataactaacacttattgagsctttaacatgcgtaacatcacctaatccttacaataacactataaggtaaacataggatattattggcatcttacagatgaggaaaccaaggcctagaga

SEQ ID NO: 488885 - DNA, 201 bp, Homo sapiens
agaaactggaaccctcacaaactgctggtgagagtacaaaatggtatacctactttgaaaaacagtttagcagttcctcaaaaagttaaacatagtagaamtccatataacccaaccattccactcccaggtatgcacataagggaactgaaacatctgttcacgccaaaacttgaatataaaggtttatagcagcattat

SEQ ID NO: 488886 - DNA, 201 bp, Homo sapiens
ctttcagagagctctctccattggttcctcctgttttcttggtcttccccagtatttatgtgtagagaaagctatagtccctcttccccagatgttttgawctgtatctgcctgaatcaaaattcacctgcccctcccttttttttttccccacttcctatggtctacccacttcaactctttatcacctgcaacattgga

SEQ ID NO: 488887 - DNA, 201 bp, Homo sapiens
ggaaacatatcccagtcacaagcaggtacacaggtacagcctgaagctgaagtttcccccagggccttgggccacacttcaagagaaatggaagttagtcrtcgactctcttccaattcaacttttgattatcctctttcaaagcccagatcctcacatgcatattctatctccgtaccctttcaaaacctgccttcctaa

SEQ ID NO: 488888 - DNA, 201 bp, Homo sapiens
tccttccactcagttacttccacctcagttccccacttgctctagtggcctctgtctcccccactctcctgaattaactgcagttaggaaatgatgacttytttgacagatacattggcaatatttctattctaacaattgtctactctagagacatcaataagggaaatcagagaaagtgccaaaataaaatttaaaaaa

SEQ ID NO: 488889 - DNA, 201 bp, Homo sapiens
tcaattagtctgatttgtgtgtgtttaatgtatactggaatttaaattattctctttcctaagtattttctgtttcctcaaggaatgtttttttcattagrttcttcctccccaccttctttctggggcataaggctggaagacaatagaggctcattttttaaaaagaaaaatagttgttttcaaaccttaagttgacct

SEQ ID NO: 488890 - DNA, 201 bp, Homo sapiens
gactcacgatggtgagaacattttcaaatgcttattgaccatttgtatatctacttttgtaagatgtcttttcaagtcttctgccctttttaaaatactgmgttaattaacttttcattgtagatttgtaaaagttctaaatatattctagatgtaagttctttatcagataatatatgtaaaatagcccaaatcacaatt

SEQ ID NO: 488891 - DNA, 201 bp, Homo sapiens
  misc_feature (1)...(201): n = A,T,C or G
gacagatggggttatttaccctgccagagagggataaagttcttctactaactgcaaagactttgtctaccatcccacagttgttgctgttacaattttcntaactaaagaggtcctcagaaattaagtagtatttcaaaaacagaaactgagggctagaaaaacctggtgaatggcccaaagttacacaatcagttaaag

SEQ ID NO: 488892 - DNA, 201 bp, Homo sapiens
ccctcacacagacagatggggttatttaccctgccagagagggataaagttcttctactaactgcaaagactttgtctaccatcccacagttgttgctgtwacaattttcataactaaagaggtcctcagaaattaagtagtatttcaaaaacagaaactgagggctagaaaaacctggtgaatggcccaaagttacacaa

SEQ ID NO: 488893 - DNA, 201 bp, Homo sapiens
ttctaaatgctttgattcagaaagcaaatactcctggtcactgtctctcaggccagaagaaatgtcagcagacatcttgttaatttttcatcctcaggcasactaagataataattaacatctgtatggccctttatagtttataaactatttcatagacatcatctgaccctcatagatctcataaggttggcattatca

SEQ ID NO: 488894 - DNA, 201 bp, Homo sapiens
ggcctcatgacactttatctaaggagccagtgtccttgacaggggcagagaactagatattgatgccaatagaaaggaggcaatggcctgggtaattctaracaaatgaaaaattttagacaggatttgtctccttagttatgtttgtttaggttgatgcagaaggagttttattttctgggcagcaaggaatggtaaaag

SEQ ID NO: 488895 - DNA, 201 bp, Homo sapiens
caggccttgcaagagacgagactggagtggatgcaggcttcaaatcagaatgcacctcatatggcaaggcaggagcagtggatttgtcctaaaggcactgwagggtaagattcagagaaggaacatgatcaggtgattcagacagattaccctccaactgtgcagaaggagggtaaactggggtcagcccaaaggagtgtg

SEQ ID NO: 488896 - DNA, 201 bp, Homo sapiens
ttgctgtgaagatatatttgtcaaggtagaaggacagaacatgttttatttaacagtttgttagcttgctacattaatttcacatattcagacaaagggtrtgtgagcttccatttgtactcttgccctaggcaccacaatgttagaatcaggccttgcaagagacgagactggagtggatgcaggcttcaaatcagaatg

SEQ ID NO: 488897 - DNA, 201 bp, Homo sapiens
cacaggaagaagcctcagatgtcactgagaccagtggctgtctaccctgacagaacaatgaaatcactcagggaactctgatacaatactcactcctacawctcagacccagagactttttaatgtcattgatctggggtgaagcttgggcatcagcgtttttcaggttccataggcaattccaacgtgtggctagggtga

SEQ ID NO: 488898 - DNA, 201 bp, Homo sapiens
ctagagactgtatagtagctgattaggccccgtggaatgcagactagccctagaaccatactgtagtgttgggagagacacaacagtgagtagaaatagamaaacttagcttctgcagtggctctcagggtgtctctgctcatgactgggatttgtggacattgccataggtaccccccttcatttttaaaggggtgaatt

SEQ ID NO: 488899 - DNA, 201 bp, Homo sapiens
gtaacactcagatctagaagaatcatcctctcttgtctagtctcattggttcactctaggattgggctatcagcatggctttagaaagccaagtccacttktatctcaccttcctcaggtacactgttaaaatcatcatcatcatccagcagaaatgtaggtgtcaggcacacggctgctctagagactgtatagtagctg

SEQ ID NO: 488900 - DNA, 201 bp, Homo sapiens
ctctctacccttccagcactaccaaagaccctgttgcctcagctccttcctttctgggttgagacagatattcaccatggcccttggatccttctctcctkaagtggttgataagaacgggtttctgaagatactgcccagaatatgatgatttatcgatgctgacgccttctaatgcctgccagttcatgtatttattat

SEQ ID NO: 488901 - DNA, 201 bp, Homo sapiens
aatttgggatgctatttgggaatgtttggaaggagatgaacatagggtagctagggagtcagttgtgaaatccaacacttatttttcaggccagaaaaagraaaaaggtacatatgttaggtccaaggagaacactccctctggccccaaaagagacactccttagatcccccccttactgcccatctaatagcttccaat

SEQ ID NO: 488902 - DNA, 201 bp, Homo sapiens
tcatttttgacaacatgaatggacctagaatatgttatgctaagcgggatatgccaggcacagcaagataaatactgcatgatctcacttatatgtggaakctaaaaaagttgatctcacagaagcagagagtaaggtggttaccaggggctgggataattgggggtggtgaggtggggggtcttgaggcgggggagttgg

SEQ ID NO: 488903 - DNA, 201 bp, Homo sapiens
agaagaacccctgggaaaaagagctcatggtatccccaaatcccatttctctcttcctcccatccaaatccatcatacaaacaggtaccaaggggtgcttkcctctctgatgaaatggccagaacatatccaaatgccgataatggccactttgaagactgaagttacacttctacctctacataactgttcttccaacct

SEQ ID NO: 488904 - DNA, 201 bp, Homo sapiens
ggccccaaaagagacactccttagatcccccccttactgcccatctaatagcttccaattgttcagattatcctgttctaaaatgaaaactggcttttttwaaatttatttatttaggatatatgccccactttcaaacagaatttgacgccagtcttatttattgaacaaatatacattagagcctttttagtctttatt

SEQ ID NO: 488905 - DNA, 201 bp, Homo sapiens
ctctgagtgccttggagagtcccattctgggctctgtccctctttttgcacaccccaccccctccaccccaggagccaagatgactcacccacatacagtstgtgctgcacatccctcttccccttctaggccaagctcctagtatctgaaaccctaatactctccgcccaaaggacccttagcctacttcctgggcccat

SEQ ID NO: 488906 - DNA, 201 bp, Homo sapiens
tctgtgacttgagtttcctagccttcaccagacaagacatcccattaacagaggcaatccaaattccactggctttggcctgatcttcttcctcatgttgyacctcagcccctgaaaagtttcatctcactatgtccaggagccccactcatatctccccatgctcattcctgctcacaaagcattgtcagccgtacctgc

SEQ ID NO: 488907 - DNA, 201 bp, Homo sapiens
tggaagcttttaggacaccaaaattgttaaatttcacttggtttacctttgtttgtcctgcctgtctatgtatagatggcattccatcactagcattaatmggtattttctggtatgtttctctctctccatttaaaggggaaaaagaaacacacactatttgggcacccttgtttcctagcactctgtgaggctctatta

SEQ ID NO: 488908 - DNA, 201 bp, Homo sapiens
actgtatttcagagttcatcatcaataaaaacaaaaattgacaagtttctccttgaggtgcctagggttaagtcttggttctctacacaattaagttatayagaccccaaggacatgaaagaaatgaagggtgacagtagcacaaattagcaatataatgctgaggtcatacttggtaaaggagtgaccagggcaggaggg

SEQ ID NO: 488909 - DNA, 201 bp, Homo sapiens
ctccagcatgagagaaaggatgagtattctccccaatcctgcatcccaaaggaaaggagttgcctcttcttccctgacacttattgaaacaatgagtggcygaagctttccataaataattttgtctatcttcttgtcttaaagcaatgtgactttttctccaaattacaggatttctttcccattataagagaaacacct

SEQ ID NO: 488910 - DNA, 201 bp, Homo sapiens
gcaagggtagacctctacggctgtaggtcaggttaaagaaagctcttatgggattgcccacaatttctagtctatatgcccacagctgatgggagagaggkattttaggaatccctcaaattgtccacctttaatcctaaagagtctcaggattccccccgcaagaaccctagagattgtaactttatattctgtagacaa

SEQ ID NO: 488911 - DNA, 201 bp, Homo sapiens
acacccaggaagggcagcagggctcggacagtggcagaaagactccacccatacagcactttgaacagaagctctcttccaactggaggcatagagctagytgctaatctgacggacgcccaaaacagagaagtgggtaaaaataaaattacgactgctcccgtgagaaggccaggaagagaacatatcgaaacaatcatg

SEQ ID NO: 488912 - DNA, 201 bp, Homo sapiens
ccagtgatgagattgttacagcctcattaagagaccacagctcttgactatgtgagtgtctcaagcacaaggcagcttacttaggcctccctggtacatakaaaagtccccaggagaggcgactctctccagcatgagagaaaggatgagtattctccccaatcctgcatcccaaaggaaaggagttgcctcttcttccct

SEQ ID NO: 488913 - DNA, 201 bp, Homo sapiens
atagcacacccacaaagacggtctgtatttccatgtgagaacaccagaaaaacactaagtgggagactcactttgcttttctcctcaagttccctgtaacyactggtgtttatctttttggaacagagctatttctttggaggggaagggatcagcaactctagggagctgacagaaggcagcggccacagccagagggag

SEQ ID NO: 488914 - DNA, 201 bp, Homo sapiens
ttcccttacccctttagggaagaggttagaaaaaaagaggggctgggaagcatgtttgaagctgcgtgtgtgtgtgtgtgtgtgtgtgtgtgtgtgtgtgwgagagagagagagaaggagaagaaggaggaggaggagaaagagaaagagagagaaagagaaagagagagaaagagaaagaaagaaaagagaaagagaaag

SEQ ID NO: 488915 - DNA, 201 bp, Homo sapiens
gaaaagctagattagaacctaattatgcataccattatccaggctgaatgactttgtcaagtcacttaacttatttcagcctcagtttcctgatctgtaarataggatctatactattttgaaggttgagataagcacttaggacagttcctggcacataggaagtacttaatcaatataaaaaaaattacttagtgataa

SEQ ID NO: 488916 - DNA, 201 bp, Homo sapiens
tgtttttctctgacaggcgctgcaatggtttgcattcattccctcagtgtcagaaaaggctgtgaagcagtaacaaccaagattcttaatgcattcccaayattaaaattcaacttaattaagtagggctattttttttttcctgagcagcaatcaaactttaattaatactctattaaagggaattcctggggggggaca

SEQ ID NO: 488917 - DNA, 201 bp, Homo sapiens; identical to SEQ ID NO: 195844

SEQ ID NO: 488918 - DNA, 201 bp, Homo sapiens
cctagtatagacccctagctcagggcagcaggtcaacaaaatacacttgaccacacaccagccagtccccccttctctccctctgagctgatgcagatcaraaggaagcctgcaaggtctgaaatctgaccttccatctgccacttgatcttccatctgccacttccccaattcaaaaggggctaggggctggaggataca

SEQ ID NO: 488919 - DNA, 201 bp, Homo sapiens
caataacttcctgactattcctgtctcccacacacccaatcctggcaacactgtgtatttctcagccaagatctgtcctacccattaagcccctgatttgsggtttagaaatgcaaaaaagaaaaataaaagtaaggagaaggaagaacagaggagaggagatagaaaaggaaaaaaacaagagtgtaggtaataggaaga

SEQ ID NO: 488920 - DNA, 201 bp, Homo sapiens
cggtaggagggcagtggagtgggtcggaaggtagagatctgggctctagcactcccttgagatgtgaccagccatgtgacttcttttcttctcaaccagckgtcctcaagatcaccatggtgctctctccttctaacatcaaaggatgacttggggagtgggaagtataatagtaagggctcactcatttgttagataaat

SEQ ID NO: 488921 - DNA, 201 bp, Homo sapiens
catgaagattcctctcataaactggtgccccttcccagttatcctatttctgtccataagcacatgttcttagaatctcagaaacaagaaactgaaagagwtttccattaaagccatctgatctagtactaaaaacaaaaaatgcattaatcatcccactgaacccctgatggcctgctactgactaaacacaaccagtag

SEQ ID NO: 488922 - DNA, 201 bp, Homo sapiens
acaaatcactatacccttccatctccatgacatcatgtgtaaagtaggttggggaaagcacaaaataaattggttagtttccatctgattctaacatcttraagtcttccctgttaaaaacataggtaaatgtctacctcaagaatattatttcatcgagttggttctcagtatggtaaattacaatatggccttttcaat

SEQ ID NO: 488923 - DNA, 201 bp, Homo sapiens
tcatgggagagaagaagtatggcctggccgatgagggcagctaggctgaattacggaaagtgagaactggagggaaccttaggaatcaaggcgtgccacastagacagaagaagaaactaaagtctaaagagaaagaaaagggacttccaaaatcagactgctagttggtggtggaactggaccttgaattcagccagcat

SEQ ID NO: 488924 - DNA, 201 bp, Homo sapiens
aaggacaacacaaagtcctcacatggactgaccaggcattaaagaaagccccactaggacttaaattctgctactgttttctcaattctgaagatggtgaytagcttacggaaaccgagctatcctcaaacatcttctcctgccaaggattataagagctgaaatcaagagagaaagagctctgacagacacagctttcct

SEQ ID NO: 488925 - DNA, 201 bp, Homo sapiens
gaccctatgtggtaaggattctgatgatcactacttttcagaggaaggcaaggcttagagagacaggcgaacatgtacaaggacactcaggtcctaagacrtgtggccgggatttcaacccaggatttcctcttttgtattctagcctttatgctcaaggagaagagtgatcctcacaaaacttgatttattttaagaatt

SEQ ID NO: 488926 - DNA, 201 bp, Homo sapiens
gctcaatgtttttctactgatttacaattagtaagctcagccagtcactgacaagtgttcccaatgtttatgtataaaccacccaacattaataaactgtyaaccatctgacctacaatgggagccttgagtcaatatatgccagccagaagctgttgccccattccttgtttacctccttgtcttacttttcctatatac

SEQ ID NO: 488927 - DNA, 201 bp, Homo sapiens
tgttccttcatgctgctggaaaaactacaggaatacaaataacttcaacagaatgcagcatgtgctagaataggagtacaaaatatactagttgccaagcytcactgaaccctttccatcctcccatgttatcccacttcatcctcacatgaccctatgtggtaaggattctgatgatcactacttttcagaggaaggcaa

SEQ ID NO: 488928 - DNA, 201 bp, Homo sapiens
cttcccatttagaaacatcatgggtttcagtacctactttttaaattatataacatcatttccttattcatttttatttactaaatgctgtttaaaaaggyattccaggactttaaagtgggagatttgattttaggaagctaaaaatgcatggtagtttatatctatggcttagctccagggtggggctgaaccctagga

SEQ ID NO: 488929 - DNA, 201 bp, Homo sapiens
atgtgacagccaggcatggttgctcatgcctgtaatcccagcactttgagaggccaaggcagatcacttgagcccaggagttcaagaccagcctgaacgaygcagggaggccctgtctctacaaataataaaaataaatgaataagtacataaatgagcggtgcttggtggaccatacctgtggtcccagttacttggcag

SEQ ID NO: 488930 - DNA, 201 bp, Homo sapiens
caattaactaagcctccctgagggatggagcccagacattggtatttttaagaagttcccaggtgattctcaatctaccgacaggttaagaaccattgttytacatcaaggtttcttcttcccttcgtctcagcccctcagatccacattcctattcaccccagagtagctttcattttgaaaaaaaaataaaaataaaaa

SEQ ID NO: 488931 - DNA, 201 bp, Homo sapiens
cttagaaatgcaaaaagatatttttcctctttccatcaagtagcggaatgtatttgtgaggaaatcatttgtcaggctcttttttaaaaagttctattgaracttctttctgatgtgcccccacaatttcctgtgcccatactccaatcagaacacttccattgaggttggttccttattaacttatctatgttgttccag

SEQ ID NO: 488932 - DNA, 201 bp, Homo sapiens
cacactgacacgagtcctagttaaagcccatcaaatggtaaatatctgtcaatcggcagcaggcagagtttgcttgtgttgactttactgctctcaatctrttgatatatctgtttttcttaggggctcttagaaatgcaaaaagatatttttcctctttccatcaagtagcggaatgtatttgtgaggaaatcatttgtc

SEQ ID NO: 488933 - DNA, 201 bp, Homo sapiens
cttgttcagatccttagatctaggaaaatcctaactctgaactacttgcttattctgatccctgagtccacctggctctgcagcttcttagttctgtccargtcctttccctggctcctcatccaacaatctagacccaatgcaggtttggtcctgatgctgacacttttgtctgagatgctgaagaacaggatcctaacc

SEQ ID NO: 488934 - DNA, 201 bp, Homo sapiens
ggcttatgtcagcataaacacgcctctcgttacagaaaccaccctcagtttcacaccagaagcttctctaaaagtttgttcttcatccccacagtgagacrtagctggtatttgaataatctcaacaccctcaaaaataacttctgacaatctgacttgaagcagaacttttccataggtttggcaggatttccagttcta

SEQ ID NO: 488935 - DNA, 201 bp, Homo sapiens
ttctgactcctaactcttaccttaaactttcaactttctgccttctcacattcatgtcctcttggtttctaactgtctccgacttgttgcaagttgtgacmcatgttgtttcttgatttggattgtctacatatttcttattcggccttgttcagatccttagatctaggaaaatcctaactctgaactacttgcttattc

SEQ ID NO: 488936 - DNA, 201 bp, Homo sapiens
tggcttatgtcagcataaacacgcctctcgttacagaaaccaccctcagtttcacaccagaagcttctctaaaagtttgttcttcatccccacagtgagasatagctggtatttgaataatctcaacaccctcaaaaataacttctgacaatctgacttgaagcagaacttttccataggtttggcaggatttccagttct

SEQ ID NO: 488937 - DNA, 201 bp, Homo sapiens
tcactggagcaacagcagaaaaaacaacagagcccttctttctttattctactatcctcaccccatctgctccttccaggcctatctacagcccctcccawgagagatcaaccctcccaagaaatgctggagaaagagggcgtcagagaggagagttgagagtgctctgcctgccgcacacatggccagggaccagggacc

SEQ ID NO: 488938 - DNA, 201 bp, Homo sapiens
ctccccactccccttagtcaggctatatgaaaaacaattcatcttttaactttaaaaaatatcattatgatcatagcacatatatctgtgacaaagactgkgacctgtctaagcacagtgcctcagccaccccactgtaagacacaaggagcctttctaaaacgtggagtaagagaagagagctgaggggactcaagagaa

SEQ ID NO: 488939 - DNA, 201 bp, Homo sapiens
gaaacagataaaattccagctccggacagaacagtctgggagatgcaagggagaaaaatgtactgattttagagttttttagtagctctcaaaaccaaggstggtcctcacttgacctagaacaaatgggaaatgcagagaggaaggaggctctgagagaaaaggaaagaggggccagggccatcaggacacatgcttgaa

SEQ ID NO: 488940 - DNA, 201 bp, Homo sapiens; identical to SEQ ID NO: 195852

SEQ ID NO: 488941 - DNA, 201 bp, Homo sapiens; identical to SEQ ID NO: 195853

SEQ ID NO: 488942 - DNA, 201 bp, Homo sapiens
ctgaaacgcaggactgagtgctggacctggctcagccacttacctgcttggggaagcctgtggcaagtcgctccacatctctggacctcaggcatccgctstctaagttgagagacataaacaaagcttagccctatgtctctgacactgtacatgccacaggatctcagtaagagcagaggtgagtatcacctggggtac

SEQ ID NO: 488943 - DNA, 201 bp, Homo sapiens
cctgtacatattccatactattttgttctttttaaaattgctaaattggttagaaagctgaatgctaaagatgtggcttatcttaatttcaataaatataygagacattttcccataatattcaagatgataaaatgcaactaggtattactggccagacaactttaaaagagcaaagtatagtgttttgaacaaaataag

SEQ ID NO: 488944 - DNA, 201 bp, Homo sapiens; identical to SEQ ID NO: 195854

SEQ ID NO: 488945 - DNA, 201 bp, Homo sapiens
aggcaacacaggcagagatactgacaggctgaaaaatagccaggattaacaagggcagattcctggggcaaagacaggctgtgactgaaaggaaggtgagracgcagaaagaatgagaaccaggcagtcactaaccaacacccttcattgtgccaagtgctatggaaaagacaatttgcaaccaaggagataaaatgtgaa

SEQ ID NO: 488946 - DNA, 201 bp, Homo sapiens
tctcaaatgtctagcttccagaactgtgagaaaacaaattgttgttatctaagtcacagtctcgtggtgctttgttacaacagccccaggaaactgagackctagggttgaaactttcagaggctgtggagccagcctcttgattgtactggcataggacctggggaagatgggcaggcaaacacttgtcttggcttctag

SEQ ID NO: 488947 - DNA, 201 bp, Homo sapiens
gacatcctccaacatctccttctgaaggtcttccatccatgtccacaactgtagagagagagcagagattccactcagggaagatgggagaggccagggcwggggtgagggcaaggaagctagactggaatcacccaacttactctcaaccagtcagtgccattctcatcagcacaactatgggtcagtttgtgtttttac

SEQ ID NO: 488948 - DNA, 201 bp, Homo sapiens
ttagtgtccccaggtgaacgggcttcttaggtccacacctgaggacagtatctacagcaagtaagtatcatctagacactgaaattcaagtccaccctccmaagaggccctttccagctaacctcacacattctctatctcagaggttctcaaagtttaatgggcagcagaatcaccttagacggttggttatccatacag

SEQ ID NO: 488949 - DNA, 201 bp, Homo sapiens
agcctccagtatttctggaaagggtaaaaataacataaaatttgcgtgtaaggactccttggagaaactcttttaagaagtagtcagttccagcagccctrctagtcaggaggcttgcatcctcaagttagtcccagccctcacacttggagagagagagggaacagcaaacaaggacaaggtggcattcattcatttccc

SEQ ID NO: 488950 - DNA, 201 bp, Homo sapiens
tattcctcagaaagaactagctctgctgacactttgatctcaaatgtctagcttccagaactgtgagaaaacaaattgttgttatctaagtcacagtctcrtggtgctttgttacaacagccccaggaaactgagacgctagggttgaaactttcagaggctgtggagccagcctcttgattgtactggcataggacctgg

SEQ ID NO: 488951 - DNA, 201 bp, Homo sapiens
ttttttatgtcttcatgggtccaaagtcaaacatcagcaaaatgatctgattttgctgactggggcactggaggtcagagttcagcctaagaccagatgtyaaataacactatgttccataatgtctatttctctgcatgagcaaatatgccctaattcttaattattttttacttttgttttttttgtcttttgttaatt

SEQ ID NO: 488952 - DNA, 201 bp, Homo sapiens
gactgagtttcgctgtgtcgcccaggctggagtgcagtggtgcgatctcagctcactgcaacctctgcctcctgggttcaagcgattctcctgcctcaacytcccaagtatcagctggagaattaaaaaaaaaaatcaccatgtcctaaccacaccccagaccaatatcaccagaatctctgcggctgggacccgaccatt

SEQ ID NO: 488953 - DNA, 201 bp, Homo sapiens
ggcagagacaagcttgttcaacttagagtgaaagaggtacagagagatgggacatgcaggccagcaatgctgaagcagaagtatcaagacttactgaaaasatgcttttcagtctcttcagcttatacatctataggcttgttgtcaccacctctgtataaacaagccaaaatatagaaagcatttccctacaggacttct

SEQ ID NO: 488954 - DNA, 201 bp, Homo sapiens
agacagacatgcacacagggacaatgctatgtgaagatgaacgaagaaactgggagatgtatctacaaggctaagaatgctaaagactgccagaaaactamtaaaagttgagaaaaaggcacagggtagatttctccctcatattcctcagaaagaactagctctgctgacactttgatctcaaatgtctagcttccagaa

SEQ ID NO: 488955 - DNA, 201 bp, Homo sapiens
tgcccttaggcattgtgcaggtttacagttgttaagaacaagtggcatctccgtaggcctagccccacagaaagtgaagccagccaagcctgtgaaaagtwtttgaatagataacacaaagccatcacaaaattctagagctgccagagctcctagagtgaaccccttaattacacagacgaagcagctgaggcccagaga

SEQ ID NO: 488956 - DNA, 201 bp, Homo sapiens
cattctctcatgcattgttcaccacaattctctaaggcatgaactacagaatgaaagtttctgtccccctgccccaaatttatatgttgaaattctaagtrcgacgtgatggtatttaaagataggcctttgggagataattaggtcctaagggcaaagccctcatgaatgggactagtgttctttaaaaaagaccccaga

SEQ ID NO: 488957 - DNA, 201 bp, Homo sapiens
atactatagtaggatagatccctaatccaatatgactggtgtccttatttaaaaaaaaatgccatgtgaagagacagacatgcacacagggacaatgctaygtgaagatgaacgaagaaactgggagatgtatctacaaggctaagaatgctaaagactgccagaaaactactaaaagttgagaaaaaggcacagggtaga

SEQ ID NO: 488958 - DNA, 201 bp, Homo sapiens
attaccttgttaccctgcctttacaatgttcactacatacactcttcactacatgtcaatatttttattttcccactggcatttttattgtttttcaaaaygtgtgttgatactacttgccacctgaaatcctgacagtacattcaaaataaataataaatataaataaattctcctaaggttatgaaatcagttggaagg

SEQ ID NO: 488959 - DNA, 201 bp, Homo sapiens
gaatattctctccctctctccccacccctctactcacatgcacatgcatgaacatacacacgtgcacattcgcccactcccccacactcctttttaaggtrtgagcacatcacacaacagacattctaaaccttgggttcatggatagaattcagggatcatatatttggatagggaaaaaaatcacgtctttattttcac

SEQ ID NO: 488960 - DNA, 201 bp, Homo sapiens
ttcaggaagggaaaatttctgaatactagtgatgttttcttatttcctaaaaaagaaaacacacacaaagctccagtcctccaggggaagtgccaagacaytggagtgaccaggagctaagccagatggagtcaaggacagccattgttcctcctgcaaggaagggatggcctgcaccatgcagcatctccaccagcttct

SEQ ID NO: 488961 - DNA, 201 bp, Homo sapiens
gtagtatttcacatgaatgtgactttatagctgagttccagtgaggaaacaagtctcaggttcaaacacgaccaagcttagcaagatttgagagatatccrggaaaacaatagtcaataacttcctgactattcctgtctcccacacacccaatcctggcaacactgtgtatttctcagccaagatctgtcctacccatta

SEQ ID NO: 488962 - DNA, 201 bp, Homo sapiens
cgatgcccccagctgatgtgaggggtgtagtcgatgtcaaagtgaagctaactgacccattccagcgctgaaccagcaaccctgacttccaggtcacagcyatcttttcaaataaaacttaatccaaaccctcagattgtttcctcccccttaagcatgttttgaagcagacctggaatgacaggagagtaaataagaagt

SEQ ID NO: 488963 - DNA, 201 bp, Homo sapiens
gctaaggatgaggcagctctttctttgggagcccctctctgggaggaggcaggcttccctgtgggagcccttctcttggggagaagaccaccacctagctmtgctggtatgtgctaggtgggcctgaccttgagcttaggaggaggactaggcaccccattttgccccttctcccctcttccagcagcagcctctgcaatg

SEQ ID NO: 488964 - DNA, 201 bp, Homo sapiens
tgtgtcttgaagaaaaggtgatgaagcaaaagtatggtggaagggcccccattgtatctgttgtaagaaataatcacagaagggacaagcaaataccacamatggagcaggcaggctggaagggtggatagagagccccacagaaggtgaaggaaaagagaccaggaggaggaggaggagggagggttcaaagaaaattag

SEQ ID NO: 488965 - DNA, 201 bp, Homo sapiens
aatttccgtacttactacaacctagctataaaaccatgggcaaattattaatttttctgaactttggttttcccatttgtaaaactggaattttaaaaaaygagaattatcatggctatgaactagatagccagatagcctagcacatggtttgtgctaaataaatttcagttctttctctttcttcacctgccccctgta

SEQ ID NO: 488966 - DNA, 201 bp, Homo sapiens
gtttgttcttcatccccacagtgagacatagctggtatttgaataatctcaacaccctcaaaaataacttctgacaatctgacttgaagcagaacttttcyataggtttggcaggatttccagttctaagattagatgtagcattctccccaagcttttgggcctcccccacaagacaagggaataagaccccttgtaaaa

SEQ ID NO: 488967 - DNA, 201 bp, Homo sapiens
acaggttaagaaccattgttctacatcaaggtttcttcttcccttcgtctcagcccctcagatccacattcctattcaccccagagtagctttcattttgaaaaaaaaataaaaataaaaagcccacagattttttttctttcctttttgacactagtaaaattatttgtgctccattatttttacctacatctgttccac

SEQ ID NO: 488968 - DNA, 201 bp, Homo sapiens
aacaatccttaaggatgttgaaaggcacaccatatccacatggtgaacctcctcttccctcattttgaaaagataatttttcctggacatcaaccaccagsttgtttcttaaataaacagtacaacagtacagcaagtaaaatagaggataaggctatttttgttcttaaagccatcatctctcttgaagaccaatttagt

SEQ ID NO: 488969 - DNA, 201 bp, Homo sapiens
gcccatctcagaaaatgccccaaattatccaatgatggtagaaaaactatcttgatataaatatgcatatatgtgtatatatattatattgtgcacatatwttttatcaagccaatacaaagtatataaaatttcccaggattttcattagtagactggtgctggagtctcactctgaccacatggcagatggctttgtgt

SEQ ID NO: 488970 - DNA, 201 bp, Homo sapiens
aatagtgagatgatgagctccctcctttcttctcccttccctgctaagcccctttctgggctctggagatattctggtagaggctggatggcatcatccarggatgccaaatcctagccaccaacttttgcctgccctcaggtgtaacctcattgggaaaccctctatgaacatcctgactgggctaagcatctgcctctt

SEQ ID NO: 488971 - DNA, 201 bp, Homo sapiens
ttcccttcaatatgcataagaaaactggaatttggaaacagccattattcataccctcccaaaccctaaatattcctctgtgaaactgggcaccacaatgygcccttgtttgggatgctaaaattacgccatctcttttgtattaactgatcctttgcctgaggagtcaacggatgatcagttccttattatcaacaggaa

SEQ ID NO: 488972 - DNA, 201 bp, Homo sapiens
ggctgcaccagagccagtactctgaagaggacacatccaagcctgtatgtgagccaggctccattcagcagacagtgaccaagacagtcagtgactagagrccatgtcctatccagaaagaggtgaataaaatagaggatatataccatagagggctgacactaaggagaaatcattataacatttttagagtcaccggga

SEQ ID NO: 488973 - DNA, 201 bp, Homo sapiens
gttcccaatgtttatgtataaaccacccaacattaataaactgtcaaccatctgacctacaatgggagccttgagtcaatatatgccagccagaagctgtkgccccattccttgtttacctccttgtcttacttttcctatatacttttccaaattcatgagcacaggtgcaaacacacacttcctctcttcaccatgcca

SEQ ID NO: 488974 - DNA, 201 bp, Homo sapiens
agtgcagtgatgtgatcatagctcactgcagcttcaaactcctggactcaagtgatccttcttccttagcctcccaattagctgggaccacaggcatgtgycaccacattcagctaatattgagaattttttgtgcggtctcaccatgttgcccaggttggtcttaaactgctggcctcaagtgactctcttgccttggcc

SEQ ID NO: 488975 - DNA, 201 bp, Homo sapiens
tgtggagactgaagaaattgctttctatctctacctcaaaatcttatgtcaggtgttaatgtattttataaagaatacacatggtttctttaaaagcaacmagaatatgtcagtgatctaggtacaaaaacggcaggagaactcaaagagaaacagaataatgagcacaggggaggggaaaacttggaagaatttagatac

SEQ ID NO: 488976 - DNA, 201 bp, Homo sapiens
atctgccgaagcaagtcttcattccaggcgtctagctctgctgtcacctgtgagggaaccactgtcatcagcacaggctcaccaggtccacgagagattgwtaggttaaggctcacaattccaagccttattcatgaatccacccctcagttaagtctctgctttggaattcttcaacccttagactatttaagcaacatt

SEQ ID NO: 488977 - DNA, 201 bp, Homo sapiens
ttaggatgatttgggtagagtggggcagaaaggggcaaccacaggagtgatgtggtacctgccctgctgggaacccccccgggacctgtggagagtggtgrtgtgttctctcctcagggtgaccatggtctgctgacctcttaagcttcagtggcctaatctataaaatgagaataaagtttacttcagagaatggttgtg

SEQ ID NO: 488978 - DNA, 201 bp, Homo sapiens
cagagtgaatcttctaaaaggcaattttaattgtcattctcctgctgaaaagctcttcaatggcttttttattgcctattagtaactaacttcttgaactrgacccacagaattctacatgcctctctgccctatcctctgccattctcccaaaagactatgtgtttctacatcttgagtttctggaacttaacctgacac

SEQ ID NO: 488979 - DNA, 201 bp, Homo sapiens
caatccatataaggttggtacagagattggccagatgcttaccaagctcattctctcttctgaagcacacgactgttacatttcccaaccgcccttgcagytaggaacagttgtatgactgagctctggtcaatggaaggtgagcagaagtatcatatgccacttccaggactggctcataaaatcatcccacatgtatgt

SEQ ID NO: 488980 - DNA, 201 bp, Homo sapiens
caggagaatggatttgattaagtggatgtggatatccacaaatggtgatgccatttaagctgggcaggctgagccttgtaaccatgtaggctgggaagccrcctgtagatggctgtgttctcaaggtcatacctacagcaaagctttgaggttgtactcaaggcaactgactctaaggaccactattgtagatgatttatc

SEQ ID NO: 488981 - DNA, 201 bp, Homo sapiens
ccagataaacaatttcttctcatcagtatcatctactgagtctaacagttaattttcattgttccctttctcttccaaagccatggctacaaagaagaaartggcaaatataatctgacctgctaagttattcagttttcctaccccaaacttcactgtctttagaacaatcctgttccatccaacagccattatgtgtga

SEQ ID NO: 488982 - DNA, 201 bp, Homo sapiens
actgggggggaaagcgtgtacccagtctcactgttaacaatgtctgtggaaagcccagctggtaaagccagcaggcagaccaagttacccctgccccactsgtgatcacttacctcacagaacacaatcaagcatcacatgagcccacttttcagctcctgccttcccaaggcctgcttactgttgttttgttcttgctgc

SEQ ID NO: 488983 - DNA, 201 bp, Homo sapiens
aaagaatatcactacttggggacttaagagctaggccaaaagttcagctcagtctgagcttgagggggaactggacatgaagatctttattgcttcttcakgtcaggaaagctcagctaagcccaagtcaggagaatggatttgattaagtggatgtggatatccacaaatggtgatgccatttaagctgggcaggctgag

SEQ ID NO: 488984 - DNA, 201 bp, Homo sapiens
atgaccttcctctcagcccctcttgggttttgttccccttcaccccagcggaaatcttttctttttaaattgcttcccgtctgttttgtcccactctttgyttaacaagtcagaatgaagaaaagtattcttccaactctttccctctttattctaaagaaaagatgagcatcaattagctgcagctatgtgatgaacacg

SEQ ID NO: 488985 - DNA, 201 bp, Homo sapiens
acaaacaaggaaagtaaaccacaaaactcctacagatggaagcaaagttgatgacaatactcctctccccacctcttcctcctcccctcaatgtcatcatyattggtccacaatagacaggagatggggagatacaaatctcctgggaaggaaatgcactacccactaccttgtttaacttgttctctttctaaatcttgc

SEQ ID NO: 488986 - DNA, 201 bp, Homo sapiens
acccctctgtcccaatttcctcacccacatagtgtaaacattacttaatgtggttgtactgtatgcatgtctaaacttccttctggaacataggatggtayaaataaataaattccatctgttggtatccttttctttttttataaggtccagttcaaataacaacaacttatggaaatcttttgcacctaatctctcctg

SEQ ID NO: 488987 - DNA, 201 bp, Homo sapiens
gtacctgacttggcaaagccattccacaaccagaattatagccactgccctgtcctgtctttgaaatacgtacccattgatacagaaaaacacaaataaaratgtgagccaggcaaccaaacaagagttgaaaccaatataacataatgtgcagattgtatctcataaaccaaggatctgtgactttggaataagagacaa

SEQ ID NO: 488988 - DNA, 201 bp, Homo sapiens
agtgaaacaggaaattgaactaatagaactacatctccatcagagaccaatcaatgccattgattggcacaacatttcactggacatgaggcgccagggasacaggggatcctccttccctccccctaaactacacacactgcccctctgtcaatccccgggattccactgcaccagtagttgcaaattacccacaagtat

SEQ ID NO: 488989 - DNA, 201 bp, Homo sapiens
agcggggtaaaaatatctggtgcaatctgctccaatgctcattatccttgttaaaaggcagactctgacaatagtatctaagggttacatgtaaaccaaabggttaaaaataggatcctaatttataatgacctttgcacttgtttatcctcaaacctgagtgatttgcaccagaagtgacttctaaacttttagttttac

SEQ ID NO: 488990 - DNA, 201 bp, Homo sapiens
ctaacagcttggcattcattggaaagggaagattgggagcaattatttcaataagccaagccaagaaacacagctatgctattcagggaaaagaggaggcyacagagaccaagtctacttctagcaaaacggaacccggctggctagtaaaagctgatgtttccctactctgccgtgtgtattggctttcacctcttctgg

SEQ ID NO: 488991 - DNA, 201 bp, Homo sapiens
ggcgtgagtgaaaagatgcagagaagttaaagagctttaaatgactgatccattttgtcatgaccattaatacattattatttttaaagcatatttaaaaraagaatatcatacatttttattagctaatctctcacgaccctaactcctgtccccacttctttctttttccttgcagcactctagattttaaggacattt

SEQ ID NO: 488992 - DNA, 201 bp, Homo sapiens
tttaaaaaggaaattcccaccacacatctagatcacaagttttcttccccacagtgacaactccacagcactgaggcactgttgacaatggtttgagccarggccattaaattgctttggaacttacatttacagtgttaccaccaactggacctacagatatttagctgggagtcccctgaggatggggtctatgtctag

SEQ ID NO: 488993 - DNA, 201 bp, Homo sapiens
cagatgaaagggtaacacactgcatcgttatggccctactgtccagctcctgccttttctcccacagcagcatcatcttatctggtgtgtttctagttccstaatgacagagagctgtgtttcctccattagactgggggcccaaggaatgaaagaaccatgtgtttttcaagtagtgcataatgcctaactgtggtagat

SEQ ID NO: 488994 - DNA, 201 bp, Homo sapiens
taaaaaggaaattcccaccacacatctagatcacaagttttcttccccacagtgacaactccacagcactgaggcactgttgacaatggtttgagccaggkccattaaattgctttggaacttacatttacagtgttaccaccaactggacctacagatatttagctgggagtcccctgaggatggggtctatgtctagta

SEQ ID NO: 488995 - DNA, 201 bp, Homo sapiens
accagaactgtcagggaggaaaggaaacaagaaagctgcgagtggagagtgctgacggcccagcctgccagctggcacgacacactgcaaatgagatgcasacagccagaagggcagcaggatagcctcagaggaccacagcagcattgagagctccagagactctagaagattctcaggaattaagggaatcacattttg

SEQ ID NO: 488996 - DNA, 201 bp, Homo sapiens
cttgcagtgactattgctatatcagggattcccacatttctccagctgcagattgcatgctctagcagatgccccgaaaaccacctgtctccatgaccccytttcctcactagatattataggaggaaattttgccccattcggagagacctaaatgcaggctatcaggaatgaattgttaatattaccaaagttaggaag

SEQ ID NO: 488997 - DNA, 201 bp, Homo sapiens
tcatctaggctggagtgcagtggtgtgatcacagctcactgcaacctccgcctcctgggctcaagtgatcctaccatcttagcctcctgagtagctgggaycatgggtgctcaccaccacactcggtttttgtttatatttttggtggagatggagtttcaccacgttgcccaggctggtcttgagctcctgagttcaagt

SEQ ID NO: 488998 - DNA, 201 bp, Homo sapiens
gaggctaaggatgaggcagctctttctttgggagcccctctctgggaggaggcaggcttccctgtgggagcccttctcttggggagaagaccaccacctakctatgctggtatgtgctaggtgggcctgaccttgagcttaggaggaggactaggcaccccattttgccccttctcccctcttccagcagcagcctctgca

SEQ ID NO: 488999 - DNA, 201 bp, Homo sapiens
ctcctgggctgcaccagagccagtactctgaagaggacacatccaagcctgtatgtgagccaggctccattcagcagacagtgaccaagacagtcagtgamtagaggccatgtcctatccagaaagaggtgaataaaatagaggatatataccatagagggctgacactaaggagaaatcattataacatttttagagtca

SEQ ID NO: 489000 - DNA, 201 bp, Homo sapiens
aagcaaagactagacaagacaggtgatgaagtcattaaaaaggtacctatctcctgggctgcaccagagccagtactctgaagaggacacatccaagcctrtatgtgagccaggctccattcagcagacagtgaccaagacagtcagtgactagaggccatgtcctatccagaaagaggtgaataaaatagaggatatata

SEQ ID NO: 489001 - DNA, 201 bp, Homo sapiens
agtcacgtcagagggctttagttgagagagtgatctcagaggtctggaatcttgggaattcaaatctaagctaaatgtgaaatatgtccaggattctgtayctggtgtttctatattctttcatctcctctccttaccctcctccactctcatcatctgacaccattgaattgaggaacccaggtctgttatgaagcctgg

SEQ ID NO: 489002 - DNA, 201 bp, Homo sapiens
ttggtcttccccagtatttatgtgtagagaaagctatagtccctcttccccagatgttttgatctgtatctgcctgaatcaaaattcacctgcccctcccttttttttttccccacttcctatggtctacccacttcaactctttatcacctgcaacattggaaatctcactgtatagttctttcttcagatcagtgttta

SEQ ID NO: 489003 - DNA, 201 bp, Homo sapiens
ttgtggggcatccttgggggatctgggagccactgggttggcaggcaaagtaggtttttgttaaagccccatctttgaaaagtacttcattctctaactcragaaaggggttagactgatgaggctaaaatagattatttaaaaagataatttagcctgggtgcagtggcttgtgcctataatcccagtgatttgggaggc

SEQ ID NO: 489004 - DNA, 201 bp, Homo sapiens
tttatgttcttttcttctctatcatcatgattaaaactgagatccttggccaggtgtggtggctcacgcctgtaatcccagtactttgggaggccgaggcrggcggatcacgaggtcaggagatcgaggccatcctggctaacacagtgaaacctcatctctactaaaaatacaaaaaaattagccgggtgtggtggtggg

SEQ ID NO: 489005 - DNA, 201 bp, Homo sapiens
agtaaccaaagtccttctctccactagtaacttgaatttgattccttacttggctctcaaagactacccgaaagtgtactagctttggaacagtcctgagytggaatcctgactttgggcaaattacctagactctcagaagcctcattttgctcatatgtaaaatatgaatttacatacctacctacctcataagctacc

SEQ ID NO: 489006 - DNA, 201 bp, Homo sapiens
ataaacctcttgtcttctttttcttcctcttcccttctctccataacaatttatctccatgatatgttaatgttatctccataacatcaatgatgatgacrgttatgacgattccaacaactaagatttgttaaatgctcactatgtgacaggtactgtactaagcactttatatatattaactcacttaatcctcctaat

SEQ ID NO: 489007 - DNA, 201 bp, Homo sapiens
aatataatgttgagttcctctctgctaatcaattcttacaatgataagattagtgacttctaaagcagattattttaaagttatcatagcatttccctgtyttagtaatatgtataatctctctgaagagttaaaatatttgtttaaatagctaaagacctttgggaatattgtaagaaatttccagaaaagcaaagggac

SEQ ID NO: 489008 - DNA, 201 bp, Homo sapiens
ccctctacccttctctatctcttatagccactactctacactccacttctatgagatcaacctttttagttcccacatgcatgtagtatttctgtgcctgrctcatttcacttcacataatgttggagggcttctatttctcctgggaccacatggcaagagtgggggccagcagaggcaaactgtaggaccttggattta

SEQ ID NO: 489009 - DNA, 201 bp, Homo sapiens
cccaggcagtctaactcaaaatactacacacttgatcacggcattactgtctctcagcaaaggtgattatatacattaatcaacactacatatgttgcatrtgttaagattcaatctcattccaattaccagtaggaagaaagggtccatggcatttcactgtgatgggatgccattgacatacctgggttatcaattgca

SEQ ID NO: 489010 - DNA, 201 bp, Homo sapiens
tatttgctccaaggaagactttccgatggtccctgtaagtcatccaaggagaatgattctctgatttatttctaccagggaacaattcagagaaggaaacyactatacactgagtaaaattactcctgttttaaacctgtttcataaaaagaattccctaacagcacccaaatcattttaaaaatcctcttagccctgtgc

SEQ ID NO: 489011 - DNA, 201 bp, Homo sapiens
ttcactcattgaatttttttgtcaaaaatcaactgactgtatatatgtggatctatttctataaccactattctgtctcattgtgtttattcttataccaratacgattctgtcttgatccctgctgctttagaataagtccttaaatcaggcagtgtgacttgtccaagtttgttcttccttttcaaaatcgttttggct

SEQ ID NO: 489012 - DNA, 201 bp, Homo sapiens
ctgggtacgtggatagatgtcttaagcgttttaaatagtatgttctatgctggaagcaatcaaatttattttattatgtcttcttcctgcttcctgttgcyatattagatattaacaaaatatacaataataaccatatgaatatcacatactcagtatgtggaagacactcatttttataataccccataatgcatgcac

SEQ ID NO: 489013 - DNA, 201 bp, Homo sapiens
cctggtaccaaactcaaaacatagagcttggtaaatgctgaactgctgacaggtgacaacctgctttctttcttctttattccccactcccatccccaatytgctgctgtggccctcttctggactaagccttggtgatgggcctctgtatgctccccagaactgagatagtgccagggaaagctttggacaacctgctta

SEQ ID NO: 489014 - DNA, 201 bp, Homo sapiens
gtggatatctgcagtgttcacatgcacatgtgacatttttacatgaatacacccttttccctgatttggtctgaaagaatacagcagattccagaacctgragcatgaagatgagtatctggaagcacagtatatagcaattgacttcctgcatacagctgctctacccagcagctgcaattctttgggtattcaggtttc

SEQ ID NO: 489015 - DNA, 201 bp, Homo sapiens
gacagccctgtcttacctgcccaacttttcaaacagccacaacattgatagtaataataaattaaatttatatctattttcacaggcagaagaactgtgcaaaaaaaaaaaaaagaaaaagactaaatttgagtgacaaaatataaaagctgacattgaagtttttttttttaagtcagtgtactggaagcccatactttc

SEQ ID NO: 489016 - DNA, 201 bp, Homo sapiens
tgccacatttcttgttcttcccatggggctgagtcactgagctttttctgggtttctgggaggttcagacacatcgcttctatcttctttatttccacacrtggccatacatatcttttctcgttcaacctaagcccacttgaaactcaaatctttcctccaaagacagtaacttatagaaactaataaaatggggtcaga

SEQ ID NO: 489017 - DNA, 201 bp, Homo sapiens
tggcccctattcattcttattctgagaaaacagagttcaatttatgaaaacctcagctacttcagattcttgcaaaatgtttgaatctcagcatcctctaytctcttcttgcctattttcctctgcctcatctcctcatgggctattgctgacctaggagtaaacttaggtggcagctttacattctaacatctacaattc

SEQ ID NO: 489018 - DNA, 201 bp, Homo sapiens
agtaacagtttcatcactggcaagtctggcaggccatataaaatacagacaaaatacacaggtgctcaaacttgtggggcaagactcaaactgtaaatgcrtgcagagtttaaaaagtgacgtgttaagtaaacataagagaaagaaataaaacctgaatatttcattatcctgaactttagcaagaacacaaactccaca

SEQ ID NO: 489019 - DNA, 201 bp, Homo sapiens
taaatgcctctgctagcctggcacagcactgctctgcagcagggtcctgagagctctaagactttatgcccatgttcttcttcgtgtcttgagattctatktgtattttggaaacacagttatttctattggttggttatgtaacttatcatgccaatttttttgctgatcctttgttaaccatggaacatgctgttttgt

SEQ ID NO: 489020 - DNA, 201 bp, Homo sapiens
tatcacatattccagaaagtcaaacagttatttttcccccagagcgtattgcttcaataatctcacaaggtttgcatgccatgggagctacatatattatrttctctttaaactgatgccatctgatgacataccaggaattaataaccaggaggtgaagagagaggagtgactttccaccccttatctggacctattaca

SEQ ID NO: 489021 - DNA, 201 bp, Homo sapiens
tagataaagagaataaatgcaagttatgataagtcttaagaacttcttaggacagcccacatgaggagcaaagactgaaactataagaaataatttgttargggaacactaaaaaaatactagaggccgggcacggtggctcatgcctgtaatcccagcacttggtgaggctgaggcgggcagatcacttgaggtcaggag

SEQ ID NO: 489022 - DNA, 201 bp, Homo sapiens
tagataattccacttgtgtgaatcaaaattaaaagtttttaaaagtgattttcagatctgctatctcatgctaccccgatgacaccccttgaaggcgacascatgtgtactgtcatcctcttttctcaggagacgaaagtgtcactccaggtcacacatttccaggatggcccaggccatctaagcatatatcccagagcc

SEQ ID NO: 489023 - DNA, 201 bp, Homo sapiens
tgacaaagctcatttctagaacaggatattgtgggggtgggcagcccatctgcctggggtgttttcaccccactcagccctcatagtttaggtggacaccmagcacagcccacctcagtcataagcagtcctcagggactttcaactcccagttgtctttctgttactatggatacttggctcttgggacagacgttggct

SEQ ID NO: 489024 - DNA, 201 bp, Homo sapiens
ggggtcctggaacaaataccccatggatactggatttccttcagtagactttgggaatgattggatttccttcaatagactttgattacttgtttggatayggcagtagggaagaactgctatgactatctttggccttctctgagaaagtcttttgatgaaaaacgtcttttttttttttttttttttttttttgagacg

SEQ ID NO: 489025 - DNA, 201 bp, Homo sapiens
tacttttcatactccttcattctcacctccccagccaagtttggctttctgaggacagaatctgtttttcatcttttaggctaagtgcttttttttctttmtctctctttctttctttctttttcttgttcttttttttttttttttgacagggtcttgctctgtcacccaagatggagtgcagtcatagctcattgcagc

SEQ ID NO: 489026 - DNA, 201 bp, Homo sapiens
tgtgcatcccaatatcaatcatgttcactataccctgtgtacactacagtggtgcatccataaaagcttgtgccctagagagaactaacaacctccttgcrggtgaaccttgttatatctgggaaactagccgcccagtcaattccaaaataaaattgtatgagtgttagagcgcaaggaacagaattcaaatcagtacag

SEQ ID NO: 489027 - DNA, 201 bp, Homo sapiens
ggccaaaagggaaactttgggtaccataattcatctgggcctggaaatctagacctgagagctcacttatcttgggcttcatgtgtcccctaatttatgtyttgcctctccattttgaattctagttatctgctggaaaagacagaggttcaaaagaggggttcagtaattctattttttttctatccctccctctctctt

SEQ ID NO: 489028 - DNA, 201 bp, Homo sapiens
aaagaaatcaaagaatgctgaagagtcaaagctagattaaattctggcttcattgctcaccatctgtgtggtttggggaaaattacttgacttttctaagwcttattatatgtaaaatgggaataatcatagctgcctgaaagaagcgatagaaagatacaaagagaaaatgtgtgtaaaggcactttatgtaatgtttag

SEQ ID NO: 489029 - DNA, 201 bp, Homo sapiens
aaaatgtgttttgcctacctggagtcaggacttttctgaaagtggagctgagatacttagagagcaaagcaggaatctaatgataagttggttccagctcrctaaatgaattctggcccctattcattcttattctgagaaaacagagttcaatttatgaaaacctcagctacttcagattcttgcaaaatgtttgaatct

SEQ ID NO: 489030 - DNA, 201 bp, Homo sapiens
acagaagggagatcagaaggaacataaactgacggcctttgagaacttgcctttgattttattgccttaagttttctagaattgttcttttgttctcatcygcttcctgcagttttacctgtctttcctcacaatttacctctgctatccccaccccattttattttccacccatcctttaatctcttctggctatttgtt

SEQ ID NO: 489031 - DNA, 201 bp, Homo sapiens
tctgtgttatgcatctttaaagagagggttctcttcctccttgggcctctaaataatacaatgtgcttagacaattgttaaacttacgatacatggcctcrttgtggtatattctatatttttctgttctttgaattgaactctattggtagagtaaaaagtgcataagctttggagtcagacagataggaactgaattac

SEQ ID NO: 489032 - DNA, 201 bp, Homo sapiens
gggagggagtgtgcagaaggggcatccaaccttggtggttggtccctaatttgaaaatctagaccttgctgaaaactgatttatttcaggtaattgttgtrggggtgtggcacaagaatgacatagctctgggagaaatgggtagaaatattcatcaaattctaagatccacatggaagctgtttcactatgaattaaacc

SEQ ID NO: 489033 - DNA, 201 bp, Homo sapiens
caccctcaaaaataacttctgacaatctgacttgaagcagaacttttccataggtttggcaggatttccagttctaagattagatgtagcattctccccargcttttgggcctcccccacaagacaagggaataagaccccttgtaaaatccggacgttatagcctacaccagaggatgcaggatcctatcatgatttttc

SEQ ID NO: 489034 - DNA, 201 bp, Homo sapiens
aagataatttttagtttatagaccatatgaaatagttggtaggtcaaatttggtctatgtttgctgacctctgacctagattatcctctcagctatttcartactatttccaatgggacttgtttacagcataaacggatgtgtagaaaactgaacgtgcaaccataagcacagtataaattagtaataagtgactgcttc

SEQ ID NO: 489035 - DNA, 201 bp, Homo sapiens
gcccaccacctctcctttcttttcctcgtcttacagacatggatgtgagaagacccagcctacctgggagtgcgacaatgagacctctctctgcttcccawgacccaggatggagccccactcccaaaccccctattgcctctctcaacctccctgctagacttcaccacttttctcccttgcagggcctttgttcaaact

SEQ ID NO: 489036 - DNA, 201 bp, Homo sapiens
caaacctacacaactcagtaaatgcctctgctagcctggcacagcactgctctgcagcagggtcctgagagctctaagactttatgcccatgttcttcttygtgtcttgagattctatttgtattttggaaacacagttatttctattggttggttatgtaacttatcatgccaatttttttgctgatcctttgttaacca

SEQ ID NO: 489037 - DNA, 201 bp, Homo sapiens
ttgaaaaacaccaccttgctcattctccctcaacaggatggtagctctgggaaggtctaggtctttatccatctctttccctcgatctccttctcctcatsccctcccctttccctagggcctctttccgcagatggatctacctacctacctacctgcctgactacctaccctacctacctatccaccctcccaccgtca

SEQ ID NO: 489038 - DNA, 201 bp, Homo sapiens
agttcaagtgatctgccagcctcagcctcccaaagtgctgggattataggcgtgagccaccacccttggctccataatttaagtgtcaagttcctctctcrtaacctttaagccagatccaattttaatgcatgtgatttaaacccacattttttaaaggatattttctccatatgctttggattgttttttaggagtgga

SEQ ID NO: 489039 - DNA, 201 bp, Homo sapiens
gttgaatatgtttttgccaatatcttctaactttgtctaatttgtgtgatcagatgaataaagttatttgcatagatatataccaagtttaatgttaaaayaaaatacaaaagattaatcttatgcttaatgttactcatctccaataaggtggtgtttagcaaccaggcatggatgctaagaagttagtgtgtaaaacaa

SEQ ID NO: 489040 - DNA, 201 bp, Homo sapiens
ctgtggaaggctagtgttcaggaattggacctctgctcattagatactccagtggtgcagttggggacaggcaggataaattcctatctctctctggggcytcttgtccaaacaggaggatctggtttctgaacttctgggagcaagccagaacttggaaaagatcatctttgtaccttcatacctcgccttctgtggtct

SEQ ID NO: 489041 - DNA, 201 bp, Homo sapiens
catccagtccatagatgagcatttaaaggcaactgtcctagattccaggatgcttccagatggcaaatcctacatcggctctataggatttaatttagggrgagaaagctaagaacattttttttttaaaaaacctattcagcttgtgccaggcataccaattgataagtttgaataagatattcattaccatctcaatgt

SEQ ID NO: 489042 - DNA, 201 bp, Homo sapiens
ctgaagaacttccaaaatcctataatatgttgagttacactataaacctctgaagtaaatacaatatgcagtgcttctcaaacttctttgtgcttgcagcrcttttggggcgagtatcagactttgtctcaaggaacactcttggaaaactctagttagcggtcccacacctggttgtacattgccttctggggttactat

SEQ ID NO: 489043 - DNA, 201 bp, Homo sapiens
aaaactatgtattaaacaatgttttataatacagacaccattaggaaagaaaacttaatgggtaaaaattcacaatatattccaaagctgaattgaattayaactgttatccaccagtgtggatatctgtgccatggctcctttccacgttaataaataataaagaaataattacactgacttcaaaataatgtattaaat

SEQ ID NO: 489044 - DNA, 201 bp, Homo sapiens
gaagactaacgtttcagtttatataattagaatctggtacattcagcccctttacttggcccatgataacagcatgaaggaggatgaacagtcactcatcktgtgggtcagattgggatggatacccaaaaaatctgtttttccctattaaagaagaaaatgtaaccaattgttaggtggaactcaaaggatacatgcttg

SEQ ID NO: 489045 - DNA, 201 bp, Homo sapiens
aaaacaaataatgaagatgaagtattatctcagaggtagatctgcttgtactctaaatgtctccattggagaaaggttgaggggcatggcaagcgactatrccatccccaacttcccagagcaatcatggggaaaaagaaagcagagtgaccccctggggcagaggctaaacaatggttcctaactagattgttgcttcaa

SEQ ID NO: 489046 - DNA, 201 bp, Homo sapiens
tctctctcacaaacacatacagtcacattctatagtgaaacaggaaattgaactaatagaactacatctccatcagagaccaatcaatgccattgattggmacaacatttcactggacatgaggcgccagggagacaggggatcctccttccctccccctaaactacacacactgcccctctgtcaatccccgggattcca

SEQ ID NO: 489047 - DNA, 201 bp, Homo sapiens
tcaggtctaacagcttggcattcattggaaagggaagattgggagcaattatttcaataagccaagccaagaaacacagctatgctattcagggaaaagargaggccacagagaccaagtctacttctagcaaaacggaacccggctggctagtaaaagctgatgtttccctactctgccgtgtgtattggctttcacctc

SEQ ID NO: 489048 - DNA, 201 bp, Homo sapiens
tatttggaatagaaattattaatttccaacagaaaaacatgccagggccttctaaaggtaatttctcattgtttatttaattggacaactggtatgggtgaaaaaaaccctctccaattgacgtaattccctcaggccctagggatagcctgggacttgctgatgagattatttctgtccagagctggcagaggtcccagc

SEQ ID NO: 489049 - DNA, 201 bp, Homo sapiens
gaggctgctgaggatacccctccgtgctggatctgactgtagcagcaacagggattcagaggaagtggtcatactgaagcttggggcaaagttgggaattyggaaggcagaggccaaggcccagccaccatgacctgtcacagggaggggctgcacaacacctgtgcactaaagacgtggggttggattaccatttacaaa

SEQ ID NO: 489050 - DNA, 201 bp, Homo sapiens
cacaatttgaaaatcctcaggaagcaaaaatactataaccagaattaaatgcacagcatataattttcatgaggaatgcctttctgtaaaatgaaggctgttttttttttttttttttgagacggagtctcactctgtcactcaggctggagtgcagtggcgcagtctctgttcactgcaagctctgcctcccaggttcac

SEQ ID NO: 489051 - DNA, 201 bp, Homo sapiens
atcttttatcttctgttggagagaggacagcaaatgtcaccataatcaaaatggtcatctccccaatcatacagagtacctgtgccataaggtacttattktatgtacctgctttattcccagctccatgtcacccctctgtcccaatttcctcacccacatagtgtaaacattacttaatgtggttgtactgtatgcatg

SEQ ID NO: 489052 - DNA, 201 bp, Homo sapiens
cgttagacaatgcttaattgcaactttggaataatacaaacaattggggttaaaaagcatcctttgattttttttcatattcagaagtgacaatttcggasaagtatttctgaagaataaataagtattaggacaactgcatggtccagccagtaagaagcttccaagaaactccttcatgtagaaattaagttattttgc

SEQ ID NO: 489053 - DNA, 201 bp, Homo sapiens
tctcctggatcagaagatatattcattgctacaacttacatttctatctttttgaataaaataatgtcagtgagaaaaatggcattgttttatagccagaraagcttctggatttggtggtgggtgcctgtaatcccagctacttgggaggctgaggcaggagaatcacttgaacccgggaggcggaggttgcagtgagct

SEQ ID NO: 489054 - DNA, 201 bp, Homo sapiens
aaagaacaaagcgtttaaactatggtacatccacagagctatatactatgcagctatgaaaagaagacacagctctctatgttttcatatggaagaactcygggagaagctaagtggaaaaaggtacagaagaatatgtagaacatgcaactttttgtctcagtaggaattacgtattcttatttccaacccaaaaaacta

SEQ ID NO: 489055 - DNA, 201 bp, Homo sapiens
gaggtgatacacatctcagtagagagaaaaagacctgctctggggattagatggtctcatgtgatgtcaggaaccaaggtttcctaagggacaatcacaartcttctctggacctaaacttgctgcctactagcatataatcctcacccctgcaaggctggctgtctgcaagggtcatagtcatctctgttacattcagtg

SEQ ID NO: 489056 - DNA, 201 bp, Homo sapiens
cccagagcaatcatggggaaaaagaaagcagagtgaccccctggggcagaggctaaacaatggttcctaactagattgttgcttcaagccaagaaccttayggctgggtgaaaattcaagactctgaagactctctgggttagcgttactgggaaaggtatgtgtattttggccaccaaatacttttcttatttggtgaaa

SEQ ID NO: 489057 - DNA, 201 bp, Homo sapiens
tgtgtcgagggcaatgaagggtcctcagctgtgtttctggagcctgacatcaaggaggaagtgtggctggggaggcaggtgggacagactgaccacaaagrgccttgcacacaggcttcagggaacctggaccacacattgtcggctgccaggtgctggtgggaggttttaagctgggtagtgaagtgtgaagtgagcttt

SEQ ID NO: 489058 - DNA, 201 bp, Homo sapiens
aaagaacaaagataataatagataagcattcattagttgttcccttctgtccaccatgctgaaggacccagcaagggctgtacagttaagaccctcagacrccagtgtctagattttctatggcaaatgttctatgctcatccagcccccatggtcccctaacggacattgggatgtctttctcctgtcagcacgtggaga

SEQ ID NO: 489059 - DNA, 201 bp, Homo sapiens
gtttgaggatgatgggcaaaacagatgcagcttgactctcttcaggcaactgaaccttgtgagtttatctgggagctttggcaagaaagcacaagcaacartgcacctttggcactctttcctctctgatgaaaagcccagcttaaggaaagctgcatgtggagcagagagggaggggcctacatcagtcaaaccaagctt

SEQ ID NO: 489060 - DNA, 201 bp, Homo sapiens
tgataaccacccttgtctcatctgccttggaaatggtccccatctctccattgccttccacatgaggaaaaggaagcgagaaaattaaatggaaggtttcycaaaagctgggaggtcctccaacactctcaaccttcccctctatccttgacctcaccccaagcattgtcactctggcagtttgtttgcttgttttaccat

SEQ ID NO: 489061 - DNA, 201 bp, Homo sapiens
ttttaaagatggactagataggacttgttatggggctatgaagaagggtggaggagagataataataatttaaaaaattattccaatgcctatcagaaatkatttctatcccagaaagtagcaattttgtcaccatttgcctctttcccagaggtgtgtacttgcaagacttgtttgaggatgatgggcaaaacagatgca

SEQ ID NO: 489062 - DNA, 201 bp, Homo sapiens
agtcacctccttttcctccaaacctgcctcagagtcaggacgcaaaccaagacgcagcctctaactcatggaaccactcctgctcaaagcagaaacacctratcaggacagcccactcctaattaagcagagcatctgatggcctaactctgaatcatccaggctcttaacaacacctctttactcctcctaagtatttcc

SEQ ID NO: 489063 - DNA, 201 bp, Homo sapiens
gaatacaaaaacaaataatgaagatgaagtattatctcagaggtagatctgcttgtactctaaatgtctccattggagaaaggttgaggggcatggcaagsgactatgccatccccaacttcccagagcaatcatggggaaaaagaaagcagagtgaccccctggggcagaggctaaacaatggttcctaactagattgtt

SEQ ID NO: 489064 - DNA, 201 bp, Homo sapiens
ttggcttttcatttttcctatcagggtcactgtatcttgctccctttgacactgagaagggaatggttaagcaacagatctgcaaaccatactctctcctygagggggcaggggatgcatgttgagtggaggtgcctttcccagaaataaagaagttcaccagatcaaatcttgtaaacacgttaatgacagacctcttga

SEQ ID NO: 489065 - DNA, 201 bp, Homo sapiens
gcggtgtgagcaaagacaggaagcagaagagtttgagacatgctcagagcacaggacatgtatgtcagaaaagtgctaagtggaagacaggacacaatgcrtttaaaacttcaaaaagacccttctggatattgttcatgaataatcaacagaagcatcctaagggaaaaagattctcactcagaggtaatggtggcagag

SEQ ID NO: 489066 - DNA, 201 bp, Homo sapiens
tgctgtctgagcctgaaggagcaggccaaaatactaggtctggataaactagggacaaatagtctttggaaacccagaacttcattaataagatcactaasaggcaacaaaagatcatctcatactctttggattctagagtaagcaaatgagagtaggctcagacatggaccctttcctccccctgctacaaattccggc

SEQ ID NO: 489067 - DNA, 201 bp, Homo sapiens
ggcgtggtggtgggtgcctgtagtcccagctactcgggaggctgaggagggagaatggcgtgaacccaggaggcggagcttgcagtgagccgagatcgcgycactgcactccagtctgggcaacagagcgagactccgtctcaaaaaaaaaaaaaaaaaaaaaaaattctggatcgtgtgaatgtgtaagcctttctagga

SEQ ID NO: 489068 - DNA, 201 bp, Homo sapiens
ttgtcaccatttgcctctttcccagaggtgtgtacttgcaagacttgtttgaggatgatgggcaaaacagatgcagcttgactctcttcaggcaactgaascttgtgagtttatctgggagctttggcaagaaagcacaagcaacaatgcacctttggcactctttcctctctgatgaaaagcccagcttaaggaaagctg

SEQ ID NO: 489069 - DNA, 201 bp, Homo sapiens
gctgcactggtggtcctggccctttcctgtgtcacctctgtcttggaattacttgtatccttgaaatttttagtcaagctttatacttggtaagatatctrattagtgagggtttgatcgaaaaatccaatccttggatacattcccctaggaataagggagctttgagtgtacaaagaagaagtgcaccccctagagcac

SEQ ID NO: 489070 - DNA, 201 bp, Homo sapiens
gaaaaacatccatttccaccctgtggagtttctctactgccacagtcagggggccatgttccacccccctcttggagaaaggcctctcttattgttagtcytcagttactgaagggtttttttctctctgctaactccagagactgctgaacacttccatagacatctctgagaattgcaattagatctctcctgccccct

SEQ ID NO: 489071 - DNA, 201 bp, Homo sapiens
gggtctactttcatgatagaatttgcttctcaatgcccacgtgatgctgccattcccaaaagaggcccatggctcagtagagtctctgggccttagctttkaggtgtcacttgcccacccccacttctattatccccaaccctagtttgtgcctagcagagagcagtacttactttcagcactgttttattgtctgaggat

SEQ ID NO: 489072 - DNA, 201 bp, Homo sapiens
aaatgtcaaatgaatgtggagcaaatcaaggtgtcttttgtcaaagcgtcaattgttcttgccacttgaaggaagagatacggacagagcacagtttaagygggccttgctgagctggtcccacaagccactccctgctttcttccctcttggtcacacatgtgcatgcacttgaggagaccatgcgtctttgagattctg

SEQ ID NO: 489073 - DNA, 201 bp, Homo sapiens
ccacagacttgtactgactagaaatcagtcctgggtttgtggcaagctctgttaactaaaggcactgctatcattttatgatgatcccatttgtcttggtrgaattttttttctggtaattctgcctcacaacaggtagcagctatgctggcagttcagagtgaatacatgtgaagcttttgtcggggttggaccattttt

SEQ ID NO: 489074 - DNA, 201 bp, Homo sapiens
tttggagaaaagatgtgacaagcatctttcaacacttaaaggcttaagggctgccactggtaaaacgtggtacaatttgagcattaaaattaatacgtgayggtaatagactataactaattaaataataaaataacccatgagccaatgctaacagcaaatatccaaaccttagattctaagggctagcagatggaaaag

SEQ ID NO: 489075 - DNA, 201 bp, Homo sapiens
ccttttcaaataaaacaccaaacaagttttccagaccatataagctgggatacatgttgctgtgtgaatatgctaatttcaaatcagcataaaaccaggamgtacaggatattgataatgatagcttaatgtcacttcatattttctggctgtcgttttttctagagagaaaacacattttctaagtgtatttaagtcttt

SEQ ID NO: 489076 - DNA, 201 bp, Homo sapiens
ctgggcaaaccttgaataaagtatgtaagtgataaggttgaagacagaacaggagattggacagcaatattctcatggccctaagaatgaaccagtcactrtcagtcactaccaccaacaaccttaacaacggcgacaaaaagatatggccaaatccctctcaaagtatagggttgtgcttgacacaagtattatttcagt

SEQ ID NO: 489077 - DNA, 201 bp, Homo sapiens
cattttctaagtgtatttaagtctttagggaagagatgatggattctctgaaaaaatattgtacagagaggcagagtttcaggggccaggcacagtggttsacacctgcaatcccaacactttgggaggccaaggtgggcagatcacctgaggtcaggaattcgagaccagtctggccaacatggcgaaaccccatctcta

SEQ ID NO: 489078 - DNA, 201 bp, Homo sapiens
tagtgtaaaacacacctgaggtgatagcctatctactcatagattgtgtgattttagcagtggtgtgttagaaaatgtttaacaaccagcatatatatgtrtgtgtgtatatgactatatattacatatacacaggtaagttcatttacaaattctactgatataaagaatgtataaaacacaatttacagagaacaacag

SEQ ID NO: 489079 - DNA, 201 bp, Homo sapiens
aaaggtgaggagccagacttcctgtggcctagaggcccatgtggaaagtaaggcaagtgggcacaatctgagaatcaagattctggctggggttagtggayacggggagaaaacaagacaacccagtcctaccacaagggcaaagaaaggggcaggctgttcagtaactgcccatagggcagagggctggtattcagaatg

SEQ ID NO: 489080 - DNA, 201 bp, Homo sapiens
tagttgtctgaggtgtcaaaacaatcaggtaaggttgtggcatccacagggagcttttccgaatcacacaatgtctgcatgaaggaggaccagggaggcargttattcacacaccttcgttatttgttacaaatcttctcaaatgattatacatgttctgcagtaacagcattttctctaggttctgttagctcagatgta

SEQ ID NO: 489081 - DNA, 201 bp, Homo sapiens
ttctgagttaggacacaaattctactgaaaattaaactctatttatggaactgacagaaaaaccactctgcacttagaaatagagaggaagaatggggagrgggaaagcacacactgattttgacagttttatcttctatgggaagaatagcatgggaagtccctcaaatctcctgctcatgtcattgtcttactttgggt

SEQ ID NO: 489082 - DNA, 201 bp, Homo sapiens
ccctcccatggcacacagggaggcatatttctgcttacttttaggaagaactttctagctattagaggtgtccaactgtggctgcctctgtagactcttarcaccttgtcactcattcaaatatttacggagagtgggccagggtctgtgttgggggctgtaggagatcaaagaggaataagataggattcctgcccatcc

SEQ ID NO: 489083 - DNA, 201 bp, Homo sapiens
tcttctccttcattttcctttgccccagaacctgagagaaatgggcagatagattctaaactgcagttgtccctaggtacaacgacagccacacaacaaaygagaagggagtaatggcaaggaaggtctccaatgacttaaaaggaaagaatgaggttaaagagctggattaggagtctgaataaataggagtgcttactc

SEQ ID NO: 489084 - DNA, 201 bp, Homo sapiens
attttatttttaatatagttcccacgtcccatttcctactctttttcctacaccactctaaagcaatcagttcaagtctctctgggaaggacaatgtcctrgttaaaaaggataattaagggtacttaaagcaagacaaaatttatattagattatcataaatgaagttttatttttaaatagccttctaaaaagcccctg

SEQ ID NO: 489085 - DNA, 201 bp, Homo sapiens
tttgtgtggttcttctgggtgactgtttatgcccctattaggaacatttgggagttatgtttgtccttgggacatggccaagaggaatggatattttggckctttacagctttcccatttcctaccagctgccccctccactctcttccatctgcctggctctcccattcttccctgccagccttcaatgcctttccatct

SEQ ID NO: 489086 - DNA, 201 bp, Homo sapiens
gtcattgtcctgaaagaactgcttggcagaatcttgatcaaagttttcagccctgccaaaagggctcccacttccaacctgattcctggcttacgcctacyggctacaaaaacaagataatgatagctttccattaaaaaccttagctaaattttctctttgtgatttcttatgtggtatactgaaagaaatactgcttat

SEQ ID NO: 489087 - DNA, 201 bp, Homo sapiens
cagtcgattttgtaatgtatagagtactaatcacaggggactgaaggttaatggatcagcaagatccacccagcactccccactagaaaagccacacaagkcaagcgctctaggagtcaatagctcagaagaactgctctggaaacatgcttttcttccatggcgatgagggcagtggtgctcagggagatgagaagggag

SEQ ID NO: 489088 - DNA, 201 bp, Homo sapiens
aagtttttccttgacccagagagatcagaggattcagaatcagccaataaggtgctttctgagccatgctctttcaatacaatgtccttccataccttaarttggagaaatagggtctttatctcttgagatagtcttcttggggtgcctcaaccaccttggcatgtgatagccacatccagagcgctcagaagtggggcc

SEQ ID NO: 489089 - DNA, 201 bp, Homo sapiens
ttcatttgcacagcttgggcagccactgtgctgacaacaattgattaacaataatgatatcaacaatccttaaggatgttgaaaggcacaccatatccacmtggtgaacctcctcttccctcattttgaaaagataatttttcctggacatcaaccaccagcttgtttcttaaataaacagtacaacagtacagcaagtaa

SEQ ID NO: 489090 - DNA, 201 bp, Homo sapiens; identical to SEQ ID NO: 33552

SEQ ID NO: 489091 - DNA, 201 bp, Homo sapiens; identical to SEQ ID NO: 33553

SEQ ID NO: 489092 - DNA, 201 bp, Homo sapiens
cttttatctctgacgcaatttgcagaagactagaaatggccatcctttctccttctggttttctatgtaccagaatgtaagctggaagatggcaggacctmttctcatttactgctgtactcctagcatggagaacagcttctgctgtagagtaggtagggcctctgcacagttcatgaacgaaatgggtgggaatatgcc

SEQ ID NO: 489093 - DNA, 201 bp, Homo sapiens; identical to SEQ ID NO: 195848

SEQ ID NO: 489094 - DNA, 201 bp, Homo sapiens
ggaggtgacacctgagtcaaaccttgattcagataggaatcagccagatgaaggccagtgggatgcatgctcaggcaaagcgacagaactgggatagcccwctgtgtcgagggcaatgaagggtcctcagctgtgtttctggagcctgacatcaaggaggaagtgtggctggggaggcaggtgggacagactgaccacaaa

SEQ ID NO: 489095 - DNA, 201 bp, Homo sapiens
aaataatgtcttacatctaattcaagtcctttcagttgcagcattagcccactttttctcagaagaaaaaccaagcagtcttttatctctgacgcaatttrcagaagactagaaatggccatcctttctccttctggttttctatgtaccagaatgtaagctggaagatggcaggacctcttctcatttactgctgtactc

SEQ ID NO: 489096 - DNA, 201 bp, Homo sapiens
tccccaaggggatgcggactggaagggaagagaaaaatggttaggaggctgctacagaaatcctgatgtgggtgaggacctggaaactcaaccatttccartgtgccacagctcgaggctcctcatcatctcagctcagtgactcacacatgctagggaccaaaaaacaatggctaagtcagcaaaagccaagaaaggtgt

SEQ ID NO: 489097 - DNA, 201 bp, Homo sapiens
gattgaatccatacctgatttgaaaacccatcccctttcttttacatcacatttcctccctgcaggagacactactggcagcccacccagatcccctttcytgccagggcacccatgtcccagctcttgtgcctgttggctgctcacagctcacaaccgacacaaacggctggcccccttgcctcaaggcagggcaaactc

SEQ ID NO: 489098 - DNA, 201 bp, Homo sapiens
aatccttacaacaaccttatatggtagctattattatttccattttatacataaggaaactgaagcatagagaggtaaagtaagttctatctggccaaacrgttagcaaacatccctctctgagtgttcagcatctgcctgaacactgctcatcatggagagctcactgtctcccactgcatcccaccccacctcctgctc

SEQ ID NO: 489099 - DNA, 201 bp, Homo sapiens
gtaatttactttgtgttgctgtggatttgctggggcagagtgggaggtgatgcaaggacattcagcatagtgggtggatgggagggtaatagtagggtttyctttctgttgcaaggatcaagctgaaccatcaaggttactacaaaagcactgcttttaatccaacttaccaggcaggagattgacctggttttgaatctt

SEQ ID NO: 489100 - DNA, 201 bp, Homo sapiens; identical to SEQ ID NO: 195849

SEQ ID NO: 489101 - DNA, 201 bp, Homo sapiens
tctactactactgactactcctggaagaagccctgaggacattacgtcctcactgtttcaccatagaggatcttcgaacttgtttctcttgacaaagccgsctttttagcaatgtggaaggtctcacctcacacacccatgtattcacccactcccatcatccaactgccactttggttgtggcagacagtttggcagtag

SEQ ID NO: 489102 - DNA, 201 bp, Homo sapiens; identical to SEQ ID NO: 195850

SEQ ID NO: 489103 - DNA, 201 bp, Homo sapiens
tctatacagttctgcatcttcttttagcagttttctccccaaaagaagagctctcaagcctgaggcaaggtgcccttaactggcatctactactactgacyactcctggaagaagccctgaggacattacgtcctcactgtttcaccatagaggatcttcgaacttgtttctcttgacaaagccggctttttagcaatgtg

SEQ ID NO: 489104 - DNA, 201 bp, Homo sapiens; identical to SEQ ID NO: 195851

SEQ ID NO: 489105 - DNA, 201 bp, Homo sapiens
tatctgcatgggacatggcgggagaaggatgagaaggctgattagtagtggggcaagtgtctggttgaaaataggagtggacatctgtcctggtctgatcyatacagttctgcatcttcttttagcagttttctccccaaaagaagagctctcaagcctgaggcaaggtgcccttaactggcatctactactactgactac

SEQ ID NO: 489106 - DNA, 201 bp, Homo sapiens
attaagtatgctatgctgtaacacagtggctgtattgggccctatggtgggatacagaatggtttgcaccaatactgagtagcccttgaccactatgaggtttttttttttttttttttggttctattgcctactgtttttgcagtttgtcttctttagacagctgctggtatcccactactcactcaagttcttgattct

SEQ ID NO: 489107 - DNA, 201 bp, Homo sapiens
gtcatgcagaaagcatctctcctgaaattctagttaatgtatacctctctctgcaattagcaatttcaaaaagaactagaattcttaaagaaaaaaaaatwagactatctgaacattctgaacatgtaagactcaactttaagttcctacaaatgggagagtctgaaaacaaactgccagcctgatatgagaacatgcgtg

SEQ ID NO: 489108 - DNA, 201 bp, Homo sapiens
tcataattatccattaaattgttcagttctgtttgtacattttcgcatatatattttgcattttgaaaaatttagaaagtttgatataaatcagatgtttrtacttaagaatacattttatctatagaaataagatggtaagtaacatttaatcagattgacccataactttcagttaggtaatataaatactgtacattt

SEQ ID NO: 489109 - DNA, 201 bp, Homo sapiens
atctgaacattctgaacatgtaagactcaactttaagttcctacaaatgggagagtctgaaaacaaactgccagcctgatatgagaacatgcgtgctcaayacaaccagggccatatctgcatgggacatggcgggagaaggatgagaaggctgattagtagtggggcaagtgtctggttgaaaataggagtggacatctg

SEQ ID NO: 489110 - DNA, 201 bp, Homo sapiens
ttcctccttgctcccaacatgaatcttgcctggataaattctacccattcagtaaaatctaacgtggaacattctctgatcttcccaaactggaagctttrgttttcttaattacatttggtcccagtttctagatctctctcttgcccacaatgccaaacacatcacattgtgcttgtttgttctggtgtagtgcgaaat

SEQ ID NO: 489111 - DNA, 201 bp, Homo sapiens
aatttcaaaaagaactagaattcttaaagaaaaaaaaataagactatctgaacattctgaacatgtaagactcaactttaagttcctacaaatgggagagwctgaaaacaaactgccagcctgatatgagaacatgcgtgctcaacacaaccagggccatatctgcatgggacatggcgggagaaggatgagaaggctgat

SEQ ID NO: 489112 - DNA, 201 bp, Homo sapiens
tgtgtatatagccaccctatcatcacatactgtcacatattatcaattggggtgtgaactcagaagactgggcagaaatagaagttgttttgatatattctgaatctccgtggtatctggtcatcaatggacacaattaaattttgttcaataaaagaatgaattcagtgtaccaatatacttgaaataattttctgttct

SEQ ID NO: 489113 - DNA, 201 bp, Homo sapiens
tgactaggggaaggggagaggagaggggcaatattagtgtaggtggctctgtggggatgaggggaagggcatggattaatgtggagagcagtgggcatttycagatatgaaaaccagcctgttttgtttccctgccgtgtttccaccctagagcagcacttagcacctagtaggtactcagaaaaaaaatgtggagaatga

SEQ ID NO: 489114 - DNA, 201 bp, Homo sapiens
agtcagcctgaattcactgtctgactgccttcttgaatcccaaggtcctgagagcggatcaccctgttctctgctaggcacctgctcgtccctcacccttrgttcatgcagagggtggaccccagcaactatctgataatcttgttcctttctggtctttaaaaaataatatctattaggtttttgttaaatttattatgt

SEQ ID NO: 489115 - DNA, 201 bp, Homo sapiens
gaataaaactgtgttgagagaagagttggcatttatcagaattatttgaattgtcagtgaccaaaccaccctgtagtttcccacatctggctgtgcacctrggttccactgtccaccttgattatggccttagagcttctttgctacctgaaaacctagcaaagaagctccaacgctataatttgctaggtttaacaggcc

SEQ ID NO: 489116 - DNA, 201 bp, Homo sapiens
gaaggtagacaaggaaaggttggagatgttttttaatctctgtgtttttctattctgatcagaagagaaaagaaaattcaaaagcagcttggatcaaaaamccatatctcattgacaaaggagacagagagtgaggggaataccagagagctaattatgagtgctcagccgacagcaatgcctgtgacactcctgatctga

SEQ ID NO: 489117 - DNA, 201 bp, Homo sapiens
ccagtacttttggaggccaaggcgggaggatcaccttaggtcgggagttcaagaccagcctggccaacatggtgaaaccccatctctactaaaaatacaamaattagctgggcgtagtggcacctgcctgtagtcccatatactcaggaggctgaggcatgagaattgcctgaaaccgggaggtggaggttgcagtgagcc

SEQ ID NO: 489118 - DNA, 201 bp, Homo sapiens
ggatcaatgcattttagagagaagatctatcagtccccagaaggcacagaaagcctaagtgcatgtgggaggtttgcactgcattttaatatccctgaaayagggtggtaagtagattttttcttctaaaaccctctcaatacccattttagagcatttcctgaaatccccatctgactgcttcccttggctccccttcat

SEQ ID NO: 489119 - DNA, 201 bp, Homo sapiens
tatatatattttatatatataatttatatataatataaataatcagggagaaaagggttattaaaactatacagaggagactctccctccccactgaagtkaataatcaaaatatcagatgtcaaaacacctgatggagctagggaacttatgttcaacctcctacttttatcaattcactctttttattgaggtgcaaag

SEQ ID NO: 489120 - DNA, 201 bp, Homo sapiens
ccattgggcccttgacgtgctcttggattttccagaatagcctagctccggaatgggcaggagcctggtaggtggaattctcttgccccctcctgccttgragcaataatctctacctgtaaatctgaagccagctgccctgaggaacaggtcattttctccatagaaccgcaagaaagttcaagattaaggcaactcttt

SEQ ID NO: 489121 - DNA, 201 bp, Homo sapiens
ggcccttgacgtgctcttggattttccagaatagcctagctccggaatgggcaggagcctggtaggtggaattctcttgccccctcctgccttggagcaayaatctctacctgtaaatctgaagccagctgccctgaggaacaggtcattttctccatagaaccgcaagaaagttcaagattaaggcaactctttgctttc

SEQ ID NO: 489122 - DNA, 201 bp, Homo sapiens
tgaggcaggaatgtctttggtgggtcaagaaacagcaagaatcccaggatgaccgggacaaatgacaagttgtagaggctgagatgtgaaaagtaagtggrgttcagtctattggatcccagtaagccatggtaagggacttcggctttcattatgaggaaaggaagacatgaaggtattttaagcagaggagtggcaaga

SEQ ID NO: 489123 - DNA, 201 bp, Homo sapiens
acttgcaaacgtctcacctgtaatgtctgtaatcagtctctgtccttcatctggtactcctagctggctaccatgctgtccccaaatggcactgtcactgmttattatcgacacttcatatttgtgttctgctttacagttcaagacttctcatgtgcatatctcatctgacatactaggtttcactgaccatttcatgcc

SEQ ID NO: 489124 - DNA, 201 bp, Homo sapiens
aagagagatggttgagccaggcagtgccaaccatgagtcagaaacctgagtcatcagccaagtcctgctggtcagctcagaggagccttgcagaagggacscaggccatgtgtgcactagagcaaaactgagaaggctgcctaaaccaaggagcttccctgtgcttcctgtttgaataggaaccaatccccaaacatggct

SEQ ID NO: 489125 - DNA, 201 bp, Homo sapiens; identical to SEQ ID NO: 256648

SEQ ID NO: 489126 - DNA, 201 bp, Homo sapiens; identical to SEQ ID NO: 256785

SEQ ID NO: 489127 - DNA, 201 bp, Homo sapiens; identical to SEQ ID NO: 256794

SEQ ID NO: 489128 - DNA, 201 bp, Homo sapiens; identical to SEQ ID NO: 256669

SEQ ID NO: 489129 - DNA, 201 bp, Homo sapiens; identical to SEQ ID NO: 256740

SEQ ID NO: 489130 - DNA, 201 bp, Homo sapiens; identical to SEQ ID NO: 256672

SEQ ID NO: 489131 - DNA, 201 bp, Homo sapiens; identical to SEQ ID NO: 256703

SEQ ID NO: 489132 - DNA, 201 bp, Homo sapiens; identical to SEQ ID NO: 256952

SEQ ID NO: 489133 - DNA, 201 bp, Homo sapiens; identical to SEQ ID NO: 257007

SEQ ID NO: 489134 - DNA, 201 bp, Homo sapiens; identical to SEQ ID NO: 257008

SEQ ID NO: 489135 - DNA, 201 bp, Homo sapiens; identical to SEQ ID NO: 256901

SEQ ID NO: 489136 - DNA, 201 bp, Homo sapiens; identical to SEQ ID NO: 256940

SEQ ID NO: 489137 - DNA, 201 bp, Homo sapiens; identical to SEQ ID NO: 257020

SEQ ID NO: 489138 - DNA, 201 bp, Homo sapiens; identical to SEQ ID NO: 256884

SEQ ID NO: 489139 - DNA, 201 bp, Homo sapiens; identical to SEQ ID NO: 256908

SEQ ID NO: 489140 - DNA, 201 bp, Homo sapiens; identical to SEQ ID NO: 257023

SEQ ID NO: 489141 - DNA, 201 bp, Homo sapiens; identical to SEQ ID NO: 256909

SEQ ID NO: 489142 - DNA, 201 bp, Homo sapiens; identical to SEQ ID NO: 256914

SEQ ID NO: 489143 - DNA, 201 bp, Homo sapiens; identical to SEQ ID NO: 256889

SEQ ID NO: 489144 - DNA, 201 bp, Homo sapiens; identical to SEQ ID NO: 257032

SEQ ID NO: 489145 - DNA, 201 bp, Homo sapiens; identical to SEQ ID NO: 256890

SEQ ID NO: 489146 - DNA, 201 bp, Homo sapiens; identical to SEQ ID NO: 257010

SEQ ID NO: 489147 - DNA, 201 bp, Homo sapiens; identical to SEQ ID NO: 256891

SEQ ID NO: 489148 - DNA, 201 bp, Homo sapiens; identical to SEQ ID NO: 257036

SEQ ID NO: 489149 - DNA, 201 bp, Homo sapiens; identical to SEQ ID NO: 256983

SEQ ID NO: 489150 - DNA, 201 bp, Homo sapiens; identical to SEQ ID NO: 257038

SEQ ID NO: 489151 - DNA, 201 bp, Homo sapiens
aaggtctttgacaaaattctacagccctttgtgctaaaaactctcaataaattaggtattgatgggacatatctcaaaataataagagctatttatggcaracccacagccagtatgatactgaatgggcaaaaactggaagcattcactttgaaaactggcacaagacaaggatgccctctctcaccactcctattcaac

SEQ ID NO: 489152 - DNA, 201 bp, Homo sapiens
tcaaaaccacaatgaggtaccatttcactccagttagaatggcgatcattaaaaagtcatgaaaaaacaggtgctggagaggatgtggagaaataggaacrcttctacactgttggtggaactgtaaactagttcatccattgtggaagagagtggggcgatttctcaaggatctagagctagaaataccatttgacccgg

SEQ ID NO: 489153 - DNA, 201 bp, Homo sapiens
tgatttcagttatctttcattgtgcttagagaacatacactgtatgctttcatcctttgaaatttgttgagatttgctccatgtccagttttttttattgktttatttatttatttatttatttaatttatttttttgagatggagtcccactctgttgctccggctggagtgcagtggcacgatcttggctcactgcaac

SEQ ID NO: 489154 - DNA, 201 bp, Homo sapiens
tgtcagtctccttttaactgcgatttaaaagtacacagtctgacagtttagaatgcactttttacacttcctcagcctttctttcaaacccgaaagtttatttttaaataaaggccatttcccttataaaattttgagggtttcacaaatatataaagaaatgacttagccagacaaggtggctctagcctataatcccag

SEQ ID NO: 489155 - DNA, 201 bp, Homo sapiens
attagatcccatttgtcaattttggcttttgttgccattgcctttggtgttttagacatgaagtccttgcccatgcctatgtcctgaatggtattgcctargttttcttctagggtttttatggttttgggtctaacatttaagtctttaatccatcttgaattaatttttgtataaggtgtcaggaagggatccagtttc

SEQ ID NO: 489156 - DNA, 201 bp, Homo sapiens
atttttggcagagacagggtttcaccatcttggcaaggctgatctcgaattcctgacctcaggtgatccacctgccttggcctcccaaagtgctgggttayaggcatgagccaccatacctggccataaatggtatatttaaacttcagtttcaaattttccattgctagtataaaaaaaaatagaattgattctgagtgc

SEQ ID NO: 489157 - DNA, 201 bp, Homo sapiens
cctgaatggtattgcctaggttttcttctagggtttttatggttttgggtctaacatttaagtctttaatccatcttgaattaatttttgtataaggtgtmaggaagggatccagtttcagctttctaaatatggctagccagttttcccagcaccatttattaattagggaatcctttccccatttcttgtttttgtcag

SEQ ID NO: 489158 - DNA, 201 bp, Homo sapiens
tggcaccagtaccatgctgttttggttactgtagccttgtagtatagtttgaagtcaggtagcgtgatgcctccagctttgtccttttggcataggattgwcttggcaatgtgggctcttttttggttccatatgaactttaaagtagtttttttccaattctgtgaagaaagtcattggtagcttgatggggatggcatt

SEQ ID NO: 489159 - DNA, 201 bp, Homo sapiens
tgggttacaggcatgagccaccatacctggccataaatggtatatttaaacttcagtttcaaattttccattgctagtataaaaaaaaatagaattgattytgagtgctgacctgtatcttgtgaccagagttttttagtacaatccttaggatgctctacatagacaggtttatttcttccttttcaatctgtgtgcttg

SEQ ID NO: 489160 - DNA, 201 bp, Homo sapiens
aattgaatacaagagtttcaaaaagaaatagcaatcagaaattcagcaattaaatataaagcctcaaataaaaactaatgtaacattattagtgctaacaycagttactgtataaatttccttaaaactgtagaaaagtaagaattaacaaatgtatacatcaaaggtggaatcagagttaataaataactgcctgaatac

SEQ ID NO: 489161 - DNA, 201 bp, Homo sapiens
tcctttctcaagctcagtcaagctatttggagctattaattttcaggcttttccctcagccatgataaatggcagatggctctttcagctctaaatttctyatcccaaaaatcatagtgtttctctaggctggtcgacctgaaattatggaaccatagaattaaggttttgggggtgtttttttgtttgcttgttgtttgc

SEQ ID NO: 489162 - DNA, 201 bp, Homo sapiens
attgttttaccttcttgaggggaacggtcttgttaaccagccctgagttgtctaccccaaacaatctctgtcattttcaaagatgcaaaatggtgttattkaattgtctccaccattgtcacacacaggaatgcctaataatagcaacccttgtctccctcttctctcctttgcaaatggctcagtgactggaagaggcgg

SEQ ID NO: 489163 - DNA, 201 bp, Homo sapiens
ctattgtttttccatatacagtttaattgatttctactcttatttctttccttctgcttgcttttggtttattttgttctctatagcttcttagattactkactggataccttgcatttttgccaatacaagtattttaatgctataaatttccctctaaacactgctttagctgcatcctgcaaatgtttaaatgtatta

SEQ ID NO: 489164 - DNA, 201 bp, Homo sapiens
ttaccattgaaaacacttaatttgtttcagcgcttactttaatatattttagaatgtatctgtttctagtgcctgtgggtttctctgataatcgcgtgcakgtgtgtgtgtgtgtgtgtgtgtgtgtgtgtgtgttattcctacttgccttacaaagccaaggccatcttttaactgtgagtcagatgtaaaggtactcag

SEQ ID NO: 489165 - DNA, 201 bp, Homo sapiens
taccattgaaaacacttaatttgtttcagcgcttactttaatatattttagaatgtatctgtttctagtgcctgtgggtttctctgataatcgcgtgcatgtgtgtgtgtgtgtgtgtgtgtgtgtgtgtgtgttattcctacttgccttacaaagccaaggccatcttttaactgtgagtcagatgtaaaggtactcagg

SEQ ID NO: 489166 - DNA, 201 bp, Homo sapiens
attgtaaccatctaattcagaacattaaacattaagtgtttctatttatattattgtcataaactaaatattgagaaataaaatcatatttttggtacttsacataaaacatggaacttaaaatgttgtcctctggggttgctctgtctccagtgagttgagtaagtacagtaggaccataggagtcccatagtcttaagc

SEQ ID NO: 489167 - DNA, 201 bp, Homo sapiens
gaaaatggccatactgcccaaggtaatttatagattcaatgccatccccatcaagctaccaatgaccttattcacagaattggaaaaaactaaagttcacrtggaaccaaaaaagcgcccacatttcgaagacaatcctaagctaaaagaacaaagctggaggcatcacgctacctgacttcaaactacactacaaggctg

SEQ ID NO: 489168 - DNA, 201 bp, Homo sapiens
gagatcacgccactgcaccccagcttgggcaacagagtgagactccgtctcaaaaaaaaaaaaaaagaaaaatttcccttcctctgtatttgtaagcaggygttcccaacccctggtccatggcctgttaggaaccaggccacacagtgggaggtgagtggcaggtgagtgagcattaccatctgagctccacctcctgtc

SEQ ID NO: 489169 - DNA, 201 bp, Homo sapiens
gacctactacatagaattatgggatgttggaggctctgtgggcagtgccagcagcgtgaaaagcacaagagcagtattctacaactccgtaaatggtaaarcatttttaaatttctatcttatattaatggtctaagagtatagatcatctgatatgtaatgccatagcatgccagactcatcttaatttgagaaagatat

SEQ ID NO: 489170 - DNA, 201 bp, Homo sapiens
agatgcaaaatggtgttatttaattgtctccaccattgtcacacacaggaatgcctaataatagcaacccttgtctccctcttctctcctttgcaaatggstcagtgactggaagaggcggactaatagccagagttaaatataaatacaaattaataatacatagagaacagcaataccagaaaaaaagaattctggtaa

SEQ ID NO: 489171 - DNA, 201 bp, Homo sapiens
catgctgttttggttactgtagccttgtagtatagtttgaagtcaggtagcgtgatgcctccagctttgtccttttggcataggattgacttggcaatgtsggctcttttttggttccatatgaactttaaagtagtttttttccaattctgtgaagaaagtcattggtagcttgatggggatggcattgaatctataaat

SEQ ID NO: 489172 - DNA, 201 bp, Homo sapiens
ccccagaagagaagacctactacatagaattatgggatgttggaggctctgtgggcagtgccagcagcgtgaaaagcacaagagcagtattctacaactcygtaaatggtaaaacatttttaaatttctatcttatattaatggtctaagagtatagatcatctgatatgtaatgccatagcatgccagactcatcttaat

SEQ ID NO: 489173 - DNA, 201 bp, Homo sapiens
cttgtacctctggtggaatttggctgtgaatccatctggtcctggactttttttgcttggtaagctattaattgttgccccaatttcctagcctgttattrgtctattcagaggttcaacttcttcctggtttagtcttgggagggtgtatgtgtccaggaatttatccatttcttctagattttctagtttatttgcgta

SEQ ID NO: 489174 - DNA, 201 bp, Homo sapiens
ccctttaccattatgtaatggccttctttgtctcttttgatctttgttggtttaaagtctgttttatcagagactaggattgcaacccctgcctttttttkttttccatttgctcagtagatgttcttccatccctttattttgagcctatgtgtgtctctgcacatgagatgggtttcctgaatacagcacactgatggg

SEQ ID NO: 489175 - DNA, 201 bp, Homo sapiens
tctaagaattgcataggatcttatatcattctatcattatttagtttttgttattcatttattttttgatctatcattaatgcgttttggaatgaggcagrcttttatggaaatactctcacaattctgatctcattaacaccagatttttagctgactgtactacatgtctactgctatggaaaagattcttagtttgga

SEQ ID NO: 489176 - DNA, 201 bp, Homo sapiens
agttctcctagataatatcctgcagagtgttttccaacttggttccattctccctgtcactttcaggtagaccagtcagacatagatttggtcttttcacrtagtcccatatttcttggaggctttgttcctttctttttattcttttttctctaaaattatcttctcgcttcatttcattcatttgatcttccatcgctg

SEQ ID NO: 489177 - DNA, 201 bp, Homo sapiens
ttgattattctagttagcctttcatctaatctttttccaaggtttttaacttctttgccttgggttcgaacttcctcctttagctctgagtagtttgatcrtctgaagccttcttctctcaaatcatcaaagtcattctccatccagctttgctccattgtcggtgatgagctgcgttcctttggaggaggagaggcactc

SEQ ID NO: 489178 - DNA, 201 bp, Homo sapiens
cctaggctagtaatccttcagaaggaaataatgaagtgtctttacttctctcccttaagattaagatatattatcatatcaccctgactcctttcatctcrgccccaccttgattcttctagcacatgttctacaaagcaataactctcagcccaaatgaaagagaaagaataggggaaaagggtactcaaatgcccttaa

SEQ ID NO: 489179 - DNA, 201 bp, Homo sapiens
tttagttcaaaatattttctaatactccttgagattttcccataggctgtttagaaatgtgttgtttagtttccatgtatttagaggctttccagttattytttgctattgacttctagcttaattttattatgatccaagaacatactttatatgatttcacttattttatatttgtgcaacacccggtatgtgacctgg

SEQ ID NO: 489180 - DNA, 201 bp, Homo sapiens
caggcgttgtggcgggcgcctgtagtcccagctacttgggaggctgaggcaggagaatggcatgaacctgggagacggagcttgcagtgagccgagatcaygccactgcaccccagcttgggcaacagagtgagactccgtctcaaaaaaaaaaaaaaagaaaaatttcccttcctctgtatttgtaagcaggcgttccca

SEQ ID NO: 489181 - DNA, 201 bp, Homo sapiens
gccctggtttctttttgacacaaaggaaagctatgcaaatcatgatctgtatgtagaattggtcacaagtatgttgttgcataggctgtacagttgggaaktagaaaccaaatgctacccagagacctaacccaattaagctctttgtatttctccttcaagaaataaatcttccttccttctttcttcctctttctttta

SEQ ID NO: 489182 - DNA, 201 bp, Homo sapiens
cttttactattcattttgcatttcagctgtttccttccatttccatgtgtttaatccacctttcccaggctatagtatcacctatatttgatttattctargcttcagcttccctatttctattttcttattcttcttatttctttactattcagacagaaatgtgtattgtagatatagaattaatgcataccccaaaag

SEQ ID NO: 489183 - DNA, 201 bp, Homo sapiens
gagaaatgaacagatttttgacatatttttttaaagtcaaagaagcagaacttgttggcaaatgcaataatgcaatatgaaaggagtcaaggatcagtctyaagtttttggcccaagtaactggaagaataaaattgccttttagatgaaattgccacaagaatgagtattgatagaaaagaaaagagactgaagaactaa

SEQ ID NO: 489184 - DNA, 201 bp, Homo sapiens
ctactaaaaaatacaaaaattagccagacgtggtgacatgtgcctgtaatcccagccacttgggaggctgaggcaggagaatcgctgaacccagggaggcrgaggttgcagtgagctgaaatcatgccactgcactccagcctgggtgacagagtgagactccatctcaaaaaaaaaaaaaaaaaaaagttacagacaatg

SEQ ID NO: 489185 - DNA, 201 bp, Homo sapiens
tgtaaaattatcctaggcactaatgattgaatgggtggcttaagtaagtggctagatggactgtccccaagaagagggccatattataggtgaaaaagaargaaacaatagtaagttcagttctggacatggtgaaaggaggtatctgtgagctagccacctggagctgtcctggaaatgaaatgctgaagctcaaaagac

SEQ ID NO: 489186 - DNA, 201 bp, Homo sapiens
ccaagctggagtgcagtggcaccatatcggctcactgcaacctctgcctcccaggatcaagaattcttgtgcctcagcctcctgagtagctgagattacasgtgcgtgccaccatgcctggctaattgttgtatttttagtagagacaggtttcgccatgttggccaggctggtctcaaactcctggcctcaagtgatctg

SEQ ID NO: 489187 - DNA, 201 bp, Homo sapiens
gagaaggttcttttcattggatacatattatagaatacagaatgagatgtgtcagttcagacccatatcctatttagctcagaattctatctgaaaatgtmagtcttaataaagaaacaaagcattcataaatgagacaaaaatagttataagatgaccttgatatatgccatcatcatgcaaaaaggtatatacaatggt

SEQ ID NO: 489188 - DNA, 201 bp, Homo sapiens
tttgtaaccatggagtaagattccaggagaaaagtggaaatatttggagaaggaaacaattaggagtttaatgatgggtagaggaagcaaaagcagtctgrgaataagaatatgagagaccaattaaggacccaatatgtatagtaacagaggataactgggatataaatgtcttgagtgtagctggtggcaaagtttcca

SEQ ID NO: 489189 - DNA, 201 bp, Homo sapiens
attcaattttaccagttgcctcttcatgataatcatgatttttctgatttattccattactgtggtaaattatgttgattaattttttgaatgttaaaccmaccttgcaatcctgtaataactctaacttggtcttgtgctgctcttttcatatatcactagatttaatttgctaatatttttcttagacatttgcatcta

SEQ ID NO: 489190 - DNA, 201 bp, Homo sapiens
tgcctctttttttttcttttttttttaattttattattattatactttaagttttagggtacatgtgcacaatgtgcaggtttgttacatatgtatacatstgccatgttggtgtgctgcacccaacagttgcctcttttacttcaaatctattaagagccaaccaaaaatagagatgatagcagtgatgatgtaattgtt

SEQ ID NO: 489191 - DNA, 201 bp, Homo sapiens
tgtctaggtgtagatttgtttttattcatcctattcagaagtagtcatggttctcatctctttatttttcagaattttaagccattatctgtcttgcctcrtttcttctatcccttcctcttgactttctatgagatttttgttcttcataactgttaatatttctccttgctgccttctggatgatgtactcatatctgc

SEQ ID NO: 489192 - DNA, 201 bp, Homo sapiens
tcatgcacttgcacaactgcacctatgtccagggccaagtggtagaaggacaaagaataaaagcaatgggagtttgccccactgtcttgagatacagttcyatcagtcagaaaaatttcccttctgggcccggcgcggtggctcacgcctgtaatctcagcactttgggaggccaaggcgggcggatcatgaggtcaggag

SEQ ID NO: 489193 - DNA, 201 bp, Homo sapiens
ctgcaaagaaacgcagctcctcgccagcaaaggaacaaagctggatggagaatgactttcacaagttgagagaagaagtcttcagatgatcaaacttctcygagctaaaggacgaagttcaaacccattgcaaagaagctaaaaaccttgaaaaaagattagctgaatggctaactagaataaccaatgtagagaagtcct

SEQ ID NO: 489194 - DNA, 201 bp, Homo sapiens
ttcatactatgtgccaggtactatgccagttgctttacatgtcccttcttatttcacctttttaaaactgagatgtgtagatgcagaaactaaggcagagkcaagatttgaacagtttttctgatgccacagacttcagttttaatcactatgccatatatctagagttcacatagcatcctccgtaaataattctgccta

SEQ ID NO: 489195 - DNA, 201 bp, Homo sapiens
aagaactagagaagcaagagcaaacacattcaaaagctagcagaaggcaagaaataactaagatcagagcagaactgaaggacatagagacacaaaaaacscttcaaaaaatcaatgaatccaggagctggttttttgaaaagatcaacaaaattgatagaccactagcaagactaataaagaagacaagacagaagaatc

SEQ ID NO: 489196 - DNA, 201 bp, Homo sapiens
caaaccgaatccagcagcacatcaaaaagcttatctaccatgatcaagtgggcttcatccctgggatgcaaggctggttcaacatgtgcaaatcaataaayataatccagcatataaacagaaccaaagacaaaaaccacatgattatctcaatagatgcagaaaaggtctttgacaaaattctacagccctttgtgctaa

SEQ ID NO: 489197 - DNA, 201 bp, Homo sapiens
ggctgttgtaaatgggattgtattcttgatttggttctcagcttgaatgttattggtgtataaaaatgctgtggattgttgtatgttggttctgtatcctraaactttactgaggtcgtttgtcagttccaggcgcctcattccttccccggggagattctccagccacctggcaactccacagcctccccatgggaagca

SEQ ID NO: 489198 - DNA, 201 bp, Homo sapiens
ctgatttagataatgagtcttggacatcatttctgattgtctaaatcaggcatgatttagacaatgagtcttggagactttcgagctgaaaatatttagaygagaggctgggtgcagtggctcatacctgtaatcccagcactttaggaggctgagtggggtggatttcttgagccccaaagtttgagatcagcctaggcc

SEQ ID NO: 489199 - DNA, 201 bp, Homo sapiens
ccccacccccattccccaggcagtggctggtgtggcccagtctgctggacctcccacctgctgggctcctggctctgttcttcaggccgaggctcaccacrtgcctggctgtgtgatctccccacccccactctggccctgcctgccctgcgttccctctgctgtagccggcctgactgctgcttcttaaaagagctctgc

SEQ ID NO: 489200 - DNA, 201 bp, Homo sapiens
cactgggctcgctccccctcatccagtgctgctgctgctgtggccagcgtcccccccactggctaggcacacctgcctcagggttcaggacccaggaggarccccaagccccaccccgagtcagggctgtctccattgcagctccggggtccccaagcatctgtgcctctgggcgggcagccccaggagcaggcttctcag

SEQ ID NO: 489201 - DNA, 201 bp, Homo sapiens
ctgggatcccactgggctcgctccccctcatccagtgctgctgctgctgtggccagcgtcccccccactggctaggcacacctgcctcagggttcaggacycaggaggagccccaagccccaccccgagtcagggctgtctccattgcagctccggggtccccaagcatctgtgcctctgggcgggcagccccaggagcag

SEQ ID NO: 489202 - DNA, 201 bp, Homo sapiens
cggcctctccctcctcctctcttcagctctgcagatgctggaccctcaggtgttccccaaaaccgggcccagacctgctgcaacttgcaggtcacaaaccrcccccttcactggccttctgtgccgaggaagatgggcggcctggagggaatctgcctttctagaggctggagccctccccactgcccatctgtctgggag

SEQ ID NO: 489203 - DNA, 201 bp, Homo sapiens
agacgaccgggtgaagaatgaggcttagccgagcctcattcccaagtcactgacctatggcacctgcacagtcaggcctttcggcttctggctggaaacaygccgagcctcgccagcatgctcacgtgcccccacccgtccccaggctccctgccagtgtgtcgggagcatggcctctccagcagacaccgagcctgtggc

SEQ ID NO: 489204 - DNA, 201 bp, Homo sapiens
accaaaaataggatccatggatagcaggcaagagtgtccaggtgttcgaggcacagacgacactgtgacagggaagagtccccttagccctggctggggcygtgaaagcatgctgttgtccgtctcgggtgaacgcagactgttgtcacgcattgcataacgatgcttccgtcactggccaatcgcatgggggggtggtcc

SEQ ID NO: 489205 - DNA, 201 bp, Homo sapiens
ggcctctctgcctaggaaaacatggctgtggacgttgcaggatgaccaacagcccctgccactgggctgcacacagggccacgacgggcgctcatgttctrcatcactggcgcccaccccagcccctcccaccttgtgtcgctgtgaatcgcaggatcccagcggctcagtcggaccctcattcctgagtagtctgagcct

SEQ ID NO: 489206 - DNA, 201 bp, Homo sapiens
ctttgtataggggcaccaaccccacatttcccttctgcattgccctagcagaggttctccatgagggccccacccctgcaacaaacttctgcctggacatycaggtgtttccatacatcctctgaaatgcaggcagaggctcccaaacctcaattcttgacttctgtgcacctgcgggctcaacaccacatggaagctgcc

SEQ ID NO: 489207 - DNA, 201 bp, Homo sapiens
agaatttgagtgtgtcatttttggggacacagtttggcccataccaccaggatgtggctgatattcaccaaggagtagctatggttgtgtgttgatgtcarggtgacggtgatgaccctgggtccctcggtggtccccttgcccctgagtctgcctgagcctgtggtggatgtcctgggaaactcttgtgcctcagccccc

SEQ ID NO: 489208 - DNA, 201 bp, Homo sapiens
cggggacggctatgtgaagccctcacactcgcccaggtgcgtcggcatcaggtatgtgtgccgggacagccatgtgaagccctcacactcacccaggtgcrtcggcatcagttgtgtgtgtggggacggccatgtgaagccctcacactcgcccaggtgtgctggctttggttgtgtgtgcagggatggccacatgaagcc

SEQ ID NO: 489209 - DNA, 201 bp, Homo sapiens
gcagggacaaccagggctggggttatgagtgcacggggatggccatgtgaagccttcgtgcttgcccaggtgtgctggtgttggttgtgtgtgcggggacrgctatgtgaagccctcacactcgcccaggtgcgtcggcatcaggtatgtgtgccgggacagccatgtgaagccctcacactcacccaggtgcgtcggcat

SEQ ID NO: 489210 - DNA, 201 bp, Homo sapiens
ttccaggatccaactgataatgaaaagtagcaccctctgtcccacccagaaacactctggaaacccggacagtttagctggagtctgccatgatttcacttttttttttttttttttttttttgaggtggagtcttgctttgtctcccaggctggagtgcagtagcgcgatctcggcccactgcgacctccgcctcccagg

SEQ ID NO: 489211 - DNA, 201 bp, Homo sapiens
tggagtgcagtagcgcgatctcggcccactgcgacctccgcctcccaggttcaagcaattctcctgcctcagcctccccagtagctgggactacaggcgcscgccaccacgtccagctaatttttgtatttttagtagagacggggtttcatcatgttggccaggctggtctcgatctcctgacctcatgatccgcccccc

SEQ ID NO: 489212 - DNA, 201 bp, Homo sapiens
tacaggcgcgcgccaccacgtccagctaatttttgtatttttagtagagacggggtttcatcatgttggccaggctggtctcgatctcctgacctcatgayccgcccccctcggcctcccaaagtgctgggattacaggcatgagccaccgtgcccggcctgattccactttttaaaggaaacgacataattatgtggaga

SEQ ID NO: 489213 - DNA, 201 bp, Homo sapiens
ttcagcggtgtgatctcggctcactgtagcctttgcctcccagattcaagcaatcctcccacctcaacccctcaagtagctgagactacaggcatgtgccrccacactgggctaatttttgtattttttgtagagacgggttttaccatgttgcccaggctggtctcgaactcctgagctcaagccatccacctgcctcag

SEQ ID NO: 489214 - DNA, 201 bp, Homo sapiens
gccccacccctgcaacaaacttctgcctggacatccaggtgtttccatacatcctctgaaatgcaggcagaggctcccaaacctcaattcttgacttctgwgcacctgcgggctcaacaccacatggaagctgccacagcttggggcttgtaccctctgaagccacagcctgagctgtaccttggcccctttcagtcatgg

SEQ ID NO: 489215 - DNA, 201 bp, Homo sapiens
acccgagtcattcactgggcactcttaaaaaatgcagatgctcaagccccacacccgtgaactgtgggtgaactgggggggtttggtgggttgggggtggkgctcaggggctcaggctttttttttaagcccctcttgagttttaccagcagtcgaggctgagattcccgactctgcagtgctcccctgagcagctgtgac

SEQ ID NO: 489216 - DNA, 201 bp, Homo sapiens
tgttgggaagctcagagctgattctgggctcatattaatggaggaccaggccttctactgggcgttaggaagcttggagttgaatcggacctcgtgttagyggacgaccaggccttctacttggtgttgggaagctcagagctgaatctgggctcacgttagtggacgaccaggccttctacttggtgtcatttcccttcc

SEQ ID NO: 489217 - DNA, 201 bp, Homo sapiens
catgtgagtgtgtgcatgcgtgtgcatgtatgcatgtgtttatgtgtgcctgagcatgtgtgaatgtgtgtgcatgcatgaattgtttacgtgtgtatgartgtgtggatgaatccgtcagactgagtgtggatgagtgtgtgactgggtgagagagtgtgggtatcaatatgcatgtggtgagtgtgtgagcattgagtg

SEQ ID NO: 489218 - DNA, 201 bp, Homo sapiens
atttatgtgtgtgttttattaagttgtaggagtttaacgattctgtattcaagtcctttggtggacagatgcactgtgttttcttccagtttatggctcamccattcattttctcagcggtctcttttgatgagtagtctgtgtctcctctaagaaatctttgtctatcctaaagtcaagtttaggtctaagatacattta

SEQ ID NO: 489219 - DNA, 201 bp, Homo sapiens
gtttaatttttaatatcagttttattgaagtctaatttacataaaattcacacattttaaggttgagatttaatgagttttgacaaaggcatacagtcacmtaaccactactgcaataaagatgtagaatatgtctgtcacctcagaaagctcgcccttgaccctttacaggaagtccagctctgggctggagttggctac

SEQ ID NO: 489220 - DNA, 201 bp, Homo sapiens
gagagaaggtggtgtgggaagcccatgggcccaggtcctcatccctgcggcatgatgcgtcagtgacggtgggtggctctgcactgcgctggcccctggcsactggccccgtggcctggctgtgctgtgaccctgcattgcagtgacacgtcggcggagtggccagaaggaagagcgggcactgagactcggaggtgattc

SEQ ID NO: 489221 - DNA, 201 bp, Homo sapiens
tcctggggagtgtggccccgtgcttttgggcggagcatcctgtgtccccgagcccactgcggggccttgtcttccccggggacccccacacctaacgggcrctcccagctgtgtcaggcaggaccctcctagggaggaacccgggttccaggccaggccctgcaggaccactcagagcagcttcccagacttcctcttgag

SEQ ID NO: 489222 - DNA, 201 bp, Homo sapiens
tctgatgatattgaacatcttttgaggtgttttatcaggcattgtgtctagagaaatgtctatccaaatgttttaaaatttttattgtcttttttttagtmtactctgacaatatattttaattggcatatttattttactttatttttttttagagacagggtcttgctttattaccaaaactggagtgcagtggtgcaa

SEQ ID NO: 489223 - DNA, 201 bp, Homo sapiens
ctgtggtttggtgtctgtcattaatttcagaaaattcccagtcattattatttcaaatattctgttctctttctcttctcctgctggaaatccaattatgygtgtgtggtgccgtttgaaattgtcccacagctcttggatattctgttcatttttttcactcttttttttttctctttgcatttcagttcgagaagtttc

SEQ ID NO: 489224 - DNA, 201 bp, Homo sapiens
ggcccctgcacaagaagaagaagcgcctggccaagaacaagtcccgggacaacagcagggacagctcccagtccgtgagtgccagggcaggctcagggcgyggcggcgggctgggcttggggctcctctctaccaccgagcaaggtgtgtggggacccctgacagtgcacacgtctcggaagtccagcagaccgtttcctg

SEQ ID NO: 489225 - DNA, 201 bp, Homo sapiens
agctctgcagatgctggaccctcaggtgttccccaaaaccgggcccagacctgctgcaacttgcaggtcacaaaccgcccccttcactggccttctgtgcygaggaagatgggcggcctggagggaatctgcctttctagaggctggagccctccccactgcccatctgtctgggagcctggtccccatgacaccctcctc

SEQ ID NO: 489226 - DNA, 201 bp, Homo sapiens
caacggcgggaccggctactccttcgaggtggactggtggtcggtgggggtgatggcctatgagctgctgcgaggatgggtatggaccccctgcagccccygggcttggctgccaggcccctgctctctgcccccaccagtgctggggagggggtggctgccccagtgcccaggtgcgcagggatgtctccactgtgtctg

SEQ ID NO: 489227 - DNA, 201 bp, Homo sapiens
ctggaccctcaggtgttccccaaaaccgggcccagacctgctgcaacttgcaggtcacaaaccgcccccttcactggccttctgtgccgaggaagatgggmggcctggagggaatctgcctttctagaggctggagccctccccactgcccatctgtctgggagcctggtccccatgacaccctcctcccagtgagtgcat

SEQ ID NO: 489228 - DNA, 201 bp, Homo sapiens
gtgccggccctgtgcccacgggtccgggctgtgaccccgtggcagctgtttttccttctttctgtcggaaagctccggagatcttccactcttttgtcaayggcgggaccggctactccttcgaggtggactggtggtcggtgggggtgatggcctatgagctgctgcgaggatgggtatggaccccctgcagcccccggg

SEQ ID NO: 489229 - DNA, 201 bp, Homo sapiens
ccatttaactgaaggctcctgtttgcccatccaccacatcccagggaatccaaactaattttaacattagcttaaagcagatgaaattaggaagcagagcyggtgtgatggctctgaaaataaaatttaaaaaaagaaaataggaagcagattatgaaggaagtgaaattgggaagcagaaattaggctgaaattccgcag

SEQ ID NO: 489230 - DNA, 201 bp, Homo sapiens
gccccagctgagactgggcacagtgggctgttagccctggtggacagaccaccaggctgggtcacagcaggtggccttcacctggtccatttaactgaagrctcctgtttgcccatccaccacatcccagggaatccaaactaattttaacattagcttaaagcagatgaaattaggaagcagagctggtgtgatggctct

SEQ ID NO: 489231 - DNA, 201 bp, Homo sapiens
aacgtgcagttctccgaggacacggtgaggctgtacatctgcgagatggcactggctctggactacctgcgcggccagcacatcatccacaggtgtgtgcktggcagacggcgcaggtacctgctgaggtgggcggggctgaagcagccttaggtcaggctgccggcacggcggccgtactccctcagagcgggtctagct

SEQ ID NO: 489232 - DNA, 201 bp, Homo sapiens
ccttccaggacgaggaggacatgttcatggtcgtggacctgctactgggcggggacctgcgctaccacctgcagcagaacgtgcagttctccgaggacacrgtgaggctgtacatctgcgagatggcactggctctggactacctgcgcggccagcacatcatccacaggtgtgtgcgtggcagacggcgcaggtacctgc

SEQ ID NO: 489233 - DNA, 201 bp, Homo sapiens
caactccttgaggaccagagagcagaggttgtggaaggccttggaaacgggtctggattacctgtcctgggaaggtctctcccaacctgagtgtcagacargggttagctctgctgctcacaattttgtgccttaattcctggcttccctttggggatcttcatcctcaattctgattgacatccttggccacaagggacc

SEQ ID NO: 489234 - DNA, 201 bp, Homo sapiens
tgtctatcattggctttagggcccatcccaattcaggacctccagatcctcaacttaattacatcttcagagacctttattccgaataaggccacattccraggctcctggtggctgtgtcttttggggacgcactcgggcctgctgtgagggatcgaggcgtttccaccagggtctccagggaggcaccatggccactca

SEQ ID NO: 489235 - DNA, 201 bp, Homo sapiens
ctctgctccaccttcacactccctcgcccccatgcctgcgtcatcttctcttttctgtcttttatcagggtgtctatcattggctttagggcccatcccarttcaggacctccagatcctcaacttaattacatcttcagagacctttattccgaataaggccacattccgaggctcctggtggctgtgtcttttggggac

SEQ ID NO: 489236 - DNA, 201 bp, Homo sapiens
aaatccatttcaacggaaaaccccacaccaccccaaaccaccttcaacgtgcctgacagtccaggcctcagagggcgggtcctagtgataaggggcaggacaggctccccacctgctggcctgggtcagaaaatggtgaaggagattaggggaagtgggctgctgggttggcaggtgctccggtgagggcgcagcgtgagc

SEQ ID NO: 489237 - DNA, 201 bp, Homo sapiens
ttgtggcctccccatcagtggcgtttcataggaaaagcccagggctccggagcccggggttggcttgttcctctttgtggtgagacctcaaactccatttyctctttgggcttaagttggtgattggaggaagcggctgggaaagcagggaccagtttcctggaggaagcgtttgagtcggacctgcctgccctcagcccc

SEQ ID NO: 489238 - DNA, 201 bp, Homo sapiens
gcggctgtcaagctcgggcagcatggagggtggccctcaagatggatcacggattatgcacatcctgcacacaggtcctcgatcccagggcgaggagagctgggagtagccaggcaaggtgttaagagccttggttatccccaagtgggagagtccacgaggccacaggttctcagccactcaggagcagcatctccaagc

SEQ ID NO: 489239 - DNA, 201 bp, Homo sapiens
taagttggcgggcttgaggtctggagctgcttgtggacagcccgtcgagggtgcaggcctctctctgggcttcccgctctgtcccctgaatgaagggttcrctgaccagtgagtccgcagtgttctggagcctcttctacactctgccaaaaatgccggctcttccttcgtgtttatttttccacacggacttctgaatac

SEQ ID NO: 489240 - DNA, 201 bp, Homo sapiens
aatctatgtggccttttaaatttcaggatagtttagatttatagaaaagttgtgaagctgatacagagagttcccttgttccccagaagcagtttcccctyacgtcaccgtctggcattaaccgggtacatttgtcgtaactagaggacccgtatccatacctcgttgtgaactgaagtccacactgggttcagatctcct

SEQ ID NO: 489241 - DNA, 201 bp, Homo sapiens
gctgatacagagagttcccttgttccccagaagcagtttccccttacgtcaccgtctggcattaaccgggtacatttgtcgtaactagaggacccgtatcsatacctcgttgtgaactgaagtccacactgggttcagatctcctcagttgttccccggtgtcacttatctgtcccaagatcccgtgttacatgagtctcc

SEQ ID NO: 489242 - DNA, 201 bp, Homo sapiens
ttccacactgtcctccctggcaggatggcaccatatgcagcccacaccgggtgtgggggtagttatggtcccctcatcaagggggcttatctatatacgtyattcagaattctttttttttttaagatggaatcttgctccgtcgcccgggctggagtgcagtggcacaacctcggctcactgcagcctccgcctctgggt

SEQ ID NO: 489243 - DNA, 201 bp, Homo sapiens
cgtgatccgccctcctcggccccccgaagtgctgggattacaagcgtgagccactgcgcccggcctggaattcttctgtgtagatttgtctcttccttgcrttaattctgttaccccgtcattgatatcactgtagactcatgggtgctgattttacacgctggttgtaattcgtcactgctttaatttcttggtcacccc

SEQ ID NO: 489244 - DNA, 201 bp, Homo sapiens
ttctgtgtagatttgtctcttccttgcgttaattctgttaccccgtcattgatatcactgtagactcatgggtgctgattttacacgctggttgtaattcrtcactgctttaatttcttggtcaccccgtcccagtctggccactgggagctgtcctttgccctggctccttcaacaccccttcttcggtgctttcgttgt

SEQ ID NO: 489245 - DNA, 201 bp, Homo sapiens
cccgctgtgccttctcccggcgtctggtggctgctggccactcgtggtgtcctcagcttgccgccatgtcactccattcccaggctggcatcttcacatcrctgcctctgctccaccttcacactccctcgcccccatgcctgcgtcatcttctcttttctgtcttttatcagggtgtctatcattggctttagggcccat

SEQ ID NO: 489246 - DNA, 201 bp, Homo sapiens
ccactctaagtcctgccccagccccctggccccaggcctctcttggctcttccccagcgctgccctccccgcacgcatgcacgcgctgcactgaccgcccygcacgtgccgtgctccccgcttgctgatgtttgccgttcgctgctcacctctgggtcagcctcttgccctgcacgttgcgtggggcaggtttcatctcct

SEQ ID NO: 489247 - DNA, 201 bp, Homo sapiens
acctggcagggtgggccctctgggcggctccgtgggaggacccgctgtgccttctcccggcgtctggtggctgctggccactcgtggtgtcctcagcttgycgccatgtcactccattcccaggctggcatcttcacatcactgcctctgctccaccttcacactccctcgcccccatgcctgcgtcatcttctcttttct

SEQ ID NO: 489248 - DNA, 201 bp, Homo sapiens
aaccaccttcaacgtgcctgacagtccaggcctcagagggcgggtcctagtgataaggggcaggacaggctccccacctgctggcctgggtcagaaaatgktgaaggagattaggggaagtgggctgctgggttggcaggtgctccggtgagggcgcagcgtgagcgcaggtgaggctgctgcctgcaggcgtggccgcag

SEQ ID NO: 489249 - DNA, 201 bp, Homo sapiens
cctcagcgttcatacaggagtctggatgcgtgaaggatggtacctggtgtgattctaaactcagacttgcagaggggcactctggaaggctccaggcccamctccattgggcgggctggcatctcgtgggcacagcccttcttcccactaggtggcctgggctctgcaggtgaccgtgcctctaggctttctttggcacag

SEQ ID NO: 489250 - DNA, 201 bp, Homo sapiens
atgcgtgaaggatggtacctggtgtgattctaaactcagacttgcagaggggcactctggaaggctccaggcccaactccattgggcgggctggcatctcrtgggcacagcccttcttcccactaggtggcctgggctctgcaggtgaccgtgcctctaggctttctttggcacagcttgaccatggacttctttcttcca

SEQ ID NO: 489251 - DNA, 201 bp, Homo sapiens
agccatagggcatggggggttcccagcctcttgggacaaagacccccctctgccatctgcagtggatggaacaagagcctcagtgccaggtggtgccatcrcagcatggccactacagccgccacccaggccccttggtgagcttgccagggtccacctcttcttgagaggtttgtggcctcgtgaggcgtcttaacttca

SEQ ID NO: 489252 - DNA, 201 bp, Homo sapiens
gggaggcagctgttgccgaaggggccatcctgcagtcgcagcaactgtgtgccttagccccacggcaatgttctgactaaacaagggctttaggcgggagygcgtgtgggcctgggaggtagctccgtcccctgggaagccggtgggctgagtgcccctgcctggccaccaacacctgacagccatagggcatggggggtt

SEQ ID NO: 489253 - DNA, 201 bp, Homo sapiens
aggcagccagagatgcaagaagaggtggtccctgactgacaggaacggatggcagccacacctgccccggcatcccaccactccccaagcaggagggggasagccctggcatgaaggggccggaagctcagaaggggccatacagagcacaggatgcagggtgtggagggtgaaaccctttgggctcagagctgtgtggaa

SEQ ID NO: 489254 - DNA, 201 bp, Homo sapiens
atacagctcacaccactcacaccactcacacggttcataccagtcacacagctcacaccactcacacagttcataccagtcacacagctcacaccactcasacagttcataccactcacagttcacactgctcacaccgctcacaccagtcacagcttcaccttgctttcttccccaaccgtgtgtctggtgccccctgta

SEQ ID NO: 489255 - DNA, 201 bp, Homo sapiens
attgcctcaactcttctctttttctagtttttagaagatgcaactcacatggtatagaggaggaacactgtgaccccccacaagcacccgggtccggcctyatcagggaccgacgcgacaccaatcctgttacagccacaaccttcgccacctcccgctgtgccctcggtatccgacatgaattccagagagtgtgtcatt

SEQ ID NO: 489256 - DNA, 201 bp, Homo sapiens
ctcaacagtcgggaggctgtggccagagaccaagggatccatccacccgtgtgggtccctgagggccggcctcgtcgttaggggtggaactggggcagacrgggtttccgtgatacaaccacagtgtggaagctgaagatcttctagtacttacagaccttggcgggcgcgtggcaggcctggtgcccacaagcacttgga

SEQ ID NO: 489257 - DNA, 201 bp, Homo sapiens
gtctcaacagtcgggaggctgtggccagagaccaagggatccatccacccgtgtgggtccctgagggccggcctcgtcgttaggggtggaactggggcagrcagggtttccgtgatacaaccacagtgtggaagctgaagatcttctagtacttacagaccttggcgggcgcgtggcaggcctggtgcccacaagcacttg

SEQ ID NO: 489258 - DNA, 201 bp, Homo sapiens
cattttcttccctcgacaggcgtgtgcatggtccttgcctttgccttagagctgcaaggaagctgaggccagagaggtggccctactggcctctggtcagktcacctggcttgggaggagcaaacgccagtggagggcagaggggcccagcctgtgagcccagggagcacagtccagggagcacagtccagggagcacagt

SEQ ID NO: 489259 - DNA, 201 bp, Homo sapiens
gggcagaaacagggcagattcccaactcaccttcccactttctgctctttctagagatgtcaagcctgacaacattctcctggatgagagaggtgtgtggrgttgggtgtgggcagcccaggtgggtggtggcagggatgggcctgtcaggggaggaggatcctgcacgcaaggatgcatctctggtcctgggacagccac

SEQ ID NO: 489260 - DNA, 201 bp, Homo sapiens
tccatatggtcttgcacatgtaagtgctcaataaatgcttagatttaacttaactgggtagaaagagaaagtgaatgagtcaatgtggaagggagctgggsacatggaggttgggcgttttgaccatgagtgttgcacaaagctgtgtctcccttagggagtgtactgcggtgtccagcggggaggcatggcccagccctg

SEQ ID NO: 489261 - DNA, 201 bp, Homo sapiens
cactgagtcttccggtgctttgatcttacacttcccagcctttacagctgtaagaaataaatctctgttgtttgaggaatcaggtctatggcaatctgttrtagtagcctgaactgactgagacagtcatttgtgtggcttactttgtgaagtgtctgtgcaattctttagcccatttatgtgtgtgttttattaagttgt

SEQ ID NO: 489262 - DNA, 201 bp, Homo sapiens
gtcgggcctccgcgtgggcccagagcccaggtcccagcattgaccacgtcccttcgctgaccaggccgtgcgcaggctctgccacctggggaaggggccargggtcctttctgtgctcctgactgaggcccatgtgtgggctttggggccacggaagcattgcctcaactcttctctttttctagtttttagaagatgcaa

SEQ ID NO: 489263 - DNA, 201 bp, Homo sapiens
ccaccccatcgggtcacccccttctgcgaacctcatgacaggttgtggcatccaggaccgcggggacattgttggccatttccggggcagtcgggcctccrcgtgggcccagagcccaggtcccagcattgaccacgtcccttcgctgaccaggccgtgcgcaggctctgccacctggggaaggggccaggggtcctttct

SEQ ID NO: 489264 - DNA, 201 bp, Homo sapiens
gggccagccccgccggcacactcaggttcctctgtgcctcgccctctgctttgggttcacctccgccaccactgcaggagcaaagaaaccctgcgtggggrcctcggcgcagagtctgcttaggaaggagtggttaccacgtgctcctaaatgggccaaaaggcggtgggaatttgccgggcccgtctctctgggtcaccc

SEQ ID NO: 489265 - DNA, 201 bp, Homo sapiens
cctccgagagcagctgctgcaccacagtcctcagtagaagctgcctcggtcccaaggaggctgccccgtgccctggccagatggtgggaggaagttccccygccagcactgctggcagttccccaggcctcgtccacttgcctgccacactgaggggcccagcttagcagctgccttttctctgggagggtcagggctgga

SEQ ID NO: 489266 - DNA, 201 bp, Homo sapiens
tgggggcctccgagagcagctgctgcaccacagtcctcagtagaagctgcctcggtcccaaggaggctgccccgtgccctggccagatggtgggaggaagytcccccgccagcactgctggcagttccccaggcctcgtccacttgcctgccacactgaggggcccagcttagcagctgccttttctctgggagggtcagg

SEQ ID NO: 489267 - DNA, 201 bp, Homo sapiens
gtatctggtaataagagctgaagtagatgggcctttagtgtgaggtttatgtaatctggccaggtttggggcagggtttaaagtctgctgtagctgtgggyaccagaggcttcacatttgttttcatttcccgggttgcccttgggcttgcctaaatcctcctcctcagagagagtctgcgtcttgtggccctctctgctg

SEQ ID NO: 489268 - DNA, 201 bp, Homo sapiens
caggtcacctggcttgggaggagcaaacgccagtggagggcagaggggcccagcctgtgagcccagggagcacagtccagggagcacagtccagggagcayagtcagggagtgggagcccaggggcaggagtgggcatttaaaatgaaaccgcccacccagctggcagctccggtctcaacagtcgggaggctgtggccag

SEQ ID NO: 489269 - DNA, 201 bp, Homo sapiens
gtgcatggtccttgcctttgccttagagctgcaaggaagctgaggccagagaggtggccctactggcctctggtcaggtcacctggcttgggaggagcaarcgccagtggagggcagaggggcccagcctgtgagcccagggagcacagtccagggagcacagtccagggagcacagtcagggagtgggagcccaggggca

SEQ ID NO: 489270 - DNA, 201 bp, Homo sapiens
agaaaccctgcgtggggacctcggcgcagagtctgcttaggaaggagtggttaccacgtgctcctaaatgggccaaaaggcggtgggaatttgccgggccygtctctctgggtcacccaggctgcacctttatgccttaaaatagctgtttccctcatgactgattcaggaggaggaggagaactttcatatccattttct

SEQ ID NO: 489271 - DNA, 201 bp, Homo sapiens
cagggctggttctcctccaggctctaggggcagaggggtgaagccacaccgggccagccccgccggcacacacttgggggaagaggggtgaagctgcactygggggcagagggatggagctgcaccggggccagccccgccggcacactcaggttcctctgtgcctcgccctctgctttgggttcacctccgccaccactg

SEQ ID NO: 489272 - DNA, 201 bp, Homo sapiens
aaatggtcgggaaagggggatcctgctctccctgctgtggggaagctgattcttccagggctggttctcctccaggctctaggggcagaggggtgaagccrcaccgggccagccccgccggcacacacttgggggaagaggggtgaagctgcacttgggggcagagggatggagctgcaccggggccagccccgccggcac

SEQ ID NO: 489273 - DNA, 201 bp, Homo sapiens
tctcttggacctgctgtgtagcttcccgtgggggcctccgagagcagctgctgcaccacagtcctcagtagaagctgcctcggtcccaaggaggctgcccygtgccctggccagatggtgggaggaagttcccccgccagcactgctggcagttccccaggcctcgtccacttgcctgccacactgaggggcccagcttag

SEQ ID NO: 489274 - DNA, 201 bp, Homo sapiens
cttcacgtcgtctgcctccgagaccctggtctttgctgtgtggccccacggtgtggcatgcccctcctcctgttggtaactataacgaacggtctcatcartggcaggcatctcctgatctcacccacctgtgtgataataaaacctacattttaaagcaaggggcatctcctgaatcatgtggatctcttggacctgctg

SEQ ID NO: 489275 - DNA, 201 bp, Homo sapiens
accccagacaaccagggcaggcctgtattcccacaggccagtctcaaacctgctcacctggctttccccgcctttccctgcttttcccgaggaagcctccrctaaggctctgcccgtgtttccccttcacgtcgtctgcctccgagaccctggtctttgctgtgtggccccacggtgtggcatgcccctcctcctgttggt

SEQ ID NO: 489276 - DNA, 201 bp, Homo sapiens
gtcccgtgcgcctcacacacacctgccctctcctctctgcagtgacctgtcccgtgcgcctcacacacacctgccctctcctctctgcagtgacctgtccygtgcgcctcacacacacctgccctctcctctctgcagtgacctgtcccgtgcgcctcacacacacctgccctctctctgcagtgacctgtcctgtgcgcc

SEQ ID NO: 489277 - DNA, 201 bp, Homo sapiens
gaggatggacactttgcctgctgcgtctatgctgaaacctggggctatcctggggtgccctgggaagggagtgggcattttccagttcagaggaaaatgcraagaaacctttcgtctagaaactgttctgtctcctcctccacacactgagtgcctaaagcacttgccccaccagacggcacagggtaccgccagggagca

SEQ ID NO: 489278 - DNA, 201 bp, Homo sapiens
gccctgttagattcccaagcctcaggtgaatgtcagcgggcggtgcagcctccacagcctggtacgaggttttgtcactgcacatttcctgcaaaacaacygtgaacagttgtcaatcttcatatattgacctcccatcaaacacatacgaaaatttctctgtgaagaagtgtccaaaataaaaccgtgcacttaccatga

SEQ ID NO: 489279 - DNA, 201 bp, Homo sapiens
tcacttttctgcatcttcccttgaaaatggtttttctgctgcggtcatgctgttttctgtgtttcgctgtgggtccaccttctgatttgtgtggactcgawaattgctgaccgaaaagctggtccaaaagctgggccccagaattacctccaggctcatctcatgatgagggaagcctcgcatgtgggtctggcgtcaccg

SEQ ID NO: 489280 - DNA, 201 bp, Homo sapiens
ggaggtctgtgggatggctggtgtctgtaggatcacgcgcctgatgccagccgatcccagacttggcgtggtggcatctcatcactctgctgaaagctcayttttctgcatcttcccttgaaaatggtttttctgctgcggtcatgctgttttctgtgtttcgctgtgggtccaccttctgatttgtgtggactcgaaaat

SEQ ID NO: 489281 - DNA, 201 bp, Homo sapiens
gggcccaggtcctcatccctgcggcatgatgcgtcagtgacggtgggtggctctgcactgcgctggcccctggccactggccccgtggcctggctgtgctrtgaccctgcattgcagtgacacgtcggcggagtggccagaaggaagagcgggcactgagactcggaggtgattctggagcaaaatcctaggatgtcctgg

SEQ ID NO: 489282 - DNA, 201 bp, Homo sapiens
gaccctgtctcaaaaaaaaagttttcgtacatacccaactatctaccaatcaggaagctgaaagcacaaccagtaccttctcaggagcgtggggaggccarccacccgggcagagcaaggagagaatgaggagtgacatgggtgttgccgtgagtggcgaaggggatggaagatttcagcacgatgctatttctaacaagt

SEQ ID NO: 489283 - DNA, 201 bp, Homo sapiens
ttgtcccactcccccttccacttcgcttctgtgtcatgatgcaggacaaaagcaccaccagaaactgttgccgttctcttgggcttcccagccttcaaaastgagtcaagtaaacatctttcctgtataaatcataacccagcctcaggtattctttgtagcaacagaaaatggaccaagacactggccttgagacttggg

SEQ ID NO: 489284 - DNA, 201 bp, Homo sapiens
catttagacaccgtgtagctggcacaggtgctgaccctgaccctgttccagtgcccagtgccaggaggtctgtgggatggctggtgtctgtaggatcacgygcctgatgccagccgatcccagacttggcgtggtggcatctcatcactctgctgaaagctcacttttctgcatcttcccttgaaaatggtttttctgctg

SEQ ID NO: 489285 - DNA, 201 bp, Homo sapiens
gaggaaaccttgggagaagatacattgggtttttttttttttgaggcagggtcttgctctgtcaccaggctggactgcagtggcacaatcatagctcactraagctttgagctcctgggctcaagcaatcctcccgccccagtctcctgagtagctgggactataggtgtgtgccatcatgtccagctaattaaaaacttt

SEQ ID NO: 489286 - DNA, 201 bp, Homo sapiens
tgagcccagatggggcgcagccacggcctcgagccctggggagccatagcctgcatctgacctggactcttggggaccgtgggccacgctggggtaacggrggaaaccttgggagaagatacattgggtttttttttttttgaggcagggtcttgctctgtcaccaggctggactgcagtggcacaatcatagctcactga

SEQ ID NO: 489287 - DNA, 201 bp, Homo sapiens
catgtttgtttcaaaaggacgacgcctgcagctttgttgagaatagattctagggcgagggtggaggcggggagaccaggctgttgcaggaatccaggcgsgagtggacggtggccagaagcagaggaggggcaagatgcggtcggagtctgggaacgcttgaaggaagagcctgcaggatttcccgacagacgggctggg

SEQ ID NO: 489288 - DNA, 201 bp, Homo sapiens
taaccaactctttgaagatctcatctccacacacagccacgctcggaggcacgaggggtcagggcctcagcttaggacttcgggggcacagcacagcccaygacacacctaccctgccggggcttgcaggcacacctggtctgtcctttccccatttcagctgagctggagagaagctagacatgcattcagggtaggggc

SEQ ID NO: 489289 - DNA, 201 bp, Homo sapiens
atctcatctccacacacagccacgctcggaggcacgaggggtcagggcctcagcttaggacttcgggggcacagcacagcccacgacacacctaccctgcyggggcttgcaggcacacctggtctgtcctttccccatttcagctgagctggagagaagctagacatgcattcagggtaggggccttgccccgccagcaca

SEQ ID NO: 489290 - DNA, 201 bp, Homo sapiens
aggggcagggccgtggctctgagcacagtgtgcccaggaggccgcaggagtctctggaaaactcagactccagatccccacccacacctggaaattttgtyctgtaggtgtggggtgtcggggagggcgcgagtctggggtcaggaacgggtgatcccaggtcactccgatgtgtgctttggccaccttagggaaacacca

SEQ ID NO: 489291 - DNA, 201 bp, Homo sapiens
acctttccctctttctgggcccagagcccccacaggcccaaagtctgggtcctgtgagctgctatgtgtttctgattcatttttggtctatgaagtgttgstggtttttaaatttttgttttaaaaattacctattataggccaagcatggtggctcacacctgtaatcccagcgctttgggaggctgaggcgggcggatc

SEQ ID NO: 489292 - DNA, 201 bp, Homo sapiens
cctctccttttggggttagacagactcaccagcattaacattaaaatagagatcttggctgggcgaggtggctcacgcctgtaatcccagcacttggggasgccaaggcaggcagatcacttgaggtcaagagatcgagactagctggccaacatggggaaaccccatcactactaataatacaaaaattagccaggcgtg

SEQ ID NO: 489293 - DNA, 201 bp, Homo sapiens
aacttacagtcatggtggaaggccaaggggaggccagcacgttctcatggctggagcaggtagaagagagtggaggggaagtgacacacactttcagacgyccagatctcatgagaactcactatcacgagaacagcaagggggaactccaccccatgatccagtcacctcccaccaggaccctcctccaacactgatctc

SEQ ID NO: 489294 - DNA, 201 bp, Homo sapiens
aaggtgtggttaggccattaagagattaatgctgctctttagggactgggctaattcttgagggagtgagtggcttcccgctctctccggacagcattaastgccacaggttgggttattataacatgaggccacccctcatgttttgtcccactcccccttccacttcgcttctgtgtcatgatgcaggacaaaagcacc

SEQ ID NO: 489295 - DNA, 201 bp, Homo sapiens
ggagcccatgtagaacactcacccataacaggaaaccatggcaacaacccctgccctgcgaagcccgatgggcttattcaggccagttgaaaacacacagytccttcattcaggcaaccggccctgtgagggcacatcccagaaagtgtgtagcgagtgtcacagggaaactgcaggggccgctccggaatgccggccatg

SEQ ID NO: 489296 - DNA, 201 bp, Homo sapiens
catttaagcaaaagcactggaaaggccaggacgggagaaagcacaaatacgtcacactgaagccagacaaggaagcatcttacagcctcaaaatgaatgamcaaccctccgcctcccaggttcaagcgattctcctgcctcagcagtagctgggattacaggtgcctgccaccacacccggctaattttttgtatttttag

SEQ ID NO: 489297 - DNA, 201 bp, Homo sapiens
atagtcacattctgaggagccgggggttataacatcaagtctgcccttgacctcacacaagccaggctcctccaggccctctgctccaccaggcctcaacrtggcgcacaaaggattgaacggacgccagcatcatttgtaagaactccaggccgcatcccaagggtgacctagccccccaaatgcctgcctgagaaaact

SEQ ID NO: 489298 - DNA, 201 bp, Homo sapiens
gtcttctcagccaccctcctgagtgggatgccgccttgttcggctctggctgtcaatgggggcgagtggccacccggggtggtatctctgtgcctggagcrcttccttacaggtctcctgcctgccctgggcgtgggcagagacgcaggcccctcccctctcccagtatacaggcagaccaacctgctgattgatgataaa

SEQ ID NO: 489299 - DNA, 201 bp, Homo sapiens
ctcctgctgctgctgactaatacttgggcacgtggcgagaccttggtcttctcagccaccctcctgagtgggatgccgccttgttcggctctggctgtcartgggggcgagtggccacccggggtggtatctctgtgcctggagcgcttccttacaggtctcctgcctgccctgggcgtgggcagagacgcaggcccctcc

SEQ ID NO: 489300 - DNA, 201 bp, Homo sapiens
tcgagccctggggagccatagcctgcatctgacctggactcttggggaccgtgggccacgctggggtaacggaggaaaccttgggagaagatacattgggtttttttttttttgaggcagggtcttgctctgtcaccaggctggactgcagtggcacaatcatagctcactgaagctttgagctcctgggctcaagcaatc

SEQ ID NO: 489301 - DNA, 201 bp, Homo sapiens
ttcccagtgttaaattgtcgaccttgtcgttgagccactgcctggccctgagccctgccttcccgcagctgtcaaaggggcagtcggcgtcctctttggaygcctctttggagccacggctgtgcttctggctggaggagttgggtgggctgggcgtgtggctcttgcacccagcctgggcagcaggtgtgggtggagggt

SEQ ID NO: 489302 - DNA, 201 bp, Homo sapiens
cttggggcgggcccctccctgtggctgtgctctgttcccagccttccttggcctcgacctatggcagggtctgacactcctgatccccaacccccttcccygtgcctgctccatggcctccttggcggatcctcctcgtctctgactctgactctgccgtgctggggctctttcacctcccgctccacccacacgctggtg

SEQ ID NO: 489303 - DNA, 201 bp, Homo sapiens
gtctcctgtggacccaccctcttcccactcttaagttttcacttccccagctctcctgagccccagcggacccccacccctcactgtccctttaaaacccrcagtcaccgccgtgcagattcaagctgagtcaggtcacgctagactcttccccattgcaacagttatgactaatcacagtctgccctcaccactctggca

SEQ ID NO: 489304 - DNA, 201 bp, Homo sapiens
acccaccctcttcccactcttaagttttcacttccccagctctcctgagccccagcggacccccacccctcactgtccctttaaaacccgcagtcaccgcygtgcagattcaagctgagtcaggtcacgctagactcttccccattgcaacagttatgactaatcacagtctgccctcaccactctggcaatgggctgtgt

SEQ ID NO: 489305 - DNA, 201 bp, Homo sapiens
ttttttttttttctggaaacagctgtttctaagactttttctcattgttgcttgaacctgggaggcggaggttgcagtgagccgagatcgtgccattataytccaccctgggagaaagtgtgagactccatctcaaaaaaaaaaaaatccatctaaggtgcaatagatgagttttatattatgtaaattatgcctcaatag

SEQ ID NO: 489306 - DNA, 201 bp, Homo sapiens
gaggcctcttgacctggtccttgtcatctccttagccttcgtctcttgccactccctgcctcaatctctccagcttaaccagcctggcctttcattcattyctttcttctaaagcatcacattcttgctcacctcttggacgctacccatgttctgcccggagggctgctctcctgctcccctttggctgacgtctgccca

SEQ ID NO: 489307 - DNA, 201 bp, Homo sapiens
agagtgtgtgacttaaccgtcactcggcatggccttaggtcctgtttataatttggtatcttattgccacaaagagccattccgtttgtcttatggtctcyagcttaacattaaagctggttggttgttgtgtctaaaccgtaaaagggagggggtatcaggagacccgtctgacctcccatcccaccatcatagccagga

SEQ ID NO: 489308 - DNA, 201 bp, Homo sapiens
actgtcaccatagcaaccaagtgtccccacacgtgggctccaaggccctggccttccaagaatcctcagtcccaggccccgccagggctgaatctgagggygccacggccatctgtcttccatttcccaggagggaggctgtccgtggattctccacataggtggacaccagcatcggagtcccatgggagcccatttcct

SEQ ID NO: 489309 - DNA, 201 bp, Homo sapiens
ctcctgctgggatgggcaccgagggcttcctctgaggcaggtgctgaacccactgccttctgcgtgcctgctggagaatggcaactttgagggagagcagrgaacagagcttcgcagctgcaagggctgaaaactcggctctgtgcactggaagttagagaccgatgcgtttgtgctagccaggcagggagagctgcggtg

SEQ ID NO: 489310 - DNA, 201 bp, Homo sapiens
ccccaaactgagcacccgccgggactcagctgggctttgtgtggtgaaatcaggagggcaagactaggccctggcccgaatagcagaggacatctctgggyggtgaccgcttccctccgcttcttcctgtcactggcagggcacagacaacttgggagtcatagcacagggtttgcagaagaatgttctgcacctctgagt

SEQ ID NO: 489311 - DNA, 201 bp, Homo sapiens
cagtcccaggtacagccgtggagaaacactctctctttgttagcagaagtgggatcctgctctgcatgccaatttgccgtaaggtgcttgttgattcagcratatgttgccagcctcttccagacctgaggcatcatttgttggctgaatttacaacagttctcagccccaggctgtggacccgagtcattcactgggcac

SEQ ID NO: 489312 - DNA, 201 bp, Homo sapiens
gagacccgcctagatggaggaagcgctgctgggcgccctcttaccgctcacggggagctggggccatggatgggacaggagtctttgtccctgctcagccyggaggctgtgcacggccctcgtcacaaggtgacccttgcagcacaggccgcgggtgccccaggctcggctcagttcttggaggtcaagggcatgggttgg

SEQ ID NO: 489313 - DNA, 201 bp, Homo sapiens
ctctgtctcctgcagctcccctgtcttgataattggctgtctaggcagcgggtaaggtgaaccccttgggcagttatgtgatgatctcagtttctgtaaaycggaagtccaggcatggtgcagctctgttccctgcttcggggtctcaccagaatgtgagctaacattgaggtcgtggccttgtcaggtgcagctctgttt

SEQ ID NO: 489314 - DNA, 201 bp, Homo sapiens
ctgaggaacttcgtttaacatgtcttataggacaggtccaacagagatgaattccttccctttttgtttgtccaaaaaagtctttactttcacctttaaakaataatttcactggatatagaattctagattggtaggttttttactttcaacactttaaatatttcactccgctctcttcttgcttatgtgatttctaac

SEQ ID NO: 489315 - DNA, 201 bp, Homo sapiens
tccgcctccctgtctctgggctgcctctccttccctgcaccccctgccgtggtctccccactggccctgacactcctttccagagccgcagaggctttcgrcgtcccagagggcgcgggcctgcgagtcctgcctctgtggccaccatgccccggggtcgcctgggacatctgcttcctgcctgctgatcggtgccattcc

SEQ ID NO: 489316 - DNA, 201 bp, Homo sapiens
cattttgttggctttctgggtggtctgtcacgttgccttggagtgactctagtggccccgtgatggttttgcctcgttctttccttatggtgttgccggarctcatggagcagagaagagagaaggtcctgagcccaggggctgccgagggctggggacagctcctcccgcacggttggtatggacgggttgtccttccag

SEQ ID NO: 489317 - DNA, 201 bp, Homo sapiens
ggtggggccaggagcccacatttccagccggccccaggcggtgccagcgctgctggcccgcggacatactttgagtgtgagagtttagtgagtatatagcyggtgcatcatggtgagtgagggcaggaaacccacggggtgctggtcccttggcccgggctcccgatgggcctggagggggatctctaaccctctgtacca

SEQ ID NO: 489318 - DNA, 201 bp, Homo sapiens
tgaaatctattgttttaaaaatcaaggctgctgcagagatcagcatggctgggcaggagtgcagacggaggtgcttgccctggcctggctttgtccccccmagattccatccagcctcctctcaccccacttctccacctgtgaggagggagcccccatggtctctgccatgcttccttctgggctccggccctgccaatc

SEQ ID NO: 489319 - DNA, 201 bp, Homo sapiens
caacatctttctgtgtgaggccaggtgtggggccagcctcaggtgcccagtgaggcagggcgtgggcacagcacgggcccacactgttgggacaaggagcygggggctctgggaacgtggcctctgttctgaccctccatgctattcttgcagctctctgcctgggtctcttgccaggtgtgctggttttttcctgagtgc

SEQ ID NO: 489320 - DNA, 201 bp, Homo sapiens
gtctgacctcagagcctctgttcgctgtgggaaagctgttcctggcggctcttgtgcccaataacagggctcggggtcctggcaccgcgtttctcaaaccrggtcctgttcgtgcccaggggacacattgttccacttttctgttgctgctagtaaactaccctacactagtgacttatcagcctccttgtggtttctcac

SEQ ID NO: 489321 - DNA, 201 bp, Homo sapiens
agggctgcctgctttacagatggggtgtatgggccactgccacgtggaggccgaagctggctggaagtgcctgagcccagggacactcttctggatgccasagtccccagccatgggtcaggggtgccggctgctgaatggagggccccggttaggacactcctcaccccctgtatttctatctgataatggagccctagt

SEQ ID NO: 489322 - DNA, 201 bp, Homo sapiens
agaatgtccaccgtggctccctcatccatgtacacggcacctcggccagagcggctcagagagctgcgggctggtgcaaacctccccaggggtcttgtccygaggtctcagttagtttgctgttggctggtggatcagctgtccatgctgctgggtctcgtcctggggtctcagttcgctgttggctggtggatcagctgt

SEQ ID NO: 489323 - DNA, 201 bp, Homo sapiens
cctgggtgactccacacactgcgctcaactccctcccagtgaccccacacacggcgctcaactcccccccagtgaccccacacacggcgctcaactccccrgtgaccccacacagggcgctcccctccctccctccccagtgagctgagcaggagcgagaagccacagcgaggatctcagccacaggctcctcccagcatg

SEQ ID NO: 489324 - DNA, 201 bp, Homo sapiens
cgtggaggccgaagctggctggaagtgcctgagcccagggacactcttctggatgccacagtccccagccatgggtcaggggtgccggctgctgaatggarggccccggttaggacactcctcaccccctgtatttctatctgataatggagccctagtcatttgcgtctttgagtcactttgggggtgccaccctccttg

SEQ ID NO: 489325 - DNA, 201 bp, Homo sapiens
tcccagcacccacccccaccagcggccctgtggggctgtctgtgagtagccatggggcctggtggggcagcactgcccagagacatggtgggcacgggtayggggatgccggacctcccatggctgctgtcagggctgaggccagacgggctgatgggccagatggcagcaccagggacagtacctgctgcctgggccccc

SEQ ID NO: 489326 - DNA, 201 bp, Homo sapiens
gatcttcggggtctgctggcagcgggggcggaggcaccggtggggtggcagcgaggactggctgccctggacacgctggggatggccacggaggaggggcyggggcatgtcctgcagagggtgtggggtgggagccaagcaggaggggagtcctctgtcattgggtcctggtgccccttccccagagccacagcagccaga

SEQ ID NO: 489327 - DNA, 201 bp, Homo sapiens
cctgcagtgaacttcgaccacttccagatccttcgggccattgggaagggcagctttggcaaggtaaggcagggcctggggtggggactgggctgaggggrcaggggcagaaccgtggagtcggacatgctgtcccctgagcccacctactcccatcctccttgggagaagcagccttacctgggcagaggctccaggtct

SEQ ID NO: 489328 - DNA, 201 bp, Homo sapiens
ccttgggccacatgctgagccagccacggtgctttgcctgatgtcggccgtcggcaccacccttcctcgcgtggccctgaggttcctgaattctgaacctsaggcttggtgggaccctcctcaaggtgccctggcctgggggtggcgggctattccgtgctggtgggctgtgggccctggaccctctgactcatgcctggt

SEQ ID NO: 489329 - DNA, 201 bp, Homo sapiens
tccaccatatttgtctcacagcctgtctggtcccagccccagggcaacaaacagcctttctggagcagtttccagacctgcagtggccgccttgagcctgyagtgaccgtctgcaggaggccgcgggtgctggggctggcgcaggaaagcaccgttgcttctgcgcctgtgcagagtgaggctggggcttccatcccgggc

SEQ ID NO: 489330 - DNA, 201 bp, Homo sapiens
ggacgtttgaagggatttcccaggaaggcagaccctggagcctgagagaaggtggtgtgggaagcccatgggcccaggtcctcatccctgcggcatgatgmgtcagtgacggtgggtggctctgcactgcgctggcccctggccactggccccgtggcctggctgtgctgtgaccctgcattgcagtgacacgtcggcgga

SEQ ID NO: 489331 - DNA, 201 bp, Homo sapiens
ccctgttcctgttcggtgggctgggaggaattccagaggaaggcctgcgcgctggcccagccacccgggagagcgcattggacctgtccttccaggagaaygcgctggcctaggcacccaggagagcgcactggacccgtcctgaggatgacacgggctccacctgtcctttgcaaagagccctggaagggccccgtgggg

SEQ ID NO: 489332 - DNA, 201 bp, Homo sapiens
ccctccagtgcacagttagtgccgcttcctggcaggcacagatcccttcactgcaacctgtgggggcctccgcagatggcagccccaagccccaggaagcragctggtggcaggctctgtggccctctcatggcgagccctaccaggtcactggtgtcctggtgatcccctgagctgcgtctccaggcaccctcacagcag

SEQ ID NO: 489333 - DNA, 201 bp, Homo sapiens
agccctggaagggccccgtggggggtgatggggggcggccagggccacgctttccattttaggaaaaggaggctgtgaggaactcttcgagtgctgttgayggtttggggaaaggtgctttccactctaccaagtgctaatgtgtgtgaaaatcagactggagctcatgccaccttggagcaaagctcccgctgtgcccgg

SEQ ID NO: 489334 - DNA, 201 bp, Homo sapiens
gcacagaggggaaggaagagagcgggatgctaagtgccgtctggggagccggagggcccggggcgggcggggctgctcgaggacagccgagcagaaaagarttgctgctgaggcaccacctttggagccgccctcgctgcctgtccttcccgctgggctcactccccgcgtctctcctggggcttcctggagccacttccc

SEQ ID NO: 489335 - DNA, 201 bp, Homo sapiens
aatggcaggcatctcctgatctcacccacctgtgtgataataaaacctacattttaaagcaaggggcatctcctgaatcatgtggatctcttggacctgcygtgtagcttcccgtgggggcctccgagagcagctgctgcaccacagtcctcagtagaagctgcctcggtcccaaggaggctgccccgtgccctggccaga

SEQ ID NO: 489336 - DNA, 201 bp, Homo sapiens
agccgtgtgtttgcggcatcagtgttgacaccgatgatccatgctcagagggtacaggcctgaagagctatgtggggactggcgccccggagggggtcccrctgtggtggcagcggtggcccccaagccccacgctcactctgtgtgtctccttgcaggacagggtgaggggccttggcctcacggtgttgagacgggagt

SEQ ID NO: 489337 - DNA, 201 bp, Homo sapiens
agggactgaaaaactcaccactgtcatcaccatcaccatcaccaccatcatcgccatcaccaccaccatcaccactgcaaccatcatcactctcatcaccrtcatcactataatcaacacaatcactattgtcaccaccattaccaccaccaccacgaccacaatcactgttatcaccatcaccaccaccctcagtcctca

SEQ ID NO: 489338 - DNA, 201 bp, Homo sapiens
gagtgcctgcccccagctgtggcacctgtgccgaccaggtcagccccatagctgtgtgcctggtgtccatctggggggacctcgtcccagcagccccagcygagactgggcacagtgggctgttagccctggtggacagaccaccaggctgggtcacagcaggtggccttcacctggtccatttaactgaaggctcctgtt

SEQ ID NO: 489339 - DNA, 201 bp, Homo sapiens
cactgtgtctgaggagtcacgcttttatcgaagtgtgtagttggtgatggaatgcctgagcaggaggaggaaggacagactcactgtggtttcccggggcygctgctggtgcctgcaggccagcctctgtgggggtggacaaggctgagaactggccagcaggggtgctgcctcggaactttccacaaaaagtttcttttg

SEQ ID NO: 489340 - DNA, 201 bp, Homo sapiens
caggaccccaggggctgcaggtgggaggatggaaggacagacacgtggacagggctttttccagccttgacccacccacacacctacccatctcgtgctgrcctctgaacacactgacctctggggtctttcagggcatgtcctgtatccacaggcctcacccccctgaggacccagcctcatgggcagcccccagctggt

SEQ ID NO: 489341 - DNA, 201 bp, Homo sapiens
agcctctgtgggggtggacaaggctgagaactggccagcaggggtgctgcctcggaactttccacaaaaagtttcttttggggccctgtgctcttaccctkgtggccacggcgaggccagtcctggagaccgggaggctgggggtcctcttgtggaccgtacccctcagccctgcacaggaccccacctctgaggaagcca

SEQ ID NO: 489342 - DNA, 201 bp, Homo sapiens
tgctgggattacaggtgtgagccaccgtgcctggccaaaaattgattttttaaatctatgaatctgtggcagttgggacattttattttggtcgtctttartttttctcagcaccgtttcctagctttcagtgtgcaaatgttgcagatattttgttaaatttatccccacatattttatgttttttaaaaaatgaaatct

SEQ ID NO: 489343 - DNA, 201 bp, Homo sapiens
atccccaagtgggagagtccacgaggccacaggttctcagccactcaggagcagcatctccaagctctgtttgaagatagccaagaatcccagacctcatyggaacgatcgcttgcatgcaagcaccagaaaacagtatgtccatagtagttccacagtggcgaggactcagacggcgccccagcccatctgctcttccaa

SEQ ID NO: 489344 - DNA, 201 bp, Homo sapiens
gaggggagtgagtgtgccacacgggcccggctgcctcccggcccccgtgtctcaggcaggtggggcctcctgccctggaattgtagccaagcagcctaaakccttggggaggccttgcctgccggggcctctccccagccccgagagtctcttaactctgctgtagccccatgaagctcagtcacacctgcccaggtggct

SEQ ID NO: 489345 - DNA, 201 bp, Homo sapiens
gaatattataccaacctttcatttctagatttgtttttatgtgttcctgaattcagttttccaatatttcattaataatttttacatctgtgttcattagrgatattggcctgtgttttctttcctgcagtgtccttgtctggttttgacatcaggcatgtgctggcctcacaaaatgagttgagcggtgttctcttctca

SEQ ID NO: 489346 - DNA, 201 bp, Homo sapiens
aaatgttcctctgcacattggtcaaatatcccttgtttgaaatgtgctttgatgtagtcacctaactgtatgatcagtgttttcatgatgtatcattttcyacccttttcctttttaacctgtgtctttaaataggaagtacatcttttacaaatatatagtggtgtcttgcttttaaaaatacagtctgaaaatatctgc

SEQ ID NO: 489347 - DNA, 201 bp, Homo sapiens
tgcgaggatgggtatggaccccctgcagcccccgggcttggctgccaggcccctgctctctgcccccaccagtgctggggagggggtggctgccccagtgyccaggtgcgcagggatgtctccactgtgtctgaggagtcacgcttttatcgaagtgtgtagttggtgatggaatgcctgagcaggaggaggaaggacaga

SEQ ID NO: 489348 - DNA, 201 bp, Homo sapiens
gagggtggggacgttgagctctttgtggagctccacaggcaggtgtgggaatgtgttctgggttcatgcctggtctttgggcaggtgtgggaatgtgttcygggttcatgcctggtctttgggcagacgtgggaatgtgttccgggttcatgcctggtctttgggcagacgtgggaatgtgttccgggttcatgcctggtc

SEQ ID NO: 489349 - DNA, 201 bp, Homo sapiens
ctggtctttgggcaggtgtgggaatgtgttctgggttcatgcctggtctttgggcagacgtgggaatgtgttccgggttcatgcctggtctttgggcagaygtgggaatgtgttccgggttcatgcctggtctttgggcagacgtgggaatgtgttccgggttcatgcctggtctttggacagacgtgggaatgtgttccg

SEQ ID NO: 489350 - DNA, 201 bp, Homo sapiens
ctggtctttgggcagacgtgggaatgtgttccgggttcatgcctggtctttggacagacgtgggaatgtgttccgggttcatgcctggtctttgggcagaygtgggaatgtgttccgggttcatgcctggtctttgggcagacgtgggaatgtgttctgggttcatgcctggtctttggacagacgtgggaatgtgttccg

SEQ ID NO: 489351 - DNA, 201 bp, Homo sapiens
ggggaaacccacaaaacgttgggggcctcataagaccgcagccgcaggagttctgcacacggccccggccgctccccagagctgcccaggaggtgttcccrcacaccatcagttctgctccaggccagcaggtctcagctgtgactttgctcacctgtctctccagacttgggggtcgccgcagcgctttgacctcagctc

SEQ ID NO: 489352 - DNA, 201 bp, Homo sapiens
acgtgggaatgtgttccgggttcatgcctggtctttgggcagacgtgggaatgtgttccgggttcatgcctggtctttgggcagacgtgggaatgtgttcygggttcatgcctggtctttggacagacgtgggaatgtgttccgggttcatgcctggtctttgggcagacgtgggaatgtgttccgggttcatgcctggtc

SEQ ID NO: 489353 - DNA, 201 bp, Homo sapiens
ctcgggatgggagatgccagcagagcttggctttcaagcagaaatctggaaaccctgtggggagtggcttcggacttcaggggacctggagcgtcacttgyggttcaagaggtccctgccctgagggagctgggctctcaaacacccacaccagtcagtcatgggcgaagggcccctctgtggccttctgactgtgtgtgt

SEQ ID NO: 489354 - DNA, 201 bp, Homo sapiens
acgtgggaatgtgttccgggttcatgcctggtctttgggcagacgtgggaatgtgttctgggttcatgcctggtctttggacagacgtgggaatgtgttcygggttcatgcctggtctttgggcagacgtgggaatgtgttccgggttcatgcctggtctttgggcagacgtgggaatgtgttccgggttcatgcctggtc

SEQ ID NO: 489355 - DNA, 201 bp, Homo sapiens
gggcctcctggaggaggtgggtctgagctcttatggacaggacgtgcagggcagcacgtgcagacggctgagggcactgactggcaccctggggatcagaygaccgggtgaagaatgaggcttagccgagcctcattcccaagtcactgacctatggcacctgcacagtcaggcctttcggcttctggctggaaacatgcc

SEQ ID NO: 489356 - DNA, 201 bp, Homo sapiens
ctggtctttgggcagacgtgggaatgtgttctgggttcatgcctggtctttggacagacgtgggaatgtgttccgggttcatgcctggtctttgggcagaygtgggaatgtgttccgggttcatgcctggtctttgggcagacgtgggaatgtgttccgggttcatgcctggtctttggacagacgtgggaatgtgttctg

SEQ ID NO: 489357 - DNA, 201 bp, Homo sapiens
cagacgtgggaatgtgttctgggttcatgcctggtctttggacagacgtgggaatgtgttccgggttcatgcctggtctttgggcagacgtgggaatgtgttccgggttcatgcctggtctttgggcagacgtgggaatgtgttccgggttcatgcctggtctttggacagacgtgggaatgtgttctgggttcatgcctg

SEQ ID NO: 489358 - DNA, 201 bp, Homo sapiens
tgcgcagtgagaggcaggggtgggtggggccgggccttggacagtaggacccctctaggcagcctggggggaggtgctgctgcccacctctccagcggttkggggagctggaggagcccaggtccctgctgccgtgggcgactcctgcggtctcaggcactgcggtctcaggcctgagcctctgccacccggagatactgt

SEQ ID NO: 489359 - DNA, 201 bp, Homo sapiens
ccggagatactgtattgatcaggcggttgccctaatcactcatttatggcagatccccgtgttgtctgaggatgtcgatattaaacaccggaacatgattmcagacaatttcagaccagacaggaccaggatccacagtgctggcctgggaagctgccactgagcctgttttatgggtggaagctttcactgcaattaagg

SEQ ID NO: 489360 - DNA, 201 bp, Homo sapiens
ggttttggagaaagaagttttaaatgttgatgaagttcagtatatcatcaatttcttcctttatggtttgttctttttgtgttctttctaagaaatcttcraccagcgcttgatcacaaggattttttcctgtgttttcttctagaagttttatagctgttaatttttgtgtttcacatgcggtgagggttgaggattttt

SEQ ID NO: 489361 - DNA, 201 bp, Homo sapiens
gccatgtgccgagtgttagccgctagccgggcctcggctgccacctcctggcaaatcccagcagagccttccctgcagatccctctgctgtcctctggcgycaggggtttaggtagcagcactgagaacaggcgtcccttgggccacatgctgagccagccacggtgctttgcctgatgtcggccgtcggcaccacccttc

SEQ ID NO: 489362 - DNA, 201 bp, Homo sapiens
cacccatccctctgtagaaaggccgtctgcactgcgaccccacctttgagctggaggagatgatcctggagtccaggcccctgcacaagaagaagaagcgyctggccaagaacaagtcccgggacaacagcagggacagctcccagtccgtgagtgccagggcaggctcagggcgcggcggcgggctgggcttggggctcc

SEQ ID NO: 489363 - DNA, 201 bp, Homo sapiens
gggacaacagcagggacagctcccagtccgtgagtgccagggcaggctcagggcgcggcggcgggctgggcttggggctcctctctaccaccgagcaaggygtgtggggacccctgacagtgcacacgtctcggaagtccagcagaccgtttcctgaagtcctgagaaggccagagacctcccttctgcctttcccagccc

SEQ ID NO: 489364 - DNA, 201 bp, Homo sapiens
cagctcccagtccgtgagtgccagggcaggctcagggcgcggcggcgggctgggcttggggctcctctctaccaccgagcaaggtgtgtggggacccctgrcagtgcacacgtctcggaagtccagcagaccgtttcctgaagtcctgagaaggccagagacctcccttctgcctttcccagcccccacctcgctccttat

SEQ ID NO: 489365 - DNA, 201 bp, Homo sapiens
tcccagtccgtgagtgccagggcaggctcagggcgcggcggcgggctgggcttggggctcctctctaccaccgagcaaggtgtgtggggacccctgacagygcacacgtctcggaagtccagcagaccgtttcctgaagtcctgagaaggccagagacctcccttctgcctttcccagcccccacctcgctccttatgaag

SEQ ID NO: 489366 - DNA, 201 bp, Homo sapiens
ggatggccatgtgaagccttcgtgcttgcccaggtgtgctggtgttggttgtgtgtgcggggacggctatgtgaagccctcacactcgcccaggtgcgtcrgcatcaggtatgtgtgccgggacagccatgtgaagccctcacactcacccaggtgcgtcggcatcagttgtgtgtgtggggacggccatgtgaagccctc

SEQ ID NO: 489367 - DNA, 201 bp, Homo sapiens
cctcacactcgcccaggtgtgctggctttggttgtgtgtgcagggatggccacatgaagccctcacactcgcccaggtgcgtcagcatcaggtgtgtgtgyggggacggccatgtgaagccctcacactcgcccaggtgcgttgatgttgtgtgtgcagggatggccatgtgaagccctcacactcacccaggtgcgttga

SEQ ID NO: 489368 - DNA, 201 bp, Homo sapiens
tcacacttgcccaggtgcgttgatattagttgtgtgtgcagggatggccacgtgaagccctcacactcacccaggtgcgttgatgtcagttgtgagtgtgygcagggatggccacatgaagccctcagactcgcccaggtgtgctggctttggttgtgtgtgcagggacggccatgtgaagccctcacactcgcccaggtg

SEQ ID NO: 489369 - DNA, 201 bp, Homo sapiens
tggggacggccatgtgaagccctcacactcacccaggtgtgtcgacatcagttgtgtgtggggggacggccatctgaagccctcacactcacccaggtgtrtcggtgtcagttgtgtgtgcggggatggccacgtgaagccctcacacttgcccaggtgcgttgatattagttgtgtgtgcagggatggccacgtgaagcc

SEQ ID NO: 489370 - DNA, 201 bp, Homo sapiens
catgcctggtctttgggcagacgtgggaatgtgttccgggttcatgcctggtctttgggcagacgtgggaatgtgttccgggttcatgcctggtctttggrcagacgtgggaatgtgttctgggttcatgcctggtctttgggcagatgtgggaatgtgttctgggttcatgcctggtctttgggcagacgtgggaatgtg

SEQ ID NO: 489371 - DNA, 201 bp, Homo sapiens
gacccctgggaatgtgattggtgcagcctcggcctgagaacgcagcagggccagcctccccgaccccagcctcagaggggctgtgacaggaaatgacaacrccccccaccgcctcctgaccagcagagttgctgtagcctgtgctgtgttttctccagagaaaccacttacttcttcccttcgctccagcagctaataggg

SEQ ID NO: 489372 - DNA, 201 bp, Homo sapiens
ggacggccatgtgaagccctcacactcgcccaggtgcgtcagcatcagttgtgtgtgtggggatggccacgtgaagccctcagactagcccaggtgcgtcrgcatcaggtgtgtgtgccgggacagccacgtgaagccctcacactcgcccaggtgtgccggctttggttgtgtgtgcggggacggccacgtgaagccctc

SEQ ID NO: 489373 - DNA, 201 bp, Homo sapiens
acttctggccggttccccagaggagtggctgctggtggctaagatgtttaactggtggccccagcctactcagacagctgggtgatcggatgctttgtgtyggcttccttaatggcaagctgacttcgtcgtcgttgttattattattttgttgttatttcttgtttcaagttggggtttcagtgtagtgtttagtatgtc

SEQ ID NO: 489374 - DNA, 201 bp, Homo sapiens
taagatgtttaactggtggccccagcctactcagacagctgggtgatcggatgctttgtgtcggcttccttaatggcaagctgacttcgtcgtcgttgttrttattattttgttgttatttcttgtttcaagttggggtttcagtgtagtgtttagtatgtcacttcccctggtgaagccatggctgtgggttaaataagt

SEQ ID NO: 489375 - DNA, 201 bp, Homo sapiens
cacctgcacagtcaggcctttcggcttctggctggaaacatgccgagcctcgccagcatgctcacgtgcccccacccgtccccaggctccctgccagtgtrtcgggagcatggcctctccagcagacaccgagcctgtggcccacgtttgggcatccacgccatggcctatcccatgagcccgtgggcaggtcatgggacc

SEQ ID NO: 489376 - DNA, 201 bp, Homo sapiens
cccacccgtccccaggctccctgccagtgtgtcgggagcatggcctctccagcagacaccgagcctgtggcccacgtttgggcatccacgccatggcctaycccatgagcccgtgggcaggtcatgggaccgtgaggccagggaggtgggggcataacgccctccatgtgttcctgccaccccaggctgaagaggagccag

SEQ ID NO: 489377 - DNA, 201 bp, Homo sapiens
tagctgacgcctggcactgccctcttcatcagccaccagaaaactgcaggaaaccacccaggagctgtctcagagaggactttattccagttccagcagcsactctggacggcctggggaagctggcgcagctggcagggcgtgtggcagggatgggcgctgtgagagccggggtgggcggctgcgaagcctctcgggcgt

SEQ ID NO: 489378 - DNA, 201 bp, Homo sapiens
ccgctcacggggagctggggccatggatgggacaggagtctttgtccctgctcagcccggaggctgtgcacggccctcgtcacaaggtgacccttgcagcrcaggccgcgggtgccccaggctcggctcagttcttggaggtcaagggcatgggttggggtagtgggtggggaggtgaatgttttctagagattcaaactg

SEQ ID NO: 489379 - DNA, 201 bp, Homo sapiens
aaagcagaggggcctgcaggtgccgggagggaatctgtcttttcgtctcccggggacctgcacaaaccacccgaccggcccagggggatactccctgtccrcaacagtgctttccaaccggagcccttttctgatagaagatttctgatagaagattttcaaagacagtatttcttgagctgggcttcatgaacatactct

SEQ ID NO: 489380 - DNA, 201 bp, Homo sapiens
gggcgtggtcacagagtgcaggggcgtggtcacggggtgcaggggcgtggtcacggggtgcaggggcgtggtcacggtgtggaggcctcagcgtgatcacsgagtgtaggggcatggtcatggagcacaggtggcgtgatcacagagtgcaggggcgtgatgatggggtgcagtggcgtgatcacagagtggaggcctcag

SEQ ID NO: 489381 - DNA, 201 bp, Homo sapiens
ttacagagtgcaggggcgtgaacatggagtgcgggtgggcatgatcatggctcattgcagccttgacctcctgtgctctggccatccccctgccacagccycccaaagtgctgggatgacaggtgtgagccactgcacctggtcacatgtgtatgtctttacacacatgcatgtacttgtcacgtagagtctgtcatttac

SEQ ID NO: 489382 - DNA, 201 bp, Homo sapiens
tagcccagggctttttgttcttacacttcagtcgtgaaagtcactgcacatcggtcttgatgaatttttgtgggcttgctgactgtggaacttcacagttgcaatcattactgtgttaaactgggtgcagctggactattgatcactgttgctaattgcttctagaagggctgggccacttatatgccccgtcccccgccc

SEQ ID NO: 489383 - DNA, 201 bp, Homo sapiens
tggttttctcaataatctgtataagttccttgtaagaaaagtagccccttgtttgtcatatgtattgcaaatgctttttctcagtttgtagtattttgaatttttttttttttttttttttgagacagtctcgctctgtcgcccaggctggagtgcagtggcgcgatctcggctcactgcaagctccgcctcccgggttca

SEQ ID NO: 489384 - DNA, 201 bp, Homo sapiens
ggagggagatggcaagaatgctgccgccaacagggtcctgctggaggtgtaggcaccaggaccccgggctctgggtgtgtacctgggcaggagaagccacrattgtttcggagcccaggggccccacaggactcagctgtgggctgctgccacatcctggctgtgtctgtttcacagaaaagacagggtgagggcatcgct

SEQ ID NO: 489385 - DNA, 201 bp, Homo sapiens
caggggccccacaggactcagctgtgggctgctgccacatcctggctgtgtctgtttcacagaaaagacagggtgagggcatcgctgccaagatggagcckggggcacagggtatgttcccagagtaagaccccagttggctccccgaggctggaagggtggtggtgccagctgaggacagagccctgtcccggagctgcc

SEQ ID NO: 489386 - DNA, 201 bp, Homo sapiens
cgctccgccctgcccatgtgcggccccatttgcccctcggccgggagcggctaggccgggacgcccgtggtcctcaccccttgagctgctttggagactcrgctgccagagggagggccatgggccgaggcctggcattcacgttcccacccagcctggctggcggtgcccacagtgccccggacacatttcacacctcag

SEQ ID NO: 489387 - DNA, 201 bp, Homo sapiens
ccagggtgtgcagaggctgcaggctgctggtcatgggggtctgcccctgggtgaggggacggtggagaaggagaaggtggccagctgggccctcggagatkcgtgggcagcgcacgtaatgctgggccatggtgctggcacccaggcatgacctcgaggctccaggccccctctggactgaggagtccagggtcagaggcc

SEQ ID NO: 489388 - DNA, 201 bp, Homo sapiens
ctacagcaggtgtgccattttatgcccctaccagcagtgtgtgagggttctaatttctccatatatttaccaagtcctgttattgtctggtttattttttwaaaaatcatagttatcttagtgtgcagtgattgtgtggttatggtttgcatttctctgatgatattgaacatcttttgaggtgttttatcaggcattgtg

SEQ ID NO: 489389 - DNA, 201 bp, Homo sapiens
acaggaaagacccgcccccataattcaatcacctcccaccaggttcctcccacaacatgtgggaattgtgggagtcacaattcaagctgagattgggatgrggacagagccaaaccatatcattctgccccagcccctccaaaatctcatgtcctcacatttcagaaccaatcatgccttcccaacagtcccccatagtct

SEQ ID NO: 489390 - DNA, 201 bp, Homo sapiens
acagtccaatgtctcatctgagacaaggtaagtcccttctgcctatgagtctgtaaaatcaaaagcaagtgacttcctagatacaataggggtacaggcaytgggtaaattcagccattccaaatgggagaaattggccaaaacaaaggggctacaggccccatgcaagtctgaaatccagcaggcctgtcaaatcttaaa

SEQ ID NO: 489391 - DNA, 201 bp, Homo sapiens
tagggcaggggcaaaatgctgccagtctctttgcttaaagcataacaagagccacctttgctgtagttcccaacaagttcctcatctccatctgagaccarctcagcctggacttcattgtccatatcattatcagcattttggtcaaagccattcaacaagtctctaggaagttccaaactttcccacattttcctgtct

SEQ ID NO: 489392 - DNA, 201 bp, Homo sapiens
atcagttctgctccaggccagcaggtctcagctgtgactttgctcacctgtctctccagacttgggggtcgccgcagcgctttgacctcagctctctgatrggtccaggaaaagtaattgattttcattagttcagcatttttcctgtcgcagggatgggagtgaggccttccacgttgtttgccgcagagcagaagccag

SEQ ID NO: 489393 - DNA, 201 bp, Homo sapiens
agggacctgattctcatcctacgtccatggcacgacatctagatgtttccaaggccaggatggctgcctccaagggcaggtggggcagattcatcccagamccctggaccttccctcggcctcttgcacctgccagccttgctactgttgctgactcaccatcttccccgggggtcccagcacccacccccaccagcggcc

SEQ ID NO: 489394 - DNA, 201 bp, Homo sapiens
ggccagcaggtctcagctgtgactttgctcacctgtctctccagacttgggggtcgccgcagcgctttgacctcagctctctgatgggtccaggaaaagtmattgattttcattagttcagcatttttcctgtcgcagggatgggagtgaggccttccacgttgtttgccgcagagcagaagccagaagtccttgctcgtc

SEQ ID NO: 489395 - DNA, 201 bp, Homo sapiens
tgacctcagctctctgatgggtccaggaaaagtaattgattttcattagttcagcatttttcctgtcgcagggatgggagtgaggccttccacgttgtttrccgcagagcagaagccagaagtccttgctcgtctctgtgtttcttcgtcggagtcatgtcttttatttcctgaacgcaggtgtgtggtcagacaggagat

SEQ ID NO: 489396 - DNA, 201 bp, Homo sapiens
gtcgcccaggctggagtgcagtggcgcgatctcggctcactgcaagctccgcctcccgggttcatgccattctcccgcccagcctcctgagcagctgggastacaggcgcctgccaccacgcccggctaattttttctatttttagtagagatggggtttcaccgtgttagccaggatggtcttgatctcctgacttcgtg

SEQ ID NO: 489397 - DNA, 201 bp, Homo sapiens
gccgggactgcaccatcttgataactgtagctttgtagcaagctttcaaatcaggatctgtgaatcccccagttttgttctttttggacattatttgactrttctgggtccctggcatttccactgaatgctgaggggtctgacagttgcatctgagctgccaagcaggtttgtggcggtgctagggactgaagcctgctc

SEQ ID NO: 489398 - DNA, 201 bp, Homo sapiens
ccgtgttagccaggatggtcttgatctcctgacttcgtgatccacccgcctcagcctctcaaagtgctgggattacaggcgtgagccaccgcgcccggccrgtattttgatttttaaaaactgtgtttattgttatctatgcagaagctttgcatttttgtagcgttctgtgtatcttcctggtcaagagccctttccctg

SEQ ID NO: 489399 - DNA, 201 bp, Homo sapiens
ggtgctagggactgaagcctgctccatttcccaggcccctcctcgctgtgggtgacatctggggtccgaggctgtgtctcagcatgtgtgaaggtgccacrggtgccctgagatggggattcctggtccagttactcagaaagtgcatccaggagagacccccgcccttctcgggatgggagatgccagcagagcttggct

SEQ ID NO: 489400 - DNA, 201 bp, Homo sapiens
caggatggtcttgatctcctgacttcgtgatccacccgcctcagcctctcaaagtgctgggattacaggcgtgagccaccgcgcccggccggtattttgatttttaaaaactgtgtttattgttatctatgcagaagctttgcatttttgtagcgttctgtgtatcttcctggtcaagagccctttccctgtagcttctgc

SEQ ID NO: 489401 - DNA, 201 bp, Homo sapiens
gagcaatgggttcccagggggtcttcatggtaaggagtctattcctaagctgccccctcaagaccacccccacctctccctggagggaactggggaggaaytccgaagccttgctttgccactgctgccttctgccatcaacaggatgttcatgtgattttatcgtgatttgggagatgaagaaagaccctctcccaggtg

SEQ ID NO: 489402 - DNA, 201 bp, Homo sapiens
tttgggagatgaagaaagaccctctcccaggtgagccagagtgcaggctggccctgcaccgagacagccaatgaaggagaggtcgggagggtgtgtcgggycccgggtgagaagccaggttcctgcagcctgaaggcagaggtttggaaaggagcatgtgtgcatgtgtgtgtgcacttgtctgtgcaagggactcagaag

SEQ ID NO: 489403 - DNA, 201 bp, Homo sapiens
tcttctgactcttatttttggagacataaaagagaacagagtcttacactctgtctagaaataatgcctttccttacttcaattcagttggtcaaaaatargcacatccctttcccagggtgataatccaatcctttgagctggaaggaggaatggaggaggggaggctgggctggggagggacaggaacagaggccgttc

SEQ ID NO: 489404 - DNA, 201 bp, Homo sapiens
tgggctgcctgtgggttctctgctggttacagacgcagagggagggaggggtgtctggttggtacccccaggccattctgcaaggcagcactagcaaatamggccatgggttcatatccggcaggccggggagcaggcgtgggactccaagggaagaggccatgctgggtcctggggttgccgtaactcacggccataccc

SEQ ID NO: 489405 - DNA, 201 bp, Homo sapiens
agccatggctcatgacccctgcatctgcaaggccagcggcgtgggcccgtgcttcacttgtggtatcaccttccctggtagcagtgtctccctgcaaggayggctgtgagcagttagggcccacctggataattcaggagtcccaccctctcaagattgttcactcagtcacatctgccaaatcctttttgccacataagg

SEQ ID NO: 489406 - DNA, 201 bp, Homo sapiens
gcgacagcctggggtctgtctcataagctcaggtttggaaaataagaccatccactagctgttagccccgagcagccttcctgcccttggggaaaatcaayccatcagcagccagcccagaggcgctggctcttagcagagcagtgatggtgataaatggctgtgaggctgcagcttgctgccacacactttccccaggtc

SEQ ID NO: 489407 - DNA, 201 bp, Homo sapiens
ctgccgggctcaagcaattcttgtgcctcagcctcctgactagctgggattacaggtgtgcaccaccatgcctgactaattttctgtattttaatagagayagggttttaccgtgttgtccaggctggtctcaaactcctgacctcaggtgatccacctgccttggcctcccaaagtgctgggattataggtgtgagccac

SEQ ID NO: 489408 - DNA, 201 bp, Homo sapiens
atacacatgcatgcacacaccgacacacacacacgatgtgggacatgcgtgcacacaggcatagagctgaacctgcatacacaggcatgcacacacaccgmcacacacacacacgatgtgagacatgcatgcacacaggcatagagctgaacctgcatgcacatgcatgcacacacaccgacacacatacacacgatgtgg

SEQ ID NO: 489409 - DNA, 201 bp, Homo sapiens
gtgtctcctcaacctgaacagttatttctggggacagctttgattccagggtccctgagccaggtgaccctctctcaacatcatcagggtttagcttggatttttttttttcctgaaccagactttacacagcgtgcatttgtggcatgtgtgcatggggcctccgtgatgcgtgcgctctgcccttggtctggagcccat

SEQ ID NO: 489410 - DNA, 201 bp, Homo sapiens
ggagcctgagagaaggtggtgtgggaagcccatgggcccaggtcctcatccctgcggcatgatgcgtcagtgacggtgggtggctctgcactgcgctggcmcctggccactggccccgtggcctggctgtgctgtgaccctgcattgcagtgacacgtcggcggagtggccagaaggaagagcgggcactgagactcggag

SEQ ID NO: 489411 - DNA, 201 bp, Homo sapiens
caagggggaactccaccccatgatccagtcacctcccaccaggaccctcctccaacactgatctcgtgagaactcactatcacgagaacagcaagggggayctccgccccgttgacccagtcacctcccaccaggaccctcctccaacactggggatgacaattcagcatgagatttgggtggggacatagagccaaacca

SEQ ID NO: 489412 - DNA, 201 bp, Homo sapiens
acgtgtgagtccagaagcagctcctttccagggcctgctggccctcacagcgtcagcgtggacagcagtcggtacccagggcgttaggtgcccagaggacyggctgtgagcccgccgccctgttcctgttcggtgggctgggaggaattccagaggaaggcctgcgcgctggcccagccacccgggagagcgcattggacc

SEQ ID NO: 489413 - DNA, 201 bp, Homo sapiens
agcgctgctgggcgccctcttaccgctcacggggagctggggccatggatgggacaggagtctttgtccctgctcagcccggaggctgtgcacggccctcstcacaaggtgacccttgcagcacaggccgcgggtgccccaggctcggctcagttcttggaggtcaagggcatgggttggggtagtgggtggggaggtgaa

SEQ ID NO: 489414 - DNA, 201 bp, Homo sapiens
cctctcctgatctctgaccttcctgccctggggtttcaacacatcctcagtggtgcaggaaaccgcgtggggctcagcaagggttgagggacctgcttccygcagggccccctgctcctctcctgggtgctgctgtggctggacgcttctgctctatgttctccgctgtaactcgggagcctcctcacccctgcccagcgg

SEQ ID NO: 489415 - DNA, 201 bp, Homo sapiens
gtggaggacgaggcggaacgctccgccctgcccatgtgcggccccatttgcccctcggccgggagcggctaggccgggacgcccgtggtcctcaccccttragctgctttggagactcggctgccagagggagggccatgggccgaggcctggcattcacgttcccacccagcctggctggcggtgcccacagtgccccgg

SEQ ID NO: 489416 - DNA, 201 bp, Homo sapiens
agggcacctgaggagtgggagtggggggcacccattgccaggaggagctatcgggccggttccaactcttccacctggcccggtatttcctaagtcaggasccccgtgtgggccagacatccccagaggctgcacaagctctgcggggcctgcgtctcggagtcctgggggatgattttcctcatcataagcacttcccag

SEQ ID NO: 489417 - DNA, 201 bp, Homo sapiens
tgtgacagctctcacagtagtgcccacttctgctgtgcaatcctcccattggtgaacgggctggttctgcctgaggacacttggacgtgggggcctcttcyggatgagtgggtggggtgggctgtgaagggaagcgtcccaggcctgggacacgcctgcagctgtgggcagctcatccaccacgtggcagctctgaaactg

SEQ ID NO: 489418 - DNA, 201 bp, Homo sapiens
aggaagggatcatccttggcttcattaagacctggcagggttcctggaggggaaacccacaaaacgttgggggcctcataagaccgcagccgcaggagttstgcacacggccccggccgctccccagagctgcccaggaggtgttcccgcacaccatcagttctgctccaggccagcaggtctcagctgtgactttgctca

SEQ ID NO: 489419 - DNA, 201 bp, Homo sapiens
cctggtccagttactcagaaagtgcatccaggagagacccccgcccttctcgggatgggagatgccagcagagcttggctttcaagcagaaatctggaaaycctgtggggagtggcttcggacttcaggggacctggagcgtcacttgtggttcaagaggtccctgccctgagggagctgggctctcaaacacccacacca

SEQ ID NO: 489420 - DNA, 201 bp, Homo sapiens
aaagtgcatccaggagagacccccgcccttctcgggatgggagatgccagcagagcttggctttcaagcagaaatctggaaaccctgtggggagtggcttyggacttcaggggacctggagcgtcacttgtggttcaagaggtccctgccctgagggagctgggctctcaaacacccacaccagtcagtcatgggcgaagg

SEQ ID NO: 489421 - DNA, 201 bp, Homo sapiens
ggagaggagagggctgcccgcagagagcgtgggagtctgccggcttcttctcgagtccttggcaaggtgctggccgctcacaccgtgtacgtgtggggaaygcccaggaccagggtgacaccaccaggaggagcgggcgggacagtccccactcagggctaggaagagagagtccacattcccgctgccagggtgaaaccc

SEQ ID NO: 489422 - DNA, 201 bp, Homo sapiens
gacactgtgacagggaagagtccccttagccctggctggggccgtgaaagcatgctgttgtccgtctcgggtgaacgcagactgttgtcacgcattgcatracgatgcttccgtcactggccaatcgcatgggggggtggtcccgtaagatggtaacactgggttttgctgtacgttttgtatgtctagatagggttgagc

SEQ ID NO: 489423 - DNA, 201 bp, Homo sapiens
acaggagtctttgtccctgctcagcccggaggctgtgcacggccctcgtcacaaggtgacccttgcagcacaggccgcgggtgccccaggctcggctcagktcttggaggtcaagggcatgggttggggtagtgggtggggaggtgaatgttttctagagattcaaactgctccagcaatttctgtatagttttcacctct

SEQ ID NO: 489424 - DNA, 201 bp, Homo sapiens
gcacatgcatgcacacacaccgacacacatacacacgatgtgggacatgcatgcacacaggcatagagctgcacctgcatacacatgcatgcacacacacygacacacacacacacgatgtgggacatggatgcacacagacaggcatagagctgaacctgcatacacaggcatgcacacacactgacacacacacacacg

SEQ ID NO: 489425 - DNA, 201 bp, Homo sapiens
cacaccgacacacatacacacgatgtgggacatgcatgcacacaggcatagagctgcacctgcatacacatgcatgcacacacactgacacacacacacaygatgtgggacatggatgcacacagacaggcatagagctgaacctgcatacacaggcatgcacacacactgacacacacacacacgatgtgagacatgcat

SEQ ID NO: 489426 - DNA, 201 bp, Homo sapiens
gctgaacctgcatacacaggcatgcacacacactgacacacacacacacgatgtgagacatgcatgcgcacagacaggcatagagctgaacctgcatacamatgcatgcacacacaccgacacacacacacacaatgtgggacatgcatgcacacaggcatagagctgaacctgcatacacatgcatgtacacacgcaggc

SEQ ID NO: 489427 - DNA, 201 bp, Homo sapiens
gccctgagccctgccttcccgcagctgtcaaaggggcagtcggcgtcctctttggatgcctctttggagccacggctgtgcttctggctggaggagttggstgggctgggcgtgtggctcttgcacccagcctgggcagcaggtgtgggtggagggtcgggtttggctttgccaagctgtggctggtgctcctgggaataa

SEQ ID NO: 489428 - DNA, 201 bp, Homo sapiens
cacacatacacaatgtgagacatgcatgcacacaggcatagagctgaacctgcatacacatgcatgcacacacaccgacacacacacacacacacgatgtrggacatgcatgcacacaggcatagagctgaacctgcatacacatgcatgcacacacaccgacacacacacacacaatgtgacgcatgcacgcaggcacag

SEQ ID NO: 489429 - DNA, 201 bp, Homo sapiens
gcccagagcccaggtcccagcattgaccacgtcccttcgctgaccaggccgtgcgcaggctctgccacctggggaaggggccaggggtcctttctgtgctcctgactgaggcccatgtgtgggctttggggccacggaagcattgcctcaactcttctctttttctagtttttagaagatgcaactcacatggtatagagg

SEQ ID NO: 489430 - DNA, 201 bp, Homo sapiens
acatgcatgcacacacactgacacacacacgatgtgggacatgcatgcacacagacaggcatagagctgaacccacatacacatgcatgcacacgcactgacacacatgcacagaactgtagccccagaaacatacatgcacatgcatacagacacacatgcacattcacatgtgcagagctacacccacaggcacacgca

SEQ ID NO: 489431 - DNA, 201 bp, Homo sapiens
ccactgatagtttagtgtgttatctttaaagatgaggactctcttcgtagccaccgccacggtatttttccacacctgaaacaacggtctttacgatcccrtcacactgcgccaggcttgtgttctcccagtgtctgtgaatgtcttctgatggtttctctcaatcaggatctggatgagtctgtgcagtgaggtgggtcc

SEQ ID NO: 489432 - DNA, 201 bp, Homo sapiens
catgcatgcacacacactgacacacacacgatgtgggacatgcatgcacacagacaggcatagagctgaacccacatacacatgcatgcacacgcactgacacacatgcacagaactgtagccccagaaacatacatgcacatgcatacagacacacatgcacattcacatgtgcagagctacacccacaggcacacgcac

SEQ ID NO: 489433 - DNA, 201 bp, Homo sapiens
tgccttctccttccttctagaaatatcccttgtaaaaaagattttagttcatatttccattgattgattgatttctttccttttttttttttttttttttraggctgagtcttgctctgttgccaggctggagtgcaatggtgcaatctcggctcactgcaacctccgcctcccaggttcaagagattcccctgcctcagc

SEQ ID NO: 489434 - DNA, 201 bp, Homo sapiens
ttccgtggcgactaaggacagcctctctcctgtgctcattggccttcgggagcttctcgtctgtgaagcatctgcctgggcctcttgcccatctttaatgygctgcttgccatttattactgccttgtgtgtgccctggctgcctgcggctgaatcctgacccagagccttcagcaggaaggaaagacattgtcccgagcc

SEQ ID NO: 489435 - DNA, 201 bp, Homo sapiens
aaaaagattttagttcatatttccattgattgattgatttctttccttttttttttttttttttttaaggctgagtcttgctctgttgccaggctggagtgcaatggtgcaatctcggctcactgcaacctccgcctcccaggttcaagagattcccctgcctcagcctcccgagaagctgggattacaggcacacgccac

SEQ ID NO: 489436 - DNA, 201 bp, Homo sapiens
gaaagcgagaggcctcccagggctgtgcggggctgatgggcctgccctccgtctctctgcaccgtgtcctctcctcacacccaggcagggccccagagtgyagtgaggaccccacaggctcctccaggctgtgtgttgcccttgcagctctggtggtcgcttctgccctagttccagaagcccaggactggctcttcctgg

SEQ ID NO: 489437 - DNA, 201 bp, Homo sapiens
cctggagacattttccccattgtcttggtgattaatattcagttccttgttgcttatgcaaatttctcctcagaaaatggggttttcttttttttctctctttttttttttttttgagacagtcttgctctgtcacccaggctggagtgcagtggtgcaatggcggctcattgccactgcaacctccgcttcctaagttca

SEQ ID NO: 489438 - DNA, 201 bp, Homo sapiens
cgagaggcctcccagggctgtgcggggctgatgggcctgccctccgtctctctgcaccgtgtcctctcctcacacccaggcagggccccagagtgcagtgrggaccccacaggctcctccaggctgtgtgttgcccttgcagctctggtggtcgcttctgccctagttccagaagcccaggactggctcttcctggacacc

SEQ ID NO: 489439 - DNA, 201 bp, Homo sapiens
gacaccctcgctgtgatgggccaggcctgggctgagtgtggcagggaggagcaggggctgtcatcgaaggagaagagccagtgcccagcagagtgtccccmgggtggctgcagagcccacctcgccgcccttgcggcacccccagagccacctcgctgccctggcagctcccccagagcccacctcactgcccttgcggct

SEQ ID NO: 489440 - DNA, 201 bp, Homo sapiens
aagaggggacctggggtgtcaggagcagagctgattctccagctcttgagacagccttcgcgtggggtgcacgcattgtgccggggtgacatagtgctgaytcccggcgccctgcggcaggcttattttactctcctgggctcccaggtctgggggcagccttcgtggagggtgcacgcattgtgccggggtgacatagtg

SEQ ID NO: 489441 - DNA, 201 bp, Homo sapiens
acctggggtgtcaggagcagagctgattctccagctcttgagacagccttcgcgtggggtgcacgcattgtgccggggtgacatagtgctgattcccggcrccctgcggcaggcttattttactctcctgggctcccaggtctgggggcagccttcgtggagggtgcacgcattgtgccggggtgacatagtgctgattcc

SEQ ID NO: 489442 - DNA, 201 bp, Homo sapiens
actttttaataacagtcgtcctgactggtgtgagatggtgtctcattgtggctttgacttgcatttctctgatgattagtgatgtggggcatgtttttcayatgcttgttggccatttggatctgctgttgaaaagtgtctgttcatgtattttacctgttttttttttttttttttttgagatggagtctcactcttgtc

SEQ ID NO: 489443 - DNA, 201 bp, Homo sapiens
ggtggacagatgcactgtgttttcttccagtttatggctcacccattcattttctcagcggtctcttttgatgagtagtctgtgtctcctctaagaaatckttgtctatcctaaagtcaagtttaggtctaagatacatttaaaattaatttttgtgcacagtgtgaaatgggggtagaggttcatttttccatgtggata

SEQ ID NO: 489444 - DNA, 201 bp, Homo sapiens
gtacatgaacgtgtgtgtgcctgcatgtctgtgtgttgcgtgtgtgtgcatgcctctgtgtgtgcatgtgtgtatgtggtatgtgtgtgtgtgtgcatgcrttgcacatgtatgaactgtgtatttccaacgctttaatgtcagggccttgctgaccctggagagactgcccctcctgggccagccacttcctagagatca

SEQ ID NO: 489445 - DNA, 201 bp, Homo sapiens
ccactccatcctcctctcagccaggcccactctaagtcctgccccagccccctggccccaggcctctcttggctcttccccagcgctgccctccccgcacrcatgcacgcgctgcactgaccgccccgcacgtgccgtgctccccgcttgctgatgtttgccgttcgctgctcacctctgggtcagcctcttgccctgcac

SEQ ID NO: 489446 - DNA, 201 bp, Homo sapiens
cgagggtttcaggagcactgaggacccgacagggctggacagtcaccccggcactgcagcctggtctccgcccaagtgtccacccagcgtgcccgctcctstgtgtgtgcatacctgtgtacatgaacgtgtgtgtgcctgcatgtctgtgtgttgcgtgtgtgtgcatgcctctgtgtgtgcatgtgtgtatgtggtatg

SEQ ID NO: 489447 - DNA, 201 bp, Homo sapiens
tgtgaaccaccatttctcctgctgctgctgactaatacttgggcacgtggcgagaccttggtcttctcagccaccctcctgagtgggatgccgccttgttyggctctggctgtcaatgggggcgagtggccacccggggtggtatctctgtgcctggagcgcttccttacaggtctcctgcctgccctgggcgtgggcaga

SEQ ID NO: 489448 - DNA, 201 bp, Homo sapiens
gtgctcttgtcctgagccctcacaccatctataaaatacccaccagcatcctgagggttccagcctgtggctctcaggattgtggagtgcagtactggccrctgcagaccctgtctggctttggggtttaaatggttaagtgcagtgtgatcttcctcccttggacctctgatggggagtgcttggccctgcatgtccagc

SEQ ID NO: 489449 - DNA, 201 bp, Homo sapiens
ttgacgatgtccagcagcgtctgctggcctgctgccgggctcccggggcaggggctgctgcagtcactgcgggcggctgggcctgggtttctcccagatgscccccactttccagcagcacaggctctggtttcctcaccagcccactgcctggccaccccgctcagggcagcaggagccctctgcggcggccaagtgcgt

SEQ ID NO: 489450 - DNA, 201 bp, Homo sapiens
tcccatggcgagtgatgcgtccctgtcctcactgtccagaccctgctcctgagatgtccaggcctggatcctgggcttgggacctggggaacccgggcctrtgtgccgtgagtgacccctcacatgacagccccctagtgtccgggaagcctggctgaaagggagccatcagtggccgctaaaagttgacgatgtccagca

SEQ ID NO: 489451 - DNA, 201 bp, Homo sapiens
tgttcccatggcgagtgatgcgtccctgtcctcactgtccagaccctgctcctgagatgtccaggcctggatcctgggcttgggacctggggaacccgggyctatgtgccgtgagtgacccctcacatgacagccccctagtgtccgggaagcctggctgaaagggagccatcagtggccgctaaaagttgacgatgtcca

SEQ ID NO: 489452 - DNA, 201 bp, Homo sapiens
cagccagcggacgctgacgtcgattggaagctgggtgtgctgggggttgcttatctgtgacgtgtgttcccatggcgagtgatgcgtccctgtcctcactstccagaccctgctcctgagatgtccaggcctggatcctgggcttgggacctggggaacccgggcctatgtgccgtgagtgacccctcacatgacagcccc

SEQ ID NO: 489453 - DNA, 201 bp, Homo sapiens
gctgtcatcgaaggagaagagccagtgcccagcagagtgtcccccgggtggctgcagagcccacctcgccgcccttgcggcacccccagagccacctcgcygccctggcagctcccccagagcccacctcactgcccttgcggctcccccagagccacctcgccgccctggcagctcccccagagcccacctcactgccct

SEQ ID NO: 489454 - DNA, 201 bp, Homo sapiens
ctggctggctgggctcctcgccctgccctgcgcacccctcaccccaggccatccccctgtccgagggagagagagagaagcacaggcgcacggcgtccgcrtttcccaggctgtggggaaataactaagaaaacaggtcaaaaggccttcaccacagcccccacccaccccgaggaaccgcctgtccttgcagtgacccca

SEQ ID NO: 489455 - DNA, 201 bp, Homo sapiens
gcctctttggagccacggctgtgcttctggctggaggagttgggtgggctgggcgtgtggctcttgcacccagcctgggcagcaggtgtgggtggagggtygggtttggctttgccaagctgtggctggtgctcctgggaataacagccaggccctcacttaactaggagtgtttggggtgtgagtgctaagtgctgggag

SEQ ID NO: 489456 - DNA, 201 bp, Homo sapiens
cagagcccacctcgccgcccttgcggcacccccagagccacctcgctgccctggcagctcccccagagcccacctcactgcccttgcggctcccccagagccacctcgccgccctggcagctcccccagagcccacctcactgcccttgcggcatcccccagagcccacctcaccgcccttgcggccatgtctgctgctcg

SEQ ID NO: 489457 - DNA, 201 bp, Homo sapiens
ctgcggtgtctgagaggctcgccacctccccagcgctgcctaattgtgcttgttcagaatccaggacatcgcattccagccttgggctgtggatatctcakgctgagggccatgatcccaggagccacagatgggggcagccccattcctgcatcctcctgtgagctggtgggtgggtggcttggatgcagctgccccagg

SEQ ID NO: 489458 - DNA, 201 bp, Homo sapiens
ccttgcggcacccccagagccacctcgctgccctggcagctcccccagagcccacctcactgcccttgcggctcccccagagccacctcgccgccctggcrgctcccccagagcccacctcactgcccttgcggcatcccccagagcccacctcaccgcccttgcggccatgtctgctgctcgcaccttctactgttctca

SEQ ID NO: 489459 - DNA, 201 bp, Homo sapiens
ctcgctgccctggcagctcccccagagcccacctcactgcccttgcggctcccccagagccacctcgccgccctggcagctcccccagagcccacctcacygcccttgcggcatcccccagagcccacctcaccgcccttgcggccatgtctgctgctcgcaccttctactgttctcatgttgcagcaggtcaggaagatg

SEQ ID NO: 489460 - DNA, 201 bp, Homo sapiens
gcagctcccccagagcccacctcactgcccttgcggctcccccagagccacctcgccgccctggcagctcccccagagcccacctcactgcccttgcggcatcccccagagcccacctcaccgcccttgcggccatgtctgctgctcgcaccttctactgttctcatgttgcagcaggtcaggaagatgtgtggctgtcct

SEQ ID NO: 489461 - DNA, 201 bp, Homo sapiens
ctgctgctcgcaccttctactgttctcatgttgcagcaggtcaggaagatgtgtggctgtcctgaatcctctgacatcaggcggagtataaataaaatacrggtatgatggatgaggcttgaacttttgtgaatttaacatagtttaacgtctttcctaaagtgaaagtcagaatgaagcgccctatttattcacatgatt

SEQ ID NO: 489462 - DNA, 201 bp, Homo sapiens
aatacgggtatgatggatgaggcttgaacttttgtgaatttaacatagtttaacgtctttcctaaagtgaaagtcagaatgaagcgccctatttattcacrtgattttttacgtcttccatcaaggaaaactgccatgagcgactgtcccgcccccacctcccaccgaggaaactcgtcttgaaaaagaagactgtgctgt

SEQ ID NO: 489463 - DNA, 201 bp, Homo sapiens
ccccagctccctgtgcgtcccgcccacctaacgcctactcccagctcgaggggtccctgcggctcagttctgccctgaccaccttccccaccatgtgatgscatccacatggggccacctgatgaccaggtgtccctccagggggctgcagcctacagccaactgattgtgggccacttaaataattatcttgttaattga

SEQ ID NO: 489464 - DNA, 201 bp, Homo sapiens
ttctgccctgaccaccttccccaccatgtgatgccatccacatggggccacctgatgaccaggtgtccctccagggggctgcagcctacagccaactgatygtgggccacttaaataattatcttgttaattgaagtgaaattcatagcacacaaaattaaccactttagagtgaagagttccgtggtgtttagtgcattg

SEQ ID NO: 489465 - DNA, 201 bp, Homo sapiens
ccgtggtgtttagtgcattgacaatgttgagaacatactcttcacaccacctctatctaactgcaggcgcctcaccagccctaagggagactccatgcctrctgattacatccgtcgccaccgcctgccccagctcctggcagccaccacactgccttctgtccctgggtcgtggcactgggtatttcacagggacggagt

SEQ ID NO: 489466 - DNA, 201 bp, Homo sapiens
gggcagcccaggtgggtggtggcagggatgggcctgtcaggggaggaggatcctgcacgcaaggatgcatctctggtcctgggacagccacacctgacccstctctgcacaggacatgcacacctgaccgacttcaacattgccaccatcatcaaggacggggagcgggcgacggcattagcaggcaccaagccgtacatg

SEQ ID NO: 489467 - DNA, 201 bp, Homo sapiens
cacagttaggcctcctcatcaggcctgcaggggttctgtgcggcgcttgttgatgggtgcctggcactgaggggagggtgaggtgaggcctgtcactgacmtggaggggtccttccagctctttcactggccaaggcaatgaccccatggcaggaaggatgagggctgagaagggtggttctgcgtgtggttgggctgtag

SEQ ID NO: 489468 - DNA, 201 bp, Homo sapiens
gcagtgcaggactggactccaggtacccatgtgccaagtgccagggtcaggggcctggcacagcaggtgccatgtggccgtcctaggcatgcacgtgggcrtggaccaccaccctcgtcctcagctctgttgggaatggccaaggctgtgccgaccacgggctcctgtgcccgctgtggctcttttgcctctaccggccgc

SEQ ID NO: 489469 - DNA, 201 bp, Homo sapiens
tggctgagcacatgcctaatcccatagcaatcctgggagtaggacgtgcaagacccaaggcccatgtcttcactgaccggggctcagccccctcctgcctygcacaggagcgagagtttggcccgccccacggcgaccctcttctaggatgaggggccctgggcagtgtcggggtgggggatgttgaggtgggggagctgc

SEQ ID NO: 489470 - DNA, 201 bp, Homo sapiens
ctttcccagcccccacctcgctccttatgaagcaggtgggcagggacaaccagggctggggttatgagtgcacggggatggccatgtgaagccttcgtgcytgcccaggtgtgctggtgttggttgtgtgtgcggggacggctatgtgaagccctcacactcgcccaggtgcgtcggcatcaggtatgtgtgccgggacag

SEQ ID NO: 489471 - DNA, 201 bp, Homo sapiens
ggatgccaccctgcgccttcaggccagctctgccctgtgctcggagccctgaagcctccgtgggtccttgtcacggcacccgtagctcaggctgaaagaaytctgggtgtgtgactctgtccccagggcccatgaggatggacactttgcctgctgcgtctatgctgaaacctggggctatcctggggtgccctgggaagg

SEQ ID NO: 489472 - DNA, 201 bp, Homo sapiens
ctcccaggctacacaggtcatggtggacatagccacagccctgagccgcctctcgttgttcatcttggggccgtttgcagactcccccaggcttgcccagygagtgccagcagggctgacacccctgtcctctggagacgcggagcagggtggaggggaaccaggaacagctgctcatgtgtgcatggcttcccccaaaac

SEQ ID NO: 489473 - DNA, 201 bp, Homo sapiens
cctggaggccagggggtgacattgtgggacccccgtcttatgtgtacggagaatgtcctgggtttgaaaggcaagtgcagacggtctggaaagcccatcasaatccctttccttggtgtgaatagggcacacggacaggtctcacgagtgacaattaggggagccgtccttctcccggagggacttgcaggtgtgggaaat

SEQ ID NO: 489474 - DNA, 201 bp, Homo sapiens
agaaacctttcgtctagaaactgttctgtctcctcctccacacactgagtgcctaaagcacttgccccaccagacggcacagggtaccgccagggagcagyggagatgagactctaggccgtgcctcccaggaggggtcagtacctaccctgctgtctccccgggtctgcctctggccttggctgtgtcttccctgccttt

SEQ ID NO: 489475 - DNA, 201 bp, Homo sapiens
tgaatcacctcaggacctgaccccagacaaccagggcaggcctgtattcccacaggccagtctcaaacctgctcacctggctttccccgcctttccctgcytttcccgaggaagcctccactaaggctctgcccgtgtttccccttcacgtcgtctgcctccgagaccctggtctttgctgtgtggccccacggtgtggca

SEQ ID NO: 489476 - DNA, 201 bp, Homo sapiens
cccactaccgtcttgtgcagaggagaccaaggccacaggtcacagccccttcctcacccccaggtgctctgctgactgccctcccacttcacccaggaccwgcttgtgggtctgtccatacccttggggtccttttcctgcctgtgcccaggctggcccctcacctaggcaccccctcccttcccccagctgatgcctact

SEQ ID NO: 489477 - DNA, 201 bp, Homo sapiens
gttccgtagctcagtgtctgcaaacaacagaagtttctcttgtagtcctggagatgggaagcctgagacctggcagggtgggccctctgggcggctccgtrggaggacccgctgtgccttctcccggcgtctggtggctgctggccactcgtggtgtcctcagcttgccgccatgtcactccattcccaggctggcatctt

SEQ ID NO: 489478 - DNA, 201 bp, Homo sapiens
aagaagcgcctggccaagaacaagtcccgggacaacagcagggacagctcccagtccgtgagtgccagggcaggctcagggcgcggcggcgggctgggctyggggctcctctctaccaccgagcaaggtgtgtggggacccctgacagtgcacacgtctcggaagtccagcagaccgtttcctgaagtcctgagaaggcca

SEQ ID NO: 489479 - DNA, 201 bp, Homo sapiens
gcccagcttggaaccttcctcctctctggggaccagacgttgacctttgcctagaacggtctccgacttccgtgctgccgatggaaagccaggcggagacstggaaggttcaggaacacttgcccgggtctcctctctgcaatgacctgtcccgggcacctcacacacacctgcactcggggcggggcccctctctgcagt

SEQ ID NO: 489480 - DNA, 201 bp, Homo sapiens
attgacaatgttgagaacatactcttcacaccacctctatctaactgcaggcgcctcaccagccctaagggagactccatgcctactgattacatccgtcrccaccgcctgccccagctcctggcagccaccacactgccttctgtccctgggtcgtggcactgggtatttcacagggacggagtcacatgatgcatgaac

SEQ ID NO: 489481 - DNA, 201 bp, Homo sapiens
tgtcagggtccttccagcttggaccatgtgtcactgcgccatgctttttctttttttataatcccaactttttttttttttttttttgagatggagtctcrttctgtcatccaggctggagtgcagtggcacaatctcagctcacggcagcctctgcctcccaggttcaagcagttcttatgcctcagcctcccgagtagc

SEQ ID NO: 489482 - DNA, 201 bp, Homo sapiens
ctgaggtttggggttcaattgatcctgtcacccaagcactgagcatagtacccagtggctggtttttcaacccttgactcctcctcttctcccctgcctcrcagtcccggtgtccattgttcctgtctttatgtccacgtgtgcccagtggttagctcccacctacacatgaggacatgtggtattgagttttctgttcct

SEQ ID NO: 489483 - DNA, 201 bp, Homo sapiens
ctgaagctttgagctcctgggctcaagcaatcctcccgccccagtctcctgagtagctgggactataggtgtgtgccatcatgtccagctaattaaaaactttttttttttcagagatgggggtcttgctgtgttatccaggctggtctcacactcctggccacaagcagtcctcccgccttggcttcccaaagtgctggg

SEQ ID NO: 489484 - DNA, 201 bp, Homo sapiens
cacctacacatgaggacatgtggtattgagttttctgttcctgcattaagtcgcttaggattatggcctccagctgcatccatgttgccacagaggccatwatcttgctcttttttacgattgtgtgatatgccatggtgtataggtactgcgttttctttatccagtccaccgtggatgggcacctgggttgattcacgt

SEQ ID NO: 489485 - DNA, 201 bp, Homo sapiens
ctgccggggcttgcaggcacacctggtctgtcctttccccatttcagctgagctggagagaagctagacatgcattcagggtaggggccttgccccgccarcacacacacaaacatgaggaggtccgggcgtccgggcactgagcagtggtgttgtcactgaggcagccccagtgctgcctgggaaggggcagggccgtgg

SEQ ID NO: 489486 - DNA, 201 bp, Homo sapiens
acctacacatgaggacatgtggtattgagttttctgttcctgcattaagtcgcttaggattatggcctccagctgcatccatgttgccacagaggccatawtcttgctcttttttacgattgtgtgatatgccatggtgtataggtactgcgttttctttatccagtccaccgtggatgggcacctgggttgattcacgtc

SEQ ID NO: 489487 - DNA, 201 bp, Homo sapiens
cacctgggttgattcacgtcattgctgttgtgattagcaccacaatgaacacacgaatgcgcgtgtctttttggtagaacgatttgttttcttttggataygtacccataatgggattgctggatcaaatggtagttctatattttttgagaaatcttcaaactgctttccacagtggctgaactaatttagattcccact

SEQ ID NO: 489488 - DNA, 201 bp, Homo sapiens
gctttccacagtggctgaactaatttagattcccactaatagtgtataagcgtttgttctcttttctctgcagtcttgccagcatctgttgttttatgactttttaataacagtcgtcctgactggtgtgagatggtgtctcattgtggctttgacttgcatttctctgatgattagtgatgtggggcatgtttttcatat

SEQ ID NO: 489489 - DNA, 201 bp, Homo sapiens
ctttccacagtggctgaactaatttagattcccactaatagtgtataagcgtttgttctcttttctctgcagtcttgccagcatctgttgttttatgactttttaataacagtcgtcctgactggtgtgagatggtgtctcattgtggctttgacttgcatttctctgatgattagtgatgtggggcatgtttttcatatg

SEQ ID NO: 489490 - DNA, 201 bp, Homo sapiens
tgcatttctctgatgattagtgatgtggggcatgtttttcatatgcttgttggccatttggatctgctgttgaaaagtgtctgttcatgtattttacctgttttttttttttttttttttgagatggagtctcactcttgtcaccaggccggagtacagtggtgtgatctcctgacctcgtgatccacacacctcagcctc

SEQ ID NO: 489491 - DNA, 201 bp, Homo sapiens
gtgccatgctgttttggttactttggccctgtagtagagtttgaagtccagtaatgtgatgcccccagctttgttcttttttcttaggatcgctttggctrtttgagctcatttttggttgcatgtgaattttagcatagtttttcctgtttctgtgaaaaatgactttgtagtttgataggaggagcattgaatcagtag

SEQ ID NO: 489492 - DNA, 201 bp, Homo sapiens
gtccttgtctccaagccggacacctgcgaggaccccgggccggactctgggggtgggctttggtacattccccagtggctgagcagggccaggggccaggyggaggctgaggccattgctgtccctgacaacgtggctgggaggacgtgtcagtgtctcctcaacctgaacagttatttctggggacagctttgattccag

SEQ ID NO: 489493 - DNA, 201 bp, Homo sapiens
ccaaggcctaagctcgtagtccccgagtcctccccatgggaagcagtgatcgtctccaaggcctaagctcgtagtccctgaggcctgtgggaggtggggaygccagtcggacagcttcccccagccccaggggctggactgagcggaggtagagctctgtgggctaggggcctgctgggggcccgcatgagcatcctgacg

SEQ ID NO: 489494 - DNA, 201 bp, Homo sapiens; identical to SEQ ID NO: 404385

SEQ ID NO: 489495 - DNA, 201 bp, Homo sapiens; identical to SEQ ID NO: 404351

SEQ ID NO: 489496 - DNA, 201 bp, Homo sapiens
caggccatgacccagtgtcccattctccttcacggtttgctggtgtgtagcctcctggatacaggcaatgtatatagatcgcagagaatgtccgttctggyctcttccttggaagggtctaaaaacagaccttaaggagctaagtgacttccccaaagcccacagctccagtgccactgctgacttttgggtgggggtggg

SEQ ID NO: 489497 - DNA, 201 bp, Homo sapiens
ctgcagttagccatgattgtgtccctgcacaccagcctgggtgacagagcaagactttatctcaagcagacaaacaaaaccagaatcagctgtcccgcccyttctcccttaggtccatgagctgattccagctgtgatgacctgcatcgtgagcagacagttgtgcctgcgaccagatgtggacaatcactgggcactccg

SEQ ID NO: 489498 - DNA, 201 bp, Homo sapiens
cacctgcctcagcctcccaaattgctgggattacaggtgtgagccaccgcaccccaccgctcctggacccactttaatcaatggcacagtcctcactctgsccccttccccatgcttaggggtagacatcccctatagtcaaaccctagaacctagctcccctctcaggttcccttctcacctccctggatggtgcagtgt

SEQ ID NO: 489499 - DNA, 201 bp, Homo sapiens
ctccggctcccctcagcctgctccgtgatgctccacctgccagcccccggattcccacacatgcagacacgtacacacgtgcacgtacacacatgcatgcwcgctaagcggaaggaagttgtagattgcttccttcatgtcactttctttttagatattgtacagccagtttctcagaataaaagtttggtttgtaagttc

SEQ ID NO: 489500 - DNA, 201 bp, Homo sapiens
ttgcagtaattacaccaagagggagtgctccttatatatagatgtagaaacaaacttttaaaatataatttcattctgcgagcctagaggacttattctgktacggggaaggggcagtgacttgctcttaggctctgccaggacctgctcccacgagggggcggggccaagatggcgccgagcgccgggtgagcagcgtct

SEQ ID NO: 489501 - DNA, 201 bp, Homo sapiens
ggagtgcagtggcgtgatctcggctcactgcaacctctgccctctggtttcaagtgattctcgtgccttagtctccctagtagctgggattacaggtgtgyactaccacgccctgctaatttttgtatttttagtagagatggggtttctccatgttggccaggctggtctcgaattcctgacctcaagtgatccgcccgc

SEQ ID NO: 489502 - DNA, 201 bp, Homo sapiens
acctctggttgggggaagtcacactggaaacaagggggcagagggaagagggactggaacttgtgggggtctaagggtcttgaggcttgtctgtaataccttttttttttttttttgagatggagtctcgctcttgcccaggctggagtgcagtggtgcaatctctgctgaccgcaccctctgcctcctgggttcaagcga

SEQ ID NO: 489503 - DNA, 201 bp, Homo sapiens
cccaaagtgctgggattacaggtgtgagccaccacgtctggcctcattgtaatgtcttaatgatttacaaggaaagtgtctatgaaagacttaggtccctrtcaatcatcctttcagaccccttcatcttagtttatttccttccccttacagagctgggtggacgagaagacgccctggacgactcgttatggctccatc

SEQ ID NO: 489504 - DNA, 201 bp, Homo sapiens
ggactccaaaagccaatggctcccagcccaactccggctcccctcagcctgctccgtgatgctccacctgccagcccccggattcccacacatgcagacaygtacacacgtgcacgtacacacatgcatgcacgctaagcggaaggaagttgtagattgcttccttcatgtcactttctttttagatattgtacagccagt

SEQ ID NO: 489505 - DNA, 201 bp, Homo sapiens
tgggaggaagaaatgggggaggggacacagtcatgaggttatagagggcactgtacccccatctgggagaccctggtgaccctccggcttttgcttgtccytttcccttctaacaggttatcaagactctgattctgccccggctgcagcaggaaggggagcggatccgcagtgtgctggacggccctgtgctgagcaaca

SEQ ID NO: 489506 - DNA, 201 bp, Homo sapiens
tcacccccttctgcactaggcctttcagtgttgccatggtctgactctgaccctgagagattaagaatttggcatcagcccagctcaccaccccacccctyccttcccctttctgccatttcagttttgtcaactactggagattcaagggtgagttccatgatggtgagatgatgggcagataacctctggagggcctca

SEQ ID NO: 489507 - DNA, 201 bp, Homo sapiens
caggacctgctcccacgagggggcggggccaagatggcgccgagcgccgggtgagcagcgtctcggctgccgctagagttttcctgctccccgcgctcggstggcgggggcgggtctgagtggtaccccggaggagaccctttgaaggtcccttgtggggactggaaagaggacggttggttgtgtgtctgtgctcgtggg

SEQ ID NO: 489508 - DNA, 201 bp, Homo sapiens
acaggcctaagatgctgcacctggccccgtgcccatcttttcttatgagaaagcccacagtgttctgtacacacactaatagttcagcataatttggcctycaacaggggcactgagatgataaggaatgtccttttttaccccatccccaaggttcttctcaagagtgtcaccagccctccctctacctggcttttttcc

SEQ ID NO: 489509 - DNA, 201 bp, Homo sapiens
tttctctttttttttggagacacggtctagttctgttgccaggactggtctggaactcctgggctccagcgatcctccagtcttggtctcctgaagtgctrggattacaggtgtgagccaccgcgcctggtctttttttcttttgagacagtctcgccctgtcgcccaggctagagtgcaggggcaccatcatagctcgcc

SEQ ID NO: 489510 - DNA, 201 bp, Homo sapiens
gagacacggtctagttctgttgccaggactggtctggaactcctgggctccagcgatcctccagtcttggtctcctgaagtgctaggattacaggtgtgakccaccgcgcctggtctttttttcttttgagacagtctcgccctgtcgcccaggctagagtgcaggggcaccatcatagctcgccccagtcttgaacccct

SEQ ID NO: 489511 - DNA, 201 bp, Homo sapiens
ttgaagttcatgcacatggggaagcggcagaagctcaccaccagtgacattgactacgccttgaagctaaagaatgtcgaggtgatttggggagacaggcgggggggggtgagacgccatccttcagccaggtctcctccggctcccttcttacccatgcccctctctcctgccacagccactctatggcttccacgccca

SEQ ID NO: 489512 - DNA, 201 bp, Homo sapiens
caggctagagtgcaggggcaccatcatagctcgccccagtcttgaacccctggttctagcgatcctcctgcttcagcctcctggagtgctgggaatacagrcgtgcacgcccctctaaattttttttggttttttttgagacggagtcttgttctgtcgcccaggctagagtgcagtggcgtgatctcagctcactgcaac

SEQ ID NO: 489513 - DNA, 201 bp, Homo sapiens
ctcctaacctcaggtgatcttcccgccttggcctcccaaattacaggcgtgagccactgcacctggctccactttgctttttttgttttttttttttttttgagacagagtctggctctgttgcccaggctggagtgcagtggtgcgatctcggctcactgcaagctccgcctcccgggctcacgccattctcctgcctca

SEQ ID NO: 489514 - DNA, 201 bp, Homo sapiens
gatccctggtgagttgcaaggggagcaggagtggaaacacgcttccatagcatggggcaactccccaatgtccatgcgtggcaattcaccttgacacctgycttccttgcagctcattggctgagcatcgagggctgccagccagctatccccgagaacccgcccccaggtaacctccatgccccaccctctgggtctctg

SEQ ID NO: 489515 - DNA, 201 bp, Homo sapiens
ggtctctaactctggtctcaaacagtccttctccctcagactcactaagtgctagcattacagttgtgagccactccacccggctcattatgatttctttktttttgtttttgtttttgtttttttttttaagatggagtcttgctctgtcgccctggctggagtgcaatggtgcgatcttggctcatggcaacctccacc

SEQ ID NO: 489516 - DNA, 201 bp, Homo sapiens
gaacttctgacctgaggtgatccacccgccttggcctcccaaagtgctgggattacaggcatgagccaccgcatccggcctcctcccaccttttacttttctactatgctcatcacccctcccgctgtgcctgctttcccaccagctcccaaagagcaacagaaggctgaagccacagaacccctgaagtcagccaagcca

SEQ ID NO: 489517 - DNA, 201 bp, Homo sapiens
gctcgccccagtcttgaacccctggttctagcgatcctcctgcttcagcctcctggagtgctgggaatacaggcgtgcacgcccctctaaattttttttgkttttttttgagacggagtcttgttctgtcgcccaggctagagtgcagtggcgtgatctcagctcactgcaacctccgcctcctgggttcaagcgattctc

SEQ ID NO: 489518 - DNA, 201 bp, Homo sapiens
aaaacagactaatacagtaaactgctaacagtagagtggggcattgctgaaaagatagccaaaaatatgaaagcaagtttggaactgggtaacaggcagasgttggaacagtttgaagggctcagaagaagacaggaaaatgtgggaaagtttggaacttcctagatacttgctgaatggctttgcccaaaatgctgatag

SEQ ID NO: 489519 - DNA, 201 bp, Homo sapiens
ctttcacataatcgcagaaattaaagatgtccaaggcccctgtagggcatttcatccatgtcatactcttatcagatgactgtctttttgttctgaaagastgaatgagtgggttttcatcatctctccatttgaaagtcaagtaagctttatctcttcggattcaaggtctaaatttgtccttgtttcttcctaatattt

SEQ ID NO: 489520 - DNA, 201 bp, Homo sapiens
gcttatttttgtgttgtaaaatgaaatctctaacaatactaacttggcagttgggtggaatccagtgccacccacacacatctgctcaaatagttctttaycttctgagccccaagacagcccagtcctcaaattaacaatgatggcaggcttcaggaggctgatggctagttctccgccagacacaaatgcaagatagat

SEQ ID NO: 489521 - DNA, 201 bp, Homo sapiens
agctcctgaagtcatggttatcagaagaaaagctataaaggaagaactacagggaaaacctacaacactctctttggaaaaatgacaaaataacacatttmctgatgcactaacggaagaaggtaggtgcatatattaactataacacataattaattttaactgttattggtgaatatgcacaaaatatacatacaaatt

SEQ ID NO: 489522 - DNA, 201 bp, Homo sapiens
caaatgcaagatagatagttttaaagctcctgaagtcatggttatcagaagaaaagctataaaggaagaactacagggaaaacctacaacactctctttgraaaaatgacaaaataacacatttactgatgcactaacggaagaaggtaggtgcatatattaactataacacataattaattttaactgttattggtgaat

SEQ ID NO: 489523 - DNA, 201 bp, Homo sapiens; identical to SEQ ID NO: 404344

SEQ ID NO: 489524 - DNA, 201 bp, Homo sapiens; identical to SEQ ID NO: 404363

SEQ ID NO: 489525 - DNA, 201 bp, Homo sapiens
gagctgtggtgggcaggaacaccagcttttcagagtttacctcaacactgtccaactcagttggcctagagtcaggcaacctggttttaagcccatgttcmccacctttgattggaggaacccaggcaaactgcacttctctgggcctcagaatccttctataaaatgaaagggtctcctctgattatttccaaggccctc

SEQ ID NO: 489526 - DNA, 201 bp, Homo sapiens
ttgagtgctagagaatcttatggctgcaaaatgagtaagcagagacttcaaccactgtcttctgactcacagcccaagggaaagaccaggcaagagtaggrgtgaagtaagtagctcggtgacagcacagaacctgtgagccagggctcaggctgaggctcctggcctccctgactcttccttcaaaggcacacagtaggc

SEQ ID NO: 489527 - DNA, 201 bp, Homo sapiens
atttgtacactgttttgagcagtgcctgctgtacagtaaggaccatatatgtgtttataaaataaatcttagttgctataggcaacaccacgcagctgagrgtggccgcacattgactctcttaaagaacacttcctctcttgctcatcctactcagctcataaaagttccagggaaaatcatacattggacaagacaagg

SEQ ID NO: 489528 - DNA, 201 bp, Homo sapiens
aggcaaactgcacttctctgggcctcagaatccttctataaaatgaaagggtctcctctgattatttccaaggccctccatcagctcaaacatgctatcaytttcatggcatcacaaagaggcgaatgaatggggcttccttcctcatttccaactgattatattccagactcaaaagagaaacgaataaataaaacatag

SEQ ID NO: 489529 - DNA, 201 bp, Homo sapiens
gtgtctcttgctttttccccctctgatatcttccacttatttttcagaagtaacctaacggtacttgaaggaaatgagagtcaaagtcctttcccttctayagcacaaagggcctctccaccccttttcccaaagttaagtgattctatgtattcaaccagcagctgtgggactgaggccatgttgggagagggagtgaag

SEQ ID NO: 489530 - DNA, 201 bp, Homo sapiens
ttgactctatgtagaaactatattctccagcgagctttcagtcatactttaataaggacaaaggataaccttttagtttaggcatctctgttactttgcayggtgccacatggtatatactcaatacattttttatactttaataaatttggagctgtttaacaatactttatttctgaaatgctttatagttataggatt

SEQ ID NO: 489531 - DNA, 201 bp, Homo sapiens
taccacatccagaccgtcaagattaccccaatgtagatgagagcctgaccaaattatttttaaactgtgtaacaaaattattttgaaatcaaaacaagggytaatcctttgaaaggaaggtaagtcctcaagtcccaaggcgacttggcagcttctccctccacaaggctgttgcaaaccttagcatttcaggtctgaaag

SEQ ID NO: 489532 - DNA, 201 bp, Homo sapiens
atcatctctcacctgtatcctgtattattgtgatagcctcctcactggtctcctcccagattctactcttcaaactcttcagcctattttcaacccagaamctataataattcagttaaaaattaaacaaaacaaaagattatggaactcttttgctcaaaatttataaaaggctccatctcaccccaagaaaagccaaag

SEQ ID NO: 489533 - DNA, 201 bp, Homo sapiens
agttagcgagcccttctgaaccccaatgtatccataaaataaaggtcttttttttaatctacttcacaaagccatgttggaggtaaaaaagagaataaatmtgtgagaactcccaacacagactctggcacataggtggcactcagtaagggtgagttctcttcctcttcactatgcactaatctatgttcagattaaaca

SEQ ID NO: 489534 - DNA, 201 bp, Homo sapiens
ttctcccttcttccctctctcccttactccctccctcttcatctctctctccctctcttcgttatagaaatccctttttctcccttgaaaaagtcatctcrgctgcaagcaaaaaaagctattccttactgcaattatgaagctagataataagaaagttgttaccttgaaacccgctcgaaaaactgaaagtcaagaaca

SEQ ID NO: 489535 - DNA, 201 bp, Homo sapiens
ttgatggggaaaagtgtctttaaagtattccagataatgaaagactaaaattggtagcatttgggtatcaccatcttgcaatacctcacaaaggaatgaayataaacaataatcatcaatgactgttcacataacaaaagggggtataaacattcattctctgccttctgatggaagcacacatcacatcctctgaagctg

SEQ ID NO: 489536 - DNA, 201 bp, Homo sapiens
gagtcacatttgaatcctctttccttacaatccaagtctaatcctttagcaaattcagcggttcctatcttccagatacatccaggacctgacctcttctyattacttctactgctaccacactgatccaagccacatcatctctcacctgtatcctgtattattgtgatagcctcctcactggtctcctcccagattcta

SEQ ID NO: 489537 - DNA, 201 bp, Homo sapiens
ataaagaaggaggagaaggaggtttacaaccctatactccctcactgctgcagagattcttcctggctctcacacgctggcaagcagctggctctccgtcytggcagaaaatgcccaaaagaggtaaaagatagagactgcacaccatctgtgcaaaccaggctgctcttgtagtttttagacaaaatctaaatgtagtca

SEQ ID NO: 489538 - DNA, 201 bp, Homo sapiens
cgctcctttcccacagacacaaacactgtgctgacccacaaaagagatgccactcgtgttatcatgttttataatttcattaacatctcaggccttaaacsttggagtcacatttgaatcctctttccttacaatccaagtctaatcctttagcaaattcagcggttcctatcttccagatacatccaggacctgacctct

SEQ ID NO: 489539 - DNA, 201 bp, Homo sapiens
acttgagaccatggtctacctttgccttccttcatcacctccattctctcctcattcatttactcctccttccattgcattcccgtttctcaccgcaccaygccaatgaaactgccctaagattgccaatggcctgtaaagcaaagaccaatttttgtgttttatcttcttggatctatgtagcatgggccattgttggcc

SEQ ID NO: 489540 - DNA, 201 bp, Homo sapiens
ttttcttaaggattcagatcaaatcaattttggtcttaccctttgtatcttccataagtagcagcttttgttttcctcctctttcctcgtctttccccccyccagcctctgcttgctgtggtccgtctccgtgagagaggtcctcaaggaaacagagatataacagacccttgggctcgtgggaggggctaaattagccgg

SEQ ID NO: 489541 - DNA, 201 bp, Homo sapiens
attcaccatgcaatttgtctgttgtgtaataatcaggcagcaatatcaaggtttccttagatttccctgtggaacttaacatcagatgtagaaatcaggarggaccatacacaatgtccaatatgcaatatgctattgtggtttgatggtttaaggcacactccataaacccaacagtgaccaagcaggaaccacataaat

SEQ ID NO: 489542 - DNA, 201 bp, Homo sapiens
ctattttaaacaaaattaaaattcaaggtcacttcagtcatgttgtatcagacgttgtcgacaaaaggttactttgacaattgtctcattctctttacatktcatcagggagagaaagagttagtaaaaagtaaattgttctagtacccaacttctggtttaaccaggagaggtaaaatctcattatagtaactagcactt

SEQ ID NO: 489543 - DNA, 201 bp, Homo sapiens
tcttttttttaatctacttcacaaagccatgttggaggtaaaaaagagaataaatatgtgagaactcccaacacagactctggcacataggtggcactcartaagggtgagttctcttcctcttcactatgcactaatctatgttcagattaaacaaaacattgccttttgtacttgtgtctcttgctttttccccctctg

SEQ ID NO: 489544 - DNA, 201 bp, Homo sapiens
ccttcacaaacaagctacttgagaccatggtctacctttgccttccttcatcacctccattctctcctcattcatttactcctccttccattgcattcccrtttctcaccgcaccatgccaatgaaactgccctaagattgccaatggcctgtaaagcaaagaccaatttttgtgttttatcttcttggatctatgtagca

SEQ ID NO: 489545 - DNA, 201 bp, Homo sapiens
ttaacaatactttatttctgaaatgctttatagttataggattttgcatgtatgataacaactaattacactgaatgaaagactcaatggatgtcttctcycgagtcagtttagactacatctctaataatgaatattggtctgatattcatcctgttatgataaaactggtttttggtgatatgatgggattttttgtaa

SEQ ID NO: 489546 - DNA, 201 bp, Homo sapiens
caaaatagtgtgcgaattacagaatggaaaccaaaacatcaaagctagaaagagaaaagaatgatcaaagggaagatccagagtggctgaggggtaggcargagaaacagacaaacaagtacctgagcttgtcaatgagagacacactttggtgggtgctgtggcaacggttctctactttattacattaggatattaggt

SEQ ID NO: 489547 - DNA, 201 bp, Homo sapiens
ttatgaatgctgcttaaaaataatgtcaaaatatgttttagctgcctactcaggtaacgttttcttttgctctcatcttggtttccatatactatttttgkttttttgtgagatctaatcaatgatctagtcagaagctacttcactggctaacagtgatcatgttcatgtgctaaaaatgaacttgaaacacggaagtag

SEQ ID NO: 489548 - DNA, 201 bp, Homo sapiens
aactcagactccagagtagctgggactacaggtgtgcgccaccacactcagctaattttttattttatttttttagagatggagtctgtgttgtccaggcyggtctcaaactcttgggctcaagcaatcctcccacctcagcctcccaaagtgctgggattacaagcatgagctactgcacctgccctctgtttcctttgg

SEQ ID NO: 489549 - DNA, 201 bp, Homo sapiens
cagcctcaacctcctgggctcaaacagtcctcccaactcagactccagagtagctgggactacaggtgtgcgccaccacactcagctaattttttattttatttttttagagatggagtctgtgttgtccaggctggtctcaaactcttgggctcaagcaatcctcccacctcagcctcccaaagtgctgggattacaagc

SEQ ID NO: 489550 - DNA, 201 bp, Homo sapiens
taaaaataatgtcaaaatatgttttagctgcctactcaggtaacgttttcttttgctctcatcttggtttccatatactatttttggttttttgtgagatytaatcaatgatctagtcagaagctacttcactggctaacagtgatcatgttcatgtgctaaaaatgaacttgaaacacggaagtagtggttggtccagtt

SEQ ID NO: 489551 - DNA, 201 bp, Homo sapiens
ctcacacctgtgcatgctggggcagagaatggagaatgaggggaaggagaaaggtagggggcactgacttcctgtgcattgtccctctcttccaggtgtgygagatcatcgagagccccctctttctgaagttgaaccctatgaccaagcacacagatgtgagtaatactccatgcctactctgtcatgattgtcgctata

SEQ ID NO: 489552 - DNA, 201 bp, Homo sapiens
gtgtagaccacgtagcccgaatgacagcaacaggcagtggagagaactccactggtaatggaggggattccttggaagtggggttggaaggtgtggccacmtcccgtctcaacctcctcctgtcctcatccccttgcagtggctgaacacctgatagcacagcacagcgccatcaagatgctgcacagccgcgtcaagctc

SEQ ID NO: 489553 - DNA, 201 bp, Homo sapiens
gatcccgaggaactggtcctttctgttccctcccagcaatgcaacgacgtggggctcatggcctacctcggcaccatcaccaaaacgtgcaacaccatgarccagtttgtgaacaagttcaatgtcctctacgaccgacaaggcatcggcaggagaatgcgcgggctctttttctgatgagggtacttgaagggctgatgg

SEQ ID NO: 489554 - DNA, 201 bp, Homo sapiens
agggcggagcagcaacatctttccctgggataagttacgggaggaaagtgtggcccgggctccgccgtcccccactgccatctccagggaagaacgtgggkcccggactctcaccctctctcctttccctccacccttagtagtccccagcgtgatggcctgcggagtgactgggagtgtttccgtcgctctccatcccct

SEQ ID NO: 489555 - DNA, 201 bp, Homo sapiens; identical to SEQ ID NO: 300650

SEQ ID NO: 489556 - DNA, 201 bp, Homo sapiens; identical to SEQ ID NO: 300651

SEQ ID NO: 489557 - DNA, 201 bp, Homo sapiens; identical to SEQ ID NO: 137674

SEQ ID NO: 489558 - DNA, 201 bp, Homo sapiens
catatatttgatatgcccagactgcatacgattttaagcggagtacaactactattgtaaagctaatgtgaagatattattaaaaaggtttttttttccaraaatttggtgtcttcaaattataccttcaccttgacatttgaatatccagccattttgtttcttaatggtataaaattccattttcaataacttattggt

SEQ ID NO: 489559 - DNA, 201 bp, Homo sapiens; identical to SEQ ID NO: 137718

SEQ ID NO: 489560 - DNA, 201 bp, Homo sapiens
ggattgtagatatgaggaaaaccttccaaggagaggcaagaaagacagatacgagaaaaaccaagtgagcataatgtcctaggatgcaaaataaacaaagkacttgaaggaaaagaaggtgattaaccatattaaatgctgctgataagcccagtaaaatgaagactggaaaatgatgcttgattttaaaaagacgaggta

SEQ ID NO: 489561 - DNA, 201 bp, Homo sapiens
ttaatagtcacatttttatcaagcaagtttctcaagcttgaactcatacacagcctcccatagagcacatcacatcacaaaagcactcaaaggtttatagyttccctgacctcaattcagttcttctccatgttcccacattatttctacaaagcttctcagacacctcctctttatcaacatagtaaaaagcaggctaca

SEQ ID NO: 489562 - DNA, 201 bp, Homo sapiens
atttaattttattgtgctttgagaacagatatggcatgatctctagtttgttaaggtttgttttatggcctagaatgaagtttatcttggtgaatgttccrtgtaagcttgagaagaatgtgtaatctgctgttatttgaagtagtctatagatgtcaattatacccagttgattgatactgctatcaacttcaactatgt

SEQ ID NO: 489563 - DNA, 201 bp, Homo sapiens
gagtggtatatctttttttactaatgcataataattgtacatatttatggggtacatatgatatcgtgatacatgcacacaatgtgtaatgatcaaatcasggtaattagaatatccatcacctcaaatatttatcatttgtgttagaaacatttccaatcctcttctagctattttgaaaaatacaataaattattgcta

SEQ ID NO: 489564 - DNA, 201 bp, Homo sapiens
tttgtttttacctttaggattttctgtaggattaaagaaagaagagtcttatttttcatactaaataagcatattttaaaatgtatttttgttttatttgktttcattcccttaaaaaaaaaagtgggtcctacctcctcgtgatatataatcatatttttcctccttcatcttctcttcatctggtatactgctatctga

SEQ ID NO: 489565 - DNA, 201 bp, Homo sapiens
aaacaataaaaggcttacagcagagaaatactaaaaataaatttaaaaggccaccctactgaaaggacagacatataaacaaataattaaaatatcatgtggggggggtttctgcttcccgtatatttgagaacagcatcaaacattcccatgaccattaaaaatctagataaggggcctggcatggtggttcatgcctgt

SEQ ID NO: 489566 - DNA, 201 bp, Homo sapiens
tcaatgttgtggcgttactgccctagaaagacactgactacagctgatgagacagcctctacaggcattaaggatgccaaggacagaataactgtgttggsatacgttaatacaatatgcatacataaatgtacacttcctatgacaggcaaaaacttgtgtcctccctgttttcgaggagtgaatttcttaccagcccat

SEQ ID NO: 489567 - DNA, 201 bp, Homo sapiens
gaagtcttagatttattcagtaaaatagtttgctaaacttctttctggtgggggaaagattcttcatagctatcttatgctgccaggtaacttttcttccrtttagctgagacaaaaaacggttatcaagcgataagataatgaaaaagtatttttttccttgataagaaatactagaaatctaaataaagcaaatatttt

SEQ ID NO: 489568 - DNA, 201 bp, Homo sapiens
tctcttagatttgagttcctatattcctgacaaaatgcaaaccagaagtctggttgtgtgagaactgccaggtctgaaaaacttagaagtacagccttccygtcttttacattgttataggcctgggacagagaatacaagtaggtggcatccctcatatacattttttaaaatttttaaatattttataagaaatagaga

SEQ ID NO: 489569 - DNA, 201 bp, Homo sapiens
gaagacttagaagcaaatgaagacaggaaagcttcaataacattagatttggcagcaacttctgggaaatgacaccaaaagcaccaacaacaaaataaaaratggatacattgaactacattaaaatttataattttcctatgcatcaaaagacattatcaagaatgtgaaaaggcaacccacagaatagagaatatatct

SEQ ID NO: 489570 - DNA, 201 bp, Homo sapiens
tttggcagtaattttctgattatgacatgactgctgtgcgattcagcaatttcccagatgcaggcaatagctggtgtttgtgtcctattctcacagtaacygtctcaatgtagtgaaaaatatcagtaattttagtaaactgtacaaggtcacatttacacttgatcaacaatatagcatagaattttttattttttacca

SEQ ID NO: 489571 - DNA, 201 bp, Homo sapiens
taaagtcagtgtgcatacatatcatcattcaaggttaagtaatcccagttcaacaacctaaaaatatcaaactggatcacacttaattttcttccatatcstctacttcatcctcgtgtatcttcaaggctctcaccatttctttgactgcatgatacaaaatatttttaacctgaaagagatgttgatatttctaatcac

SEQ ID NO: 489572 - DNA, 201 bp, Homo sapiens
ttctactttctgagagaaaaataactatcagcaacaagtagagtacatgactttccctgtggaaaaaaggtaagggtgtgctgtaaaggataccaccacartacagttttgttgtcatcttttctaatatcattttcttaaaataatagtttaagaagtcacaatgaaatcttacctacttattcttcataaaaactggga

SEQ ID NO: 489573 - DNA, 201 bp, Homo sapiens
ccttgtaattagttaatttgcaggcttaaaaaattgaaaggaactaccctaactcattagttatatcaaatacctgcaataatgtttcagcagcttttaawatatttctttgatagtaacataagaagaaaactttacaaatattgcaaatttgttatatgctagatgttctgccagaaaacagcaataacaatagttaaa

SEQ ID NO: 489574 - DNA, 201 bp, Homo sapiens
actacaatgagatacaaaggatgtaactccatggcatcacaggattagaaaggataaataatctgaactacaggtcacatttctgtggcagcgctcagacwataactcaagtgtgcccactgactctcaaatctctgggggataggggtggttacctattatagtcaatagtgtcagttaaaaagctgagtagcataatgt

SEQ ID NO: 489575 - DNA, 201 bp, Homo sapiens
tactacattttgcttatatttgtttttctatgtgtgtttcccccattaaattctaggttctttgaaggtatttgtagttctgaacataacaaacctggccsttaaatatatgaattaatgactctcaatccagattatttaatgactaaggaccagtactgttttgtttttagtctgaagcctagaaagacttgaatttta

SEQ ID NO: 489576 - DNA, 201 bp, Homo sapiens
agtacactttaatgatttatcttagagtgagcaatcatttgaacaaattattcagcggtagaaaagtgggggaaaaaataaggtactggaagtaatcaaamcagtgtgatacttgcgtaaggacagatatatagaccaagggaccagaatagagagcacagaaataaactgttacacaaatggtcaactgatttcaagggt

SEQ ID NO: 489577 - DNA, 201 bp, Homo sapiens
gtttaagatacttcaggaggtcgggcgcggtggctcacacctgtaatcccagcactttggaggcagaggtgggcgaatcacctgaagtcaggagttcgagmccagcctggccaacatggtgaaaccccttctctactaaaaatacaaaaattagccaggtgcggtggcgtgtgcctgtaattccagctactcaggaggctg

SEQ ID NO: 489578 - DNA, 201 bp, Homo sapiens
agcaaagtgactggcacacagcaataaatgaatgcctgtatgttatagctcagcaatcacaggatcttctttttcctcgaatcttaaaaacatatgtttcytacaagggaggtcttatgcctaataatttacaaggcaggagttatactcaagacattgatctggtatttcagtaaatttcaccaaaacagaatagtacac

SEQ ID NO: 489579 - DNA, 201 bp, Homo sapiens
gctgtaatatttatgacctgaaagagaatcaagtattttatctgtctttgagttcacatttagagcaaagtgactggcacacagcaataaatgaatgcctrtatgttatagctcagcaatcacaggatcttctttttcctcgaatcttaaaaacatatgtttcttacaagggaggtcttatgcctaataatttacaaggca

SEQ ID NO: 489580 - DNA, 201 bp, Homo sapiens
atctgtactgtgggctactgctgccagggtcaacaccctagcaaagtgcacctgcccagttaccagttgcctgcctacagctgctccaacagaaagcaacscaccttccccagtagcagggctgcaacatgatggctggagccctcacctgaccattccactggtagtctggggatcatgccacccctgttgaccacagcc

SEQ ID NO: 489581 - DNA, 201 bp, Homo sapiens
tacctgcaataatgtttcagcagcttttaatatatttctttgatagtaacataagaagaaaactttacaaatattgcaaatttgttatatgctagatgttytgccagaaaacagcaataacaatagttaaatgaatgtggctcttttcctaatacaatttaatgaccttgtttacttcctgtttcttttcttaaataaaac

SEQ ID NO: 489582 - DNA, 201 bp, Homo sapiens
cactacctgctctcctaggtactttcttagtctctgttgctctgctaataaatgaactcttttaacatgcagaagatgcacattccacatatctcctaggraaactaatatttaaaagagaaaccaatgcttttaacagtctaattacccttagattttaaagcctcttatttttgatcttcataacagtatcatccccat

SEQ ID NO: 489583 - DNA, 201 bp, Homo sapiens
ctcatgcctgaaatcccaacactttggggggccaaggtgggcaactgcttgaggccaggagttcaagaccagcgtggccaacatggcgaaaccccgtctcyagtaaaaatacaaaaattagctacacgtggtgttgcatgcctatagtcctagctattcaggaggctggggtgggagaattgcttgaacccgggaagcaga

SEQ ID NO: 489584 - DNA, 201 bp, Homo sapiens
atttcagtaaatttcaccaaaacagaatagtacactttaatgatttatcttagagtgagcaatcatttgaacaaattattcagcggtagaaaagtgggggraaaaataaggtactggaagtaatcaaaccagtgtgatacttgcgtaaggacagatatatagaccaagggaccagaatagagagcacagaaataaactgtt

SEQ ID NO: 489585 - DNA, 201 bp, Homo sapiens
gacttccagggctcaggttcttctcccccacccccccttccctccacatacactctctctcattagcacaatcaaaagaaatgaaagtttactattattgycttttaaaatttgacacatttctttatatgtaaggggtaaaaggcaacattatcttataaactgaggctgactcaaaagcaaagaacaacgggtggaaga

SEQ ID NO: 489586 - DNA, 201 bp, Homo sapiens
cctatgcctgtttattcatctataaacaagaataatagtgtctacctcaaaagaataatgtaaaacactgagaaaaatatctggaacttggtatgccttcaaaaatgaactagtaataatatattactgacattatatctttttttttttaatggactctcactctgtcgccaggctggagtgcagtggcgcgacctcagc

SEQ ID NO: 489587 - DNA, 201 bp, Homo sapiens
tctgaaaactgtaccagagcccttccttgcctctcctagcttctggtggtctgctggcaaccttttgcaatcctgagcttgcagaagcatcatgccgatcyctgccaatgttgacacatggtgtctacactgtgtatctctgtatccatattctctcttataagaaccctagattaagggcaactctaacgacctcatctt

SEQ ID NO: 489588 - DNA, 201 bp, Homo sapiens
cagtggctcacatttctaatcccagcactttgagaggccgaggtgggcggatcacgaggttaggagttcaagaccagcctggctaacacggtgaaactctstctctactaacaatacaaaaaaaattagctaggcatggtggcacatgcctataatcccagctacttgggaggctgaggcaggagaatcgcttgaacccgg

SEQ ID NO: 489589 - DNA, 201 bp, Homo sapiens
aatgaagaggactggctgtagaaatttaaatttcttcatgaagaaagtaacgacaagctaaaaaaaatcagtatgaaatctttatttttttaagatagcaratattgagaaaaaatattaagtatattagttgtttcaaaacatgtccaaacactcatagatatttagtaagaaaaatctgattgcaattacaactacttt

SEQ ID NO: 489590 - DNA, 201 bp, Homo sapiens
tatcccgggagtcctgctccgacaccacctccacaggggaagccgctcggagagacgcagggacccaggcaagggatgcgggcaaacgcgccaagggttcrgcagaggggcgtgaccgccagttggccgggctgagcgaggcgccagagggaagcctgcaaggtacgtctgcgagagccgggtgcgggcgcggcaggggaa

SEQ ID NO: 489591 - DNA, 201 bp, Homo sapiens
gcctaattcatatttttataataaaattttaaatctgttaattacaggcgtgagccaccacacccggctaattcctaatttttgaaagtacatattattasataataaattcaacagcacctaaaacagaagcataaatgttctctttttgaacataaattaatttagggattagccattttcacagagcagatgagtagc

SEQ ID NO: 489592 - DNA, 201 bp, Homo sapiens
caggagaatggcttgaacccaggaggcggaggttgcagtaagccaagatcacaccattgcactccagcctgggcgacagagcaagactctgtctcgaaaamaaaaatatatatagataagatatactttaagtttgggggttttaagccatgtactaataaaacagacaagaactactgagccaagacctgaaaaggtgag

SEQ ID NO: 489593 - DNA, 201 bp, Homo sapiens
aatggcttgaacccaggaggcggaggttgcagtaagccaagatcacaccattgcactccagcctgggcgacagagcaagactctgtctcgaaaaaaaaaawatatatagataagatatactttaagtttgggggttttaagccatgtactaataaaacagacaagaactactgagccaagacctgaaaaggtgagaaaccc

SEQ ID NO: 489594 - DNA, 201 bp, Homo sapiens
tccagttaacttataatataactgataaacagttaatttacccaaaaatatttcatttattctggacacagttaaacataatccttcttagaataaactayaaatctcagtgaactaccttatttccaactttttagggatcatatacttgtttccatatccctccaatgtcttaatgcatatattctatgtagatcaaca

SEQ ID NO: 489595 - DNA, 201 bp, Homo sapiens
gctaaaaaaggattgttgtaccaggggaaaacagcaaacaccaacattttaatctgttataattattacatttttgcattccaataatattctttgcattygagttttatttttatttagaaacaaaacaaagtgatgaatgactgtgatcccacactgatctaaagaaagcaatttcagtaaaaggctattttaaaaaac

SEQ ID NO: 489596 - DNA, 201 bp, Homo sapiens
tacaaaaattagctacacgtggtgttgcatgcctatagtcctagctattcaggaggctggggtgggagaattgcttgaacccgggaagcagaggttgcaaygagccgagatcacgccactgcactccaccctggatgacagagcaagactctgtctcaaaaaaataaaaataaaacaggacaatcatcacatcatactaat

SEQ ID NO: 489597 - DNA, 201 bp, Homo sapiens
acttcgtccatagtccctctttattaacaggatgatataaagtcacctaccattcttaatgtcttccttaaaaccacttccggctgggtgtggtggctcaygcctgtaatcccagcactttgggaggctgaagtgggcggatcgcctgaggtcaggagttagagaccagcctggccaacatggtgaaacccctctctacaa

SEQ ID NO: 489598 - DNA, 201 bp, Homo sapiens
actttgggaggctgaagtgggcggatcgcctgaggtcaggagttagagaccagcctggccaacatggtgaaacccctctctacaaaaaatacaaaacttarctgggcgtggtggtgcttgcctgtaatcccagctacttgagaagctgaggcaggaaaatcacttgaactcaggaggcagaggttgcagtgagccgagatc

SEQ ID NO: 489599 - DNA, 201 bp, Homo sapiens
gggtttcaccatgctggccaggatggtctccatctcttgacctcgtgatccgcccgccttggcctcccaaagtgctgggattacaggcctgagccactgcrccctggtcaatctttccaaggcctagttcaaacatagccttgtctatgaattaatttctgtatctcatcactcaaaattaatcctttcctgctttatata

SEQ ID NO: 489600 - DNA, 201 bp, Homo sapiens
cattattgaaaatgtagaactaaattgttgcagccagtctacagttttttatgaggaaattatgtaagaagagccacaaccatcttaggtcatcaaatttaaaaaacagcaattagaagataaagattctttctgaagtagttaaaaaaaaaaggaatagcatttagattttttgttttgagtgaggatctctccgtgtcg

SEQ ID NO: 489601 - DNA, 201 bp, Homo sapiens
gctggcctcaaactcctgacctccggtgatctgcccgccttggcctcccaaagagctgggattacaggcgtgagccactgtgcctcgccaaacactcactaaaaaaaatttttttttaatatacagtgcaatgaatgtaacttccaaattaataccacatcgaagttttttgggctgattttcacttttagcatatagtgc

SEQ ID NO: 489602 - DNA, 201 bp, Homo sapiens
ctggcctcaaactcctgacctccggtgatctgcccgccttggcctcccaaagagctgggattacaggcgtgagccactgtgcctcgccaaacactcactaaaaaaaatttttttttaatatacagtgcaatgaatgtaacttccaaattaataccacatcgaagttttttgggctgattttcacttttagcatatagtgct

SEQ ID NO: 489603 - DNA, 201 bp, Homo sapiens
tggcctcaaactcctgacctccggtgatctgcccgccttggcctcccaaagagctgggattacaggcgtgagccactgtgcctcgccaaacactcactaaaaaaaatttttttttaatatacagtgcaatgaatgtaacttccaaattaataccacatcgaagttttttgggctgattttcacttttagcatatagtgcta

SEQ ID NO: 489604 - DNA, 201 bp, Homo sapiens
tccagcgattcccctgcttcagcctcacaagtagctgggattacaggcacgcgccaccacacccagctaatttttgtatttttagtagagacagggtttcrtcatgttggccaggctggtctcgaactcctaacctcaggtgatctgcccgccttggcttcccaaagtactaatattacaggcgtgatccaccatacccgg

SEQ ID NO: 489605 - DNA, 201 bp, Homo sapiens
ttccaaaaagcaagaatgaatgctgagatttacaaaaatagttaacagatttgctgaagcatttattttaaaaacatatatggaacaactagatattatgyatttcagtatatttcaatgtttcatcataaatatcacacatattaaaaataaggcggacaatttaaaagtaggtttaggtttccaggttaagatggcgaa

SEQ ID NO: 489606 - DNA, 201 bp, Homo sapiens
aaagtttaaagaatatttagcctaggaagaattaaatatgtagatgatccactactgtacatacccatataaagcaaacagctttgggattctctcttgayacttaatggcatggaagttgacggttgagatagatatgggaatttaacaacaaaattccattcacaaagacattcaacaacagttcatgccatattgtct

SEQ ID NO: 489607 - DNA, 201 bp, Homo sapiens
ggtacagcagcttgggagttcattgctggtctgggactatttgcttgggcacgtgtataatggctctaaaaataaccaattaacagtaattgtttactacytggtttctactagcctaaggaaaaatattttacagaaattcatccctaataacatacatacgtgaacagcgttgacgttttgattggcacgagacctgcg

SEQ ID NO: 489608 - DNA, 201 bp, Homo sapiens
aaacgggggttttgccatgttggccaggatggtctcaaactcttgacctcaggtgatccacccaccttggcctcctaagtgctgggattataggcgtgagycaccgctcctggccctacatgttgatttaagtgacaaactggcatagatgtgattgatctcattagctgggatacagaatgatcaggaagaaaaacgaaa

SEQ ID NO: 489609 - DNA, 201 bp, Homo sapiens
atattttacagaaattcatccctaataacatacatacgtgaacagcgttgacgttttgattggcacgagacctgcgtcgtgatgtaatgccaatattttcrccttttaacaaagagtgaacaacatcatctagaaaggtcatttgaaccatagaaggatcgacattctgtggttctagtacctaatccatgatacaaaaca

SEQ ID NO: 489610 - DNA, 201 bp, Homo sapiens
cctgagtagctgggactacaggcatgtgccaccacacacggctaatttttgtatttttagtagaaacgggggttttgccatgttggccaggatggtctcaractcttgacctcaggtgatccacccaccttggcctcctaagtgctgggattataggcgtgagccaccgctcctggccctacatgttgatttaagtgacaa

SEQ ID NO: 489611 - DNA, 201 bp, Homo sapiens
agaaaagaaggtctttcagacagaggaaaattcatacgcaagaatagatgggtgaaacagtatggaatatagggacaagtacactggtatggattgaattraggacagcagagtaggtgaggaagaaaactgaaagactgtagtttggagtgttctgtaatagtctaggcgggtaaggatgggagccttacgatagaggag

SEQ ID NO: 489612 - DNA, 201 bp, Homo sapiens
ttccttctcaccacctccttccactatgaagtttccatctatctggtttccttccttataactgtttcaaaagtatagcacatggatgaggaacagggtatttttttttttttttttttaccaaaagccaaaccattcatatgtatggatttcataaacatttattgatccttttttgaggtaagtataaatacctttaca

SEQ ID NO: 489613 - DNA, 201 bp, Homo sapiens
caaaaaaaaaaaaaacccaaacaaacaaaaacttccatacataaccatccatataccttttccataatatagggaattataaactgttttttctgtgctgktttttttttttttttctgagacacagtctcactctcccagcccgtagtgtactgggcacgatcttgactcactggaatcttcgcctcccaagttcaagcg

SEQ ID NO: 489614 - DNA, 201 bp, Homo sapiens
tcctgtagtcccagctactagggaggctgaggcaggagaactgcttgaacctggaaggcagaggttgcagtgagccaagatcgcaccactggactccagcytgggcaacagagtgagattccatctcaaaaaaaaaaaaaaaaaacttttttttttttcctaagtttgtcaaggcacagttgaggaaagaacagaatctat

SEQ ID NO: 489615 - DNA, 201 bp, Homo sapiens
cccagctactagggaggctgaggcaggagaactgcttgaacctggaaggcagaggttgcagtgagccaagatcgcaccactggactccagcctgggcaacagagtgagattccatctcaaaaaaaaaaaaaaaaaacttttttttttttcctaagtttgtcaaggcacagttgaggaaagaacagaatctatatcaaatgt

SEQ ID NO: 489616 - DNA, 201 bp, Homo sapiens
actagggaggctgaggcaggagaactgcttgaacctggaaggcagaggttgcagtgagccaagatcgcaccactggactccagcctgggcaacagagtgarattccatctcaaaaaaaaaaaaaaaaaacttttttttttttcctaagtttgtcaaggcacagttgaggaaagaacagaatctatatcaaatgttaatatt

SEQ ID NO: 489617 - DNA, 201 bp, Homo sapiens
tagggaggctgaggcaggagaactgcttgaacctggaaggcagaggttgcagtgagccaagatcgcaccactggactccagcctgggcaacagagtgagaytccatctcaaaaaaaaaaaaaaaaaacttttttttttttcctaagtttgtcaaggcacagttgaggaaagaacagaatctatatcaaatgttaatattaa

SEQ ID NO: 489618 - DNA, 201 bp, Homo sapiens
gcttagaaaatctcaaatcacactaagaaaaggatagttaatcagacaatccctatcaccaggcacctggatgaaagaaatacaaatcctccatgaaataaaaaaaaaaaaaaaaaaaaaggccaggcgcggtggctcacacctgtaatcccagcactttgagaggccaaggtgggcagatcacaaggtcaggagtttgag

SEQ ID NO: 489619 - DNA, 201 bp, Homo sapiens
ctaagggctacccaatttgtgaatcatttttccttgctcagttaaattgtaaaatttgtctgaaagtttttcttttaacagtctattggtctatctacttkgctactatttttaagagacttatcgtatcattcagtgtcataccataatttagcgcaactaaaatatcattttaaaaggcagttttaaagttcatctgct

SEQ ID NO: 489620 - DNA, 201 bp, Homo sapiens
cttagaaaatctcaaatcacactaagaaaaggatagttaatcagacaatccctatcaccaggcacctggatgaaagaaatacaaatcctccatgaaataaaaaaaaaaaaaaaaaaaaaggccaggcgcggtggctcacacctgtaatcccagcactttgagaggccaaggtgggcagatcacaaggtcaggagtttgaga

SEQ ID NO: 489621 - DNA, 201 bp, Homo sapiens
agaatcgcttgaacccggaaggcagaggctgcagtgagccaagatcataccactgcactccagcctggcgacggagcaagactccacctcaaaaaaaaaamaaaaaacaaaaaaggttgcagtgagctctaattgtaccactactacactccagcctggatgacatggcaagacgctctgaccctctctctctctctctct

SEQ ID NO: 489622 - DNA, 201 bp, Homo sapiens
  misc_feature (1)...(201): n = A,T,C or G
ttcatcactgaggcttggacttatcttctgagctttattacatagaggatttccaataactgagcaagacaattcaaaactagttaaatctctctccaccstgttatatttctagatactcctttaagtgtttcnnnnnnnnnnnnnnnnnnnnatttgggttggcattaaatgtttgtgatcatgaggctgtcccttcac

SEQ ID NO: 489623 - DNA, 201 bp, Homo sapiens
tctacctgatttattaaggacacgatagattaatctcttaagctctctatgtaggtgtgtgtgtgtctgagtacatataaatataaataaatacttttttwaaaaaaaggaaacatattaaaagatttcacataattaaaagcaaggggtaattaagtctccgtatacaaaatttcatcatttgattagctgtggttaatt

SEQ ID NO: 489624 - DNA, 201 bp, Homo sapiens
agaccacactataaaagcttctaggcagaaggtactatatttccttttctcccagtgcccctagcaccttatcttatacagtgaagtacttatctaatggycactttttttttttttttttttttttgagacagagtctcactctgtcacccaagctggagtgcagtggtgcaatctcagctcagtgcaacctccgcctcc

SEQ ID NO: 489625 - DNA, 201 bp, Homo sapiens
atagcacaatgtatgaatattagtgatatatgtataaaatcaaaattaagttcagtacttaaagaaatcatatcttctatataagaaatgatttcaagcaytccaagagaccacactataaaagcttctaggcagaaggtactatatttccttttctcccagtgcccctagcaccttatcttatacagtgaagtacttatc

SEQ ID NO: 489626 - DNA, 201 bp, Homo sapiens
ttctcattaataattacagggatcagacattatctttgtaccctctaattctgctctcactacctgctctcctaggtactttcttagtctctgttgctctrctaataaatgaactcttttaacatgcagaagatgcacattccacatatctcctaggaaaactaatatttaaaagagaaaccaatgcttttaacagtctaa

SEQ ID NO: 489627 - DNA, 201 bp, Homo sapiens
cctctagactgtgaccttccaccagcatttctcaggttttttcctcccttcaaatggaacagggtggctggagagggctgaagttatttcccttcccacarctggaagtctagagggaggtggagttaggaatttccttttctccatgtggagggctagagttgactggagctgcatttttcccattccccagttaggttt

SEQ ID NO: 489628 - DNA, 201 bp, Homo sapiens
gtgttttgtaatgcagtactagggtgatgggggaggagaagcattctataggcctaggattaggtctcagtcctctggtgagcccgtgcctctagactgtraccttccaccagcatttctcaggttttttcctcccttcaaatggaacagggtggctggagagggctgaagttatttcccttcccacaactggaagtctag

SEQ ID NO: 489629 - DNA, 201 bp, Homo sapiens
taaagaaaatgtagtacacacacacaccatggaatactatgcagacataacaaagaatgaaatcatgtccttttgcagcaacatggatggagttggaggtsattatcctaagcaaattaaggtaggaacagaaaaccaaatactgcatgccctaacttataagtgggagctaaacactgggtactcactgacataatgatg

SEQ ID NO: 489630 - DNA, 201 bp, Homo sapiens
acttcaaaactgcaagggcatctgccagataataagagatcagaaaagaaggtctttcagacagaggaaaattcatacgcaagaatagatgggtgaaacartatggaatatagggacaagtacactggtatggattgaattgaggacagcagagtaggtgaggaagaaaactgaaagactgtagtttggagtgttctgtaa

SEQ ID NO: 489631 - DNA, 201 bp, Homo sapiens
atcttacaatccagtggaattgagacagacacacaaatacgatacagattaaagtatctttgtatcctctaggatacaaaggtgagacaaaatgggttggsgggtgacctagttaggtgtgtcaggaaaggatttacagagaaggaaatatttgagttgagactcaagaaaagtatgaaaccaaggtttttgagttggaac

SEQ ID NO: 489632 - DNA, 201 bp, Homo sapiens
agcaatctgcccaccttggcctcctaaatactgggattaaaggtgtgagctactgtgcccggtagagaccccatctcttaaaaaaagaaaagaaaaagacytagtcattagtttatcacgtttttttaattttatttttttttaattttcagagtgagtcttgctctgttgcccaggctggagtgcactggtgtgatctcg

SEQ ID NO: 489633 - DNA, 201 bp, Homo sapiens
atcaatacagagcctcaaactccagtaacccacaattttgaaggctagaagtctaagatcaaggtggttgtgagatgaaaccagatttataaaagaaaaamtgtatgactgtgacatcacttaaacaaatttaattttaaaaagtgtatatatacctaggcttacctatttcacattttatcttaagagtctaaatatttc

SEQ ID NO: 489634 - DNA, 201 bp, Homo sapiens
ctgaagcatttattttaaaaacatatatggaacaactagatattatgcatttcagtatatttcaatgtttcatcataaatatcacacatattaaaaataasgcggacaatttaaaagtaggtttaggtttccaggttaagatggcgaatcatatacgtctatgtaatttcagtaccttgtgaaacctactacaaactacat

SEQ ID NO: 489635 - DNA, 201 bp, Homo sapiens
gtctccctatgacctgaaatgacctctatgtaatatcagatacatttaaacttactagaattacacgactaaaaaccctagagataaaaattatttagtakcaaattgttgatgtattttggggggcatggatgatttgaacttttaaaatctctataaaaatattagtggaactatttacctgatcattcataacgatca

SEQ ID NO: 489636 - DNA, 201 bp, Homo sapiens
tagacattgcttataagatgcaaactcaggccaggtgtggtggctcacgcttgtaatcccaacacaatgggaggccaaggcaggtggatcatctgaggtcrggagttcgagaccagcctgactaacatggtgaaaccccatctctactaaaaatacaaaattagccgggcgtggtggctcatgcctgtaatcccaactacg

SEQ ID NO: 489637 - DNA, 201 bp, Homo sapiens
atggactgttgttctattgccaatttctgagacttttaacagatgtaaactttgacttctctcaaagagccaaaatacactaacataaattatatatatawatatatatataaatatatatatggctagataggtatctttcaacaaaatctcaatagaatttagtaacttattctacaattgttgtgagctgattctggt

SEQ ID NO: 489638 - DNA, 201 bp, Homo sapiens
ttctattgccaatttctgagacttttaacagatgtaaactttgacttctctcaaagagccaaaatacactaacataaattatatatatatatatatatataaatatatatatggctagataggtatctttcaacaaaatctcaatagaatttagtaacttattctacaattgttgtgagctgattctggttctctctatat

SEQ ID NO: 489639 - DNA, 201 bp, Homo sapiens
agcaagagaaacagggttttgactttcaacaaaaactcccatctactttgaagtaaaaattatgtaatggtcttatattgttgaatgccaagtgaaggtayggcaacaatgaataagtccttgcttgaggggaagagatattatttgcaaactaacttataccttttgaagaaattcccttatcttgtcaacatctttccc

SEQ ID NO: 489640 - DNA, 201 bp, Homo sapiens
tctattgccaatttctgagacttttaacagatgtaaactttgacttctctcaaagagccaaaatacactaacataaattatatatatatatatatatataaatatatatatggctagataggtatctttcaacaaaatctcaatagaatttagtaacttattctacaattgttgtgagctgattctggttctctctatatc

SEQ ID NO: 489641 - DNA, 201 bp, Homo sapiens
ggtcagacaaagcagtctgacaaagtgcctctgaatgttgctatcagagattgttgttccaggtcagacacagcagtctgtcaaagtgcctctgaatgttrttatcagagaatgttgcttcaacctgaacaatgaaagctgtaagacaaacaacctggataccctgtttaaaaatggtgataatgtaggcatgggggcaaa

SEQ ID NO: 489642 - DNA, 201 bp, Homo sapiens
tcagacaaagcagtctgacaaagtgcctctgaatgttgctatcagagattgttgttccaggtcagacacagcagtctgtcaaagtgcctctgaatgttgtyatcagagaatgttgcttcaacctgaacaatgaaagctgtaagacaaacaacctggataccctgtttaaaaatggtgataatgtaggcatgggggcaaagc

SEQ ID NO: 489643 - DNA, 201 bp, Homo sapiens
cggcgtaatctcagctactgcaacctccacctcctgagttcaagcaattctcgtgcctcagtctcccaagtagctggaattaaaggcatgtgccaccacgcctggctaatttttgtatttttagtagagacggggtttcactgtgttggccaggctggtctctaactcctgacctcaagtgatccacctgcctctgcctcc

SEQ ID NO: 489644 - DNA, 201 bp, Homo sapiens
cgagtaactgggattacaggtgcatgtcatttcacctatcataaaacctcaaatttatttaaaaacattcagcatctgctaagtgcaataaagcaaactaygataaaaaatgtatatttacttatatataggtttgtataacccaggatactccagatcctgatttgaacagtattttaagacaataaaaagtagaaaaaa

SEQ ID NO: 489645 - DNA, 201 bp, Homo sapiens
attccataatatgcagttttctgtcaacaaaacacctgtgtagctgtaatttcatgacaggcattcagttcaaataaagttaatacacttgtgaaattatyaactttctatcaaaattattatcactctgctattattttcctggatgtatataactcaaaatattggactgggccttctatttatattgcacacaattga

SEQ ID NO: 489646 - DNA, 201 bp, Homo sapiens
caaatatgctaatatatttatgttgcagccttaaggcatgctttaaaaatactctatgtaggtattctttggtattttcttttaggaattttataattcartttttatttatttatttatttttgagatggagtcttgctctgttgccaggctggagtgcagtggcgcgatcataggatcaccgcaaccgccttctctcag

SEQ ID NO: 489647 - DNA, 201 bp, Homo sapiens
gacctcaagtgatcctcccaccttggcctcccaaagtgctgggatttcaggcatgagccactgtgcctggccaggtaaaaagaacttctaggaattacagktcacttattgcatcgaaactggacttgcctttacattcttaatgtacttttacttttcctcaagatatgaacttattgttgtaaagctgaattttctttc

SEQ ID NO: 489648 - DNA, 201 bp, Homo sapiens
acgccaacaatttttaaacctgggtatatatcaatttgaaatcagttattcttaataaatctaggataccagagaacttacaatgcagtttaaagtatatsacacgcacacacaaaatacattaagacaatgttgaatatatatgaagaaagtatgtgtattcatatttgtttcagatttgactcaagaacgattaaactt

SEQ ID NO: 489649 - DNA, 201 bp, Homo sapiens
tatttgcaagctactcatcgcacaagtgactaataattcagaatatatgagaaactcaacagtttaaaaaaaaatcccattaaaaagtgggcaaaaggccrggcatggtggctcatgcctgtaatcccagaactttaggaggccgaggtgggtggatcatgaggtcaagaaatcaagaccattctggccaacacggtgaaa

SEQ ID NO: 489650 - DNA, 201 bp, Homo sapiens
cttgtgtgacttttggcagattgtacctttcaaataactggtccatttcatctaggttatgaaattcataagcacagggtcagtgataatattcctttatyatctttttaatgtcaatgggatctgtaaagatgctgctctttcatttttgatattagtaatttgtatcctttctttttagctggtctagctaaaagatta

SEQ ID NO: 489651 - DNA, 201 bp, Homo sapiens
aattaattcaaaaatatgggcaaaagatttgaacatgtacttcactaaagaagacatacaggcagcaagtaagcacatcaaaagatattaaaaatcattartaattagagaaatacaaataaagaccacaatgagctactactacacatctattagaaagactaaaatttttggccaggtgcagcggctcatgcctgtaat

SEQ ID NO: 489652 - DNA, 201 bp, Homo sapiens
gagacagttgctcattctgaagcagggaacagcagaatcaacgaccctaaggaaaaaggaggctgacatgtttacagaaacagaagaaaggccaataggamtgaagcttagtgggccaggaggataatgataataagatgaatttggaaaggcaagcagggaccagctcacacaaggctttgtgggcaaacatgaaattta

SEQ ID NO: 489653 - DNA, 201 bp, Homo sapiens
ttcacttgtttattaatttttacaatctcctaaaacaaaagaaaaaaggaaggaaggcaagcacacataacctgactactggaattaatgacaatatcccrttgcatagactttaaaataaacatacaattcaaaaagacttactatcaaacaactggctaagcaaactatgaaatatgacaaaaaggttataatatctgt

SEQ ID NO: 489654 - DNA, 201 bp, Homo sapiens
ggaatctgaatagcattaagaagccaatgcaggtgagacagttgctcattctgaagcagggaacagcagaatcaacgaccctaaggaaaaaggaggctgayatgtttacagaaacagaagaaaggccaataggactgaagcttagtgggccaggaggataatgataataagatgaatttggaaaggcaagcagggaccagc

SEQ ID NO: 489655 - DNA, 201 bp, Homo sapiens
ctcacattctaattggaggaggaaacagaaaacaacaacagcagccagtggttaagtacaatgcagagaactgcaacaggatgacccaggagtgattaggyggttaggtgagattgggtaataaatgaaggagtcaccacggaatctgaatagcattaagaagccaatgcaggtgagacagttgctcattctgaagcaggg

SEQ ID NO: 489656 - DNA, 201 bp, Homo sapiens
aaagcttagcccttaagtgacacacaaagatatatttaaagacaaagggcctgagaaatatgcttaggcctttaatgaccaagttccaaaagctctcaacytaaaggccacaggccatttttaatacttccaaaatctaaatgaaacaatcatttaaatgtgaaattccctaactaaaattgtaggttttttaggggtttt

SEQ ID NO: 489657 - DNA, 201 bp, Homo sapiens
ctattattatacccattttgcagatggggaaactgagtcttaaagctaaatgatccatgtaaaaaagcttagcccttaagtgacacacaaagatatatttraagacaaagggcctgagaaatatgcttaggcctttaatgaccaagttccaaaagctctcaacctaaaggccacaggccatttttaatacttccaaaatct

SEQ ID NO: 489658 - DNA, 201 bp, Homo sapiens
gcgtgccaccacgcctagctaattttttgtatttttagtagacagagttttgccatgttgcccaggctggtcttgaactcctagactcaagcaatgtaccygccttggcctccccgagtgctgagattacaggcgttgagccaccacgccccgcctgggatctgaatatgttttatagatagaaccaacaagactttcttg

SEQ ID NO: 489659 - DNA, 201 bp, Homo sapiens
acctgcccgcgcggcgccggactcgcggctccgcctttcggggaggtctccgtggccgcccaggcgccacagcggggagccgcggtcgacccctccgggakgggggccagggcagcctccgcggctatcccgggagtcctgctccgacaccacctccacaggggaagccgctcggagagacgcagggacccaggcaaggga

SEQ ID NO: 489660 - DNA, 201 bp, Homo sapiens
tcctttggtagcaattccatggtatgtgttttatccatattgcattcctgaggaagtaaatcattagaattatgatcagaaactgtggactgttctgacgwatgaataatcatatcttcttgaagctgagtgtcaacagacttccgcttctctgcttcttcatgttttttatcttcctgtatttgatcccagggaggctgg

SEQ ID NO: 489661 - DNA, 201 bp, Homo sapiens
tacagtagtatgaatcaaccgctgaatattcatcaactctctccactagaagtagaaatttcttgagaacgggtttacttcttaaatgctatgttagcctrcaacactgaccacatacataatcaatacttgatatttatacattcaaaacatttactgagagtcaattcataacagtaagtgactgaggagttttctgat

SEQ ID NO: 489662 - DNA, 201 bp, Homo sapiens
cttattttgtattttcagtagagacggagtttctccttgttggccaggctggtcttgaactcctgacctcaggtgatctgtctgcctcggcctcccaaagygttgggattacaggtgtgagccactgtgcctggcctatttattttgatctgacctttttatttattgtatttttgaacaggatctcactcttgtcaccca

SEQ ID NO: 489663 - DNA, 201 bp, Homo sapiens
aatcacttgaatccgggaggcagaggttgcagtgagctcagattgtgccactgtactccagcctgggcaacagaatgagacctcatctcaatagatagatagatagataaataaataaataaataaataaataaataaatgacagggaataatgatggacactgttgaatatgtgggaaaaggggaacctgtacgctgttg

SEQ ID NO: 489664 - DNA, 201 bp, Homo sapiens
caagaaatagacttggtggcttctacagaatagatctaaaaaagtccaaatctagggttccaacaaaggtaaagaccctgattgagttagaattcagaaargctatatcctgggagcaaaagtaacccagaattaagtcagttcctttatggtctgcagtccagctttgagtaatcaaggtggcttagaaaatctcaaatc

SEQ ID NO: 489665 - DNA, 201 bp, Homo sapiens
gataaaaagatcaaactttgaatccaaaatctacaagactattccgagaaacatgagctgcacagctgtagataacagcaataaaaacagaataatgggtracaattactgagcacatactatgtatcacccaatatgccaagtgcttcaaatgatcttcaaaataactcctggaagtagatactattattatacccattt

SEQ ID NO: 489666 - DNA, 201 bp, Homo sapiens
atcacttgaatccgggaggcagaggttgcagtgagctcagattgtgccactgtactccagcctgggcaacagaatgagacctcatctcaatagatagatagatagataaataaataaataaataaataaataaataaatgacagggaataatgatggacactgttgaatatgtgggaaaaggggaacctgtacgctgttgg

SEQ ID NO: 489667 - DNA, 201 bp, Homo sapiens
ctaggcaaaagataatgtaggtttgaactagtataatgctaatagaaaaaatgacatgtgctgggatctgaattttttttttttttttttttttttttttyccagacagagtctcactctggttacctaggctggagtgcagtggtgtgatctgggctcactgcagcctcaacctcccaggctcaggcgattctcccacct

SEQ ID NO: 489668 - DNA, 201 bp, Homo sapiens
atagacttggtggcttctacagaatagatctaaaaaagtccaaatctagggttccaacaaaggtaaagaccctgattgagttagaattcagaaaggctatwtcctgggagcaaaagtaacccagaattaagtcagttcctttatggtctgcagtccagctttgagtaatcaaggtggcttagaaaatctcaaatcacacta

SEQ ID NO: 489669 - DNA, 201 bp, Homo sapiens
aaatacaaaaattagccgggcatggtggcgggcatctacagtcccagctactcgggaggctgaggcaggagcatggtgtgaacccgcgaggcggagcttgmagtgagccaagttgcgccactgcactccagcctgggtgacagagcgagactttgtctcaaaaaaaaaaaaaaaaaaaaaacctgccagctgccagctctt

SEQ ID NO: 489670 - DNA, 201 bp, Homo sapiens
cacttgaatccgggaggcagaggttgcagtgagctcagattgtgccactgtactccagcctgggcaacagaatgagacctcatctcaatagatagatagatagataaataaataaataaataaataaataaataaatgacagggaataatgatggacactgttgaatatgtgggaaaaggggaacctgtacgctgttggtg

SEQ ID NO: 489671 - DNA, 201 bp, Homo sapiens
agagagaaagaaaaaatttccttgaaacaaagtctaataaagtattgtgaaaaccaaggttattgcttttgtcctatgtaaaaataaaaaaagacattaayagaccataaatacctaaagcgcctatcctcttttcatcctttgtgcattactgaatttagtaaaactaaacattttcccaatacattttattttatttta

SEQ ID NO: 489672 - DNA, 201 bp, Homo sapiens
ctacatggggggtggggggcgcggggcagggtctgaggcaggaggatcacttgagcccgggaatctgaggaggcaatgagccatctttgccccagcctggrtaacaaaacgagacccagtctcaaaaaaaaaaaaaaaaaaaaaggaggctgggaaagaaagaattagttaagaacacctgacaaaattagaaagagaact

SEQ ID NO: 489673 - DNA, 201 bp, Homo sapiens
cttgaatccgggaggcagaggttgcagtgagctcagattgtgccactgtactccagcctgggcaacagaatgagacctcatctcaatagatagatagatagataaataaataaataaataaataaataaataaatgacagggaataatgatggacactgttgaatatgtgggaaaaggggaacctgtacgctgttggtgga

SEQ ID NO: 489674 - DNA, 201 bp, Homo sapiens
cattaatagaccataaatacctaaagcgcctatcctcttttcatcctttgtgcattactgaatttagtaaaactaaacattttcccaatacattttatttwattttaattttattttatttgagatggagtcttgctctgtcacctaggctggagtgtagcggtacaatctcccctcactgcaacctccacctcccaggtt

SEQ ID NO: 489675 - DNA, 201 bp, Homo sapiens
tcttagatccctgagattgctggcaacagttttaaaacgtgaatgttaagtccacaagagtgacattaatttttaccacaccacatctttttaacttatamaagaatccattttgctaataaggatttgctgggacaagaaatatataaagtttgaaagttgctacaggggtgctcaaaaagcaaagctgtctataccacc

SEQ ID NO: 489676 - DNA, 201 bp, Homo sapiens
ccggctagacacggtggctcacgcctgtaatcccagcactttgggaggccgaggagggtgattcacgaggtcaggagatcgagaccatcctggctaacacrgtgaaaccccatctctactaaaaatacaaaaattagccaggcatggtggcgggtgcctatagtcccagctactagggaggctgaggcaggagaatggtgt

SEQ ID NO: 489677 - DNA, 201 bp, Homo sapiens
gtctcatgtctcatttaaaaataaaaaaaagaacacttgccatttgctcatgttaatatggcaaataatagatctattttacctttttcacacttctgctkacaagatttcctccatctggaatatcttatattttctactcagcccaagcacttttcttcagaacattaattctaatcatatatattcaaagcaggagtc

SEQ ID NO: 489678 - DNA, 201 bp, Homo sapiens
ttgaaaaagactgtgaaaaagatactgatgttaatcgtgcttttatttcacagttaaaaacttcattgctaattgtgtcacatttttcagccctttccccyatacttttcaaaggtactaactctattattctgtccacatttttaaaaattgttttagtaagaataataccggctagacacggtggctcacgcctgtaat

SEQ ID NO: 489679 - DNA, 201 bp, Homo sapiens
ttcagggctgatgaagaatttcaaattgtggtaatggttgcacagctctgtgaacatgctaaaaaccatacaactgtgtactttaattgggtgaattacayggtatgtgaattatgcctcaataaagctattattttaaaagtctatgaatgaatggttttagaaagttaagaaaactgtaaaggaagtaacaagtcaatt

SEQ ID NO: 489680 - DNA, 201 bp, Homo sapiens
atgggaagtgactgctaaaagacagtttctttcagggctgatgaagaatttcaaattgtggtaatggttgcacagctctgtgaacatgctaaaaaccatayaactgtgtactttaattgggtgaattacatggtatgtgaattatgcctcaataaagctattattttaaaagtctatgaatgaatggttttagaaagttaa

SEQ ID NO: 489681 - DNA, 201 bp, Homo sapiens
cgctaatgagcaatctatagatagctcatttaatccatgcaacaactctatgtgctaagtactagtttactaaccttagaaataagaaaactgagatgacraattgttgtatcttgccctgtggtcacacaatttagtgtgtgggcaagataatcaaggtaatctcttcaaggtggcctaaaagttggcaaagaatgaaga

SEQ ID NO: 489682 - DNA, 201 bp, Homo sapiens
aaagagaaaataaaaatagtgttttatatgacttatatacgagtaagctgagattaactctatctttcccattatttggcaactgaagatatgttatagtrtggcataaaacagcctaattttgctaagggaaattgataacctgcagtgggtgttgagaggagcctgagggtgctggtaatgtgctgtttcttattctgg

SEQ ID NO: 489683 - DNA, 201 bp, Homo sapiens
ttttccctaagagtgtgcatggcatctagaagatctgtcaaaactacaaaataaaatggtagttaataaaaagattaccactagttgttaatgctgtaaamtttttttcttacaatattttatattataattgggaataacggaggttttcttgtgccctttaaatttcttccatttttctccattctcttccatctatta

SEQ ID NO: 489684 - DNA, 201 bp, Homo sapiens
gacatgtcatcaatgagtgatcactcttaggacattactacattcatcgggaataatgtgatagactttgcagttttcaactctgagtgacagagaagaamctatcgtttactgtgaagttgtatgaaccaaccaggatgctagttcacatttgttatttcatttattcctcatgtaatacttctaagaaaggtatattat

SEQ ID NO: 489685 - DNA, 201 bp, Homo sapiens
cagaagatattaaatggatggatggcagcacacagaaggggcaactaatccaggattggggtcagggaagtagtcagaaaataagtgatagacgtgacaargcctgaagaatgaatgaaagtcagccaaagacgtggagaaggggaaagtaaagggcttcaagcaattgtaaaaaaaaaaaaaaaaaaaaaaaaaaaaaaa

SEQ ID NO: 489686 - DNA, 201 bp, Homo sapiens
agctgtaaaatcagtaggaaagttttagcaagattatgctttgtaaaaagttaaactccttgagatgaaattcaagtcagttatacaattgtgatgatacrgtaagactttagtaaagaagcaaagacattaagagctctaggtactgattaatgactaaaaagtgcagcagcgtttctatttacttactaaccaattcta

SEQ ID NO: 489687 - DNA, 201 bp, Homo sapiens
atggagactcaaagacttactcccccatccaaaagggacactcagaataacactatataatttccaatatcaaatcaataaattacttttttcccaatctmatattttcacttaccgtctaaagtagtaaaatctacaaaatactggtgagtgagctggttcttctccttttttactgcgaataagtctacattctcgaca

SEQ ID NO: 489688 - DNA, 201 bp, Homo sapiens
aacgtgcctcgtcgccgaccgccacacacaggaaccgcttacccaccagctctgcccgcgtctctaccgccatagctgtcgctgccgaagcggccgctgcytcctccagtgcgagggaaccgatgaaacctcactcctaccggccgctcatgctgaggagagcggaccgggacacagcagcggacccgaaagagcgcagac

SEQ ID NO: 489689 - DNA, 201 bp, Homo sapiens
gtttatactgctgcccactaggaagcttctttaaaaaaaaaaaaaaagcttatctattagaatatccactaaagatattcattaaagcttatctattagawtgaggaaagagaaatgcactggtcaaggagttaacatctgtttctagttaactatccataccaagtcaaggaagaaatccaagtcaaggaagaagccaac

SEQ ID NO: 489690 - DNA, 201 bp, Homo sapiens
ttggtgttaatctttggttgtcaccctaatgtgaccaactaggcaatgactgcctaagctgttatacatgtatcatatttctgaatataaaaagcctgaaraacaggacctagaacacccaactcttacctgtagtttatcatcataattgatttcttccttcaaaagtctcagttcctgtgttaaatgaaatgactctac

SEQ ID NO: 489691 - DNA, 201 bp, Homo sapiens
gaccgccagttggccgggctgagcgaggcgccagagggaagcctgcaaggtacgtctgcgagagccgggtgcgggcgcggcaggggaaaaggggggcgctsgctctcttaccgccaggtccggattgcggctgtccctgtgtgacacggctcggatgacccccgctcgccagcttcgccagccgcgtccgctctcccagcg

SEQ ID NO: 489692 - DNA, 201 bp, Homo sapiens
taattctcttatttgcatcttcttccatttatatctatactaagagcaatttttttttcaaaactagttctttcagtcagtaaaaaatatgttagaaatargtttgtatatacctgatgaagtgctcccgctggcaaaacaatagcatcaccaaggaactgaataagagtacaggttctgactccatattcttcaagcagc

SEQ ID NO: 489693 - DNA, 201 bp, Homo sapiens
gccaagtgaaggtacggcaacaatgaataagtccttgcttgaggggaagagatattatttgcaaactaacttataccttttgaagaaattcccttatcttstcaacatctttcccagcataaatatgccacagagcaccaggtatttcacttgagtccttcaatcttttccttaaaatgtcatccaaatcttcttcctcaa

SEQ ID NO: 489694 - DNA, 201 bp, Homo sapiens
taattccattttcaaaagcttatggaactgccaaacatttctccataagcaaaacagtataaacggcatctttaaggtcaaaggaaattagtgctagaaayagggattaggacccagtattttgtttccaattacttgtttctttttattagacaacataaaacagatgtttcaaagactaaaaatctgttaagttacatt

SEQ ID NO: 489695 - DNA, 201 bp, Homo sapiens
ctagctttagttgaatgcctcttatcctaaagactaaaataattagggcttgattcgtttaatgttgaccagagaaggctgttttttcacctttaacaagytcacagagctagtgtactcactgctacaaaggtcatttagtctaactcttttatttaatgcttaggggacttctagaccttagtattatagctacaaagt

SEQ ID NO: 489696 - DNA, 201 bp, Homo sapiens
taattgattccgccttccataggctaatgttcattttcttatgcacaccagaaaccactgcaggcttataaatagataaataaataacagttaaaagatayatagactttcttttttgtttgtttgtttgtttgtttgagacagagtcttgctctcttacccaggctggagagcagtggcctcatcatacctgactgtcac

SEQ ID NO: 489697 - DNA, 201 bp, Homo sapiens
caggctggtctcaaatgtctgactttcaggtgatctgcctgcctcggcctcccaaagtgctgggattacaggcttgagttcactgtgcccagccttttttktttttttttttttttttgagacagggtctcactctgtcaccaggctggagtgcagcagcacgatcttggctcagtgcaacctccgcctcctggattcaag

SEQ ID NO: 489698 - DNA, 201 bp, Homo sapiens
tgagtcaactctgagaattgataaagtcatctctccaatccatgagactatgaagatatactggctatctgaactaaaactggctctcagtttacaccatsactaacaagaaagctttacataatccagagatatgattcatttctacaaatagtttacttggttaaatataatgacattgggtcaggatagcttaatcct

SEQ ID NO: 489699 - DNA, 201 bp, Homo sapiens
atcatatttttcctccttcatcttctcttcatctggtatactgctatctgagcccttcctcttatttggacggatacttctttgttgctgttgctggtgtrtattctgttttggtacagcagcttgggagttcattgctggtctgggactatttgcttgggcacgtgtataatggctctaaaaataaccaattaacagtaa

SEQ ID NO: 489700 - DNA, 201 bp, Homo sapiens
cttgataaaaatttttattatggctttaatatctgaatgacaacttggtgggatttaaaatctaggttctcttcaaaccttaaaaaatgctcccagcactytgggaggccaaggtgggcggatcacaaggccaggagatcgacaccatcctgactaacatggtgaaacaccgtctctactaaaaatacaaaaaattagccg

SEQ ID NO: 489701 - DNA, 201 bp, Homo sapiens
ggatgttaaggaaaaagacacaaatctgttagccagctcttggctctcctgtgttcctctagctagcttatctttgtgcagctgcagctacattaatgacrtgagagtgaagggtcagaataaacatgtgagtgcaacaataaaaatagaaaccttgaattaataatctgagtacagtagggcacttgggtcaccaggcct

SEQ ID NO: 489702 - DNA, 201 bp, Homo sapiens
ttcaaatctgcaatgggacatcaagaaaactttttcagaactgaacacaatcaatgagtaagttagaaatcctcccgccactatttctcatgctgaaacaytcaacccttcagcttttaactgtggccgctcaccaacttaccagcttgaaaatatctttccataatttctactctattacacataaacacctagaactac

SEQ ID NO: 489703 - DNA, 201 bp, Homo sapiens
tgagaaatctaaacattctgttaaattctagtaaatggcaactaattgtcatgtttggataaaacaatgaaatatgacataacaatttaagaaatggggtaaaaaaaaaaaatctgaagatagatacggtggtgtgtacctgtcgtcccagctactcacaaggcagaggccaggagttctagtccagcctgggcaatatag

SEQ ID NO: 489704 - DNA, 201 bp, Homo sapiens
aatgtttactatgtaagttagggaaaacacatacacaggcataagtttaaaaacaaattttaagacatttttgtaggcattatttttctatattgttcttytatatttatttttcggtaagatgtaaaaggatgtgacacaatgcatttaagaatttcttgccaggcctggtggctcacgattgtaattccagcactttgg

SEQ ID NO: 489705 - DNA, 201 bp, Homo sapiens
gaactaaagttattagtctgacctcccagaggccaaagctacacctttcagctagtatgtgattttgagccccagtaaaactggaaaatcaaagactcagatgagtttcttcactgacgaaactcacatactgtggacataaaaagataatgctggacatgactgcacagggagaagagtctggactctaccctaaacatc

SEQ ID NO: 489706 - DNA, 201 bp, Homo sapiens
aatacacacaacacacatatatatatattaagacagctgatcaattactttaccaaacatcatagattttatgaaggaattcatatgagaggaggggactraaaaaacaagtcaccttaaaaacaggaaaacatttttcttttcacagtaaagaaactacatcaatcactttttttaaataaaattctcctttgcaaatgt

SEQ ID NO: 489707 - DNA, 201 bp, Homo sapiens
ctaaaatagccccatgaaaaatgggagaatggactaggaagtattaaaggactaccaggcaaaattaaggacccagttgaaattacaaaatatggatttakagtgacaatgacctgtgtcatttttcatcaggaccaaagatgaaggggcaagtaaagcatatagacagtgattctcaacacaggagggctggggtgaaca

SEQ ID NO: 489708 - DNA, 201 bp, Homo sapiens
tagctcaccatagccttgtactcctggagtcaagcaatcctcccacctcaacctcctgagtagctgggactacaaggcttgcgccactacaataggctaatttttttttttttttggtagggatgagggtatagctatgctgccctggctggtcttgaactcctggactcaagcaattctcccgcctcaacctcccaaagt

SEQ ID NO: 489709 - DNA, 201 bp, Homo sapiens
acatcaatcactttttttaaataaaattctcctttgcaaatgtatatacttaagtttgcatactaagaatattctttgtaactgatttcaattacacagtrccagtaaagaacatttttctctaacttgcattaatattgacaaaagatcaattaacgaaattttacaaattatttcacaaagattacaaaagactcattc

SEQ ID NO: 489710 - DNA, 201 bp, Homo sapiens
ggggtgacagagcaagactccgtctcaaagaaaataaataaaggctctcactttcccaattgtcttaatctatacctatcccaatggctctaaataaaggytgaaaggggatgggaaatggctcagggatatccattaatgaatgagagaacttgccaaaggcattttatttgctaagtcagaggtacagattcctactat

SEQ ID NO: 489711 - DNA, 201 bp, Homo sapiens
caaagaaatcaactgaatgtttctgtagttctgatccttaaaattcctttcttgatgtagtaggaactaaatttgcacagaagcagggctttggaatagaygagaaacttttcagtgactataagcagaaacatatactggaacaaaaccattcttcagttcaagttactattgatcgtgattacctcaccagttagacta

SEQ ID NO: 489712 - DNA, 201 bp, Homo sapiens
gggctttggaatagatgagaaacttttcagtgactataagcagaaacatatactggaacaaaaccattcttcagttcaagttactattgatcgtgattacytcaccagttagactatggaaacaaaacataaaagaaaattaagaacaatgaaaaaaagagaaaaaacaataagggcaagaaagtaaaactcaaaaatgct

SEQ ID NO: 489713 - DNA, 201 bp, Homo sapiens
caggtgatccgctcgcctcagcctcccagagtgctgggattacaggcttgagccactgcacccggcctccaattctgtttgtatcatcccaatttttttcyactagtcagaaaattacatgttttaatttttaactttttaatggttactacagaatagctgtatccaattgaatagccacatctacactttttgcaatga

SEQ ID NO: 489714 - DNA, 201 bp, Homo sapiens
cgatctcagcttaccgtaacctctacctcccgggttcaagagagtctcctgcctcggcctcccgggtagctgggattacaaacatgcacaaccacacctgsctaattttatatttttagtagagacagggtttcttcatgatggcaggctggtctcaaactcctgacctcaggtgatccacccacctcagcctcccaaagt

SEQ ID NO: 489715 - DNA, 201 bp, Homo sapiens
agttagcttagaaaaatcatggcccatcctgtagtcaaaccacacaattggataaaagatagaatggatactggggaggggaaggtacacagtgccataasagaaacaaaaaatttacaattaagagtaaatagtaaggtcaggtgtaggtggcacacacctgtaatcccagcattttgggaggccaaggtgggaggctca

SEQ ID NO: 489716 - DNA, 201 bp, Homo sapiens
tgggattacaaacatgcacaaccacacctgcctaattttatatttttagtagagacagggtttcttcatgatggcaggctggtctcaaactcctgacctcrggtgatccacccacctcagcctcccaaagtgctgggattacaggcatgagctaccgagcccagcctgacaggtcttttttaactcagggggaatagcacc

SEQ ID NO: 489717 - DNA, 201 bp, Homo sapiens
accgagcccagcctgacaggtcttttttaactcagggggaatagcacctcaaaatgttgcctcaggatctgagaacggaagaagaaaaaaaaaagacagcyttgaagatctcatactggaacttaaatactgcagcaatattaggatgcacaatttcctttcaaacatctgtttttctcacaactcatttattggccagaa

SEQ ID NO: 489718 - DNA, 201 bp, Homo sapiens
tacattttaaaatatcacaagtacctcagccaagaattcagagtataaccatttgttgtttgaagtggatacattctgatctgttatttcctcaaccctaycaatgtttaaaaacattagaacctgaaggaaatacatgagaaagtcagtttgctattctccaaattttaacccttgctaaagtatagtgttctagagaaa

SEQ ID NO: 489719 - DNA, 201 bp, Homo sapiens
acccgcctgagcaacatggtgaaaccctgtctctacaaaaaattcaaaaattagccaggcgtggtggtatgtgctatagtcccagctactcgggaggctgrgttgggaagatcacctgagcccaagaggtggaggttgcagcgagctgagattgtgccaatgccccccagcctgggcaacagaatgagactgtgtcttttg

SEQ ID NO: 489720 - DNA, 201 bp, Homo sapiens
ttaaacccacttctcattacttacttttttcctatcaaatctcaattttacctacttcaatatcctcgtcctacaaaattatatgtgaaactgcacaattrgaattacatttccaatacattcgcttacatggtttttcatttgcttgccctatttttttcacttttagattatgaggttttaacttgcgatccaaagata

SEQ ID NO: 489721 - DNA, 201 bp, Homo sapiens
actttacctcttgccctataaaaatatgtccaatcctctgttaaaactcttaaacccacttctcattacttacttttttcctatcaaatctcaattttacytacttcaatatcctcgtcctacaaaattatatgtgaaactgcacaattggaattacatttccaatacattcgcttacatggtttttcatttgcttgccct

SEQ ID NO: 489722 - DNA, 201 bp, Homo sapiens
actcttggcctcaagcaatcctcccacctcagtctcccaaagtgctgggattacgggtctgagtcactgtacctggcccatacgatataaattgagttccaaaaaaaaaaaaaagggaaaattaagctaacaatttagagagggtatgctgtgactaaactaggaatcatttcagttacagctaaatgctgaaatgcaaac

SEQ ID NO: 489723 - DNA, 201 bp, Homo sapiens
taaatagataaataaataacagttaaaagatatatagactttcttttttgtttgtttgtttgtttgtttgagacagagtcttgctctcttacccaggctgkagagcagtggcctcatcatacctgactgtcaccctttgggctcaatcaatccttctacctcagcctcttcagtagctgaaactattaaatttcgagccta

SEQ ID NO: 489724 - DNA, 201 bp, Homo sapiens
ttccaatgctagtatctccaacatttaaaatataatatgctaaaacaaagttttttctctccttcatttcttattattctcctagactctggtttcaaacrtaacactttttgtgcatgtaatcagctcatttctgcctgagctttctactttacctcttgccctataaaaatatgtccaatcctctgttaaaactcttaa

SEQ ID NO: 489725 - DNA, 201 bp, Homo sapiens
tggaaaaaaagacagaaaatgccagctttcaaggtaaagagagttataatgcaaatagaaacatgcctagcaatttggtacacttgatttcatcagcatastgggtagttcagagccaaaaactaagtctccaaatcatctctatttaaggcccacattaaaaccaaaaatctggcatcactcactggggctcccattgaa

SEQ ID NO: 489726 - DNA, 201 bp, Homo sapiens
aaataatacgtaagaaaccaaggagacaaatgactggtacatatcaaaggaaattaaacacacaaataaatggaaagacatctgtgtttgtggatcagaaratccgatattaagatatcagcactacccaaagccatctacagattcaatacatacaaaccctattaatatccccatgttttctacagaaatagaaaaatc

SEQ ID NO: 489727 - DNA, 201 bp, Homo sapiens
accatacacaaaagtcaactaaaaatggatagaagaactaaatcaagagctgaaactatagaagacttagaagcaaatgaagacaggaaagcttcaataayattagatttggcagcaacttctgggaaatgacaccaaaagcaccaacaacaaaataaaagatggatacattgaactacattaaaatttataattttccta

SEQ ID NO: 489728 - DNA, 201 bp, Homo sapiens
ctcagaaactattaaaataggtaggtaaaaaatattaggtagatacctgtacaaatattacaatgaatttggaattgtaagctttcatgcacacaaagggaaaaaaatttcctaaatttgaagttttcattgaaaaagtaaatggctcagggcattacaaataaatttcacagattacgtattcataaatcaacctttgga

SEQ ID NO: 489729 - DNA, 201 bp, Homo sapiens
tacctacgctactcaaagaaagcactggcagcgtcacatgtaagaaaccaaaaaaaaaaaaagataatcaattctgcatggcatttaacattttaattgasaacatttttcgtcttatttaaaatcgtataaaacccagaaacagcttgactccaaagaactatacctttctaacaagaaaagcacattggggacagaaag

SEQ ID NO: 489730 - DNA, 201 bp, Homo sapiens
aaaaaaagtgggtcctacctcctcgtgatatataatcatatttttcctccttcatcttctcttcatctggtatactgctatctgagcccttcctcttattkggacggatacttctttgttgctgttgctggtgtgtattctgttttggtacagcagcttgggagttcattgctggtctgggactatttgcttgggcacgtg

SEQ ID NO: 489731 - DNA, 201 bp, Homo sapiens
cagtgagcagttcgatttcaggcaccctttatactgcttttttataggtagtccaatattctaaatttcagtttcttgagattttcctgaacctctatttaaaaaaaaaaagttaacagagtttacagtagtaatctgaatgtttaaaataactataaggcttttatctgttttctctagaacactcaagctgggcaattt

SEQ ID NO: 489732 - DNA, 201 bp, Homo sapiens
tgacctacaaagcccatcttttgcaaccctgtgcgggtctcctaaatacattcgatgggagcactaatgaatcctccagaaacagcctaaactatagtttsatttttttttttttttgaggcagtctcattttgctacccaggcttgagtgcagtggtacaatcatagctcactgtacttcgaactccttggctcaggtga

SEQ ID NO: 489733 - DNA, 201 bp, Homo sapiens
cacagccaagaggtgaaagcaacccaaatgtccactgacagatgaatggagaaagaaaatagggcacatacatacagtggaatattatacagccttaaataagaagaagatcatgtcacatgttgcaacatggatgaacctcaagaatattgtagtaagctaaataagccagtaacaaaaggataaatattctatcattct

SEQ ID NO: 489734 - DNA, 201 bp, Homo sapiens
tcaattatgaatgccaacactttctttccctggtgccgataaatgtgctttcacaagtattttactttattaaaaagtaaataaaatttaacaatctattaagtaacttacatgaagacgcaagttacctcagcctacagcattagaatggcctcaagtggtactctgattgtacaggaccaagcaaaaaaagacaccact

SEQ ID NO: 489735 - DNA, 201 bp, Homo sapiens
aagatcccaccaaaaacctcatagaactgatcaattcagtaaagttgcaagataaaaaaatcaacaagcaaaaatcagtagcatttctatataccaataakgcaatagctgagaaacatatcaagaaggtggccaggcgtggtggctgatgcctgtaatcccagcactttgggaggccgaggcgggtggatcatgaggtca

SEQ ID NO: 489736 - DNA, 201 bp, Homo sapiens
acagccaagaggtgaaagcaacccaaatgtccactgacagatgaatggagaaagaaaatagggcacatacatacagtggaatattatacagccttaaataagaagaagatcatgtcacatgttgcaacatggatgaacctcaagaatattgtagtaagctaaataagccagtaacaaaaggataaatattctatcattcta

SEQ ID NO: 489737 - DNA, 201 bp, Homo sapiens
ttgctactgatatcctagaaagaaagaggaaccagacaattccagagaaggagcctgggtattatactattcatattttgctgaagatgcaattatgttamgttttaaaaaatatactttaaaatatgttaatgagacaacaggatttgtttttgtcttgtcatgatctcaagaaacagcaggtacactgccagtttccac

SEQ ID NO: 489738 - DNA, 201 bp, Homo sapiens
aacaattacatttttaaacactttcttcaataattcaattagtagtatagatacaaaaaatttacacagaaacacagcaaacctaattcatacataagtcytaaaccaaatttcaaataaatatcaaagttgactaatttaaccacagattttatttgaataaccagagatttttactcacttgagatacaccattcattg

SEQ ID NO: 489739 - DNA, 201 bp, Homo sapiens
cagccaagaggtgaaagcaacccaaatgtccactgacagatgaatggagaaagaaaatagggcacatacatacagtggaatattatacagccttaaataagaagaagatcatgtcacatgttgcaacatggatgaacctcaagaatattgtagtaagctaaataagccagtaacaaaaggataaatattctatcattctac

SEQ ID NO: 489740 - DNA, 201 bp, Homo sapiens
ccaaaagttggtttacataggagaaagctctttcaagatccacagcaagaacgtaaagattaaaggtttatatagttagaaactacaggttagtttcaacrtatttctattgaaatacataatctgattttccaaggtaagtgtggctcattaagacaagtggtaattttataaaacctgtatttgggagaagaggtgctt

SEQ ID NO: 489741 - DNA, 201 bp, Homo sapiens
aacgaactcaactatttcaggtcataattttgctctaataaacctaatgactttatagaggcttaaaacttaattctaaagaaagatcaacattgagactrcgttaaatattttccaaaaatattctcatcatagaaagataaataacctttagcttttaaggggcctaaatcaaaatcatattctgttttattgtgttac

SEQ ID NO: 489742 - DNA, 201 bp, Homo sapiens
agaacgtgccactgcattccagcctgggtgaaagagtgagactccatcacggaaaaaaaaaaaaaaaaaaatacacatacacacacacacacacacacacwcacacacacacacacacacacacacaattctgtgagctttacttatacctgaaaaaattaactggtaatttcaacaatcttaaaaaatatttagcttaat

SEQ ID NO: 489743 - DNA, 201 bp, Homo sapiens
gtgaaagaaagctagatgcaaaagggcacagattatatgatttcatttatatggaatgttcacaacagacatttccatagagacaagagagtagataagcrgttgccaaagggctggaagtggcaggaagaggaacacaagtgactgctaacggatagtgagtttcttttgggggtatactaaaattagataggggtcatg

SEQ ID NO: 489744 - DNA, 201 bp, Homo sapiens
ttttagtagagacggggtttcactatgtttttcaccatgttggccaggctggtctccaactcctgaccttgcaatccacccaccttcgcctcccaaagtgmtgggattaaaggtgtaagccaccacatccagccctttttgttgttgttgtttttgttttgaggcaaagtttcacttttgtcaccaggctggagtgcactg

SEQ ID NO: 489745 - DNA, 201 bp, Homo sapiens
aatgaacccacccattgtgtgtgtgacactatgagccttcttgcccttttctgcttcctcctccttcctgcctggagctgaactaaggaagacaacaacartatcagctatattgtaactgaccatgaggaaaagaccaagagaacaacagcccagtcttcaacagccctggcatccttaaatgatcacatcaactctgga

SEQ ID NO: 489746 - DNA, 201 bp, Homo sapiens
ctgttaattggcattgaggaaaaaataccatgagacaaaaacttgaaaagatcagatacaagttcataataaaaacacagagacctagaacagccataagmagcatacaacattgttgatgtttattttacagaacttttagattacacctaaaaacagaaattcaccgactgaatacctaagatgatgatcacaatgcta

SEQ ID NO: 489747 - DNA, 201 bp, Homo sapiens
ctgaattcacatttggcaaaatgattcttccagtttctccggcttctgctagtttgaggcaatctgttttatgtgccccagctgaagatctttcactaacwcgatctttagaagctaactgcattgctggcatactatcagtttttgtactagaagatggacgcacaatgacagatgccatagcagcctgtaactttccgc

SEQ ID NO: 489748 - DNA, 201 bp, Homo sapiens
ccaaaaaggaacactacagaaaataaggagcactacaaaaaaaaatcacataaacactaaatcttctacagagagaacaaacatacagcaaagactgattwaaaaaataggaaaacctgaagagaagtatcagagtagcaacaggaacaaagaatttccaaaaggacagtgatccagtgttaaatgcaaaggttcagtagg

SEQ ID NO: 489749 - DNA, 201 bp, Homo sapiens
tagagacaactgttttggcaagagactgacaagggcttcattttaaagtattttatttttgaattttagctttgagcgaatctaggtattcagaatacccrtatgcacaaccaaaaaaacaaacaaacaaacaaacaaaaaacagcaaaacaaaactagacagctgaaaaaaaagagactagaaaacatcttaatatggat

SEQ ID NO: 489750 - DNA, 201 bp, Homo sapiens
tgattctctgcagaacccaaaataatgtaattcatttctcaataatgtatgtatacattttaactgtgattcatttttaatttgtcctttcttcattaggwttaaaaattttaatatcttaaaccagacacattatgttgccaatcactagcacagtacttcagtaaatgcactaatacttctcagcatgtcataactact

SEQ ID NO: 489751 - DNA, 201 bp, Homo sapiens
gtggttaagacagcaaatgagccaggcatggtggctgacacctgtaatcccagcactttgggaagctgaggcaggcggatcacctgaagtcaggagttcargaccagcctggacaacatggcgaaacctagtctgtactaaaaatacaaaacttagctggacacagtggcatacacctgtagtcctagctactcaggaggc

SEQ ID NO: 489752 - DNA, 201 bp, Homo sapiens
attttgctaggcttgtctcaaattctggcgttacgcaatcctctcaccttagcctcccaaagtgctgggactgcaggcatgagccaccgtgctcagcccaraacaatttgttaaacagagcaaaataaaatcaaagagaagactgaaggtaatggggtcaaaagttccaaattatgtagtccagtcagcctactctcaaat

SEQ ID NO: 489753 - DNA, 201 bp, Homo sapiens
gactgagccttgaggttactgacctttattactgtactgtctactgaagtctccctaacactaagtgtgcacaaccaggtttagtaaaagaaacataaaayggcactgtggtaactgcttcatacaatttcactcaattcatataacaacccttttaggtaaaatagtacctatcttatagatcaaaaaagccatggttca

SEQ ID NO: 489754 - DNA, 201 bp, Homo sapiens
gtcttgaactcctgagctcaagtgatctccctgccttggcctcccaaagtgctgagattacagatgtgagccaccgcgcttggcctatagcatacattacrgtagttgattatggtaatatagtacaagtccttacgttatggtagttaactatggtaatatagcacagttcctaggcaacatgtaacatctctgaaggat

SEQ ID NO: 489755 - DNA, 201 bp, Homo sapiens
tcaaatgattcttctgcctcagcctgacaagtagctgggactacagatacgcgccaccatgcccagcttatttttgtatttttaatagagacggggtttcrccatgttgttcaggctggtctcaatctgttgacctcgtgatccacccacctcggcttcccaaagtgctgggattacaggcgtgagccaccgcacccagcc

SEQ ID NO: 489756 - DNA, 201 bp, Homo sapiens
ttagggtctcttctcctgccttctcattattatggggttttccttcttctccatttatttttgaagtatttttatttttcaattcattctctggcttctgktctgaggaattatctattattctcttatttgaattttctgagtcactgctctcagaaaagtctgaaacattgtcagttcgaagtcttttcatatttagtt

SEQ ID NO: 489757 - DNA, 201 bp, Homo sapiens
tagtcccagccacttgggaggctgagatgggaggattgcttgagcccaggaagcagaggttgcaatgagccaataccatgccaccttattccagcctgggyaacagggtgagaccctgtctccaaaggaaaaaaaaaaaaaaaagaactgtggcagggcatggtggctcacgcctgtaatcctagcactttgggaggccaa

SEQ ID NO: 489758 - DNA, 201 bp, Homo sapiens
ataacctgaaacaggcctgagataaagtcttacaggtgggattcagaatcgaagcctgacatccatgagaaggcaaacgtgtacaatttctccccctgccaaaatttagtctttcttctctccaataagaacttactggtatccacacattctcaacaatacagcagtatccttctatttaatagctgctaatttggcagg

SEQ ID NO: 489759 - DNA, 201 bp, Homo sapiens
cacactataaaagcttctaggcagaaggtactatatttccttttctcccagtgcccctagcaccttatcttatacagtgaagtacttatctaatggccactttttttttttttttttttttttgagacagagtctcactctgtcacccaagctggagtgcagtggtgcaatctcagctcagtgcaacctccgcctcccagg

SEQ ID NO: 489760 - DNA, 201 bp, Homo sapiens
atctccagttctgttaccaatgacctatgtgatcacccgccagttgagttaacttctctaaacctcactttccatggtaccaaaagggaataaacgctatmtggctttttaagttgtcagaatgactcaatgacacgtgtatagcacatagtaggtggtttccaacccatggcctattgagatgtgaaaaaaggcactgtt

SEQ ID NO: 489761 - DNA, 201 bp, Homo sapiens
agaggttgcagtgggccaagattgcactactgaactccagcctgggcgacagagcaagactctgtctcaaaaaataataataaataaataaaactacttayccagatttcaatcctaataatacatttaattttccattagtttccacatcacgatccctaaagctatttcctaggatactttaaaatctatagaataaat

SEQ ID NO: 489762 - DNA, 201 bp, Homo sapiens
aagttgtcagaatgactcaatgacacgtgtatagcacatagtaggtggtttccaacccatggcctattgagatgtgaaaaaaggcactgttccaggtaaayagaaagaaagcagcaaaaagtaatctaaatgtggaagaggcagaagatataataagcatacaaaatgaaacttaacgcacagcagtctagggacatttca

SEQ ID NO: 489763 - DNA, 201 bp, Homo sapiens
ccttttatccctttaagtatttattctccacttaaaaaaaattatctcccttcttagattcctatcttctggatgtcaatacctttatttctgtatttgawagctgtcaatttttcttttatatttgctatttccttgtccttttatccccgtgaaatattctctttaatcttccaattaacaattttgttcttcaaatag

SEQ ID NO: 489764 - DNA, 201 bp, Homo sapiens
agaattttcaagatcacctggagaacattctaagaatacacatatctaagccttactctgtaacttacactgagggtgggtcccaggaatccttaggtttwaaaagctctctgggttagttctgaggttcaatcacctttaggaaccgttgcttcagccattgcgaccgtgaacacggttaagaacacctggcctagagtg

SEQ ID NO: 489765 - DNA, 201 bp, Homo sapiens
aggtctggttacatatgcaaaccttttatagaggtttggttacatatgccactggtaatttactctatctccagtcactccccactccccagaggttaggkcatggagatgagagtgttccaagcttctattcaaggtctggtctttctggtgaccagaccataccctgaagttatctagaagtccaccaagggttgcctc

SEQ ID NO: 489766 - DNA, 201 bp, Homo sapiens
tgtggtggctcatgcctgtaatcccagaactttgggaggttggggcaggtggattgcttgagctcaggaattcaagaacagcatgggcaacatggtgagaycccatatctactttaacaaaaaaaaaaaaaaaaaaagtcaggcatggtggtgtgcacctgtggtcccagctacttgggaggctgaggtgggaggatcact

SEQ ID NO: 489767 - DNA, 201 bp, Homo sapiens
gctgagattacaggtgtgtgccactatgcagcatagctcccccccttttttttttatgagatagggtctccctctgtcacccaggctcaagtgcagtggcragaccatggctcactgtagcctcaacctcctgggctcaagcgatcctcctgccttagcctccccagtagctgggactatacacgtgcaccaccatgccct

SEQ ID NO: 489768 - DNA, 201 bp, Homo sapiens
atttgaagtgcagactcagtaatgaaaagatattcatacttcctaaattagtctataaaactgtacacaattccaagcaaagttaggccaggtgtgacggytcttgcctgtaatcccagcattttgggaggccgaggtgggaagatcacttgaggccagtttgagaccagcctgggcaacaaagggacactccatcttcaa

SEQ ID NO: 489769 - DNA, 201 bp, Homo sapiens
gaacattccacagctaacatcatactcaatggtgaaacactaaaagctttttctctaagatcaagagcaagacaaggatacctgctgttgccacttctatycaacgcagcattggactagtcagaaacttagataagacattcaaattggaaaagaagaagtaaaattacctctgttcaaatgacataatttgttatgtac

SEQ ID NO: 489770 - DNA, 201 bp, Homo sapiens
tcaaactagtccaaaaaactgaagaggagggaattcttcctaatttattctaagaggccagcattatattaccctaataccaaaaccagacaagaatgctacaacaacaacaacaacaaaataaaactacaggccaatatctctgatgaacatacatacaaaaattcttatcaaaatagaaaaccaaattcaacagcacat

SEQ ID NO: 489771 - DNA, 201 bp, Homo sapiens
cacagataaatcagttgtgtttctataaatcaacaatggacaatctgaaaaggaaattattaaagcaattccatttacagtaacatcaaaaaaataatacrtaagaaaccaaggagacaaatgactggtacatatcaaaggaaattaaacacacaaataaatggaaagacatctgtgtttgtggatcagaaaatccgatat

SEQ ID NO: 489772 - DNA, 201 bp, Homo sapiens
ctgacgactgtattcatgggacatacagtctacgaggagagactgatggtcatcaaacaacataaaatatattacatttcatgtgtgataaatgaagttasgaaaatttattaagtactttcctcaatcaagaccatgggtgtagacagccctttcatgaagacataaagtaatatctgaactatgagtcaagttaactag

SEQ ID NO: 489773 - DNA, 201 bp, Homo sapiens
caaactagtccaaaaaactgaagaggagggaattcttcctaatttattctaagaggccagcattatattaccctaataccaaaaccagacaagaatgctacaacaacaacaacaacaaaataaaactacaggccaatatctctgatgaacatacatacaaaaattcttatcaaaatagaaaaccaaattcaacagcacatc

SEQ ID NO: 489774 - DNA, 201 bp, Homo sapiens; identical to SEQ ID NO: 29621

SEQ ID NO: 489775 - DNA, 201 bp, Homo sapiens
tttttgttttttggttgagacagtctcactctatcacccaggctggagtgcagtggcgtgatctcggctcactgcaacctcttcctcccaagttcaagtgrttctcctgcctcagcctccggagtagctgagattacaggcgcgcaccaccacgcccagttatttttagtagagatggggtttaaccatattggccaggct

SEQ ID NO: 489776 - DNA, 201 bp, Homo sapiens
aaactagtccaaaaaactgaagaggagggaattcttcctaatttattctaagaggccagcattatattaccctaataccaaaaccagacaagaatgctacaacaacaacaacaacaaaataaaactacaggccaatatctctgatgaacatacatacaaaaattcttatcaaaatagaaaaccaaattcaacagcacatca

SEQ ID NO: 489777 - DNA, 201 bp, Homo sapiens
aagcaaatgaagacaggaaagcttcaataacattagatttggcagcaacttctgggaaatgacaccaaaagcaccaacaacaaaataaaagatggatacaytgaactacattaaaatttataattttcctatgcatcaaaagacattatcaagaatgtgaaaaggcaacccacagaatagagaatatatctctaatcattt

SEQ ID NO: 489778 - DNA, 201 bp, Homo sapiens; identical to SEQ ID NO: 158203

SEQ ID NO: 489779 - DNA, 201 bp, Homo sapiens
gatagtccacaaatattcctaaaatatagcaaaagacacagacattttatattactggagaaaaagtgaatgttttaaaatataatttcaaattagaaagmatttcttaagctgaaacaaaggcctgatgccaaaggaaaaatttttactgatcctttgcgtctgtcaagcaaagccatacagaataatgtactataagta

SEQ ID NO: 489780 - DNA, 201 bp, Homo sapiens
gtagacatggatctactaactggactaaaataccaatctaaaaagaggagaaaggaactgcattttgtaaattcaaggcgttattacatgtctgttctgayagatcaaaaagtaacataaaataatcaacgtttccctattaattcatattaaatctggccaaaaaacaggaattgagaaacaagcattctgacaatcttt

SEQ ID NO: 489781 - DNA, 201 bp, Homo sapiens
gtataatttcaaaaccaagaaactgacattaagtacaaaccacaaagcttatttccatttcaccagttttacatatactcatttgtgtgcatatgtgtgcrcatggctgtgcagttctatgcaattttgtaatgtgcagattcatttaacatcatgaccacaaccataacagagaattgttccatcatcacaaggatccct

SEQ ID NO: 489782 - DNA, 201 bp, Homo sapiens
tctagaagcttcattatattcaggttcagttcttcttggcaaaaatacttcataagttgaattgtgtagttcctgttgtattgtatcgcaacacctataaygtggttattttcctttaggttatgctcagcttgattacatatgcctgggaggaataagactacgtgcatccgttcacatctttatttttaacaaaaaact

SEQ ID NO: 489783 - DNA, 201 bp, Homo sapiens
tggttggaaagaaagatatgcaaagatgattttgtagaagttttattctatgatgttttccctagttacttattaaaaaaaaaaaggtaatgtgtgctcakgtgcatttatcttagatcatatacaataatgagatgggcgcccagtgagaaagcaagcaggtccaactttatttggactacacaataatgaggtttcaag

SEQ ID NO: 489784 - DNA, 201 bp, Homo sapiens
gatgaaggtgttttcaagcccaggtgaaacttcaaattaaatctcaaaatggcagctggtttcacatgaagataataaattatactttaaacactatttcraacccacacacgggacattcatgtaaagcttccaaacagtagagacggtggatcaaactgaaaaaaggccaaactttaattgcagatttgtgagtaatta

SEQ ID NO: 489785 - DNA, 201 bp, Homo sapiens
tgaggcatgagaatcgcttgaacctgggaggtggaggttgcagcaagccaagattgtgccactgcactccagcctgggtgacagtgtgagactccatctcaaaaaaaaaaaaaagaaaaaagaaaaaaaggaaggaagctataactaaaattccaatgtatcataatagaaaagcacattagccacctagaatttttaagg

SEQ ID NO: 489786 - DNA, 201 bp, Homo sapiens
catcactatttctctaaaataaattcatcttgtgttccaaaattactcatatgttcttcaaataaattatatttaaatgaggacttcttgtagtccaatgwgaggaaaaattaagcataaagaccaattatattacatgaaaaattaaaagatagtgttagggttacacaatctacatagcagcatatggcagtgctacat

SEQ ID NO: 489787 - DNA, 201 bp, Homo sapiens
aatctattatttataggttcctcttgctttttccccttggttaaagaaataaagtcatttctcccatacagccttcaattacctgtattttactattctgkggcattttaaaatatgtttctccattcttgtatttccagtaattgtttaactggagtattaatcaaattcaaggttgataattagaaaagactacctcat

SEQ ID NO: 489788 - DNA, 201 bp, Homo sapiens
gaggcatgagaatcgcttgaacctgggaggtggaggttgcagcaagccaagattgtgccactgcactccagcctgggtgacagtgtgagactccatctcaaaaaaaaaaaaaagaaaaaagaaaaaaaggaaggaagctataactaaaattccaatgtatcataatagaaaagcacattagccacctagaatttttaagga

SEQ ID NO: 489789 - DNA, 201 bp, Homo sapiens
attgtcatgtttggataaaacaatgaaatatgacataacaatttaagaaatggggtaaaaaaaaaaaatctgaagatagatacggtggtgtgtacctgtcrtcccagctactcacaaggcagaggccaggagttctagtccagcctgggcaatatagcaagatcctgtctctttaatacgatataattaagatatatcata

SEQ ID NO: 489790 - DNA, 201 bp, Homo sapiens; identical to SEQ ID NO: 29623

SEQ ID NO: 489791 - DNA, 201 bp, Homo sapiens
attctctcaatcttcaaatgtctttgtattagagttctccacaaaaacaggaccaatagagtgtgagcatatttgtgtgtgtttctctgtgtgtttgcatrtgtgtgtgtgtatacatatatatatataggctcattatctcatatgattatgaaagccaaaatcccatgatctgcagcccacaagctggagaaacaggaa

SEQ ID NO: 489792 - DNA, 201 bp, Homo sapiens
gtcaagagttcaagaccagcccgaccaacatggtgaaaccctgtctctactcaaaatacactgtactccagctgggagacagagcgcaattccatctcaaaaataaataaataaataaataaataaataaataaataaataaataaagataataaaatatggtaacaatttattacaatggcaagaaatcagtaatgttat

SEQ ID NO: 489793 - DNA, 201 bp, Homo sapiens
tcaagagttcaagaccagcccgaccaacatggtgaaaccctgtctctactcaaaatacactgtactccagctgggagacagagcgcaattccatctcaaaaataaataaataaataaataaataaataaataaataaataaataaagataataaaatatggtaacaatttattacaatggcaagaaatcagtaatgttata

SEQ ID NO: 489794 - DNA, 201 bp, Homo sapiens
ttaaagctcaccatttcacatttaacaggaaattcaaggagcttatgtctgcagtcttagtttctaacaatctccggttaacagttaacaattccaagttaaaaaaaaaaaacaggcttattaactgcaaaaatactaatataaatctcaccaaaggtaaatactaaagcagaaaacaacctaagcaacattttagaagtt

SEQ ID NO: 489795 - DNA, 201 bp, Homo sapiens
cttattaactgcaaaaatactaatataaatctcaccaaaggtaaatactaaagcagaaaacaacctaagcaacattttagaagttaagatttagtctaccaaaaaaaaaaaaaaaaggactggagtgacttgaaagaacaaagtccaaattcccacccaagcaggtctattgaaaaacacgatactgttagaaaacaagtt

SEQ ID NO: 489796 - DNA, 201 bp, Homo sapiens
taaatattagatttaaaaggtcttgtaaaggagcggggacaggtaggtgaattgatactgacacacgtaagtcaaatgaaaactagtgttatgagaagcartatctatgagttagcagaataaacccgtcaaaaaaaggagattctggagagggtttaaagggaatatgtgacttgagttcctaactttctagttcccaat

SEQ ID NO: 489797 - DNA, 201 bp, Homo sapiens
agtatctagtgtaaatacttctttagtcttcaaaaatcacaggcaaatggctctcaaaccaagcatttctgagctcacttgcagcggcgtcattgtatagraagaaaagccaagaccacagaacgaagcaggagctgtaacctaacaagtctccaacgagcaaatgacgattttctgtctgctctggctcagccctggcag

SEQ ID NO: 489798 - DNA, 201 bp, Homo sapiens
cctgagttcaagtgattctcctgcctcagcctcctgagaagctggcattacaggtgcccaccaccacgcccagctaatttttttgtgaatacctactatcyactaagcaatgttctcaatgctgggaatacagtttatcaaagctgataaaagtccatttaatggagcaatttaattctaatgcagaaaaagaagtacaat

SEQ ID NO: 489799 - DNA, 201 bp, Homo sapiens
aaacactagtctgaaaatcctaatttgaagcacttctgccataatactttaaacaattaaactcgttttttaacatttacagttattaaattactacaaayacaataaacctttttaaacaaatgaaagttaaaaattcttaaaactaaaaacattgaggccagatcttttataaaaggcagtgaccttaatttctcaggc

SEQ ID NO: 489800 - DNA, 201 bp, Homo sapiens
tatgatatcgtgatacatgcacacaatgtgtaatgatcaaatcagggtaattagaatatccatcacctcaaatatttatcatttgtgttagaaacatttcmaatcctcttctagctattttgaaaaatacaataaattattgctaactatggttaccatactgtgctatcgaacactagcacttactccttctatctaatt

SEQ ID NO: 489801 - DNA, 201 bp, Homo sapiens
acaggtgccctccaccacacccggctaatttttgtatttttagtagagacgaagtttcgccatgttggccaggctggtctcaaactcttcacctcaggtgrttcacccgcctcggcctcccaaagtgctgggactacaggcgtgagccactgcacccggcctcgtttcctctcttgcggtagaacttcaggtcaatttttt

SEQ ID NO: 489802 - DNA, 201 bp, Homo sapiens
atctagatgtatgacgaactcactgtacagtacattccaaagctacaagtacatttcaaaattatatgcctttcattttatttttggctatatagtaagtmcccacttaatgttgtggataggttcttggaaaccgcaactaaatgaaaggagtacagaaggttctccaaagttgtttcaatcaacctcatttccttacga

SEQ ID NO: 489803 - DNA, 201 bp, Homo sapiens
aatatctcctatattctgaatgtttgtgtcccccactaaaattcgtatgtggaaacctagtcatcattgggatggtatgaagaagtggggcgttcaggagktgactaacacatgaaagcagagccttcatgtatagaattaataccctaataaaagaggacccagcagggcacagtagctcacgcctgtaatcccaacact

SEQ ID NO: 489804 - DNA, 201 bp, Homo sapiens
ggattaaagactcttcaaagctgcatggagagggagggaaattccaagtttttgttcttttacatcctcatctagatgtatgacgaactcactgtacagtrcattccaaagctacaagtacatttcaaaattatatgcctttcattttatttttggctatatagtaagtccccacttaatgttgtggataggttcttggaa

SEQ ID NO: 489805 - DNA, 201 bp, Homo sapiens
actgtagggcacttattaccagtatttattattgttcttttctcagggaccttcactttccctgaggtaacaatcctctaatcatttcaggggggacgtamctggttgacatgaaataaatggggctgaaagaaccacttagaaaaaggattttcatttaatgcacttgtcctatcagaaattctgatgggccaaatgtcc

SEQ ID NO: 489806 - DNA, 201 bp, Homo sapiens
ctgaggcaggagaatggtgtgaactcgggaggcagagcttgcagtgagccaagattgcgccactgcactccagtctgggcgacagagtgagactccgtctmaacaacaacaacaacaacaacaacaacaacaacaaaaaagacaattccatttataatacctaaagaaaaaacatccatgaataaatgtaccccaaaaggg

SEQ ID NO: 489807 - DNA, 201 bp, Homo sapiens
gtaagatctagatctagagacatgattcagtttcaattttttggcaaaaatagtccataatagtccataggtgatacatgtactttcctaatccattacaytaggacacacataatgtcttgttgtcccactgagagtgacacagaaatagcagaacttcttaaatttaatgacatatgagacccagatttctactttgaa

SEQ ID NO: 489808 - DNA, 201 bp, Homo sapiens
acttagaaaaaggattttcatttaatgcacttgtcctatcagaaattctgatgggccaaatgtccttaaagccagaacctctactgttcatattcttgagmgaatgtactgtaagtggtgaagaggttagcttgccaactgtgagaagtatgaagaaagcactgggagtctacttctcttcatacaattcttttttttttt

SEQ ID NO: 489809 - DNA, 201 bp, Homo sapiens
aaatgcataagtagagaatttatataaaaaagttaaaaagtgggaatcagcatgacttaaaaaaaacccatgccactcccttctcccaaaggcaatgatgatatatatacagagagattatactatacattctaaatctcacgtgccttttatgttaaagggtagaagaatgagacaataatctcgaacagaggctatatc

SEQ ID NO: 489810 - DNA, 201 bp, Homo sapiens
agaatcgcttgaacctgggaggcagagtttgcaatgagcccagatagcgccattgcactccagcctgggcaacaagagcaaactccgtctcaaaaaaaaaraaaaaaaaacaaaaaaagtgggcaggggattgttttcaaaagcaaacatacaaagggctaaaaaatggtcaaaattcatgaaaaaaatgctcaatatcac

SEQ ID NO: 489811 - DNA, 201 bp, Homo sapiens
tctgcctcccgggttcaagcaattctcttgcctcagcctcccgagtagctgggattagagatgcatgccgccatgcctggctaattttttgtttttggtaragatggggtttcacaatgttgcccaggctggctgagaactcatgagttcagggaatccgcccaccttggcctcccaaagtgctgggattacaggcgtgag

SEQ ID NO: 489812 - DNA, 201 bp, Homo sapiens
aatgcataagtagagaatttatataaaaaagttaaaaagtgggaatcagcatgacttaaaaaaaacccatgccactcccttctcccaaaggcaatgatgatatatatacagagagattatactatacattctaaatctcacgtgccttttatgttaaagggtagaagaatgagacaataatctcgaacagaggctatatcc

SEQ ID NO: 489813 - DNA, 201 bp, Homo sapiens
aaagaaaaaaaaacaaaaaaagtgggcaggggattgttttcaaaagcaaacatacaaagggctaaaaaatggtcaaaattcatgaaaaaaatgctcaatawcacaaatcatcagagaaataaaaaattaaaaccataatttacatataaaatgagaaagtaagtacatttacgaagaatacttgtaacatttcgttaaaat

SEQ ID NO: 489814 - DNA, 201 bp, Homo sapiens
gctggtcttcaacttctgggctcaagcggttctcccaccttggcctcccaaagtgctgggattggagtgggcaaggggtcaaaacaaaaacctagtgctgrgattataggcgtgaagcctggcccagttttctttaatcctgttaaattggtcactaattgacacccactccctacattctaaaaatgtatttctatcttg

SEQ ID NO: 489815 - DNA, 201 bp, Homo sapiens
atgcataagtagagaatttatataaaaaagttaaaaagtgggaatcagcatgacttaaaaaaaacccatgccactcccttctcccaaaggcaatgatgatatatatacagagagattatactatacattctaaatctcacgtgccttttatgttaaagggtagaagaatgagacaataatctcgaacagaggctatatcct

SEQ ID NO: 489816 - DNA, 201 bp, Homo sapiens
agaaagtaagtacatttacgaagaatacttgtaacatttcgttaaaataaactttccactttcccttttctttttaaaaattgttagtcctttgtgttgartgaataaatgaaattgtgactgtgtaaatgagcagaagcttaatacctgatgatatgtaacactcatctgaacaggatgtttttaggaatatcataatgc

SEQ ID NO: 489817 - DNA, 201 bp, Homo sapiens
tggaaatttaagtgtcaccaggaaagccaagggatgcccaaagctagtataagtcatcctaccactcaaatgtacattacttatccaaactgtgtaacttkttaaaacttcagaaacaaacttccaaagtacattccagataagtaccaatttagtaagactgacaatgaataaagagtacttataatatttctaaaatct

SEQ ID NO: 489818 - DNA, 201 bp, Homo sapiens
tgcataagtagagaatttatataaaaaagttaaaaagtgggaatcagcatgacttaaaaaaaacccatgccactcccttctcccaaaggcaatgatgatatatatacagagagattatactatacattctaaatctcacgtgccttttatgttaaagggtagaagaatgagacaataatctcgaacagaggctatatccta

SEQ ID NO: 489819 - DNA, 201 bp, Homo sapiens
ggctcaagcggttctcccaccttggcctcccaaagtgctgggattggagtgggcaaggggtcaaaacaaaaacctagtgctgagattataggcgtgaagcstggcccagttttctttaatcctgttaaattggtcactaattgacacccactccctacattctaaaaatgtatttctatcttgtgaccattatctcttact

SEQ ID NO: 489820 - DNA, 201 bp, Homo sapiens
ttgaactcaggaggccaaggtagcagtgagctgacatcgcgccactgcactccagcctgggtgatagagcaagacttcatctcaaaaaaaagaaaaaaaaragagagagagagaccccaaacttgagctacattgcctgacttctaatcctagctccaccatttactagctgtgttaccatgcaaatcacttgatctctct

SEQ ID NO: 489821 - DNA, 201 bp, Homo sapiens
gacatatatataacaggagagaaacaaatatgcatatatacagattaatatcatcaatcttataagaacgttatcagaacaaactacattttataagtaayacaaaggaaaaccaaacaagcccattgcctgcataaattcaggaggctaaactaagaagaaacaagaatattacatgggaaagatggtgtaatattaaca

SEQ ID NO: 489822 - DNA, 201 bp, Homo sapiens
gccatatgtaaaagtcttaccaaaataacaggcaataaagattcataagacaatggagaaaaagaaagaggagattcaagagactagtcccagctgggtgyaaatctttaaacagttattgagaaatgggataaaatattgaagccaaaacaaaggtcacactgcagcactctcagaggttgagtggaccaatgagcccct

SEQ ID NO: 489823 - DNA, 201 bp, Homo sapiens
aaggtggcctaaaagttggcaaagaatgaagatggcagatggagaaaacagaaatagttattttacttaacttctctgcttccaacttttctattaccttyctcatctcattttactattataacttttctttttcatcaccccctcccccagttattcttaactactgactcttttctccttgccacttgatctgattca

SEQ ID NO: 489824 - DNA, 201 bp, Homo sapiens
caccatgcctggctaattttgtacttttaggagagatggggtttctccatgttggtcgggctggtctcaaactctcaacctcaggtgatctgccagcctcrgcctcccaaagtgctgggattacaggagtgagctactgtacccggcaattcaccctagtttgaggaaactttaaaaactggaaggcaaaaatgactaaga

SEQ ID NO: 489825 - DNA, 201 bp, Homo sapiens
tcactgcaacctccacctcccaggttcaagcgattttcctgcctcagcctcccaagtagctgggactacagtagagacagggtttagccatgttggccagrctggtctcgaactcctgacctcaggtgatctgcccaccctcgcctcccaaagtgctgggattataggcatgaatcatcacgcccagccccttatagaaat

SEQ ID NO: 489826 - DNA, 201 bp, Homo sapiens
acaggcgtggtggtgcatgcctgtaatccgcagctactcgggaggctgaggcaggagaatcgcttgaacccggaaggcagaggttgcagtgagccaagatygcgccactgagctctagcctgggcaacaagagcaagactctgtctcaaaaaaacaaaaaacaaaaaacaaaaaaaaaaactgcaagagggaattttttcg

SEQ ID NO: 489827 - DNA, 201 bp, Homo sapiens
caagagttcaagaccagcccgaccaacatggtgaaaccctgtctctactcaaaatacactgtactccagctgggagacagagcgcaattccatctcaaaaataaataaataaataaataaataaataaataaataaataaataaagataataaaatatggtaacaatttattacaatggcaagaaatcagtaatgttataa

SEQ ID NO: 489828 - DNA, 201 bp, Homo sapiens
aagagttcaagaccagcccgaccaacatggtgaaaccctgtctctactcaaaatacactgtactccagctgggagacagagcgcaattccatctcaaaaataaataaataaataaataaataaataaataaataaataaataaagataataaaatatggtaacaatttattacaatggcaagaaatcagtaatgttataag

SEQ ID NO: 489829 - DNA, 201 bp, Homo sapiens
tggtctcaatctcttaacctcatgatccacccacccaccttgacctcccaaagtgctgggattacaggcatgggccaccacgcccatccttgaacagaaattttttttttttttttttgagacggagtcttgctctgttgcccaggctggagtgcagtagtgcaatctcagctcactgcaacctccacgcctcctgggttc

SEQ ID NO: 489830 - DNA, 201 bp, Homo sapiens
agccaccattctcagcccttgatttggatcttaatgatttgttttgttgttgttgcctggctgtttttgaaacttttcagataaaatttaagtaggcaccrctaagatagacctagatatagtggcatcatttcaaggaagcttaagggctgactacacatgctacattagccactacaaactttaaacattttgaataat

SEQ ID NO: 489831 - DNA, 201 bp, Homo sapiens
tctctactcaaaatacactgtactccagctgggagacagagcgcaattccatctcaaaaataaataaataaataaataaataaataaataaataaataaawaaagataataaaatatggtaacaatttattacaatggcaagaaatcagtaatgttataagatactgcctataaagcctaacatgaaatactgaaggtcca

SEQ ID NO: 489832 - DNA, 201 bp, Homo sapiens
gacagagtctcgctcttgtcactcaggctggagtgcaatggtgtgatcacagctcactgcagcctccgtctcctgggttcaagcaattctcctgcctcagyctcctgagtagctgggattacaggcactgccaccatgcccagctaattttttgtatttttagtagagatgaggtttcaccatgttggccaggctggtctt

SEQ ID NO: 489833 - DNA, 201 bp, Homo sapiens
ggctgactacacatgctacattagccactacaaactttaaacattttgaataatcaaatatctttctgctccttagatttttttttttttttttttttttttgagatagagtttcgctcttgttacccagacttgagtgcaatggtgcaatctcagctcaccgcaacctctgcctcctgggttcaagcgatcctcctacct

SEQ ID NO: 489834 - DNA, 201 bp, Homo sapiens
tttaaaagtttcagaaaagaaattttattaagcccatgaatgttaaaaattttttaaaactgcatctggtcctttacaatgacaacataatttacttttayctatgaaaagaaatgaaaaatgtaaaactgatactggttaataattcatttcagagagaatgagtatagctaaaacctgcagcttgatccaagaatatta

SEQ ID NO: 489835 - DNA, 201 bp, Homo sapiens
gctgactacacatgctacattagccactacaaactttaaacattttgaataatcaaatatctttctgctccttagatttttttttttttttttttttttttgagatagagtttcgctcttgttacccagacttgagtgcaatggtgcaatctcagctcaccgcaacctctgcctcctgggttcaagcgatcctcctacctc

SEQ ID NO: 489836 - DNA, 201 bp, Homo sapiens
aagtacctgttactatataattattcccttcttgaaccatatgtgtttctttcaccactttgaaagtttctcaaaattaggaaccagtcatctcctttggmatcttttctcatcatcatacccaggatcctgaaaagtatatgcagtttagttgtgtcgacagcgaagtgtttatttaaaaacattaaataaaccaggcgc

SEQ ID NO: 489837 - DNA, 201 bp, Homo sapiens
gctgggactactggcatgagcaactgcactcagtttatttaacagatagttaggctgtttccagtcttctaatacatacaagaagaagccctgtactcaastcatctcccacaaatgaataaatgcatgtagactggacaataagttacgagaagaaaaatgcctgagtaaatgaatatatataattagaaatgcattcca

SEQ ID NO: 489838 - DNA, 201 bp, Homo sapiens
tgtaacctcgaactcttgggctcaagggatcctcccaccacagcctctccagtatctgggactacaggcacacaccaccacacccagctagaaactttctygaaactcaaagaaagtaataggaaaaaaattgtgttgtaatattcactaattcactaagcatgttttaataaagtttattcaatcactcactgactagtt

SEQ ID NO: 489839 - DNA, 201 bp, Homo sapiens
cttagactcaatcatggtctttaaaaaataaaagcaacctggtaaaaggttaagtttgatttggtggtgtttatactgctgcccactaggaagcttctttaaaaaaaaaaaaaaagcttatctattagaatatccactaaagatattcattaaagcttatctattagaatgaggaaagagaaatgcactggtcaaggagtt

SEQ ID NO: 489840 - DNA, 201 bp, Homo sapiens
agtttcttcactgacgaaactcacatactgtggacataaaaagataatgctggacatgactgcacagggagaagagtctggactctaccctaaacatctcytcccctggctgattttaattcgtatactttctctgcaataaactgtaggcatgaatgtaacagctctcaatgagttatatcaatcttccagtgatttatc

SEQ ID NO: 489841 - DNA, 201 bp, Homo sapiens; identical to SEQ ID NO: 158201

SEQ ID NO: 489842 - DNA, 201 bp, Homo sapiens
ggtaacttttactaaagtagatctcctttatagatgggtaaatttcttttacaaaagggcagcttttcaaaattactcctgtgtctgcagattctcagaakaactagctcaaaacatggcaaaaaaagatattttggggatggtatattctggtctcttaccagaatattttgggtggggtatcttgagccaacaatggat

SEQ ID NO: 489843 - DNA, 201 bp, Homo sapiens
tatcttgagccaacaatggataatcagtataatgaaaatttttaaaaaacaaattgaccaagtaagagcaaaatatattcattgagagtaatttgcatttyttttttttttttttttttttttgagacagagtcttgctctgtctcccaggctggagtgcaatcttgtgatcttggctcactgaaacctctgcctcttggt

SEQ ID NO: 489844 - DNA, 201 bp, Homo sapiens
aagtagagaatttatataaaaaagttaaaaagtgggaatcagcatgacttaaaaaaaacccatgccactcccttctcccaaaggcaatgatgatatatatacagagagattatactatacattctaaatctcacgtgccttttatgttaaagggtagaagaatgagacaataatctcgaacagaggctatatcctaacaca

SEQ ID NO: 489845 - DNA, 201 bp, Homo sapiens
accgccagttggccgggctgagcgaggcgccagagggaagcctgcaaggtacgtctgcgagagccgggtgcgggcgcggcaggggaaaaggggggcgctcrctctcttaccgccaggtccggattgcggctgtccctgtgtgacacggctcggatgacccccgctcgccagcttcgccagccgcgtccgctctcccagcgc

SEQ ID NO: 489846 - DNA, 201 bp, Homo sapiens
agtagagaatttatataaaaaagttaaaaagtgggaatcagcatgacttaaaaaaaacccatgccactcccttctcccaaaggcaatgatgatatatatacagagagattatactatacattctaaatctcacgtgccttttatgttaaagggtagaagaatgagacaataatctcgaacagaggctatatcctaacacac

SEQ ID NO: 489847 - DNA, 201 bp, Homo sapiens
aagctctcaaataactctaagaatgttttctttccaatccagatctctgatcacattttttaaaaagaaggaaaaaaataaaaacaaagagagagagaaaycatggagtcttttcttcccgtagctggcaggaagtagggtatatgatttctatgtagcctgactcagaatacttttcaaagtttggaaagttgggcctgg

SEQ ID NO: 489848 - DNA, 201 bp, Homo sapiens
gaggctgagacaggtgggaggcggaggttgcagtgagccgagatcgcaccattgcactccagcctcaaaaaaaacaactcctaactcaaaaaaaaaaaaaaagaagaagaaaattgagaaagggaaagaatgaagcatttatccttcctttactatttaaagtatacctcagtgtaacaaaaagtgagcagaggaaaagtt

SEQ ID NO: 489849 - DNA, 201 bp, Homo sapiens
tcgcgccattgcactccagcctgggccacaggagcaaaactgtctcagaaaaaaaaaacagataaaaatcaatgtacatctaggaaagttattgtgaaatktccaagcagagacacaagaaaagatcccacaagtttcttttatataaaagatcaaaaaccagaacaacatctgactttttaaaagcaaattcagaatctg

SEQ ID NO: 489850 - DNA, 201 bp, Homo sapiens
agtctcactgcaggtgtgaactcctcagatcaagtgatcctcctgccttagcctccctgagtatctcagaacacagacatgtgccactgtgcccaactaatttttttttttttttggtagagacagggtctcactcaggttggttctgaactcctggcctgaagtgatactcctgcctcagcctcctaaagtgctcggcca

SEQ ID NO: 489851 - DNA, 201 bp, Homo sapiens
aggctgagacaggtgggaggcggaggttgcagtgagccgagatcgcaccattgcactccagcctcaaaaaaaacaactcctaactcaaaaaaaaaaaaaaagaagaagaaaattgagaaagggaaagaatgaagcatttatccttcctttactatttaaagtatacctcagtgtaacaaaaagtgagcagaggaaaagttc

SEQ ID NO: 489852 - DNA, 201 bp, Homo sapiens
caattcaggggttgggactgaggacagcccgcccagtcgaaaagctgaatgtaatttttgactccccataaaattaactggtaatagcctactgttgaccrgaagtcttaacaatgacataaagtcaattaacaaatattttgtatgtctattatatactgtattcttacagtaaagtaagctagagaagttattatgagc

SEQ ID NO: 489853 - DNA, 201 bp, Homo sapiens
tcttttcctttagaacttgattaatcttagtttacttaaaaaaaaaacacccaaaagaaatgaaaacatatggctacaaatatttgtacatatatgttcayagcagcattattcgtaacagccaaaaagtggaaacaacccaaatatccatcaactgatgatataaaatgtttatgtatacaatggactattattcagtaa

SEQ ID NO: 489854 - DNA, 201 bp, Homo sapiens
ggtcaactactcacatggagatgtcagcatcacactgagttttaagcagacattcgcaacatttgagttcaacacagtaaaaacaggaggtggctaaaaayctatcacagcatgtactaaagttaattttatgtagttatgagttaatactgcatctttatgtttgtttatatttctctctactgtaaatagtgccatgtc

SEQ ID NO: 489855 - DNA, 201 bp, Homo sapiens
cggtggctcacgcctgtaatcccagcactttgggaggccgaggagggtgattcacgaggtcaggagatcgagaccatcctggctaacacagtgaaaccccrtctctactaaaaatacaaaaattagccaggcatggtggcgggtgcctatagtcccagctactagggaggctgaggcaggagaatggtgtgaacccaggag

SEQ ID NO: 489856 - DNA, 201 bp, Homo sapiens
tctgatattttaactttttaaatagatttgtgtatattttatggtagcaaatgataaaactaagatgtacatatattttatgcatttatgacatacctaasattttctaaatttttaaaaatatttctaggctacatggttcatctatgagttttttcaaattgctgcaaatctctaaaatattttgcaatatatttattt

SEQ ID NO: 489857 - DNA, 201 bp, Homo sapiens
ttctcaacaatacagcagtatccttctatttaatagctgctaatttggcaggtaagaaaatttttatctggatttctttaataatcagtgagaccaaaaayactttcttagtgtgacatgccaaaatttattaacatgtgagtgtactcagtcttcctcctctactcattctgcccttcctaaaaaggaagatttgctgga

SEQ ID NO: 489858 - DNA, 201 bp, Homo sapiens
tgcaaataaataattaatgcttacaagggtgtgatgagtgagataaaaacaccccaacactgactgaggacaatggcagtcagtacaacctttacacaatktgtgaagagtgtcaggagatagatttttgtggctttcaagttcataccctgtgattattaattctactactatgaatatacattttaaaaaatcagagat

SEQ ID NO: 489859 - DNA, 201 bp, Homo sapiens
ttgcttgaaccaaggaggcagaagatgcagtgagtgctgagatcgcaccactgcactccagcctgggtgacagagcaagactccatctcaaaaaaaaaaawatatatacagtatttgtgggatgtgaaaactacatatatgtagcaccaacgttttgtatacacaagttcaacagggccatctgcatgacttgagtaagtg

SEQ ID NO: 489860 - DNA, 201 bp, Homo sapiens
aggagaatcgcttgaacctgggagatggaggttgcagtgagccaagactgcaccactgcactccagcttgggtgacaagagcaacactctgtctcaaaagaaaaaaaaaaaatatatatatatatatagagagagagagagagagagagagcgcaagcgtgcgagcacacgaaggagagtcgattaaggaagtattactca

SEQ ID NO: 489861 - DNA, 201 bp, Homo sapiens
gtgaagtctttatggttttctaagtataagattatatcatctgtgaacagacacaattttacttctttctttccaatttaaatgctatttgtctttttctrgtctaatttctggactataacttcaaatactatgtggagtggacatggcaaaagcagggatcccttgtcttattcttgatcttagaggaaaagctttcag

SEQ ID NO: 489862 - DNA, 201 bp, Homo sapiens
aaactcacataaccctgcactgggaaatgaaaatggaacaaccaatttagagaatagtctggcagtttcttaaatttaatcatacattatagtatcaccargcaatcccaccattcagtatttacttaacagaaataaaaatctttgttcacataaaaccatgtatatgaatgtttatgatagctttatctattattgccc

SEQ ID NO: 489863 - DNA, 201 bp, Homo sapiens
aataaaataaaataaaataaaataaccccatttaaaaatgggcaaaaacacatgaacagacacttctcaaaagaagacatacaagcagccaacaaacatgraaaaagaggctcaacatcactaattatcagagaaatgcaaatcaaaatcccaatgagttatcatctcacatcagtcagagtggctattactaaaaagtca

SEQ ID NO: 489864 - DNA, 201 bp, Homo sapiens
aggttgcagtgagccaagactgcaccactgcactccagcttgggtgacaagagcaacactctgtctcaaaagaaaaaaaaaaaatatatatatatatatakagagagagagagagagagagagcgcaagcgtgcgagcacacgaaggagagtcgattaaggaagtattactcaaatcaataagaaaattctgcaatttcag

SEQ ID NO: 489865 - DNA, 201 bp, Homo sapiens
tcatctgtgaacagacacaattttacttctttctttccaatttaaatgctatttgtctttttctagtctaatttctggactataacttcaaatactatgtkgagtggacatggcaaaagcagggatcccttgtcttattcttgatcttagaggaaaagctttcagtctttcaccattgactaggatattacctaagcaaca

SEQ ID NO: 489866 - DNA, 201 bp, Homo sapiens
tgaggaacaagaagacaaaattacagtatggtcacaaaagccatcatattttctaggactttaattaaaggctccaagcctacatttcatcttttattctycgcaccatctgaatactagaattatcttttactatcgtcttaactggaaaaaataaaaatatctaaactttaacatcattttctcaatttggtactgtca

SEQ ID NO: 489867 - DNA, 201 bp, Homo sapiens
gttgcagtgagccaagactgcaccactgcactccagcttgggtgacaagagcaacactctgtctcaaaagaaaaaaaaaaaatatatatatatatatagakagagagagagagagagagagcgcaagcgtgcgagcacacgaaggagagtcgattaaggaagtattactcaaatcaataagaaaattctgcaatttcagta

SEQ ID NO: 489868 - DNA, 201 bp, Homo sapiens
cccaaagagctgggatacagcacccagcccttaatattaagatgtctaccacccagatccatctacagattcaattcaatccctatcaaaatccaagtgamctttttctggagaaaaagaaaaatctctcctgaaattcatacagaatctcaagggaccctgaataaccaaaactatcctgagaaagaagaaagttgacgg

SEQ ID NO: 489869 - DNA, 201 bp, Homo sapiens
tggccaggcacacctcaaagtcttggctctccaaaaccagggcctggtcgagagttttattggacaccgagttcctgcgaatatctcacttttcacacagrcactgccaatccctaccctccagtacccttcctcagcctcctgccccactctcgccgcgaggtgggcgtcccaaagagctaaggagggtaaggttggtta

SEQ ID NO: 489870 - DNA, 201 bp, Homo sapiens
ttttaagtgtaataaaagtatctttaaattatgcatgtaaactcacttaaggtagaactgttctttcatttatttttagtgctcactacagtgctgcatayatataaagtttttaattaacattaaaaatctcctgactcttagactcaatcatggtctttaaaaaataaaagcaacctggtaaaaggttaagtttgattt

SEQ ID NO: 489871 - DNA, 201 bp, Homo sapiens
tcaaaaaataaaaatcaaaaacaatgtacacactttaacttaaaaatgttcttactgccaaaaaacggtaacaatcatctgagctttcagagagttgtagyatctttttgccgataaagtgccttgcctcaacgtttttggctgctgactgctcagggtggtggtagctcaaggtggggtgtttgtgacaatttcttaaaa

SEQ ID NO: 489872 - DNA, 201 bp, Homo sapiens
tcacttattaatgaaccccaatcagactaacggcagtttctctgcacaatccttacagggcagaagacaatgggataataggttcaaaaagctgaaggagaaaaaaaaaaaagccgaatatactataccaaacaatgttatccttcataaatgatggggaaataaagtctttcctaaacaagtaaaagcaagaaaattcat

SEQ ID NO: 489873 - DNA, 201 bp, Homo sapiens
agggagatgcatatgaaaagtcagggagtaactgggaatgtgttcgacgcctgtcaaaatataatccagaaacagatatagaaaaagagagtagccaggcrcagtggcttacacctgtaatccgaacacgttgggaggccgaggtgggaggattacttgaggttaggagttcgagaacatcctggccaacactggtgaaac

SEQ ID NO: 489874 - DNA, 201 bp, Homo sapiens
ttcctatggttatgccacttaggcttctgtttcattttgcttttccttttaggatttttttttttaatgacaaaaacttcttttgggattatgtaaaataytgacatacttgattcaaagtcacatctagaaaacaaggtatattcggagaattctagctagtccttctatacctgttccctataataaattagttttggg

SEQ ID NO: 489875 - DNA, 201 bp, Homo sapiens
ggagttcgagatcagcctgaccaacatggagaaaccccatctctactaaaaatacaaaattagccaggcgtggtggtgcatgcctgtaatgtcagctactygggaagctgaggaaagagaatcgcttgaacctgggaggcagagtttgcaatgagcccagatagcgccattgcactccagcctgggcaacaagagcaaact

SEQ ID NO: 489876 - DNA, 201 bp, Homo sapiens
atctgaaagaggacatacattcaaagttgaaaagaaaccattacaacttaaaaataagaaaaacaacaaaaaatgatttaaacaagcatgtctccaaaaaraaaatagacggtaaaaaagttcaccaatagtattcaatacctattaccacaaggggaaaaaaaattaaatcaatgctgtaccactacatatctaacagta

SEQ ID NO: 489877 - DNA, 201 bp, Homo sapiens
cattaaaaaaaaaaagaatattctgaatgaggtaagaggaaaataccataatcaaaagcaaaaggatgctatcaaaatacaacaatctggagaaacaaacaaaaaaaaaaacagaaaaaaatctttagcaaattaaattatgatagcagaaataaaaaatacaataggtttagaaaaggaagctgaaaatttttccaagta

SEQ ID NO: 489878 - DNA, 201 bp, Homo sapiens
gcccaaataaaataaaaatgtatgttcacacaaaaatctgtatatgtatgtttttaggagcatgattcaaaatcactcaaaagtagaatgggtatctgttrgcgggtgaatggataatctaactgtggtatatccatacaacagaatactcattaataaaaggaacaaactggctgggtgcagtggctaacgcctgtaatc

SEQ ID NO: 489879 - DNA, 201 bp, Homo sapiens
taacacacatcaaaccctaataacaattaactacatagccgaagacattttaaatctcaaagtaacacataattcacaaaacaatcagcatttatcttagttttttttttttaataataaacatttaaaagtcagctgaattgcaatccgtaattgcaggaaaaatctatctcattttatgcatgtttttcaatgtattct

SEQ ID NO: 489880 - DNA, 201 bp, Homo sapiens
ttctcccttttagactgtgtattttgagggtgtacagacatgtttttacatctttgtattccaacttaaatacctggaacatactataataaatagctaakaagtagaattacacaaaaatgtctaactcagtttaatatgtactttaactttgctaaaaagagggctgttttaatttatttgggacatttattctagtta

SEQ ID NO: 489881 - DNA, 201 bp, Homo sapiens
tgaggcaggagaatcgcctgaacccaggagacggaggtggcagtgagccgagatcacaccactgcactccaacctgggcaacagagtgagactccatctcaaaaaaaaaaaaaaaaatctagataaggaccagacacagtgactcctgtctgtaatcctagtactttgggaggccgaggagggtcaatcacctgaggtcag

SEQ ID NO: 489882 - DNA, 201 bp, Homo sapiens
tgcaacctctgcttcccaggttcaagcaattctcccgcctcagcctccctagtagctgagattacaggcacacgccaccatgcccggctaatttttctggktttttttttgtttgttttttgtttttttagtagagatggggtttcaccatgtcggccagactggttttgaactcctgaccttgtgatctgcccgtctcgg

SEQ ID NO: 489883 - DNA, 201 bp, Homo sapiens
aaactgggcatctgaacattacaatgggtaatcatattctctccctgcctcagggtttgctgttgttgattcctgagggctccagtcatccatttgtttagtgacttttccaaactgtttttgcaaaggcagtattccttgttgggtgtggtcactgaagtctctgttccactatctcactggtcagccagttacctaaca

SEQ ID NO: 489884 - DNA, 201 bp, Homo sapiens
ctatgaaaataccatccataaaagagaaactgatcaactggacctcatcaaaatggaaaaaaccagccaggtgggttggctcatgcctacaatcccaacaytttgggaggccaaggcaggaagattgcctgagcttaggagttcgagaccagcctgagcaacacagcaagaccccatctccacaaaaaattaaaaaatcag

SEQ ID NO: 489885 - DNA, 201 bp, Homo sapiens
atcaactggacctcatcaaaatggaaaaaaccagccaggtgggttggctcatgcctacaatcccaacactttgggaggccaaggcaggaagattgcctgascttaggagttcgagaccagcctgagcaacacagcaagaccccatctccacaaaaaattaaaaaatcagctgggcatggtggtgtccatctacagtactag

SEQ ID NO: 489886 - DNA, 201 bp, Homo sapiens
gcctgtaatcccagcatcttggaaggccgaggcaggcagatcacctgaggtctgtagttcgagaccagccaggccaaaatgatgaaaccccggctctattaaaaaaaaaaaaaaaaacaaattagctaagtgtggtgatgggcagctgtaatcccagctactcgggagactgaggcaggagaatcacttgaatccaagaag

SEQ ID NO: 489887 - DNA, 201 bp, Homo sapiens
tagctgggaattacaggtgcctgccaacacgcccagctaatttttgttaatttttaacttttttgtagagatggtgtctccttatgttgcccaggctagtsttgaactcctagactcgaggaatcctcctatcctggcctcccaaagtgttggcattacatgttgggattacaagtgtcagccaccacccccagcttgatc

SEQ ID NO: 489888 - DNA, 201 bp, Homo sapiens
taataacatgtccagaactcttacgtaagttcaacattcctgggacatcaatacttgtgattttctaaacaaactggaatttaaaaaaaaaaagtttcttyggcatagataatttgagaagtactgacctagacttttaggttcagggttaatatggacatattttctctatactttggttagcttcactaaccaatgtat

SEQ ID NO: 489889 - DNA, 201 bp, Homo sapiens
agcagccaatgataattgtctaaatctagtaattcactgagatttgcaaataatgatattctaactataattgcttcatcatttactatctgaaaaaaaawaatttttttttttttgagacagactctcactctgtcacccaagctggagggcagtggcgcaatctcggctcactgcaacctccacctcccaggttcgagc

SEQ ID NO: 489890 - DNA, 201 bp, Homo sapiens
ccaggatggtgcttgttaccaagggaaccaaccatgtgtttagagagttggaaagttcatagccccaccccagacctccagggagaggagaggggctgaaytgagttgatcaacaatggccaattatataatcaatgatgcctatgtaatgaagtctccataaaaccccctaaaaatagagtttgaatgaggttccagact

SEQ ID NO: 489891 - DNA, 201 bp, Homo sapiens
gcagccaatgataattgtctaaatctagtaattcactgagatttgcaaataatgatattctaactataattgcttcatcatttactatctgaaaaaaaaawatttttttttttttgagacagactctcactctgtcacccaagctggagggcagtggcgcaatctcggctcactgcaacctccacctcccaggttcgagcg

SEQ ID NO: 489892 - DNA, 201 bp, Homo sapiens
cagccaatgataattgtctaaatctagtaattcactgagatttgcaaataatgatattctaactataattgcttcatcatttactatctgaaaaaaaaaawtttttttttttttgagacagactctcactctgtcacccaagctggagggcagtggcgcaatctcggctcactgcaacctccacctcccaggttcgagcga

SEQ ID NO: 489893 - DNA, 201 bp, Homo sapiens
gtagaaagcatggggattaacaaataatacaaacttttccttaggaaagctaaatcaaaatattacttgataaacacaaatgacgtaaaacaggggaatartaagcccaagaatactagaatagggtttcttctacctcagtgttttggttttttgttttgttttgttttgagacaagagtttggctctgtcacccaggat

SEQ ID NO: 489894 - DNA, 201 bp, Homo sapiens
actccagcctgggtgacagagtgagacttcatctcaaaaaaaaaaaaaaaaagaaagaaaaggaaaaagaaaaagagaatagaaagtgctgagtaagtacyattaatctaaatgatcctggttttccaattctgcagaacatctgatttgcatctggcactctaactgaaaagttcttttaagataaacctagctttagtt

SEQ ID NO: 489895 - DNA, 201 bp, Homo sapiens
tcggctcactgaaacctctgcctcccaggttcaagcgattctcctgcttcagcctccaaagtagctgggattacaggcgcccgccaccacgcccggttaattttttttttgtatttttagtagagactgcatttcaccatgttggccagggtggtctcgaactcctgacctcatgatccgcccgcttcggcttctcaaagt

SEQ ID NO: 489896 - DNA, 201 bp, Homo sapiens
attaaatagcttactaacagagacaaacatacaattcactaaactgcgttaagactttagctcttatgcctctcaaactgttttaaaaaaagttagggtacccccccactctcccccagcatattctttcaatcattgtaattttcaaaaacatgtcgagttttaggccacctggcaagagtttatttttaaaagtaattt

SEQ ID NO: 489897 - DNA, 201 bp, Homo sapiens
ttcttcaatcagaaagaaaaacaaataatgtacaaaaaagaaaatatttaaaaatataaaagctactggtaaaatcaaatacacagacaatacaatgccaygaaacaagcctcaacaaattcaaaaaagcgaaaatcatacggcaaactgtcttttctgaccacaacagaataaacctagaaatcagtagcaagggaaacc

SEQ ID NO: 489898 - DNA, 201 bp, Homo sapiens
tttttttaaggtcatttatcagtgttaaacatactttttaaaaatagtctacggccaaaataaatatagttgagagcctgcatttctagtagggcctaccraactataggaagaatgcttagaacaactgtatcctgtttggggctccatgctgcaccacattccattcacatgaggaagacgcgaacagatgagccctcc

SEQ ID NO: 489899 - DNA, 201 bp, Homo sapiens
tttttaaggtcatttatcagtgttaaacatactttttaaaaatagtctacggccaaaataaatatagttgagagcctgcatttctagtagggcctaccaawctataggaagaatgcttagaacaactgtatcctgtttggggctccatgctgcaccacattccattcacatgaggaagacgcgaacagatgagccctcccc

SEQ ID NO: 489900 - DNA, 201 bp, Homo sapiens
taagtgagttattttaatgttttaagaaataaataactaggccaggtgcagtatctcacatctgtaatcccggcactttgggaggacaagctgggcacatyacctgaggtcaggagttcgagaccagcctggccaacatggcgaaaccctgtctctactaaaaatacaaaaattagccagacatggtggcgcatgcccgta

SEQ ID NO: 489901 - DNA, 201 bp, Homo sapiens
agtggcatgcccctggaatcccagctacttagaaagtgagctgagaggatggcttgagcccagggagtaggagaccagcctgggcaacattgcaagatgcygtctctaaaaatataggtatttttaaaaaagaaatacaaaatttagtcctattactttaatgttagaaatactctcatttttacagataaaaaaatggac

SEQ ID NO: 489902 - DNA, 201 bp, Homo sapiens
tcagtttaatatgtactttaactttgctaaaaagagggctgttttaatttatttgggacatttattctagttacttttattagtaagtaaatgtacgttayattttaattgtatttcacaagatctaggattacactatcatttccacagtggcagtggaacttgtgaaaacactgtattcacgcactggaaattatcttc

SEQ ID NO: 489903 - DNA, 201 bp, Homo sapiens
atgtataatataaagttaatttaaccatttttaaatgtataatttaagggcactaaaataacttcacaccctatgcaactgtcgccactgttaccaaaactttttttttttctttttttttttgagactgagttttcgctcttgtcacccaggctggagtgcaatggcacgatatcggctcactgcaaactttgcctcctg

SEQ ID NO: 489904 - DNA, 201 bp, Homo sapiens
ggcaggagaatcgcttgaacccgggaggcagaggttgcagtgagctgagatagcgccattgcactccagcctgggaaaaaagagtgaaagtctgtctcagaaaaaaaaaaaaaaaaaaaagggctgggcgaggtggctcacgcttgtaatcccaacactttgggaggccaaggtgggcggatcacaaggtcacgagatcaa

SEQ ID NO: 489905 - DNA, 201 bp, Homo sapiens
ctgtaacctcatggactgaagtgactgaaggtgtaaacctcctgcacctcagcctcctgagtagcagctgggactacaggtacaaatcaccatacccagcttttttttttttttttaagtagagacagtgtctcgccatattgcccacgctggtcttgaactcctgatctcaagcaatacccctgccatggcctcccaaag

SEQ ID NO: 489906 - DNA, 201 bp, Homo sapiens
tgagatgggaggatcacttgagcccaggaattcaaggcagcagtaagctataatcgtgccactgtacttcagcctgggcgacaaagcacaaccctgtttcaaaaaaaaaaaaaaaaaaaaaaagagagagagaaggacatgatggagtaaaaggctgaaatcaggccgggtgtggtggctcatgcctgtaatcccagcact

SEQ ID NO: 489907 - DNA, 201 bp, Homo sapiens
ctttttttttttttttttttttctttttgagaccgggtctcattctgttgcctgtgctggagtacaatgatgcgactgtggctcactgcagcctcgacctcctgggctcaagcaatcctcctacctcagcctcccaagtagctgggattacaggtgtgagccaccatgcttggcccaaaacccattattttaaataatctg

SEQ ID NO: 489908 - DNA, 201 bp, Homo sapiens
agtttagatcttatgagattaaaagtctctatacaatctacaaagaaataaggagtgatgaaactgctcctgtgaattctctaaaccatgtccaaactgcwtatcacatgacaaataaaatctcagtcaaaactgaaaagtctgggcgcagtggctcatgtctctaatcccaggactttgggaggccaagacaggcagatc

SEQ ID NO: 489909 - DNA, 201 bp, Homo sapiens
ctgctaaccagtgcagtggtgactgggattctggaggagttaacttgttatctgtgcctacatcactctctgggctgctgccaccatttttctcagacttyggaggagtattttgctgctgagactcaggcatgcacagagaaattttattactgtgattaagaacattctgtaaaacctacaaaggtagaacaattacat

SEQ ID NO: 489910 - DNA, 201 bp, Homo sapiens
aaactacaaaataaaatggtagttaataaaaagattaccactagttgttaatgctgtaaaatttttttcttacaatattttatattataattgggaataayggaggttttcttgtgccctttaaatttcttccatttttctccattctcttccatctattacagttttgattattcaaccaaatttatgttttttttgttt

SEQ ID NO: 489911 - DNA, 201 bp, Homo sapiens
aacctacaaaggtagaacaattacatttttaaacactttcttcaataattcaattagtagtatagatacaaaaaatttacacagaaacacagcaaacctarttcatacataagtcctaaaccaaatttcaaataaatatcaaagttgactaatttaaccacagattttatttgaataaccagagatttttactcacttgag

SEQ ID NO: 489912 - DNA, 201 bp, Homo sapiens
ccaacatgccattgttacacagataattttgttactctcctgagaactgtgcttagtgatcttttcctcttttgtctgaccccacaccatgtgtatccagyattaattctattcataaactctcttctttagctaagctgacattctactgtcccctaaaatacttcaacaccaattatgctgttcctcctggcaaatgtc

SEQ ID NO: 489913 - DNA, 201 bp, Homo sapiens
ccataggggaaggtaggtggtgaaccccatctctactaaaaataaaaaaatcagctgggtatggtggcacacacctgtactcccagctacttgggaggctsaggcaggagaatcacttgaacccaggaggcaaaggttgcagtgagctgagaccacgccactgcactccagcctgggtgatggagcaagactctgtctcca

SEQ ID NO: 489914 - DNA, 201 bp, Homo sapiens
aaatatataagtacaatgaccttatttttaagagttcccactactgagcctgtaggaaaaatataaaaatgttacatatcaataacctattaataacaccygatgtattattgagataacagacgttttcaaaaattttccaaatattcaagtaaatacaatgataaataaggtttataggtagctttactgccatatgaa

SEQ ID NO: 489915 - DNA, 201 bp, Homo sapiens
attcacctatacatctaattattcataatttctcataaattgtatccagtttttgggttaaggtctataaaattaaaatcatgcttttgggttaaggtctrtaaaagtttaaaatggtttaaactttttatatgaacaattcaacatactcattaaatattttttaaaacctactatggataaaattatcttctttagttt

SEQ ID NO: 489916 - DNA, 201 bp, Homo sapiens
tgacgcaggagaatcgcttgaacccgcgaggcagaggttgcagtgagccgagatcatgccactgcactacagcctgggcaaaaagagtgaaactccatctaaaaaaaaaaaaaaaccggaaagaaacggctttgctaagttgcccaggctagagtgcagtgactattcacaggcatgatcacagtgcactatggcctcaaa

SEQ ID NO: 489917 - DNA, 201 bp, Homo sapiens
ctttaaaaatgccaactatacatatattttcattaattagactgacacattgctgaagtgatttaagagaacaaggatgaaaattcttaatagttttatargaaccccattaatgtgcttacttgctcttagcttctgatatccaaataactactctattcagagaagtttatggtaaacggaaggcaaaattgccattct

SEQ ID NO: 489918 - DNA, 201 bp, Homo sapiens
gctgaagtgatttaagagaacaaggatgaaaattcttaatagttttataggaaccccattaatgtgcttacttgctcttagcttctgatatccaaataacwactctattcagagaagtttatggtaaacggaaggcaaaattgccattctcttactggctggtggttattcctcaattatattgtacttcactctctttac

SEQ ID NO: 489919 - DNA, 201 bp, Homo sapiens
aataaccaattaacagtaattgtttactacctggtttctactagcctaaggaaaaatattttacagaaattcatccctaataacatacatacgtgaacagygttgacgttttgattggcacgagacctgcgtcgtgatgtaatgccaatattttcaccttttaacaaagagtgaacaacatcatctagaaaggtcatttga

SEQ ID NO: 489920 - DNA, 201 bp, Homo sapiens
ggcgcggtctcggctcactgaaacctctgcctcccaggttcaagcgattctcctgcttcagcctccaaagtagctgggattacaggcgcccgccaccacgcccggttaattttttttttgtatttttagtagagactgcatttcaccatgttggccagggtggtctcgaactcctgacctcatgatccgcccgcttcggct

SEQ ID NO: 489921 - DNA, 201 bp, Homo sapiens
aagagtgagatcatgtctcttaaaaagagaaattaaaaaaaaattatataccataactgagatttattgctggaatgcgaggatggttcaacacacaaaastcaataaatacaatacattcacataatgaagggaaaaaaaattttatgatcatctcaattgatgcagataaagcatgtgacaaagtcaacattttttcat

SEQ ID NO: 489922 - DNA, 201 bp, Homo sapiens
aacgctgcaggactgggataaagacagctatactgtcggtcctctgtactgcattcatgagttcaaccaatgatagatcaaaaatattcagaaaaaaattwaaaaaatatgaatttgaaaaatacagtataacaactatttacagagcatttacactgcattaggtattataagtactatatagcactgacattgtattag

SEQ ID NO: 489923 - DNA, 201 bp, Homo sapiens
tatttacaaaatttatgccagtaacagctgccattttaagaagctaaggaatttaatgtactgcttggacaactggttagaaaacaatcaatctggtatasagccattgtaattacacgaactctaaatttttttttcttctttctagaacatttctgtatttcataagatttatttaaataaataaatttaaccatctta

SEQ ID NO: 489924 - DNA, 201 bp, Homo sapiens
cccaggtggtggagcttacagtgagccgagatcatgccactgcactccagcctgggcgacagagcgagactccagctcaaaaaacaaaaaacaaaaaacaaacaaaaactccataggaaacttgtaatccttaagattcaccataaaacttaattgagcataccaacactgacatttgatgtgagaagaaatgtactgtgt

SEQ ID NO: 489925 - DNA, 201 bp, Homo sapiens
tgatttcctgaccttttttggtcaaaagctagtaatatgcctcttccagtttttcctaatcgtttcattgtttgtcctcttagaaacttgaataagacacyttttttgcactggttttgttcatttccatctggcaaacatctgtttcttgtgcagtataagtcaacaaggctctacaattatttccccattacctccttg

SEQ ID NO: 489926 - DNA, 201 bp, Homo sapiens
ccaggtggtggagcttacagtgagccgagatcatgccactgcactccagcctgggcgacagagcgagactccagctcaaaaaacaaaaaacaaaaaacaaacaaaaactccataggaaacttgtaatccttaagattcaccataaaacttaattgagcataccaacactgacatttgatgtgagaagaaatgtactgtgtg

SEQ ID NO: 489927 - DNA, 201 bp, Homo sapiens
caggtggtggagcttacagtgagccgagatcatgccactgcactccagcctgggcgacagagcgagactccagctcaaaaaacaaaaaacaaaaaacaaacaaaaactccataggaaacttgtaatccttaagattcaccataaaacttaattgagcataccaacactgacatttgatgtgagaagaaatgtactgtgtgt

SEQ ID NO: 489928 - DNA, 201 bp, Homo sapiens
gccactggtaatttactctatctccagtcactccccactccccagaggttagggcatggagatgagagtgttccaagcttctattcaaggtctggtctttytggtgaccagaccataccctgaagttatctagaagtccaccaagggttgcctcatagaagaaatgacacttctatcacccctatcactcgggagagtcca

SEQ ID NO: 489929 - DNA, 201 bp, Homo sapiens
ataactcataattcaattacgtcattcacaaaccatgatgataatattcatatctcctcaatgacaattttcaaactctactgggcaagaaacaatgtacycttttcttttctttttttttttttttttgagacagggtctcgctttgatgctgaggctggagtgcaagggtgagatcatggctcactgcagtttcgacct

SEQ ID NO: 489930 - DNA, 201 bp, Homo sapiens
aatgcgggaactatatgagttaccctggatttttagagatttaattagcagaaataggtgaaaaggcttcataggtgggggaaaagtatgaataaaagaakggacatgtaaaaacacctagtattttccagaagcgctaaacagttaggtatagataaaatacagaattgaggaaaatagtgatgaattttgtaatactgt

SEQ ID NO: 489931 - DNA, 201 bp, Homo sapiens
tttaattagcagaaataggtgaaaaggcttcataggtgggggaaaagtatgaataaaagaatggacatgtaaaaacacctagtattttccagaagcgctamacagttaggtatagataaaatacagaattgaggaaaatagtgatgaattttgtaatactgtaaattcactaaaagaataattgacagatacctgacatta

SEQ ID NO: 489932 - DNA, 201 bp, Homo sapiens
aaagaataagattttaatatattattcacataaaatgattttctcacttctctatcaatggaatctcacaaccaaatacttttctgtaacatccttattayctccattttgcagaaaaggtgacctgactcatgagataagtgacttgtgtgtggggttattgtttgtgagtggcagatgtaggaaaagctattctcaccc

SEQ ID NO: 489933 - DNA, 201 bp, Homo sapiens
aaagagatctagtaatagctctgtaacttaccaattgtgtgagtttaggcctcatttaaccttccaggtttctcaattacaaaacggagatatcttacatrttacttaaatgcctgataaatagtatcaatgatgataattatcaattagatttcaaaaagtaataatcatctctatgttccatttatttttataggttaa

SEQ ID NO: 489934 - DNA, 201 bp, Homo sapiens
aatggaatctcacaaccaaatacttttctgtaacatccttattatctccattttgcagaaaaggtgacctgactcatgagataagtgacttgtgtgtgggkttattgtttgtgagtggcagatgtaggaaaagctattctcacccaatatcattagatacatactaaagggtttatgttttttcagatttttaaaatcctt

SEQ ID NO: 489935 - DNA, 201 bp, Homo sapiens
tgacctgactcatgagataagtgacttgtgtgtggggttattgtttgtgagtggcagatgtaggaaaagctattctcacccaatatcattagatacatacyaaagggtttatgttttttcagatttttaaaatccttacctgattgatctattgtcatgataatcatactgccaattttattgctgattaaataccaacta

SEQ ID NO: 489936 - DNA, 201 bp, Homo sapiens
agcactttgggaggccaaggcgggaaggatcacttgagcccaggagttcaagatcagcctgggcaacaaagtcagagcgcatctattaagaaaaacaaacaaaaaaaaaagattgaccaagcctatgtgcttttaagaagctacacaaaggtggatgaaacaaactgaaagaatgagagagtgaaattctctaagttcacc

SEQ ID NO: 489937 - DNA, 201 bp, Homo sapiens
tacagcactatgaagacttttccaagaaaagagataccagggaagctggccgcctgtcgccatgagtggtccgccccctacccccacctgcccgcgcggcrccggactcgcggctccgcctttcggggaggtctccgtggccgcccaggcgccacagcggggagccgcggtcgacccctccgggatgggggccagggcagc

SEQ ID NO: 489938 - DNA, 201 bp, Homo sapiens
ggtttgatgttcagagcacacagcgcccgccgcctgagttagcctgaattagcagtcccgcagtaacagcagcagagcaggacaacacttctactgaaaastaagccccaaagtcacagcagaaccaaccgttcatgacttcaagggaaaacgagggggaaaatgtgatcctttcattcttctcatttgtggtgatactaa

SEQ ID NO: 489939 - DNA, 201 bp, Homo sapiens
aaatcaagcagcaatcatacaagcagacatagtggcatgcccctggaatcccagctacttagaaagtgagctgagaggatggcttgagcccagggagtagragaccagcctgggcaacattgcaagatgccgtctctaaaaatataggtatttttaaaaaagaaatacaaaatttagtcctattactttaatgttagaaat

SEQ ID NO: 489940 - DNA, 201 bp, Homo sapiens
gaacacttactatgtgtcagacagtatactaagtactttacacacgtaatctcattttgaggataaagaaaatgaggtttagagaagtttagtaacttgcstaagaatacacattaagaaactggttttcaaaaccagatcttgtgataacaaaggctccctgctattaactattatactaaaaagtcacttaaaagaaac

SEQ ID NO: 489941 - DNA, 201 bp, Homo sapiens
acctgatacactactctgaaaaaagagcggcctgaaatgaaaatgacactcattactttgagacagacaatctatactaagtacttctaatgtttccacartattaatcctcttatttcatcagaactctactcctaacaaaaaattcaataccagctttaggtagtcacttccaaaattgccttggataatctttctaaa

SEQ ID NO: 489942 - DNA, 201 bp, Homo sapiens
caaaattgccttggataatctttctaaaacacttttgattcatttaattacttcctttctgagacagggtatcactgtgtcacccaggctggagtgcaatrgggcaatcacagttcactgcagcctccatctcctgggttcaggtgatcctcccacctcagcctcccaggtaattgggactacaggaacacaccaccatgc

SEQ ID NO: 489943 - DNA, 201 bp, Homo sapiens
aagacccataaatgatcattaagtgaaaaataaaaatgccgtacatctaagcagggtttctcaactctggtacttttgacattttaggttgaataattctytgttgggagggattactctgtgcattgcagactgttcagaggcatctgtagcctctacctatcagatgttggcaacatatccttaactccctcagttatg

SEQ ID NO: 489944 - DNA, 201 bp, Homo sapiens
ggtaacagttagggagtaaagctgagattccaatacaaataattggggtagattatgtctttataagccaaatgctgaaatttcacaatttctaaagtggrtttaacacattaacttaatgttgtaatggcagaaacagcaaaatgctattgtgatttcacaaatggttaattgactcaattcaccctctataggaaagta

SEQ ID NO: 489945 - DNA, 201 bp, Homo sapiens
aaaaaggacaaaactctaatgcattatacagtctaatatgtgaaaaaaaaatcaacttatttacatactctacatcattgctccatcacatttactgactyatgtttaataagtacaagaacattggctcaagaaatccgtcatctagagagtaagaagaatttctggaccgagaggaactccaaaaattaaatgttgtct

SEQ ID NO: 489946 - DNA, 201 bp, Homo sapiens
agttttttctggtttccctggtacaccttgttaattttaagggttaacctgggctgtagtagccccattccacctataggaatccactgtgtacttttaawcccaccctccataaccactgcatctattctatgccatttttcccggtgctggaaaaattaggtattttaaactaggtatttattttagtttttatgtttt

SEQ ID NO: 489947 - DNA, 201 bp, Homo sapiens
ctagagagtaagaagaatttctggaccgagaggaactccaaaaattaaatgttgtctattaaaatttttaaaaacatatttatttaaaagtaagctggccrggcacggtggctcatgcctgtaatcccagtactttgggaggctgaggcgggcggatcacctgaggtcgggagttcgagaccagcctgaccaacatggtga

SEQ ID NO: 489948 - DNA, 201 bp, Homo sapiens
aaacttacaaagcactgtgtttaaataaaccatatagagtgacccatttgaaatcaggtccaattattaagcacttctgaattgctgcctcgttctttacaattacatgctttcccctctctgtctctaacttagggtaaggagccatttggcttaatccactagagaaacacccatgtgtataaccacacaccacatctc

SEQ ID NO: 489949 - DNA, 201 bp, Homo sapiens
ttaaatgtaaaaattagataaaatgtaagatagaagtaaataaaacataaaaattagtggagaaaaagcggctgacttttaattaagagaaacaaaaaggyagcagagaggaagacattccaaaagagtagataagacaaaatctattatatctagctttaatgtactaagaaacacactattatgtgtatgtgtatataa

SEQ ID NO: 489950 - DNA, 201 bp, Homo sapiens
accaagcaggggagatttgactaaacattacaacctgggggaaaaaaaggcactcattctggcccttttcttagaactcttacatgtgaatatgtatattygtctcaagatgaaaagagaatacgtatttcactaacacttaatttcataaatttaacttcacaagagttttctaggcattaaaacctggaaggtacctat

SEQ ID NO: 489951 - DNA, 201 bp, Homo sapiens
gaaatcaggccgggtgtggtggctcatgcctgtaatcccagcactttgggaagccgaggtgggtggatcacctgaggtcatgagttcaagaccagcctgaycaacatggtgaaaccaaacctcatctctactaaaaaatacaaaaaaaatgtatttaggtgtagtggtgcgcatctataatcccagctactcgggaggctg

SEQ ID NO: 489952 - DNA, 201 bp, Homo sapiens
aaaaatttcattcttcagaagatatatgaaattaacttgataaattgactatcctaaaatttaaaacttttattcactaaaacttgctaatgtggaaaaawgagctgctgggaaatgatatatgtgatatagaaccaataagtaattatctaaaatataaaaacaaatcctacaaatcatttttttttaaatacaactttc

SEQ ID NO: 489953 - DNA, 201 bp, Homo sapiens
ccaactccataaggtgtcagaatcagaagtggtatcacagaagcagagaactatattcaaagaggttgtgattaacggtgccattcattatagacaggggygagtaataaacgaaccagaaagatacactgaattatccaaatacgtgtgagtgacagcagtagcaatagtaaatttcagaccagtatggaataagactgc

SEQ ID NO: 489954 - DNA, 201 bp, Homo sapiens
ttttttaaaaggaccagtgaacatttaaataaatattctttttaaaaattttgtataaatttaaggggtacaactgcaatttttgttacatggatatattscctagcggtgatgtcttggcttttagttatcatcacctgaataatgtacattgtatctactaaataatttctcattacccacccctgttaaccaccatcc

SEQ ID NO: 489955 - DNA, 201 bp, Homo sapiens
atactgctatgtggcaaactacagtgtaacttaccctccttaatgaagcttcagcattaactgcattttctgggtgaacccacttagaagaaggcaaaccragtcctgagtatgcatgtgttccatttggatactgccaaataattggataaagtccaagctgattatatgaagcagaaggatgggcttgtccaagaagat

SEQ ID NO: 489956 - DNA, 201 bp, Homo sapiens
ggtcactttgctcactcaacatcctactttctcaggaaccacaggacctttaaataatttaccaagagcttacattggaaagctgcccatcctcagtatgyagctctttgaaccacatagaggccctttaaactttacccaattatacacaccaggttttcaaatacgaaaaatctagggctagtaagagaataagctctt

SEQ ID NO: 489957 - DNA, 201 bp, Homo sapiens
tttaaataatttaccaagagcttacattggaaagctgcccatcctcagtatgtagctctttgaaccacatagaggccctttaaactttacccaattatacrcaccaggttttcaaatacgaaaaatctagggctagtaagagaataagctctttggtattttgcagaagatatttatttaaaggtattctggcttcctaaa

SEQ ID NO: 489958 - DNA, 201 bp, Homo sapiens
cccagaatacacagaaacagaacgtaagtaaaaatagtaaacagaataacctcaaaagtagtttcttcttgatgcttaaaaaagatgaagattcaatcatwgttgatctcaactttctatgcatactaagaggaacaaagaaaaagtgcctcaaaagaagacacgagaaaccagaagtaaagttaatcattcaacaaaaaa

SEQ ID NO: 489959 - DNA, 201 bp, Homo sapiens
ctcaacacagaggcattcgtattaatgataacctataagaggcttatttctcctttgactttgaaaataccatattctgatgctttccctatttctctaatttttttttttcaatcttcccagatggctccacttcttcacaacccttaaatgtggatgtggctcaagattaagccaatcactttgaactccaactgatca

SEQ ID NO: 489960 - DNA, 201 bp, Homo sapiens
acaaaacaaaaaaaacctgtttttgagagaaatcaaatacattttcctcccacagacttatttttttttaaacaatatccctacactccacaatatgcacktctcttagatttgagttcctatattcctgacaaaatgcaaaccagaagtctggttgtgtgagaactgccaggtctgaaaaacttagaagtacagccttcc

SEQ ID NO: 489961 - DNA, 201 bp, Homo sapiens
tgaggattgtaaggtttcaacagattgaaaagatgggtaaaataaactaattttaaaataacagcaaaaccagtggtagctaacttagtggaaaaaaaaasaagcttaatctaaagccaaatattagggaaagctgattaatatgctaaattaccaaagataagctatgccccaaaggttcaaaaattgagtaggggtaaa

SEQ ID NO: 489962 - DNA, 201 bp, Homo sapiens
atgtggtaaaaccagcttggcagcttttgatgcaaaaaaggattaggaagttttattcattcaacaaatattcattggaacatttaaagtgtattaagcaytgtctcagagattttgggtgatgcaaagatgaagctaaacagaaactcagtaggagacaacactgttctgtggtatgaaggttaaagctgtcgttccacg

SEQ ID NO: 489963 - DNA, 201 bp, Homo sapiens
gtataaatatctattttttctacataaacaacagctttaaaaatgagtattttttgtattaagttaaaaaaaaaatttgaaatctcaagactttcagactrgtacttaaaactccataggagccgggcgcggtggctcacgtctgtaatcccagcactttgggaggctgaggtgggcagatcacgaggtcaggaaatcgag

SEQ ID NO: 489964 - DNA, 201 bp, Homo sapiens
gcggtggctcacgtctgtaatcccagcactttgggaggctgaggtgggcagatcacgaggtcaggaaatcgagaccatcctggctaacatggcgaaacccygtatctactaaaaatacaaaaaaatagccgggcgtggtggcgggcgcctgtagtcacagctactcgggaggctgaggcaggagaatggtgtgaacccagg

SEQ ID NO: 489965 - DNA, 201 bp, Homo sapiens
ttactaaaaataaaaatttagccaggtgtggtgacacatgcctgtagtcccagctacttgggaggctgaggcaggagaatcacttgaactccaggaggtgsaggttgcagcaagccgagatcgcgccattgcactccagcctgggtgatagagcaagacaccatctcaaaaaaaaaaaaaaaaaatctagaactattgttt

SEQ ID NO: 489966 - DNA, 201 bp, Homo sapiens
gaacagatcagtcttttattaacagggaatggaggcacactaccaactgggaacaaatcaccattcaaaaccctcaaaatgttaacagactttcaaagagragcaagagaaacagggttttgactttcaacaaaaactcccatctactttgaagtaaaaattatgtaatggtcttatattgttgaatgccaagtgaaggta

SEQ ID NO: 489967 - DNA, 201 bp, Homo sapiens
ttaccaaaagccaaaccattcatatgtatggatttcataaacatttattgatccttttttgaggtaagtataaatacctttacatggctaaccttctaacrcttgaaaaatcaatttcaagggactctttaatcagttaaataatctgctttagaaggcacaaatgatcatacttcagattaaaatacaggtaagtattca

SEQ ID NO: 489968 - DNA, 201 bp, Homo sapiens
cagagggggaagtgtggatatgtaaaccaacctaactttttaacaaggtcactttgagcctactaaaagaccactgttcccaaaaaagtagcagcagggasacaagtgtaagcatggaatctctttggggtaacaatgattgcatctggaaaaaaggaactgggggaaaaatgtgagatactgaattttcaccgtgaactt

SEQ ID NO: 489969 - DNA, 201 bp, Homo sapiens
tactgggcacgatcttgactcactggaatcttcgcctcccaagttcaagcgattctcctgcctcagcttcctgagtagctgggattacaggcgcataccamcatgcacaactaatttttgtatttttagtagagacggggtttcaccatgttgaccaggctggtctcaaactcctggactcaagcgatctgcccaccttgg

SEQ ID NO: 489970 - DNA, 201 bp, Homo sapiens
gtgaaacccagtctctactgaaaatacaaaaaaattaaccgggcgtggtggcaggcgcctgtagtcccagctactccggaggctgaggcaggagaactgcrtgaacccgggaggcagagcttgcagtgagccgagatcatgccactgcactccagcctgggcaacagagtgagactccatctcaaaaaaacaaaaaggcaa

SEQ ID NO: 489971 - DNA, 201 bp, Homo sapiens
gaaattgctaaaaatcgtcaaaccccactggtttgaaggtcacacgttgtaacatactaaacaaaggaaacaaaagactagtaatttctgaaaaaggtgcrctgaaataggccacttttaccagatacgaagaacattcttcaaaggaaatcaattgtggctgtgggcaaccctctactgcaaacaatgcttccttctcca

SEQ ID NO: 489972 - DNA, 201 bp, Homo sapiens
caaccccttgtgcttcctgagtgaggtgattccctgccctgcttcggctcacactctgtgggctgcacccactgtccgacaagccccagtgagatgaaccsagtacctcagttggaaatgcagaaatcaccagtcttctgcatcactcatgctgggagctgtagactggatctgttcctattcggccaccttggaacctat

SEQ ID NO: 489973 - DNA, 201 bp, Homo sapiens
cagttttatccgtgtttctggagccaactatggggcaggggctgaaggtcttaccacccagttttctgagtctggcatttctccttattttggctcgtctmgagatttggagactctcaggttccctgcctcctccagttctgagcttttccagggttctggaatttaggcttttttcaaaggtgtccacctctctgcata

SEQ ID NO: 489974 - DNA, 201 bp, Homo sapiens
tccctccaccgccacccccgcacttagctgtactcttaatttgcagcccggggcaactcatcccaggaccccaacaagtctggtcagtcacccaatctgcmaccctgtataatcatcttgtaaaggctcctgtatgcaagactttgtgtagaactttacggggttcatggggacacctagctaagaatccctgctatgtag

SEQ ID NO: 489975 - DNA, 201 bp, Homo sapiens
ctggtggtgtgcacctgtgtcccagctattcaggaggctgaggtgggaggatcccttgagcccaggagtttgaggtacagtgaggtatgatcataccactrcactccagcctgggcaataatacgagactctgtctctaataataataacattgttattactgttattaactttccaaatttaacctgccactgaacgact

SEQ ID NO: 489976 - DNA, 201 bp, Homo sapiens
cccacacttgtaatcccaacactttggaatgccgaggtgggaggattgcttgaggctggaagttcgagaccagcctgggcaacatagcaaggccctgcctytgcaaaataaactacaaaaatttccagagcctggtggtgtgcacctgtgtcccagctattcaggaggctgaggtgggaggatcccttgagcccaggagtt

SEQ ID NO: 489977 - DNA, 201 bp, Homo sapiens
agggtttagtctgtggtctccaagatgatttctagcattactgttctgattctagataagaggtagagtagagaggatactatgaaaaagaaccacaagayaggacagggattttgcaaagaagaaatgagtgggtataagacactggtagaaggagaaaggaatcagagtccagagcttgagctcacattcaggggagtt

SEQ ID NO: 489978 - DNA, 201 bp, Homo sapiens
ctacacacaacctccagtatacttcaaatcatctctacttatatacttcatagaatgtagttaatagactgtattttttatatttttttcattgtttgttstatttttttaattgggttttttccccaaatatttttaattggcagttggttgaatctgcagatgtggaacccatggataagaagggtcaactgtaaaagg

SEQ ID NO: 489979 - DNA, 201 bp, Homo sapiens
tgcagatgacatgcagtggtttgtgcggagtcactcggcagagggccccgtgggtcatggccatgtaggcctccttcactgtgctctgttttatgttgtaragccaggctactgccctgtgagactgggaatgacaactggaagacttcagtctggagtgaatactttgcaggggttcaaagaggataaaaggaacaaagt

SEQ ID NO: 489980 - DNA, 201 bp, Homo sapiens
tgtctgcagtattcagtatggtaacatgctgtataggttcctagcctaggagcagtaggctatatcatttagccaggtgtctaataggctataccatctargtttgtgtgagtgtactcattgatggtcacacaacaaaattgcctaacagtacatttctcagaacgcgtcccttcattaagctacatgtgactatataca

SEQ ID NO: 489981 - DNA, 201 bp, Homo sapiens
gattgccagaaggaggttgcagtgagccaagattgcacctctgcactctagcctgggcaacagagcgagactctgtctcaaaaaaaaaaaaaaaaaaaaagtgtcctcttttcaacttaacttgtttccttattagattactggtttcaagagggagccctttaaggaacagggccaagaaagcatgcagtttttagggcc

SEQ ID NO: 489982 - DNA, 201 bp, Homo sapiens
tgattgccagaaggaggttgcagtgagccaagattgcacctctgcactctagcctgggcaacagagcgagactctgtctcaaaaaaaaaaaaaaaaaaaaagtgtcctcttttcaacttaacttgtttccttattagattactggtttcaagagggagccctttaaggaacagggccaagaaagcatgcagtttttagggc

SEQ ID NO: 489983 - DNA, 201 bp, Homo sapiens
ttgattgccagaaggaggttgcagtgagccaagattgcacctctgcactctagcctgggcaacagagcgagactctgtctcaaaaaaaaaaaaaaaaaaaaagtgtcctcttttcaacttaacttgtttccttattagattactggtttcaagagggagccctttaaggaacagggccaagaaagcatgcagtttttaggg

SEQ ID NO: 489984 - DNA, 201 bp, Homo sapiens
accataccataccatggcaggcaggcagaagagagttttcattttagctctcttccactaacttgtggactttgggcaagacattaactaccctgggactyagtgttctcatccctaaagaagggtttagtctgtggtctccaagatgatttctagcattactgttctgattctagataagaggtagagtagagaggatac

SEQ ID NO: 489985 - DNA, 201 bp, Homo sapiens
ttagcattgtgttacagctgtctgcagtattcagtatggtaacatgctgtataggttcctagcctaggagcagtaggctatatcatttagccaggtgtctrataggctataccatctaggtttgtgtgagtgtactcattgatggtcacacaacaaaattgcctaacagtacatttctcagaacgcgtcccttcattaagc

SEQ ID NO: 489986 - DNA, 201 bp, Homo sapiens
acatctcagaggcacagaagctatacctaaacaccattacctgaaaacaagttgattgccagaaggaggttgcagtgagccaagattgcacctctgcactytagcctgggcaacagagcgagactctgtctcaaaaaaaaaaaaaaaaaaaaagtgtcctcttttcaacttaacttgtttccttattagattactggtttc

SEQ ID NO: 489987 - DNA, 201 bp, Homo sapiens
aaaatttacatctcagaggcacagaagctatacctaaacaccattacctgaaaacaagttgattgccagaaggaggttgcagtgagccaagattgcacctytgcactctagcctgggcaacagagcgagactctgtctcaaaaaaaaaaaaaaaaaaaaagtgtcctcttttcaacttaacttgtttccttattagattac

SEQ ID NO: 489988 - DNA, 201 bp, Homo sapiens
tttttgtaaattgatattgtatctttaccaaaaatacatttttctttatatactatgtatatagaattgtttctcttatatctagtaattttaataacatwttaactattttaacttttagtaaccctaatttcaagtgaaaaccctaagattacttaatataacatgactttaagatttaaaattactgaagagaatttt

SEQ ID NO: 489989 - DNA, 201 bp, Homo sapiens
gttgcactctattttacccagtgataactttcagagtacaggcaaggtagtcagtagaaacaaatatgccttcttaaaatttacggagaaacctcaagccyttaactacaatgaaaatttcacagcacatcattgcagcgaaaaattaagcacatgtttcacagaatagaaacaagacttctttggttagcgaaaccattc

SEQ ID NO: 489990 - DNA, 201 bp, Homo sapiens
accccctttgttttttccttcgtgaacgtattattctctccttttccagtagatggcagtaaagtacattgagcttgttattaagaatattttctttacartgatgtctttttaccccttaaaatgatttatgtatttaaagatattggttctgaaatatttctaaattatctccctttgttccatttaggaggataaaaa

SEQ ID NO: 489991 - DNA, 201 bp, Homo sapiens
tacatttaagtgtttaatccatttggagttaatgtttgtatattgtgagagataggagttcagtttcattcttctgcacatggttagccagttttcttagygccatttattgagtggtctttctactttgtttatttttgtcgactttgtcaaagatcagtcggttgtatgtatgtggctttatttctgggttctctattc

SEQ ID NO: 489992 - DNA, 201 bp, Homo sapiens
ttttactaaatattcagtataattccaatttgctgggttatgtaatggttggaaaagtactggaataataaacttgttaacactgttcttctctggatgakacattaggaggatttttattttctcctctacccatatttttatttgtccacaataaaatagatcgctttaatggttttaagattactttaaaagtccagt

SEQ ID NO: 489993 - DNA, 201 bp, Homo sapiens
atggttttacgtaactatattcatttaataagtgacattcacaacaagattctgcaacatactctgaattatgaaaaagaaaatgtaaaggttggaatcaraattttaggtggagagagacctgtagagatcacagccttgtgttgtacagatgggaaactgagactaaaacagtggggtaacttgttaaaagtcatatgc

SEQ ID NO: 489994 - DNA, 201 bp, Homo sapiens
ataaaatgatttataaaaattacagaagtatttctaaaatcacagtagaggaaataaccatatacacacccattatgattataacacgaaaaagctacacrtaacgttttacaaataacaactgctacttatcaggcatatagtacatcctaggttctgtgctgagcgctttatgtacatcatcctactatactccctact

SEQ ID NO: 489995 - DNA, 201 bp, Homo sapiens
tcttgctatgttgtccaggctggtcccaaacttctggggtcaggtgatcctttcacctcagcctcccaaaagtactaggattacaagtgtgagctaccatrtctggcattttagttgcggggagtgaatgggggtaatgtaccttgctaaaaattaggaatctgttacttaggaaaataagataaagttgggggaagcaca

SEQ ID NO: 489996 - DNA, 201 bp, Homo sapiens
ccatatttttatttgtccacaataaaatagatcgctttaatggttttaagattactttaaaagtccagtaaaaaacagcaagaactgtgttggtgaggatstcaccatctgcactactaatagagcatggtgtgatgaggaaaggcccaacatgagtgacagcaagcctagtcttagttgctggtttagtgaccttaggtg

SEQ ID NO: 489997 - DNA, 201 bp, Homo sapiens
ttaaacccgctttataaactaactgtaaactcttcttccttaactacctaaagttaaatggcactaatatttttgcttagttttttctgtgtaattaacaraatttactgttaaccagaactgtgttaacttatggttttacgtaactatattcatttaataagtgacattcacaacaagattctgcaacatactctgaat

SEQ ID NO: 489998 - DNA, 201 bp, Homo sapiens
gaaagctcaacggcctaaagtaatatttattcagttcatttggcagttgaagtaaaatgtgtgtgtgtgtgtgtgtgtgtgtgtgtgtgtgtgtgtgtgtgaaaagtgtgcaggaagactcagctttttgaatgaccagtgccatcacccacagttcagtaaagcccagcacattatgttaagatttaaggaatctacaaa

SEQ ID NO: 489999 - DNA, 201 bp, Homo sapiens
ggaaagctcaacggcctaaagtaatatttattcagttcatttggcagttgaagtaaaatgtgtgtgtgtgtgtgtgtgtgtgtgtgtgtgtgtgtgtgtgtgaaaagtgtgcaggaagactcagctttttgaatgaccagtgccatcacccacagttcagtaaagcccagcacattatgttaagatttaaggaatctacaa

SEQ ID NO: 490000 - DNA, 201 bp, Homo sapiens
gggaaagctcaacggcctaaagtaatatttattcagttcatttggcagttgaagtaaaatgtgtgtgtgtgtgtgtgtgtgtgtgtgtgtgtgtgtgtgtktgaaaagtgtgcaggaagactcagctttttgaatgaccagtgccatcacccacagttcagtaaagcccagcacattatgttaagatttaaggaatctaca

SEQ ID NO: 490001 - DNA, 201 bp, Homo sapiens
cagtaagaagagtagaagtgtgtccccagagtgtttttaagcaggttagggtttatcataattgaaaggaattggtatcttagctctttagaatttctacrttgccacttttttctagggaaagctcaacggcctaaagtaatatttattcagttcatttggcagttgaagtaaaatgtgtgtgtgtgtgtgtgtgtgtgt

SEQ ID NO: 490002 - DNA, 201 bp, Homo sapiens
cccctacagggaggtgcctcccagttaggctactcgggggtcagggacccacttcaggaggtagtctgtccgttctcagatctcaaactccatgctggcakaaccactactctcttcaaagctgtcagacagggacgtttaagtctgcagaagtttctgctgccttttgttcagctatgccctgcccccagaggtaggctc

SEQ ID NO: 490003 - DNA, 201 bp, Homo sapiens
cttcatttcattcatttgatcttcaatcattgataccctttcttccacttgatcaaatcggctactgaaacttgtgcatgcatcacgtagtcctcgtgccrtgattttcagctccatcaggtcagttaaggtcttctctaccctatttaatgtagttagccattcgtctaatcttttttcaaggtttttagcttctttgca

SEQ ID NO: 490004 - DNA, 201 bp, Homo sapiens
caaatagtgaacatagtacccagtaggaagtttctgaacccttgcccccttccctccctgcccccttttagcatttccagtgtctgttcttcccatctttktgtctgtgtgcaccagtatttagctcctacttttaagtgagaacatggcaatatttgtttttctgtttctgcattaatttgtttaggatagtggcctccg

SEQ ID NO: 490005 - DNA, 201 bp, Homo sapiens
ccaagatccataccagtatttctggacgaaggatttaaaattttccaaagttaagaattactgcaacagaatatgttgtgaggtggtaaaaatacattaaycaactaacagtggtagctgggatcaagcatgagttcagtttataactgctctctggaacttttaaaacaaccatatattctgtattaggtgctttggatt

SEQ ID NO: 490006 - DNA, 201 bp, Homo sapiens
tttcacatagtccaatatttcttggaggctttgttcatttcttttcactccttttcctctaaacttctctttttgcttcatttcattcatttgatcttcartcattgataccctttcttccacttgatcaaatcggctactgaaacttgtgcatgcatcacgtagtcctcgtgccatgattttcagctccatcaggtcagt

SEQ ID NO: 490007 - DNA, 201 bp, Homo sapiens
tgatggtctttacaatttggcctgtttttgcagtggctggtactggttattcctttccacgtttagtgcttccttcagaagctcttgtaagacaggcctgrtgatgacaaaatctgtcagcatttgtttgtctgtaaaagattttatttctccttcacttatgaagcttagtttggctggatatgaaattctgggttgaaa

SEQ ID NO: 490008 - DNA, 201 bp, Homo sapiens
gaggcattttaattaccaaaaaaagaaaaagacattgctttcaaaggaaaattaaacttcactctttcctgggacttgtttcaaggtttagaaactttctstaattgaatttattttgtgcatgtcgtgttttttaaaaccccaaagcattcttaatgtaagttctgctttataaaattctagagtggaaataaaattatt

SEQ ID NO: 490009 - DNA, 201 bp, Homo sapiens
tttttaagctgacaataatggattcatagttactattatcctttagtggagagagagagcatgtctccctgatagtagcatctgcagtattttaatttttwaaaaatatatttttaaagagactgtacctcagccagtactaaagtgtaggaacttgttacttcaaaacgttgatgtgccatctgctgtcttataacatgt

SEQ ID NO: 490010 - DNA, 201 bp, Homo sapiens
agttctgctttataaaattctagagtggaaataaaattattactgagaacttacagaaataattaaactcactaatatttttaatgtagcaaaataaaacrtgtttttaaaaatcaaataagattgctttttgttgttgtttgtgttttttgttttttgttttgtttttttgagacggagtctcactctgtcacccaggct

SEQ ID NO: 490011 - DNA, 201 bp, Homo sapiens
agtttggatcccatcaacataatgagatccatcctgacttagcaggattctggctcaggatgggacactgagcttgggttatggcagtagtttactggatrttattccttcttagcagtagtaccttgctaattttcattacatataagaaattaaccctgtagattcaccagtcccctgcttttctcacaaagagggaat

SEQ ID NO: 490012 - DNA, 201 bp, Homo sapiens
aaatattcagtataattccaatttgctgggttatgtaatggttggaaaagtactggaataataaacttgttaacactgttcttctctggatgatacattargaggatttttattttctcctctacccatatttttatttgtccacaataaaatagatcgctttaatggttttaagattactttaaaagtccagtaaaaaac

SEQ ID NO: 490013 - DNA, 201 bp, Homo sapiens
acttgcagaaaactcgaaagcagaaagatggaacagacacctcacagagtggggaggacggaggctgctggcagagagagagagaggactctggagatgcygaagcacacgccttcaagagtcccagcaaagaaaataaaaagtaaaagatctttgggatgttaaggtcaaactgtcttcttcaagctagtaagggggaaa

SEQ ID NO: 490014 - DNA, 201 bp, Homo sapiens
ctctctctcccaaattcttccatttatttgtctgtctctgttttctgttgaaagcatcctttagttgtctgttgagcttttgcagtttgtacaaagctgaktaaatgctttgtacctagacagagtttgtcagttgatggactttattgtagagtgactaacagggactcagtcattttggtgaagaatgccccaatgtct

SEQ ID NO: 490015 - DNA, 201 bp, Homo sapiens
aaagaacaatggtatattgttctcccttcaaagtaatgtttgaggtagaactaatttttttgtaagttcccagaaaaacgtttaacacaagtaacactggwcagaaaaaggtagggaaataacatgttaggtgtgccttactgtttctgttcttaaattagagacccttaacaggtcatcaaggaagtaagtttcaatgag

SEQ ID NO: 490016 - DNA, 201 bp, Homo sapiens
agtataaataaacctcacgacctggtaaatcctaagggaggtttgactaacttgttccaggagtccagggaaaggtatgcgtcattctgccgtgggcagcyaggggaaagcatcatagagctaatggctaacgtgtgtagcaaatgctgttttcagcctagggccaaaaatgatgtgcagctgccaggtaatgaaacattt

SEQ ID NO: 490017 - DNA, 201 bp, Homo sapiens
tagtttactggatattattccttcttagcagtagtaccttgctaattttcattacatataagaaattaaccctgtagattcaccagtcccctgcttttctsacaaagagggaatctgttcacttttacattagtaagtgtggtttggttgttgttgtttttacaaggtagaggtccttaagtccgaagttgactgtggttt

SEQ ID NO: 490018 - DNA, 201 bp, Homo sapiens
cccctgcttttctcacaaagagggaatctgttcacttttacattagtaagtgtggtttggttgttgttgtttttacaaggtagaggtccttaagtccgaarttgactgtggtttcagatcaagccatttaatcttttagacctcaccagcctgaatgaattctttctggatcatgcatctatgcattccacaaatagggat

SEQ ID NO: 490019 - DNA, 201 bp, Homo sapiens
cctttctcctgcctcagatcttcatgcatacaagatgtttcccctgcctggaatgctgttcccacacacctacctccacccccaacctagctagattctttctccttcagatctcagctcagatgttacttcctcatggaaaccttcccacacttgtccagtctaaattattttcacccaaaagttattctgtccttgaaa

SEQ ID NO: 490020 - DNA, 201 bp, Homo sapiens
taaagaggtctgatgagagtaaatgaattgcctaaggtcacagagtggttttttactttattctttttgttcttttttttttttttttgagacaggatctrgctctgttgcccaggctagagtgcagtggtgcaatctcgacttaccgcaacctccacctcctgggctcaagccatgctcctacctcagcctcccaagtag

SEQ ID NO: 490021 - DNA, 201 bp, Homo sapiens
ccacctcctgggctcaagccatgctcctacctcagcctcccaagtagctgggactccaggtgcacaccaaaactcctggctaatttttgtattttttgtaragacgggatttcgctatgttgcctaggctggcctcgaactcctgagctcaagtgatccacccacctcggcctcccaaagttctgggatgacaggggtgag

SEQ ID NO: 490022 - DNA, 201 bp, Homo sapiens
atggcatgaagtagagctcaaattctattttctcttttcaggtaacagttgtctcagcaccacccttttgtcattgacttataatgtcacctctgtgatayactaagattattctatgtacatgggtctgtttctgggctctgatctcttctgttggcttatttgtctgtgtgtcagacccacattgtcttattatcacgt

SEQ ID NO: 490023 - DNA, 201 bp, Homo sapiens
atccgagtgtttactgtctgccagacactattctaaattctttgtgtatatttactattttgatccttagaaataattctgtgaggtaggtgctgttagtrtctcgtactgctgatttaactgagccacagagtatgaggtagcttttaactagagaggagcagtgactaatcgtattaagcaaagtgagaattctggcaa

SEQ ID NO: 490024 - DNA, 201 bp, Homo sapiens
gaggattatggagctgttgttagaggattagctcaaaaatgggcaagaaggagatgcgtataggggacataaagtaagtctctttttaaacacagaatgcrtggaggggaggatagggtaagatctgaaaggcagctgagatggcagagtaaggagtttgagcttcagtatgtagtcagtaggaaatcaaaaactttgagt

SEQ ID NO: 490025 - DNA, 201 bp, Homo sapiens
tctaaggctaattgctactccattgtatggatataccacattttatttatttatcagtcagtggacatgtggtttgcttccaccttttggctgttatgaayaatgctgcgaggaacatgaattgtacaaagttctcttcaggacccctactttcacttcttttggatacacacccacaaatagaattactggatcatacta

SEQ ID NO: 490026 - DNA, 201 bp, Homo sapiens
tcctccatccctttattttgagcctatgtgtgtctctgcacatgagatgggtttcctgaatacagcacactgatgggtcttgactctttatccaatttgcyagtctgtgtcttttaattggagcatttagcccatttacatttaaggttaatattgttatgtgtgaatttgatcctgtcattatgatgttagctggttatt

SEQ ID NO: 490027 - DNA, 201 bp, Homo sapiens
caatacacatagcataaaatttaccattttaattatttttaagtgtgcagttcagtagtgttaaatgtatttacatttttgtgcaactattttccagaacyttttcgtacctattaaaaactccccattttcctttctccctctcctcagaccttggcaaccaccattccactttctgtctctgtgaatttgactgctttt

SEQ ID NO: 490028 - DNA, 201 bp, Homo sapiens
ctgttgatttagggtggagagttctgtagatgtctattaggtctgcttggtgcagagctgagttcaattcctggatatccttgttaactttctgtctcgtygatctgtctaatgttgacagtggggtgttaaagttttgcattattattgcgtgtgagtctaagtctctttttaggtaactcaggacttgctttatgaatc

SEQ ID NO: 490029 - DNA, 201 bp, Homo sapiens
ttctgttgatttagggtggagagttctgtagatgtctattaggtctgcttggtgcagagctgagttcaattcctggatatccttgttaactttctgtctcgtcgatctgtctaatgttgacagtggggtgttaaagttttgcattattattgcgtgtgagtctaagtctctttttaggtaactcaggacttgctttatgaa

SEQ ID NO: 490030 - DNA, 201 bp, Homo sapiens
gatcagtctgtgtcattatgcacaaaggatctagctagacatcatgtatttcatggtaacagctagcctaactttcacttcatcttgaaataggtacagtrtatcaagttttccttaaaattcaaagtccctgaaatattttaaacccgccattaacaaagccataacttttagatagtaattcctagccctggttttaag

SEQ ID NO: 490031 - DNA, 201 bp, Homo sapiens
gactttttaatgatcaccgttctaactggtgtgagatggtatctcattgtggttttgatttgcatttctccgacggccagtgatgatgagcatttttcacrtgtcttctgcatgaatgtcttcttttgagaagtgtctgttcatatcctttgcccactttttgatggggttgtttgattttttcttgtagatttgtttaag

SEQ ID NO: 490032 - DNA, 201 bp, Homo sapiens
tgaagttataatatgttctaaaattggaacatgaactacagaatttaaatttacaggaaaacatttgtattctggtcttttgaaatcatattgtttagcaygttggttttatttaattttagattcaaggggtacatacaccattttgttacgtgggtatattgcatgatgctgagatttgagcttctcttgaacccatca

SEQ ID NO: 490033 - DNA, 201 bp, Homo sapiens
ctcccccatacccccaccccacaacaggccccggtgtgtgatgttccccaccctgtgtccaggtgttctcattgttcaattcccacctatgagggagaacrtgcggtgtttggttttctgtccttgccatagtttgctcagaaacagcttcatccatgtccctacaaaggacatgaactcatcctttttatggctgcatag

SEQ ID NO: 490034 - DNA, 201 bp, Homo sapiens
agtcgtgcatctgcatgtggtttttcgatttttatggtgattcatttttctgtattacagttttacatttaaagaaatgccttggtgtgcagatgtctgaktgtctgtatgcttggctgagagattcttggattcacttaactagagaaagaaaaacatgtttggattgttgattattcttgcgctcctaatatttagaca

SEQ ID NO: 490035 - DNA, 201 bp, Homo sapiens
tgaccttcagtaatgtttcacagtttttcccaaaaggttttgggtatcttttattagatttatttctatatacactatgttgcttttttggatagtattgkttttctaactggttatttctggcatagagaccccctttgttttttccttcgtgaacgtattattctctccttttccagtagatggcagtaaagtacattg

SEQ ID NO: 490036 - DNA, 201 bp, Homo sapiens
ataaaactaccatcttgataccaaccatccagctttaacagatctcaacatttagccatatatatatgtgtgtgtgtgtgtgtatatatatatatatattwtttttttcccctaaggaaagaagagggcagacagagatcccttataccctttcagagtcccatttctgtctttccttctgatagaaccactgtactgaat

SEQ ID NO: 490037 - DNA, 201 bp, Homo sapiens
tttcttgttcctctccctctcccttgtagggaagaattcacttgagttgtaactttacaagtacctgtttgagagaaaatatcttagatttgcaaaccagycaatgaagtagtaaagttaggagagaataaataatcttttggtaaaacaaaatagattgacatgcaagttaaagaatagtgttacagtatttgatttttt

SEQ ID NO: 490038 - DNA, 201 bp, Homo sapiens
agagtacagagaataataaaactaccatcttgataccaaccatccagctttaacagatctcaacatttagccatatatatatgtgtgtgtgtgtgtgtatrtatatatatatattttttttttcccctaaggaaagaagagggcagacagagatcccttataccctttcagagtcccatttctgtctttccttctgataga

SEQ ID NO: 490039 - DNA, 201 bp, Homo sapiens
gcagagtacagagaataataaaactaccatcttgataccaaccatccagctttaacagatctcaacatttagccatatatatatgtgtgtgtgtgtgtgtrtatatatatatatattttttttttcccctaaggaaagaagagggcagacagagatcccttataccctttcagagtcccatttctgtctttccttctgata

SEQ ID NO: 490040 - DNA, 201 bp, Homo sapiens
tcacatttaataggaaggaatctgtgtctctgtggctgttatttcatagaatggatcttctaaacttgccagcctaccaagatccataccagtatttctgsacgaaggatttaaaattttccaaagttaagaattactgcaacagaatatgttgtgaggtggtaaaaatacattaatcaactaacagtggtagctgggatc

SEQ ID NO: 490041 - DNA, 201 bp, Homo sapiens
ggcataggccaagaaaatagctttttgagtccataagatcctgttgagaatcttgattttgatgagcataaaatgggcattgttggacaattttacttcaraatttaaattttaagaatgcagagtacagagaataataaaactaccatcttgataccaaccatccagctttaacagatctcaacatttagccatatatat

SEQ ID NO: 490042 - DNA, 201 bp, Homo sapiens
tgtgaattttagaatagttttttctgaatctgtgaagaatgatgttgggaatttgataggaatagcattgaatctgtagattgctttagacagtatggacrttttaacaatattgattattccatgagcatgggatgtttttccatttgtgtcatatatgatttctttcagcagtgttttttagttcttctagagatcttt

SEQ ID NO: 490043 - DNA, 201 bp, Homo sapiens
gattagacttgcctcctgagaagcctctcacaagctctttagccaaacaagaaggttggaataactctgaattaactatcctgaatgaggaggctgaaatyattatagctcaggaaaatggtggggttttagcttctaagttggagctttgtgattgaatttttaagttttttctctcaaactgcataagagctttaaatt

SEQ ID NO: 490044 - DNA, 201 bp, Homo sapiens
ctcttagaattctgagattttcttcacctccatttctctagcccatcatcccctgtgtgaaagtcagtatcttgagtttaatgattagccacctgtaataytagtttggttaaaataagcctttgtggtttgctgcatatatgaatatggtacaggctgagcatccctaatccagaaattcgaaatctgaaattctccaaa

SEQ ID NO: 490045 - DNA, 201 bp, Homo sapiens
atttattttgggccgggtgtggtggctcacgcctgtagtcccagcactttgggaggccgaggcgggcagatcacgaggtcaggagattgagaccatcctgkctaacatggtgaaaccccatctgtacttaaaaaaaaaaaaaaaaaattgccaggcatggtgatgggcgcctgtagtcccagctacttgggaggctgaggc

SEQ ID NO: 490046 - DNA, 201 bp, Homo sapiens
aactaccatatgatccagcaattcagctactgggtatatatccaaaggtaatgaaatcagtatgtccaggagatacctgtactcttgtgttaattgcagtrctattcatagtagccaagatggaatcagtctaagtgcccatcaatggatgaatgcattttttaaaatgtggtatgtatacacaatggagtattattccac

SEQ ID NO: 490047 - DNA, 201 bp, Homo sapiens
gcctctaagatctggctcgtttgaggaggagcaggacagaatagagacatgaatcatctatgagtttcagcaagtcgtttttggattatactcttaggcarttgtactcgcacatcaggtgaggaagcagctaagtccaaattttgaggagctgcttcaaagaatggtttttccatctaggcagggtaaaaagtcatgctc

SEQ ID NO: 490048 - DNA, 201 bp, Homo sapiens
tttcttgattcattcccttgttctggtggactcttaactctaggaacgtcctaagaaagcatacacggggtagattttataagttctaacatgtttgaaartctgtattctgccctcatacaggttgatggtttgacttgtttagattgaaaattattttctttcagacttttgaaggcattgctttgttgttttctggct

SEQ ID NO: 490049 - DNA, 201 bp, Homo sapiens
agttttaggaatagtagttgatgtgatctcttcttgggagaaagaagggctagagtatgtatgattctgagggactggcgactcttctctcagttccatgsagctggatggaggacaaaggatgtccttttcctttcaaaacatttttctgaaaggcatacataacttctgcttatgttttactaaccagaacctaatcac

SEQ ID NO: 490050 - DNA, 201 bp, Homo sapiens
tattgcttaataattcttcccaaactctaagatttatgaaactcatttgagttctttacttccttttttattttcctctggagacatttatcttacagctytctgtctcctggaggctgaattagttgctgtcaaggcctcctgggactctccttcacctgcttcctggatctcatgccttcctctttcttgattcattcc

SEQ ID NO: 490051 - DNA, 201 bp, Homo sapiens
aaaagtacacaaaatggaaaaagttttcctcaccccaatccttcacatagactccctcttcagaggtaaccagttgttttttttaattaatagtagtaaartaattcgtgaagatgatttttaaaagtcaagagtactacacagctttttgacacaaagcaggctgctgctccactctggacactttttaggtatttttcc

SEQ ID NO: 490052 - DNA, 201 bp, Homo sapiens
tgttttgttttcttccttaaattataaaacccatatatgcatttgattttttaaaagtagttcatgtggtgcaaaagtacacaaaatggaaaaagttttcytcaccccaatccttcacatagactccctcttcagaggtaaccagttgttttttttaattaatagtagtaaagtaattcgtgaagatgatttttaaaagtc

SEQ ID NO: 490053 - DNA, 201 bp, Homo sapiens
gatttgacagaaggtacgtgccctgttttctctgggaaagcagaaagctatggtgactatagtcatccctcagtgtctgcccgagattggtatcaggaccycggatttggtatttaccccacaaagatagcaaaatctgtagatgctcaagtccctaacataaaaggtatttgcctataccctacacacaacctccagtat

SEQ ID NO: 490054 - DNA, 201 bp, Homo sapiens
actaactgtaaactcttcttccttaactacctaaagttaaatggcactaatatttttgcttagttttttctgtgtaattaacagaatttactgttaaccaraactgtgttaacttatggttttacgtaactatattcatttaataagtgacattcacaacaagattctgcaacatactctgaattatgaaaaagaaaatgt

SEQ ID NO: 490055 - DNA, 201 bp, Homo sapiens
acttggtaatttaaaaacaagttcataaaaagaaaatacctgcaggtaatttttatggtcagttatattctataacctgaacactgaaaactaaaaacttytacttacaaactattattatctgagcacagcacagtgctttgctttaattggaaataaaaatgcatgagtgagtggtagtcagttatttgttaaactccc

SEQ ID NO: 490056 - DNA, 201 bp, Homo sapiens
atgtaccttgctaaaaattaggaatctgttacttaggaaaataagataaagttgggggaagcacacgcgcacgcgcgcgcgcgcacacacacacacacacwcaaacacacaacgtaaagccttacaatttttcaaaagtgcctcagttaagtgattttcttgttttgagtaggaaggctctaactatattagtttaaaatg

SEQ ID NO: 490057 - DNA, 201 bp, Homo sapiens
agaagagatgcactcacaggttgtccaagttgtctctaaacagactccattcctttctggtaagaaaagtaagatacagttgaaggacggcaggggagaaygcaaagatgtgtgagtaatcaaggaagaggtgaaaggccgcaccttactttcaaagcacctctctccagaatgcttgcctcacaagctgcctcattcaaa

SEQ ID NO: 490058 - DNA, 201 bp, Homo sapiens
ggggagtgaatgggggtaatgtaccttgctaaaaattaggaatctgttacttaggaaaataagataaagttgggggaagcacacgcgcacgcgcgcgcgcrcacacacacacacacacacaaacacacaacgtaaagccttacaatttttcaaaagtgcctcagttaagtgattttcttgttttgagtaggaaggctctaa

SEQ ID NO: 490059 - DNA, 201 bp, Homo sapiens
aaggaagaggtgaaaggccgcaccttactttcaaagcacctctctccagaatgcttgcctcacaagctgcctcattcaaaggcaaggctctgctgctcccygccttcttgctgtgaccacattcctcaggactctatccccacagccagctgaccccataagctgatgctagacagtagtcctccttacatgtcagtggtt

SEQ ID NO: 490060 - DNA, 201 bp, Homo sapiens
gcttctaaatttgctgttgagaagtctgttgccattctgattcttagtcctttgcatatgaccagtatttgctaacttgaaatttttaggatcttccccccttatcttcagtgttctgacatttcacaatgaatacttgtgccttcagttcagagctgtgtgcttgaagtattcctgtgttcatttctttccctccatttt

SEQ ID NO: 490061 - DNA, 201 bp, Homo sapiens
ttcaacagcagctggctgcttgtaagccttcaattaatattactacaaatgaggtagcaaatgtgtcactttaacataaacttgaatacttctgaacaagktactctttttgaaaactatttattgtggagaaatttgaccataaaataaaatataatgaatttccatatacccatcaccccatcccaacaagccattagc

SEQ ID NO: 490062 - DNA, 201 bp, Homo sapiens
tacaggttcctgccaccacacccagcaaatttttgtatttttagtagagatggggttccccatgttggtcaggctggtcttgaactcctaacctcaagcaktccatccgcctcggcctcccaaaatgctgggattacaggcatgagccactgcacccggcctattgttgtacgtcataaatctacatgttcaaactaaaac

SEQ ID NO: 490063 - DNA, 201 bp, Homo sapiens
tgaatttccatatacccatcaccccatcccaacaagccattagcccatggctaatcctgccccatcctcacccccatacactccccaccctgtgtactttygaagaacatctcagacattgtatcatttcagacataactatcgtggtattttacatatattcagtattttagatgcattattgctgaaaatcttaaaccc

SEQ ID NO: 490064 - DNA, 201 bp, Homo sapiens
tcttttcttccttcttttcttttctccttccttcctttctttctttttcttctttttagacagagtcttgcactgttgcccaggctggagtgcagtggcgygatctcggctcactgcaagctctgcctcctgggttcacgccattctcctgcctcagcctcccaagtagctgggactacaggcgcctgccaccatgcccgg

SEQ ID NO: 490065 - DNA, 201 bp, Homo sapiens
caacaagccattagcccatggctaatcctgccccatcctcacccccatacactccccaccctgtgtacttttgaagaacatctcagacattgtatcatttyagacataactatcgtggtattttacatatattcagtattttagatgcattattgctgaaaatcttaaaccctgataggatggaaaagggaagtaatagag

SEQ ID NO: 490066 - DNA, 201 bp, Homo sapiens
cttccttcttttcttttctccttccttcctttctttctttttcttctttttagacagagtcttgcactgttgcccaggctggagtgcagtggcgtgatctyggctcactgcaagctctgcctcctgggttcacgccattctcctgcctcagcctcccaagtagctgggactacaggcgcctgccaccatgcccggctaatt

SEQ ID NO: 490067 - DNA, 201 bp, Homo sapiens
gacaagtattgagttccttagaaacctggactaggagaagcttttatttccctttagtttttcactgtgtgttttgcacagtaaagaatttctttctacaratttattcaaaattcgccagctataattctagtcatgttcttgtattctatccatggtacagtatcctttatataataaccttgtttggtaactgaatta

SEQ ID NO: 490068 - DNA, 201 bp, Homo sapiens
ctccatctggaagactctaaagtttctgagggcagggctcatgtctcactcatttttgtgcttcctcccgcaaagcccagtggcaaggtgctgtgtttgcrgaaagaaagctggagatgagctgacccagcacacctgtgtactcgtgtctcacagtgtgtccaacgatcccacagaagacaatcccactggcaacaccga

SEQ ID NO: 490069 - DNA, 201 bp, Homo sapiens
ttccttcttttcttttctccttccttcctttctttctttttcttctttttagacagagtcttgcactgttgcccaggctggagtgcagtggcgtgatctcygctcactgcaagctctgcctcctgggttcacgccattctcctgcctcagcctcccaagtagctgggactacaggcgcctgccaccatgcccggctaattt

SEQ ID NO: 490070 - DNA, 201 bp, Homo sapiens
ttttttgtttagttgagacggagtctcacgctatagcccaggctggagcgcagtggtgcgatctcggctcactgcaacctccgcctctcaggttcaagccwttgtcctgcctcagcctcctgagtagctgagattacaggcacgtgccaccgcacccagctaatttttgcatttttagtagagacagggtttcactatgtt

SEQ ID NO: 490071 - DNA, 201 bp, Homo sapiens
ctccttccttcctttctttctttttcttctttttagacagagtcttgcactgttgcccaggctggagtgcagtggcgtgatctcggctcactgcaagctcygcctcctgggttcacgccattctcctgcctcagcctcccaagtagctgggactacaggcgcctgccaccatgcccggctaattttttatacttttagtag

SEQ ID NO: 490072 - DNA, 201 bp, Homo sapiens
ggtctttctcattctttctctttttttgtactcattgaccacccccaattcctcctcatcccccactacccttcccagcctttggtaaccatccttatatkctctacccccatgagttcaatcattttaatttttttttttttttttttttgagacggagtctcgctctgttgctcaggctggagtgcagtggcgcgatct

SEQ ID NO: 490073 - DNA, 201 bp, Homo sapiens
ttaggctgggtgcggtggctcacccctgtaatcccagcactttgggaggtcgaggtgggcgatcacctgaggtcaggagttcaagaccagcctggccaacrtggcaaaactctgtctctactaaaaatacaaaaattagccacgcatggtggcacatgcctataatcccagttacttgggaggctgaggcaggagaattgc

SEQ ID NO: 490074 - DNA, 201 bp, Homo sapiens
cttctttttagacagagtcttgcactgttgcccaggctggagtgcagtggcgtgatctcggctcactgcaagctctgcctcctgggttcacgccattctcytgcctcagcctcccaagtagctgggactacaggcgcctgccaccatgcccggctaattttttatacttttagtagagacagggtttcaccgtgttggcca

SEQ ID NO: 490075 - DNA, 201 bp, Homo sapiens
gaagttggaaaccatcattctgagcaaactatcacaaggatagaaaaccaaacaccacatgttctcactcataggtgggaattgaacaatgagaacacttrgacacagggtggggaacatcacacaccagggcctgtcgtgggctggggggaagggggagggatagcattaggagatatacctaatgtaaaagatgagtta

SEQ ID NO: 490076 - DNA, 201 bp, Homo sapiens
catgcccggctaattttttatacttttagtagagacagggtttcaccgtgttggccacgatggtctcaatctcctgaccttgtgatccgccctcctcggcstcccaaagtgctgggattacaggcgtgagccactgtgccctgccattttcttttctttctcttctcttctcttcttctttccttccttcctcccttcctt

SEQ ID NO: 490077 - DNA, 201 bp, Homo sapiens
tgcggtggctcacccctgtaatcccagcactttgggaggtcgaggtgggcgatcacctgaggtcaggagttcaagaccagcctggccaacgtggcaaaacyctgtctctactaaaaatacaaaaattagccacgcatggtggcacatgcctataatcccagttacttgggaggctgaggcaggagaattgcttgaacccag

SEQ ID NO: 490078 - DNA, 201 bp, Homo sapiens
aggcgtgagccactgtgccctgccattttcttttctttctcttctcttctcttcttctttccttccttcctcccttccttccttccttccttccttccttycttccttccttcctttctttctttctttctctctctctcttttgtttctttctgtctctctctctttctttctttctgtctctctctcttccttcctccc

SEQ ID NO: 490079 - DNA, 201 bp, Homo sapiens
atattgagaagtgaatcacttaaagcttccctgccctgtgtttttaattaaatagactactcagaccatcagaattttttttttttttttttttttttgaratggagtcttgctctgtcaccaggctggagtgcagtggcgcgacctcggctcactgcaacctctgcccccgggttcaagtgattcccctgcctcagcctc

SEQ ID NO: 490080 - DNA, 201 bp, Homo sapiens
attttagtggagatgggatttcaccatgttggccaggatggtcttgatctcctgagctcgtgatccacccgccttggcctcccaaaatgctgggattacargcgtgagccactgcgcccgacccagaattttttaaagatagcatatgatgtggtctgtgtgtggattcttgcttatttagtcataaacaggaattacaaa

SEQ ID NO: 490081 - DNA, 201 bp, Homo sapiens
tcatatctcatgagacttatgcaccatcacaagaacagcatgggaaagacctgcccacatgattcagttacctcccactgggtccctcccacaacacgtgkcaattcaagataagatttaggtgagatcatagccaaaccacgtctgtgtgtgtgtgtgtgtgtgtgtgtgtggtgtgtgtgtgtgtggtgtgtgtgtgcg

SEQ ID NO: 490082 - DNA, 201 bp, Homo sapiens
cgccagcctggcgatgaagcgagactccatctcaaaaaacaaacaaacaaaaatgttgccaggcgtggtggctcacatctgtaatcctagcactttgggargccaaggcgggtggatcacctgaggtctggagttcgagaccagcctgggcaacatggtgaaaccctggctctactaaaaatacaaaaattagccaagcat

SEQ ID NO: 490083 - DNA, 201 bp, Homo sapiens
aagacctgcccacatgattcagttacctcccactgggtccctcccacaacacgtggcaattcaagataagatttaggtgagatcatagccaaaccacgtckgtgtgtgtgtgtgtgtgtgtgtgtgtggtgtgtgtgtgtgtggtgtgtgtgtgcgtgcgcgtgtgcacgtggcttaaagtaacaaatttattatcttact

SEQ ID NO: 490084 - DNA, 201 bp, Homo sapiens
ggctaaaatcgaagtgttggcaagtgtgtattccttctggtcttgccttttccagcttctagaggctacttgcattccttggagcaagtccccttcctctrtcttcaaacccagcaacatagcatcttgagatctctttctttttctctctttttccatcatcttgtctccttctctgactctgactctcctgccttgttt

SEQ ID NO: 490085 - DNA, 201 bp, Homo sapiens
gggtttatagagagcctcaacttacaatattgtcattgctaaattagaagtggatacaggcatatctaaaatattgtacttcattaaaaaaggtttttatkgtagtaaaatacatataaagtttgacatttaaactattgttttgagagtacatttcgttgacattaagtatattcatgttgtataaccattaccacaatt

SEQ ID NO: 490086 - DNA, 201 bp, Homo sapiens
cttttaatactattttaaacttacaaaaggcctgagaaatcattcagtcttttgaccccagacaagtaattccaagtgatttttcctgacatacattattwagagcacagtagtttttccttggatcattttgaagtagtaaatgaaataagaaagtactattcaaaatatgtttttactgaaagttacaaaaaaaaaagg

SEQ ID NO: 490087 - DNA, 201 bp, Homo sapiens
atgtttggggtactagctcttacattttctaattcttctacagagataagtaataacattatagtaagacctgtcttttgcagggtttgtatttatatgtktactttatttttgagctggttaaggagaaaggttttataagtaaaaagtataaaatatagaagtcagttaattttttgttatattttaatagcagtgatt

SEQ ID NO: 490088 - DNA, 201 bp, Homo sapiens
ggtgggccctaatccagtatgacctcactgtaactaactacatctgtaaaggtcacattctgaggttctgtgtagacatgaattttggggagactctgctrtttttcaatcaagaaaacaatggtaaatgtggtagtaagaaaatttaaaacagtgacttgggtatgtattaatgtgtagcatatatttattcctgcttac

SEQ ID NO: 490089 - DNA, 201 bp, Homo sapiens
atagtattcttaactctgtactatataacaggcaaatttcatggcaatcagaaatttttttaaaaagtaaaagttgtatcatcttaaggatattgcatacrttgcatactaatgtatgtagtatgctaataagtattagctttttgtaaaaatttgttatcttaatttggggggaacttttggaagatgacttcgtgtgat

SEQ ID NO: 490090 - DNA, 201 bp, Homo sapiens
gtgaaaccccatctctactaaaaatacaaaaattagccagatgtggtggaggcctgtagtcccaggtacttgggaggctgaggcaggagaattgcttgaayctgggaggcagaggttgcagtgagctgagaccccgccactgcactccagcctaggtgataaaataaatgatttgagctgccatgtaaattcttgttgcat

SEQ ID NO: 490091 - DNA, 201 bp, Homo sapiens
aaccccatctctactaaaaatacaaaaattagccagatgtggtggaggcctgtagtcccaggtacttgggaggctgaggcaggagaattgcttgaacctgrgaggcagaggttgcagtgagctgagaccccgccactgcactccagcctaggtgataaaataaatgatttgagctgccatgtaaattcttgttgcataatt

SEQ ID NO: 490092 - DNA, 201 bp, Homo sapiens
cctactttttaataggattgttagatttttttggttgttgaatcgtttgagttccttgtgtagtctggatattagtcccctgttggatgaataatttgcaratattttctgtcattcaacaggattggttgtctcttcaatctgttatttcttttgccatgcagaagctttttagtttaattgagtcccatttgtctgttt

SEQ ID NO: 490093 - DNA, 201 bp, Homo sapiens
gtcacttgacgagcaacagggtgcgtgcaacaggagatgcgctatgcccatccatccatagctttattgcaatgcatatactaagctctctcacacctttygtagcatttcattttgattatggtcttatagtcagtattttgtggaccaaattacaataggtggtattgtacataaaaggtctttttggcctatacagat

SEQ ID NO: 490094 - DNA, 201 bp, Homo sapiens
tttttcttagctctatgtgtttattgttagttatctatttagcacaagggtcatggcatccaataattgtaggttatagataatttacataaggcaagttrtaggaaggagaggagcatcaaaataaatcaggattctatgggttcacacagaacaatcattccaagacactcacctgtgattcttaccttgggccaggta

SEQ ID NO: 490095 - DNA, 201 bp, Homo sapiens
ggaagggggagggatagcattaggagatatacctaatgtaaaagatgagttaatgggtgcagcataccaacatgggacatgtatacataacgtaacaaacytgcacattgtgcacatgtaccctagaacttaaaagtataataaaaataaataaataaatataaaaataaaagattaaaaaaactcatcaatgaaactaat

SEQ ID NO: 490096 - DNA, 201 bp, Homo sapiens
gtatctttatagttttgggtcttacacttaagtctttaatccaccttgagttgatttttatgtattagtgagagataagagttcaattgcattcttctgcrtatggatatctaattttctcagcaccattgattgaagagggtttcgtttccacagtgtatgttcttgtcggctttgtcaaacatcagttggctgcaagta

SEQ ID NO: 490097 - DNA, 201 bp, Homo sapiens
tcatatgcctttgattctgcttcataaaattaagtatgtttgtatctttctcaattgtgttagcttataatagctaatgatcttctttctattctttgggtctaaagcaaaatacaaaagacaatttcttttatctgtgaattatttcattgtcttataaagctaaattggtacaatttttggaaagttcagcaacatata

SEQ ID NO: 490098 - DNA, 201 bp, Homo sapiens
catatgcctttgattctgcttcataaaattaagtatgtttgtatctttctcaattgtgttagcttataatagctaatgatcttctttctattctttgggtctaaagcaaaatacaaaagacaatttcttttatctgtgaattatttcattgtcttataaagctaaattggtacaatttttggaaagttcagcaacatatat

SEQ ID NO: 490099 - DNA, 201 bp, Homo sapiens
aggttttaaaattttgacaaaaaagtttccaatactttaatattttaatgtgttttaattgctgtcatattgttaatttgaatactttgtttcttaactcstataactcaatgagattaccaatcctttgaccaaaatgaaatgagtttttaaaaatttatcttttttactgaagttagaatctttttacaagcgaaaatc

SEQ ID NO: 490100 - DNA, 201 bp, Homo sapiens
tctagtctagtctagtcagatagatataggccatttataggttagaaacaagtggagagaccaggtgtggtagctcatgcctgtaatcccagcactttggraggccgaggtgggtggattacctgaggtcaggagtttgagaccagcctggacaacatggtgaaactccatttctaccaaaataaatttgttgtgcgtggt

SEQ ID NO: 490101 - DNA, 201 bp, Homo sapiens
ccaccaatgatcctttgaatttctgtattatcagttgtaatgtctcctctttcatttctgattttatttatttgggtcttttctcttctgttcttagttarcatggctgaaagtttctaaattctttctctgtgttatcttgaatttctttgagtttcctcaaacagcttttttgaattacctgtctgaaaggtcacatat

SEQ ID NO: 490102 - DNA, 201 bp, Homo sapiens
gacctagacttagtaattatcaagattttgccatattttcttttctattttattttcttcccccatccaccttgctgaagatccaccttgctgaagatccrccttgctgaagatatattattttaccttcatatgtaagcctaaaaagcgattgacattttcttatataaccaaaatgccattaggtaatttaataatatt

SEQ ID NO: 490103 - DNA, 201 bp, Homo sapiens
gagagcagtacacatgataatgtactctctcttttttttttttcttttttgagatggagtctcgctttgtcgcccaagctggagtgcagtggtgctatctyggctcactgcaacctccacctcccgggttcaagtgattctcttgcctcagcctcccaagtagctgggattacaggcatgtgccactatgcccggctaatt

SEQ ID NO: 490104 - DNA, 201 bp, Homo sapiens
atgatcctttgaatttctgtattatcagttgtaatgtctcctctttcatttctgattttatttatttgggtcttttctcttctgttcttagttaacatggytgaaagtttctaaattctttctctgtgttatcttgaatttctttgagtttcctcaaacagcttttttgaattacctgtctgaaaggtcacatatctctgt

SEQ ID NO: 490105 - DNA, 201 bp, Homo sapiens
tactctctcttttttttttttcttttttgagatggagtctcgctttgtcgcccaagctggagtgcagtggtgctatcttggctcactgcaacctccacctyccgggttcaagtgattctcttgcctcagcctcccaagtagctgggattacaggcatgtgccactatgcccggctaattttttgtatttttggtagagatg

SEQ ID NO: 490106 - DNA, 201 bp, Homo sapiens
aagacatccacacatagtggtgaactgatttttaatgcgttttaaataaaaggcattgaaaaatattaataattgtaattactaaaagtatttctctttgygattctcttatctgtgtttccagaccggttggagggtgacagatcagaaggctctggtcaagagaatgaaaatgaggatgaggaataataaactcttttt

SEQ ID NO: 490107 - DNA, 201 bp, Homo sapiens
atttatttgggtcttttctcttctgttcttagttaacatggctgaaagtttctaaattctttctctgtgttatcttgaatttctttgagtttcctcaaacrgcttttttgaattacctgtctgaaaggtcacatatctctgtctctccaccctggtgccttatttagttcctttggtgaggtcatgttttcctggatggtc

SEQ ID NO: 490108 - DNA, 201 bp, Homo sapiens
ctaaaaatacaaaaattagccaagcatagtggctggcaggcacctgtaatcccagctactcgggaggctgaggcgggagaatcgcttgaactcaggaggcrgaggttgtagtgagctgagatcgtgctgcttcacttcagcctgggcaaaagcgtgaaactctgtctcaaaaaaaaaaccaaaataataatttttaattta

SEQ ID NO: 490109 - DNA, 201 bp, Homo sapiens
ctggagtgcagtggtgctatcttggctcactgcaacctccacctcccgggttcaagtgattctcttgcctcagcctcccaagtagctgggattacaggcaygtgccactatgcccggctaattttttgtatttttggtagagatgggatttcaccgtgtcagccaggatggtcttgatctcctgaccttgtgatccaccca

SEQ ID NO: 490110 - DNA, 201 bp, Homo sapiens
ctccttgctcaagtgatcctctcacctcagcctccctagtagctggggctacaggcacgtgccaccacacccaactaatttttgtatttttgtggagatgrggttttgccatgttgtccaggctggtcttgaactcctgggctcaagtgatccacctgtctgggcctcccaaagtgctgggattacaggcatgagcctggc

SEQ ID NO: 490111 - DNA, 201 bp, Homo sapiens
atctgagaattaagttagttttacttcttttctagtctggattccttttatttcgttttcttgacttatttcactggttagtattctattataagattgamtagaaggagtggaatcaggcatccttgtcttgttctgatcttagaaggaaaacagggtctccctctgtttcccagattggagtgcagtggcacaatcata

SEQ ID NO: 490112 - DNA, 201 bp, Homo sapiens
tgggtgtggtggtgcatgcctgtagtcccagctaatagggaggctaaggcaggaggattgctagagcacaggagttcaaggatccagtgagctatgattgyaccactgcactccagcctgggtgacagagtgagacccccatctctttaaaaaaaaaaaaaaaaaagaacagaaaaaaggcaggtgattgcctttatatat

SEQ ID NO: 490113 - DNA, 201 bp, Homo sapiens
cacacccaactaatttttgtatttttgtggagatggggttttgccatgttgtccaggctggtcttgaactcctgggctcaagtgatccacctgtctgggcytcccaaagtgctgggattacaggcatgagcctggccttgatttttcaaataaaatcattcacaaataaataaaaaacttctgtcagactatgtattctga

SEQ ID NO: 490114 - DNA, 201 bp, Homo sapiens
tgtacacttaaaaaatgtatattttgctgttttttagttgttacaagcatgatgataaacctggtccatgtgctgacatgttgactataagtggacatttwttttttttttaatttagatgtgctcacatactataaaactgacgcatcttaagtgttcaattcggtggtttttagtgtatttgtaaagttgtggagccat

SEQ ID NO: 490115 - DNA, 201 bp, Homo sapiens
ttttgtttctgtttttttttttttcccttttgagatggagtctcactctgccacccaggctggagtagagtggttcaatctcagctcactgctacctccgyctcccaggttcaagtgattctcctgcctcagcctcctgagtagctgggatgccaccacacccagctaatttttgtgttttagtagagatggggtttcacc

SEQ ID NO: 490116 - DNA, 201 bp, Homo sapiens
aattagccggatgtggtggcccgtgcctgtaatcctagctactcaggaggctgagggaggagaatcgcttgaacctgggaggcggaggttacagtgagccragattgcgccattgcactccagcctgggcagcagagtgagactctgtatccaaaaaaaaaaaaaaaaaagattattccttatggacctgaggtgaatttc

SEQ ID NO: 490117 - DNA, 201 bp, Homo sapiens
tgactcacagagtccatcttatattccattgctaaagaccttgttttcaactggttgcaattaaagaagcataatgtattatatctcttgagaatggctgsgggagaatggggtgacttttttaagcttcaaaagccatgaagagtcaagcaatgcaggcactaggggtaatgtttttacaatgggctgaaggtggcaggg

SEQ ID NO: 490118 - DNA, 201 bp, Homo sapiens
tacctccgcctcccaggttcaagtgattctcctgcctcagcctcctgagtagctgggatgccaccacacccagctaatttttgtgttttagtagagatggvgtttcaccatgttggccaggctggtctctaattcctgacctcaagtgatccacccaccttggcctcccagagtgctgggattacaggtgtgagtcaccat

SEQ ID NO: 490119 - DNA, 201 bp, Homo sapiens
atgtagttggtgctattattacccccatttttcagatgaggaaactgaggcaaagggtggttaagaatcatgtctaaggccgggcgtggtggctcacgccygtaatcccagtactttgggaggctgaggtgggcgaatcacgaggtcaggagatcgaggccatcctggctaacacagtgaaaccccgtctctatgaaaaac

SEQ ID NO: 490120 - DNA, 201 bp, Homo sapiens
ccctttaaaagccaaggtaaatttaaaacctaaaattgataattaaaggtattctccgtaaccctgtaacactctaataccactttgttgttagtgtaaayaagggcgtatcccgaaagcactgaggccttcctatcaaaaatccttaacccagtaacccacggatggcccagatgcattcaatctgtagcagcagctgct

SEQ ID NO: 490121 - DNA, 201 bp, Homo sapiens
ccaccacacccagctaatttttgtgttttagtagagatggggtttcaccatgttggccaggctggtctctaattcctgacctcaagtgatccacccacctyggcctcccagagtgctgggattacaggtgtgagtcaccatgcctggaccttttgtggttttaattgagcatttcatatagttttttttttctccttcctt

SEQ ID NO: 490122 - DNA, 201 bp, Homo sapiens
tttcagatgaggaaactgaggcaaagggtggttaagaatcatgtctaaggccgggcgtggtggctcacgcctgtaatcccagtactttgggaggctgaggygggcgaatcacgaggtcaggagatcgaggccatcctggctaacacagtgaaaccccgtctctatgaaaaacacaaaaaattagccagctgtggtggcggg

SEQ ID NO: 490123 - DNA, 201 bp, Homo sapiens
cctcccgagtagctgggattacaggcgcatgccaccatggccggctaatttttgtatttttagtagagacggggtttcgccatattggtcaggctggtctygaacctctgacatcaggtgatccacccgctttggcctcccaaagtgctgggattatagacgtgagccaccgcgcccggccttccctggagtttttaacat

SEQ ID NO: 490124 - DNA, 201 bp, Homo sapiens
ttgggaggctgaggtgggagaatggcgtgaacccaggaagcggagcttgcagtgagccgagattgcaccactgcgctccagcctgggtgacagagcaagaytccgtctcaaaaaaaaaaaaaagaaaagaaacatgtctaaggttgcacacagctagtaagcgttagaaacgtgtctcaaacccaagaggtctggctctgg

SEQ ID NO: 490125 - DNA, 201 bp, Homo sapiens
ttttttttgtggcaaggtctcactctgtcacccaggctggaaggctggagtacagtggtgcgatctcggcttactgcaacctctgcctcctgcgttcaagygattctcctgcctcagcctcccaaggatctgggattacaggtgtgtgccaccatgctcggctaatttttatgtttttggtagagacagggtttcaccatg

SEQ ID NO: 490126 - DNA, 201 bp, Homo sapiens
ggaggctgaggtgggagaatggcgtgaacccaggaagcggagcttgcagtgagccgagattgcaccactgcgctccagcctgggtgacagagcaagactcygtctcaaaaaaaaaaaaaagaaaagaaacatgtctaaggttgcacacagctagtaagcgttagaaacgtgtctcaaacccaagaggtctggctctggcat

SEQ ID NO: 490127 - DNA, 201 bp, Homo sapiens
tttgtggcaaggtctcactctgtcacccaggctggaaggctggagtacagtggtgcgatctcggcttactgcaacctctgcctcctgcgttcaagcgattmtcctgcctcagcctcccaaggatctgggattacaggtgtgtgccaccatgctcggctaatttttatgtttttggtagagacagggtttcaccatgttggc

SEQ ID NO: 490128 - DNA, 201 bp, Homo sapiens
tcctgcgttcaagcgattctcctgcctcagcctcccaaggatctgggattacaggtgtgtgccaccatgctcggctaatttttatgtttttggtagagacrgggtttcaccatgttggccaggctggtcttgaactcctgacctcaagtgatctgcccacctcatcctcccaaagtgttgggattacaggcatgagccacc

SEQ ID NO: 490129 - DNA, 201 bp, Homo sapiens
caagcgattctcctgcctcagcctcccaaggatctgggattacaggtgtgtgccaccatgctcggctaatttttatgtttttggtagagacagggtttcamcatgttggccaggctggtcttgaactcctgacctcaagtgatctgcccacctcatcctcccaaagtgttgggattacaggcatgagccaccacgcccagc

SEQ ID NO: 490130 - DNA, 201 bp, Homo sapiens
aattagctgagcgtggtggcacatgcctgtaatcccagctactcaggagactgaggcagcagaatcgcttgaacccgggaggcggaggttgtggtgagccraaatcacgccatcgcactccagcctgggcaacaaaagtgaaactccgtctcagaaaaaacaacaacaacaacaacaacaacaaaaaccccatgtccttta

SEQ ID NO: 490131 - DNA, 201 bp, Homo sapiens
gcttcacttcagcctgggcaaaagcgtgaaactctgtctcaaaaaaaaaaccaaaataataatttttaatttagactattgacattcaaagggattactgktatagttggattaatatttcctatatttgttaactgtttctgctttttgtctttgttccttgttcctatttttgttttccattcttctgccttttgtgtt

SEQ ID NO: 490132 - DNA, 201 bp, Homo sapiens
caattaaagaagcataatgtattatatctcttgagaatggctgggggagaatggggtgacttttttaagcttcaaaagccatgaagagtcaagcaatgcargcactaggggtaatgtttttacaatgggctgaaggtggcagggtgcattctgatacctctccaattcactctatgaaggcagctacccactggacaggcc

SEQ ID NO: 490133 - DNA, 201 bp, Homo sapiens
tttttgagacagagtcttgctctgtcgcgtaggctgggtgcagtgacacgatcttggctcactgaaacctccacctcttgggttcaagcagttctcctgtygggaggctgaggcctcccgagtagctgggattacaggcgcatgccaccatggccggctaatttttgtatttttagtagagacggggtttcgccatattgg

SEQ ID NO: 490134 - DNA, 201 bp, Homo sapiens
ttgttccatggagatttcaagccaacttagtgttggtgttttgacatttctcttttttcttagcactttaaaaaagcacaacagatattccccactcaccyctctattgtatatctgttatggggatatactgtagtttattcaaccagtctcctgtgttttactgttataaataactcagtaaataatctttgacatttt

SEQ ID NO: 490135 - DNA, 201 bp, Homo sapiens
agtattatggtgctcaaagtaaggcctgaagaaaccctttatagaaggtaccattaagacccaggagatggcattagtaaagctcaaggagtgggtaatgwcatgaggctttctccttcatctctggagcttctgaggttcttggcctttcctgatcaatgtttgtacagtctccccactccccaccccactgcctattgt

SEQ ID NO: 490136 - DNA, 201 bp, Homo sapiens
tagatctttatcatcttcataatacttagatgatttatatgttttagggattcttttagcatttagatctgtcacaaagttggttcccaatagcctcattsacccaaggaaacccagatgctgaactagactagcagaatcttttagaagagagataatcagtgacaacaaacagcctggaactgatcccacttcatgcat

SEQ ID NO: 490137 - DNA, 201 bp, Homo sapiens
tctctgtcttttctttctttctgccgcgtagtcccattcctttggctcatctagcagcacacctttcttccactttcataccctcaaagcacagctttttyaattgtccatatcccagggacagttctgcttatagtcaatctgcaacttaaccacaatgttttctactaggcagagccacaggaagagaagtctctcttc

SEQ ID NO: 490138 - DNA, 201 bp, Homo sapiens
caagtagtttaagaaactggatttttatcagtttacaaacagtggctaggttctagtgaaatgcttcatgatatacaattcgataagctgggataacataygagttctaattaggttaggattatgttctgattttcattggcttttagcttctgagttcatatatagaggaagtatacagctgtttttatatctgaaaac

SEQ ID NO: 490139 - DNA, 201 bp, Homo sapiens
catcaagatattactaaggaactcagagtctgataaaacactaggccaggagttcaccataacagagtaaaccgttgtcttcatgaatagtttgaattaayaatgcaaacaagatggcaggcagaggttgacaaggggactaaagttttcagttcactctaagtgcttcagcatccatcattaggagacaaattattgaga

SEQ ID NO: 490140 - DNA, 201 bp, Homo sapiens
aaaaaattattatcataagcctttatagggctttttaaaattttaaaacaccaatgattcattatataggaaaaaaagctttttgaccatgagtcaaataytacctgtttttatagtttgattatttttagatcctatgattttgtgggaacattaatttattgaaaataagagttttgaaacacttagttttttaaaaaa

SEQ ID NO: 490141 - DNA, 201 bp, Homo sapiens
gaggctgaggtgggagaatggcgtgaacccaggaagcggagcttgcagtgagccgagattgcaccactgcgctccagcctgggtgacagagcaagactccrtctcaaaaaaaaaaaaaagaaaagaaacatgtctaaggttgcacacagctagtaagcgttagaaacgtgtctcaaacccaagaggtctggctctggcatc

SEQ ID NO: 490142 - DNA, 201 bp, Homo sapiens
gctaattataaatcatttatctactcatacaacaatctcttaatgactatctttgggttttatagatgctggcttttaaaaatacttggataggccaggcrtggtggcttacgcctataatcccagcactttgggaggctgaggtgggaggatcacctgaggtcaggagttagagaccagcctggccaacatggtaaaacc

SEQ ID NO: 490143 - DNA, 201 bp, Homo sapiens
ttattatattgtattatatttgtttgcatgttgtgcttagatggcaacttctttgagataatgacaatttcttttttctttttgcatcctcaacacttaayattatttatttacctctcatatagttggagcccactaagtcttagtaaaacgagtgtataaatctgtatattcgatacctcagacagggttatgggtcag

SEQ ID NO: 490144 - DNA, 201 bp, Homo sapiens
tgaggtgggagaatggcgtgaacccaggaagcggagcttgcagtgagccgagattgcaccactgcgctccagcctgggtgacagagcaagactccgtctcaaaaaaaaaaaaaagaaaagaaacatgtctaaggttgcacacagctagtaagcgttagaaacgtgtctcaaacccaagaggtctggctctggcatccgtga

SEQ ID NO: 490145 - DNA, 201 bp, Homo sapiens
tgaagagaaagaggaagtaaaagctgaaaaacacaggaatgaagtcagtggcaagaccagccggcgccactgatgaccaggtctgaggttaaaagattaacccccattctaaccacatgtgctatctacagatctcaatctattatgaccctttcacgtggaacccctcacagctctaagcccttaaaagggccaggaact

SEQ ID NO: 490146 - DNA, 201 bp, Homo sapiens
ctggaagaggggagtgtattttgagaggggcatctgaaatctagagatttgttcaaaggaacgggcccccaattttttactcactaaattttaattagttkatttaataagggaatgcttttcaatttatgagtgactgatgaagcagtgaggctcctgcttttgttactgaaattataaataaacctcttaagtggaggt

SEQ ID NO: 490147 - DNA, 201 bp, Homo sapiens
atctggaatctacaaaaaagttgtggattccctgacctatgaacatggaaaattttgcattggtttaaaaactgtggttgagaaatttgccttttctatasaagtctagtaagttggagtgcagaatgtggggagatagttaaactttattattttttcagaatatttcaccatatgttttatttcgaccttactttggtt

SEQ ID NO: 490148 - DNA, 201 bp, Homo sapiens
tacataaaagtgttcaaatctaatccagaggactgaagttcattgacctctttaaaattcattgactctggaatgtgaggaatgatggcagagactggaartaagtcagaaaattatgacattttggttaaaattgtagttgtcttcaaatatttgggctgaactgtgaaagttgtggggtaagtggtggacgtgggctaa

SEQ ID NO: 490149 - DNA, 201 bp, Homo sapiens
agcgattctcctgcctcagcctcccaaggatctgggattacaggtgtgtgccaccatgctcggctaatttttatgtttttggtagagacagggtttcaccrtgttggccaggctggtcttgaactcctgacctcaagtgatctgcccacctcatcctcccaaagtgttgggattacaggcatgagccaccacgcccagccc

SEQ ID NO: 490150 - DNA, 201 bp, Homo sapiens
tttttttttttttttttttttttttttttttttgagacggagtttcgctcttgttgcccaggctgaagtgcaatggcatgatcttggctcaccacaacctytgcctcctgggttcaagtaattctcctgtcagcctcctgagtagctgggattataggtgcataccaccactcctggctaattttgtattttttttaggag

SEQ ID NO: 490151 - DNA, 201 bp, Homo sapiens
ctctagtagcatttctgaaaaggatcttttttttttttttttttttttgagacggagtctcgctctgtcgcccaggccggactgcggactgcagtggcgcratctcggctcactgcaagctccgcctcccgggttcacgccattctcctgcctcagcctcccgagtagctgggactacaggcgcccgccaccgcgcccggc

SEQ ID NO: 490152 - DNA, 201 bp, Homo sapiens
ggggggctgagggaggagactgttgctgatctttggatgttctggttagtctaagaaggagagtatgaggcgagctccggcccgggtgcggccgggcttcrggggcccaggcgccgctgctgccaccgccatctaacgctgcgccctggaggcccggcgcgcggatggtgccggtgcggctcgggtgttgaaacgggtgtc

SEQ ID NO: 490153 - DNA, 201 bp, Homo sapiens
gaagttcattgacctctttaaaattcattgactctggaatgtgaggaatgatggcagagactggaaataagtcagaaaattatgacattttggttaaaatkgtagttgtcttcaaatatttgggctgaactgtgaaagttgtggggtaagtggtggacgtgggctaagtgggggacatgggtgtgtatgcaaggtgtaatg

SEQ ID NO: 490154 - DNA, 201 bp, Homo sapiens
cgattctcctgcctcagcctcccaaggatctgggattacaggtgtgtgccaccatgctcggctaatttttatgtttttggtagagacagggtttcaccatrttggccaggctggtcttgaactcctgacctcaagtgatctgcccacctcatcctcccaaagtgttgggattacaggcatgagccaccacgcccagcccaa

SEQ ID NO: 490155 - DNA, 201 bp, Homo sapiens
caggctgaagtgcaatggcatgatcttggctcaccacaacctctgcctcctgggttcaagtaattctcctgtcagcctcctgagtagctgggattataggkgcataccaccactcctggctaattttgtattttttttaggagagatggggtttctccatgttggtcaggctggtctcgaactcccgacctcaggtgatct

SEQ ID NO: 490156 - DNA, 201 bp, Homo sapiens
gcaatctcggctcactgcaagctccgcctcccgggttcacgccattctcctgcctcagcctcccgagtagctgggactacaggcgcccgccaccgcgcccrgctaattttttgtatttttttagtagagacggggtttcaccttgttagccaggatggtctcgatcttctgacctcatgatccacccgcctcggcctccca

SEQ ID NO: 490157 - DNA, 201 bp, Homo sapiens
aactaagataggactgagcagaactgagcagggcgtagctctattcttccctctcctgcccccagttcactggctcaactttgacttctttagctaccaarcttgtaagattgaaagactgagctaatgaaaacagaggatgctcagttaaatctgaattttaaataaacaattttttagtataaatatattccaaacatt

SEQ ID NO: 490158 - DNA, 201 bp, Homo sapiens
ttctcctgcctcagcctcccaaggatctgggattacaggtgtgtgccaccatgctcggctaatttttatgtttttggtagagacagggtttcaccatgttrgccaggctggtcttgaactcctgacctcaagtgatctgcccacctcatcctcccaaagtgttgggattacaggcatgagccaccacgcccagcccaaatt

SEQ ID NO: 490159 - DNA, 201 bp, Homo sapiens
ataggtgcataccaccactcctggctaattttgtattttttttaggagagatggggtttctccatgttggtcaggctggtctcgaactcccgacctcaggkgatctgcctgcctctgcctctcaaagctctgggattacaggcatgaaccaccgtgcctgggccacagttttttttttttttttttacatgagagtttgtt

SEQ ID NO: 490160 - DNA, 201 bp, Homo sapiens
aatctcggctcactgcaagctccgcctcccgggttcacgccattctcctgcctcagcctcccgagtagctgggactacaggcgcccgccaccgcgcccggstaattttttgtatttttttagtagagacggggtttcaccttgttagccaggatggtctcgatcttctgacctcatgatccacccgcctcggcctcccaaa

SEQ ID NO: 490161 - DNA, 201 bp, Homo sapiens
aagtccacctttggaggccagacgtggtggctcacacctgtaatctgagcactctgggaggctgaggtgggcggatcacttgaggccaggaatttgagacyggcctggccaacatggtgaaaccctgtctctactaaaaatacaggaatcagctgggtgtggtggtgcacgcctgtaataccagctacttgggaggctgag

SEQ ID NO: 490162 - DNA, 201 bp, Homo sapiens
ccgcgcccggctaattttttgtatttttttagtagagacggggtttcaccttgttagccaggatggtctcgatcttctgacctcatgatccacccgcctcrgcctcccaaagtgctgggattacaggtgtgagccaccgcgcccggcctgaaaaggatcttttaagttggtttcctgaatctcaagttacggacctttcac

SEQ ID NO: 490163 - DNA, 201 bp, Homo sapiens
cctttccttcttcccatcacacattttccatgttgtatcattttgtactgaaggtacatcctttagcagtttttttttttttttttttttttttttttttyttgagacggagtttcgctcttgttgcccaggctgaagtgcaatggcatgatcttggctcaccacaacctctgcctcctgggttcaagtaattctcctgtc

SEQ ID NO: 490164 - DNA, 201 bp, Homo sapiens
gctaattttttgtatttttttagtagagacggggtttcaccttgttagccaggatggtctcgatcttctgacctcatgatccacccgcctcggcctcccaragtgctgggattacaggtgtgagccaccgcgcccggcctgaaaaggatcttttaagttggtttcctgaatctcaagttacggacctttcacttctaatcc

SEQ ID NO: 490165 - DNA, 201 bp, Homo sapiens
tccttcttcccatcacacattttccatgttgtatcattttgtactgaaggtacatcctttagcagttttttttttttttttttttttttttttttttttgkgacggagtttcgctcttgttgcccaggctgaagtgcaatggcatgatcttggctcaccacaacctctgcctcctgggttcaagtaattctcctgtcagcc

SEQ ID NO: 490166 - DNA, 201 bp, Homo sapiens
ttttgtatttttttagtagagacggggtttcaccttgttagccaggatggtctcgatcttctgacctcatgatccacccgcctcggcctcccaaagtgctrggattacaggtgtgagccaccgcgcccggcctgaaaaggatcttttaagttggtttcctgaatctcaagttacggacctttcacttctaatcccccaaaa

SEQ ID NO: 490167 - DNA, 201 bp, Homo sapiens
ccttcttcccatcacacattttccatgttgtatcattttgtactgaaggtacatcctttagcagttttttttttttttttttttttttttttttttttgaracggagtttcgctcttgttgcccaggctgaagtgcaatggcatgatcttggctcaccacaacctctgcctcctgggttcaagtaattctcctgtcagcct

SEQ ID NO: 490168 - DNA, 201 bp, Homo sapiens
tttagtagagacggggtttcaccttgttagccaggatggtctcgatcttctgacctcatgatccacccgcctcggcctcccaaagtgctgggattacaggygtgagccaccgcgcccggcctgaaaaggatcttttaagttggtttcctgaatctcaagttacggacctttcacttctaatcccccaaaatgaagtccttt

SEQ ID NO: 490169 - DNA, 201 bp, Homo sapiens
ttcttcccatcacacattttccatgttgtatcattttgtactgaaggtacatcctttagcagttttttttttttttttttttttttttttttttttgagayggagtttcgctcttgttgcccaggctgaagtgcaatggcatgatcttggctcaccacaacctctgcctcctgggttcaagtaattctcctgtcagcctcc

SEQ ID NO: 490170 - DNA, 201 bp, Homo sapiens
atcacacattttccatgttgtatcattttgtactgaaggtacatcctttagcagttttttttttttttttttttttttttttttttttgagacggagtttygctcttgttgcccaggctgaagtgcaatggcatgatcttggctcaccacaacctctgcctcctgggttcaagtaattctcctgtcagcctcctgagtagc

SEQ ID NO: 490171 - DNA, 201 bp, Homo sapiens
tgtactgaaggtacatcctttagcagttttttttttttttttttttttttttttttttttgagacggagtttcgctcttgttgcccaggctgaagtgcaayggcatgatcttggctcaccacaacctctgcctcctgggttcaagtaattctcctgtcagcctcctgagtagctgggattataggtgcataccaccactcc

SEQ ID NO: 490172 - DNA, 201 bp, Homo sapiens
tgggccttggtctggggaaagcatagatttcaacttcttgaactggctccaaatcttaaatgggtgactgctttgctatcataattctcccgcttctttaytaaaatatacttcaaaattaatgctccacactcacactttctcagtacggccccaatactgatacaatggtccagaatctgcaacacctttcataacttt

SEQ ID NO: 490173 - DNA, 201 bp, Homo sapiens
gtggatggtgtggggagtgtcatacttagaattgctgtcccggagaatgggaagtaggtcccctttgtgtgctggtaaggaccaggagctgtgttgaggarcccacccaccagtaatgaagctgtcggcattgatataagaccctactgaccactggtagaggcaaaggcatttttccatggtgggtacttacttttgtgc

SEQ ID NO: 490174 - DNA, 201 bp, Homo sapiens
ccactcctggctaattttgtattttttttaggagagatggggtttctccatgttggtcaggctggtctcgaactcccgacctcaggtgatctgcctgcctytgcctctcaaagctctgggattacaggcatgaaccaccgtgcctgggccacagttttttttttttttttttacatgagagtttgttgatagaaaacaatt

SEQ ID NO: 490175 - DNA, 201 bp, Homo sapiens
aaactgctggcgagtataccctctctgcaggaagtaaaaatgcccttactaaataaatttatgttcaagtgctatttctttatggcattggagaacaagcrtttcaaacagaggtgattttagtcagtgtagagatgaattagatgattgttaagattctattgttttaattaaggtgatgtgaatgaacttggacagatt

SEQ ID NO: 490176 - DNA, 201 bp, Homo sapiens
aagagcactttcaatgcatgttgatggtacccttatcaactgttcagccaattctatcacatcaagaatacagcatgaacagcatgggtactgacaaagcrcggaagcaccttggaatgagaaatgaggatacctgagtcaaaaggcaagcaggcgaatgaggcccgaaagataaaccaagaaggattcctgaatgcggag

SEQ ID NO: 490177 - DNA, 201 bp, Homo sapiens
acctcaggtgatctgcctgcctctgcctctcaaagctctgggattacaggcatgaaccaccgtgcctgggccacagttttttttttttttttttacatgaragtttgttgatagaaaacaatttcagtttccttttctttccttcattcattctttcctttcttccttttctttcctttgtgaaaaatgtctttttttttt

SEQ ID NO: 490178 - DNA, 201 bp, Homo sapiens
tgcctgcctctgcctctcaaagctctgggattacaggcatgaaccaccgtgcctgggccacagttttttttttttttttttacatgagagtttgttgataraaaacaatttcagtttccttttctttccttcattcattctttcctttcttccttttctttcctttgtgaaaaatgtcttttttttttaaatgccagttct

SEQ ID NO: 490179 - DNA, 201 bp, Homo sapiens
tcctgggttgaagtgattctcctgcctcagcctctggagtagctgggattacaggcgtgcgccaccacacccagctaatttttgtattattagtagagacrgggttttaccatgttggccaggctggtctcgaactcctgccctcaggtgattcacctgccttggcctcccaaagtgctcggattacaggcgtgagccacc

SEQ ID NO: 490180 - DNA, 201 bp, Homo sapiens
tcaaagctctgggattacaggcatgaaccaccgtgcctgggccacagttttttttttttttttttacatgagagtttgttgatagaaaacaatttcagttyccttttctttccttcattcattctttcctttcttccttttctttcctttgtgaaaaatgtcttttttttttaaatgccagttcttcaaagatagttttgc

SEQ ID NO: 490181 - DNA, 201 bp, Homo sapiens
acggggtttcaccttgttagccaggatggtctcgatcttctgacctcatgatccacccgcctcggcctcccaaagtgctgggattacaggtgtgagccacygcgcccggcctgaaaaggatcttttaagttggtttcctgaatctcaagttacggacctttcacttctaatcccccaaaatgaagtcctttacagtctttt

SEQ ID NO: 490182 - DNA, 201 bp, Homo sapiens
aatattaccaatatttgacatgttttgtaatatgtagattatattcctgagagattaaataagaactctgtaggccgggcatggtggctcatgcctgtaaycccagcactttgggaggccgaagtgggtgaatcacttgaggtcaggagttcaagaccagcctggctaacatggtgaaaccccatctctcctaaaatacaa

SEQ ID NO: 490183 - DNA, 201 bp, Homo sapiens
tagttaactggttaacttatttgtaaacccctagacttttctagaaatgttaaatttctactttagatacttcttgtcttagcattatatatgaatctttwaaaaaaattagtgccatctccagcctgggcaacagagcgagaccccgtctcaaaaaaaaaaaaaattagtgccatctaagtagcttttgcaacagtttta

SEQ ID NO: 490184 - DNA, 201 bp, Homo sapiens
gacagattaaattgtgataagtctttgaggatagggcatttgggggagtctcaaacttgttttgtgacttacagtggctgcgaagttactgttttttacarctaccatagtcgcaaggctgctgttgacttagggaaaataccacaagttaaagtggctcaaggctcactattctttctgagatccagttatttgtcttga

SEQ ID NO: 490185 - DNA, 201 bp, Homo sapiens
atattaccaatatttgacatgttttgtaatatgtagattatattcctgagagattaaataagaactctgtaggccgggcatggtggctcatgcctgtaatyccagcactttgggaggccgaagtgggtgaatcacttgaggtcaggagttcaagaccagcctggctaacatggtgaaaccccatctctcctaaaatacaaa

SEQ ID NO: 490186 - DNA, 201 bp, Homo sapiens
gaataattacaagtgagtatcttgaccaaataaaccctgttgaaacaaaatgttactttaaaaagaatacatactgcttcaataacttcagtgaatacttmatattgagtaaagtaattacaacaataatgtaggatgagggacaaagaaatgctatactctgaattttcaatgtttctgtaacttagtgtcacagaaaat

SEQ ID NO: 490187 - DNA, 201 bp, Homo sapiens
tctaaaaaagttgattttgaaattttgtagtgttgtcagtgcttttatggagaagtatattttcagaggtcttattcagccattgcagaagtgcttcttckgtaacattcttacacttttcccctccttcttgaggaaggttaaattgtgaggaaaggttcctaaatgattcagatttctgaacatatcttataaaggcat

SEQ ID NO: 490188 - DNA, 201 bp, Homo sapiens
ttaaataagaactctgtaggccgggcatggtggctcatgcctgtaatcccagcactttgggaggccgaagtgggtgaatcacttgaggtcaggagttcaaraccagcctggctaacatggtgaaaccccatctctcctaaaatacaaaaattagccaagtgtggtggtgggtgcctataaccccagctactctggaggctg

SEQ ID NO: 490189 - DNA, 201 bp, Homo sapiens
tcttaacattaagcagcaaaatttgaaaaatgtaaaaatggcagttgcttccctccaatttttgcttagtatgcaggttttgaaaagtatcaccagatagygcaaactacttgcctttagccttaagtgatggtaatgctacacattctgtcttccacaatttaacatagtccttgatatttttgtccctctcgaattcac

SEQ ID NO: 490190 - DNA, 201 bp, Homo sapiens
atccttaattaatcacatctacaaaatcctttttgcagtataaggtaaagtattcgtaggttctaacaaataggatgtagatatctttgggctactattaytctgcttaccacaataatagtaaaccttttaagacaaaagttttccaagtaaatttttaaaaagtataaaacacctactgaaaagtgctggcatcgtgta

SEQ ID NO: 490191 - DNA, 201 bp, Homo sapiens
tctgtaggccgggcatggtggctcatgcctgtaatcccagcactttgggaggccgaagtgggtgaatcacttgaggtcaggagttcaagaccagcctggcyaacatggtgaaaccccatctctcctaaaatacaaaaattagccaagtgtggtggtgggtgcctataaccccagctactctggaggctgaggcaggagaat

SEQ ID NO: 490192 - DNA, 201 bp, Homo sapiens
gccgagatgggcggatcacgaggtcagaagatcgagaccatcctggctaacacggtgaaaccctgtctctactaaaaatacaaaaaattagctgcgcgtgstggcaggcggctgtagtcccagctactcgggaggctgaggcaggagaatggcgtgaagccgggaggtggagcttgcagtgagccgagatcgcaccactgc

SEQ ID NO: 490193 - DNA, 201 bp, Homo sapiens
accactgtaagcctgggcaacagagcaagacatatctcaaaaagaaaaaaaaatatgaatactatataaataatcaatagttatagacagtatgagagatytgtcataggtagattataactccatctttgctgtcaagtggaccaataatagcaggcatttctaatggtactaatgacttagtgatacattatataggta

SEQ ID NO: 490194 - DNA, 201 bp, Homo sapiens
ttctcaatggaaaaaataaatatatatataccaccttagcttttttttgccaaaatagctatatattcctttctggtttaaaagaaatacatgtttgtcgmacacacacacacacacacacacacacacacacacacaaattcagtataaaaaatttacctgcagtaattctactgacatgacactcaacactgatgcata

SEQ ID NO: 490195 - DNA, 201 bp, Homo sapiens
cggctgtagtcccagctactcgggaggctgaggcaggagaatggcgtgaagccgggaggtggagcttgcagtgagccgagatcgcaccactgcactccagaaaaaaaaaaaaaaaagtcacacaatgggttaacaaaattttaaagaaaacttaaccctttcattgtagctaattaacattcaattaacatttcttagctt

SEQ ID NO: 490196 - DNA, 201 bp, Homo sapiens
tcttatccttcaagaaacttaattatttatgaataagagagaataccgaagccatttataggaacatagaaaacatttaatatatgaaagtaaatacaattatatatatatgtgtgtgtgtgtatatatatataaaagatgtgtatactgaggtaattagaaagtgattagagtaacaattacattaattttcctttgaga

SEQ ID NO: 490197 - DNA, 201 bp, Homo sapiens
accacctgttacatacaactttattttctgacagcacaatcagataagttcacagccaagccattggattccaactcaggagaaagaaatgacctcaatcwtgatcgctcttgtggggttccagaagaatctgcttcatctgaaaaagccaaggaaccagaaacttcagatcagactagcactgagagtgctaccaatgaa

SEQ ID NO: 490198 - DNA, 201 bp, Homo sapiens
ttgtcagtttttttttttatagataggggatctcactatattgcccaggctggtctcaaactcctcagctcaggcagtcctcctgccttggcctcccaaartgctgggattacaggtgtgagccactgcgcccagcatcaatttttaattttactattttctaagccagttttttaaaaaatgtaagaattaaaacaaata

SEQ ID NO: 490199 - DNA, 201 bp, Homo sapiens
  misc_feature (1)...(201): n = A,T,C or G
tgataatctgctctgttgcccaggctggattgagtgcagtggcacgatcttggctcactgcaacctccatcttctgggttcaagcaattctcctgcctcancctccagagtagctgggattacaggtgtgcaccaccatgcccagctaaatttcgtatttttagtagagacagggtatcaccatgttggccaggctggtct

SEQ ID NO: 490200 - DNA, 201 bp, Homo sapiens
tcatcagtcaacgtatttttcaagctcctccatttctacactggtgtgcctccaacttgtcgatcataaataattctgctgtaatagatatccttactctktatgttgctcaaattttagaactgacagttattgagagtctaagtgcaaacgctgtgctacatgttttagagacattagatcatctgattttcacaacaa

SEQ ID NO: 490201 - DNA, 201 bp, Homo sapiens
ccggcccccggcaggagagagggaggagccatggcaacaggtgccaaaataatcacctcaccaagtctgcgctgcgccctgctggcagcgcgcttgcgcargccgagctgcccgccatgattggcccgccccgaggcgcgggcggggtcgagcggaaacctcctccttctccccatgccctcgaggccatgttggagaagg

SEQ ID NO: 490202 - DNA, 201 bp, Homo sapiens
cttatccttcaagaaacttaattatttatgaataagagagaataccgaagccatttataggaacatagaaaacatttaatatatgaaagtaaatacaattatatatatatgtgtgtgtgtgtatatatatataaaagatgtgtatactgaggtaattagaaagtgattagagtaacaattacattaattttcctttgagat

SEQ ID NO: 490203 - DNA, 201 bp, Homo sapiens
actgattaattatctcctttcttcccatcaaagaaaattatacttcagaaaacttcctattatgttgtgggaatgaagatgaataatttcccagatgttatttatgattaaaagatatgtttacttagagctcccaaatccacaagattcacctgggccaacagagtgttgttttagactagcatggatttagaggatagg

SEQ ID NO: 490204 - DNA, 201 bp, Homo sapiens
ttttagaagagacagtctcactatgttgaccaggctggtcttgaactcctggcctcaagcctcagcctcccaaagtgctgggggactataggcgtgagccmccgcgcctggccatatactgggttaagaaacgtaaatatatgcccttggaatgaaaagagtgtggttgagatctctgtttagataatctgcatataattt

SEQ ID NO: 490205 - DNA, 201 bp, Homo sapiens
tttttttttttttttttggagacggagtctcgctccctcacccaggctggagtgcagtggggcaatcttggctcactgcaagctctgcctcccaggttcaygccattctcctgcctcagcctcccaagtagctgggactacaggcgcctgccaccacgcccagctaattttttgtatttttagtagatacggggtttcacc

SEQ ID NO: 490206 - DNA, 201 bp, Homo sapiens
ttttttttttggagacggagtctcgctccctcacccaggctggagtgcagtggggcaatcttggctcactgcaagctctgcctcccaggttcacgccattytcctgcctcagcctcccaagtagctgggactacaggcgcctgccaccacgcccagctaattttttgtatttttagtagatacggggtttcaccgtgttag

SEQ ID NO: 490207 - DNA, 201 bp, Homo sapiens
gcctgacctaagcctggtagttaaaattcgacccctgacctagcaactgttgttatctatagattccacacattgtatggaaggacattgtgaaatctctygttctgttctgtttcactgtgaccaccagtgctcacagcccctgtcacgtaccccctggcttactcaatcgatcacgaccctctcatgcagaccccctta

SEQ ID NO: 490208 - DNA, 201 bp, Homo sapiens
acatggagaaaccccgtctttactaaaaacacaaaattagctgagcgtggtggcacatgcctgtaatcccagctactcaggagactgaggcagcagaatcrcttgaacccgggaggcggaggttgtggtgagccgaaatcacgccatcgcactccagcctgggcaacaaaagtgaaactccgtctcagaaaaaacaacaac

SEQ ID NO: 490209 - DNA, 201 bp, Homo sapiens
ccatattcttttttgttttgttacaaaatctgactgcagaggaagaacctctactggaaataaacgtgatggcttttatttgtattgctacattaagtcayatgtaataattcagattaagagttttaaaaaatgtttttctttaaaacattattaattttaaataacttcttgtttcttttttagggaattatgcaggtc

SEQ ID NO: 490210 - DNA, 201 bp, Homo sapiens
ctcatttactaatgcagccttaattttgtccatacatcttgttttaaatgatttgaagctgggcatggtgactcatgcctgtaatcccagcactttgggargctgaggtgggtggatcacttgaggtcaggagtccaagaccagcctggtcaatatggtgaaaccccatctctactaaaaatacaaaaattagccagatgt

SEQ ID NO: 490211 - DNA, 201 bp, Homo sapiens
ctaatgcagccttaattttgtccatacatcttgttttaaatgatttgaagctgggcatggtgactcatgcctgtaatcccagcactttgggaagctgaggygggtggatcacttgaggtcaggagtccaagaccagcctggtcaatatggtgaaaccccatctctactaaaaatacaaaaattagccagatgtggtggagg

SEQ ID NO: 490212 - DNA, 201 bp, Homo sapiens
atattgttactttttgagatggagttttgctcttgtcgcccaggctggagtgcaaaggcgcgatctcagctcactgcaacctccgcctcctgggttgaagygattctcctgcctcagcctctggagtagctgggattacaggcgtgcgccaccacacccagctaatttttgtattattagtagagacggggttttaccatg

SEQ ID NO: 490213 - DNA, 201 bp, Homo sapiens
ttgtgttattggcactattaaaccatctttcttcctactgcccatacaaataggcgaactcctgggcttccctgtctatgctttccgcgaaaagcgaaacrtagccatagataattaaaaagatgatgaatgaccacctaaaaaattatacaatactataggcctgccacttagacacaagatggctcatgggtataccag

SEQ ID NO: 490214 - DNA, 201 bp, Homo sapiens
ggctggagtgcagtggggcaatcttggctcactgcaagctctgcctcccaggttcacgccattctcctgcctcagcctcccaagtagctgggactacaggmgcctgccaccacgcccagctaattttttgtatttttagtagatacggggtttcaccgtgttagccaggatgatctcgatctcctgacctcgtgatccgcc

SEQ ID NO: 490215 - DNA, 201 bp, Homo sapiens
gctggagtgcagtggggcaatcttggctcactgcaagctctgcctcccaggttcacgccattctcctgcctcagcctcccaagtagctgggactacaggckcctgccaccacgcccagctaattttttgtatttttagtagatacggggtttcaccgtgttagccaggatgatctcgatctcctgacctcgtgatccgcct

SEQ ID NO: 490216 - DNA, 201 bp, Homo sapiens
ggagtgcagtggggcaatcttggctcactgcaagctctgcctcccaggttcacgccattctcctgcctcagcctcccaagtagctgggactacaggcgccygccaccacgcccagctaattttttgtatttttagtagatacggggtttcaccgtgttagccaggatgatctcgatctcctgacctcgtgatccgcctgcc

SEQ ID NO: 490217 - DNA, 201 bp, Homo sapiens
gagtgcagtggggcaatcttggctcactgcaagctctgcctcccaggttcacgccattctcctgcctcagcctcccaagtagctgggactacaggcgcctsccaccacgcccagctaattttttgtatttttagtagatacggggtttcaccgtgttagccaggatgatctcgatctcctgacctcgtgatccgcctgcct

SEQ ID NO: 490218 - DNA, 201 bp, Homo sapiens
gtggggcaatcttggctcactgcaagctctgcctcccaggttcacgccattctcctgcctcagcctcccaagtagctgggactacaggcgcctgccaccaygcccagctaattttttgtatttttagtagatacggggtttcaccgtgttagccaggatgatctcgatctcctgacctcgtgatccgcctgcctcagcctc

SEQ ID NO: 490219 - DNA, 201 bp, Homo sapiens
ggcgcctgccaccacgcccagctaattttttgtatttttagtagatacggggtttcaccgtgttagccaggatgatctcgatctcctgacctcgtgatccrcctgcctcagcctcccaaagtgctgggattaccggcatgagccaccgcacccaggctgtataatttttttttttttttacaatgccaaatctgttgtaag

SEQ ID NO: 490220 - DNA, 201 bp, Homo sapiens
cgcctgccaccacgcccagctaattttttgtatttttagtagatacggggtttcaccgtgttagccaggatgatctcgatctcctgacctcgtgatccgcytgcctcagcctcccaaagtgctgggattaccggcatgagccaccgcacccaggctgtataatttttttttttttttacaatgccaaatctgttgtaagtg

SEQ ID NO: 490221 - DNA, 201 bp, Homo sapiens
gcctgccaccacgcccagctaattttttgtatttttagtagatacggggtttcaccgtgttagccaggatgatctcgatctcctgacctcgtgatccgccygcctcagcctcccaaagtgctgggattaccggcatgagccaccgcacccaggctgtataatttttttttttttttacaatgccaaatctgttgtaagtga

SEQ ID NO: 490222 - DNA, 201 bp, Homo sapiens
caccacgcccagctaattttttgtatttttagtagatacggggtttcaccgtgttagccaggatgatctcgatctcctgacctcgtgatccgcctgcctcrgcctcccaaagtgctgggattaccggcatgagccaccgcacccaggctgtataatttttttttttttttacaatgccaaatctgttgtaagtgatttgac

SEQ ID NO: 490223 - DNA, 201 bp, Homo sapiens
gtgtgttatgatagtcatcttgatttgtttgaaatgatgtttacaaatgctattaaaattataaatcctacattttacttgtgaattttttggtctacctytctagttgtaaaatataaaaatcctaaaagatcatattgattaacttcttggtggaatcacttatcttgttttgatgataggagcagtatagcatcaagt

SEQ ID NO: 490224 - DNA, 201 bp, Homo sapiens
tgaatcatagtatgggtaagccatgagtaactaaaatgcatggtttttgtaacctttaccttaatcattttatgaaatagtaggaatgtttttcagagccrtctgtttaaatgttcgtatgattatctgcacttttcttttcatcttcagattatgactgtacccaatgacccttacacttttctctcttgtggtgaagat

SEQ ID NO: 490225 - DNA, 201 bp, Homo sapiens
tcccaagttttagaaatgctctgcttctggattattctaactacattctagacaagtattgagttccttagaaacctggactaggagaagcttttatttcyctttagtttttcactgtgtgttttgcacagtaaagaatttctttctacagatttattcaaaattcgccagctataattctagtcatgttcttgtattcta

SEQ ID NO: 490226 - DNA, 201 bp, Homo sapiens
gggacgcagaggttgtagtgagctgagatcgcgccactgcactccagcctgggcgacagagtgagactctgtctcaaaagaaaaaaaaaagaaatatccayataatgtgttctaatgtgactgtcatgttgggtctgcaatcttgtagaaagaaggttaggattctgttgctgtcagttagtaaaataagtatatcctagg

SEQ ID NO: 490227 - DNA, 201 bp, Homo sapiens
  misc_feature (1)...(201): n = A,T,C or G
aagcagtgaaagtgaggcatttctgctggcccaagtgtttttttgcagttctggaactgttgccctccttcaggctctgctgacaccaagattgtggcccnatatttctccaaagtgtgagacagagcctcctcttaattgccttgacacagttaggaccaagatttaacttatgataagacttttggggatgttcgtgtc

SEQ ID NO: 490228 - DNA, 201 bp, Homo sapiens
  misc_feature (1)...(201): n = A,T,C or G
ctgttgccctccttcaggctctgctgacaccaagattgtggcccaatatttctccaaagtgtgagacagagcctcctcttaattgccttgacacagttagnaccaagatttaacttatgataagacttttggggatgttcgtgtctgacagaaggaaattacaagtgctactagaagtggctgccttcagaatccacaggt

SEQ ID NO: 490229 - DNA, 201 bp, Homo sapiens
tagattcaaaacagggacatattgagagcaagagtgattagttcttagttcccagaaagtttccttctcaattgctaacaagagtctatcccctgactcamgggtcgcaaacgccaaaagaaggagaaacgagaaggtctgacttggtagtggagaatccaaagaactcaggtagcatctgtttccatagcatctggcaca

SEQ ID NO: 490230 - DNA, 201 bp, Homo sapiens
acatacagctaagtttgtgtatgttggtcttccccacttgattgtgagttttctgggcaggaactaggccctgttcatactgtgtgtgtatttctccactyttatctgcagaggtggtacagaaaaatcatgaagagtacaggctttgggatcagatagtcctgggtttgcatagtaaactgattgcattaatggccccag

SEQ ID NO: 490231 - DNA, 201 bp, Homo sapiens
taaactgattgcattaatggccccagtacctgtatctgtgccctttgctgtgtaacttggcagagtcctctcattctggactcagccttgtgaatgctttygtcaatggactatctgcaaacataagacataggaagaggcttgaaaaatgcttttgcattgggcctgctctcttgctcctccagtattgccaggacaaac

SEQ ID NO: 490232 - DNA, 201 bp, Homo sapiens
gaaccccaggcacgtgaataagccaagacaagatcaaccaaatccagccaagatcaattgaaccccacatttgtgagaaaaataaatgtttatttttgcayaccactgaagttttgtgattgcccgtaaggtcacattattgtgactgaatcttgactccattgctcactatagatatggccatagacaagtcatttaaca

SEQ ID NO: 490233 - DNA, 201 bp, Homo sapiens
ccgcttacatagcatttacattgcattaggtattataagtaatatagagataatttacagtataaggaagggtatgcataggttatatgcaaatattatgscattatatatgagggacttgaggagctgcagattttggtattttcagcgattttagaactaatccctcatggataccaagggatgactgtaatttggttt

SEQ ID NO: 490234 - DNA, 201 bp, Homo sapiens
ggaagggtatgcataggttatatgcaaatattatgccattatatatgagggacttgaggagctgcagattttggtattttcagcgattttagaactaatcsctcatggataccaagggatgactgtaatttggtttacttacagaagctcctgaagaatcatcagaggatgtgacaaaatatcaggaaggagtatctgcag

SEQ ID NO: 490235 - DNA, 201 bp, Homo sapiens
ctggcatagattatgacataaagatctggtcaccattagaagagtcaaggatttttaaccgaaaacttgctgatgaagtaagatttttattgtacttactmtagaccatatttcaatttgttcctaaaatgcttccctaagaaaaattaaaagttattagttgctaacatgaaacaagttaatgcagttaaggaggtcaaa

SEQ ID NO: 490236 - DNA, 201 bp, Homo sapiens
ctgatgtttaataagtactcactaaaaattattattcattcatgtattcaaactgcactttattgatggcctatgtatgccaagcacagtgctaagcctcrggaatactgaagggaataataaagacaccttgacccaactgcagccctggttctgttatctgactcttgaagacctcgattccagcttgctaatctaatg

SEQ ID NO: 490237 - DNA, 201 bp, Homo sapiens
ctatgctgagcttttggggaatgtatttcactaaagacttagaggagaaataatatcttatactcttttaaccctaacaatgcctcggcatacagttgacwtaattagtaaataatattaaatggttggtgattgggcccatttgggtgcaaatagatactcaaatgagaggattttttgtttggtttgtacaacctttga

SEQ ID NO: 490238 - DNA, 201 bp, Homo sapiens
gattttttgtttggtttgtacaacctttgaagaattaccctcatattctcagatctgaggagagaatgggattttccaccatgccatagtgtcagtcagayggaggaaagattaaggattttgaagtctgggccttggtctggggaaagcatagatttcaacttcttgaactggctccaaatcttaaatgggtgactgctt

SEQ ID NO: 490239 - DNA, 201 bp, Homo sapiens
aatgggattttccaccatgccatagtgtcagtcagatggaggaaagattaaggattttgaagtctgggccttggtctggggaaagcatagatttcaacttyttgaactggctccaaatcttaaatgggtgactgctttgctatcataattctcccgcttctttactaaaatatacttcaaaattaatgctccacactcaca

SEQ ID NO: 490240 - DNA, 201 bp, Homo sapiens
gtcagtcagatggaggaaagattaaggattttgaagtctgggccttggtctggggaaagcatagatttcaacttcttgaactggctccaaatcttaaatgrgtgactgctttgctatcataattctcccgcttctttactaaaatatacttcaaaattaatgctccacactcacactttctcagtacggccccaatactga

SEQ ID NO: 490241 - DNA, 201 bp, Homo sapiens
ttgactttttgaccaatgactatagcaagaaagagaaagtcaaagatcagggaaataacaggcattgaactgaatgtaatctgaaacattgtccccaaatrgcatttttaccctttactccctttgctgttcatgagtgacacagaagcctagtctcaagacccatattcagccaatggctattcacaaaatgtgcaggga

SEQ ID NO: 490242 - DNA, 201 bp, Homo sapiens
aaagagaaagtcaaagatcagggaaataacaggcattgaactgaatgtaatctgaaacattgtccccaaatagcatttttaccctttactccctttgctgytcatgagtgacacagaagcctagtctcaagacccatattcagccaatggctattcacaaaatgtgcagggagttagttagccattagcaaagtttctgcc

SEQ ID NO: 490243 - DNA, 201 bp, Homo sapiens
aagatcagggaaataacaggcattgaactgaatgtaatctgaaacattgtccccaaatagcatttttaccctttactccctttgctgttcatgagtgacamagaagcctagtctcaagacccatattcagccaatggctattcacaaaatgtgcagggagttagttagccattagcaaagtttctgcctcacttgggaggt

SEQ ID NO: 490244 - DNA, 201 bp, Homo sapiens
gcttgagtatggagcaggctctgtaagtgggatggccacagcactgaaggctctcagagaaggtgtcagttggtcttctgccacaaggtggacaagcacawgcttgggcctggggtactgatctccatatgagacataaaattgtgtctgcatgctcctatgaataaaccttcatttggcgatttctcgatttagtaaatg

SEQ ID NO: 490245 - DNA, 201 bp, Homo sapiens
ggacaattactttaaataactcctcatgcctccattctctaacctataaaatagggatgataatagtaactctctgagagggtggtttatgaagattaatkagttaatacacgtttatcactttcaacagcagctggctgcttgtaagccttcaattaatattactacaaatgaggtagcaaatgtgtcactttaacataa

SEQ ID NO: 490246 - DNA, 201 bp, Homo sapiens
aatctgagggtcaggaggaatctttcgtcccacagagctcagtgcaaccaccagaaggagacagtgaaacaagtaaggtgttattttgcttttgttgttayaaaattgcagcattggatgtttatctactttcctgttcccttcgatgctgtattttgtttcttgtttttaataaattacttttgcttctatagtccagct

SEQ ID NO: 490247 - DNA, 201 bp, Homo sapiens
ctttgcccccaggacttcacatacaattgaggtcttagctccaatatcacctccttagaaaagtcttccctggtagtgcggtggctcatgcctgtaatccyagcactttgggaggccgaggcgggtagatcacgaggtcaggagattgagaccagcctggccaacatggtgaaatcccatctgtactgaaaaatacaaaaa

SEQ ID NO: 490248 - DNA, 201 bp, Homo sapiens
ctgaaaaatacaaaaattagctgggtgtggtggcgcgtgcctgtagtcccagctacttgggaggctgaggcaggagaatcgcctgaacccaggaggtggakgttgtagtgagccgagatcgcaccactgcactccagcctggtgacagagggagaatcagtctaaaaaaaaaaaaaaaaaaaaaaaaaaaagaaaagaaaa

SEQ ID NO: 490249 - DNA, 201 bp, Homo sapiens
aaattagctgggtgtggtggcgcgtgcctgtagtcccagctacttgggaggctgaggcaggagaatcgcctgaacccaggaggtggaggttgtagtgagcygagatcgcaccactgcactccagcctggtgacagagggagaatcagtctaaaaaaaaaaaaaaaaaaaaaaaaaaaagaaaagaaaagtcttccctggtc

SEQ ID NO: 490250 - DNA, 201 bp, Homo sapiens
gtaatttttaatgttaattaaagtcatcagaaagctggcaaaaactacttattgaagccagtttttatttctatcatgtaaattataccatgttttacatstgtaataatcacaaggttcttattgtgtggtgtgaagtagtagagaataaaagatattggatataatttgtcccttctggtgccattggacctagtgcgt

SEQ ID NO: 490251 - DNA, 201 bp, Homo sapiens
cttgtaagccttcaattaatattactacaaatgaggtagcaaatgtgtcactttaacataaacttgaatacttctgaacaaggtactctttttgaaaactrtttattgtggagaaatttgaccataaaataaaatataatgaatttccatatacccatcaccccatcccaacaagccattagcccatggctaatcctgccc

SEQ ID NO: 490252 - DNA, 201 bp, Homo sapiens
gaagactctaaagtttctgagggcagggctcatgtctcactcatttttgtgcttcctcccgcaaagcccagtggcaaggtgctgtgtttgcagaaagaaarctggagatgagctgacccagcacacctgtgtactcgtgtctcacagtgtgtccaacgatcccacagaagacaatcccactggcaacaccgatggatacag

SEQ ID NO: 490253 - DNA, 201 bp, Homo sapiens
ttgcagaaagaaagctggagatgagctgacccagcacacctgtgtactcgtgtctcacagtgtgtccaacgatcccacagaagacaatcccactggcaacrccgatggatacagttctggtgcaggggagacaagatttgtggggaaagaaataaagataatgagcgtagagaaagtgggaagggtgggaaataatgtctg

SEQ ID NO: 490254 - DNA, 201 bp, Homo sapiens
acaacagtttgagacacaggactaagttcttaattaattcttctttctttcctgttccctgcatgccctccctacttatgcctcaaaagggtcagggaccrctgggtgggaccagggtcaatactcactggattttgtggacttgagagcagaagtcaaatatatccatagcacattccagagcatgagtgagctcgtcag

SEQ ID NO: 490255 - DNA, 201 bp, Homo sapiens
tttcgtagcatttcattttgattatggtcttatagtcagtattttgtggaccaaattacaataggtggtattgtacataaaaggtctttttggcctatacrgattattttctatgtaagctcatttctcactttggcccttgatgccaactttgaactctctccctataacaaaattataatggatacaaactatatccat

SEQ ID NO: 490256 - DNA, 201 bp, Homo sapiens
atcaaatagatagttaattatttgtagcgtggagtaatgtatgctcagtctctcctcacaacggagccaaaggtcacaaacatttacagaaaacctacttwtgtcccaggtactctgctaggtactttcctaacttgtctaaagtcacagcataggctgggtatggtggctcatgcctgtattccagcactttgacaggac

SEQ ID NO: 490257 - DNA, 201 bp, Homo sapiens
agagaatgtctttttaggctcagtgtggtggctcatgcccataatcccagcactgtgggagggtgaggcgggcagatttcttgaggtcaggaatttgagaycagtcaggccaacatggtgaagctccatctctactaaaaatacaaaaagttagctgggtgtggtggcgcatgtgggaggctgaggcaggagaattgcttg

SEQ ID NO: 490258 - DNA, 201 bp, Homo sapiens
gataccgcttcactgtgtgaccctggagaagtcactttgctgccctggttgcctcctatttcctcacctgggaaaagagtagttgagcttcatgatctctrtggttcccttcactataaagattgatagttttatgctctaggatagactgataagagatggtaggaatgagtttgagggagtcaaaaaataagggagaca

SEQ ID NO: 490259 - DNA, 201 bp, Homo sapiens
tcactgagatgttactctcaaaaataatataacttcacaatctctagtaagtctcctctttttcttcctttgtgacttgttatttttcctcattgcatttrtcacatttgtaatcatacatttatttaggggattgtttaatatctacctttttgcatattctctaaatattttcatttaataatttcctctatgcctaaa

SEQ ID NO: 490260 - DNA, 201 bp, Homo sapiens
gacccaggagatggcattagtaaagctcaaggagtgggtaatgtcatgaggctttctccttcatctctggagcttctgaggttcttggcctttcctgatcmatgtttgtacagtctccccactccccaccccactgcctattgtggctttgtaaaagtacagtcttctatttgtaacatctaaaatactccagacctgtac

SEQ ID NO: 490261 - DNA, 201 bp, Homo sapiens
agagaagactagaaggtcaaagacagatacctgaagtcaccaacatttaagacatggaaaggaaactaagcaaagaggactgaaaataggtgatttgagasgtaaaggcaaaactagaaaagaataatacttttgaactcaaggaaaaaggagaaggtagtgtccaagaaaagagcataagctatggtcaaccatctagga

SEQ ID NO: 490262 - DNA, 201 bp, Homo sapiens
agaagttaacctaaataaaagcaaatgagaagttttcagttattctgagaactgtttaatcctttgaagtgtaatttcttagcagaaagagagtatgcttytgactgaacagtgattggcacacttaaacaccaagactatttgatttgtaaaattgaaattttaaattgaaaatctaaaaaatctttccaattacagtgt

SEQ ID NO: 490263 - DNA, 201 bp, Homo sapiens
ttggctcatctagcagcacacctttcttccactttcataccctcaaagcacagcttttttaattgtccatatcccagggacagttctgcttatagtcaatstgcaacttaaccacaatgttttctactaggcagagccacaggaagagaagtctctcttctatcactgaacttcgccgcacttgctcaactccaaccttta

SEQ ID NO: 490264 - DNA, 201 bp, Homo sapiens
ctcaagtggagaatgagtacgtggaaccagtttacatctatgctccatttctgtgaatggggaaagacaggagaaaggcagctagggtttctgatgaggtmtgaagacagctgccctcctcccacgataatggaatgcttttaattaatttattgatcaatatatgttataggctggggcttgtgtaagcatgggtgggtg

SEQ ID NO: 490265 - DNA, 201 bp, Homo sapiens
gtggctggtcaagtgtcagacatgcagcctcctctagctattattttaggggtcaggaaaaggctccagatatttctttcttccaaattctcaactgtacrgtgataactgcaacttctttaactgggaataaaattttcattccgtggtaacaaaaacacacacatttcaaacacttctgaagaggtggcaagtttatta

SEQ ID NO: 490266 - DNA, 201 bp, Homo sapiens
atttgttgagataatacaggttatgtttcattatcaaataactttgaaatctcaatggcttgaaataacaaaggcttatttcttgttcatttcttgctcayactacatgtcccttgtgggttgtatggggttctcctctgtttttgccttcactttgggacccaaactggaatattctggttgtcaaggtagtgggaaaga

SEQ ID NO: 490267 - DNA, 201 bp, Homo sapiens
aaagatataattgaaagtacggccattatggaaaataatatgcaggttcctaaaaaattaaaaatagaactaccatatgatctaacaatcccacatctggrtatatacccaaaggaattgaaatcagtatccctgcactcccatgtttatttcagcactattcacaatagccaagatatggaaccaacctaattgttcatc

SEQ ID NO: 490268 - DNA, 201 bp, Homo sapiens
acaaaaatattgaacgatctcacttatatatggaatctaaaaaagtcaaaatcatagaagcagagtagaatggtgatgcctgaggctggggttgggtgggkggaatgagatgttggtggctgaaggatacaaagtttcaattagacccaatgaaaaagtcctggagatctaacctagagcaaggtgaatacagttaataaa

SEQ ID NO: 490269 - DNA, 201 bp, Homo sapiens
aaatatatccatagcacattccagagcatgagtgagctcgtcaggtaccttttccccagggaagccaaagacacagaggaaagagcagccctgtgagggaragagacagcaaccacagctgatggacagtgtgctttaaactggactggccagaaggctcaacagagagccggcggcaatttttggcttctgaatcagatt

SEQ ID NO: 490270 - DNA, 201 bp, Homo sapiens
ttaacaaacagctcggatccatgtcacttgacgagcaacagggtgcgtgcaacaggagatgcgctatgcccatccatccatagctttattgcaatgcatawactaagctctctcacacctttcgtagcatttcattttgattatggtcttatagtcagtattttgtggaccaaattacaataggtggtattgtacataaaa

SEQ ID NO: 490271 - DNA, 201 bp, Homo sapiens
aaaatattaagagagaaaatgaaaaaactagcccgaactcagtctctcagtttccttaatcatccaatcatccaatctttagctgtctgtttcatctattscagaagcctaaagacagcagtgatgaaacaaaaatctcagtaacataactaaagaataagaggaaactgtggacaaatgactagcaaacagcaagttttt

SEQ ID NO: 490272 - DNA, 201 bp, Homo sapiens
aaaatctgtataaccattaaggttttggatatggtgaaccatctgtagtgaagacaagaaaggagacaatgtagttcacttaaaattcaatagagagacaygtagaaatacatactagataatgaaaggatccaaacagtgaagaagcagtccctttatatttttgaattttttttcaagagtaaagtgtgttatgatagt

SEQ ID NO: 490273 - DNA, 201 bp, Homo sapiens
gagacacagtgaagcacaatcctctttgtggacacagtggccaggatagttgttcatcatactataaatggatgagatataaatgttagtttgaattagtytttatcatttttatacctagcaatgaaatccactgtatttgttttggttgtatatgtggtttatagagggggaaaaaggaatagaatctaaacaagttac

SEQ ID NO: 490274 - DNA, 201 bp, Homo sapiens
gatttgtttctaggctcttttgtttcatcagacaatttgcctgtctctctgtcagtatcatacttttgtaattattatagctttttagtaaatcttaatgrcggctaaggcaagacccttccttctctttattcatttttagaaggatcttggctattctttgtcctttggttgattttataatcaactttttcagttcta

SEQ ID NO: 490275 - DNA, 201 bp, Homo sapiens
aagaaaataggttaaaaagtttattctcccaatatttcttctaagttttacaagctgtaagaggtttggtgtgactgaactttttattgtatatccaaatkgaacatccagtcatttttagtcttcacatagctgaattaatttatcagaacaaaagagcattgctcgtcttctttttgaaattgcccacatatctcataa

SEQ ID NO: 490276 - DNA, 201 bp, Homo sapiens
agtgcctgaccatttaaaaattgtgatgtttgtggccctttttcttaatacataatttaagatgacagtaggtcatcgtacttatcacgtcttttccattytcatgtttctgtacacaaggagctggcatcttctgaagaatcttatctaaactttttgggctttttttttttttagagaaaatcattagtcccattcttc

SEQ ID NO: 490277 - DNA, 201 bp, Homo sapiens
agttaattttttgttatattttaatagcagtgattacaattaaaatattatgaataagcctaggcaacatagtgagaccctatttgtacaaaatttttttwaaaaaattagcctggtatggtggtgtgcacctgtagtcctagccacttgagaggctgagacaggaggatcacctgacctcaagagtttgaggttacaatg

SEQ ID NO: 490278 - DNA, 201 bp, Homo sapiens
aagaaggagagtatgaggcgagctccggcccgggtgcggccgggcttcaggggcccaggcgccgctgctgccaccgccatctaacgctgcgccctggaggyccggcgcgcggatggtgccggtgcggctcgggtgttgaaacgggtgtcccctccccctcctcccctcccccacgcggtggtctcccctcccacccggctc

SEQ ID NO: 490279 - DNA, 201 bp, Homo sapiens
tacctttatttactaatacattgtaaggcaaagaatccagtttcttgcccccacaaaggagcagaaacagcaagatactctctagcaacccatctccctcrcttatttcagatacttgtaaagatatatgttgaaatgacagcaattctaacatatagaacttttttattgataaagctagataacgctaacatactaata

SEQ ID NO: 490280 - DNA, 201 bp, Homo sapiens
tggtggtgaggagacaggccatttctcttactgtctcttgtctctgaagagaaagaggaagtaaaagctgaaaaacacaggaatgaagtcagtggcaagamcagccggcgccactgatgaccaggtctgaggttaaaagattaacccccattctaaccacatgtgctatctacagatctcaatctattatgaccctttcac

SEQ ID NO: 490281 - DNA, 201 bp, Homo sapiens
aatttatactcgcaaagcacctttcctaagaataagatcaacaggtaaagtaaaatatactaaagtaatcactaaagtaaaatatacttctaaccactaargtaaaatatacttctgtgatgcaggcaggctattgggttaacagcctgtaaacacttaagttcacaaacgctaaggaccatttcctcaattctcaatcca

SEQ ID NO: 490282 - DNA, 201 bp, Homo sapiens
cataacttaataacttcctagacataatactgttaattcctttgtgtgtgggtgtatttcaaacactaagccactaaataaactgatataaaagaaaacaraaatcatttatgttctacaagaaacacagaagatatttatttaatttacctgtagccatcaaaacagcagattgagctgtgctaagtttttctgcaggtc

SEQ ID NO: 490283 - DNA, 201 bp, Homo sapiens
caagtatggtttattacggacaaatggtagaaaaatgttactaatatccatagataagttccttaagtcatgtagagagactgttattaaaagtttgctgyatttttctattgaatcaagaactagctaccagttacagtgccttctaaacacacagttagctttgctttatcaataaccaaataataaactaggtcccaa

SEQ ID NO: 490284 - DNA, 201 bp, Homo sapiens
aaaagttacttcaaattagtaaattcctattaaggaatttgtctttcagtagcttccgtaaaaactcaagacttacccatttcataattggagcccagaaraaaactgttctgggacctgaaaaaaaaaagaaaagaaaaattcaggaataaaccaaatatattatacacgtcttttaacagctgtcaccaaattttaaaa

SEQ ID NO: 490285 - DNA, 201 bp, Homo sapiens
gtacctatcaagattatgactttctcgaagctagtggctcaatactattcatacttgtacccctattacctaatagaatgtagaataataaataaaaaggraagttagccagtagagttggaagcagtttatactaacatttattaccctaatatatatgtatgtgtatatataatatacagatatacatatacacatata

SEQ ID NO: 490286 - DNA, 201 bp, Homo sapiens
aaggaaagttagccagtagagttggaagcagtttatactaacatttattaccctaatatatatgtatgtgtatatataatatacagatatacatatacacrtatatatatatatatatatatatatatatatacatatacatatacacacacatatatatatacacatacaaacaacgttttttttttttggttttttttt

SEQ ID NO: 490287 - DNA, 201 bp, Homo sapiens
tagtttatggcatttctacatggcccggagatgcgaaggaggaacaacagtttgagacacaggactaagttcttaattaattcttctttctttcctgttcsctgcatgccctccctacttatgcctcaaaagggtcagggaccgctgggtgggaccagggtcaatactcactggattttgtggacttgagagcagaagtca

SEQ ID NO: 490288 - DNA, 201 bp, Homo sapiens
taataattggtacaagtgacattatttcaataacattttttgggggaaaatgtgccataaataaagtatgagttaatgagaaaattacttttatgtgttaycttaatatattatcttaacattctaaaaagttacttattttaatgttaagaatagtgtgggtaaagctgccaactttggtcattgtttcgttttcttaaa

SEQ ID NO: 490289 - DNA, 201 bp, Homo sapiens
taatcccagctacttgggaagctgaggcagaagaatcgcttgaacccgggacgcagaggttgtagtgagctgagatcgcgccactgcactccagcctggghgacagagtgagactctgtctcaaaagaaaaaaaaaagaaatatccacataatgtgttctaatgtgactgtcatgttgggtctgcaatcttgtagaaagaa

SEQ ID NO: 490290 - DNA, 201 bp, Homo sapiens
aataattccaaaagataatcaaaatataacccagttgaaaaataggtgaaaaattgtacaggtactttaaaaaaatgtctgggctgggcacagtggctcaygcctgtaatcccagcactttgggaggctggggcaagtggatcacttgaagttaggagatcaagaccagtctggccaacatggtgaaaccctgcctccact

SEQ ID NO: 490291 - DNA, 201 bp, Homo sapiens
caggtactttaaaaaaatgtctgggctgggcacagtggctcacgcctgtaatcccagcactttgggaggctggggcaagtggatcacttgaagttaggagwtcaagaccagtctggccaacatggtgaaaccctgcctccactaaaatataaaaattagctgggcatggtggcggacacctgtaatcccagctactcagga

SEQ ID NO: 490292 - DNA, 201 bp, Homo sapiens
gggcaagtggatcacttgaagttaggagatcaagaccagtctggccaacatggtgaaaccctgcctccactaaaatataaaaattagctgggcatggtggyggacacctgtaatcccagctactcaggaggctgagtcctgagaatcacttgaacccaggaggtagaggttgtagtgagccaagattgctcctttgtactc

SEQ ID NO: 490293 - DNA, 201 bp, Homo sapiens
gcaagtggatcacttgaagttaggagatcaagaccagtctggccaacatggtgaaaccctgcctccactaaaatataaaaattagctgggcatggtggcgyacacctgtaatcccagctactcaggaggctgagtcctgagaatcacttgaacccaggaggtagaggttgtagtgagccaagattgctcctttgtactcca

SEQ ID NO: 490294 - DNA, 201 bp, Homo sapiens
aggaggctgagtcctgagaatcacttgaacccaggaggtagaggttgtagtgagccaagattgctcctttgtactccagcctgggcaacagagtgagactstgtctcaaaataaataaataaataaataaatccaaatggccaataaacttatgaagaaggagctcaaccacatcagggaaatacaaatggaaaccataat

SEQ ID NO: 490295 - DNA, 201 bp, Homo sapiens
catgcatcattttctttaatcctgacaaaaacactgttaagaagtactacttggctgggcgcagtgactcacgcctgtaatcccagccctttgggaggccraggtgggcagatcacgaggtcaggagatcgagaccatcctggctaacacggtgaaaccccatctctaccaaaaatacaaaaagaaattagccaggcatgg

SEQ ID NO: 490296 - DNA, 201 bp, Homo sapiens
tgttctgtacaatgacacagctattctcataggagagcataaaaatagataattatgacacgtgaagtgattataataccttaatattagaataagcagawgtataaactaacagatacctggctaacatccattatgataaatgaaataacttgattaggtggaaaatttgaactgctgaaaatatactgaagaaaaatc

SEQ ID NO: 490297 - DNA, 201 bp, Homo sapiens
agaatagagttcactagcagctttcacactttccaaagcaccaaactcatcttgtttgttcaattttgtcccaacttcagggagactacaataaacaacarctcccaacgcttcctgtgcaaaattgctgattcccactgttccaatgccattttctgttgttacccattcgtgtttctctgtgaatttacgcaccgagag

SEQ ID NO: 490298 - DNA, 201 bp, Homo sapiens
ctcgtcttttatccctagcgacttaaggatctggttagagtggcccgaatgcattcttccagggtgagggcagccgcagcacacaccagcctcagtccccrgggtggtcgtcatctcgcgagaaagggttggcggggagggtatccaggacgaggagagggaggagtcgccatcgcctccgcctccgcctcctcctgttgg

SEQ ID NO: 490299 - DNA, 201 bp, Homo sapiens
caggcagagccatgtctcggggtggctcctacccacacctgttgtgggacgtgaggaaaaggtccctcgggctggaggacccgtcccggctgcggagtcgmtacctgggtgagcgggggccccggggcggaggcgctgaggtcgccgcctagagtgggggagggggcacgctgccgggtctgttggaggtgggacggcgtc

SEQ ID NO: 490300 - DNA, 201 bp, Homo sapiens
ggcgcggtggctcacgcctgtaatcccagcgctttgggaggccgaggtgggtggatcacctgcggttgggagtttgcaaccagcctgaccaacatggagawaccccgtctttactaaaaacacaaaattagctgagcgtggtggcacatgcctgtaatcccagctactcaggagactgaggcagcagaatcgcttgaaccc

SEQ ID NO: 490301 - DNA, 201 bp, Homo sapiens
ttgttttagactagcatggatttagaggataggccagggattttaatctttgtgagccctatctaaatttcaatgtaggattcttttttttggtgggaggyggggggcagggtgaggcagggttttgctctgtctcccaggctggtgtgcagtggcaccctcatggctcactgcagcctccacgtcctgggctcaaggcca

SEQ ID NO: 490302 - DNA, 201 bp, Homo sapiens
ccccatagcttgtgcctaaaaatatactccagatctgactactgcttaccaccacccttgctgcattaccaccctgatccgagctatcagcatctctggcrtgacctatccccctttgtagttgattttgctagctttctaaccagtcttcctgctttcacttcctacagccctatagctatacagcattcaaagtgatcc

SEQ ID NO: 490303 - DNA, 201 bp, Homo sapiens
aggtttagaagcttctggtagcatggagcttatgttacaagtatgctttaggtcagtgtttttaaaatgttttaaaaatgatccatgataaaagtacattyatgtggcaacctgtgatatacacaacgaaaataaaggattctctaggtgtatatataaaccttactagatgggatgcattctgttttttttcatattgtt

SEQ ID NO: 490304 - DNA, 201 bp, Homo sapiens
caaatggtagaaaaatgttactaatatccatagataagttccttaagtcatgtagagagactgttattaaaagtttgctgcatttttctattgaatcaagmactagctaccagttacagtgccttctaaacacacagttagctttgctttatcaataaccaaataataaactaggtcccaatggttttgtccacatctaga

SEQ ID NO: 490305 - DNA, 201 bp, Homo sapiens
tttgttacatgcatagattatgctgcagtcaagtgagggcttttaaggtatccatcacctgaataacgttctttgtcctcattaacgaatttctcatcatsctcccacctcctcattcttccactccattatgtatcattccactctgcatctgtgtgaacacgtttgtttagaacacacttatgagtcagaacatcatac

SEQ ID NO: 490306 - DNA, 201 bp, Homo sapiens
tcattttctttaatcctgacaaaaacactgttaagaagtactacttggctgggcgcagtgactcacgcctgtaatcccagccctttgggaggccgaggtgrgcagatcacgaggtcaggagatcgagaccatcctggctaacacggtgaaaccccatctctaccaaaaatacaaaaagaaattagccaggcatggtggcgg

SEQ ID NO: 490307 - DNA, 201 bp, Homo sapiens
acaaaaacactgttaagaagtactacttggctgggcgcagtgactcacgcctgtaatcccagccctttgggaggccgaggtgggcagatcacgaggtcagsagatcgagaccatcctggctaacacggtgaaaccccatctctaccaaaaatacaaaaagaaattagccaggcatggtggcggttgcctgtagtcccagct

SEQ ID NO: 490308 - DNA, 201 bp, Homo sapiens
cagtgactcacgcctgtaatcccagccctttgggaggccgaggtgggcagatcacgaggtcaggagatcgagaccatcctggctaacacggtgaaaccccrtctctaccaaaaatacaaaaagaaattagccaggcatggtggcggttgcctgtagtcccagctactcagggggctgaggcaggagaatggtgtgaacccg

SEQ ID NO: 490309 - DNA, 201 bp, Homo sapiens
gagatcgcaccactgcactccagcgtgggcagcagagccagactccatctcaaaaagaaaaaaaaggactactggccaggcacggtggctcatgcttgtawtcccagcattttgggaggccgaggcaggtggatcatctgaggtcaggagtttgagaccagcctgaccaacatggtgaaaacctgtctctactaaaaatac

SEQ ID NO: 490310 - DNA, 201 bp, Homo sapiens
aatagagagacatgtagaaatacatactagataatgaaaggatccaaacagtgaagaagcagtccctttatatttttgaattttttttcaagagtaaagtrtgttatgatagtcatcttgatttgtttgaaatgatgtttacaaatgctattaaaattataaatcctacattttacttgtgaattttttggtctacctttc

SEQ ID NO: 490311 - DNA, 201 bp, Homo sapiens
gatcgcaccactgcactccagcgtgggcagcagagccagactccatctcaaaaagaaaaaaaaggactactggccaggcacggtggctcatgcttgtaatyccagcattttgggaggccgaggcaggtggatcatctgaggtcaggagtttgagaccagcctgaccaacatggtgaaaacctgtctctactaaaaatacaa

SEQ ID NO: 490312 - DNA, 201 bp, Homo sapiens
cgtgggcagcagagccagactccatctcaaaaagaaaaaaaaggactactggccaggcacggtggctcatgcttgtaatcccagcattttgggaggccgargcaggtggatcatctgaggtcaggagtttgagaccagcctgaccaacatggtgaaaacctgtctctactaaaaatacaaaaattagctgggcgtggtggc

SEQ ID NO: 490313 - DNA, 201 bp, Homo sapiens
gcagcagagccagactccatctcaaaaagaaaaaaaaggactactggccaggcacggtggctcatgcttgtaatcccagcattttgggaggccgaggcagktggatcatctgaggtcaggagtttgagaccagcctgaccaacatggtgaaaacctgtctctactaaaaatacaaaaattagctgggcgtggtggcttgcg

SEQ ID NO: 490314 - DNA, 201 bp, Homo sapiens
cattgtatggaagggcattgtatggaaggacattgtgaaatctctcgttctgttctgtttcactgtgaccaccggtgctcacagcccctgtcacgtacccyctggcttactcaatcgatcacgaccctctcatgcggacccccttagagttgtgagcccttaaaagggacagaagttgagcatcagacgagctcggatttt

SEQ ID NO: 490315 - DNA, 201 bp, Homo sapiens
tttagcctgccctgtggaacatccctgctggggactccaaccagccagagtgacgcggatcctgagagctctcctgggtaggcatttgccccggtgggacrcctcgccagagcagtgtgtggcaggcccccgtggaggatcaacagagtggctgaacaccgggaaggaattggcacttggagtccggacaactaaaacttg

SEQ ID NO: 490316 - DNA, 201 bp, Homo sapiens
tctcaaaaagaaaaaaaaggactactggccaggcacggtggctcatgcttgtaatcccagcattttgggaggccgaggcaggtggatcatctgaggtcagragtttgagaccagcctgaccaacatggtgaaaacctgtctctactaaaaatacaaaaattagctgggcgtggtggcttgcgcctgccatcccagctactc

SEQ ID NO: 490317 - DNA, 201 bp, Homo sapiens
ttcccactccatttgagtggaagcatggcctgatctgatcacccacggtgtgcctgttccggcactttggtttttgtttttgacttgacttagattgcttratactttggttttggttttgacctggcttggatttctgaatactctgattttggttttgattttggtttagtgtaaactgcaaaagtgtgtgcgtgccct

SEQ ID NO: 490318 - DNA, 201 bp, Homo sapiens
aaaagaaaaaaaaggactactggccaggcacggtggctcatgcttgtaatcccagcattttgggaggccgaggcaggtggatcatctgaggtcaggagttygagaccagcctgaccaacatggtgaaaacctgtctctactaaaaatacaaaaattagctgggcgtggtggcttgcgcctgccatcccagctactctggag

SEQ ID NO: 490319 - DNA, 201 bp, Homo sapiens
atttaagggagattacggtgttactatgacactagaaaaacttagaactttgtgtaaaatagactggccaacattagaggtgggttggccatcagaaggargcctagacaggtcccttgtttcaaatgtatggcacaaggtaacctgtaagccaaggcacacagaccagtttctgtacgtagacaattacagctggtttta

SEQ ID NO: 490320 - DNA, 201 bp, Homo sapiens
gcaggtggatcatctgaggtcaggagtttgagaccagcctgaccaacatggtgaaaacctgtctctactaaaaatacaaaaattagctgggcgtggtggcktgcgcctgccatcccagctactctggaggctgaggcaggagaatcgcttgaacccaagagacagaggttgcagtgagccaagatcacgccattgcattcc

SEQ ID NO: 490321 - DNA, 201 bp, Homo sapiens
tttagacccccttcgcccccacagtagttaagagaggcagaaagagaggaagaaacagaggcaaaaggaaagtcaaagagagagagagggagagagagagmcagaaagtcaaagagagaaagaaaaatagagagaaatatccaagtagttaagaaaaaaatagtgtaccctattccctttaaaagccaaggtaaatttaaa

SEQ ID NO: 490322 - DNA, 201 bp, Homo sapiens
ttaaaacaaactttggcaattaagacagcataccaagatgcaaatgcctggttgaaatggatcaaatattccatctgcacattaaacaaaagcagttgttwtgcttgtgcacatggcaggccagaggccctcattgtcccccttccactaaagtggtcctccagtccaccaggcgtgggctgcatggtagctcttttccag

SEQ ID NO: 490323 - DNA, 201 bp, Homo sapiens
tcagcccccgagggccatccagcctccgtctcccaacactaagttcacttcatgtctctcaccacagagaggaaacttaggattccttggagacctgaagkgatgcaatgagcttaagaattttcaagagcttatcaatcagtcagcccttgttcatccccaagcggatgtgtggtggtattgtggtggacctttactggg

SEQ ID NO: 490324 - DNA, 201 bp, Homo sapiens
aagtgctgggattacaggcgtgagccaccacacccggcctttttttttttgttatttgtagctattgtaaatgggattgtgttcttgatttggttttcatyttgaatcattattggtgtgtagaaacactactaatttttgtatgttgattttgtatcttgcaagtttactgaattcatttaccaaatctaagggtttttt

SEQ ID NO: 490325 - DNA, 201 bp, Homo sapiens
tcttgtgatcaaaagcatattccccaatatatgagctacattatataaaggcaataaagtgtaaaagaaactctgatttcacagaaaatgtaagaagaacygattttcattttaaattataagactatagaatagagttgtcacattttgaatttgacattacacttttaatttgaaaatacccttggaaaaacttgttta

SEQ ID NO: 490326 - DNA, 201 bp, Homo sapiens
tattttttaaagctatctaatgcattttaattactgcatttcaaattgctaaattcctttcaatatttaatgtaagtattaaatgtgacaatcatttgaaytattgaagaagaaaaaatatctttggtggtcatgtgatgattattgaaacattatgcagtacttttactcataaattatttataggaagtaaggaaatat

SEQ ID NO: 490327 - DNA, 201 bp, Homo sapiens
acctgtctctactaaaaatacaaaaattagctgggcgtggtggcttgcgcctgccatcccagctactctggaggctgaggcaggagaatcgcttgaacccragagacagaggttgcagtgagccaagatcacgccattgcattccatcctgggcaacaaaagcaaagctccatctcaaaaaaaaaaaaaaaaaagtactac

SEQ ID NO: 490328 - DNA, 201 bp, Homo sapiens
ctctactaaaaatacaaaaattagctgggcgtggtggcttgcgcctgccatcccagctactctggaggctgaggcaggagaatcgcttgaacccaagagayagaggttgcagtgagccaagatcacgccattgcattccatcctgggcaacaaaagcaaagctccatctcaaaaaaaaaaaaaaaaaagtactactcttat

SEQ ID NO: 490329 - DNA, 201 bp, Homo sapiens
ggaaatcaattctcacatatgcatctgtggtcatttgttcatcacatcacttttctctgaattgattaagaacagagtgaagaccaggtgcagtggctcaygcctgtaatcccagcactttgggaggccgaggcaggtggatcacttgaggtcaggaattcgagacccacctggccaacatggcgaaacctcatctctact

SEQ ID NO: 490330 - DNA, 201 bp, Homo sapiens
actaagttcacttcatgtctctcaccacagagaggaaacttaggattccttggagacctgaagtgatgcaatgagcttaagaattttcaagagcttatcamtcagtcagcccttgttcatccccaagcggatgtgtggtggtattgtggtggacctttactgggcactctgccgaataactggagtggcacttatacttta

SEQ ID NO: 490331 - DNA, 201 bp, Homo sapiens
caattctcacatatgcatctgtggtcatttgttcatcacatcacttttctctgaattgattaagaacagagtgaagaccaggtgcagtggctcatgcctgyaatcccagcactttgggaggccgaggcaggtggatcacttgaggtcaggaattcgagacccacctggccaacatggcgaaacctcatctctactaaaaat

SEQ ID NO: 490332 - DNA, 201 bp, Homo sapiens
ttagtccagttggctatccctttcaccctggcatttcatcaacaagagggaggaaaaataagacatcgtaaagcgagagaagcccccttataggtctttcractctcacgtccatttagacgcaattggagtcccacgaggaataccagatcaatttaaagcttgaaatcaaatagctacaaaatttaagtcaatatttta

SEQ ID NO: 490333 - DNA, 201 bp, Homo sapiens
gtggtcatttgttcatcacatcacttttctctgaattgattaagaacagagtgaagaccaggtgcagtggctcatgcctgtaatcccagcactttgggagrccgaggcaggtggatcacttgaggtcaggaattcgagacccacctggccaacatggcgaaacctcatctctactaaaaatacaaaaattagccaggtgtg

SEQ ID NO: 490334 - DNA, 201 bp, Homo sapiens
ccccagccctggggctacctgacctgacgaaagtgcacactctatgtgccaaaaaaaaaaaaaaaaaaaaagggccatctataccaattctaagttaattyagactaaacaaggtcttactcatagcaaaggataattgaaatcccaaacttacaaggttttcaacaaaagtaaagtttgctaaaagttaacagtgtaaca

SEQ ID NO: 490335 - DNA, 201 bp, Homo sapiens
tggtcatttgttcatcacatcacttttctctgaattgattaagaacagagtgaagaccaggtgcagtggctcatgcctgtaatcccagcactttgggaggycgaggcaggtggatcacttgaggtcaggaattcgagacccacctggccaacatggcgaaacctcatctctactaaaaatacaaaaattagccaggtgtgg

SEQ ID NO: 490336 - DNA, 201 bp, Homo sapiens
aaacttacaaggttttcaacaaaagtaaagtttgctaaaagttaacagtgtaacatgtattatagtaacttctaatcttgtggccttagacagtctagtcyacagatataaagaaagttcacttaaaaaaaaaaaaaaaagaatggttatcttcaaaaaaaaaaaatggcagttggagttttaacccagactgtagggctc

SEQ ID NO: 490337 - DNA, 201 bp, Homo sapiens
ggtcatttgttcatcacatcacttttctctgaattgattaagaacagagtgaagaccaggtgcagtggctcatgcctgtaatcccagcactttgggaggcygaggcaggtggatcacttgaggtcaggaattcgagacccacctggccaacatggcgaaacctcatctctactaaaaatacaaaaattagccaggtgtggt

SEQ ID NO: 490338 - DNA, 201 bp, Homo sapiens
aaaaaagaatggttatcttcaaaaaaaaaaaatggcagttggagttttaacccagactgtagggctctggccaaggccagtggcctatctctcaaaacaaytagatggggtttccaaaggctggcccccatatctaagggccctggcagcaacggccctgttagcacaagaagcagataagctaactcttaggcaaaacct

SEQ ID NO: 490339 - DNA, 201 bp, Homo sapiens
ttcatcacatcacttttctctgaattgattaagaacagagtgaagaccaggtgcagtggctcatgcctgtaatcccagcactttgggaggccgaggcaggmggatcacttgaggtcaggaattcgagacccacctggccaacatggcgaaacctcatctctactaaaaatacaaaaattagccaggtgtggtggcgcatgc

SEQ ID NO: 490340 - DNA, 201 bp, Homo sapiens
taagctaactcttaggcaaaacctaaacataaagtcccccccatgctgtggtgactttaatcagtaccaaaggacatcattagctaatgaatgctagactractagataccaaagcttgctctgtgaaaatccccacataaccattgaagtttgcaacaccctaaaccccgccaccttgctcctggtatcagagagcccag

SEQ ID NO: 490341 - DNA, 201 bp, Homo sapiens
tgggaggccgaggcaggtggatcacttgaggtcaggaattcgagacccacctggccaacatggcgaaacctcatctctactaaaaatacaaaaattagccmggtgtggtggcgcatgcctgtaatcccagctactcaggaggctgagtcaagagaatcgcttgaacccgggaggcggaggtttcagtgagccgagatcatg

SEQ ID NO: 490342 - DNA, 201 bp, Homo sapiens
accctaaaccccgccaccttgctcctggtatcagagagcccagttaaacataactgtgtagaagtgttggactcagtttattctagtgggcccaacctccraaaccatccttaaacatcagtaaactgggagctgtacgtggatgggagcagcttcaccaacctctgcaaagtgactcagaaaaagccctgctccagtcac

SEQ ID NO: 490343 - DNA, 201 bp, Homo sapiens
gggaggccgaggcaggtggatcacttgaggtcaggaattcgagacccacctggccaacatggcgaaacctcatctctactaaaaatacaaaaattagccargtgtggtggcgcatgcctgtaatcccagctactcaggaggctgagtcaagagaatcgcttgaacccgggaggcggaggtttcagtgagccgagatcatgc

SEQ ID NO: 490344 - DNA, 201 bp, Homo sapiens
gaagctgcaaccccttgaaattagtaattacaaatcccttaaacccaaggtagaaaaaaagaagtacacgtatctctgggcgtcgataaaaaaggactagmtcctagagtaaataccttagtaaaagaggaggttcgtaaactctctccggaaccagtatttcagactttctatgattaactaaatgtgccagtaccagag

SEQ ID NO: 490345 - DNA, 201 bp, Homo sapiens
ggaggttcgtaaactctctccggaaccagtatttcagactttctatgattaactaaatgtgccagtaccagagactccaggaaaaaccagaaatttgtttktgcaattagccgagcatgtagcccagtctctaaatgtcacctcatgttacgtttgtggagaaactgtaataagagatcaatggcataagaagcccgagaa

SEQ ID NO: 490346 - DNA, 201 bp, Homo sapiens
ccggaaccagtatttcagactttctatgattaactaaatgtgccagtaccagagactccaggaaaaaccagaaatttgtttttgcaattagccgagcatgyagcccagtctctaaatgtcacctcatgttacgtttgtggagaaactgtaataagagatcaatggcataagaagcccgagaattagtgcctacagacccag

SEQ ID NO: 490347 - DNA, 201 bp, Homo sapiens
ctcgtttgcaatctgtgtatctttgctgaggtgcctgttatggcctttggctcatttcttagatgtttcttattgtagtgttttaagagttctttatttaytttagataacattactttatcagatgtgtcttttgaaagtatttcccctgtcttgtcttcttgttttcttgacattgtcttttgcagggtggaagttttt

SEQ ID NO: 490348 - DNA, 201 bp, Homo sapiens
tgagattacaggcacccgccatcacgcctggctaatttttgtattttagtagagacggggtttcaccatgttggtcaggctggtctcaaactcctgacctsaggtgatccacccaccttggcctcccaaagtgctgggattacaggtgtgagccactgcacctggccttatttggaaatttttaacaacatcaaaagcggg

SEQ ID NO: 490349 - DNA, 201 bp, Homo sapiens
gattacaggcacccgccatcacgcctggctaatttttgtattttagtagagacggggtttcaccatgttggtcaggctggtctcaaactcctgacctcagrtgatccacccaccttggcctcccaaagtgctgggattacaggtgtgagccactgcacctggccttatttggaaatttttaacaacatcaaaagcgggcct

SEQ ID NO: 490350 - DNA, 201 bp, Homo sapiens
attacaggcacccgccatcacgcctggctaatttttgtattttagtagagacggggtttcaccatgttggtcaggctggtctcaaactcctgacctcaggkgatccacccaccttggcctcccaaagtgctgggattacaggtgtgagccactgcacctggccttatttggaaatttttaacaacatcaaaagcgggccta

SEQ ID NO: 490351 - DNA, 201 bp, Homo sapiens
ttacaggcacccgccatcacgcctggctaatttttgtattttagtagagacggggtttcaccatgttggtcaggctggtctcaaactcctgacctcaggtratccacccaccttggcctcccaaagtgctgggattacaggtgtgagccactgcacctggccttatttggaaatttttaacaacatcaaaagcgggcctag

SEQ ID NO: 490352 - DNA, 201 bp, Homo sapiens
ggaggccgaggcaggtggatcacttgaggtcaggaattcgagacccacctggccaacatggcgaaacctcatctctactaaaaatacaaaaattagccagrtgtggtggcgcatgcctgtaatcccagctactcaggaggctgagtcaagagaatcgcttgaacccgggaggcggaggtttcagtgagccgagatcatgcc

SEQ ID NO: 490353 - DNA, 201 bp, Homo sapiens
ggcacccgccatcacgcctggctaatttttgtattttagtagagacggggtttcaccatgttggtcaggctggtctcaaactcctgacctcaggtgatccrcccaccttggcctcccaaagtgctgggattacaggtgtgagccactgcacctggccttatttggaaatttttaacaacatcaaaagcgggcctaggttaa

SEQ ID NO: 490354 - DNA, 201 bp, Homo sapiens
ccgaggcaggtggatcacttgaggtcaggaattcgagacccacctggccaacatggcgaaacctcatctctactaaaaatacaaaaattagccaggtgtgktggcgcatgcctgtaatcccagctactcaggaggctgagtcaagagaatcgcttgaacccgggaggcggaggtttcagtgagccgagatcatgccactgc

SEQ ID NO: 490355 - DNA, 201 bp, Homo sapiens
tagtagagacggggtttcaccatgttggtcaggctggtctcaaactcctgacctcaggtgatccacccaccttggcctcccaaagtgctgggattacaggygtgagccactgcacctggccttatttggaaatttttaacaacatcaaaagcgggcctaggttaaagaaggctgagaaacagttaattgtataactgctga

SEQ ID NO: 490356 - DNA, 201 bp, Homo sapiens
ggcaggtggatcacttgaggtcaggaattcgagacccacctggccaacatggcgaaacctcatctctactaaaaatacaaaaattagccaggtgtggtggygcatgcctgtaatcccagctactcaggaggctgagtcaagagaatcgcttgaacccgggaggcggaggtttcagtgagccgagatcatgccactgcattc

SEQ ID NO: 490357 - DNA, 201 bp, Homo sapiens
tcactgcttgggaatcacaccacagtacttacttctattccgcagccttatacatttgtttcttaagcttagagatgatcatgacattgctgtgcagtttkctgctgcttacttttaagttgaaatctcatttttgtttcagattctccttcttctgtggttaacaaacagctcggatccatgtcacttgacgagcaacag

SEQ ID NO: 490358 - DNA, 201 bp, Homo sapiens
gcttttaaaaatacttggataggccaggcatggtggcttacgcctataatcccagcactttgggaggctgaggtgggaggatcacctgaggtcaggagttygagaccagcctggccaacatggtaaaaccctatctctactgaaaaaaatacaaaattgctgggcatggtggcgcacgcctgtaaccccagctacgtgtgt

SEQ ID NO: 490359 - DNA, 201 bp, Homo sapiens
actaaatgtgccagtaccagagactccaggaaaaaccagaaatttgtttttgcaattagccgagcatgtagcccagtctctaaatgtcacctcatgttacrtttgtggagaaactgtaataagagatcaatggcataagaagcccgagaattagtgcctacagacccagttcctgatgaattcccggcccaaaagaatcac

SEQ ID NO: 490360 - DNA, 201 bp, Homo sapiens
aggtggatcacttgaggtcaggaattcgagacccacctggccaacatggcgaaacctcatctctactaaaaatacaaaaattagccaggtgtggtggcgcktgcctgtaatcccagctactcaggaggctgagtcaagagaatcgcttgaacccgggaggcggaggtttcagtgagccgagatcatgccactgcattccag

SEQ ID NO: 490361 - DNA, 201 bp, Homo sapiens
tctaaatgtcacctcatgttacgtttgtggagaaactgtaataagagatcaatggcataagaagcccgagaattagtgcctacagacccagttcctgatgrattcccggcccaaaagaatcaccctgatcatttctaggttctaaaagtctcaattattagacaatattgcatagctgaaaaaaggaaagaattcactcat

SEQ ID NO: 490362 - DNA, 201 bp, Homo sapiens
gaggctgagtcaagagaatcgcttgaacccgggaggcggaggtttcagtgagccgagatcatgccactgcattccagcctgggcaatagagcaagattccrtctcaaaaaaaaaaaaaaaaaaaagaacagagcgaaaacacctgggagccagaggcagtcccctccctgccatggatgaaaataaaaggggaactggagg

SEQ ID NO: 490363 - DNA, 201 bp, Homo sapiens
atctctactgaaaaaaatacaaaattgctgggcatggtggcgcacgcctgtaaccccagctacgtgtgtggctgaggcaggagaatcgcttgaacctgggrggcagaggctgcagtgagctgagatcgtgccactgcactccagcctgggagacagagtgagactctgactcaaaaaaaaaaattaataaataaaaatagc

SEQ ID NO: 490364 - DNA, 201 bp, Homo sapiens
acaaaaacagttacatggtggagttcaaaccacacagataaaaatccattcagtaaatttccaaagttgcagaccgtttaagcccacccagaattccaccrggactagacagccccccactaggctatactggatacgtggacatagaacctacgctaagctgcctgaccagtggacaggtagttgtgttattggcactat

SEQ ID NO: 490365 - DNA, 201 bp, Homo sapiens
tgaaaaaaatacaaaattgctgggcatggtggcgcacgcctgtaaccccagctacgtgtgtggctgaggcaggagaatcgcttgaacctgggaggcagagsctgcagtgagctgagatcgtgccactgcactccagcctgggagacagagtgagactctgactcaaaaaaaaaaattaataaataaaaatagccgggcacc

SEQ ID NO: 490366 - DNA, 201 bp, Homo sapiens
gtgcctggcacatagtaagtgccatatccaccatagaagttataattataaacaaagactggccttctaggttaaatttctttttttgtttagttgagacrgagtctcacgctatagcccaggctggagcgcagtggtgcgatctcggctcactgcaacctccgcctctcaggttcaagccattgtcctgcctcagcctcc

SEQ ID NO: 490367 - DNA, 201 bp, Homo sapiens
gaaaaaaatacaaaattgctgggcatggtggcgcacgcctgtaaccccagctacgtgtgtggctgaggcaggagaatcgcttgaacctgggaggcagaggytgcagtgagctgagatcgtgccactgcactccagcctgggagacagagtgagactctgactcaaaaaaaaaaattaataaataaaaatagccgggcaccc

SEQ ID NO: 490368 - DNA, 201 bp, Homo sapiens
tataaacaaagactggccttctaggttaaatttctttttttgtttagttgagacggagtctcacgctatagcccaggctggagcgcagtggtgcgatctcrgctcactgcaacctccgcctctcaggttcaagccattgtcctgcctcagcctcctgagtagctgagattacaggcacgtgccaccgcacccagctaattt

SEQ ID NO: 490369 - DNA, 201 bp, Homo sapiens
ctatcaatctattgcacaagaaggcataagtggcaaaaataagagtgagaactcccactaataaaaagtgagagtctcaaacgggggaaatgagggaagasagagaccctctcatattgttttatattgttttatactcagaaaaggacagagaagcgaaactaaaggcaggtagcccggcgcctaagaaccagacccgaa

SEQ ID NO: 490370 - DNA, 201 bp, Homo sapiens
gatgtatatatttttgtgttacatgagatattttgatacaggcatgcaatgcgtaataatcacatcagggtaaatggattattcatcccctcaagcatttwtcctttgtgttacaaacaatccaattatactcttttagttatttttaaaatgtatggttgtattagtccgttctcccactgttataaagaactacctgat

SEQ ID NO: 490371 - DNA, 201 bp, Homo sapiens
gttttatattgttttatactcagaaaaggacagagaagcgaaactaaaggcaggtagcccggcgcctaagaaccagacccgaaaccaggcctgggcctgcytgacctaagcctggtagttaaaattcgacccctgacctagcaactgttgttatctatagattccacacattgtatggaaggacattgtgaaatctctcgt

SEQ ID NO: 490372 - DNA, 201 bp, Homo sapiens
atcccccactacccttcccagcctttggtaaccatccttatattctctacccccatgagttcaatcattttaatttttttttttttttttttttgagacgragtctcgctctgttgctcaggctggagtgcagtggcgcgatctcggctcactgcaacctctgcctcctgggttcaagcgattctcctgcctcagcttcca

SEQ ID NO: 490373 - DNA, 201 bp, Homo sapiens
gttttatactcagaaaaggacagagaagcgaaactaaaggcaggtagcccggcgcctaagaaccagacccgaaaccaggcctgggcctgcctgacctaagcctggtagttaaaattcgacccctgacctagcaactgttgttatctatagattccacacattgtatggaaggacattgtgaaatctctcgttctgttctgt

SEQ ID NO: 490374 - DNA, 201 bp, Homo sapiens
gcctttggtaaccatccttatattctctacccccatgagttcaatcattttaatttttttttttttttttttttgagacggagtctcgctctgttgctcargctggagtgcagtggcgcgatctcggctcactgcaacctctgcctcctgggttcaagcgattctcctgcctcagcttccagagtagctgggattgcaggc

SEQ ID NO: 490375 - DNA, 201 bp, Homo sapiens
ttttatactcagaaaaggacagagaagcgaaactaaaggcaggtagcccggcgcctaagaaccagacccgaaaccaggcctgggcctgcctgacctaagcytggtagttaaaattcgacccctgacctagcaactgttgttatctatagattccacacattgtatggaaggacattgtgaaatctctcgttctgttctgtt

SEQ ID NO: 490376 - DNA, 201 bp, Homo sapiens
tttatactcagaaaaggacagagaagcgaaactaaaggcaggtagcccggcgcctaagaaccagacccgaaaccaggcctgggcctgcctgacctaagccyggtagttaaaattcgacccctgacctagcaactgttgttatctatagattccacacattgtatggaaggacattgtgaaatctctcgttctgttctgttt

SEQ ID NO: 490377 - DNA, 201 bp, Homo sapiens
gtcaggagttcgtgaccagcctggccaacatgatgaaaccctgcctctactgaaaatacaaaaaaaaaaaaaaaaaaaaattagccagacttggtggcggrtgcctgtagtcccagctactcaggaggctgaggtaagagaattgcttgaacccaggaggcggaggttgcagcgagccgggatcctgccattgcactccag

SEQ ID NO: 490378 - DNA, 201 bp, Homo sapiens
aataataaaaaataaataaataaaaaataataaagtttccaggctgggagcggtggctcacgcctgtaatcccagcactttgggaggccgaggcgggtggrtcccctgaggtcaggagttcgagaccagcctcaacatggagaaaccccgtctctattaaaaatacaaaattagccgggcgtggtggtgcatgcctgtaat

SEQ ID NO: 490379 - DNA, 201 bp, Homo sapiens
agactgaggcagcagaatcgcttgaacccgggaggcggaggttgtggtgagccgaaatcacgccatcgcactccagcctgggcaacaaaagtgaaactccrtctcagaaaaaacaacaacaacaacaacaacaacaaaaaccccatgtcctttattcaattcagaaaacaattcagtgactcttggggcctaaaggccaaa

SEQ ID NO: 490380 - DNA, 201 bp, Homo sapiens
cctgtaaccccagctacgtgtgtggctgaggcaggagaatcgcttgaacctgggaggcagaggctgcagtgagctgagatcgtgccactgcactccagccygggagacagagtgagactctgactcaaaaaaaaaaattaataaataaaaatagccgggcaccctggctctcacctgtaatcccagcactttggggggctg

SEQ ID NO: 490381 - DNA, 201 bp, Homo sapiens
gagactctgactcaaaaaaaaaaattaataaataaaaatagccgggcaccctggctctcacctgtaatcccagcactttggggggctgaggcaggtggatsacttgaggtcaggagtttgagaccagcctggccaacatggtgagaccccatctctactaaaaatacaacaattagacaggtgtgggggcgggcgcctgta

SEQ ID NO: 490382 - DNA, 201 bp, Homo sapiens
tcaaaaaaaaaaattaataaataaaaatagccgggcaccctggctctcacctgtaatcccagcactttggggggctgaggcaggtggatcacttgaggtcwggagtttgagaccagcctggccaacatggtgagaccccatctctactaaaaatacaacaattagacaggtgtgggggcgggcgcctgtaatcctagctac

SEQ ID NO: 490383 - DNA, 201 bp, Homo sapiens
aaaattaataaataaaaatagccgggcaccctggctctcacctgtaatcccagcactttggggggctgaggcaggtggatcacttgaggtcaggagtttgrgaccagcctggccaacatggtgagaccccatctctactaaaaatacaacaattagacaggtgtgggggcgggcgcctgtaatcctagctactcgggaggc

SEQ ID NO: 490384 - DNA, 201 bp, Homo sapiens
gtaaccatccttatattctctacccccatgagttcaatcattttaatttttttttttttttttttttgagacggagtctcgctctgttgctcaggctggartgcagtggcgcgatctcggctcactgcaacctctgcctcctgggttcaagcgattctcctgcctcagcttccagagtagctgggattgcaggcatgcacc

SEQ ID NO: 490385 - DNA, 201 bp, Homo sapiens
cctcagctttttttttttttttttttttttgagacagagtcttgctttgtagcccaggctggagggcaatggtgtgatctcagctcactgcaacctccgcytcccgggttcaagcaattctcctgcctcagccttccgagcagctgggactataagcgtgcgccaccatgccaggctcgtttttgtatttttagtacagat

SEQ ID NO: 490386 - DNA, 201 bp, Homo sapiens
atattctctacccccatgagttcaatcattttaatttttttttttttttttttttgagacggagtctcgctctgttgctcaggctggagtgcagtggcgcratctcggctcactgcaacctctgcctcctgggttcaagcgattctcctgcctcagcttccagagtagctgggattgcaggcatgcaccaccatgcctggc

SEQ ID NO: 490387 - DNA, 201 bp, Homo sapiens
agctttttttttttttttttttttttgagacagagtcttgctttgtagcccaggctggagggcaatggtgtgatctcagctcactgcaacctccgcctccygggttcaagcaattctcctgcctcagccttccgagcagctgggactataagcgtgcgccaccatgccaggctcgtttttgtatttttagtacagatgggg

SEQ ID NO: 490388 - DNA, 201 bp, Homo sapiens
cccatgagttcaatcattttaatttttttttttttttttttttgagacggagtctcgctctgttgctcaggctggagtgcagtggcgcgatctcggctcaytgcaacctctgcctcctgggttcaagcgattctcctgcctcagcttccagagtagctgggattgcaggcatgcaccaccatgcctggctaatttttgtat

SEQ ID NO: 490389 - DNA, 201 bp, Homo sapiens
aataaaaaataaataaataaaaaataataaagtttccaggctgggagcggtggctcacgcctgtaatcccagcactttgggaggccgaggcgggtggatcmcctgaggtcaggagttcgagaccagcctcaacatggagaaaccccgtctctattaaaaatacaaaattagccgggcgtggtggtgcatgcctgtaatccc

SEQ ID NO: 490390 - DNA, 201 bp, Homo sapiens
gctttttttttttttttttttttttgagacagagtcttgctttgtagcccaggctggagggcaatggtgtgatctcagctcactgcaacctccgcctcccrggttcaagcaattctcctgcctcagccttccgagcagctgggactataagcgtgcgccaccatgccaggctcgtttttgtatttttagtacagatggggt

SEQ ID NO: 490391 - DNA, 201 bp, Homo sapiens
ctcacgcctgtaatcccagcactttgggaggccgaggcgggtggatcccctgaggtcaggagttcgagaccagcctcaacatggagaaaccccgtctctaytaaaaatacaaaattagccgggcgtggtggtgcatgcctgtaatcccagctactcaggaggctgaggcaggagaattgcttgaacctgggaggcggaggt

SEQ ID NO: 490392 - DNA, 201 bp, Homo sapiens
caccatgttagccaggatggtctcgaactcctgaccttgtgatccgccctcctcggcctccaaaagtgttgggattgcaggcgtgagccaccgaacccggyggcctcagcttttaaaaacaggcagagtttcttcttaaggatctttgtggctggtcaagtgtcagacatgcagcctcctctagctattattttaggggtc

SEQ ID NO: 490393 - DNA, 201 bp, Homo sapiens
gctgggtcatagggtatacacatgttaaactttagtacaggcttgtccaagctatgtcctgtgggccacatgcggtccaggatggctttgaatgcagcccmacacaaatttgtaaactttcttaaaacattatgagatttttttgtgatttttttttcttagctcatcagctatcattattgttagtattattttatgtgt

SEQ ID NO: 490394 - DNA, 201 bp, Homo sapiens
tggagtgcagtggcacatctcatctcactgcaacctccgcctcctgggttcaagtgattctgttgcctcagcccctgagtagctgggattacaggcgcccrccactacgcccagctaattttttgtatttttagtagagacggggtttcaccatgttggccaggctggtcttgaactcctgatctcgtgacttgcccacct

SEQ ID NO: 490395 - DNA, 201 bp, Homo sapiens
tcccagcactttgggaggccgaggcgggtggatcccctgaggtcaggagttcgagaccagcctcaacatggagaaaccccgtctctattaaaaatacaaawttagccgggcgtggtggtgcatgcctgtaatcccagctactcaggaggctgaggcaggagaattgcttgaacctgggaggcggaggttacagtaagccga

SEQ ID NO: 490396 - DNA, 201 bp, Homo sapiens
gggtatacacatgttaaactttagtacaggcttgtccaagctatgtcctgtgggccacatgcggtccaggatggctttgaatgcagcccaacacaaatttstaaactttcttaaaacattatgagatttttttgtgatttttttttcttagctcatcagctatcattattgttagtattattttatgtgtggcccaagatg

SEQ ID NO: 490397 - DNA, 201 bp, Homo sapiens
agaagaaacctaggcaataccattcagtacataggcatgggcaaggacttcatgactgaaacaccaaaagcaatggcaacaaaaaccaaaattgacaaacmggatccaattaaactaaagagcttctgaacagcaaaagaaatcatcagagtgaacaggcatcctacagaatgggagaaaatttttacaatctacccatct

SEQ ID NO: 490398 - DNA, 201 bp, Homo sapiens
gccgaggcgggtggatcccctgaggtcaggagttcgagaccagcctcaacatggagaaaccccgtctctattaaaaatacaaaattagccgggcgtggtgstgcatgcctgtaatcccagctactcaggaggctgaggcaggagaattgcttgaacctgggaggcggaggttacagtaagccgagatggcgccattgcact

SEQ ID NO: 490399 - DNA, 201 bp, Homo sapiens
gggcaaaggatatgaacagacacttctcaaaagaagacatttatgcagccaacagacagatgaaaaaatgttcatcatcactggccatcagagacatgcaratcaaaaccacaatgagataccatctcacaccagttagaatggcaatcattaaaaagtcaggaaacaacaggtgctggagaggatgtggagaaataggaa

SEQ ID NO: 490400 - DNA, 201 bp, Homo sapiens
gggtggatcccctgaggtcaggagttcgagaccagcctcaacatggagaaaccccgtctctattaaaaatacaaaattagccgggcgtggtggtgcatgcytgtaatcccagctactcaggaggctgaggcaggagaattgcttgaacctgggaggcggaggttacagtaagccgagatggcgccattgcactccagcctg

SEQ ID NO: 490401 - DNA, 201 bp, Homo sapiens
aaggatatgaacagacacttctcaaaagaagacatttatgcagccaacagacagatgaaaaaatgttcatcatcactggccatcagagacatgcaaatcaraaccacaatgagataccatctcacaccagttagaatggcaatcattaaaaagtcaggaaacaacaggtgctggagaggatgtggagaaataggaacactt

SEQ ID NO: 490402 - DNA, 201 bp, Homo sapiens
gtggatcccctgaggtcaggagttcgagaccagcctcaacatggagaaaccccgtctctattaaaaatacaaaattagccgggcgtggtggtgcatgcctrtaatcccagctactcaggaggctgaggcaggagaattgcttgaacctgggaggcggaggttacagtaagccgagatggcgccattgcactccagcctggg

SEQ ID NO: 490403 - DNA, 201 bp, Homo sapiens
tggatcccctgaggtcaggagttcgagaccagcctcaacatggagaaaccccgtctctattaaaaatacaaaattagccgggcgtggtggtgcatgcctgkaatcccagctactcaggaggctgaggcaggagaattgcttgaacctgggaggcggaggttacagtaagccgagatggcgccattgcactccagcctgggc

SEQ ID NO: 490404 - DNA, 201 bp, Homo sapiens
caggagttcgagaccagcctcaacatggagaaaccccgtctctattaaaaatacaaaattagccgggcgtggtggtgcatgcctgtaatcccagctactcrggaggctgaggcaggagaattgcttgaacctgggaggcggaggttacagtaagccgagatggcgccattgcactccagcctgggcaacaagagcaaaact

SEQ ID NO: 490405 - DNA, 201 bp, Homo sapiens
tggagaaaccccgtctctattaaaaatacaaaattagccgggcgtggtggtgcatgcctgtaatcccagctactcaggaggctgaggcaggagaattgctkgaacctgggaggcggaggttacagtaagccgagatggcgccattgcactccagcctgggcaacaagagcaaaactccatctcaaaaaaaataaagtttcc

SEQ ID NO: 490406 - DNA, 201 bp, Homo sapiens
aagatcattattttttacaagaaaactctactaaaaaaatgcagattaaaaaaatttttagtttatacaagtaatcattgcttttgttttttttttttttycccctctctttctcacatttgctgtctacctgaaaagtttctggtggatttttttttttttttttttagcttgtattagcattctttgttagttttggag

SEQ ID NO: 490407 - DNA, 201 bp, Homo sapiens
gaaaactctactaaaaaaatgcagattaaaaaaatttttagtttatacaagtaatcattgcttttgttttttttttttttccccctctctttctcacattkgctgtctacctgaaaagtttctggtggatttttttttttttttttttagcttgtattagcattctttgttagttttggagagaaggatttggatctataa

SEQ ID NO: 490408 - DNA, 201 bp, Homo sapiens
tcctgacctcaggtgatccacccacctcagcctcccaaagtgctgggattacaggtgtgagccaccgtgcctggctaaaaacacattcttgttacctgtcragacatacagtgtcagtgataaaattaaatctcaaaaatctagaatcagcaatgtatgatttccaactgttaatattgtagcatttcatatcatttaata

SEQ ID NO: 490409 - DNA, 201 bp, Homo sapiens
actttagtacaggcttgtccaagctatgtcctgtgggccacatgcggtccaggatggctttgaatgcagcccaacacaaatttgtaaactttcttaaaacrttatgagatttttttgtgatttttttttcttagctcatcagctatcattattgttagtattattttatgtgtggcccaagatgattcttcctcttccaat

SEQ ID NO: 490410 - DNA, 201 bp, Homo sapiens
tcaaactgggcagttttaggaagtgttgaatagctatctacctgtgagggtagaggtataaaaagtaaagtagaggttcctcttcaaagactttcctcccygtctaattaggaataaatagtaacttatcttaaaagcaaaatttattcaaagacctgtgctaacattcttaaatatctgctagccataataaagaaatca

SEQ ID NO: 490411 - DNA, 201 bp, Homo sapiens
gaatagctatctacctgtgagggtagaggtataaaaagtaaagtagaggttcctcttcaaagactttcctccccgtctaattaggaataaatagtaacttmtcttaaaagcaaaatttattcaaagacctgtgctaacattcttaaatatctgctagccataataaagaaatcaatgtactttatgttcttggctcccaca

SEQ ID NO: 490412 - DNA, 201 bp, Homo sapiens
agaaataggaacacttttacactgttggtgggactgtaaactagttcaaccattgtggaagacagtgtggcgattcctcaaggatctagaactagaaataycatttgacccagccatcccattactgggtatgtacccaaaggattataaatcatgctgctataaagacacatgcacatgtatgtttattgtggcactatt

SEQ ID NO: 490413 - DNA, 201 bp, Homo sapiens
cctcttcaaagactttcctccccgtctaattaggaataaatagtaacttatcttaaaagcaaaatttattcaaagacctgtgctaacattcttaaatatcygctagccataataaagaaatcaatgtactttatgttcttggctcccacaatgtagcctaaatatttgccctggcatgcttatactggtccaagcaaccat

SEQ ID NO: 490414 - DNA, 201 bp, Homo sapiens
cacagtggaatattatgcacccataaaaaggatgagttcacgtcctttgtagggacatggatgaagttggaaaccatcattctgagcaaactatcacaagkatagaaaaccaaacaccacatgttctcactcataggtgggaattgaacaatgagaacacttagacacagggtggggaacatcacacaccagggcctgtcg

SEQ ID NO: 490415 - DNA, 201 bp, Homo sapiens
cttcaaagactttcctccccgtctaattaggaataaatagtaacttatcttaaaagcaaaatttattcaaagacctgtgctaacattcttaaatatctgcyagccataataaagaaatcaatgtactttatgttcttggctcccacaatgtagcctaaatatttgccctggcatgcttatactggtccaagcaaccattag

SEQ ID NO: 490416 - DNA, 201 bp, Homo sapiens
gattaaaaaaactcatcaatgaaactaattttttatctgataaaataattctaaaaaaaaaaaacacttgatgttatcccatctgtccatttttgctttgrttgcctgtgcttgtggggtattactcaagaaatctttgcccactccaatgtccttgagagtctccccaatgttttcttgtagtagtttcatggtttgatg

SEQ ID NO: 490417 - DNA, 201 bp, Homo sapiens
cccagctactcaggaggctgaggcaggagaattgcttgaacctgggaggcggaggttacagtaagccgagatggcgccattgcactccagcctgggcaacragagcaaaactccatctcaaaaaaaataaagtttcctaaggaagcttaaaaaaaaaaaaaagcctgcatagctgactcttccagctccctgtgttctatt

SEQ ID NO: 490418 - DNA, 201 bp, Homo sapiens
aagactttcctccccgtctaattaggaataaatagtaacttatcttaaaagcaaaatttattcaaagacctgtgctaacattcttaaatatctgctagccrtaataaagaaatcaatgtactttatgttcttggctcccacaatgtagcctaaatatttgccctggcatgcttatactggtccaagcaaccattaggtcat

SEQ ID NO: 490419 - DNA, 201 bp, Homo sapiens
atggatatccagttttcccagcacaatttattgaagggattgtcttttcctttatattcttggctcttttgtcaaaaattagttcactgtagatgtatgartttatttcttgtttctctattctgttccactggtctatgtgtctgttttcatgccagtactatgctatttgggttgctatagctgtggtataatttgaag

SEQ ID NO: 490420 - DNA, 201 bp, Homo sapiens
ttaaagtacttaaagaaaagtactttctgggtctaccttcaattaataagattaccattttctgaactttcttcttgttgcccaggctggagtgcaatggygtgatctcagctcactgcaacctccacctccctggttcaagtgattctcctgtctcagcctcccaagtagctcggattacaggcatgtgccaccataccc

SEQ ID NO: 490421 - DNA, 201 bp, Homo sapiens
agctactcaggaggctgaggcaggagaattgcttgaacctgggaggcggaggttacagtaagccgagatggcgccattgcactccagcctgggcaacaagrgcaaaactccatctcaaaaaaaataaagtttcctaaggaagcttaaaaaaaaaaaaaagcctgcatagctgactcttccagctccctgtgttctattcat

SEQ ID NO: 490422 - DNA, 201 bp, Homo sapiens
tcactgtagatgtatgagtttatttcttgtttctctattctgttccactggtctatgtgtctgttttcatgccagtactatgctatttgggttgctatagstgtggtataatttgaagtcagataatatgattcctcctgatttattctttttgcttcagatagctttggctactctgggtcttttgtggttccatgtaaa

SEQ ID NO: 490423 - DNA, 201 bp, Homo sapiens
ttaaagaaaagtactttctgggtctaccttcaattaataagattaccattttctgaactttcttcttgttgcccaggctggagtgcaatggcgtgatctcrgctcactgcaacctccacctccctggttcaagtgattctcctgtctcagcctcccaagtagctcggattacaggcatgtgccaccatacccagctaattt

SEQ ID NO: 490424 - DNA, 201 bp, Homo sapiens
tactcaggaggctgaggcaggagaattgcttgaacctgggaggcggaggttacagtaagccgagatggcgccattgcactccagcctgggcaacaagagcwaaactccatctcaaaaaaaataaagtttcctaaggaagcttaaaaaaaaaaaaaagcctgcatagctgactcttccagctccctgtgttctattcataca

SEQ ID NO: 490425 - DNA, 201 bp, Homo sapiens
agaaatgctgatttttgggccgggcgcggtggctcacgcctgtaatcccagcactttgggaggccgaggcgggcggatcacgaggtcaggagatcgagacmatcctggctaacacggtgaaacctcgtctctattaaaaacacaaaaaattagcggggcgtggtggcgggcgcctgtggtcccagctactcaggaggctga

SEQ ID NO: 490426 - DNA, 201 bp, Homo sapiens
taaagaaaagtactttctgggtctaccttcaattaataagattaccattttctgaactttcttcttgttgcccaggctggagtgcaatggcgtgatctcarctcactgcaacctccacctccctggttcaagtgattctcctgtctcagcctcccaagtagctcggattacaggcatgtgccaccatacccagctaatttt

SEQ ID NO: 490427 - DNA, 201 bp, Homo sapiens
cggaggttacagtaagccgagatggcgccattgcactccagcctgggcaacaagagcaaaactccatctcaaaaaaaataaagtttcctaaggaagcttaaaaaaaaaaaaaagcctgcatagctgactcttccagctccctgtgttctattcatacagaacacctaccggtagaaccttatggagtatctttagctggat

SEQ ID NO: 490428 - DNA, 201 bp, Homo sapiens
gagtgaacccgggaggcggagcgtgcagtgagccgagacagcgcaactgcagtccagcctgggcgaaagagggagactccgtctcaaaaaaaaaaaaaaaraaaaagaaagaaaaagaaatgctgatttttgtatgatgattttgtatactgtgaccttgttgaatttgtgtatcagttctaatggttttttggtggagtc

SEQ ID NO: 490429 - DNA, 201 bp, Homo sapiens
aattaataagattaccattttctgaactttcttcttgttgcccaggctggagtgcaatggcgtgatctcagctcactgcaacctccacctccctggttcargtgattctcctgtctcagcctcccaagtagctcggattacaggcatgtgccaccatacccagctaatttttttgtatttagtagagatgcggtttcacca

SEQ ID NO: 490430 - DNA, 201 bp, Homo sapiens
gatgtacttttgtctggttttggtatcagggtaatactggccttgtagaatgagtttggaagtattccctcctcttctatgtttcagagtagtttgagtayggttggtattagttcttcaagtctttggtagaattcagcagtgaatacttcgggtcccagatcttgttacttgttatttatctgttcaggttttagattt

SEQ ID NO: 490431 - DNA, 201 bp, Homo sapiens
ggatgtatgtgtataggagtttatacatttcttctagattttccaatttattggcatataattgctcatagtagccaccaatgatcctttgaatttctgtrttatcagttgtaatgtctcctctttcatttctgattttatttatttgggtcttttctcttctgttcttagttaacatggctgaaagtttctaaattcttt

SEQ ID NO: 490432 - DNA, 201 bp, Homo sapiens
taaactagaatccaaatctccagactcctcatccaacatttatttatttatttagttagttagttattttttgagacagagtctcgctctgtcacccaggytggagtgcagtggcgcaatctcggctcactgcaacctccgcctcctgggttcaagcgattctcctgtctcagcctcctgagtagctgggattacaggtgt

SEQ ID NO: 490433 - DNA, 201 bp, Homo sapiens
tgctctgtctcccaggctggtgtgcagtggcaccctcatggctcactgcagcctccacgtcctgggctcaaggccatcctcccacctcagcctcctggaatttttttttttttttaaagaataattatcaaagtcagagatacctgtaggtttaaatgtttaaatgtaatagtttctcaaattactgtatactaggtgtag

SEQ ID NO: 490434 - DNA, 201 bp, Homo sapiens
tttagtgagtgatgttaataaaaatgtaaattagataaattatatctattacaaacaacagcaacaagcttttcatgagttgaaagaaaaactcaggtcgsccccagccctggggctacctgacctgacgaaagtgcacactctatgtgccaaaaaaaaaaaaaaaaaaaaagggccatctataccaattctaagttaatt

SEQ ID NO: 490435 - DNA, 201 bp, Homo sapiens
ttagtgagtgatgttaataaaaatgtaaattagataaattatatctattacaaacaacagcaacaagcttttcatgagttgaaagaaaaactcaggtcggscccagccctggggctacctgacctgacgaaagtgcacactctatgtgccaaaaaaaaaaaaaaaaaaaaagggccatctataccaattctaagttaattt

SEQ ID NO: 490436 - DNA, 201 bp, Homo sapiens
agacatcatattagaatgtgtttgtgagctcctaagttaggttaaataattagtattgcccacattaccacctgttacatacaactttattttctgacagyacaatcagataagttcacagccaagccattggattccaactcaggagaaagaaatgacctcaatcttgatcgctcttgtggggttccagaagaatctgct

SEQ ID NO: 490437 - DNA, 201 bp, Homo sapiens
caggctggagtgcaatggcgtgatctcagctcactgcaacctccacctccctggttcaagtgattctcctgtctcagcctcccaagtagctcggattacargcatgtgccaccatacccagctaatttttttgtatttagtagagatgcggtttcaccatgttagtcagtcttgtcgcgaactcctgacctcaggtgatcc

SEQ ID NO: 490438 - DNA, 201 bp, Homo sapiens
tgccaccatacccagctaatttttttgtatttagtagagatgcggtttcaccatgttagtcagtcttgtcgcgaactcctgacctcaggtgatccacctgyctcggcctctcaaagtgctgggatttcaggcatgcaccaccgcgcctggcccgtttcctgaactttccatatcttcaatatttactgtggaccaggcact

SEQ ID NO: 490439 - DNA, 201 bp, Homo sapiens
gacaggatacatattgttactttttgagatggagttttgctcttgtcgcccaggctggagtgcaaaggcgcgatctcagctcactgcaacctccgcctccygggttgaagtgattctcctgcctcagcctctggagtagctgggattacaggcgtgcgccaccacacccagctaatttttgtattattagtagagacgggg

SEQ ID NO: 490440 - DNA, 201 bp, Homo sapiens
atctccagactcctcatccaacatttatttatttatttagttagttagttattttttgagacagagtctcgctctgtcacccaggctggagtgcagtggcrcaatctcggctcactgcaacctccgcctcctgggttcaagcgattctcctgtctcagcctcctgagtagctgggattacaggtgtgtgccaccgcgcctg

SEQ ID NO: 490441 - DNA, 201 bp, Homo sapiens
gagtgcaaaggcgcgatctcagctcactgcaacctccgcctcctgggttgaagtgattctcctgcctcagcctctggagtagctgggattacaggcgtgcrccaccacacccagctaatttttgtattattagtagagacggggttttaccatgttggccaggctggtctcgaactcctgccctcaggtgattcacctgcc

SEQ ID NO: 490442 - DNA, 201 bp, Homo sapiens
gactcctcatccaacatttatttatttatttagttagttagttattttttgagacagagtctcgctctgtcacccaggctggagtgcagtggcgcaatctyggctcactgcaacctccgcctcctgggttcaagcgattctcctgtctcagcctcctgagtagctgggattacaggtgtgtgccaccgcgcctggctaatt

SEQ ID NO: 490443 - DNA, 201 bp, Homo sapiens
acccagctaatttttgtattattagtagagacggggttttaccatgttggccaggctggtctcgaactcctgccctcaggtgattcacctgccttggcctmccaaagtgctcggattacaggcgtgagccaccgcacctggccaagatttaatttttaagattaaaaaattggatagattaagagttttggggcagaaaag

SEQ ID NO: 490444 - DNA, 201 bp, Homo sapiens
actcctcatccaacatttatttatttatttagttagttagttattttttgagacagagtctcgctctgtcacccaggctggagtgcagtggcgcaatctcrgctcactgcaacctccgcctcctgggttcaagcgattctcctgtctcagcctcctgagtagctgggattacaggtgtgtgccaccgcgcctggctaattt

SEQ ID NO: 490445 - DNA, 201 bp, Homo sapiens
agtagagacggggttttaccatgttggccaggctggtctcgaactcctgccctcaggtgattcacctgccttggcctcccaaagtgctcggattacaggcstgagccaccgcacctggccaagatttaatttttaagattaaaaaattggatagattaagagttttggggcagaaaagaaaagaagcatgtgatggttgtt

SEQ ID NO: 490446 - DNA, 201 bp, Homo sapiens
tagttagttattttttgagacagagtctcgctctgtcacccaggctggagtgcagtggcgcaatctcggctcactgcaacctccgcctcctgggttcaagygattctcctgtctcagcctcctgagtagctgggattacaggtgtgtgccaccgcgcctggctaatttttgtatttttagtagagacaaggtttcaccatg

SEQ ID NO: 490447 - DNA, 201 bp, Homo sapiens
caggacgaggcgggcagatcacctgagcccaggagttcgagaccagcctgggcaacatgacaaaaccctacctctacaaaaatacaaaaattagctgggtrtggtggtgtgtgcctgtagtcccagctgctcgggaggctgaggcaggaggatcacttgagcccaggaggtagggtttgcagtgagccgagattgtgccac

SEQ ID NO: 490448 - DNA, 201 bp, Homo sapiens
cagactgagaaatatacacataggctgcacgcagtggctcacgtctgtaatcccagcactttgggaggccaaggcgggcagatcacgagatcaggagttcragaccagcctggccaatatggtgaaaccccgtctctactaaaaatacaaaaattagctgggtgtggtggtgtgcacctgtaatcccagctacttgggaag

SEQ ID NO: 490449 - DNA, 201 bp, Homo sapiens
gagtctcgctctgtcacccaggctggagtgcagtggcgcaatctcggctcactgcaacctccgcctcctgggttcaagcgattctcctgtctcagcctccygagtagctgggattacaggtgtgtgccaccgcgcctggctaatttttgtatttttagtagagacaaggtttcaccatgttggtcaggctggtcttgaact

SEQ ID NO: 490450 - DNA, 201 bp, Homo sapiens
tgagcccaggagttcgagaccagcctgggcaacatgacaaaaccctacctctacaaaaatacaaaaattagctgggtgtggtggtgtgtgcctgtagtccyagctgctcgggaggctgaggcaggaggatcacttgagcccaggaggtagggtttgcagtgagccgagattgtgccactgcactccagcctgggccacaga

SEQ ID NO: 490451 - DNA, 201 bp, Homo sapiens
gctgcacgcagtggctcacgtctgtaatcccagcactttgggaggccaaggcgggcagatcacgagatcaggagttcaagaccagcctggccaatatggtraaaccccgtctctactaaaaatacaaaaattagctgggtgtggtggtgtgcacctgtaatcccagctacttgggaagctgaggcagaagaatcgcttgaa

SEQ ID NO: 490452 - DNA, 201 bp, Homo sapiens
agtggcgcaatctcggctcactgcaacctccgcctcctgggttcaagcgattctcctgtctcagcctcctgagtagctgggattacaggtgtgtgccaccrcgcctggctaatttttgtatttttagtagagacaaggtttcaccatgttggtcaggctggtcttgaactcctgacctggtgatccacccacctcggcctc

SEQ ID NO: 490453 - DNA, 201 bp, Homo sapiens
agcctgggcaacatgacaaaaccctacctctacaaaaatacaaaaattagctgggtgtggtggtgtgtgcctgtagtcccagctgctcgggaggctgaggmaggaggatcacttgagcccaggaggtagggtttgcagtgagccgagattgtgccactgcactccagcctgggccacagagcgagaccctgtctcaaaaaa

SEQ ID NO: 490454 - DNA, 201 bp, Homo sapiens
gcagtggctcacgtctgtaatcccagcactttgggaggccaaggcgggcagatcacgagatcaggagttcaagaccagcctggccaatatggtgaaacccygtctctactaaaaatacaaaaattagctgggtgtggtggtgtgcacctgtaatcccagctacttgggaagctgaggcagaagaatcgcttgaacccggga

SEQ ID NO: 490455 - DNA, 201 bp, Homo sapiens
cctgggttcaagcgattctcctgtctcagcctcctgagtagctgggattacaggtgtgtgccaccgcgcctggctaatttttgtatttttagtagagacarggtttcaccatgttggtcaggctggtcttgaactcctgacctggtgatccacccacctcggcctcccaaagtgctgggattacaggcgtgagccatcacg

SEQ ID NO: 490456 - DNA, 201 bp, Homo sapiens
agtcccagctgctcgggaggctgaggcaggaggatcacttgagcccaggaggtagggtttgcagtgagccgagattgtgccactgcactccagcctgggcmacagagcgagaccctgtctcaaaaaaaaaaaaaaaaaaaaagtcacaacagataagtcatagagctgggattcaaattcaggtctgtctgaatatagagt

SEQ ID NO: 490457 - DNA, 201 bp, Homo sapiens
gtggctcacgtctgtaatcccagcactttgggaggccaaggcgggcagatcacgagatcaggagttcaagaccagcctggccaatatggtgaaaccccgthtctactaaaaatacaaaaattagctgggtgtggtggtgtgcacctgtaatcccagctacttgggaagctgaggcagaagaatcgcttgaacccgggacgc

SEQ ID NO: 490458 - DNA, 201 bp, Homo sapiens
gggaaaataaaggagagtgttgggtcgggcgcagtggctcacatctgtaatcccagcactttgggaggctgaggcgggaagatcacgaggtcaggagatcragaccatcctggctaacacggtgaaaccctgtctctactaaaaatacaaaaacgtagccgggcgtggtggcgggcgcctgtagtcccagctactcaggag

SEQ ID NO: 490459 - DNA, 201 bp, Homo sapiens
ggctcacgtctgtaatcccagcactttgggaggccaaggcgggcagatcacgagatcaggagttcaagaccagcctggccaatatggtgaaaccccgtctytactaaaaatacaaaaattagctgggtgtggtggtgtgcacctgtaatcccagctacttgggaagctgaggcagaagaatcgcttgaacccgggacgcag

SEQ ID NO: 490460 - DNA, 201 bp, Homo sapiens
gatcacgaggtcaggagatcgagaccatcctggctaacacggtgaaaccctgtctctactaaaaatacaaaaacgtagccgggcgtggtggcgggcgcctrtagtcccagctactcaggaggctgaggcaggagaatggcatgaacccgggaggcggagcttgcagtgagccaagattgcgccactgcactccagcctggg

SEQ ID NO: 490461 - DNA, 201 bp, Homo sapiens
gccgctagtaaaaatggtttataaaggccatcgcaactccaggacaatggtaccaaatgttcatggcattttttggtgaaattgcagtttcatgctctgartgtttttccataatgatttatcttcatatattgccaatgggatttcagtattacattattaaatcttcagttatctctttatccaacatggttcttttag

SEQ ID NO: 490462 - DNA, 201 bp, Homo sapiens
cacgtctgtaatcccagcactttgggaggccaaggcgggcagatcacgagatcaggagttcaagaccagcctggccaatatggtgaaaccccgtctctackaaaaatacaaaaattagctgggtgtggtggtgtgcacctgtaatcccagctacttgggaagctgaggcagaagaatcgcttgaacccgggacgcagaggt

SEQ ID NO: 490463 - DNA, 201 bp, Homo sapiens
tcacgaggtcaggagatcgagaccatcctggctaacacggtgaaaccctgtctctactaaaaatacaaaaacgtagccgggcgtggtggcgggcgcctgtwgtcccagctactcaggaggctgaggcaggagaatggcatgaacccgggaggcggagcttgcagtgagccaagattgcgccactgcactccagcctgggcg

SEQ ID NO: 490464 - DNA, 201 bp, Homo sapiens
cactttgggaggccaaggcgggcagatcacgagatcaggagttcaagaccagcctggccaatatggtgaaaccccgtctctactaaaaatacaaaaattarctgggtgtggtggtgtgcacctgtaatcccagctacttgggaagctgaggcagaagaatcgcttgaacccgggacgcagaggttgtagtgagctgagatc

SEQ ID NO: 490465 - DNA, 201 bp, Homo sapiens
ttcaagaccagcctggccaatatggtgaaaccccgtctctactaaaaatacaaaaattagctgggtgtggtggtgtgcacctgtaatcccagctacttggraagctgaggcagaagaatcgcttgaacccgggacgcagaggttgtagtgagctgagatcgcgccactgcactccagcctgggcgacagagtgagactctg

SEQ ID NO: 490466 - DNA, 201 bp, Homo sapiens
actgtgggcttcacaagggattatcagcacctcctattcccaactgaggtggaacaggttagtagattaggctggagttatgtattttccttccccaatgyggaaggctggaattgggtatttctgtttgtctaggtcagttaggctctaataaaacctcagtgggtaggctgtggtgaaatagcttttcttaagggcaga

SEQ ID NO: 490467 - DNA, 201 bp, Homo sapiens
tagtcccagttactcgggagggagtggcaggaggatcacttgagcccaggcgttccaccactacactccaagtctggatgacagcaagagctgatatcttaaaaaaaaaaattattatcataagcctttatagggctttttaaaattttaaaacaccaatgattcattatataggaaaaaaagctttttgaccatgagtca

SEQ ID NO: 490468 - DNA, 201 bp, Homo sapiens
gccagcagccagtcctggcaagaaggcaaggaataggtttgcacaagaagttctggattatttcccagcagcacaggtttttggaaaaaccataatcttgrtgggactatactatctcagagcaaaatctcacttctaaaactttacataggaattatggcatacctcttttgggctcgggccttccaaagctccccttct

SEQ ID NO: 490469 - DNA, 201 bp, Homo sapiens
ctgctcgggaggctgaggcaggaggatcacttgagcccaggaggtagggtttgcagtgagccgagattgtgccactgcactccagcctgggccacagagcragaccctgtctcaaaaaaaaaaaaaaaaaaaaagtcacaacagataagtcatagagctgggattcaaattcaggtctgtctgaatatagagtattttctg

SEQ ID NO: 490470 - DNA, 201 bp, Homo sapiens
tgaggcaggaggatcacttgagcccaggaggtagggtttgcagtgagccgagattgtgccactgcactccagcctgggccacagagcgagaccctgtctcaaaaaaaaaaaaaaaaaaaaagtcacaacagataagtcatagagctgggattcaaattcaggtctgtctgaatatagagtattttctgctacattatcagt

SEQ ID NO: 490471 - DNA, 201 bp, Homo sapiens
tcaaaagctgtcagtcagaagctcccacttccacttgtacttttcaatgtgggaaaggtatagaatcaatctccaagccttgaatagagcctgatgaaatraacgcgttacttatttatcaggctttattactagcgatcaaatatagcacagagaaggattagtagaggaagacattctgacatgaagggacatctgaaa

SEQ ID NO: 490472 - DNA, 201 bp, Homo sapiens
gccaaaaactttttttttttttttttgagatggagtctcactctgtcgcccaggctggagtgtagtggtgtgatctcggctcgctgcaagctctgcctccygggttcacgccattctcctgcctcagccccccgagtagctgggactacaggcgcccgccaccacttctggctaattttttgtatttttagtagagatggt

SEQ ID NO: 490473 - DNA, 201 bp, Homo sapiens
agagatgttgcaggagagagggtgaaatgcacaggctaggagagtagacggcttcacttgaagggaagggattggggctgtggatgcctctagaggcagtygtcagagggcctctaaaaggtccattttagaggaagcgagaaggaaggtctcgataaggagccattcagggtccattacctgctggatggttgtacaacg

SEQ ID NO: 490474 - DNA, 201 bp, Homo sapiens
tctactaaaaacaaaaaaatcagccgggtgtggtggcacgctcctgtagtcccagctactcgggagggcgagacaggagaatcgcttgaacccgggaggcrgaggttgcagtgagccaagatcgcgccactgcactccagcctgggcgatagagcgagactcggtctcaaaaaaaaaagaagaaaaagaaaaacagtatac

SEQ ID NO: 490475 - DNA, 201 bp, Homo sapiens
tggttgagtgcaactggtgtctttgcttatttatcctgaatttttaacaaaatcacaatttgatagaagtatgtttagcctgaatcttcattcattaatgyagctccctggttgtctcaatagttttactttttttaagaaacaaaattgtagggaaataaatgtataacatgcacattgttattaattgtatcctattat

SEQ ID NO: 490476 - DNA, 201 bp, Homo sapiens
cacgaggtcaggagatcgagaccatcctggctaacacggtgaaaccctgtctctactaaaaatacaaaaacgtagccgggcgtggtggcgggcgcctgtartcccagctactcaggaggctgaggcaggagaatggcatgaacccgggaggcggagcttgcagtgagccaagattgcgccactgcactccagcctgggcga

SEQ ID NO: 490477 - DNA, 201 bp, Homo sapiens
acaaaaaaatcagccgggtgtggtggcacgctcctgtagtcccagctactcgggagggcgagacaggagaatcgcttgaacccgggaggcggaggttgcastgagccaagatcgcgccactgcactccagcctgggcgatagagcgagactcggtctcaaaaaaaaaagaagaaaaagaaaaacagtatacatagaagtga

SEQ ID NO: 490478 - DNA, 201 bp, Homo sapiens
acattaagctgagatctgaaaggtgagcctgaataagttaggtgaaggagcatgagtaaagggaagcatgaatagcatattgcagagcctctgagatgccrcatacaggatgactaggagaacctcagtatgcaggacaaagtgactttttggacatttttaggtttcgcatttttattttaagaacagagggaagctaat

SEQ ID NO: 490479 - DNA, 201 bp, Homo sapiens
atggagtctcactctgtcgcccaggctggagtgtagtggtgtgatctcggctcgctgcaagctctgcctcccgggttcacgccattctcctgcctcagccycccgagtagctgggactacaggcgcccgccaccacttctggctaattttttgtatttttagtagagatggtgtttcaccgtgttagccaggatggtctcg

SEQ ID NO: 490480 - DNA, 201 bp, Homo sapiens
ttttgaacagtatttaaatatataaaatactcagcatttttttttttactatggttatcacatgtgtttttgtatgtctttgagcatcttttagaacctcrtgattataatttcgtagtggaaatgtacagattaaatcatttcacagcgtgtgcattacaaaaaatagttactttgtgattcttatgcaaaagacttgaa

SEQ ID NO: 490481 - DNA, 201 bp, Homo sapiens
ggtgaaaccctgtctctactaaaaatacaaaaacgtagccgggcgtggtggcgggcgcctgtagtcccagctactcaggaggctgaggcaggagaatggcrtgaacccgggaggcggagcttgcagtgagccaagattgcgccactgcactccagcctgggcgacagaatgagactctgtctcaaaaaaaaaaaaaaaaga

SEQ ID NO: 490482 - DNA, 201 bp, Homo sapiens
cccgggttcacgccattctcctgcctcagccccccgagtagctgggactacaggcgcccgccaccacttctggctaattttttgtatttttagtagagatrgtgtttcaccgtgttagccaggatggtctcgatctcctgaccttgtggtctgcctgcctcggcctcccaaagtgctgggattacaggagtgagccaccat

SEQ ID NO: 490483 - DNA, 201 bp, Homo sapiens
tactaaaaatacaaaaacgtagccgggcgtggtggcgggcgcctgtagtcccagctactcaggaggctgaggcaggagaatggcatgaacccgggaggcgragcttgcagtgagccaagattgcgccactgcactccagcctgggcgacagaatgagactctgtctcaaaaaaaaaaaaaaaagaaagaaaggagagtgtt

SEQ ID NO: 490484 - DNA, 201 bp, Homo sapiens
ccaccacttctggctaattttttgtatttttagtagagatggtgtttcaccgtgttagccaggatggtctcgatctcctgaccttgtggtctgcctgcctyggcctcccaaagtgctgggattacaggagtgagccaccatgcccggcctgccaaaaacttttaacagcttagctgacatatagtttcctgtgcaaaagta

SEQ ID NO: 490485 - DNA, 201 bp, Homo sapiens
cttggcacacatttataattgatgtatattcatagtaatgctcaataaattatagttattaatatgatagctttctacataaagctatttgtgtgtttacktgaagttctaaaccttaagggttttaaataaaaatctaccttttaagtaacatatctgtgcattatgtaaataagactttgaaaaatacaatttttagaa

SEQ ID NO: 490486 - DNA, 201 bp, Homo sapiens
gccgggcgtggtggcgggcgcctgtagtcccagctactcaggaggctgaggcaggagaatggcatgaacccgggaggcggagcttgcagtgagccaagatygcgccactgcactccagcctgggcgacagaatgagactctgtctcaaaaaaaaaaaaaaaagaaagaaaggagagtgttcccaaattatccctgccaatc

SEQ ID NO: 490487 - DNA, 201 bp, Homo sapiens
ttctcatgcctcagcccccaagtagctggaattacaggcgtgtgccaatatgcctggctaatttttgtatttttaatagagacggggtttcaccatgttgrccaggctggtctcaaactcctgaccgcaggtgatccgcccgcctcaacctcccaaagtgctgggattacaggtgtgagccaccatgcccggccttggctg

SEQ ID NO: 490488 - DNA, 201 bp, Homo sapiens
gtggaatacttttctactgcatttctgtatttgaagtcttgttaattgtcctctcacagaataaaggctagaagagaggttctatgagattctcccccccytttttttttttttttttgagatgaggtctcacccagactcgactcgaactcctgggcttaagggttcctcccaccactgagccccgctgagattctctta

SEQ ID NO: 490489 - DNA, 201 bp, Homo sapiens
aggccaacatggtgaagctccatctctactaaaaatacaaaaagttagctgggtgtggtggcgcatgtgggaggctgaggcaggagaattgcttgaacccrggaggcggaggttgcagtgagccaagatcatgctgctgcacttcagcctgggtgacagagtgagactctgtctcaaaaaaaaaaaaaaaaaaaaaaagga

SEQ ID NO: 490490 - DNA, 201 bp, Homo sapiens
atgcctcagcccccaagtagctggaattacaggcgtgtgccaatatgcctggctaatttttgtatttttaatagagacggggtttcaccatgttggccagsctggtctcaaactcctgaccgcaggtgatccgcccgcctcaacctcccaaagtgctgggattacaggtgtgagccaccatgcccggccttggctgttacg

SEQ ID NO: 490491 - DNA, 201 bp, Homo sapiens
tggaaaaaataaatatatatataccaccttagcttttttttgccaaaatagctatatattcctttctggtttaaaagaaatacatgtttgtcgcacacacrcacacacacacacacacacacacacacacaaattcagtataaaaaatttacctgcagtaattctactgacatgacactcaacactgatgcatagccttcc

SEQ ID NO: 490492 - DNA, 201 bp, Homo sapiens
acatggtgaagctccatctctactaaaaatacaaaaagttagctgggtgtggtggcgcatgtgggaggctgaggcaggagaattgcttgaacccgggaggyggaggttgcagtgagccaagatcatgctgctgcacttcagcctgggtgacagagtgagactctgtctcaaaaaaaaaaaaaaaaaaaaaaaggaagtctt

SEQ ID NO: 490493 - DNA, 201 bp, Homo sapiens
tatactaacatttattaccctaatatatatgtatgtgtatatataatatacagatatacatatacacatatatatatatatatatatatatatatatatayatatacatatacacacacatatatatatacacatacaaacaacgttttttttttttggttttttttttggttttttttgtttttttttgagacagagtct

SEQ ID NO: 490494 - DNA, 201 bp, Homo sapiens
catggtgaagctccatctctactaaaaatacaaaaagttagctgggtgtggtggcgcatgtgggaggctgaggcaggagaattgcttgaacccgggaggcrgaggttgcagtgagccaagatcatgctgctgcacttcagcctgggtgacagagtgagactctgtctcaaaaaaaaaaaaaaaaaaaaaaaggaagtcttt

SEQ ID NO: 490495 - DNA, 201 bp, Homo sapiens
atatacatatacacacacatatatatatacacatacaaacaacgttttttttttttggttttttttttggttttttttgtttttttttgagacagagtctyactctgttgcccaggctggagtgcaatggcacaatctcggctcactgcaacctccacctcccgggttcaagtgattctcttgccttagcctcccaagtag

SEQ ID NO: 490496 - DNA, 201 bp, Homo sapiens
acttagttgcctaggacaaaaactgtataatggtaccacaaaaacagttacatggtggagttcaaaccacacagataaaaatccattcagtaaatttccaragttgcagaccgtttaagcccacccagaattccaccgggactagacagccccccactaggctatactggatacgtggacatagaacctacgctaagctgc

SEQ ID NO: 490497 - DNA, 201 bp, Homo sapiens
ggctgaggcaggagaattgcttgaacccgggaggcggaggttgcagtgagccaagatcatgctgctgcacttcagcctgggtgacagagtgagactctgtytcaaaaaaaaaaaaaaaaaaaaaaaggaagtctttttattttaatggaacattttactatttactagtagctgctgttttttttttcttaaatcttaaaa

SEQ ID NO: 490498 - DNA, 201 bp, Homo sapiens
aaggaaagaattcactcatcctgtaggatgacttagttgcctaggacaaaaactgtataatggtaccacaaaaacagttacatggtggagttcaaaccacrcagataaaaatccattcagtaaatttccaaagttgcagaccgtttaagcccacccagaattccaccgggactagacagccccccactaggctatactgga

SEQ ID NO: 490499 - DNA, 201 bp, Homo sapiens
tgaggcaggagaattgcttgaacccgggaggcggaggttgcagtgagccaagatcatgctgctgcacttcagcctgggtgacagagtgagactctgtctcmaaaaaaaaaaaaaaaaaaaaaaggaagtctttttattttaatggaacattttactatttactagtagctgctgttttttttttcttaaatcttaaaattc

SEQ ID NO: 490500 - DNA, 201 bp, Homo sapiens
aatcctgcactaactccaggtggttataacatcagaattgcactgcaggccgagcacggtggctcacacctgtaatcccagcactttgggaggccaaggcrggcggatcatgaggtcaagagatggagaccatcctggccaacatgggaaaccctgtctctactaaaaatacaaaaattagctgggtgtggtggcacgcct

SEQ ID NO: 490501 - DNA, 201 bp, Homo sapiens
gttctaaattcgtaatatggagtccataaagaagatgctatttgaaggcccttgttttattgcttatatattaatattcttttttttttttttttgagacrgagtctcgctctgtcacccaggctggagtgcagtggcgcgatctcggctcactgcaagctccgcctcccgggttcatgccattctcctgcctcagcctcc

SEQ ID NO: 490502 - DNA, 201 bp, Homo sapiens
ccgggtgtggtggcacgctcctgtagtcccagctactcgggagggcgagacaggagaatcgcttgaacccgggaggcggaggttgcagtgagccaagatcrcgccactgcactccagcctgggcgatagagcgagactcggtctcaaaaaaaaaagaagaaaaagaaaaacagtatacatagaagtgattcttatttccag

SEQ ID NO: 490503 - DNA, 201 bp, Homo sapiens
cgggtgtggtggcacgctcctgtagtcccagctactcgggagggcgagacaggagaatcgcttgaacccgggaggcggaggttgcagtgagccaagatcgygccactgcactccagcctgggcgatagagcgagactcggtctcaaaaaaaaaagaagaaaaagaaaaacagtatacatagaagtgattcttatttccagt

SEQ ID NO: 490504 - DNA, 201 bp, Homo sapiens
caggtgcaaggtatcgagcaggacctggtgataggttggtaaatttttaattaacatgaactgtaaaaaatgtatttcacaaggatttgtttgaagtcatkgaagggaatctctccatttttgacagttgcttcctctaagagtgtctcattcatataaacttaaagaaactttacagtttactgtaaatgattttacgta

SEQ ID NO: 490505 - DNA, 201 bp, Homo sapiens
tatacatatacacacacatatatatatacacatacaaacaacgttttttttttttggttttttttttggttttttttgtttttttttgagacagagtctcrctctgttgcccaggctggagtgcaatggcacaatctcggctcactgcaacctccacctcccgggttcaagtgattctcttgccttagcctcccaagtagc

SEQ ID NO: 490506 - DNA, 201 bp, Homo sapiens
gtgtggtggcacgctcctgtagtcccagctactcgggagggcgagacaggagaatcgcttgaacccgggaggcggaggttgcagtgagccaagatcgcgcyactgcactccagcctgggcgatagagcgagactcggtctcaaaaaaaaaagaagaaaaagaaaaacagtatacatagaagtgattcttatttccagtttt

SEQ ID NO: 490507 - DNA, 201 bp, Homo sapiens
aggtgcaaggtatcgagcaggacctggtgataggttggtaaatttttaattaacatgaactgtaaaaaatgtatttcacaaggatttgtttgaagtcattkaagggaatctctccatttttgacagttgcttcctctaagagtgtctcattcatataaacttaaagaaactttacagtttactgtaaatgattttacgtat

SEQ ID NO: 490508 - DNA, 201 bp, Homo sapiens
tatacacatacaaacaacgttttttttttttggttttttttttggttttttttgtttttttttgagacagagtctcactctgttgcccaggctggagtgcratggcacaatctcggctcactgcaacctccacctcccgggttcaagtgattctcttgccttagcctcccaagtagctgggattacaggcgcctgccacca

SEQ ID NO: 490509 - DNA, 201 bp, Homo sapiens
aaatttaagtgcccagtttctagtaatgtttttaatggatattagacactttgagaaagtcataactatttagcagcttctatgcaggctaattataacasttaataccaagcctgctttatagctgaggaaacttaggtgctaagcaaagggttttgtatattctagagctaaggagttttgttttttgaaacacagtac

SEQ ID NO: 490510 - DNA, 201 bp, Homo sapiens
cgcacccaggctgtataatttttttttttttttacaatgccaaatctgttgtaagtgatttgacggcctgattggtagctcttactgtttctaaactcaaragaaaacctaaattactctctgaaaaaaaaaaaacaagcatctaagaaagcttcctgaataagtcctcacatagtcttgaatagtttttaattatagcct

SEQ ID NO: 490511 - DNA, 201 bp, Homo sapiens
tacacatacaaacaacgttttttttttttggttttttttttggttttttttgtttttttttgagacagagtctcactctgttgcccaggctggagtgcaakggcacaatctcggctcactgcaacctccacctcccgggttcaagtgattctcttgccttagcctcccaagtagctgggattacaggcgcctgccaccaca

SEQ ID NO: 490512 - DNA, 201 bp, Homo sapiens
cacccaggctgtataatttttttttttttttacaatgccaaatctgttgtaagtgatttgacggcctgattggtagctcttactgtttctaaactcaagaraaaacctaaattactctctgaaaaaaaaaaaacaagcatctaagaaagcttcctgaataagtcctcacatagtcttgaatagtttttaattatagcctca

SEQ ID NO: 490513 - DNA, 201 bp, Homo sapiens
atttcatggttattataagtgtacgaggactctaaaagaaacttgtttgtataatgctattctatccaaggtatgtagcctaggaaataaccaacctgatstgtgttatgacccattttaagcctccaatgatcacagttttttaaaataaattaaggactggtccttttctaggtgacacaagtaaagtaatagctaaga

SEQ ID NO: 490514 - DNA, 201 bp, Homo sapiens
ggccaacatgggaaaccctgtctctactaaaaatacaaaaattagctgggtgtggtggcacgcctctgtattcccagctactcaggaggctgaggcaggakaatcgcttgaacccgggaggcagaggttgcagtgagcccatatcgcgccagtgcactccaacctggtggcagagtgagactccatctcaaaaaaaaaaaa

SEQ ID NO: 490515 - DNA, 201 bp, Homo sapiens
catacaaacaacgttttttttttttggttttttttttggttttttttgtttttttttgagacagagtctcactctgttgcccaggctggagtgcaatggcrcaatctcggctcactgcaacctccacctcccgggttcaagtgattctcttgccttagcctcccaagtagctgggattacaggcgcctgccaccacacccg

SEQ ID NO: 490516 - DNA, 201 bp, Homo sapiens
cattgtttatgatataaagaagaaacaaacccagcttccttgcctggtatatagggcacttcatattatagctgctgccaaaaattggtcatgctgtctayattgccatacttggagtgtcactgaatacattcagaggactattggagttctctgaatacattatgctgccttaagtcagcgtatctttacatactctga

SEQ ID NO: 490517 - DNA, 201 bp, Homo sapiens
acatgggaaaccctgtctctactaaaaatacaaaaattagctgggtgtggtggcacgcctctgtattcccagctactcaggaggctgaggcaggagaatcrcttgaacccgggaggcagaggttgcagtgagcccatatcgcgccagtgcactccaacctggtggcagagtgagactccatctcaaaaaaaaaaaaaaaaa

SEQ ID NO: 490518 - DNA, 201 bp, Homo sapiens
caacgttttttttttttggttttttttttggttttttttgtttttttttgagacagagtctcactctgttgcccaggctggagtgcaatggcacaatctcrgctcactgcaacctccacctcccgggttcaagtgattctcttgccttagcctcccaagtagctgggattacaggcgcctgccaccacacccggctaattt

SEQ ID NO: 490519 - DNA, 201 bp, Homo sapiens
tgctgggttcaagcaattctcctgcctcagcctcccaagtagctggggctacaggcatgtgccaccatgcccggctagttttttgtatttttagtagagayggggtttttaacttgatatactgaagaacagtggtattcagaattataatgagcatttccaatgaaccataaatacatggaatttaatttattcttttaa

SEQ ID NO: 490520 - DNA, 201 bp, Homo sapiens
accctgtctctactaaaaatacaaaaattagctgggtgtggtggcacgcctctgtattcccagctactcaggaggctgaggcaggagaatcgcttgaaccygggaggcagaggttgcagtgagcccatatcgcgccagtgcactccaacctggtggcagagtgagactccatctcaaaaaaaaaaaaaaaaaggaattgca

SEQ ID NO: 490521 - DNA, 201 bp, Homo sapiens
tgttgcccaggctggagtgcaatggcacaatctcggctcactgcaacctccacctcccgggttcaagtgattctcttgccttagcctcccaagtagctggkattacaggcgcctgccaccacacccggctaatttttttgtatctttaatagagacagggtttcaccatgttggccaggctggtctcaaactcctgacctt

SEQ ID NO: 490522 - DNA, 201 bp, Homo sapiens
  misc_feature (1)...(201): n = A,T,C or G
tcccaagttttagaaatgctctgcttctggattattctaactacattctagacaagtattgagttccttagaaacctggactaggagaagcttttatttcyctttagtttttcactgtgtgttttgcannnnnnnnnnnnnnnnnnnntttctgcaagagcttcattaatttcagttacttctcctgataaaggagaatag

SEQ ID NO: 490523 - DNA, 201 bp, Homo sapiens
gctaaaacggtgaaaccccgtctctactaaaaatacaaaaaattagccgggcgtactggcgggcgcctgtagtcccagctacttgggaggctgaggcaggrgaatggcgtaaacccgggaggcggagcttgcagtgagccgagatcgcgccactgcactccaagcctggggcgacagagagagactctgtctcaaaaaaaa

SEQ ID NO: 490524 - DNA, 201 bp, Homo sapiens
gctggagtgcaatggcacaatctcggctcactgcaacctccacctcccgggttcaagtgattctcttgccttagcctcccaagtagctgggattacaggcrcctgccaccacacccggctaatttttttgtatctttaatagagacagggtttcaccatgttggccaggctggtctcaaactcctgaccttgtgatctgcc

SEQ ID NO: 490525 - DNA, 201 bp, Homo sapiens
caaatagaataataattgatactttgagctgtttcattattgctttgaaattgctggataatcaattttttacctattattttgttacttcaataaacctrttatgtgctagatactctggtgggtgctggtgataatgataacacaacgcctaccctccttgagctctcagttcagtgggatacacagacacatatacat

SEQ ID NO: 490526 - DNA, 201 bp, Homo sapiens
tgaaaccccgtctctactaaaaatacaaaaaattagccgggcgtactggcgggcgcctgtagtcccagctacttgggaggctgaggcaggggaatggcgtraacccgggaggcggagcttgcagtgagccgagatcgcgccactgcactccaagcctggggcgacagagagagactctgtctcaaaaaaaaaaaaaaaaaa

SEQ ID NO: 490527 - DNA, 201 bp, Homo sapiens
  misc_feature (1)...(201): n = A,T,C or G
tggagtgcaatggcacaatctcggctcactgcaacctccacctcccgggttcaagtgattctcttgccttagcctcccaagtagctgggattacaggcgcntgccaccacacccggctaatttttttgtatctttaatagagacagggtttcaccatgttggccaggctggtctcaaactcctgaccttgtgatctgcccg

SEQ ID NO: 490528 - DNA, 201 bp, Homo sapiens
ttaaaaaaatttttagtttatacaagtaatcattgcttttgttttttttttttttccccctctctttctcacatttgctgtctacctgaaaagtttctggkggatttttttttttttttttttagcttgtattagcattctttgttagttttggagagaaggatttggatctataaaatctaagttgattgcaaaaaattg

SEQ ID NO: 490529 - DNA, 201 bp, Homo sapiens
aggctgaggcaggggaatggcgtaaacccgggaggcggagcttgcagtgagccgagatcgcgccactgcactccaagcctggggcgacagagagagactcygtctcaaaaaaaaaaaaaaaaaaaaaaaaaaaatcaacaaaatgcaatgtgagatcatgcatacagtcctggaacattccactaagtggaccacagtggg

SEQ ID NO: 490530 - DNA, 201 bp, Homo sapiens
ccaagtagctgggattacaggcgcctgccaccacacccggctaatttttttgtatctttaatagagacagggtttcaccatgttggccaggctggtctcaractcctgaccttgtgatctgcccgcctcagcctcccaaaatgctgggattacaggcgtgagccaccgtgcccggccacaaataacttttaaagtacttta

SEQ ID NO: 490531 - DNA, 201 bp, Homo sapiens
aagtctaacatgaattcaaagttaaaacaatttttaaaggtatcaagaatgattgaagagaggctgggcgtggtggcttacacctataatcccagcacttygggaggctgaggtgggtggatcacgaagtcaggagttcaagaccagcctggccaagatggtgaaaccccgtctctactaaaaatacaaaaaattagctgg

SEQ ID NO: 490532 - DNA, 201 bp, Homo sapiens
caagtagctgggattacaggcgcctgccaccacacccggctaatttttttgtatctttaatagagacagggtttcaccatgttggccaggctggtctcaarctcctgaccttgtgatctgcccgcctcagcctcccaaaatgctgggattacaggcgtgagccaccgtgcccggccacaaataacttttaaagtactttaa

SEQ ID NO: 490533 - DNA, 201 bp, Homo sapiens
ttttaatgaagtcagtcttatcaatgatttcttttatggatcttgccttggtattgtacttaataaattatcaccatacccaaggtcatctgagttttttycctatgttatcttctcagaggtttatagttttgtgtttatatttaggtctgtgatctattttgaattaatttttgtgaagggtgtaagttatgtgtctag

SEQ ID NO: 490534 - DNA, 201 bp, Homo sapiens
tcccagcactttgggaggctgaggtgggtggatcacgaagtcaggagttcaagaccagcctggccaagatggtgaaaccccgtctctactaaaaatacaaraaattagctgggcgtggtagcgggcacctgtaattccagcgactcggaaggttgaggcagggaattgcttgaacccgggaggcggaggttgcagtgagcc

SEQ ID NO: 490535 - DNA, 201 bp, Homo sapiens
cccgtctctactaaaaatacaaaaaattagctgggcgtggtagcgggcacctgtaattccagcgactcggaaggttgaggcagggaattgcttgaacccgrgaggcggaggttgcagtgagccgagatcacgccattgcactctagcctggtcaacagagcgagactccgttttttttttttaaaaaaagaatgattgaag

SEQ ID NO: 490536 - DNA, 201 bp, Homo sapiens
tttttttttcaacaaaatatttaacttatttgggcttttttttttgagatggagtttcacgcttgttgcccaggctggagtgcaatggcgccatctcggcycactgcaacctccgcctcctgggttcaagcaattctcctgcctcagcctcccaagtagctgagattacaggcacccgccatcacgcctggctaatttttg

SEQ ID NO: 490537 - DNA, 201 bp, Homo sapiens
tgatataagaccctactgaccactggtagaggcaaaggcatttttccatggtgggtacttacttttgtgctcaccagaaggataataatgcatgaaggtcrtacactttgtgaaaaattcatcaaaattaaaattggggggtggttttaagaagttaacctaaataaaagcaaatgagaagttttcagttattctgagaac

SEQ ID NO: 490538 - DNA, 201 bp, Homo sapiens
gattttctattacttactgccatcttacccttgctgatgaatgcctatcataatttaaagaagctagaagacagatttttgtcagtttttttttttatagrtaggggatctcactatattgcccaggctggtctcaaactcctcagctcaggcagtcctcctgccttggcctcccaaagtgctgggattacaggtgtgagc

SEQ ID NO: 490539 - DNA, 201 bp, Homo sapiens
tcaaaaaaaataaagtttcctaaggaagcttaaaaaaaaaaaaaagcctgcatagctgactcttccagctccctgtgttctattcatacagaacacctacyggtagaaccttatggagtatctttagctggattctaaaatgagattgtctccttaacttgaaatgcatgcaccttgtttctatctaagcaaagcctcaat

SEQ ID NO: 490540 - DNA, 201 bp, Homo sapiens
agtatgtttgtatctttctcaattgtgttagcttataatagctaatgatcttctttctattctttgggtctaaagcaaaatacaaaagacaatttcttttwtctgtgaattatttcattgtcttataaagctaaattggtacaatttttggaaagttcagcaacatatatgtaaattgccattatactgcccaaaacccag

SEQ ID NO: 490541 - DNA, 201 bp, Homo sapiens
gattacaggcgcctgccaccacacccggctaatttttttgtatctttaatagagacagggtttcaccatgttggccaggctggtctcaaactcctgacctsgtgatctgcccgcctcagcctcccaaaatgctgggattacaggcgtgagccaccgtgcccggccacaaataacttttaaagtactttaaaatcataagtt

SEQ ID NO: 490542 - DNA, 201 bp, Homo sapiens
tctttcatttagcagttaataattaagcacctattgtatcccaagtaccatttcaggtgctgtaaatatagtattgaacaaagcaaagtccctcttcttasgggggattttctattacttactgccatcttacccttgctgatgaatgcctatcataatttaaagaagctagaagacagatttttgtcagttttttttttt

SEQ ID NO: 490543 - DNA, 201 bp, Homo sapiens
ggtgtgagccactgcgcccagcatcaatttttaattttactattttctaagccagttttttaaaaaatgtaagaattaaaacaaataaaaaaatgtaagartagcataaatctttgttttaataactttgatttgaatttttaaataattttttttaacccttagataaaagaagccaatttctggggtgctaactttgta

SEQ ID NO: 490544 - DNA, 201 bp, Homo sapiens
ctaatttttttgtatctttaatagagacagggtttcaccatgttggccaggctggtctcaaactcctgaccttgtgatctgcccgcctcagcctcccaaartgctgggattacaggcgtgagccaccgtgcccggccacaaataacttttaaagtactttaaaatcataagttgtttttatcagcctgatacttaaatatt

SEQ ID NO: 490545 - DNA, 201 bp, Homo sapiens
tgcttctggaagctgataatcatgtggtaaactgcctgcagccacatccgtttgacccaagtaagatatcttttctaggacgagggctagaaattatttgyatgactcatcagtcatacaaaattattcttttttaattgttaatattataagaataatccaaactatctgactaggcaccagtagagtcaattacagctg

SEQ ID NO: 490546 - DNA, 201 bp, Homo sapiens
aaaaaaaaaggtcggccgggcgcggtggctcatgcctgtaatcccagcactttgtgaggccgagatgggcggatcacgaggtcagaagatcgagaccatcytggctaacacggtgaaaccctgtctctactaaaaatacaaaaaattagctgcgcgtggtggcaggcggctgtagtcccagctactcgggaggctgaggca

SEQ ID NO: 490547 - DNA, 201 bp, Homo sapiens
acgagggctagaaattatttgtatgactcatcagtcatacaaaattattcttttttaattgttaatattataagaataatccaaactatctgactaggcascagtagagtcaattacagctgaacttgcacttcaaacacacctgtaatctgctttttgcacaaagtaaaagaaaataggttaaaaagtttattctcccaa

SEQ ID NO: 490548 - DNA, 201 bp, Homo sapiens
ttgggcttttttttttgagatggagtttcacgcttgttgcccaggctggagtgcaatggcgccatctcggctcactgcaacctccgcctcctgggttcaascaattctcctgcctcagcctcccaagtagctgagattacaggcacccgccatcacgcctggctaatttttgtattttagtagagacggggtttcaccatg

SEQ ID NO: 490549 - DNA, 201 bp, Homo sapiens
ggaggcggaggtgggcggatcaccagaggtggggagtttgagactagcctgaccaacatggagaaaccccatctctactaaaaatacaaaattagccgggygtggtggtgcatgcctgtaatcccagctacttgggaaggttgaggcaggggaatcgctagaacccaggaggcagaggttgcagtgagccgagattgcacc

SEQ ID NO: 490550 - DNA, 201 bp, Homo sapiens
agcccacagagaggaacagctgtttgtaaatggggtagataggatggagaggtcttcacagaagaaataagaattggacagaagtctgagaatagttcacyaggcagacagggagcaaagcagcatttaagacagaaggatcagcatgtgccaaagcatgagagggtaaatgaaccatcagtgtgcctggaaccctagagt

SEQ ID NO: 490551 - DNA, 201 bp, Homo sapiens
ttttttttttgagatggagtttcacgcttgttgcccaggctggagtgcaatggcgccatctcggctcactgcaacctccgcctcctgggttcaagcaattytcctgcctcagcctcccaagtagctgagattacaggcacccgccatcacgcctggctaatttttgtattttagtagagacggggtttcaccatgttggtc

SEQ ID NO: 490552 - DNA, 201 bp, Homo sapiens
gaggcggaggtgggcggatcaccagaggtggggagtttgagactagcctgaccaacatggagaaaccccatctctactaaaaatacaaaattagccgggcrtggtggtgcatgcctgtaatcccagctacttgggaaggttgaggcaggggaatcgctagaacccaggaggcagaggttgcagtgagccgagattgcacca

SEQ ID NO: 490553 - DNA, 201 bp, Homo sapiens
acagtgattcagagaataggcttatactaaagatctcatcccagacaagccacttaacccatttgagtctgtttcctcaagtggagaatgagtacgtggarccagtttacatctatgctccatttctgtgaatggggaaagacaggagaaaggcagctagggtttctgatgaggtctgaagacagctgccctcctcccacg

SEQ ID NO: 490554 - DNA, 201 bp, Homo sapiens
agcctgttatcctattgagatcacaatcacttattaaatcgttcacagattgactccctcagtaagtgatactaactttactccagaatagacctaatatktatatacccttgatctccctgcttctacttctcttgtcctcatagtctgattttcacacagcagccagagggatcctttcaaaacaggtcagttaatttt

SEQ ID NO: 490555 - DNA, 201 bp, Homo sapiens
tggagtttcacgcttgttgcccaggctggagtgcaatggcgccatctcggctcactgcaacctccgcctcctgggttcaagcaattctcctgcctcagcckcccaagtagctgagattacaggcacccgccatcacgcctggctaatttttgtattttagtagagacggggtttcaccatgttggtcaggctggtctcaaa

SEQ ID NO: 490556 - DNA, 201 bp, Homo sapiens
gggcggatcaccagaggtggggagtttgagactagcctgaccaacatggagaaaccccatctctactaaaaatacaaaattagccgggcgtggtggtgcaygcctgtaatcccagctacttgggaaggttgaggcaggggaatcgctagaacccaggaggcagaggttgcagtgagccgagattgcaccattgcactccag

SEQ ID NO: 490557 - DNA, 201 bp, Homo sapiens
gtttcacgcttgttgcccaggctggagtgcaatggcgccatctcggctcactgcaacctccgcctcctgggttcaagcaattctcctgcctcagcctcccragtagctgagattacaggcacccgccatcacgcctggctaatttttgtattttagtagagacggggtttcaccatgttggtcaggctggtctcaaactcc

SEQ ID NO: 490558 - DNA, 201 bp, Homo sapiens
atacaaaattagccgggcgtggtggtgcatgcctgtaatcccagctacttgggaaggttgaggcaggggaatcgctagaacccaggaggcagaggttgcastgagccgagattgcaccattgcactccagcctgggcaataagagcgaaactccgtctcgaaaaaagaaaaaaaaaagtctacacattttaaactatgaac

SEQ ID NO: 490559 - DNA, 201 bp, Homo sapiens
cgccatctcggctcactgcaacctccgcctcctgggttcaagcaattctcctgcctcagcctcccaagtagctgagattacaggcacccgccatcacgccyggctaatttttgtattttagtagagacggggtttcaccatgttggtcaggctggtctcaaactcctgacctcaggtgatccacccaccttggcctcccaa

SEQ ID NO: 490560 - DNA, 201 bp, Homo sapiens
attagccgggcgtggtggtgcatgcctgtaatcccagctacttgggaaggttgaggcaggggaatcgctagaacccaggaggcagaggttgcagtgagccdagattgcaccattgcactccagcctgggcaataagagcgaaactccgtctcgaaaaaagaaaaaaaaaagtctacacattttaaactatgaactatgttc

SEQ ID NO: 490561 - DNA, 201 bp, Homo sapiens
ggttcaagcaattctcctgcctcagcctcccaagtagctgagattacaggcacccgccatcacgcctggctaatttttgtattttagtagagacggggttycaccatgttggtcaggctggtctcaaactcctgacctcaggtgatccacccaccttggcctcccaaagtgctgggattacaggtgtgagccactgcacct

SEQ ID NO: 490562 - DNA, 201 bp, Homo sapiens
tagccgggcgtggtggtgcatgcctgtaatcccagctacttgggaaggttgaggcaggggaatcgctagaacccaggaggcagaggttgcagtgagccgarattgcaccattgcactccagcctgggcaataagagcgaaactccgtctcgaaaaaagaaaaaaaaaagtctacacattttaaactatgaactatgttcaa

SEQ ID NO: 490563 - DNA, 201 bp, Homo sapiens
aagtgatgcaatgagcttaagaattttcaagagcttatcaatcagtcagcccttgttcatccccaagcggatgtgtggtggtattgtggtggacctttacygggcactctgccgaataactggagtggcacttatactttagtccagttggctatccctttcaccctggcatttcatcaacaagagggaggaaaaataaga

SEQ ID NO: 490564 - DNA, 201 bp, Homo sapiens
tcaagcaattctcctgcctcagcctcccaagtagctgagattacaggcacccgccatcacgcctggctaatttttgtattttagtagagacggggtttcaycatgttggtcaggctggtctcaaactcctgacctcaggtgatccacccaccttggcctcccaaagtgctgggattacaggtgtgagccactgcacctggc

SEQ ID NO: 490565 - DNA, 201 bp, Homo sapiens
ccgggcgtggtggtgcatgcctgtaatcccagctacttgggaaggttgaggcaggggaatcgctagaacccaggaggcagaggttgcagtgagccgagatygcaccattgcactccagcctgggcaataagagcgaaactccgtctcgaaaaaagaaaaaaaaaagtctacacattttaaactatgaactatgttcaagaa

SEQ ID NO: 490566 - DNA, 201 bp, Homo sapiens
ttctcctgcctcagcctcccaagtagctgagattacaggcacccgccatcacgcctggctaatttttgtattttagtagagacggggtttcaccatgttgktcaggctggtctcaaactcctgacctcaggtgatccacccaccttggcctcccaaagtgctgggattacaggtgtgagccactgcacctggccttatttg

SEQ ID NO: 490567 - DNA, 201 bp, Homo sapiens
tgcctcagcctcccaagtagctgagattacaggcacccgccatcacgcctggctaatttttgtattttagtagagacggggtttcaccatgttggtcaggytggtctcaaactcctgacctcaggtgatccacccaccttggcctcccaaagtgctgggattacaggtgtgagccactgcacctggccttatttggaaatt

SEQ ID NO: 490568 - DNA, 201 bp, Homo sapiens
gctgagattacaggcacccgccatcacgcctggctaatttttgtattttagtagagacggggtttcaccatgttggtcaggctggtctcaaactcctgacytcaggtgatccacccaccttggcctcccaaagtgctgggattacaggtgtgagccactgcacctggccttatttggaaatttttaacaacatcaaaagcg

SEQ ID NO: 490569 - DNA, 201 bp, Homo sapiens
gagttctaggtattgtatttatgaatagtggttaaaaaaacatgtcacttaaaatgttcatatgataggaaaataatccttcccaaaggagttgtgtgttsccaagattacaaatagaatgaaagcagtgaccaggaaggatttcttcataaaattaatcttcaagatgggaggaacagcaaatgcctcagaaatacacaa

SEQ ID NO: 490570 - DNA, 201 bp, Homo sapiens
tttgttctgcttctccttttagctattagagatgttcaaagaatgtaaacttctgcttaagatagacaaaattagaaaaataaaattatcacagatgtttrtatctactgcccgttatgactagtcttcattagggactgtcttacaatggggaatgtgttctactataatctgctaagattctgaatgataggtaccata

SEQ ID NO: 490571 - DNA, 201 bp, Homo sapiens
caaccgcttacatagcatttacattgcattaggtattataagtaatatagagataatttacagtataaggaagggtatgcataggttatatgcaaatattrtgccattatatatgagggacttgaggagctgcagattttggtattttcagcgattttagaactaatccctcatggataccaagggatgactgtaatttgg

SEQ ID NO: 490572 - DNA, 201 bp, Homo sapiens
atggagtccataaagaagatgctatttgaaggcccttgttttattgcttatatattaatattcttttttttttttttttgagacagagtctcgctctgtcrcccaggctggagtgcagtggcgcgatctcggctcactgcaagctccgcctcccgggttcatgccattctcctgcctcagcctcccgagtagctgggacta

SEQ ID NO: 490573 - DNA, 201 bp, Homo sapiens
ctggtcaagagaatgaaaatgaggatgaggaataataaactctttttggcaagcacttaaatgttctgaaatttgtataagacatttattatatttttttytttacagagctttagtgcaattttaaggttatggtttttggagtttttccctttttttgggataacctaacattggtttggaatgattgtgtgcatgaat

SEQ ID NO: 490574 - DNA, 201 bp, Homo sapiens
cataaagaagatgctatttgaaggcccttgttttattgcttatatattaatattcttttttttttttttttgagacagagtctcgctctgtcacccaggckggagtgcagtggcgcgatctcggctcactgcaagctccgcctcccgggttcatgccattctcctgcctcagcctcccgagtagctgggactataggcgcc

SEQ ID NO: 490575 - DNA, 201 bp, Homo sapiens
catatcctgaattgcatgtttctaggcttcatattaatatataaattttatttctagttttagcctcatctggcatagattatgacataaagatctggtcmccattagaagagtcaaggatttttaaccgaaaacttgctgatgaagtaagatttttattgtacttactatagaccatatttcaatttgttcctaaaatgc

SEQ ID NO: 490576 - DNA, 201 bp, Homo sapiens
tatttgaaggcccttgttttattgcttatatattaatattcttttttttttttttttgagacagagtctcgctctgtcacccaggctggagtgcagtggcrcgatctcggctcactgcaagctccgcctcccgggttcatgccattctcctgcctcagcctcccgagtagctgggactataggcgcccgctgccaaacctg

SEQ ID NO: 490577 - DNA, 201 bp, Homo sapiens
atgttaagtgttgaacaactgcatcaaggatgataatctgctctgttgcccaggctggattgagtgcagtggcacgatcttggctcactgcaacctccatyttctgggttcaagcaattctcctgcctcaccctccagagtagctgggattacaggtgtgcaccaccatgcccagctaaatttcgtatttttagtagagac

SEQ ID NO: 490578 - DNA, 201 bp, Homo sapiens
ctaaatttcgtatttttagtagagacagggtatcaccatgttggccaggctggtctcgaactcctgatttcaggtgatccacacgcctcggcctcccaaastgctgggattacaggtgtgagctaccgcgcccagctgatattcctttttatgaattcttctgagaatacaaactctgtgtgggtgggtttcgttatttta

SEQ ID NO: 490579 - DNA, 201 bp, Homo sapiens
tttttagtagagacagggtatcaccatgttggccaggctggtctcgaactcctgatttcaggtgatccacacgcctcggcctcccaaagtgctgggattayaggtgtgagctaccgcgcccagctgatattcctttttatgaattcttctgagaatacaaactctgtgtgggtgggtttcgttattttatccactgcttta

SEQ ID NO: 490580 - DNA, 201 bp, Homo sapiens
ataatttttttgttttccttaactaagcttttaagaaaacattgggccgggtgtggttgctcacacctgtaatcccagcactttgggaggccaaggcaggyggatcacctgaggtcaggagtttgagaccagcctggccaacatggggaaaccccatctctactaaaaacacaaaaattagctgagcatggtggcacatgc

SEQ ID NO: 490581 - DNA, 201 bp, Homo sapiens
aatttttttgttttccttaactaagcttttaagaaaacattgggccgggtgtggttgctcacacctgtaatcccagcactttgggaggccaaggcaggtgkatcacctgaggtcaggagtttgagaccagcctggccaacatggggaaaccccatctctactaaaaacacaaaaattagctgagcatggtggcacatgcct

SEQ ID NO: 490582 - DNA, 201 bp, Homo sapiens
tttttgttttccttaactaagcttttaagaaaacattgggccgggtgtggttgctcacacctgtaatcccagcactttgggaggccaaggcaggtggatcrcctgaggtcaggagtttgagaccagcctggccaacatggggaaaccccatctctactaaaaacacaaaaattagctgagcatggtggcacatgcctgtaa

SEQ ID NO: 490583 - DNA, 201 bp, Homo sapiens
gtattcaggagttcttcagacggagaaaagaaaggaaagaaatggaagaattggatactttgaacattagaaggccgctagtaaaaatggtttataaaggmcatcgcaactccaggacaatggtaccaaatgttcatggcattttttggtgaaattgcagtttcatgctctgagtgtttttccataatgatttatcttcat

SEQ ID NO: 490584 - DNA, 201 bp, Homo sapiens
aactaagcttttaagaaaacattgggccgggtgtggttgctcacacctgtaatcccagcactttgggaggccaaggcaggtggatcacctgaggtcaggartttgagaccagcctggccaacatggggaaaccccatctctactaaaaacacaaaaattagctgagcatggtggcacatgcctgtaatcccagctactcag

SEQ ID NO: 490585 - DNA, 201 bp, Homo sapiens
acattgggccgggtgtggttgctcacacctgtaatcccagcactttgggaggccaaggcaggtggatcacctgaggtcaggagtttgagaccagcctggcmaacatggggaaaccccatctctactaaaaacacaaaaattagctgagcatggtggcacatgcctgtaatcccagctactcaggaggctgaggcaggagaa

SEQ ID NO: 490586 - DNA, 201 bp, Homo sapiens
gcaggtggatcacctgaggtcaggagtttgagaccagcctggccaacatggggaaaccccatctctactaaaaacacaaaaattagctgagcatggtggcrcatgcctgtaatcccagctactcaggaggctgaggcaggagaatcgcttgaacccaggaggccaaggttgcagtgagcccagatcacaccactgcactcc

SEQ ID NO: 490587 - DNA, 201 bp, Homo sapiens
atcacctgaggtcaggagtttgagaccagcctggccaacatggggaaaccccatctctactaaaaacacaaaaattagctgagcatggtggcacatgcctrtaatcccagctactcaggaggctgaggcaggagaatcgcttgaacccaggaggccaaggttgcagtgagcccagatcacaccactgcactccaacctagg

SEQ ID NO: 490588 - DNA, 201 bp, Homo sapiens
tggtattttcagcgattttagaactaatccctcatggataccaagggatgactgtaatttggtttacttacagaagctcctgaagaatcatcagaggatgygacaaaatatcaggaaggagtatctgcagaaaacccagttgagaaccatatcaatataagtgagttgctccctttagataattgctttgtatgggaaaat

SEQ ID NO: 490589 - DNA, 201 bp, Homo sapiens
cagtcctcctgccttggcctcccaaagtgctgggattacaggtgtgagccactgcgcccagcatcaatttttaattttactattttctaagccagtttttwaaaaaatgtaagaattaaaacaaataaaaaaatgtaagagtagcataaatctttgttttaataactttgatttgaatttttaaataattttttttaaccc

SEQ ID NO: 490590 - DNA, 201 bp, Homo sapiens
gtagtaaaattgcacatgaattttgtctgtattatgtttttataaaatagccctttaaaaaccagtttgccgcatgctattgcctttacttttcatccagwaccaaatttctaagtgatctcttaactaaaatactttgttgtagtaactcaactagtctgacttctcactgttgtgtctgcgtttttatgcttttggttg

SEQ ID NO: 490591 - DNA, 201 bp, Homo sapiens
agtttgagaccagcctggccaacatggggaaaccccatctctactaaaaacacaaaaattagctgagcatggtggcacatgcctgtaatcccagctactcrggaggctgaggcaggagaatcgcttgaacccaggaggccaaggttgcagtgagcccagatcacaccactgcactccaacctagggaacagagcaagactc

SEQ ID NO: 490592 - DNA, 201 bp, Homo sapiens
catggggaaaccccatctctactaaaaacacaaaaattagctgagcatggtggcacatgcctgtaatcccagctactcaggaggctgaggcaggagaatcrcttgaacccaggaggccaaggttgcagtgagcccagatcacaccactgcactccaacctagggaacagagcaagactctgtctcaaaaaaaaaaaaaaaa

SEQ ID NO: 490593 - DNA, 201 bp, Homo sapiens
cgcttgaacccaggaggccaaggttgcagtgagcccagatcacaccactgcactccaacctagggaacagagcaagactctgtctcaaaaaaaaaaaaaaraaaagaaaagaaaagaaaagaaaaaataacactgggcaacataacttcaagattatttctttgacaaacactggagtacagctatgcaactggctagggt

SEQ ID NO: 490594 - DNA, 201 bp, Homo sapiens
gcttgaacccaggaggccaaggttgcagtgagcccagatcacaccactgcactccaacctagggaacagagcaagactctgtctcaaaaaaaaaaaaaaaraaagaaaagaaaagaaaagaaaaaataacactgggcaacataacttcaagattatttctttgacaaacactggagtacagctatgcaactggctagggtg

SEQ ID NO: 490595 - DNA, 201 bp, Homo sapiens
ctgtaactaaaatatgtatctatacataaaaacacattagtttttttttttttttttgagacagaacctcgctctgttgccaggctggagtgcaatggcaygatcttggctaactgcaacctccacctcctggtttcaagtgattctcccgcctcagcctcccaagtagctgagattactggcacccgccactacacccgg

SEQ ID NO: 490596 - DNA, 201 bp, Homo sapiens
ctaaaatatgtatctatacataaaaacacattagtttttttttttttttttgagacagaacctcgctctgttgccaggctggagtgcaatggcacgatctyggctaactgcaacctccacctcctggtttcaagtgattctcccgcctcagcctcccaagtagctgagattactggcacccgccactacacccggctaatt

SEQ ID NO: 490597 - DNA, 201 bp, Homo sapiens
cagcctcccaagtagctgagattactggcacccgccactacacccggctaatttttgtattttagtagagatagggtttcatcatgttggtcaggctggtytcaaactcctgacctcaggtgatccacccacctcagcctcccaaagtgctgggattacaggtgtgagccaccgtgcctggctaaaaacacattcttgtta

SEQ ID NO: 490598 - DNA, 201 bp, Homo sapiens
gaaataatattttctgttttctgaatattcttccagacctttttgtttgcattcttacaagtacatatgtacatgtacaaatgctggggtgtgtgtgtgtktgtgtgtgtatgagagagacacctgagtgcatggtgtcatattgtaaacattgttttcacttctccacattttggagatctttccatggcagtaaaaata

SEQ ID NO: 490599 - DNA, 201 bp, Homo sapiens
aataatattttctgttttctgaatattcttccagacctttttgtttgcattcttacaagtacatatgtacatgtacaaatgctggggtgtgtgtgtgtttktgtgtgtatgagagagacacctgagtgcatggtgtcatattgtaaacattgttttcacttctccacattttggagatctttccatggcagtaaaaataga

SEQ ID NO: 490600 - DNA, 201 bp, Homo sapiens
tagctgggatatgggcatgcgccaccatgcccagctaatgttgtatttttagtagacatggggttttgccatgttggtcaggctggtctcgaactcctgamctcaggtgattgacctgcttcggcctcccaaagtgctgggattacaagcatgagccgctgcgcctggcctttaatttgcatttctctagtggttaatgat

SEQ ID NO: 490601 - DNA, 201 bp, Homo sapiens
ttagccgggagtggtggcgtacgcctgtagtctcagctccttgggaggctgaggcaggagaatagcttgaacttgggaagtggaggttgcagtgagccaarattgtgccactgcactccagcctgggcgacagagggaaactctgcgtcataaataaataaataaataaataaagtatggtacacttataaagccttcctt

SEQ ID NO: 490602 - DNA, 201 bp, Homo sapiens
tgttttattgcttatatattaatattcttttttttttttttttgagacagagtctcgctctgtcacccaggctggagtgcagtggcgcgatctcggctcastgcaagctccgcctcccgggttcatgccattctcctgcctcagcctcccgagtagctgggactataggcgcccgctgccaaacctggctgattttttgta

SEQ ID NO: 490603 - DNA, 201 bp, Homo sapiens
ttttattgcttatatattaatattcttttttttttttttttgagacagagtctcgctctgtcacccaggctggagtgcagtggcgcgatctcggctcactrcaagctccgcctcccgggttcatgccattctcctgcctcagcctcccgagtagctgggactataggcgcccgctgccaaacctggctgattttttgtatt

SEQ ID NO: 490604 - DNA, 201 bp, Homo sapiens
ttattgcttatatattaatattcttttttttttttttttgagacagagtctcgctctgtcacccaggctggagtgcagtggcgcgatctcggctcactgcmagctccgcctcccgggttcatgccattctcctgcctcagcctcccgagtagctgggactataggcgcccgctgccaaacctggctgattttttgtatttt

SEQ ID NO: 490605 - DNA, 201 bp, Homo sapiens
ctaccaatgactttcttcacagaattggaaaaatctactttaaagttcatatggaaccaaaaaagagcctgcattgtcaagataatcctaagcaaaaagarcaaagctggaggcatcatgctacctgacttcaaactatactacaaggctacagtaaccaaaacagcatggtactggtaccaaaacagaaatatagaccaa

SEQ ID NO: 490606 - DNA, 201 bp, Homo sapiens
atactgtgttttctttactcttttatttgcctctaaagacatccacacatagtggtgaactgatttttaatgcgttttaaataaaaggcattgaaaaataytaataattgtaattactaaaagtatttctctttgcgattctcttatctgtgtttccagaccggttggagggtgacagatcagaaggctctggtcaagaga

SEQ ID NO: 490607 - DNA, 201 bp, Homo sapiens
ttgcttatatattaatattcttttttttttttttttgagacagagtctcgctctgtcacccaggctggagtgcagtggcgcgatctcggctcactgcaagmtccgcctcccgggttcatgccattctcctgcctcagcctcccgagtagctgggactataggcgcccgctgccaaacctggctgattttttgtatttttag

SEQ ID NO: 490608 - DNA, 201 bp, Homo sapiens
ttatatattaatattcttttttttttttttttgagacagagtctcgctctgtcacccaggctggagtgcagtggcgcgatctcggctcactgcaagctccrcctcccgggttcatgccattctcctgcctcagcctcccgagtagctgggactataggcgcccgctgccaaacctggctgattttttgtatttttagtaga

SEQ ID NO: 490609 - DNA, 201 bp, Homo sapiens
ttcctaattgtagccttcatggtaggcgtgtagaaatatatcattgttttaatttgcatttctctttttttgtttttgagacggagtttcgctcttgtcgsccaggctggagtgcaatggcatgatcttggcttaccgcaacctctgcctgctgggttcaagagattctcctgcctcagcctgccaagtagctgggatatg

SEQ ID NO: 490610 - DNA, 201 bp, Homo sapiens
ttccattgatctagcttcatgtctttataccgaggattgaaatcagctagtgtgatactttaaacttggtcttttttttgagacagagtcttgctctgtcrcccaggctggagtgcagtggctcgatcttggctcactacaagctccgcctcctgggttcacaccattctcctgcctcagcctcccgagtagctgggacta

SEQ ID NO: 490611 - DNA, 201 bp, Homo sapiens
ctttataccgaggattgaaatcagctagtgtgatactttaaacttggtcttttttttgagacagagtcttgctctgtcacccaggctggagtgcagtggckcgatcttggctcactacaagctccgcctcctgggttcacaccattctcctgcctcagcctcccgagtagctgggactacaggcacccgccaccacgcccg

SEQ ID NO: 490612 - DNA, 201 bp, Homo sapiens
aaatcagctagtgtgatactttaaacttggtcttttttttgagacagagtcttgctctgtcacccaggctggagtgcagtggctcgatcttggctcactamaagctccgcctcctgggttcacaccattctcctgcctcagcctcccgagtagctgggactacaggcacccgccaccacgcccggctaatttttttgtatt

SEQ ID NO: 490613 - DNA, 201 bp, Homo sapiens
ctagtgtgatactttaaacttggtcttttttttgagacagagtcttgctctgtcacccaggctggagtgcagtggctcgatcttggctcactacaagctcygcctcctgggttcacaccattctcctgcctcagcctcccgagtagctgggactacaggcacccgccaccacgcccggctaatttttttgtatttttttag

SEQ ID NO: 490614 - DNA, 201 bp, Homo sapiens
ttggtcttttttttgagacagagtcttgctctgtcacccaggctggagtgcagtggctcgatcttggctcactacaagctccgcctcctgggttcacaccrttctcctgcctcagcctcccgagtagctgggactacaggcacccgccaccacgcccggctaatttttttgtatttttttagtagagatggggtttcaccg

SEQ ID NO: 490615 - DNA, 201 bp, Homo sapiens
gctggagtgcagtggctcgatcttggctcactacaagctccgcctcctgggttcacaccattctcctgcctcagcctcccgagtagctgggactacaggcrcccgccaccacgcccggctaatttttttgtatttttttagtagagatggggtttcaccgcgttagccaggatggtctcgatctcctgaccttgtgatctg

SEQ ID NO: 490616 - DNA, 201 bp, Homo sapiens
gagtgcagtggctcgatcttggctcactacaagctccgcctcctgggttcacaccattctcctgcctcagcctcccgagtagctgggactacaggcacccrccaccacgcccggctaatttttttgtatttttttagtagagatggggtttcaccgcgttagccaggatggtctcgatctcctgaccttgtgatctgcccg

SEQ ID NO: 490617 - DNA, 201 bp, Homo sapiens
gcagtggctcgatcttggctcactacaagctccgcctcctgggttcacaccattctcctgcctcagcctcccgagtagctgggactacaggcacccgccamcacgcccggctaatttttttgtatttttttagtagagatggggtttcaccgcgttagccaggatggtctcgatctcctgaccttgtgatctgcccgcctt

SEQ ID NO: 490618 - DNA, 201 bp, Homo sapiens
gtggctcgatcttggctcactacaagctccgcctcctgggttcacaccattctcctgcctcagcctcccgagtagctgggactacaggcacccgccaccaygcccggctaatttttttgtatttttttagtagagatggggtttcaccgcgttagccaggatggtctcgatctcctgaccttgtgatctgcccgccttggc

SEQ ID NO: 490619 - DNA, 201 bp, Homo sapiens
tcgatcttggctcactacaagctccgcctcctgggttcacaccattctcctgcctcagcctcccgagtagctgggactacaggcacccgccaccacgcccrgctaatttttttgtatttttttagtagagatggggtttcaccgcgttagccaggatggtctcgatctcctgaccttgtgatctgcccgccttggcctacc

SEQ ID NO: 490620 - DNA, 201 bp, Homo sapiens
gtttgtttaacctaagataatgacctctagttccatccacgttgctgtatatgtcatgatttcattcattttttttttgagatggagtctcactctgtcgyccaggctgtagtgcagtggtgagatctcggcttactgcaagttccgcctccgaggttcacgccattctcctgcctcagcctcccaagtagttgggactac

SEQ ID NO: 490621 - DNA, 201 bp, Homo sapiens
tagctgggactacaagtgcgcaccactatgcccagctaatttttgtgtgtgtgtgtatttttagtagagacagggtttcaccatgttggccaggatggtcycgatctcttgaccttgtgatccacccaccttggcctcccaaagtgctgggattacaggcgtgagccaccacacccggcctttttttttttgttatttgta

SEQ ID NO: 490622 - DNA, 201 bp, Homo sapiens
agctgggactacaagtgcgcaccactatgcccagctaatttttgtgtgtgtgtgtatttttagtagagacagggtttcaccatgttggccaggatggtctygatctcttgaccttgtgatccacccaccttggcctcccaaagtgctgggattacaggcgtgagccaccacacccggcctttttttttttgttatttgtag

SEQ ID NO: 490623 - DNA, 201 bp, Homo sapiens
gtgcgcaccactatgcccagctaatttttgtgtgtgtgtgtatttttagtagagacagggtttcaccatgttggccaggatggtctcgatctcttgacctygtgatccacccaccttggcctcccaaagtgctgggattacaggcgtgagccaccacacccggcctttttttttttgttatttgtagctattgtaaatggg

SEQ ID NO: 490624 - DNA, 201 bp, Homo sapiens
ccagctaatttttgtgtgtgtgtgtatttttagtagagacagggtttcaccatgttggccaggatggtctcgatctcttgaccttgtgatccacccacctyggcctcccaaagtgctgggattacaggcgtgagccaccacacccggcctttttttttttgttatttgtagctattgtaaatgggattgtgttcttgattt

SEQ ID NO: 490625 - DNA, 201 bp, Homo sapiens
atttttgtgtgtgtgtgtatttttagtagagacagggtttcaccatgttggccaggatggtctcgatctcttgaccttgtgatccacccaccttggcctcycaaagtgctgggattacaggcgtgagccaccacacccggcctttttttttttgttatttgtagctattgtaaatgggattgtgttcttgatttggttttc

SEQ ID NO: 490626 - DNA, 201 bp, Homo sapiens
tatttttagtagagacagggtttcaccatgttggccaggatggtctcgatctcttgaccttgtgatccacccaccttggcctcccaaagtgctgggattayaggcgtgagccaccacacccggcctttttttttttgttatttgtagctattgtaaatgggattgtgttcttgatttggttttcatcttgaatcattattg

SEQ ID NO: 490627 - DNA, 201 bp, Homo sapiens
tagagacagggtttcaccatgttggccaggatggtctcgatctcttgaccttgtgatccacccaccttggcctcccaaagtgctgggattacaggcgtgarccaccacacccggcctttttttttttgttatttgtagctattgtaaatgggattgtgttcttgatttggttttcatcttgaatcattattggtgtgtaga

SEQ ID NO: 490628 - DNA, 201 bp, Homo sapiens
ttttttttttgagacagaatttcattctgttgcccaggctggagtgcaatggcacaatctcagctcactgcaagctctgcctcccgggttcaagtgattcrcctgcctcagcctcccgagtagctgggattacaggcatgtgccaccacacccggctaatttttgtagttttagtagagacagggtttcaccatgttggcc

SEQ ID NO: 490629 - DNA, 201 bp, Homo sapiens
aagacatgatctcttacttaaggaattcacagcttagtggaagtagaggtacaagtaaataaatatgtaaaacttaatatagaattatgtataaggactaygttctgtataagtagaacaaagtagggaataattaatcttgagtaaagcctgaggaaggttttaaagcatgagtaaaagtttgttgtatgattttgtctt

SEQ ID NO: 490630 - DNA, 201 bp, Homo sapiens
ttttttttgagacagaatttcattctgttgcccaggctggagtgcaatggcacaatctcagctcactgcaagctctgcctcccgggttcaagtgattctcstgcctcagcctcccgagtagctgggattacaggcatgtgccaccacacccggctaatttttgtagttttagtagagacagggtttcaccatgttggccag

SEQ ID NO: 490631 - DNA, 201 bp, Homo sapiens
taatttacattcccactgaaagtataagaatgcccattaccccatagtacgttgggtattgtcagactttgcagtttttgcctttctattagatattaagrgaaatgaaaactcagcccaagggttttatattagcacataaaatgttttctatcaagtgcctttgataagcataagaatcaaccctgggagctttaagat

SEQ ID NO: 490632 - DNA, 201 bp, Homo sapiens
gaatttcattctgttgcccaggctggagtgcaatggcacaatctcagctcactgcaagctctgcctcccgggttcaagtgattctcctgcctcagcctccygagtagctgggattacaggcatgtgccaccacacccggctaatttttgtagttttagtagagacagggtttcaccatgttggccagctggtcttgaacta

SEQ ID NO: 490633 - DNA, 201 bp, Homo sapiens
gaaaatagaattaatctatgaattataattctatattattatgttttattaaattggtctgtaaccaaaatcttactataatgacttctgaaacatctctygtgatcaaaagcatattccccaatatatgagctacattatataaaggcaataaagtgtaaaagaaactctgatttcacagaaaatgtaagaagaaccgat

SEQ ID NO: 490634 - DNA, 201 bp, Homo sapiens
aatttcattctgttgcccaggctggagtgcaatggcacaatctcagctcactgcaagctctgcctcccgggttcaagtgattctcctgcctcagcctcccragtagctgggattacaggcatgtgccaccacacccggctaatttttgtagttttagtagagacagggtttcaccatgttggccagctggtcttgaactac

SEQ ID NO: 490635 - DNA, 201 bp, Homo sapiens
attataatgctttagggagagggaaaacctttcttttaatctattaaacttagaattcatgagcctttcttggctgggtactcttagaactaaaaatttakgttgaggtaggaagtgggaggtttagtggtacctaagaataggcaaagatgaaggagaggtgagccctgttctcaagaaaccttaccatacacatggaaa

SEQ ID NO: 490636 - DNA, 201 bp, Homo sapiens
ttcttcagccttctacatcctctacaatgtcagctcaggctcattcgacatcatctcccacagaaagccctcattctactcctttgctatcttctccagayagtgaacaaaggcagtctgttgaggcatctggacaccacacacatcatcagtctggtgaggataagtatgctgtggttcatctaatgatttttgatagtg

SEQ ID NO: 490637 - DNA, 201 bp, Homo sapiens
atgactattttacactttcatgtctctcaaactttaatacttcccttcatccccgccccacttccagattctaacctttcattcacaatgaaaagtactcrttttcctactgtcaataatttcccagctttccaacatctgtactcacattgtgatagaagcagaaagctcctatcaaaagctagtcaatgtagttgctat

SEQ ID NO: 490638 - DNA, 201 bp, Homo sapiens
gaaaagtactcgttttcctactgtcaataatttcccagctttccaacatctgtactcacattgtgatagaagcagaaagctcctatcaaaagctagtcaawgtagttgctatccctttccagcttctcaaagatttcgccccttctcttgcattatcattgcctttttttgccaaattgtttcttttggccttaacatgct

SEQ ID NO: 490639 - DNA, 201 bp, Homo sapiens
tcatttatttattaaccaacccccatctgcttttcaacccccttttcctctgaaacttttaatcaaagtcactagtgacattcaccagtttaaaggatatytctctgttagtaccttactagatttttcgacccggttgcatttaacataggctgtcactccttcttgaaacactttcctttcttggtatctatgatatca

SEQ ID NO: 490640 - DNA, 201 bp, Homo sapiens
ataggaaagattgattgctttaacaagaatatgttgtagataagtttttatccctcttgactggcctattttgtcaaatgggccaaatcaccagtagttaytatcactgaaattatatatttgtgtgtgtaaatataaatgtgttttctgagcatatctgtttagagttgttggttttagaaaatatttaaaatttgaatt

SEQ ID NO: 490641 - DNA, 201 bp, Homo sapiens
atttcattctgttgcccaggctggagtgcaatggcacaatctcagctcactgcaagctctgcctcccgggttcaagtgattctcctgcctcagcctcccgmgtagctgggattacaggcatgtgccaccacacccggctaatttttgtagttttagtagagacagggtttcaccatgttggccagctggtcttgaactact

SEQ ID NO: 490642 - DNA, 201 bp, Homo sapiens
gagtgcaatggcacaatctcagctcactgcaagctctgcctcccgggttcaagtgattctcctgcctcagcctcccgagtagctgggattacaggcatgtrccaccacacccggctaatttttgtagttttagtagagacagggtttcaccatgttggccagctggtcttgaactactgacctcaggtgatctggccacct

SEQ ID NO: 490643 - DNA, 201 bp, Homo sapiens
ctgcaagctctgcctcccgggttcaagtgattctcctgcctcagcctcccgagtagctgggattacaggcatgtgccaccacacccggctaatttttgtakttttagtagagacagggtttcaccatgttggccagctggtcttgaactactgacctcaggtgatctggccacctcagcctcccaaagtgctgggattaca

SEQ ID NO: 490644 - DNA, 201 bp, Homo sapiens
gcaatagctgtatatttattgtcattgaaatacattcaccatgtgttattttattttatttttttgaggtggagtctcactctgttgcccaggctggagtrcagtggcatgatctcagctcactgcagcctccgcctcccaggttcaagcgattctcctacctcagcctcccgagtagctgggactacaggtgcccatcac

SEQ ID NO: 490645 - DNA, 201 bp, Homo sapiens
gtgttattttattttatttttttgaggtggagtctcactctgttgcccaggctggagtacagtggcatgatctcagctcactgcagcctccgcctcccagkttcaagcgattctcctacctcagcctcccgagtagctgggactacaggtgcccatcaccacacccggctaatttttgtatttttagtagagatggggttt

SEQ ID NO: 490646 - DNA, 201 bp, Homo sapiens
ttttttgaggtggagtctcactctgttgcccaggctggagtacagtggcatgatctcagctcactgcagcctccgcctcccaggttcaagcgattctcctrcctcagcctcccgagtagctgggactacaggtgcccatcaccacacccggctaatttttgtatttttagtagagatggggttttgacatgttgatcaggc

SEQ ID NO: 490647 - DNA, 201 bp, Homo sapiens
cagtggcatgatctcagctcactgcagcctccgcctcccaggttcaagcgattctcctacctcagcctcccgagtagctgggactacaggtgcccatcacyacacccggctaatttttgtatttttagtagagatggggttttgacatgttgatcaggctggtcctgaactcctgacttcaggtgatccacccacctcggc

SEQ ID NO: 490648 - DNA, 201 bp, Homo sapiens
gctaagccctttctgtccttaaaataactacaggccgggcgtggtggctcacacctgtaatcctagcactttgggaggccaatgcgggtggatcagttgakgtgaggagtttgagaccagcctggcccacatgatgaaatcctgtctctactaaaaatacaaaagttagctgggcgtggtgctgtgtgcctgtgatcccag

SEQ ID NO: 490649 - DNA, 201 bp, Homo sapiens
tttagctttattttagtctttagattatacttttagccccagtcatttactctggctgtttccattaagtttccaaaatttggtaacacctagaagagagrtgctgtgattagctgtctaaccatttatcattttggatccattgtttgcctttgactgtctagaccacataggactgagtagataattgttcttaggttg

SEQ ID NO: 490650 - DNA, 201 bp, Homo sapiens
ttgttttttaatactgctactgtgtaataaggtgcttcccttttcccattcaaaaagagagctaatgcgcttgcagcttacccctcctttccttgcatatgggtggtattcaacatcacgtgttagggggacagattggcagcagcatctgccagagaggtgaatataaaataatcaattttaaaagttgtaatatatttg

SEQ ID NO: 490651 - DNA, 201 bp, Homo sapiens
ctataaaactgtgataacatagtaaaaattgtcactctttttttctcaatgagtgttttaatgccctgtcatcttatgaccagaaagttcatgatgctcartaaacatttgttaaaagaattaatgaaagatatattaatagcacaaaataatttgtcaacttagttatttcaagatgggtaatagatactgtaaatccta

SEQ ID NO: 490652 - DNA, 201 bp, Homo sapiens
gccctgtcatcttatgaccagaaagttcatgatgctcaataaacatttgttaaaagaattaatgaaagatatattaatagcacaaaataatttgtcaactwagttatttcaagatgggtaatagatactgtaaatcctatagtattatataaatactatagtaggtataataagttatttaggaacaagaatgtctaggtt

SEQ ID NO: 490653 - DNA, 201 bp, Homo sapiens
ttttttttttcctatggggaaatattttcctatactttaacaattaacaagaaaatttgaccagattacaataatgacatttaataataaaacatttttgkttttttttttgctgtatataaacgtctagcaaacatgttttgaaggttaaaaaatcatgaaacctaaaagtcaatagaaagaaaaataaaatgtccctac

SEQ ID NO: 490654 - DNA, 201 bp, Homo sapiens
aacaccagatttcccacagtgtccataatgacagtcacatggcagcacttctcagatggatgcattggatctatgtgtttgatgtttataagtagttaatwaattagatatattagtctggttctgccagcagtccttaactaccttgaatgacagagtccaaagcaaaacagtgatgagtcttttagaagtttaaacata

SEQ ID NO: 490655 - DNA, 201 bp, Homo sapiens
ctcttgactggcctattttgtcaaatgggccaaatcaccagtagttattatcactgaaattatatatttgtgtgtgtaaatataaatgtgttttctgagcrtatctgtttagagttgttggttttagaaaatatttaaaatttgaatttgccttaacatgtgttttgaaggtggaacaagtcaatcagatatttcaactct

SEQ ID NO: 490656 - DNA, 201 bp, Homo sapiens
tggtggtattgtggtggacctttactgggcactctgccgaataactggagtggcacttatactttagtccagttggctatccctttcaccctggcatttcrtcaacaagagggaggaaaaataagacatcgtaaagcgagagaagcccccttataggtctttcgactctcacgtccatttagacgcaattggagtcccacg

SEQ ID NO: 490657 - DNA, 201 bp, Homo sapiens
ctgaaggtacatcctttagcagttttttttttttttttttttttttttttttttttgagacggagtttcgctcttgttgcccaggctgaagtgcaatggcrtgatcttggctcaccacaacctctgcctcctgggttcaagtaattctcctgtcagcctcctgagtagctgggattataggtgcataccaccactcctggc

SEQ ID NO: 490658 - DNA, 201 bp, Homo sapiens
actgtaacagccctgggtgaaatctgaaaccctgctgtaaggagctgtaagaattgtaatttctaagcagtgagcaatttctgtcaaaaaagttggagactcattgagagctaactattccttctgtgctgggcagatgaatgtggaggcccattttgttattcactgatagaacaaataaatatccaggtattatctaat

SEQ ID NO: 490659 - DNA, 201 bp, Homo sapiens
tttgtattttttttaggagagatggggtttctccatgttggtcaggctggtctcgaactcccgacctcaggtgatctgcctgcctctgcctctcaaagctytgggattacaggcatgaaccaccgtgcctgggccacagttttttttttttttttttacatgagagtttgttgatagaaaacaatttcagtttccttttct

SEQ ID NO: 490660 - DNA, 201 bp, Homo sapiens
agattccgttgtatgtatataccacattttctttattcatttatctaggctgtgtgctgtggctcatgcctgtgatcccagcactttgggaggccgaggtsggcagatcacttgaggttaggagttcaagaccagcctgtacaacaagatgaaaccgtgcctctattgaaactacaaaaattagccaggcgtggtggcagg

SEQ ID NO: 490661 - DNA, 201 bp, Homo sapiens
gattccgttgtatgtatataccacattttctttattcatttatctaggctgtgtgctgtggctcatgcctgtgatcccagcactttgggaggccgaggtgrgcagatcacttgaggttaggagttcaagaccagcctgtacaacaagatgaaaccgtgcctctattgaaactacaaaaattagccaggcgtggtggcaggt

SEQ ID NO: 490662 - DNA, 201 bp, Homo sapiens
agttcaagaccagcctgtacaacaagatgaaaccgtgcctctattgaaactacaaaaattagccaggcgtggtggcaggtgcctgtagtcccagctactcrggaggctgaggcaggagaatcacttgaacccaagaggtggaggatgcagtgagctgagatcatgccactgcactccagcgtgggtgacagagtgagactc

SEQ ID NO: 490663 - DNA, 201 bp, Homo sapiens
acaaaagttagctgggcgtggtgctgtgtgcctgtgatcccagccacttgggaagctgaggaaggagaattgcttgaacttgggaggcagaggttgcagtsagctgagatcatgccactgcactccagcctgggcaacagagtgagactgtgtctcaaaaaacaaacaaacaaaaaactgcgtgaggtagaggtattctaa

SEQ ID NO: 490664 - DNA, 201 bp, Homo sapiens
agaccagcctgtacaacaagatgaaaccgtgcctctattgaaactacaaaaattagccaggcgtggtggcaggtgcctgtagtcccagctactcaggaggstgaggcaggagaatcacttgaacccaagaggtggaggatgcagtgagctgagatcatgccactgcactccagcgtgggtgacagagtgagactctgtctc

SEQ ID NO: 490665 - DNA, 201 bp, Homo sapiens
gtgctgtgtgcctgtgatcccagccacttgggaagctgaggaaggagaattgcttgaacttgggaggcagaggttgcagtgagctgagatcatgccactgyactccagcctgggcaacagagtgagactgtgtctcaaaaaacaaacaaacaaaaaactgcgtgaggtagaggtattctaatgaggaaactaagtcttagg

SEQ ID NO: 490666 - DNA, 201 bp, Homo sapiens
agcctgtacaacaagatgaaaccgtgcctctattgaaactacaaaaattagccaggcgtggtggcaggtgcctgtagtcccagctactcaggaggctgagrcaggagaatcacttgaacccaagaggtggaggatgcagtgagctgagatcatgccactgcactccagcgtgggtgacagagtgagactctgtctcaaaat

SEQ ID NO: 490667 - DNA, 201 bp, Homo sapiens
tgcctgtgatcccagccacttgggaagctgaggaaggagaattgcttgaacttgggaggcagaggttgcagtgagctgagatcatgccactgcactccagsctgggcaacagagtgagactgtgtctcaaaaaacaaacaaacaaaaaactgcgtgaggtagaggtattctaatgaggaaactaagtcttaggcggaggtt

SEQ ID NO: 490668 - DNA, 201 bp, Homo sapiens
gtggcaggtgcctgtagtcccagctactcaggaggctgaggcaggagaatcacttgaacccaagaggtggaggatgcagtgagctgagatcatgccactgmactccagcgtgggtgacagagtgagactctgtctcaaaataaataaacaggctgggcgcagtggctcacacccatcatcccagcactttgggaggctgag

SEQ ID NO: 490669 - DNA, 201 bp, Homo sapiens
ggtgcctgtagtcccagctactcaggaggctgaggcaggagaatcacttgaacccaagaggtggaggatgcagtgagctgagatcatgccactgcactccrgcgtgggtgacagagtgagactctgtctcaaaataaataaacaggctgggcgcagtggctcacacccatcatcccagcactttgggaggctgaggagggc

SEQ ID NO: 490670 - DNA, 201 bp, Homo sapiens
aatgtggtgttcacttcttagaaactagacatatcactcaaacatatcctcttttttttcatacttttttttgtttgtttttgtttttgtttttgagacaragtcttgctctgttgcccaggctggagtgcagtggcgcaatctcggctcactgcaagctcagcctccctgcaagctccgcctcccgggttcacgtcattc

SEQ ID NO: 490671 - DNA, 201 bp, Homo sapiens
acagagtgagactctgtctcaaaataaataaacaggctgggcgcagtggctcacacccatcatcccagcactttgggaggctgaggagggcggatcacgargtcaagagattgagaccatcctggccaacatggtgaaaccctgtctctactaaaaatgcaaaaattagctggatgtggtggcatgtgcctatagtcccag

SEQ ID NO: 490672 - DNA, 201 bp, Homo sapiens
  misc_feature (1)...(201): n = A,T,C or G
gtgttcacttcttagaaactagacatatcactcaaacatatcctcttttttttcatacttttttttgtttgtttttgtttttgtttttgagacagagtctngctctgttgcccaggctggagtgcagtggcgcaatctcggctcactgcaagctcagcctccctgcaagctccgcctcccgggttcacgtcattctcctgc

SEQ ID NO: 490673 - DNA, 201 bp, Homo sapiens
tagaatgaaagcagtgaccaggaaggatttcttcataaaattaatcttcaagatgggaggaacagcaaatgcctcagaaatacacaatgtctatggcagastaaaaccaaaaaggaaacccttttagtttaatactttctgtcttaacatagctttaatattttaaatacttcaagagtttgaaaatagttttgtagagat

SEQ ID NO: 490674 - DNA, 201 bp, Homo sapiens
ttcacttcttagaaactagacatatcactcaaacatatcctcttttttttcatacttttttttgtttgtttttgtttttgtttttgagacagagtcttgcyctgttgcccaggctggagtgcagtggcgcaatctcggctcactgcaagctcagcctccctgcaagctccgcctcccgggttcacgtcattctcctgcctc

SEQ ID NO: 490675 - DNA, 201 bp, Homo sapiens
gcaggattcagacttttaaatgtacaaatgcaagcaatcaaatcctataaaatcaatgtgaatccaggatatattggaaaactcagctatccagctaaggrcaatcttaaaatacctactttttgggaaaaatatgccattatgagcagaaactggtgttggccaaaagtattttgttaacatttgctaagaactagagca

SEQ ID NO: 490676 - DNA, 201 bp, Homo sapiens
ttagaaactagacatatcactcaaacatatcctcttttttttcatacttttttttgtttgtttttgtttttgtttttgagacagagtcttgctctgttgcycaggctggagtgcagtggcgcaatctcggctcactgcaagctcagcctccctgcaagctccgcctcccgggttcacgtcattctcctgcctcagcctcct

SEQ ID NO: 490677 - DNA, 201 bp, Homo sapiens
aactagacatatcactcaaacatatcctcttttttttcatacttttttttgtttgtttttgtttttgtttttgagacagagtcttgctctgttgcccaggstggagtgcagtggcgcaatctcggctcactgcaagctcagcctccctgcaagctccgcctcccgggttcacgtcattctcctgcctcagcctcctgggta

SEQ ID NO: 490678 - DNA, 201 bp, Homo sapiens
atgatctcttacttaaggaattcacagcttagtggaagtagaggtacaagtaaataaatatgtaaaacttaatatagaattatgtataaggactatgttcygtataagtagaacaaagtagggaataattaatcttgagtaaagcctgaggaaggttttaaagcatgagtaaaagtttgttgtatgattttgtcttatgtt

SEQ ID NO: 490679 - DNA, 201 bp, Homo sapiens
agaagaacattatgtagtagatattgtgattatcctcattttacagatggagaaactgagacttagacaagttaaataacttgcccagggttacaatattrctgagtagaaaaaccacatttgaacccaggaagtgtggctgaagaatttttgtgatttacctgttagactataattgtctattttttctacagtggagat

SEQ ID NO: 490680 - DNA, 201 bp, Homo sapiens
tagtggttgccaggagctgagcagagggatgagtggggagtggctgatgatggtttgtttctgggatgatgaaaacggtctggaattatataatgatgacrgttgtacctctttatgaatatacaccactgaattgtataatttaaaattatgaatattatggtatgtgaattatatttcaatacaaaaatgtttaaaatg

SEQ ID NO: 490681 - DNA, 201 bp, Homo sapiens
gcaagaatgagggcagcaggatggaatagatagcctgaggcaagtcataaagggtcgcaatagattctgtttgggaaccgaagagtaaattgtcaataatragtaaattgtcaataataaataaaaataatgatggttcccattgttaattaggtatgtgggtaatttaactagactatatttatcatcacaatagaaaac

SEQ ID NO: 490682 - DNA, 201 bp, Homo sapiens
tttcttcactattataaattattctgtaatgaacattcttatacatataggtatacttatgcaaatatatcttaggataaattcttagaagtggaatggckgagtcactggataagtaccttttaattttggtagttgttatcaaattagtctccaaaaaagatgtgctaatttacattcccactgaaagtataagaatgc

SEQ ID NO: 490683 - DNA, 201 bp, Homo sapiens
ttcttcactattataaattattctgtaatgaacattcttatacatataggtatacttatgcaaatatatcttaggataaattcttagaagtggaatggctsagtcactggataagtaccttttaattttggtagttgttatcaaattagtctccaaaaaagatgtgctaatttacattcccactgaaagtataagaatgcc

SEQ ID NO: 490684 - DNA, 201 bp, Homo sapiens
atataggtatacttatgcaaatatatcttaggataaattcttagaagtggaatggctgagtcactggataagtaccttttaattttggtagttgttatcarattagtctccaaaaaagatgtgctaatttacattcccactgaaagtataagaatgcccattaccccatagtacgttgggtattgtcagactttgcagttt

SEQ ID NO: 490685 - DNA, 201 bp, Homo sapiens
tctcaaaataaataaacaggctgggcgcagtggctcacacccatcatcccagcactttgggaggctgaggagggcggatcacgaggtcaagagattgagaycatcctggccaacatggtgaaaccctgtctctactaaaaatgcaaaaattagctggatgtggtggcatgtgcctatagtcccagttacttgggaggctga

SEQ ID NO: 490686 - DNA, 201 bp, Homo sapiens
agtcccatgccagctcatcagcaagttcttttgttcctgtatctaaactataacctgggtcttttcatctcaccatcatttcttgtctcctaattaatctscctgtacctactgttgttccattataatgtattctccatgcaggagccagaatgagtattttaacatgttaaatcagattatataactttgctgtttaaa

SEQ ID NO: 490687 - DNA, 201 bp, Homo sapiens
ctcaaaataaataaacaggctgggcgcagtggctcacacccatcatcccagcactttgggaggctgaggagggcggatcacgaggtcaagagattgagacyatcctggccaacatggtgaaaccctgtctctactaaaaatgcaaaaattagctggatgtggtggcatgtgcctatagtcccagttacttgggaggctgag

SEQ ID NO: 490688 - DNA, 201 bp, Homo sapiens
ttccttccttccttccttccttccttccttccttcctttctttctttctttctctctctctcttttgtttctttctgtctctctctctttctttctttctstctctctctcttccttcctccctccctcccttccttcacttcttccctcccttccttccttccttctttcctccatcccttctttccttctcctctttct

SEQ ID NO: 490689 - DNA, 201 bp, Homo sapiens
aaaataaataaacaggctgggcgcagtggctcacacccatcatcccagcactttgggaggctgaggagggcggatcacgaggtcaagagattgagaccatyctggccaacatggtgaaaccctgtctctactaaaaatgcaaaaattagctggatgtggtggcatgtgcctatagtcccagttacttgggaggctgaggca

SEQ ID NO: 490690 - DNA, 201 bp, Homo sapiens
ataatgaaagagtattaaatgaggcatttttccaagtgtgctatttaatttttttctttggtttcattttaacctatttaaagaatatgatttagagaagytggtaactttgaagtggatggggatatcagtatatataaaattcacctttagggctcatattgagaagtgaatcacttaaagcttccctgccctgtgttt

SEQ ID NO: 490691 - DNA, 201 bp, Homo sapiens
gttttgagatggagtcttgctgtcaccaggctggagtgcagtggcacgatctcagttcactggaacctctgcctcccaggttcaagtgattctcctgcctyagcctcccaggtagctgggattacaggtgcatgccaccacacccggctaatttttgtatttgtagtagagatggggtttcaccatgttagtcaggctggt

SEQ ID NO: 490692 - DNA, 201 bp, Homo sapiens
aataaacaggctgggcgcagtggctcacacccatcatcccagcactttgggaggctgaggagggcggatcacgaggtcaagagattgagaccatcctggcyaacatggtgaaaccctgtctctactaaaaatgcaaaaattagctggatgtggtggcatgtgcctatagtcccagttacttgggaggctgaggcaggagaa

SEQ ID NO: 490693 - DNA, 201 bp, Homo sapiens
tatcactcaaacatatcctcttttttttcatacttttttttgtttgtttttgtttttgtttttgagacagagtcttgctctgttgcccaggctggagtgcrgtggcgcaatctcggctcactgcaagctcagcctccctgcaagctccgcctcccgggttcacgtcattctcctgcctcagcctcctgggtagctgggact

SEQ ID NO: 490694 - DNA, 201 bp, Homo sapiens
taaacaggctgggcgcagtggctcacacccatcatcccagcactttgggaggctgaggagggcggatcacgaggtcaagagattgagaccatcctggccamcatggtgaaaccctgtctctactaaaaatgcaaaaattagctggatgtggtggcatgtgcctatagtcccagttacttgggaggctgaggcaggagaatc

SEQ ID NO: 490695 - DNA, 201 bp, Homo sapiens
gcaagctcagcctccctgcaagctccgcctcccgggttcacgtcattctcctgcctcagcctcctgggtagctgggactacaggtgcctgccaccacgccyggctaatttttttgtattttttagtagagacagggtttcactgtgttagccaggatggtgttgatctgacctcgtgatcctcctgcctcagcctcccaaa

SEQ ID NO: 490696 - DNA, 201 bp, Homo sapiens
ttgagatggagtcttgctgtcaccaggctggagtgcagtggcacgatctcagttcactggaacctctgcctcccaggttcaagtgattctcctgccttagyctcccaggtagctgggattacaggtgcatgccaccacacccggctaatttttgtatttgtagtagagatggggtttcaccatgttagtcaggctggtctt

SEQ ID NO: 490697 - DNA, 201 bp, Homo sapiens
ggctcacacccatcatcccagcactttgggaggctgaggagggcggatcacgaggtcaagagattgagaccatcctggccaacatggtgaaaccctgtctytactaaaaatgcaaaaattagctggatgtggtggcatgtgcctatagtcccagttacttgggaggctgaggcaggagaatcacttgaacacgggaggcag

SEQ ID NO: 490698 - DNA, 201 bp, Homo sapiens
aagctcagcctccctgcaagctccgcctcccgggttcacgtcattctcctgcctcagcctcctgggtagctgggactacaggtgcctgccaccacgcctgsctaatttttttgtattttttagtagagacagggtttcactgtgttagccaggatggtgttgatctgacctcgtgatcctcctgcctcagcctcccaaagt

SEQ ID NO: 490699 - DNA, 201 bp, Homo sapiens
aaagtgaaattctgtttgaataagcacagtaatgtccatcatgcatcttgtttagtttcaacagtatgttttaatgggtagttttagttttcctttttatytctctactataagaggaaaaattctcttctgacatatatttattttaccttgtttatattattaaaacttaacaaatttttcctcttaaaaatatgtagg

SEQ ID NO: 490700 - DNA, 201 bp, Homo sapiens
cacacccatcatcccagcactttgggaggctgaggagggcggatcacgaggtcaagagattgagaccatcctggccaacatggtgaaaccctgtctctacyaaaaatgcaaaaattagctggatgtggtggcatgtgcctatagtcccagttacttgggaggctgaggcaggagaatcacttgaacacgggaggcagaggt

SEQ ID NO: 490701 - DNA, 201 bp, Homo sapiens
cgggttcacgtcattctcctgcctcagcctcctgggtagctgggactacaggtgcctgccaccacgcctggctaatttttttgtattttttagtagagacrgggtttcactgtgttagccaggatggtgttgatctgacctcgtgatcctcctgcctcagcctcccaaagtgctgggattacaggtgtgagccactgtgcc

SEQ ID NO: 490702 - DNA, 201 bp, Homo sapiens
tttggtttttttttttttttgagacggagtctcactctgttgcccaggctgcagtgcagtggtgtgaactcggctcactgcaacctctgcctgctgggttsaagcaattctcctgcctcagcctcccaagtagctggggctacaggcatgtgccaccatgcccggctagttttttgtatttttagtagagacggggttttt

SEQ ID NO: 490703 - DNA, 201 bp, Homo sapiens
gccaacatggtgaaaccctgtctctactaaaaatgcaaaaattagctggatgtggtggcatgtgcctatagtcccagttacttgggaggctgaggcaggaraatcacttgaacacgggaggcagaggttgcagtgagctgagatcgtgtcactgcactccagcctggcgacagagtgagactccatctcagaaataaataa

SEQ ID NO: 490704 - DNA, 201 bp, Homo sapiens
tggctaatttttttgtattttttagtagagacagggtttcactgtgttagccaggatggtgttgatctgacctcgtgatcctcctgcctcagcctcccaamgtgctgggattacaggtgtgagccactgtgcctgtcccatatcctcttttttgaaatactttttctcttggcttttgctaacaccatactctcttggttt

SEQ ID NO: 490705 - DNA, 201 bp, Homo sapiens
tgagatggagtcttgctgtcaccaggctggagtgcagtggcacgatctcagttcactggaacctctgcctcccaggttcaagtgattctcctgccttagcmtcccaggtagctgggattacaggtgcatgccaccacacccggctaatttttgtatttgtagtagagatggggtttcaccatgttagtcaggctggtcttg

SEQ ID NO: 490706 - DNA, 201 bp, Homo sapiens
aaccctgtctctactaaaaatgcaaaaattagctggatgtggtggcatgtgcctatagtcccagttacttgggaggctgaggcaggagaatcacttgaacmcgggaggcagaggttgcagtgagctgagatcgtgtcactgcactccagcctggcgacagagtgagactccatctcagaaataaataaataaataagtaaa

SEQ ID NO: 490707 - DNA, 201 bp, Homo sapiens
ctaatttttttgtattttttagtagagacagggtttcactgtgttagccaggatggtgttgatctgacctcgtgatcctcctgcctcagcctcccaaagtrctgggattacaggtgtgagccactgtgcctgtcccatatcctcttttttgaaatactttttctcttggcttttgctaacaccatactctcttggttttct

SEQ ID NO: 490708 - DNA, 201 bp, Homo sapiens
tggagtcttgctgtcaccaggctggagtgcagtggcacgatctcagttcactggaacctctgcctcccaggttcaagtgattctcctgccttagcctcccrggtagctgggattacaggtgcatgccaccacacccggctaatttttgtatttgtagtagagatggggtttcaccatgttagtcaggctggtcttgaactc

SEQ ID NO: 490709 - DNA, 201 bp, Homo sapiens
gaacacgggaggcagaggttgcagtgagctgagatcgtgtcactgcactccagcctggcgacagagtgagactccatctcagaaataaataaataaataartaaataaataaattcatctagtgatggatatttaggttgcttctactccttggctattgtgaataatgctgcagtgaagatgagtgtgcaaatatctctt

SEQ ID NO: 490710 - DNA, 201 bp, Homo sapiens
actatcaacaggaatgcctgaaacagatgtggcactttatgaattattcattgatgagacaaagagtatattatgtgttagattaattattattattattytttgatatggggtcttgctctgtcaccaaggctggagtgagtggtgcaatcttggctcactgcaacctccgtctcccgggttcaagcagttctccgctgc

SEQ ID NO: 490711 - DNA, 201 bp, Homo sapiens
gatatggggtcttgctctgtcaccaaggctggagtgagtggtgcaatcttggctcactgcaacctccgtctcccgggttcaagcagttctccgctgcagcytcccgagtagctgggattacaggcacccaccaccacacctggctaatttttgtgtctttagtagagactgagtttcaccatgttggccaggctggtcttg

SEQ ID NO: 490712 - DNA, 201 bp, Homo sapiens
aaggctggagtgagtggtgcaatcttggctcactgcaacctccgtctcccgggttcaagcagttctccgctgcagcctcccgagtagctgggattacaggyacccaccaccacacctggctaatttttgtgtctttagtagagactgagtttcaccatgttggccaggctggtcttgaactcctggcctcaggtgatctgc

SEQ ID NO: 490713 - DNA, 201 bp, Homo sapiens
aggctggagtgagtggtgcaatcttggctcactgcaacctccgtctcccgggttcaagcagttctccgctgcagcctcccgagtagctgggattacaggcrcccaccaccacacctggctaatttttgtgtctttagtagagactgagtttcaccatgttggccaggctggtcttgaactcctggcctcaggtgatctgcc

SEQ ID NO: 490714 - DNA, 201 bp, Homo sapiens
caggtgatcaggaactcttttatttgtgtgctttagcttttagttcttggttatatctataaagaaaacagaaagaaaaataatcatcaataataatagayaaatttatggtaaggagagaatgggaagcatactccatttcttctttcttggtggtcaagtagctatacagttgtaaacagaatcttcccggagggctta

SEQ ID NO: 490715 - DNA, 201 bp, Homo sapiens
gtaaagtaattacaacaataatgtaggatgagggacaaagaaatgctatactctgaattttcaatgtttctgtaacttagtgtcacagaaaatactcaatycttacatgaaagaggaatctttaaagtgactattaactgtaattttcttcccacttataaaaatatgttcatggcaaaaacctgaaaagcaaaagcccat

SEQ ID NO: 490716 - DNA, 201 bp, Homo sapiens
ggagcttgcagtgagccgagatcgcaccactgcactccagcgtgggcagcagagccagactccatctcaaaaagaaaaaaaaggactactggccaggcacrgtggctcatgcttgtaatcccagcattttgggaggccgaggcaggtggatcatctgaggtcaggagtttgagaccagcctgaccaacatggtgaaaacct

SEQ ID NO: 490717 - DNA, 201 bp, Homo sapiens
aaatgatatcaccttaagtttcaaactgtttaaaatgagctgtataaaataggtattagaagatgttaaacagtggttttttatttatttttggttgttcrctctttgtcatcagtcttatgtggaaattccaatagaaagtatataaaagtagcactgttgggacttaaacatgaaacaaggagcgactacccacctgct

SEQ ID NO: 490718 - DNA, 201 bp, Homo sapiens
ttgagtatggagcaggctctgtaagtgggatggccacagcactgaaggctctcagagaaggtgtcagttggtcttctgccacaaggtggacaagcacatgyttgggcctggggtactgatctccatatgagacataaaattgtgtctgcatgctcctatgaataaaccttcatttggcgatttctcgatttagtaaatggg

SEQ ID NO: 490719 - DNA, 201 bp, Homo sapiens
tgggattacaggtgtgaaccaccatgcccagccaataatgtactatcttaattgtagtatgttgtttgctacttaaaaatgtcctcatataaaggcccccrtaaggttgatagcattcagggttttgaatgagctatatgtacatgtatcagatgaatgtcctaaacaggtatggcagaggcattcagcatatggctgatt

SEQ ID NO: 490720 - DNA, 201 bp, Homo sapiens
aaattgttaaatgagggcataatgaaatgtataacaaatccaaatggatgaaaaatatttttcacagatttttaggagagtttcccaatatttatttcacygtgagtcacatttttcttgtttttttaaagagtttaatttgttttctaaagaccaatttatctgttctttaaaaacaacatagatggtagtgttgaatcc

SEQ ID NO: 490721 - DNA, 201 bp, Homo sapiens
gtattttgttaacatttgctaagaactagagcacaggatattagaaactgggaattattcttattggttggggagagttgcgcttattacctatgtttctsttttactgtagccctactggaacacctattccccagtgtcttgcttaggttactagatccccaggctgattagagagtaaggagaagcttgggcctaaaa

SEQ ID NO: 490722 - DNA, 201 bp, Homo sapiens
tttgccccggtgggacacctcgccagagcagtgtgtggcaggcccccgtggaggatcaacagagtggctgaacaccgggaaggaattggcacttggagtcyggacaactaaaacttggtaagactagtctttggaacttgcccactccatttgagtggaagcatggcctgatcacccacggcgtgcctttatcagcacttg

SEQ ID NO: 490723 - DNA, 201 bp, Homo sapiens
tttttttttttttttttttgagctctgtcacccaggctggagtgcagtggtacaatcgtggctcactgcaccctctgcctcccaggttcaagcaattctcytgcctcagcctcctgagtagctgggattacaggcgcatgccaccacgcccggctaattttttgtattttagtagagatggggtttcaccgtgttgcccag

SEQ ID NO: 490724 - DNA, 201 bp, Homo sapiens
tgaaatctctcgttctgttctgtttcactgtgaccaccagtgctcacagcccctgtcacgtaccccctggcttactcaatcgatcacgaccctctcatgcrgacccccttagagttgtgagcccttaaaagggcagaagttgagcaccttgacgagctcggattttgagacgctagcctgccgattctcccagctgattaa

SEQ ID NO: 490725 - DNA, 201 bp, Homo sapiens
ctgtcacccaggctggagtgcagtggtacaatcgtggctcactgcaccctctgcctcccaggttcaagcaattctcctgcctcagcctcctgagtagctgrgattacaggcgcatgccaccacgcccggctaattttttgtattttagtagagatggggtttcaccgtgttgcccagtctggtctcagactcctgagctca

SEQ ID NO: 490726 - DNA, 201 bp, Homo sapiens
gaggggttttgtctgcagctggtcctgctacactgtcagctagctggataaacttaagtgtttgttctgcagaccaaatctagccttgatctcaacatctmtgccaattgttctcgatctgtctgaatattgggattacttaggaaactttaaataaccaagcccttcctggcattaaatcaggatatccatgggtcagcc

SEQ ID NO: 490727 - DNA, 201 bp, Homo sapiens
ggagtgcagtggtacaatcgtggctcactgcaccctctgcctcccaggttcaagcaattctcctgcctcagcctcctgagtagctgggattacaggcgcaygccaccacgcccggctaattttttgtattttagtagagatggggtttcaccgtgttgcccagtctggtctcagactcctgagctcaggtaatctgcccgt

SEQ ID NO: 490728 - DNA, 201 bp, Homo sapiens
cattccaagacactcacctgtgattcttaccttgggccaggtactcaattttcataagtatctggctttttccatatcctggtaatccctcatacattaaracttggctgctgttagatatcaaaaatttcttcatagtatacatgaagtagttgatctctttattacgtcctgttatttttagttttaaaaaagagcaaa

SEQ ID NO: 490729 - DNA, 201 bp, Homo sapiens
gaacctctgcctcccaggttcaagtgattctcctgccttagcctcccaggtagctgggattacaggtgcatgccaccacacccggctaatttttgtatttktagtagagatggggtttcaccatgttagtcaggctggtcttgaactcctaaacctcaagtgatccacctgcctcggcctcccaaagtgctggaattacag

SEQ ID NO: 490730 - DNA, 201 bp, Homo sapiens
accacgcccagctaatattttttatttctagtagagatggggtttcaccgcgtcaaccaggatggttttgatctcctgacctcatgatctgcctgcctcarcctcccaaagtgctgagattacaggcatgacatttttttaagttctttgtggattctggatattaaaccttcgtcaggtgcatagttggcaaatattttc

SEQ ID NO: 490731 - DNA, 201 bp, Homo sapiens
gcctcccgagtagctgggattacaggcacccaccaccacacctggctaatttttgtgtctttagtagagactgagtttcaccatgttggccaggctggtcytgaactcctggcctcaggtgatctgcccgccttggcctccaaaagtgctgggattgcaggtgtaagccactgttcctggcccaacatttttttcaagttt

SEQ ID NO: 490732 - DNA, 201 bp, Homo sapiens
ctgtgcagagctttttagtttaattaggtcccacttgtcaatttttgtttttgttgcagtggctattgaggacttagtcataatttctttctcaagtccartgtctagaatggcgtttcctatattttcttttaggattcttatagttcgaggtcttacatttaaatctggaatccatcttgagttaatttttatatatgg

SEQ ID NO: 490733 - DNA, 201 bp, Homo sapiens
agctgggattacaggcacccaccaccacacctggctaatttttgtgtctttagtagagactgagtttcaccatgttggccaggctggtcttgaactcctgrcctcaggtgatctgcccgccttggcctccaaaagtgctgggattgcaggtgtaagccactgttcctggcccaacatttttttcaagtttaaacatacctt

SEQ ID NO: 490734 - DNA, 201 bp, Homo sapiens
gtaacagccctgggtgaaatctgaaaccctgctgtaaggagctgtaagaattgtaatttctaagcagtgagcaatttctgtcaaaaaagttggagactcattgagagctaactattccttctgtgctgggcagatgaatgtggaggcccattttgttattcactgatagaacaaataaatatccaggtattatctaatgtc

SEQ ID NO: 490735 - DNA, 201 bp, Homo sapiens
acctcccactgggtccctcccacaacacgtggcaattcaagataagatttaggtgagatcatagccaaaccacgtctgtgtgtgtgtgtgtgtgtgtgtgwgtggtgtgtgtgtgtgtggtgtgtgtgtgcgtgcgcgtgtgcacgtggcttaaagtaacaaatttattatcttactgttctggaagtcagaagtctgaaa

SEQ ID NO: 490736 - DNA, 201 bp, Homo sapiens
ttttgtttgtttgttttgagactgagtctcactccgtcttccaggctggagtggagtggcacaatctcagctcactgcaacctccacctcctgggttcaastgattcttgtgcctcagcctcctgagaagctgagattacagtctgcaccaccatgcctggctaatttttgaatttctagtagagacggggtttcgccgtg

SEQ ID NO: 490737 - DNA, 201 bp, Homo sapiens
acatttctgagtatggcttagtgagaactacttagcagactgtattgcttcttttgggtgaaatattccctttctgaaaatgcatttgaacctcaatttcrtgagatgttttgtgtttttctttggcctgaatgaagctcacataggaacttagaagatgaggcttcaaaggctgcatagctgcacaccaacatggcacat

SEQ ID NO: 490738 - DNA, 201 bp, Homo sapiens
ccactgggtccctcccacaacacgtggcaattcaagataagatttaggtgagatcatagccaaaccacgtctgtgtgtgtgtgtgtgtgtgtgtgtgtggkgtgtgtgtgtgtggtgtgtgtgtgcgtgcgcgtgtgcacgtggcttaaagtaacaaatttattatcttactgttctggaagtcagaagtctgaaataagg

SEQ ID NO: 490739 - DNA, 201 bp, Homo sapiens
aataactttaattacttttgtgaattacccctagatttgtgcttaaatttttattttttatttttttatttttttatttttttgagatggagtctcgctgkgccacccaggctggagtgcagtggcacaatctcggctcactgcaagctccgcctcccggattcacgccagtctcctgcctcagcctcctgagtagctggg

SEQ ID NO: 490740 - DNA, 201 bp, Homo sapiens
aagtataataataaaaaataaataaataaaaaataataaagtttccaggctgggagcggtggctcacgcctgtaatcccagcactttgggaggccgaggcrggtggatcccctgaggtcaggagttcgagaccagcctcaacatggagaaaccccgtctctattaaaaatacaaaattagccgggcgtggtggtgcatgcc

SEQ ID NO: 490741 - DNA, 201 bp, Homo sapiens
ggctgggtgcggtggctcatgcctctaatcccagcactttgggaggccgaggcaggtggatcacaaggtcaggagttggagaccagcctggtcaacatagygaaaccctgtctctacaaaaaatacaaaaaattagccgggcgtggtggcaggtgcctgtaatcccagctactcgggaggctgaggaaggagaattgcttg

SEQ ID NO: 490742 - DNA, 201 bp, Homo sapiens
ttttagtagagacggtgtttcactgtgttagccaggatggtctcgatctcctgacctcatgatccgcccgcctctgcctcccaaagtgctgggattacagkcgtgagccaccgcacccggcaaatttttgtatttttaagagctttattgagatatgatcagctgtacatatttaaagtgtactatttgatatgtttaaca

SEQ ID NO: 490743 - DNA, 201 bp, Homo sapiens
ggcaggtggatcacaaggtcaggagttggagaccagcctggtcaacatagtgaaaccctgtctctacaaaaaatacaaaaaattagccgggcgtggtggcrggtgcctgtaatcccagctactcgggaggctgaggaaggagaattgcttgatcctgggaggcggaggttgcagtgagccgagatcacaccactgcactcc

SEQ ID NO: 490744 - DNA, 201 bp, Homo sapiens
tttagtagagacggtgtttcactgtgttagccaggatggtctcgatctcctgacctcatgatccgcccgcctctgcctcccaaagtgctgggattacaggygtgagccaccgcacccggcaaatttttgtatttttaagagctttattgagatatgatcagctgtacatatttaaagtgtactatttgatatgtttaacac

SEQ ID NO: 490745 - DNA, 201 bp, Homo sapiens
caggtggatcacaaggtcaggagttggagaccagcctggtcaacatagtgaaaccctgtctctacaaaaaatacaaaaaattagccgggcgtggtggcagktgcctgtaatcccagctactcgggaggctgaggaaggagaattgcttgatcctgggaggcggaggttgcagtgagccgagatcacaccactgcactccag

SEQ ID NO: 490746 - DNA, 201 bp, Homo sapiens
gtgtttcactgtgttagccaggatggtctcgatctcctgacctcatgatccgcccgcctctgcctcccaaagtgctgggattacaggcgtgagccaccgcrcccggcaaatttttgtatttttaagagctttattgagatatgatcagctgtacatatttaaagtgtactatttgatatgtttaacacatgtaaacataca

SEQ ID NO: 490747 - DNA, 201 bp, Homo sapiens
agtctcggcctcttgcccaggctggagtgcaatggcgcgatctcagctcacggcagcctccacctcctgggttcaagtgattctcctgcctcagactcccragtagctgggattacaggcacgcgccaccattcccagcttatttttttgtatctttagtagagatggggtggtctcgaaccaccagccaggctggtctca

SEQ ID NO: 490748 - DNA, 201 bp, Homo sapiens
cgcgccaccattcccagcttatttttttgtatctttagtagagatggggtggtctcgaaccaccagccaggctggtctcaaactcctgacctcgtgatctkcctgtcttggcctcccaaagtggtgggattacaggcactttatagtaagtcttgaagttgggtagtgtcagctgtcttgggattctccacttatctttct

SEQ ID NO: 490749 - DNA, 201 bp, Homo sapiens
gagtgcagtggcgcgatctcggctcaatgcaagctccgcctcccgggttcatgccattcttctgcctcagcctcccgagtagctgggactacaggtgcccrccaccacacccggctaattttttgtatttttagtagagatggggtttcatcgtgttagccaggatgtcttgatctcctgaccccgtgatccgccctcctt

SEQ ID NO: 490750 - DNA, 201 bp, Homo sapiens
atagagaaatctgccctttgtgacagtatacagaaagtataggcagatacaattttatgagagatctcatcagcctgattacttaattattgttctttgtygtaaattcagccttctttcattacagcttctgaataaacatgctttttgatctgtgtttggtaaagatgattcattccttaaagggacagatttctcttt

SEQ ID NO: 490751 - DNA, 201 bp, Homo sapiens
acgggtttggtttttttttttttttgagacggagtctcactctgttgcccaggctgcagtgcagtggtgtgaactcggctcactgcaacctctgcctgctrggttcaagcaattctcctgcctcagcctcccaagtagctggggctacaggcatgtgccaccatgcccggctagttttttgtatttttagtagagacgggg

SEQ ID NO: 490752 - DNA, 201 bp, Homo sapiens
cctgaagctgtttgttatcaatctgcaaagtagagagcagctttctgtaggtgtccttggcagtggatccctcccccaacaccgcccccacctcatacccraaatcatctagggaatgtctacctcagaatgggtgaggtacaacatgacagagccagcatgcctgaagtggagcagatggaaatataatcaaaatccctc

SEQ ID NO: 490753 - DNA, 201 bp, Homo sapiens
atcttagtaagcccccatacctgcaaatttcaggatgtctcctccaaaaatcaacacttctgagaaaaaaaaaaaaaattaaatcaaaccctgattccttraaggtagtaaaaaaacatcattctttcttagtggaatagaaactaggtcaaaagaacagtgattcagagaataggcttatactaaagatctcatcccaga

SEQ ID NO: 490754 - DNA, 201 bp, Homo sapiens
ctgcagtgcagtggtgtgaactcggctcactgcaacctctgcctgctgggttcaagcaattctcctgcctcagcctcccaagtagctggggctacaggcaygtgccaccatgcccggctagttttttgtatttttagtagagacggggtttttaacttgatatactgaagaacagtggtattcagaattataatgagcatt

SEQ ID NO: 490755 - DNA, 201 bp, Homo sapiens
ctcggctcactgcaacctctgcctgctgggttcaagcaattctcctgcctcagcctcccaagtagctggggctacaggcatgtgccaccatgcccggctawttttttgtatttttagtagagacggggtttttaacttgatatactgaagaacagtggtattcagaattataatgagcatttccaatgaaccataaataca

SEQ ID NO: 490756 - DNA, 201 bp, Homo sapiens
agttggagaccagcctggtcaacatagtgaaaccctgtctctacaaaaaatacaaaaaattagccgggcgtggtggcaggtgcctgtaatcccagctactwgggaggctgaggaaggagaattgcttgatcctgggaggcggaggttgcagtgagccgagatcacaccactgcactccagctcgggtgacactgcgagact

SEQ ID NO: 490757 - DNA, 201 bp, Homo sapiens
gtaatgttctgagattagtaattgaacaaagtataaggttaaattgacttaaaaacattactgaggggccgggcgcggtggctcacgcctgtaatcccagyactttgggaggctgaggcgggcagatcacctgaggttaggagttcgagaccagcctgaccaatgtggagaaaccccatctctactaaaaatacaaaatag

SEQ ID NO: 490758 - DNA, 201 bp, Homo sapiens
aattgaacaaagtataaggttaaattgacttaaaaacattactgaggggccgggcgcggtggctcacgcctgtaatcccagcactttgggaggctgaggcrggcagatcacctgaggttaggagttcgagaccagcctgaccaatgtggagaaaccccatctctactaaaaatacaaaatagccaggcgtggtggcacatg

SEQ ID NO: 490759 - DNA, 201 bp, Homo sapiens
gaatactacatagtaatgacatagaataaattacagctacacccaacaatatggatgaattatataacataccattgagtaagagaaagtatatataagcygtatataattatacaatgtatgattccatctgtatcaattttttaaacaggcataagtaatcgagggtgttagaagactttggggaaaggaagaaggaaa

SEQ ID NO: 490760 - DNA, 201 bp, Homo sapiens
ttactgaggggccgggcgcggtggctcacgcctgtaatcccagcactttgggaggctgaggcgggcagatcacctgaggttaggagttcgagaccagcctraccaatgtggagaaaccccatctctactaaaaatacaaaatagccaggcgtggtggcacatgcctgtaatcccagctactctggaggctgaggctggaga

SEQ ID NO: 490761 - DNA, 201 bp, Homo sapiens
ctcggctcaatgcaagctccgcctcccgggttcatgccattcttctgcctcagcctcccgagtagctgggactacaggtgcccaccaccacacccggctarttttttgtatttttagtagagatggggtttcatcgtgttagccaggatgtcttgatctcctgaccccgtgatccgccctcctttgcctcccaaaatgctg

SEQ ID NO: 490762 - DNA, 201 bp, Homo sapiens
aagagtgattagttcttagttcccagaaagtttccttctcaattgctaacaagagtctatcccctgactcaagggtcgcaaacgccaaaagaaggagaaasgagaaggtctgacttggtagtggagaatccaaagaactcaggtagcatctgtttccatagcatctggcacattgttcaataaatgcttgttgagtctgca

SEQ ID NO: 490763 - DNA, 201 bp, Homo sapiens
aggggccgggcgcggtggctcacgcctgtaatcccagcactttgggaggctgaggcgggcagatcacctgaggttaggagttcgagaccagcctgaccaaygtggagaaaccccatctctactaaaaatacaaaatagccaggcgtggtggcacatgcctgtaatcccagctactctggaggctgaggctggagaatctct

SEQ ID NO: 490764 - DNA, 201 bp, Homo sapiens
atgcaagctccgcctcccgggttcatgccattcttctgcctcagcctcccgagtagctgggactacaggtgcccaccaccacacccggctaattttttgtrtttttagtagagatggggtttcatcgtgttagccaggatgtcttgatctcctgaccccgtgatccgccctcctttgcctcccaaaatgctgggattacag

SEQ ID NO: 490765 - DNA, 201 bp, Homo sapiens
aatagcgcgccttttattggagcacatgctatgtgtctggcgcagttccaagtgctttacatgcatcattttctttaatcctgacaaaaacactgttaagwagtactacttggctgggcgcagtgactcacgcctgtaatcccagccctttgggaggccgaggtgggcagatcacgaggtcaggagatcgagaccatcctg

SEQ ID NO: 490766 - DNA, 201 bp, Homo sapiens
actaaaaacacaaaattagctgagcgtggtggcacatgcctgtaatcccagctactcaggagactgaggcagcagaatcgcttgaacccgggaggcggagrttgtggtgagccgaaatcacgccatcgcactccagcctgggcaacaaaagtgaaactccgtctcagaaaaaacaacaacaacaacaacaacaacaaaaac

SEQ ID NO: 490767 - DNA, 201 bp, Homo sapiens
cattaactaaattaagaaaaacaatgctgaaagtggatttaaattatgcttgttggccgggcgtagtggcttacgcctgtaatcctagcactttgggagghcgaggcgagtggatcacctgaggtcaggagttcaagaccaacctggccaacatggtgaaaccctttctctactgaaaatacaaaaattagctgggcttgg

SEQ ID NO: 490768 - DNA, 201 bp, Homo sapiens
ggatttaaattatgcttgttggccgggcgtagtggcttacgcctgtaatcctagcactttgggaggccgaggcgagtggatcacctgaggtcaggagttcvagaccaacctggccaacatggtgaaaccctttctctactgaaaatacaaaaattagctgggcttggtggcaggcgcctgtaatcccagctacttgggagg

SEQ ID NO: 490769 - DNA, 201 bp, Homo sapiens
caggcgcctgtaatcccagctacttgggaggttgaggcaggagaattgcttgaacccaagagaaggaggttgcatgagccgagatcacgccattgcactcyagcctgggtgacaagagcaaaactcagtctcagaaaaaaaaaaaaaaagcttattataacaaaccaaacaattcagaggtatacatagaataaattaata

SEQ ID NO: 490770 - DNA, 201 bp, Homo sapiens
ttatgaatattatggtatgtgaattatatttcaatacaaaaatgtttaaaatggatcagatgtggtggctcatgcctgtaatcccaacactttgggaggcmgaagtgggaggattgcttgaggccaggagttcaagaccaacctgggcaacatagctagactccatctctaaaaaaatttttaaaacagctggttgtggtg

SEQ ID NO: 490771 - DNA, 201 bp, Homo sapiens
gttgttgagttgtgtttgtatattctgggactcttgtcatgggactcttatcagatatatgatttgcaaatatttcccttcattctatgggttgtcttttygccttcctcatagtgtcctttaatgtacaaaagtttttaattttggtgaagtctaatttctttttgctgtttgcttgggctgttggtgccgtatttaaga

SEQ ID NO: 490772 - DNA, 201 bp, Homo sapiens
taggaattgcattgaatctatagaacaagttgggaataattgacatcttgaaaatactgaatctttctatttattaatatggaatagctcttcatttattkaattctttgatttcttttaccagagttttataattttcctcatagaaatcttatacatatttcattcaatttatacctaagtgtttcatgttttggagtg

SEQ ID NO: 490773 - DNA, 201 bp, Homo sapiens
tcacgaggtcaggagattgagaccagcctggccaacatggtgaaatcccatctgtactgaaaaatacaaaaattagctgggtgtggtggcgcgtgcctgtrgtcccagctacttgggaggctgaggcaggagaatcgcctgaacccaggaggtggaggttgtagtgagccgagatcgcaccactgcactccagcctggtga

SEQ ID NO: 490774 - DNA, 201 bp, Homo sapiens
caatctagggggtagcattttgtcctgtgtccttacctctctgaaggatccaagatcagttattgattttacagtttgttaactttttatttgttgttagkatggagtggcaactgctaagcttcttacgtgtggaactggaaactggaagcttgtttttttaatacatcaactattaaatcaagcttgtctaacacacgg

SEQ ID NO: 490775 - DNA, 201 bp, Homo sapiens
tgcgttcaagcgattctcctgcctcagcctcccaaggatctgggattacaggtgtgtgccaccatgctcggctaatttttatgtttttggtagagacaggstttcaccatgttggccaggctggtcttgaactcctgacctcaagtgatctgcccacctcatcctcccaaagtgttgggattacaggcatgagccaccacg

SEQ ID NO: 490776 - DNA, 201 bp, Homo sapiens
tggcctaacaaacgaagtaactaatggctgtatgtagtgtgtagttagctacttggtaaaccaccctaaatctctgacagcgttaaagaacatgatatttrtcttgtttaaaggctttacgttaattactctctctgtttcatgacattgacatgtcaggctagttattttacagaatgttgctccatttggatttgtctg

SEQ ID NO: 490777 - DNA, 201 bp, Homo sapiens
gttccacttgtctgttatggctttgttaactgtgattttgttgttatatctaataaatcattgtaaaatccaatgtcatgaagcttttctctgaattttctttttttttttttttttttgagctctgtcacccaggctggagtgcagtggtacaatcgtggctcactgcaccctctgcctcccaggttcaagcaattctcc

SEQ ID NO: 490778 - DNA, 201 bp, Homo sapiens
ttatgtatagttcattttcatgctgctaataaaggtatacccgagactgggcagtttacaaaagaaagaggtttattggacttacagttctgtgtacctgrgaggcctcacaatcatggtggaaggtgaaaggtgaaaggcatgtctcacatgacagcagacaagagaagagagcttgtgtggaaaaactcccattttaaa

SEQ ID NO: 490779 - DNA, 201 bp, Homo sapiens
ccattttaaaaaccatcatatctcatgagacttatgcaccatcacaagaacagcatgggaaagacctgcccacatgattcagttacctcccactgggtccytcccacaacacgtggcaattcaagataagatttaggtgagatcatagccaaaccacgtctgtgtgtgtgtgtgtgtgtgtgtgtgtggtgtgtgtgtgtg

SEQ ID NO: 490780 - DNA, 201 bp, Homo sapiens
acatattgttactttttgagatggagttttgctcttgtcgcccaggctggagtgcaaaggcgcgatctcagctcactgcaacctccgcctcctgggttgamgtgattctcctgcctcagcctctggagtagctgggattacaggcgtgcgccaccacacccagctaatttttgtattattagtagagacggggttttacca

SEQ ID NO: 490781 - DNA, 201 bp, Homo sapiens
ccattcatttattcatcattattgaggacctactgtataccaagcactggggatataagaataaagaaataattagtatcttcaaagagttcacagtgtarcaagtgaaaactgtaggaagtgaataattgtgatatagggcaaggagtgttctaatagaagcatatgctataggaggaaaaaaggaagaggaagaaggaa

SEQ ID NO: 490782 - DNA, 201 bp, Homo sapiens
agcttaactgtctagctgggatggggaattcatagaggaatgtctatgaatccctcgagctgggtttcaaaaattgactgcggttttcccaatagaccagkattaggtgggtgctgatgaggacaatctacttaaacaacccagaggagggggaacaggaggagatgaggttggaaaggcaggtggtaccttgtatgtcac

SEQ ID NO: 490783 - DNA, 201 bp, Homo sapiens
ttaatacacgtttatcactttcaacagcagctggctgcttgtaagccttcaattaatattactacaaatgaggtagcaaatgtgtcactttaacataaacktgaatacttctgaacaaggtactctttttgaaaactatttattgtggagaaatttgaccataaaataaaatataatgaatttccatatacccatcacccc

SEQ ID NO: 490784 - DNA, 201 bp, Homo sapiens; identical to SEQ ID NO: 490582

SEQ ID NO: 490785 - DNA, 201 bp, Homo sapiens; identical to SEQ ID NO: 490532

SEQ ID NO: 490786 - DNA, 201 bp, Homo sapiens; identical to SEQ ID NO: 490584

SEQ ID NO: 490787 - DNA, 201 bp, Homo sapiens; identical to SEQ ID NO: 490585

SEQ ID NO: 490788 - DNA, 201 bp, Homo sapiens; identical to SEQ ID NO: 490586

SEQ ID NO: 490789 - DNA, 201 bp, Homo sapiens; identical to SEQ ID NO: 490587

SEQ ID NO: 490790 - DNA, 201 bp, Homo sapiens; identical to SEQ ID NO: 490199
  misc_feature (1)...(201): n = A,T,C or G

SEQ ID NO: 490791 - DNA, 201 bp, Homo sapiens; identical to SEQ ID NO: 490200

SEQ ID NO: 490792 - DNA, 201 bp, Homo sapiens; identical to SEQ ID NO: 490152

SEQ ID NO: 490793 - DNA, 201 bp, Homo sapiens; identical to SEQ ID NO: 490201

SEQ ID NO: 490794 - DNA, 201 bp, Homo sapiens; identical to SEQ ID NO: 490408

SEQ ID NO: 490795 - DNA, 201 bp, Homo sapiens; identical to SEQ ID NO: 490472

SEQ ID NO: 490796 - DNA, 201 bp, Homo sapiens; identical to SEQ ID NO: 490473

SEQ ID NO: 490797 - DNA, 201 bp, Homo sapiens; identical to SEQ ID NO: 490278

SEQ ID NO: 490798 - DNA, 201 bp, Homo sapiens; identical to SEQ ID NO: 490479

SEQ ID NO: 490799 - DNA, 201 bp, Homo sapiens; identical to SEQ ID NO: 490541

SEQ ID NO: 490800 - DNA, 201 bp, Homo sapiens; identical to SEQ ID NO: 490482

SEQ ID NO: 490801 - DNA, 201 bp, Homo sapiens; identical to SEQ ID NO: 490484

SEQ ID NO: 490802 - DNA, 201 bp, Homo sapiens; identical to SEQ ID NO: 490544

SEQ ID NO: 490803 - DNA, 201 bp, Homo sapiens; identical to SEQ ID NO: 490281

SEQ ID NO: 490804 - DNA, 201 bp, Homo sapiens; identical to SEQ ID NO: 490487

SEQ ID NO: 490805 - DNA, 201 bp, Homo sapiens; identical to SEQ ID NO: 490546

SEQ ID NO: 490806 - DNA, 201 bp, Homo sapiens; identical to SEQ ID NO: 490283

SEQ ID NO: 490807 - DNA, 201 bp, Homo sapiens; identical to SEQ ID NO: 490282

SEQ ID NO: 490808 - DNA, 201 bp, Homo sapiens; identical to SEQ ID NO: 490490

SEQ ID NO: 490809 - DNA, 201 bp, Homo sapiens; identical to SEQ ID NO: 490549

SEQ ID NO: 490810 - DNA, 201 bp, Homo sapiens; identical to SEQ ID NO: 490591

SEQ ID NO: 490811 - DNA, 201 bp, Homo sapiens; identical to SEQ ID NO: 490284

SEQ ID NO: 490812 - DNA, 201 bp, Homo sapiens; identical to SEQ ID NO: 490493

SEQ ID NO: 490813 - DNA, 201 bp, Homo sapiens; identical to SEQ ID NO: 490552

SEQ ID NO: 490814 - DNA, 201 bp, Homo sapiens; identical to SEQ ID NO: 490592

SEQ ID NO: 490815 - DNA, 201 bp, Homo sapiens; identical to SEQ ID NO: 490285

SEQ ID NO: 490816 - DNA, 201 bp, Homo sapiens; identical to SEQ ID NO: 490495

SEQ ID NO: 490817 - DNA, 201 bp, Homo sapiens; identical to SEQ ID NO: 490556

SEQ ID NO: 490818 - DNA, 201 bp, Homo sapiens; identical to SEQ ID NO: 490593

SEQ ID NO: 490819 - DNA, 201 bp, Homo sapiens; identical to SEQ ID NO: 490286

SEQ ID NO: 490820 - DNA, 201 bp, Homo sapiens; identical to SEQ ID NO: 490558

SEQ ID NO: 490821 - DNA, 201 bp, Homo sapiens; identical to SEQ ID NO: 490594

SEQ ID NO: 490822 - DNA, 201 bp, Homo sapiens; identical to SEQ ID NO: 490560

SEQ ID NO: 490823 - DNA, 201 bp, Homo sapiens; identical to SEQ ID NO: 490595

SEQ ID NO: 490824 - DNA, 201 bp, Homo sapiens; identical to SEQ ID NO: 490562

SEQ ID NO: 490825 - DNA, 201 bp, Homo sapiens; identical to SEQ ID NO: 490596

SEQ ID NO: 490826 - DNA, 201 bp, Homo sapiens; identical to SEQ ID NO: 490565

SEQ ID NO: 490827 - DNA, 201 bp, Homo sapiens; identical to SEQ ID NO: 490597

SEQ ID NO: 490828 - DNA, 201 bp, Homo sapiens; identical to SEQ ID NO: 490183

SEQ ID NO: 490829 - DNA, 201 bp, Homo sapiens; identical to SEQ ID NO: 490186

SEQ ID NO: 490830 - DNA, 201 bp, Homo sapiens; identical to SEQ ID NO: 490189

SEQ ID NO: 490831 - DNA, 201 bp, Homo sapiens; identical to SEQ ID NO: 490192

SEQ ID NO: 490832 - DNA, 201 bp, Homo sapiens; identical to SEQ ID NO: 490195

SEQ ID NO: 490833 - DNA, 201 bp, Homo sapiens; identical to SEQ ID NO: 490714

SEQ ID NO: 490834 - DNA, 201 bp, Homo sapiens; identical to SEQ ID NO: 490715

SEQ ID NO: 490835 - DNA, 201 bp, Homo sapiens; identical to SEQ ID NO: 490505

SEQ ID NO: 490836 - DNA, 201 bp, Homo sapiens; identical to SEQ ID NO: 490508

SEQ ID NO: 490837 - DNA, 201 bp, Homo sapiens; identical to SEQ ID NO: 490296

SEQ ID NO: 490838 - DNA, 201 bp, Homo sapiens; identical to SEQ ID NO: 490511

SEQ ID NO: 490839 - DNA, 201 bp, Homo sapiens; identical to SEQ ID NO: 490298

SEQ ID NO: 490840 - DNA, 201 bp, Homo sapiens; identical to SEQ ID NO: 490515

SEQ ID NO: 490841 - DNA, 201 bp, Homo sapiens; identical to SEQ ID NO: 490299

SEQ ID NO: 490842 - DNA, 201 bp, Homo sapiens; identical to SEQ ID NO: 490518

SEQ ID NO: 490843 - DNA, 201 bp, Homo sapiens; identical to SEQ ID NO: 490577

SEQ ID NO: 490844 - DNA, 201 bp, Homo sapiens; identical to SEQ ID NO: 490521

SEQ ID NO: 490845 - DNA, 201 bp, Homo sapiens; identical to SEQ ID NO: 490578

SEQ ID NO: 490846 - DNA, 201 bp, Homo sapiens; identical to SEQ ID NO: 490524

SEQ ID NO: 490847 - DNA, 201 bp, Homo sapiens; identical to SEQ ID NO: 490579

SEQ ID NO: 490848 - DNA, 201 bp, Homo sapiens; identical to SEQ ID NO: 490527
  misc_feature (1)...(201): n = A,T,C or G

SEQ ID NO: 490849 - DNA, 201 bp, Homo sapiens; identical to SEQ ID NO: 490580

SEQ ID NO: 490850 - DNA, 201 bp, Homo sapiens; identical to SEQ ID NO: 490304

SEQ ID NO: 490851 - DNA, 201 bp, Homo sapiens; identical to SEQ ID NO: 490530

SEQ ID NO: 490852 - DNA, 201 bp, Homo sapiens; identical to SEQ ID NO: 490581

SEQ ID NO: 490853 - DNA, 201 bp, Homo sapiens
tgccgcggcggccgcagctcccgaggctgcgacggcttctcctcgttccacagggcccactggctcctggtccatcgtcgtcgccaccacagggctgctgrcgccgcagcgccggccgcctagccaagtctctgggaaggggactagccggccttgaggggcggggccggccagaggggcggggccagcccgcgcctcgcc

SEQ ID NO: 490854 - DNA, 201 bp, Homo sapiens
tggatcccttaatttcctgccccgcagattccccgaatgccgcggcggccgcagctcccgaggctgcgacggcttctcctcgttccacagggcccactggstcctggtccatcgtcgtcgccaccacagggctgctggcgccgcagcgccggccgcctagccaagtctctgggaaggggactagccggccttgaggggcgg

SEQ ID NO: 490855 - DNA, 201 bp, Homo sapiens
ttgtgaataattatagttttttaaagaatgatatagaaaattactctttaatattttttcaaacaattcacttcactttgtaaggcaaggaatatcttcgrggaaattttcaagtaagaattaagcatggagacagatcgcctcagaacatttgcctgtacttgcaaatgaggcatcaatgcagagcctttgttaacattt

SEQ ID NO: 490856 - DNA, 201 bp, Homo sapiens
gactgccatttgtgtgcctgtcattgtgctataatgctaagaacgtggaaaagatattccagacctcaaagatctgcagagctacaatccagtggcgaacscagccaagcaatcaatcccattttattaccgttgtaagggaatatgctggacacagtgggagtaacgaggaagaatacacaacccaatctgaagtggggc

SEQ ID NO: 490857 - DNA, 201 bp, Homo sapiens
tttgggagggtactaaacttgacttgggccttcgggttggagactgaagggacaaagagaaaaggaggcatttcaggaaagttaatcccaaaggactgatmaaagcgtagtgaggagaaaagttttactaacattaaggattccacaggaaagtgatagaagttgggtacaaaagtagattggagagactatgtacattat

SEQ ID NO: 490858 - DNA, 201 bp, Homo sapiens
ggattacaggtgcccgccaccacgcccggctaattttttatattttcagtagagatggggtttcaccgtgttagccaggatggtctcgatctcctgacctygtgatccgcctgcctcggcctcccaaagtgctgggattacaggcgtgagccaccgcgcccggccttgttcttttgttcttcatagtaaatcttgctgctg

SEQ ID NO: 490859 - DNA, 201 bp, Homo sapiens
agcagagaagcttcactcttcatttctcttcctctgtcagtagaaagaagccttgagtgagcccttgaaaagtctcccagaataaaacctttagaaatgtwtacaaatagtgatgagtgtatgtgtttatgtgtgggatatctatcaataaataactgaacagaaaagtataaagaaaatcatgagggacaaacatggtta

SEQ ID NO: 490860 - DNA, 201 bp, Homo sapiens
caacaaataaccccattaaagagtaggcaaagacatgaacacatatttttcaaaagaagacatacaagtggcaaacaaccatatgaaaaaaatgttcagcrtcagtaatcatcagaaaaatgcaatttaaaaccacaatgagataccatctcataccagtcagaatggctattactaaaaaagcaagaaacagcagatgtt

SEQ ID NO: 490861 - DNA, 201 bp, Homo sapiens
gaggtgggcggatcacgaggtcaggagattaagaccatcctggccaacacgatgaaaccccatctgtactaaaaaatagaaaaaattagccgggtgtggtrgcgggcgcctgtagtcccagctactcgggaggctgaggcaggagaatggcgtgaacgcgggaggcagagcttgcagtgagccgagatcgcgctgctgcac

SEQ ID NO: 490862 - DNA, 201 bp, Homo sapiens
tctctaggtaagggtctcttcttaaattttgcctagaaaacagcaatccctttttcccttgagattttatttttactttattacagttatctttattcatrtttaacatttgtttggtatctctttactgatttttgaattaggattttttttttagatctgacttttgccagcaaaataatgttaatttttttctaattg

SEQ ID NO: 490863 - DNA, 201 bp, Homo sapiens
ctttaaatttatacacatttttaaaagtgtattctatttgtagtgcacaaaatatggtatatattaattatgctttattaatttcattgctcaaatccttyatttgtcatattttatatatttcatagtattttaattagtgatgtactaatagctcttccagtaattgtgtgttatctatttattttagatttttgatgg

SEQ ID NO: 490864 - DNA, 201 bp, Homo sapiens
ctccacatcttccacaataataaaaattttagctgggcacagagaaacaaagaataagaccatattttcaagtctccttgcatttatgtataatcatgtgrctatgttttggccaataaaatgtaaataaaattattacttagcagttttctaaacccttctgaaaaaacaactgatgtgttgtttcaccatctcttcctc

SEQ ID NO: 490865 - DNA, 201 bp, Homo sapiens
cgttgtgaaggtctatactgagcatggaccattcatttgggtgagggagacataaacttctcctttgttttaagccattttctcttggtctttctgacacrtatagctgatgtaattctaatgcataagtatttaggcaaagtttctgaggctgggttcttgcttgtgtttcctcattcactctctgtagtttgtttctac

SEQ ID NO: 490866 - DNA, 201 bp, Homo sapiens
aagcgcaacagagtttccactgtgaagcgggagacttttaaaattttgcaataattaatagcgcattctgctatggtggaggaattaaaaagtacgtgacyggaaggcagctgctgtggagattcttcaacattgttggaatattattatatcttagttgaaccacaaatatcaccaggtcaacaaacagaacaaaattaa

SEQ ID NO: 490867 - DNA, 201 bp, Homo sapiens
gtcatatctttgtattaaaaaaatgataaagaagtgttccattttgttcctccaggccctattttaccaataatctaggtttcataacttggggtggaccragaaaatttggaacagccagataatagcaatatgatgattaaaggattagtaatacatagatttgcacttgcaagattaattgatgcttcataagactta

SEQ ID NO: 490868 - DNA, 201 bp, Homo sapiens
ttatttaactgatagcataattgaaatgaatatgttgctgtgagaataaatgtttattacacaagaaaagcatgctaaagaaaaagatgaaactgagtaarcctccaaaacaaataaaaaatacttctgtattaataaaatggggtttttgttttgcttttgcagacttaataaacgtgacagaggaaatgactagatttt

SEQ ID NO: 490869 - DNA, 201 bp, Homo sapiens
gcataattgaaatgaatatgttgctgtgagaataaatgtttattacacaagaaaagcatgctaaagaaaaagatgaaactgagtaaacctccaaaacaaawaaaaaatacttctgtattaataaaatggggtttttgttttgcttttgcagacttaataaacgtgacagaggaaatgactagattttaggaattaattatg

SEQ ID NO: 490870 - DNA, 201 bp, Homo sapiens
caaggccctttatgggttaatcctctacttgccctagtttgaatttccactactcttccttatgcactctacacttcagaaatttcaaattacctcagtgkctctgaatattacttttattttcactggctacatctcccactatattaatattgttccctcttcctggaatgctttttccttccttgcctgactgacaaa

SEQ ID NO: 490871 - DNA, 201 bp, Homo sapiens
tcagagccccctctttgggttcaattaattttctagagcggctcatagaactcaagaaaacatttatgatgtttaccagtttatgccaaaggatattttaraggatacacataaaccgccagatgaagagatacacaaggcaaggtctggaagggtctcaagcacaggagcttctgtccctttggagttggggtgcaccac

SEQ ID NO: 490872 - DNA, 201 bp, Homo sapiens
atagactatctgattatatagagataatacagtgactccaaaatgagtaaaatataaaagaattaatcaaacacataaaaatcccagattagtagactatwaaaataaagatacatgtaaataaagtagaaatttgaatattaaaagatatttagtaattgcagtcaaaaactgagtgaactagtcaattaaataaagctg

SEQ ID NO: 490873 - DNA, 201 bp, Homo sapiens
cagtggatgtgagtggatcccttttcccttggccagattgcctgagacaaattgcagtacatgtccccagcagacgttctttcccattcccaccatggggygaagcccctctattcccttagactcgccccagggttgcattttaaagcagcaaggaggacggggtcccaggtggggaaggacaattgttctgagagacag

SEQ ID NO: 490874 - DNA, 201 bp, Homo sapiens
ggttcaattaattttctagagcggctcatagaactcaagaaaacatttatgatgtttaccagtttatgccaaaggatattttagaggatacacataaaccrccagatgaagagatacacaaggcaaggtctggaagggtctcaagcacaggagcttctgtccctttggagttggggtgcaccacttcccagcacatagatg

SEQ ID NO: 490875 - DNA, 201 bp, Homo sapiens
agtggatgtgagtggatcccttttcccttggccagattgcctgagacaaattgcagtacatgtccccagcagacgttctttcccattcccaccatggggtraagcccctctattcccttagactcgccccagggttgcattttaaagcagcaaggaggacggggtcccaggtggggaaggacaattgttctgagagacagc

SEQ ID NO: 490876 - DNA, 201 bp, Homo sapiens
gatacacaaggcaaggtctggaagggtctcaagcacaggagcttctgtccctttggagttggggtgcaccacttcccagcacatagatgaattcttgttcrccttcctctcagcttccacatattcagctatccagaagttctcttgcaccctgtcctcttgggcctttaatggagacttcactgcatagacagaattgac

SEQ ID NO: 490877 - DNA, 201 bp, Homo sapiens
ccaacaacatattttgagcttagctgttaaggaaccaatgcctctacaatgaatcttgctggactgaggctctgaatgattttaaaaggactaaaagtagygtacgtttgaagtctcttaacagtgaagaaagagaaatgtgctctcattccttctgatgctctgtcagttgcaaatccagtcaagtttctaacattactc

SEQ ID NO: 490878 - DNA, 201 bp, Homo sapiens
gggtattctctaacactaataggctgaacagaaacccagcaaggcttgtccagattctttttggcttctctgtgctgtattcctttttccaggctaagggscaggaccccttctgaaatgaggatcttataacccacaatcagaatggtgaaagaagattagagtcctgtctcgggctgctgacaggagaataggagaagg

SEQ ID NO: 490879 - DNA, 201 bp, Homo sapiens
aaacagaacatatgctttttggaccaggagatcatggatgtggtcattgagattccatcatttgctacttgaagatgtggtctcttgcaccactaagtcayagtttaaacctacatggcaaaagatagtgagatgatgtaataagaagttatatcgaccaattcaatactatacttgcctgtacactattcagttttccag

SEQ ID NO: 490880 - DNA, 201 bp, Homo sapiens
atgataaactttaaaatttgagatggtctttatgacttgagttcagcatctccacaagccctctggcacttgattcaatccgatttttccttccaccaaaycttgtctctcaagactggcttttgggtagtggactgctggacttaggtccagttacacttttttccttgaggatgattacattttcaagagatggttctc

SEQ ID NO: 490881 - DNA, 201 bp, Homo sapiens
cctctctcaatccactaatgcagatgatgcattttcctctttaatttaatctctttacccaaattccaagaagtggctcagatttgggatcaaaggtagamaggaagatggcaacatgggacttgaagcagccctcactcacaccaccacatagagatggctcttctgagagtcaatccaggcagggtaagcagagccaga

SEQ ID NO: 490882 - DNA, 201 bp, Homo sapiens
acttacacacatgtacacagagacattttactgaagaggaagaaaagtcaattagcttgcccaaggttacaaataaggttgcaaataagtagcaaagttgraattttaatcaagtaatgttgatacggggtcagggaagtgcccggtaaagaaaagcaagtccctagctagggctccaaccctatggacctgggtgaggac

SEQ ID NO: 490883 - DNA, 201 bp, Homo sapiens
ccatgtaacaagaaaagacacttgcaacacatataaacagcaaattatttgtatctagaataaataatcccttcaaatcaataagaaatgacacataactyaatcataaaatgggcaaaaagaatatcctttcacagaaagggatacaaataactactaatgtggaaggtactcaccctcattattaatctggcaaatttg

SEQ ID NO: 490884 - DNA, 201 bp, Homo sapiens
attgtaaaataagctttcactggggtctataatgttctaaggacatgtatatctgtgtttaagagaaaaacctctggaatggtgatgggacagaaaaaaamaaaacgtgctagagtaagagtctggtaatagcagatcaatgatgaaaggtccagtgtagtgacaaggtcatcaggaggtgggtgagagggagaaagagta

SEQ ID NO: 490885 - DNA, 201 bp, Homo sapiens
aaggcttggtattgaattcactgaaaaggtgatgtgacagaggacaaacaggggacaaacaggtgaggggcttcatgttgttcagtgggggctccaacctyctctctctaatacttcctatgtattgttttgttctcagaacttaaatgtctatttgagggggaaaatgcattcttctgtcttgtgcagagacatataata

SEQ ID NO: 490886 - DNA, 201 bp, Homo sapiens
tgatgggctccagggaaagcaaaggcgagaagggctatgacagcttcagagaaacttaataggcctaattagacagagagtacattttgagaattcgtggwaaataaatacatggagcagagaatcttgtaaaccacatagcagaacttagaactgacacagtagaaaactgggaaacatttgaagttcttgagcaaaagc

SEQ ID NO: 490887 - DNA, 201 bp, Homo sapiens
cccaaaagtcagggcctaattgagaagagttcagaggagcctgaaaagagcttggtcaaggagagaatcattgtcccataacgatgtttttagttagatayatactttgcagttagttatgctatgttgatagagttccatgtgagtgtgagtgtgtgtatgtgtgcatgtgtaggtatgtgtttgtgttttccataaaga

SEQ ID NO: 490888 - DNA, 201 bp, Homo sapiens
attgctatttttatagagaaagataagtaaaactatactcccaataagacagaacaaagaaaccaatacaaaaagtttaaaaatataataacaactttctktattaacattttagaacaattaagtgaagcaaatgaaggtaaaatagtccattttttaacactcccttcaagcttactatgctcctttttcaaatgccta

SEQ ID NO: 490889 - DNA, 201 bp, Homo sapiens
aaacctatcacaaaagaaaaggacagaggaaggagaaaaacatcctagggagtttagaggatccagttgcttgattcaatctctaaaaaaactaatgcagycccaggctgtggtaacagaagtataacacccaggaagaataatcctcatatactcagaaaccgttgtaccccatctggcatgccaaacgtccttcttgtt

SEQ ID NO: 490890 - DNA, 201 bp, Homo sapiens
tctgaaatcctttgaacagcaaatggctctgagcattattccacatatttgcttccccaaccgaaagtttgggaaagattcatgttaggcatttgtccaacaatgcaatgtttttgcaaagtcaaagctatttggcaagcatggttatctggggaaggaatttggaacaaccctatatgctgtataccttgtaaatgctgt

SEQ ID NO: 490891 - DNA, 201 bp, Homo sapiens
agtagaactggctgacacagaaaacaatttcctattaggacagagcttaaccgtcaagaaaataatttcctctaaatttaagaaagttctacctaacaatyataattttcaacaatagaatttgctgactcaaaaagaccatgagttatatagctaccaaatatccacaaagacttatggatgtttctatgtacatgggac

SEQ ID NO: 490892 - DNA, 201 bp, Homo sapiens
ctgaaatcctttgaacagcaaatggctctgagcattattccacatatttgcttccccaaccgaaagtttgggaaagattcatgttaggcatttgtccaacaatgcaatgtttttgcaaagtcaaagctatttggcaagcatggttatctggggaaggaatttggaacaaccctatatgctgtataccttgtaaatgctgtt

SEQ ID NO: 490893 - DNA, 201 bp, Homo sapiens
tattaggacagagcttaaccgtcaagaaaataatttcctctaaatttaagaaagttctacctaacaattataattttcaacaatagaatttgctgactcaraaagaccatgagttatatagctaccaaatatccacaaagacttatggatgtttctatgtacatgggacagtaaaatagattacagaactctaagatctcc

SEQ ID NO: 490894 - DNA, 201 bp, Homo sapiens
tgaaatcctttgaacagcaaatggctctgagcattattccacatatttgcttccccaaccgaaagtttgggaaagattcatgttaggcatttgtccaacaatgcaatgtttttgcaaagtcaaagctatttggcaagcatggttatctggggaaggaatttggaacaaccctatatgctgtataccttgtaaatgctgtta

SEQ ID NO: 490895 - DNA, 201 bp, Homo sapiens
cacatcaaaaagagggctaagtacatgaatagacaattctcaaacgaagatatacaaatgactaataaacatatgagaaaatgctcaacatcactaatgaytagggaaatgtaaatcaaaaccacagtgcaataccaccttactcctgcaagaatggccataatcaaaaaacagtagatgttagcgtggatgcagggaaca

SEQ ID NO: 490896 - DNA, 201 bp, Homo sapiens
gaaatcctttgaacagcaaatggctctgagcattattccacatatttgcttccccaaccgaaagtttgggaaagattcatgttaggcatttgtccaacaatgcaatgtttttgcaaagtcaaagctatttggcaagcatggttatctggggaaggaatttggaacaaccctatatgctgtataccttgtaaatgctgttat

SEQ ID NO: 490897 - DNA, 201 bp, Homo sapiens
aaatcctttgaacagcaaatggctctgagcattattccacatatttgcttccccaaccgaaagtttgggaaagattcatgttaggcatttgtccaacaatgcaatgtttttgcaaagtcaaagctatttggcaagcatggttatctggggaaggaatttggaacaaccctatatgctgtataccttgtaaatgctgttatc

SEQ ID NO: 490898 - DNA, 201 bp, Homo sapiens
gctagaatgcaatggcaggatgtcagctcactgcaacctccgcctcctaggttcaagtgtttctcctgcctcagcctcctgagtagctgggattacagatkcccgccaccacgcccagctaatttttgtatttttagtagagatggggtttcaccatgttggtcaggcaggtcttgaactcctgacctcaggtgatctgcc

SEQ ID NO: 490899 - DNA, 201 bp, Homo sapiens
ggctcaagccatccacccacctcagcctcccaaagtgccaggattatggacatgagccactaggcctggccacaccctaagttttaaaatctaagtctggraaatcctcctgaagtattgctagttataagtaagctctacttaggaacagaaacattttgccaaacaaaattgtgtaatgcattctaaatttaaataaaa

SEQ ID NO: 490900 - DNA, 201 bp, Homo sapiens
tgggctcaagccatccacccacctcagcctcccaaagtgccaggattatggacatgagccactaggcctggccacaccctaagttttaaaatctaagtctsgaaaatcctcctgaagtattgctagttataagtaagctctacttaggaacagaaacattttgccaaacaaaattgtgtaatgcattctaaatttaaataa

SEQ ID NO: 490901 - DNA, 201 bp, Homo sapiens
aagttttctgttatttgcaaccgaaagcacttaaagctaatacaaaattgcagagttaccatgatcataactctaaacctatgaaattcaaggggtttaaygatttatgagttgggtgcggtggtacatacctgttagtcgcagctgaggcaggaggatcgcttgagtccaggagttccaggctgcagtgagctatcattg

SEQ ID NO: 490902 - DNA, 201 bp, Homo sapiens
tgacaacttatcaaggtagatgaaaattgaaaagagaccattgtttgtgttatgatacaatcacatgtgacggctgctgctcacttgctaaggagttaagktggaaggtagattatttagggttgaagaatgcaaagataaaaagcatagaggacagaaacagtttctgtcaaagagtttttgttttgttttgtttggttt

SEQ ID NO: 490903 - DNA, 201 bp, Homo sapiens
taacattcctcagcttttcttcttattccagatgacttaaacattaacgcttggtcagtcagggatatggctctcctctttggaggaagatatcataatcragcaggagagtcctactcctactttcatgaagctactctctcaataccagcaatcacttctgtgagtattttcctgagtccactgtgaacaatatagatt

SEQ ID NO: 490904 - DNA, 201 bp, Homo sapiens
attttccttcacattaaaataagcgcaacagagtttccactgtgaagcgggagacttttaaaattttgcaataattaatagcgcattctgctatggtggargaattaaaaagtacgtgactggaaggcagctgctgtggagattcttcaacattgttggaatattattatatcttagttgaaccacaaatatcaccaggtc

SEQ ID NO: 490905 - DNA, 201 bp, Homo sapiens
ccccagctcacagcttagttgctgccttaagtgaccctgaatcagagacaaatagctaactaggtattcacatgcctgacaataggtttgttgttttaagytgctaggtttgggggtaatttgttacacaatagatgactaataccatctgtgcattcctaatgttagatctatccttggtataagcaaagcattttaact

SEQ ID NO: 490906 - DNA, 201 bp, Homo sapiens
tattttcactttccatatttactaccatatttttgcacatactcaaagattttattatctggattgttactaagataccataaagaggtcatcatgtgcaytgttttatactgatatttgtataaaacatactaatagacatacaagtggaataataaatcaaaaaagtgcaagagaatatgtagcaaaaaaaaagagtgg

SEQ ID NO: 490907 - DNA, 201 bp, Homo sapiens
aatacatttaatctaaccttttcttgagtgtaggccttgcaaaaattaaataaaaaaagactttgataaatatatatgtaatatatattatatatatatawaaatcctacctaattattatagctgtccagcagtagaactggctgacacagaaaacaatttcctattaggacagagcttaaccgtcaagaaaataatttc

SEQ ID NO: 490908 - DNA, 201 bp, Homo sapiens
agtggggagaaggatcagctgttagaacaaactctgcctcaaaataaaatataatcatgtgtcgcttaatgaggatatattctgagaaatgtatcataagrcaatgttgtcattgcacaaacaccatagagtgtactgacacacctactgcacacctagactatatggggtaatctgttgcccctaagttacaaacctgta

SEQ ID NO: 490909 - DNA, 201 bp, Homo sapiens
aaaacatgtccctgcttggaatgggggcaagatttttccagaataaaataacaaagatcacattgttgagtagtacgatataagcatttgtaaatccaccrtgtaatttcctccagaaaggctgcaccactctatgttcccataagctatggatgacaagcatcaattctccatattcttatcaacacagcttcttttcca

SEQ ID NO: 490910 - DNA, 201 bp, Homo sapiens
gctgatttgttcagacatctgttcgacatatttgacaagtcactgatagggaacacaaaatgaacaggatccctgatctcaagaaggctgcaggcccttayggatcaaaacgaagcaaacgaaaggacactggagtgcaatagatgctagaataaatgcagattttacatatgcaatgaaagaggagaggtaaatttactc

SEQ ID NO: 490911 - DNA, 201 bp, Homo sapiens
tggtttaatcagtgatatgcttttagagatgttgaaaaactgacatgtccaacaatattattcttatgtgtctgccaacatgtctaaattgattcattaaygatattaacatgttatatcttggatattacccacttagcatgttatgataactgtaaaaacttacataataatatagccacatggaaaattttgtcagaa

SEQ ID NO: 490912 - DNA, 201 bp, Homo sapiens
tcttcctcattcctggatcccagttggcagagtagccactctctacaacattgctgatcattccagcagagggagaaaaaatagcaaaccacacacattcttttttttttttttttttttgagacagagtctcacactgtcgaccaggctggagggcaatggcacaatctcgactcactgcaacctctgtctcccaggttc

SEQ ID NO: 490913 - DNA, 201 bp, Homo sapiens
tcattccagcagagggagaaaaaatagcaaaccacacacattcttttttttttttttttttttgagacagagtctcacactgtcgaccaggctggagggcwatggcacaatctcgactcactgcaacctctgtctcccaggttcaagcaattctcctgcctcagcctcccgagtagctgggattataggcgcacaccacca

SEQ ID NO: 490914 - DNA, 201 bp, Homo sapiens
atgtgacctactgatcaaatgagaatggaagatcagctcaatgaagcacctgagaccagcatgcctcattaatcattagtttcctcatttccattttctcrttaaaaaatgatttattccaaataggactccttgtaaatgggaaatatagttcattcacatatttttatccctagtgataaccttaacactcagtggtat

SEQ ID NO: 490915 - DNA, 201 bp, Homo sapiens
gctgtagaacaatgtgctacacaagaatgaaaaagaaggaactatagctacgtgcagtgatgtatatgaatttcacagatgtagtgttgaaataaagaagycacacataaaagaatgcagactgtatggtttcatgtatgtgaagttcaagagcaggcaaactgttctgtggcaatagagataagaacagggcttattttt

SEQ ID NO: 490916 - DNA, 201 bp, Homo sapiens
cagatcccagaaccttgagtaatcctcatttttttcactgaaaaacactaatcagagaatgagttccaagcacgctatatgccagggtgataatgtcttastgaataagacaaggtgtctatcttcatgcacttacatgcttgtgaggaagagcaccaataaacaggtaaagaagcaagtaatataatttcatataaaaac

SEQ ID NO: 490917 - DNA, 201 bp, Homo sapiens
tcagacgctcccgaccactgtaagcccacagcctcaatgctggagggtgattttggactctgactcctcctttattcaagttctaattcaggagaaagatytgcagcatttacttgccttggagctgcaatatacccatcttggacctctttgtgagtgaccaggacccagacctaagccagggataggcagacaggtatg

SEQ ID NO: 490918 - DNA, 201 bp, Homo sapiens
gcatacagccattaacattcgttagcaaaattagatgggaaatttgatttggctgcatttctgaactttctcttcatacatctctgctgtttgatttgacstaaggagtatatgacttataatttaaaaaaagaaaaaagcaagaacagaatctattgaggctggcaccaccaaccttatgtctcagatgtgtttggagcc

SEQ ID NO: 490919 - DNA, 201 bp, Homo sapiens
aagaaatgacacataactcaatcataaaatgggcaaaaagaatatcctttcacagaaagggatacaaataactactaatgtggaaggtactcaccctcatkattaatctggcaaatttgaaataaaatctcaatgagacactattaaccatgcattataagggctaaaattatgaaagacttacaactacgttttggttga

SEQ ID NO: 490920 - DNA, 201 bp, Homo sapiens
aatgaacaaacgttacctgaatttgaaatgcactgattggaaatgtgtggactggcatacagccattaacattcgttagcaaaattagatgggaaatttgrtttggctgcatttctgaactttctcttcatacatctctgctgtttgatttgacgtaaggagtatatgacttataatttaaaaaaagaaaaaagcaagaac

SEQ ID NO: 490921 - DNA, 201 bp, Homo sapiens
taacagtaattaaataaaaatacatgaaacaaattgaataaatgttttatctgattttaatgattatagtggaagaaagtagtattcataataagtaaaakgaacactccattgacattatagaaacaaaaagcctggcatttaatggagtttaaatgttcttttttaaaattttaacaaatacttagaaaatacccatca

SEQ ID NO: 490922 - DNA, 201 bp, Homo sapiens
cagccaataaaaatgtatgcgattgatatattcaatagtattttatagttactaaaatccatcagttttgcttttatatatatataaaaaggattattagyacaccaatctttattataatctctcaaccatccacagaagatttaaagatgtggttttgttttctagcaggacaagaaaatggcgttctttaattaaagg

SEQ ID NO: 490923 - DNA, 201 bp, Homo sapiens
aattaaatacaattttaaaaccacccactcttttgttagtccctgtgtctcctgtacagatgctagcttaatgtcctgtgtactgactgaatgtctgggtkgcccagagtaaagacactttcttatccttctctatccctgaaaagccatgctattcatcacactggaaaaggcagatatttcaaggggaaacagtaagtt

SEQ ID NO: 490924 - DNA, 201 bp, Homo sapiens
ttactactactagtacaagaattatgtccagtcagttgacaaggatctgtgtctccaaccgagcattgaatggctatagttagtttcatgttatagttgaytgcttctgtgaagaagaaaagcctctgtcctggaaatcaagaacccaggtctgattttagctctgatacttagtatatctgggagtatgtcccatcataa

SEQ ID NO: 490925 - DNA, 201 bp, Homo sapiens
gagacaaatattatatagtaaaaaaagagattgatatttgcattagaggattttactcaatcctactacattttattttcactaaatttactagctacacragatgatgataatttaactcctctgagcctcaatttccgcaacaaatgacaattatgatggcaatatgaggttatgaatataatatgagattacctttct

SEQ ID NO: 490926 - DNA, 201 bp, Homo sapiens
gccaccacatctttggaaggcagccttttctaatataagagcttagaaaaggtttgttcaatacaggaattatggatctttccatacaaatatgctttgasatttaatgactgactttctctcacaaaatgctctatggacattgtaatttaacccacaattgtgaccttcattacaaaaatatctgtaatccaaccaaat

SEQ ID NO: 490927 - DNA, 201 bp, Homo sapiens
cttgtttataccttgtgcacagataagagaatggctatcattttagtttcgtaacaggaagagatgaaaatctgcaggaacagagctttagaggcttcagygtgcatccttttcatattatctgaattatatttcaggatgtctgaagcctccaaagtcagggttccgatatcatacgctattgaagcagatcttcttcca

SEQ ID NO: 490928 - DNA, 201 bp, Homo sapiens
cacagatatttttgtatctgtgtattttgtatatacgtatatacgttcagttcctcaaaggtactactgaatctttattgaaattacattgaacttatacrtttattttggaataaaaacttttatatttttaaataaagacataatagatttccacatttatttaggtcttccttaatttcctttattacaattttaaaa

SEQ ID NO: 490929 - DNA, 201 bp, Homo sapiens
agtctttgcatctacaaaaaacaagccatttttttctttttactaacctaatttttaaaaatcatttaattgggcccagaggctgcgcaatggaaggatayggagtttgggaaaaataaaaccaatgagtgaaccaggacattttgtgttctttaagcttttaggaggacaagtgctgaggacactgtaacattattatta

SEQ ID NO: 490930 - DNA, 201 bp, Homo sapiens
gtggtaacagaagtataacacccaggaagaataatcctcatatactcagaaaccgttgtaccccatctggcatgccaaacgtccttcttgttgtacctttwaaaaggcatttatacattaaggtatctagaggagagcaatcaatttcttcaaatggtgtcataaaggtttcctataatgaatggttgagaaaccatattt

SEQ ID NO: 490931 - DNA, 201 bp, Homo sapiens
taaaggtttcctataatgaatggttgagaaaccatatttagggctagatagtagactcaggggacatgacagctgtcttcaaatatttcaagaattgtcaygtgaacagtggaatacatttaatctaaccttttcttgagtgtaggccttgcaaaaattaaataaaaaaagactttgataaatatatatgtaatatatatt

SEQ ID NO: 490932 - DNA, 201 bp, Homo sapiens
tcatctcattgtgagtggaagtagttatctggaataaaaaaagaagatacctattgagaatgactcgattatgattacattgtaaggccagaatactcagmctttagtgttatatacctatccttccccaaccaacacacaaaaaacacactaaggacagaaaatacctcaggtattacactatttttccagtatcttata

SEQ ID NO: 490933 - DNA, 201 bp, Homo sapiens
gagaagagcaatgggcctgtgggcagaatggctaaatatccaggggaaaatagacctgggtatattggagtatatcattttatttttattgtttgcattcyaatgcttctttgtctacttattttattttttaattgacacataataattatacctgtttatgggatacatggtgatgtttccatatatataatggatagt

SEQ ID NO: 490934 - DNA, 201 bp, Homo sapiens
taatcctttgggtatatacccagtaataggattgctgggtcaaatggtatttctggttctagatccctgaggaatcaccacactgtcttccacaatggttraactaatttacactcctaccaacagtgtaaaagcatttttgtttctccacatcctctctagtatctgttgtttcctgactttttaatgattgcttttttt

SEQ ID NO: 490935 - DNA, 201 bp, Homo sapiens
atggttaaactaatttacactcctaccaacagtgtaaaagcatttttgtttctccacatcctctctagtatctgttgtttcctgactttttaatgattgcttttttttttttttttgagatggagtctccgtcgcccaggctggaatgcaatggtgtgacctcggctcactgcaagctctgcctcccgggttcacgccatt

SEQ ID NO: 490936 - DNA, 201 bp, Homo sapiens
ctgataaattgaaagccatgaagtttagaggaaataagagagcctgcagcggtctgaaactcctccacccacctccaacacacacacatacacaaacacamacacacaaaggctctatttgcaacatcacttaagattccatttgaggctttccccttgttaagacttaagggtgttgtttttaagacatccagaaatctc

SEQ ID NO: 490937 - DNA, 201 bp, Homo sapiens
aagtgaaacattgttttattatttttttaatttgccaatgtttaagtttgacaagattttcaaaatctttttgattcaaaacccttcataggttgacattrccaagtgctgacaaaaatgtgaggcaatatgaactcttacaaacagctgatacgagtgtaaattagtacaaccatttcagagaaatatctgaatatagaa

SEQ ID NO: 490938 - DNA, 201 bp, Homo sapiens
agcgagatcaacgcagaaggtgggtgatttctgcatttccaactgaggtacctggctcctctcattgggactggttagacagtgggtgcagcccacagagrgtgagccaaagcaggatgtggcactgcctcacccgggaagctcaaggggttggtgaattccctcccctagccaagggaagccatggctaggtgtcatggg

SEQ ID NO: 490939 - DNA, 201 bp, Homo sapiens
cacagagagtgagccaaagcaggatgtggcactgcctcacccgggaagctcaaggggttggtgaattccctcccctagccaagggaagccatggctaggtrtcatgggcattccggcccagatactacactttttccacagtcttcgcaacccgcagaccaggagatttcctcaggtgcctacaccaccacagccctgggt

SEQ ID NO: 490940 - DNA, 201 bp, Homo sapiens
atggagcccagcaaactaagatctactggcttgaaattcccactggcagcacagcagcctgaagttgacctgggacactccatcttggtgggggagaggcrtccacaattactgacgcttgagtaggcgtttttcccctcacagtgtaaacaaagcctctggaaagttcggactgggcagagcccaccacagcttggcaaa

SEQ ID NO: 490941 - DNA, 201 bp, Homo sapiens
tgacgttaatgaaataccatagagcaataaaatgcactacagacagctatactcacaaacataatctcaccaacagaattttgaaccaaaatagccagacrcaaaagaatataattccagttatataaacttcagaaataggcacacacaaaaaaatgatctatggtattaaaactcaggaacgaggagagagaagtgact

SEQ ID NO: 490942 - DNA, 201 bp, Homo sapiens
aacccattgaaacattctgcattatcaactagtgaattgcccaattattatatacctcttgtattcatcagaatgatctaagaagtgaggcagcaaccaayaggccccaagtctcagcaggtttaaagaatcgtttattactttctcttacttcacatttattacaggttggctggatcaaaattccacatcttcctcatt

SEQ ID NO: 490943 - DNA, 201 bp, Homo sapiens
tacagacagctatactcacaaacataatctcaccaacagaattttgaaccaaaatagccagacacaaaagaatataattccagttatataaacttcagaartaggcacacacaaaaaaatgatctatggtattaaaactcaggaacgaggagagagaagtgacttattgcaagaggcgccagggcagtagtttggggatgt

SEQ ID NO: 490944 - DNA, 201 bp, Homo sapiens
atgtggccatgttctatttcttgacctgggatgtgattatgttggtgttagctttgatagttctttggattgtacatttatattttgtctacttttatatrtgtttatcattcttcaataaaaaaatgtaagaaaacaatattcaagacagaatgtgtatttttcatattgtctgcctgcatgtgcgtagcttatcttttt

SEQ ID NO: 490945 - DNA, 201 bp, Homo sapiens
cattattactttatacattttatttcttaactctttgactagtttctctatatccttattctacattttttttctatttttttctttactttttaaacttytttgttaaaaactaagacacaaatacatatactggcctcggcctacacggggtcaggatcatcaatatcaccatcttccagctccacatcttatcccact

SEQ ID NO: 490946 - DNA, 201 bp, Homo sapiens
agtgaatgtgaaggcctagaatgttaccatacaccactgtagccttcagaaacactgtgtacttaggctacactacattcatgggatccaatttttctttmtttaataataaattaacgttagcttactgtaacattattactttatacattttatttcttaactctttgactagtttctctatatccttattctacattt

SEQ ID NO: 490947 - DNA, 201 bp, Homo sapiens
taatctatacatgaattttgaatatttttatggctatgtattttattaataattattttcaaacaaatataaaatagcatgtgaaatatagttcttcaccyggggtcaccaaaatcctgataaaaataagagtgaagcaagtgagacataaacgaatttttttattcttgcctttacctatgatggcatttaaacaatacc

SEQ ID NO: 490948 - DNA, 201 bp, Homo sapiens
agctgattgttacatatataagcatatgtataattagttacgtacatgtgtatatcagtaagacaatttattaataatcatccctgatggcctatatgtaygtatgtgtatgtattttgaatccttctttgaatcagtcttaatgtcttattggttctctcatgaatcagtaagtcaaataaaatattcagcatgtattct

SEQ ID NO: 490949 - DNA, 201 bp, Homo sapiens
tccttcttttgctctttgcaataaatcttgctactgcttactttttgggtctatactgccattatgggctgtaacactccctgcaaagggctgcagcttcycttctgaagccagtgagaccatgaagccactgggaggaacaaacaactgcagacgtgccacctaaagagctgtaacactcaccgcgaaggtctgcagttt

SEQ ID NO: 490950 - DNA, 201 bp, Homo sapiens
ttattattacttaggctttgtaatacatttatatatcactaagaagatatcctgtttctcttctgtcagctgactttttcacagatatttttgtatctgtrtattttgtatatacgtatatacgttcagttcctcaaaggtactactgaatctttattgaaattacattgaacttatacatttattttggaataaaaactt

SEQ ID NO: 490951 - DNA, 201 bp, Homo sapiens
gcaacatgacaaaaccccttctctacaaaaaatacaaaaattagccaggcatggtggtgcacgcctgtggtcccaactattcgggaggctgaggtggaagrattacttgagcccaggtggaggctgcagtgagccaagatgttgccactgcactccagcttgggtgacagagaaagacccagtctcaaaaaaaagaattct

SEQ ID NO: 490952 - DNA, 201 bp, Homo sapiens
cagtttggtgacatcactatcagttctttgtaagctggaaactacatttctcagaaaccacttgtcttgaaaagtgccaggttagattttgtcactgaaaygaactcctagaagactgggaagagggaaagcagaaaccatgaagcttggcattttatactgtctgatgcagcaggtttccagagccttccacaaactcct

SEQ ID NO: 490953 - DNA, 201 bp, Homo sapiens
actgtaaatgaaattgtcagtataaaattcccgttatgctctagtgtgctaccattattattattattttttttttttgagacggagttttgctctgtcgyccaggctggagtgcagtggcgcgatcttggctcactgcaaactccgcctcccgggttcaagccattctcctgcctcagcctcccgagtagctgggactac

SEQ ID NO: 490954 - DNA, 201 bp, Homo sapiens
tgaattaaatactgtaaatgaaattgtcagtataaaattcccgttatgctctagtgtgctaccattattattattattttttttttttgagacggagtttygctctgtcgtccaggctggagtgcagtggcgcgatcttggctcactgcaaactccgcctcccgggttcaagccattctcctgcctcagcctcccgagtag

SEQ ID NO: 490955 - DNA, 201 bp, Homo sapiens
cctgaattaaatactgtaaatgaaattgtcagtataaaattcccgttatgctctagtgtgctaccattattattattattttttttttttgagacggagtyttgctctgtcgtccaggctggagtgcagtggcgcgatcttggctcactgcaaactccgcctcccgggttcaagccattctcctgcctcagcctcccgagt

SEQ ID NO: 490956 - DNA, 201 bp, Homo sapiens
tagcaggatgtgggtggggccagataagagaataaaagcaggctgcccgagccagctgtagcaatctggtggcgtcccgttttacagtgtggaaggttccytcttttgctctttgcaataaatcttgctactgcttactttttgggtctatactgccattatgggctgtaacactccctgcaaagggctgcagcttccctt

SEQ ID NO: 490957 - DNA, 201 bp, Homo sapiens
aattaaaaattcttctgaaggatgtctgtttttatttcaaaattccatttttgtgggcaacagactaaacgatatgaccaggagtaacactatcctgttgtaacagtgaaacattcagtacactgagatattttctataaatgaccttaaaagaaaggtggctgttatacgtcaacttttgatgctttcaaaatcattttc

SEQ ID NO: 490958 - DNA, 201 bp, Homo sapiens
aggctgcccgagccagctgtagcaatctggtggcgtcccgttttacagtgtggaaggttccttcttttgctctttgcaataaatcttgctactgcttactytttgggtctatactgccattatgggctgtaacactccctgcaaagggctgcagcttcccttctgaagccagtgagaccatgaagccactgggaggaacaa

SEQ ID NO: 490959 - DNA, 201 bp, Homo sapiens
gttgattaaacttgagaatttaaaaagcattttacattatagagtcatctcagatatgaaatcatcgctgtttcaactgttcttgttataatctacaggaycgaggtttaaataatcccggctctagcaaagtagaactaaacatctcacagaacagtaatgcagacatttgaaatgccatgtattcttcagcttttgtgg

SEQ ID NO: 490960 - DNA, 201 bp, Homo sapiens
aatgttcattttcctgagcatagcttaaaaataaataaataaataaagatgtgggggaagaagctcattcttccaaaggcctttgtcagagaagcaaaaamccaaaaaaagaaaaaaaaaaaaaaaaacctctgtcaaaacacagctagttcaaaagaattcaggttatttgtaaaacactgatcatgagtttataacaac

SEQ ID NO: 490961 - DNA, 201 bp, Homo sapiens
tcctgagcatagcttaaaaataaataaataaataaagatgtgggggaagaagctcattcttccaaaggcctttgtcagagaagcaaaaaaccaaaaaaagaaaaaaaaaaaaaaaaacctctgtcaaaacacagctagttcaaaagaattcaggttatttgtaaaacactgatcatgagtttataacaacctttacattca

SEQ ID NO: 490962 - DNA, 201 bp, Homo sapiens
acactccctgcaaagggctgcagcttcccttctgaagccagtgagaccatgaagccactgggaggaacaaacaactgcagacgtgccacctaaagagctgtaacactcaccgcgaaggtctgcagtttcactcctgagccagcaagaccacgaacccaccagaaagaagaaactccaaacacatccgaacatcagaaggaa

SEQ ID NO: 490963 - DNA, 201 bp, Homo sapiens
ttttacactgttggtgggactgtaaactagttcaaccattgtggaagtcagtgtggcgattcctcagggatctagaactagaaataccatttgacccagcmatcccattactgggtatatacccaaaggattataaatcatgctgctatacagacacatgcacacgtatgtttattgcggcactattcacaatagcaaaga

SEQ ID NO: 490964 - DNA, 201 bp, Homo sapiens
tttgtcatctgtattatttcatttaccccaagtatttaaacacaattagtcccgaatgtgttaactaaacaccaggggttcggtctgggtcctgctgctcrccacacagaaagccaattactgagacagcagttactgccgaggaagaaggcttccatctggtgccacagccaaggagatgggaggtcagtctcaaatcca

SEQ ID NO: 490965 - DNA, 201 bp, Homo sapiens
cgattcctcagggatctagaactagaaataccatttgacccagcaatcccattactgggtatatacccaaaggattataaatcatgctgctatacagacayatgcacacgtatgtttattgcggcactattcacaatagcaaagacttggaaccaacccatatgtccaacaatgatagactggattaagaaaatgtggcac

SEQ ID NO: 490966 - DNA, 201 bp, Homo sapiens
ctgcttcttcaattattaatttctacctaagggcaaatgccaagagaacttactttagtttctacctcctgctgccatttcaactgtcaagaacagcaggrgtcaaaaatgaaaggcaccaccttagagaaaggctgtggcacagtgtcattttaaaaactgacagctttgtgcagtcccaaatcttaaggaaaagggatt

SEQ ID NO: 490967 - DNA, 201 bp, Homo sapiens
tgaaggacaagtgagatgaattcaagtggtgttatatggtctctctcattcatattattgagaagctcggttatttggaagattaaagtcaacagttctayagcatatcatccaaggccctttatgggttaatcctctacttgccctagtttgaatttccactactcttccttatgcactctacacttcagaaatttcaaa

SEQ ID NO: 490968 - DNA, 201 bp, Homo sapiens
aggaacaaacaactgcagacgtgccacctaaagagctgtaacactcaccgcgaaggtctgcagtttcactcctgagccagcaagaccacgaacccaccagaaagaagaaactccaaacacatccgaacatcagaaggaacaatctccggacacgctgcctttaagaactgtaacactcactgtgagggtccttggcttcat

SEQ ID NO: 490969 - DNA, 201 bp, Homo sapiens
acacatctctcccattttgcatattagaatgttgaggccaagagggttagattgaggccaagatcccaagatctcacagttcatggagaagccaggacttstcatgcctaattcatatgtcctctaaaccataatgccacctgaaaggagattctcccctacccccaggaattagttgaatgacctagataaatggagata

SEQ ID NO: 490970 - DNA, 201 bp, Homo sapiens
atatacccaaaggattataaatcatgctgctatacagacacatgcacacgtatgtttattgcggcactattcacaatagcaaagacttggaaccaacccawatgtccaacaatgatagactggattaagaaaatgtggcacatatacaccatggaatactatgcagccataaaaaatgatgagttcatgtcctttggaggg

SEQ ID NO: 490971 - DNA, 201 bp, Homo sapiens
attggtttgaagcatacatgacttcattttatgtaagtacaaagaagccatctgatggcttgaataaattggtcttaaaacactgacaataaagaaaaaayacaatagcagtttgcttactccaaaactagtgcacattcaaaggtctttagcacaccaaagacctttggtttaattctcatgtcttttttatatataaaa

SEQ ID NO: 490972 - DNA, 201 bp, Homo sapiens
gtggcacatatacaccatggaatactatgcagccataaaaaatgatgagttcatgtcctttggagggacatggatgaagctggaaaccatcattctcagcmaactattgcaagaacaaaaaaccaaacactgcatgttctcactcataggtgggaaatgaacaatgagaacacttggacacaggaaggggaacatcacaca

SEQ ID NO: 490973 - DNA, 201 bp, Homo sapiens
acaaacaactgcagacgtgccacctaaagagctgtaacactcaccgcgaaggtctgcagtttcactcctgagccagcaagaccacgaacccaccagaaagaagaaactccaaacacatccgaacatcagaaggaacaatctccggacacgctgcctttaagaactgtaacactcactgtgagggtccttggcttcattcct

SEQ ID NO: 490974 - DNA, 201 bp, Homo sapiens
atatatacactcataataataattagtatcaattagtactaattaactgttcattagtattgttattaattatactaattaacggtatatatatatacacwtatatgtaggagtacactctaaaataatgataaaagcatagtatagtaaacatgtcagtaaaatagtgattatcaaatattatgtgctgtacagaattct

SEQ ID NO: 490975 - DNA, 201 bp, Homo sapiens
ccaattaaacctctttgttttgtaaatttcccagtctcaggtatgtttttatcagtagcatgaaaacagactactacaaccatagtgtgtaatcaacacattttgcttttattcattcccctaataataatagctatgttgcctccaattacctatttccacaaaacatgtccctgcttggaatgggggcaagatttttcc

SEQ ID NO: 490976 - DNA, 201 bp, Homo sapiens
cagagctagactccgtcccccccgccacccgccccaaaaaaattcccatgctttgtctcttctctagctgcatttgtgacttcatgttcttaatgttacasaaaaacactaagcccaaatgtcctatcaatgactgaaaacataaaatttaaaaatcaaatataagcattcacatttattagcaaaaaaattaatatctat

SEQ ID NO: 490977 - DNA, 201 bp, Homo sapiens
ccccatccgctgagagctacttctagtcaataaaactttgcactcggccgggcgcggtggctcacgcctgtaatcccagcactttgggaggccgaggcggkcggatcacgaggtcaggagatggagaccatcctggctaacaaggtaaaaccccgtctctactaaaaacacaaaaaaattagctgggcatggtagcaggtg

SEQ ID NO: 490978 - DNA, 201 bp, Homo sapiens
aacggttcccttgtccccctcgcagggcatgtgatggtggtgtggctcgcttcttgagtgcccggctgctcaaacctctgtgggagcatacagatgcgtgrgctgtggggctccaaccccacggcagtgtctaggggtgaatgtttacagctgaaggctcagaaagtgtgttatagggtgctcttttagtttgccgtctat

SEQ ID NO: 490979 - DNA, 201 bp, Homo sapiens
gaggcaggagaatcgcttgaacccaggaggaggaggttgcagtgagctgagatagcaccactgcactccagcctgggcgacaagagtgagactccgtctgaaaaaaaaaaaaaaaaaaaaagcatttgcatcaaagaatgagtaaagtatacactgcctccagggccagaggaaataaatataaagaagaaaacttaaatc

SEQ ID NO: 490980 - DNA, 201 bp, Homo sapiens
ccttttggctgacagttgaatatactgctttacttcatcaaaaaatgtcttaccgtaatggaatccagcattccctaatggaaagagaaaactttttgctrtttggtcctctaactttgtatatattctttattttgaaaataatcctttaaaatgttacaaaatgtgagttaagctagaaagatagaatatcaacttgag

SEQ ID NO: 490981 - DNA, 201 bp, Homo sapiens
taaagaagaaaacttaaatcaatccctggggaaaaaattgtcttaacattaggtaagtgtgtcagcatccaattttttctatagatacctgtatgtgtggrgtttttttaattactattagagaaaacacatataatagattatatagaaagaatatagagagaacatgtaatatatataataaacttgagtttatattct

SEQ ID NO: 490982 - DNA, 201 bp, Homo sapiens
gtcgcaataggtaaatggaataaaatagatagtgatcatatatttcagaattttcagatggcctttatttcaaatattcagtaactttaaatccttcaagrtcctttagatgatcagatattggcctaaagctttcttctgataagagcagtccttagaccactttttctggctgggcaagttgaggaaggcttcaaagag

SEQ ID NO: 490983 - DNA, 201 bp, Homo sapiens
gccacaataaagcaaatatcataataaagtgagtcacacaaaattttggtttcccagtgtatatatgtaactaaatctcaggttcagtgactggctgcttrcagtccaattagcaagagtgaggtctgatataaagaaagtgactggttttatggtttggttttttttttttttttttgacagagtctcactctgtcgccc

SEQ ID NO: 490984 - DNA, 201 bp, Homo sapiens
tgactggttttatggtttggttttttttttttttttttgacagagtctcactctgtcgcccaggctggagtccagtggcgtaaactcagctcactgtaacmtttgcctcccaggttcaagtaattctcatgcttcagcctcccaagtagctgggactacaggcataccccaccatgcccggctaatttttgtattttttag

SEQ ID NO: 490985 - DNA, 201 bp, Homo sapiens
tcgatcttagtctcaaaataatgaaaagtaacaaacaaataaacaaataaatgtccctccctaattaatgcatacattctttcccttttgtttcctgccacttcccctgttgttctggaccacccacctccagctggtgagtctgctttccttcctggaatcctcaatggtatgagtattaataaactgctttcatcttgc

SEQ ID NO: 490986 - DNA, 201 bp, Homo sapiens
cctgcagaccctgacccaatgacagatgaatgaaatacactgaaacacagatattctgctttgccagtttggctgagcatccaggccgcttacagactccvgagtgctgtaaacagttgcgaccatggccccaatcagctagtgagacatacgtttaatcagtaaagattaattgacaaaggcttgagtcaacaccactaa

SEQ ID NO: 490987 - DNA, 201 bp, Homo sapiens
aaaatgctgatgcaatccaattggaacctaatttaattgagttcttgatttgaaaagcaatattctatcaggagctgccattattcaaaaactaattttaygtcattaaggaacttctaccattttctttcctaagatgttgatggctaggaaaagcagaaaggaactgtcactactactgagaacatatttgttcaaaca

SEQ ID NO: 490988 - DNA, 201 bp, Homo sapiens
tggaaacatctttgaaaagtttctattgaaatataagatacgtagagaaacaagtacccattgtaagtacacagacagagaggtgacgccaactggacttmctgggtcgactggggagttggagaacttttctgtctagctggagaattgtaaatgcaccaaacagcactctgtaaaaacacaccaatcagcactctgtgt

SEQ ID NO: 490989 - DNA, 201 bp, Homo sapiens
tttccgcatctattgagataatcatttgattttgtcattggttctgattacgtgatagattatgtttattgatttgcatatgttgaaccagccttgcatcscagggatgaagctgacttgaccgtggtggataagctttttgatgtgctgctggattcggtttgccagtattttattgaggattttgcatcaatgttcatc

SEQ ID NO: 490990 - DNA, 201 bp, Homo sapiens
ttttttattttcccatatcaaaatcataatttataaaacagtggtagcatccaaattcctttttttttaagtcttcaggttatcaatgtatttcaattagrtattatgtgaatgagggtgaattgagagtagataacgatatcatggaggagggagaatcgagtgtacccagccacccatcggcattgcactatatttagt

SEQ ID NO: 490991 - DNA, 201 bp, Homo sapiens
attgtgtttttgttctgattggtttcaaagaacttatttatttctgccttaatttcgttaagtacccagttgtcattcaggagcaggttgttcagcttccrtgtagttgtgtggttttgagtgactttcttaatcctaaattctaatttgattgcactgtggtctgagagactgtttgttattatttccattcttttgcat

SEQ ID NO: 490992 - DNA, 201 bp, Homo sapiens
ctctgtgagaaatgtgaagaaacataacagccccaacctctaggtaattaaaatcttgttggaaagaaaagggaaagatatgtgtaaccgcacaaagcaaygctacaagagatgctaatgatggtttataattacaaataggtaaaggaaaggaagaccaagtctaaactcagaagagaatagaagagatctaaagcagat

SEQ ID NO: 490993 - DNA, 201 bp, Homo sapiens
gcctctttcattcctaccttaaggcattaaatgtgcttctcattgtcagatggggacccagttatttcttttttttcatttatttatttttttgagacggmgtcttgctctgtcgcccaggctggagtgcagtggcgcgatctcggctcactgcaagctctgcctcccgggttcacgccattctcctgactcagcctctct

SEQ ID NO: 490994 - DNA, 201 bp, Homo sapiens
tatttttagtagcgacggggtttcaccatgttagccaggatggtctcaatctcctgacctcataatcagcctgccttggcctcccaaagtgctgggattayaggcatgagccaccgcacccggccatatctcttgagtacttatgtaatcaataaatgaacaaagcaactatgtaaaacagttactaaagcatttcaaaat

SEQ ID NO: 490995 - DNA, 201 bp, Homo sapiens
ttagtagcgacggggtttcaccatgttagccaggatggtctcaatctcctgacctcataatcagcctgccttggcctcccaaagtgctgggattataggcrtgagccaccgcacccggccatatctcttgagtacttatgtaatcaataaatgaacaaagcaactatgtaaaacagttactaaagcatttcaaaattagcc

SEQ ID NO: 490996 - DNA, 201 bp, Homo sapiens
tctcaaagtgctgggattacaggtgtgagccactgtgcccgccctcaacttcagttcttatatgtttgaccacagaaatgtaacttaacctttctaagtcwcagttttctagcctgaaaatgggagtaataattaactcactgagttatcatgaatatcaaataatatgttaagcacagtaattgatatacagcagatgct

SEQ ID NO: 490997 - DNA, 201 bp, Homo sapiens
gtgatggccatgacacccacgctggaaggttgtgggtttactggaatgatggcaaggaatacctggcccacccagggtggaaaaccgcttaaaggagttcytgaaccacaaacaatagcatgagcgatctgtgccttaaggacatgttcctgctgcagataactagccagacccaaccctttatttcggcccatccctttg

SEQ ID NO: 490998 - DNA, 201 bp, Homo sapiens
ggtgaaaccctgtctctactaaaaatacaaaaattagctgggcatggtggtgcgtgcctgtagtcccagctactcaggaggctgaggcaggagaaccgctygaacccgggagagagattgcagtgagccgagattgcaccactgcactccagcctgacaacagagtgagactctgtcaaaaaaaaaaaaaaaaaaaaaaac

SEQ ID NO: 490999 - DNA, 201 bp, Homo sapiens
ccacagaaatgtaacttaacctttctaagtcacagttttctagcctgaaaatgggagtaataattaactcactgagttatcatgaatatcaaataatatgmtaagcacagtaattgatatacagcagatgcttaggaaatattaattcccttccccttctccattcttgtgagctctctttgataggaaaaaaagatacaa

SEQ ID NO: 491000 - DNA, 201 bp, Homo sapiens
ttagtaccagtgcactttataatttataacagagtctaaaaagggggtacaatttgttaaagactaccattaacatcctggctttgaaagcttaaatttagttattcagattaatcagaaactctcatatatcaatgaaaaatattcctgaaatataaaacaacattactttaatgtattgtttttataattatctaaatc

SEQ ID NO: 491001 - DNA, 201 bp, Homo sapiens
cacagaaatgtaacttaacctttctaagtcacagttttctagcctgaaaatgggagtaataattaactcactgagttatcatgaatatcaaataatatgtwaagcacagtaattgatatacagcagatgcttaggaaatattaattcccttccccttctccattcttgtgagctctctttgataggaaaaaaagatacaaa

SEQ ID NO: 491002 - DNA, 201 bp, Homo sapiens
cttcatttctatatgtataaatttataaagcaaaaaacactaccaacatcaattgatgttaatatttctgtgtatttctgttcattgttttttcaaagtasctacataaattttattaaattggagtcatcgaatatgtagtttgatacccggttttcaacttaatattgcaaacattttcacataccattaaatatttta

SEQ ID NO: 491003 - DNA, 201 bp, Homo sapiens
agacaaggagaagccagagcccccatcaatcgtgattgcttcctcacccttccctaattcctctaattcctgtttcccacatgtagttatatttccccccmactatgtcaacacaccaattttaatcaatttggagagatggatttgaggtttggctctcatccctctggttgacttcacccaaataaaaagtcttcttcc

SEQ ID NO: 491004 - DNA, 201 bp, Homo sapiens
tacccacagtagaagttctttccaaattggagtcagtcttttcaatcccagtcatggctttatcaactttatgaaatattctaaattctttgttgtcattaaaaaaaaaaagcccactgcatcttcaccaggggtgaatttcatctcaagaaaccactttctttgctcatccataaaaagcagctcctcatttatgtaagt

SEQ ID NO: 491005 - DNA, 201 bp, Homo sapiens
tgggaggtggggtgcttttttgcttaataattaaatttaaaagaggtgattcctggtccttgagaaagacatttctgcattgtaaagctggtcagaagctyatttagctttaaaaaatttttccatacatttcagagaccaagaaatgacataattacaagtttcctaaagtaaacgctctaagaaaaggtaagggagaca

SEQ ID NO: 491006 - DNA, 201 bp, Homo sapiens
atttgaggtttggctctcatccctctggttgacttcacccaaataaaaagtcttcttccctggcagttctgtgcagcgagccactgaaaatagaacagatacacacacacacacacacacacacacacacacacacatacacacacacatatataatatacacatttaatagcacatatatacacacacatatataatata

SEQ ID NO: 491007 - DNA, 201 bp, Homo sapiens
aaaacactacagtagtagggtggtggtggtgatgaacccactgtggtaggaactgtcttttgtgagtgtctcattgaagtccctaaatattctctgacaartaagtgttactaaaggaagtcaaaggtgttctagagtcttcacaaagaaagacatcagtgcaaccaaaacctgaagccatttactaagcatgccaaatgt

SEQ ID NO: 491008 - DNA, 201 bp, Homo sapiens
acacaagattttattaattgggaataataacaataggctttatttcatttaatgccatctcccaggtaatatatggaaagtcaaatttcaaaatctcttcwactaagaaaatatgaacaactaattaattacaatgaaatatcatagcagcaaattatcactctctcagctattttcactacttttcattatgtctataaa

SEQ ID NO: 491009 - DNA, 201 bp, Homo sapiens
gaggccgaggtgggtggatcacaatgtctggagatcaagaccatcctggctaatacagtgaaaccccgtctctactaaaaatacaaaaaattagcctggcrtggtggtgggtgcctgtaatcccagctactcaggaggctgagggctgaggcaggagaatcgcttgaacccgggaggcagagcttgcagtgagctgagatc

SEQ ID NO: 491010 - DNA, 201 bp, Homo sapiens
gagccaagataacgccactgcactccagcctgggtgacagagtgagaccccatcaaaaaaaaagaagaagaagaaatgacaaactgaaaaagacatttacratctatgtaaccaaaaaagaataagtaatcaatacgttgaaggaattcctttgaattgataagaaaaaatggccaggcacagtggctcatgcctgtaatc

SEQ ID NO: 491011 - DNA, 201 bp, Homo sapiens
aagagtctttagtcagttagaaaaataagtatttactactctttctagaatgaagaagtagtgagagggagagtgaagagatctcaccactcaatcataamcaacttccaaaagccccagcttccacatggcatcaccacattcgaagagccctgtggaagggacaaagcttccctttttataggtgcaatattttagtta

SEQ ID NO: 491012 - DNA, 201 bp, Homo sapiens
ctcatggaaggattatgaatgttagtacatattaatgttgctgctgtttgagactgttcaggtgtgttgcactctgtgagaaatgtgaagaaacataacarccccaacctctaggtaattaaaatcttgttggaaagaaaagggaaagatatgtgtaaccgcacaaagcaatgctacaagagatgctaatgatggtttata

SEQ ID NO: 491013 - DNA, 201 bp, Homo sapiens
agattgcaccactgcactccagcctgacaacagagtgagactctgtcaaaaaaaaaaaaaaaaaaaaaaaccgtcatccaacccagcaatcccattactasgtatctacccaaggaaatacaattctttccaccataagacacatgcatgtgttatgttcactgtggcactattcacaacagcagagacatgaaatcaaac

SEQ ID NO: 491014 - DNA, 201 bp, Homo sapiens
tttgaggtttggctctcatccctctggttgacttcacccaaataaaaagtcttcttccctggcagttctgtgcagcgagccactgaaaatagaacagatacacacacacacacacacacacacacacacacacacatacacacacacatatataatatacacatttaatagcacatatatacacacacatatataatatac

SEQ ID NO: 491015 - DNA, 201 bp, Homo sapiens
ttgaggtttggctctcatccctctggttgacttcacccaaataaaaagtcttcttccctggcagttctgtgcagcgagccactgaaaatagaacagatacacacacacacacacacacacacacacacacacacatacacacacacatatataatatacacatttaatagcacatatatacacacacatatataatataca

SEQ ID NO: 491016 - DNA, 201 bp, Homo sapiens
tgaggtttggctctcatccctctggttgacttcacccaaataaaaagtcttcttccctggcagttctgtgcagcgagccactgaaaatagaacagatacacacacacacacacacacacacacacacacacacatacacacacacatatataatatacacatttaatagcacatatatacacacacatatataatatacac

SEQ ID NO: 491017 - DNA, 201 bp, Homo sapiens
acccaaataaaaagtcttcttccctggcagttctgtgcagcgagccactgaaaatagaacagatacacacacacacacacacacacacacacacacacacatacacacacacatatataatatacacatttaatagcacatatatacacacacatatataatatacacatttaatagcatatatatacaaatttaatagca

SEQ ID NO: 491018 - DNA, 201 bp, Homo sapiens
tgcaaagtcaaagctatttggcaagcatggttatctggggaaggaatttggaacaaccctatatgctgtataccttgtaaatgctgttatcaactgcaaaggagaaatgttcattttcctgagcatagcttaaaaataaataaataaataaagatgtgggggaagaagctcattcttccaaaggcctttgtcagagaagca

SEQ ID NO: 491019 - DNA, 201 bp, Homo sapiens
cccaaataaaaagtcttcttccctggcagttctgtgcagcgagccactgaaaatagaacagatacacacacacacacacacacacacacacacacacacatacacacacacatatataatatacacatttaatagcacatatatacacacacatatataatatacacatttaatagcatatatatacaaatttaatagcat

SEQ ID NO: 491020 - DNA, 201 bp, Homo sapiens
ccaaataaaaagtcttcttccctggcagttctgtgcagcgagccactgaaaatagaacagatacacacacacacacacacacacacacacacacacacatacacacacacatatataatatacacatttaatagcacatatatacacacacatatataatatacacatttaatagcatatatatacaaatttaatagcata

SEQ ID NO: 491021 - DNA, 201 bp, Homo sapiens
caaagtcaaagctatttggcaagcatggttatctggggaaggaatttggaacaaccctatatgctgtataccttgtaaatgctgttatcaactgcaaaggagaaatgttcattttcctgagcatagcttaaaaataaataaataaataaagatgtgggggaagaagctcattcttccaaaggcctttgtcagagaagcaaa

SEQ ID NO: 491022 - DNA, 201 bp, Homo sapiens
caaataaaaagtcttcttccctggcagttctgtgcagcgagccactgaaaatagaacagatacacacacacacacacacacacacacacacacacacatacacacacacatatataatatacacatttaatagcacatatatacacacacatatataatatacacatttaatagcatatatatacaaatttaatagcatat

SEQ ID NO: 491023 - DNA, 201 bp, Homo sapiens
agtcttcttccctggcagttctgtgcagcgagccactgaaaatagaacagatacacacacacacacacacacacacacacacacacacatacacacacacatatataatatacacatttaatagcacatatatacacacacatatataatatacacatttaatagcatatatatacaaatttaatagcatatatatcacat

SEQ ID NO: 491024 - DNA, 201 bp, Homo sapiens
gtcttcttccctggcagttctgtgcagcgagccactgaaaatagaacagatacacacacacacacacacacacacacacacacacacatacacacacacatatataatatacacatttaatagcacatatatacacacacatatataatatacacatttaatagcatatatatacaaatttaatagcatatatatcacatt

SEQ ID NO: 491025 - DNA, 201 bp, Homo sapiens
atagaacagatacacacacacacacacacacacacacacacacacacatacacacacacatatataatatacacatttaatagcacatatatacacacacwtatataatatacacatttaatagcatatatatacaaatttaatagcatatatatcacattttacatatatacacatttaatagcatatatatatatatat

SEQ ID NO: 491026 - DNA, 201 bp, Homo sapiens
tgcctatattcatagagatgttcctgaattaaatactgtaaatgaaattgtcagtataaaattcccgttatgctctagtgtgctaccattattattattattttttttttttgagacggagttttgctctgtcgtccaggctggagtgcagtggcgcgatcttggctcactgcaaactccgcctcccgggttcaagccatt

SEQ ID NO: 491027 - DNA, 201 bp, Homo sapiens
ttccagccccacccatttttcagttaattcttgcatgggttgatgactattttttagtttttatttttttatttttttttgagacggagtctcgctctgtygcccaggctagagtgcagtggtgccatcttgactcactgcaagctccacctcccaggttcacgccattctcctgcctcagcctcctgagtagctgggact

SEQ ID NO: 491028 - DNA, 201 bp, Homo sapiens
ccacagaggttgtgaatccagcaggccgacttcacggtgcaggggcagagggggaacaactaaagcccttttctttggcagcggggaggcggatagcctcrggtaaattttcaggcccctcttgccctcctcttggaaagactctgagctgttgggggagcacagtgggagtgagaccggcctttcagtttgcgtgggagc

SEQ ID NO: 491029 - DNA, 201 bp, Homo sapiens
tctactagaaatacaaaaattagctgggtgtggtagtgggcacctgtagccccaactactcaggaggctgcagcaggagaatcacttgaacccaggaggtrgagattgcagcgagctgagatctcgccactgccctccagcctgggtgacagagcaagactctgtctcaaaaaaaaacaataaaaaataaataaataaaag

SEQ ID NO: 491030 - DNA, 201 bp, Homo sapiens
aaggaaccagaaaaccaaccctgaaggctcttcaacaccccccaaaaatcatactagttcaccagcaatagacccaaaccaagaagaaatccctgatttayctgaaaaagaattcaagaggttagttattaagctaatcagggagggaccagagaaaggcaaagcccaggcccggcatggtagctcatgcctgtaatctca

SEQ ID NO: 491031 - DNA, 201 bp, Homo sapiens
tgaggcaggagaacggcgtgaacccaggaagcggaggttgcagtgagccgacatcgcaccactgcactccagcctgggcaacagagcgagactctgcctcaaaaaaaaaaactcaatttaaaaaaatgcaagtgcgaaatgcaaaagagatttttcagtagcacaggctaaaaatgctatagataggagaaagctgtggtg

SEQ ID NO: 491032 - DNA, 201 bp, Homo sapiens
tcccatttcagatgacctgacagttaactcagaatgtcagtggcaggtgtcacttcaattttctacataataacagagatggaggggatcatggcagacakgaggcaggactagattgcagctccagacagagcagcatcgggaggcttgcattgtgaattttagctccagatcaactgcaagaacaaaccagcaatcccg

SEQ ID NO: 491033 - DNA, 201 bp, Homo sapiens
acacacacacacacacacacacatacacacacacatatataatatacacatttaatagcacatatatacacacacatatataatatacacatttaatagcatatatatacaaatttaatagcatatatatcacattttacatatatacacatttaatagcatatatatatatatatatatatcaatcatactgtcagtaat

SEQ ID NO: 491034 - DNA, 201 bp, Homo sapiens
cacacacacacacacacacacatacacacacacatatataatatacacatttaatagcacatatatacacacacatatataatatacacatttaatagcatatatatacaaatttaatagcatatatatcacattttacatatatacacatttaatagcatatatatatatatatatatatcaatcatactgtcagtaatg

SEQ ID NO: 491035 - DNA, 201 bp, Homo sapiens
taaacaaagcctctggaaagttcggactgggcagagcccaccacagcttggcaaagccactgtggccagactgcctctctagattcctcctctctgggcasggcatgtctgaaagaaaggcagcagccccagtcagggacttacagataaaactctcatctccctgggacagagtacccaggggaaggggtggctgtggtc

SEQ ID NO: 491036 - DNA, 201 bp, Homo sapiens
gatctcggctcactgcaagctccacctcccgggttcacgccattctcctgcctcagcctcccaagcagcttggactacaggtgcccgccaccactcccggstaattttttgtatttttagtagagacggggtttcactgtgctagccaggatggtcttcatctccttacctccttgatccgcctgcctcggcctcccaaac

SEQ ID NO: 491037 - DNA, 201 bp, Homo sapiens
ttttttgctgtcgttgttttggagatggagtctcactctgttgccaggctggagtgcagtagtgtgatctcggctcactgcaacctccgcttcctggttcragcgattctccttcctcagcctcctgaatagctgggattacaggcacccgccaccacacccagctaatttttgtatttttagtagaggtgtggtttcacc

SEQ ID NO: 491038 - DNA, 201 bp, Homo sapiens
ttcccactcataagtgggagttgaacaacaagaacatatatatgtgtgtatgtatatatatacacacacatatatacgtatatatatgtgtgtatatataygtatatatgtgtatatatactatatatgtatatgtgtataatatacgtatatatgtgtgtatatatgtatatatgtgtatatatatacacgtatacatat

SEQ ID NO: 491039 - DNA, 201 bp, Homo sapiens
acattttaaggttatttagaatgcatcaaaattgttttaaacttgaattatacaatggttaactcacagataattttctttttgtttttcttttttcttctttttttttttttttgagacactgtttcactaagaactagtgtcacctaggctggagtgcaatggcactatcttggctcactgcaacctccgccttccagg

SEQ ID NO: 491040 - DNA, 201 bp, Homo sapiens
agcctccaagaagtctgggattatgttaaatgatcaaacctaagcataatcagtgttcctgaggaagaagagaattataaaagcttggaaaacatatttgrgggaataatcaaagaaaactcccccagcctagctagagacctagacatctaaatacaagaagcacaaaggatacctgggaaattcatcacaaaaagatct

SEQ ID NO: 491041 - DNA, 201 bp, Homo sapiens
tgagatctcgccactgccctccagcctgggtgacagagcaagactctgtctcaaaaaaaaacaataaaaaataaataaataaaagcaaagctcaatgcaaraaaatccaaaataaagatacaagaagtgaaaggagaaataatcactgaaatagagaattaaagaaaaaacaataaaaaaagtcaggaaactttgggcaca

SEQ ID NO: 491042 - DNA, 201 bp, Homo sapiens
gcaaaatgtaagctctacatctttagtcattagggaaatgcaaatcaaacccactaggaggtaccaacttactcttccaagaaaatatatataatcaaaawgccacctaataacagtttttggtggggaggatgtgaagaaattagaaccttctatggtttgaaggtgtcctctccaaaattcaggtgttgcaactaaggg

SEQ ID NO: 491043 - DNA, 201 bp, Homo sapiens
gtgatagtggaaaaactcaaactgtttttcctctgttctatcaccacaagcaacacagaagacttctgtgaccaaatgtgtggggtttctccccacacacyaagcaagcaatcagctctgcagcagacaccagctgggtgccctccaattcaattcaattcagccactatctggagacagcctcagatcccacaagttggg

SEQ ID NO: 491044 - DNA, 201 bp, Homo sapiens
aggagtgaagctgcagacctttgttgtgagtgtaacagctcataaaggtgacgcagacccaaacagtgagcagcaacaaaatttattgcgaagagtgaaasaacaaacgttccacgggcgtggaaggtgacccgagcaggttgccgctgctggctcaggtggcctgcttttattcccatatctggccccacccacatcctg

SEQ ID NO: 491045 - DNA, 201 bp, Homo sapiens
caacccacagagtgggagaaaatcttcacaatctacacatctgagaaaggactaatatccagaatctgcaattaactcaaacaaatcagtaagaaaaaaamcaatcacatcaaaaagagggctaagtacatgaatagacaattctcaaacgaagatatacaaatgactaataaacatatgagaaaatgctcaacatcacta

SEQ ID NO: 491046 - DNA, 201 bp, Homo sapiens
aaagcagcatgatatctccagtgggaatctgtatattagtgccactattaattacttaaaagatgcagtgattttggtcccttatgtgtcctctttcaatytgcctttcagtctgtacagaaaatcaataagacttacagaagaatagtagattagggagagtttaagcaatagttactcaaattcaagctgctgaaccaa

SEQ ID NO: 491047 - DNA, 201 bp, Homo sapiens
atgtagggggaccatttagtctttgcatctacaaaaaacaagccatttttttctttttactaacctaatttttaaaaatcatttaattgggcccagaggckgcgcaatggaaggatacggagtttgggaaaaataaaaccaatgagtgaaccaggacattttgtgttctttaagcttttaggaggacaagtgctgaggaca

SEQ ID NO: 491048 - DNA, 201 bp, Homo sapiens
tagacactcccctacccccccgccccagcaatgcacactcacttaattattttcttccttaagaaactcaaaagactaatcttttgaaacaaggcatggakccctaatggtagaattctctttaggaggaattgtgaactatcaatccaccatcattgggctaaagtcaagataatgccaaccagatcttcagatgggcga

SEQ ID NO: 491049 - DNA, 201 bp, Homo sapiens
ccttccccaccttttacatctcagaatccctcttctactgctctcttgatgactttattcacttggctccagtcacaatgacctcttcatacttgctccartaccaaatgtgcttccagcagcaggccttttgtactaactgttccttctgcccggaaaaaaaaaatccccctcttctccaatgtatctgtaaagctaaat

SEQ ID NO: 491050 - DNA, 201 bp, Homo sapiens
tcctacctcaagacatcaacagcaaatgcagcctgaggtgctgagatacctgtagcaaccaaaaagcacagactgaaacacaacaaaaccaaaccaaaacaaaaaaaaaagctctctcttaaactccctcttcagacttcaacacaacatgagtgtgaatatggaaaactagaattcaaccagctgatccaaaactagtag

SEQ ID NO: 491051 - DNA, 201 bp, Homo sapiens
caccaaaagagagcagggttagctattcttatatcagacaaaacaaactttaaagcaacatcggttaaaagacagaaagagggacattatataatggtaamaggtcttgtccaacaggaaaatatcacaatcctaaacatatatgcacctaatactggagctcccaaatttataaaacaattactaatagacgtaagaaat

SEQ ID NO: 491052 - DNA, 201 bp, Homo sapiens
gagacagggttttgccatgttgcctaggctggtctctttaactcctgagatgaagcaatccagctgccttggcctcccaaagtgctgggattacaggcatragccaccacggctggccagaaaataaccattttaattgtacttagagtttaatcacaatttgggcatagaaaaaatagtgacaggaaatatatataatgc

SEQ ID NO: 491053 - DNA, 201 bp, Homo sapiens
tacacccattctctactttggagcttctaaaagaaggttttcattacatacctttttgctcccactacaaatgcagcaaattaccctttacttcttgcagytcttctgtatagaaaaatacgatattgctttttatgttctaattttcatatttagattatctagaatgtgtgacaaatcaaaagtttctcagtgcttcta

SEQ ID NO: 491054 - DNA, 201 bp, Homo sapiens
caaagtttccaggtacaagattaatgtacacaaatcggtagttcttctatacaccaacagcgaccaagcagtgaatcaaatcaagaactcaacccctttcrcaatagctgcaaaataaataaataaataaaatacttaggaatacacctaaccaaggagttgaaagacctctacaaggaaaactacaaaacactactgaaa

SEQ ID NO: 491055 - DNA, 201 bp, Homo sapiens
tatcctgagatagcagaaaaaacacttaagaagtagtaatgtgctcccaaagagctcagccctgctcttaaaagtaaactagtgctgatgccggggtaccrggggaaatctactactgcactgtgggcgcatgtgccattgctatgtgagacacatagtaatgtctgtccatttattcacactctaaaatttatttgtaaa

SEQ ID NO: 491056 - DNA, 201 bp, Homo sapiens
acatcaaaaagagggctaagtacatgaatagacaattctcaaacgaagatatacaaatgactaataaacatatgagaaaatgctcaacatcactaatgatkagggaaatgtaaatcaaaaccacagtgcaataccaccttactcctgcaagaatggccataatcaaaaaacagtagatgttagcgtggatgcagggaacag

SEQ ID NO: 491057 - DNA, 201 bp, Homo sapiens
tagtcaattttttcattgaaagcagtttttcattatcctattagctaactgcttttcacattatgacagtcaccaattccaattgttaaaaaaaaattgtwttcaagtaaactcaacttccatatgaattaaaacattcaattcattggcgtgaacccaggaggtggagcttgcaatgagccgagatcccgccactgcact

SEQ ID NO: 491058 - DNA, 201 bp, Homo sapiens
tttcaccatgttagccagcctggtctcaaactcctggccttaagtgatcctcctgctttggcctcccaaagtgctgggattacaggtgtgagccaccacgyctggccagtaaaaggttctttagacagagttcacatttttaatatgggccagcagttccataatgtggcccttaaaattttaaggcaagaaaatttagat

SEQ ID NO: 491059 - DNA, 201 bp, Homo sapiens
atatgtttgagaaagaaccccaagaaaccatcaaagactattctgtaattctttctcctggcctttgccaggagcttgtgactatctactaatttctttgrgtattgagagagaaatacgtggacttactgtcagactctggttctgctaatccctggagacctagaatgctactgtggaaaccccactcagagtgagggc

SEQ ID NO: 491060 - DNA, 201 bp, Homo sapiens
acattcaattcattggcgtgaacccaggaggtggagcttgcaatgagccgagatcccgccactgcactccggcctgggcgacagagcaaaacgccatctcaaaaaaaaaaaaaaaattcaattcattatttttatttgatttttctccttttttcccttcttcctttttctccatttctccctttttaattaagattatga

SEQ ID NO: 491061 - DNA, 201 bp, Homo sapiens
ctgcaaaaagggttgggggaatcagtgttagtcattgacaacttatcaaggtagatgaaaattgaaaagagaccattgtttgtgttatgatacaatcacakgtgacggctgctgctcacttgctaaggagttaaggtggaaggtagattatttagggttgaagaatgcaaagataaaaagcatagaggacagaaacagttt

SEQ ID NO: 491062 - DNA, 201 bp, Homo sapiens
cagataaggaaactaaggcatttaaatcttatgacacttatctaagatcttacaactagtgagtataaaaccaccagaatttttggtggtaactaattaawaataaattctctaatgacccaaattattacatatccaaaaatatttaggtatagcaaatataagttgaataacttgacccttgtagaatgtcacattgag

SEQ ID NO: 491063 - DNA, 201 bp, Homo sapiens
aacaatgatagactggattaagacaatgtggcacatatacaccatggaatactatgcagccataaaaaatgaagagttcatgtcctttgtagggacatggrtgaaactggaaaccatcattctcagcaaactattgcaaggacaaaaaaaccaaacaccgcatgttctcactcatagatgggaattgaacaatgagaacac

SEQ ID NO: 491064 - DNA, 201 bp, Homo sapiens
tgattataggataaaattatcctatgataataaagccttcttctggaatacctcccaaagaacctccccgaggctgtttcacagttaatttatatatatakgtgtgtgtgtgtgtgtgtatatatatatgtatatatatatatatatataaatacatatgtatgtgtatatatacaaaaaatatgtgtatatatacaaaaa

SEQ ID NO: 491065 - DNA, 201 bp, Homo sapiens
tgtgttagcacatattgcagatgagggtaggcaaaatcaaagatcaaatactacatatatttgccaaatgaagtctgcctcatgttatagtgaagttcccygaggataattgtttagtacctataagctaatagacaagcggaagctatttgccacactcttgtatgactaattcctattagtttagatgcgttaaaaata

SEQ ID NO: 491066 - DNA, 201 bp, Homo sapiens
ggtaaaaccccgtctctactaaaaacacaaaaaaattagctgggcatggtagcaggtgcctgtagtcccagctacttgagaggctgaggcaggagaaccgygtgaacccaggaggcggagcttgcagtgagcccagatggagccactgcactccagcctgggcgacagagcgagactccgtctcaaaaaaaaaaacaaaca

SEQ ID NO: 491067 - DNA, 201 bp, Homo sapiens
gcgtgaacccaggaggcggagcttgcagtgagcccagatggagccactgcactccagcctgggcgacagagcgagactccgtctcaaaaaaaaaaacaaamaaacaaacaaaaaaaactttgcactcattctccaagcccacgtgtggtccgattcttccggtacaccaaggcaacaacccaggatacggaaaaccctctg

SEQ ID NO: 491068 - DNA, 201 bp, Homo sapiens
ccaggaggcggagcttgcagtgagcccagatggagccactgcactccagcctgggcgacagagcgagactccgtctcaaaaaaaaaaacaaacaaacaaamaaaaaaaactttgcactcattctccaagcccacgtgtggtccgattcttccggtacaccaaggcaacaacccaggatacggaaaaccctctgccctaggg

SEQ ID NO: 491069 - DNA, 201 bp, Homo sapiens
acacatatttatataaaactggcccaattttcccatagaactgatatttatggggttttttcaataaacatagagattgatcctcctgatcttgaaacttsaaacttaacatttgtctcctctgggttccttcctcaggaaaccaaacctcaggcaagggactcaccagatcctggcacccagacaaggagaagccagagc

SEQ ID NO: 491070 - DNA, 201 bp, Homo sapiens
gcactttgggaggtccaggtgggaggattaattgaggccaggagtttgagacaagcctggccaacacggtgaaaccccatctttactgaaaataaaaaaaytaggcgtggtggtgcatgtttgtagtcctagctacttgggaggctgaggcaggagactcacctgaaccagggaggcagaggttgcagtgcaccactaccc

SEQ ID NO: 491071 - DNA, 201 bp, Homo sapiens
caggtgcgctgtatatggtacaatgtaccagcttgccccagaggatttgaaagtgggcatctgatctgaagaccccatttacagattgttcagtgagttayagagggtacaagaaaaataacaaattgtagccccttcttgggtatttgagctggaatgtacaaaaatcgtataattttcaagagctataattgaaggaat

SEQ ID NO: 491072 - DNA, 201 bp, Homo sapiens
agagctataattgaaggaatgctagaggagcggcaaaaggagaaattgtgtttttttaaaagatgaaactgtaaaatagaaaaaagattaacagtgtgaargaaaagcacactgagaactaaaggcagtggcgtaagggtaatatcaccggaaaattgagctctcttcctactttgtatgggtcacaaagcaagaacaccc

SEQ ID NO: 491073 - DNA, 201 bp, Homo sapiens
ctgttctatcaccacaagcaacacagaagacttctgtgaccaaatgtgtggggtttctccccacacactaagcaagcaatcagctctgcagcagacaccarctgggtgccctccaattcaattcaattcagccactatctggagacagcctcagatcccacaagttgggggctcagtcacacaaaaccaccccctccttcc

SEQ ID NO: 491074 - DNA, 201 bp, Homo sapiens
gaaattgtgtttttttaaaagatgaaactgtaaaatagaaaaaagattaacagtgtgaaagaaaagcacactgagaactaaaggcagtggcgtaagggtartatcaccggaaaattgagctctcttcctactttgtatgggtcacaaagcaagaacacccaactggaccaaagggcaaacatttctggccagagatggagg

SEQ ID NO: 491075 - DNA, 201 bp, Homo sapiens
gaagcaagtgggaacttctttactgtaagctcatgtgggaaagggaacagctgaaagtctattcattcattgaaaaaacaaccacattttaatgtctgccyattaatataataaaaagaggctaacttccaatgagagagggtacacaataagccaagatgataaagcaatgccaaaattttagttaatttttctaaaaaa

SEQ ID NO: 491076 - DNA, 201 bp, Homo sapiens
gtttttttaaaagatgaaactgtaaaatagaaaaaagattaacagtgtgaaagaaaagcacactgagaactaaaggcagtggcgtaagggtaatatcaccrgaaaattgagctctcttcctactttgtatgggtcacaaagcaagaacacccaactggaccaaagggcaaacatttctggccagagatggaggagtaagcg

SEQ ID NO: 491077 - DNA, 201 bp, Homo sapiens
cacaaagcaagaacacccaactggaccaaagggcaaacatttctggccagagatggaggagtaagcgcatgctctaaagaccccttctccccaggtaataraaaacgtgaggtttttaaggactgagtctgggggttggagaggaatgttagcatgtgtaaggtgggactccacatgttcaggcttcattcataaacatgc

SEQ ID NO: 491078 - DNA, 201 bp, Homo sapiens
caactggaccaaagggcaaacatttctggccagagatggaggagtaagcgcatgctctaaagaccccttctccccaggtaataaaaaacgtgaggtttttmaggactgagtctgggggttggagaggaatgttagcatgtgtaaggtgggactccacatgttcaggcttcattcataaacatgcatcttcacacagcccat

SEQ ID NO: 491079 - DNA, 201 bp, Homo sapiens
tgttctgtatcaggaggaacactagaatcccacaaacaagcagagaagcttcactcttcatttctcttcctctgtcagtagaaagaagccttgagtgagcscttgaaaagtctcccagaataaaacctttagaaatgtatacaaatagtgatgagtgtatgtgtttatgtgtgggatatctatcaataaataactgaacag

SEQ ID NO: 491080 - DNA, 201 bp, Homo sapiens
aaaaaacgtgaggtttttaaggactgagtctgggggttggagaggaatgttagcatgtgtaaggtgggactccacatgttcaggcttcattcataaacatrcatcttcacacagcccatatacataagatggtggagattctctccttggggtgggaattttagcactataatgatatagtcatgaactgaaggcaactag

SEQ ID NO: 491081 - DNA, 201 bp, Homo sapiens
tcattaccaggaatacaaatcaatacatctagaagccagaactgatttttcacttaataaactgtttcttcatccatttcctaactctgtgttagcacatattgcagatgagggtaggcaaaatcaaagatcaaatactacatatatttgccaaatgaagtctgcctcatgttatagtgaagttccctgaggataattgtt

SEQ ID NO: 491082 - DNA, 201 bp, Homo sapiens
ataaagatgatgaaaaattgcaaaaagaaaagcaaatgtccttggaaaatgcaaatgttagcatggtgaaacaacagaaaagatttcaaggattggagaawaaaaggagaataggtaaatttgtaaatagaagcattattagatgcataagcagaatcatgacaatgaatgaaatacactgcaggaaatcatcctggccaa

SEQ ID NO: 491083 - DNA, 201 bp, Homo sapiens
agtaagagtctggtaatagcagatcaatgatgaaaggtccagtgtagtgacaaggtcatcaggaggtgggtgagagggagaaagagtagagtaagaacagraggggccgctctaattctcgagtagccagtggtaattttaaagctccataggcttttaattaatcatagatcttcattaataatgctggtagtatttagt

SEQ ID NO: 491084 - DNA, 201 bp, Homo sapiens
tggagtgcagtagtgtgatctcggctcactgcaacctccgcttcctggttcaagcgattctccttcctcagcctcctgaatagctgggattacaggcaccygccaccacacccagctaatttttgtatttttagtagaggtgtggtttcaccatgttggccaggatgatctcaatctcctgacgtcgtgatctgcctgcct

SEQ ID NO: 491085 - DNA, 201 bp, Homo sapiens
acacagaaagaatcagtactattgaaagaaaacaaattaaacaagtcactttagtcttgacctaaattcaatgacacttctgatattctgaatctgtctgrgaaaaatatattccacaagtgcttgaaaaaactatagggcattgtgatttataatagtagttctgaacaaataaaaacccaacgtttttacagttgaaca

SEQ ID NO: 491086 - DNA, 201 bp, Homo sapiens
acctaggcagagcaaacaggacttgtaagcaatgaccaaattgcacaagtgataaacctatacaggcctataacaaatgctatgctatttctagaaaggatttttttcttctaaatggcccagatgaagtcctgaactccctgcttctctccttttgctttggcagagagaagctaaggatgatgaagcatgatgtgacat

SEQ ID NO: 491087 - DNA, 201 bp, Homo sapiens
ttaaagatgtggttttgttttctagcaggacaagaaaatggcgttctttaattaaaggtctatttttcaaatcaagatgctttagctcctgcctttgaccrtctctcttttgaaaaggaaaggaagaagacccaactttggagagtcttgcccttcctatcaaatttacactaacaaaaccacatccaaatggaaataaaa

SEQ ID NO: 491088 - DNA, 201 bp, Homo sapiens
tccagtccaagcagacacagtccttcctgtgtatcagaaggaagttgaatgtaaaatatagcggcataggtaagcaagtaaaagcaaaagactccttgactttttttttttttttgagacaaagtctccctctgtcgcccaggctggagtgcagtggggcaatctgggctcgctgcaatctccacctcctgggtttaagct

SEQ ID NO: 491089 - DNA, 201 bp, Homo sapiens
ctcctttgaagatgtttaacagtaatatagattaattccataattgggtagttatacacaaacatgcctgaagacagtggagaaggctcactttttcaggttttttttccttcttggactccatgattagccacacatacaaaagggcaaggcaggattttaacgtcctttccttgaaaacattcgaaatcgagaaagagg

SEQ ID NO: 491090 - DNA, 201 bp, Homo sapiens
tcaggcatggtggtgggcgcctgtaatcccagctactcagtaggctgaggcagaagaatcgcatgaaccagggaggcagaggttgcagtgagccgagatcrtgccactgtactccagcctgggctataagagcaaaacttcatctcaaacaaaaacaacgacaacaaaaataaaaaaacaacaaaacaaaaaaaatccact

SEQ ID NO: 491091 - DNA, 201 bp, Homo sapiens
atgagctgtaacactcaccatgagggtctgcggcttcattcctgaagtcagcgagaccacgaacccactgggaggaacaaacaactccagacgtgccacctttaagagctgtaacactcactgcgaaggtctgcagcttcactcctgaagtcagcaagaccatgaactcaccagaaggaactccagacacatctgaacatc

SEQ ID NO: 491092 - DNA, 201 bp, Homo sapiens
tagctctacttctaggcaagagtttcttataatacattgacatcaaaacaaatgaaaagttggaaagttatttctgctaatataaaaatatgtgttatataatgaacctgtttccatacaggtttatggtgagatcaagacttcatcttaatgcatagtacactgttaaaatgcagaaatgaaccaggctcaagaacaata

SEQ ID NO: 491093 - DNA, 201 bp, Homo sapiens
aaagaatactattattatctccattttatagatgagaaaagcatggcttaggaagcttacatgagttaaccacagctgatacacagtcacctttttttaattttttttttaatagagacaggaatctcgctatgttgcccaggctggtctcaaactcttgggctcaagccatccacccacctcagcctcccaaagtgccag

SEQ ID NO: 491094 - DNA, 201 bp, Homo sapiens
gaggaatgttagcatgtgtaaggtgggactccacatgttcaggcttcattcataaacatgcatcttcacacagcccatatacataagatggtggagattcyctccttggggtgggaattttagcactataatgatatagtcatgaactgaaggcaactagggatcctgttccagtttgggctggttttggggtctgatccc

SEQ ID NO: 491095 - DNA, 201 bp, Homo sapiens
tctgttcctgtgttagtttgctgagaatgatggtttccagcttcattcatgtccctgcaaagggcatgaactcataggtttttatggctgcatagtattcmatggtgtatatgtgccacattttctttatccagcctatccttgatgggtgtttgggttggttccaagtctttgctattgtgaatagtgctgcaataaaca

SEQ ID NO: 491096 - DNA, 201 bp, Homo sapiens
gatcataccattgcactccagccagggcaacagagcaagaccctgtttctaaaacaaaggcagaaagaaaagaagtttacaaatcttaaatcctaaatgartgtgtgtataaatacatagatatacccataaaagattaataattcaaatacagtaacattttaaaattctacttatcagaagacatcactgagaatataa

SEQ ID NO: 491097 - DNA, 201 bp, Homo sapiens
taatcccagctactcgggaggctaaggcagaagaattgctcgaacccgacaggcggaggctgcagtgagctgagatcatgccactgaattccagcctgggygacagagtgagactccatctcaaaaaacaaacaaacaaacaaacaaacaacaaaaaaaaacagaacctcaaggaatagttgagtaaaactctgtagtgta

SEQ ID NO: 491098 - DNA, 201 bp, Homo sapiens
tactgagtattctgatacatcttactctgttccatactagtctgttccattttattatattctatactatgctgttctggtttttaaaaaacaaacaaagytagtttaatcaactactgtatactgtcagatttcatgctccaagattggaaaacactgctgtagagtatgacagcagctgcttcaggacttgtactacag

SEQ ID NO: 491099 - DNA, 201 bp, Homo sapiens
tttattattcacaagcttatttaagttgttaaacagctaatctttataatactttacatgtaagatccacattatttatacgaagagaatgcatgtcttcycacaatgctgaagtagggtcatttcagttcttaagatgcatactgatgagatgcacacaagttcctcagaagccaaccagactcaagacatatgtcaaat

SEQ ID NO: 491100 - DNA, 201 bp, Homo sapiens
ttttggaactcctgtgttagaacaaatagtgagatagcctttccttatatataaacaaatataaacacacacaaagaaaaacatagacaatgaggaacatkttaatgaagtgagtaaatgtatcagtgtattcctatgaaccaaaatatcagagataatatgtctagtggtaaaaataaaaattagtgagtaatttgtggg

SEQ ID NO: 491101 - DNA, 201 bp, Homo sapiens
cactgaaggatttgaatgctgaaatgaagacagtggacagatatttcaagatttatcattaaaatccagaatatacattttaaaaatttattttcaaacaytgaggttcagtgttaagaaagggccaaaaggatcctgaaatcatttctttcctcagagttcagttgctattaaagaggcagaaaagtagaataatgataa

SEQ ID NO: 491102 - DNA, 201 bp, Homo sapiens
gtacacttaggctatagttaatttataaaacaaaaatttatttctttaataaaaaagtaaacttatcttactgtaacttttttactttataaactttttartgttttacctttttgactcctgtaataacaaagcttaaaacaaacacattgtaccactatacaaaatattttctttctttattctttatattcttattct

SEQ ID NO: 491103 - DNA, 201 bp, Homo sapiens
aggggtggtggcacatgtctgtaatcccagctactcgggaggctgaggcagtaggatcacctgaacgtgggaggcggaggtttcagtgagtcaagatcacrccactgcactccagcctgggtgacagagtgagactctgtctcgaaaaatgccaaacaaaacaacaaaaacagaaggagcataagaaaatacagattgtac

SEQ ID NO: 491104 - DNA, 201 bp, Homo sapiens
aaagataaatccagtaaactatttatgacccttcataaaccgtgaggcgctaacaaatttagataaatgagggaggaaaatgatcacacaaattcaataarttatttaactgatagcataattgaaatgaatatgttgctgtgagaataaatgtttattacacaagaaaagcatgctaaagaaaaagatgaaactgagtaa

SEQ ID NO: 491105 - DNA, 201 bp, Homo sapiens
aacactccccaaatattgttttcactatgaccaaatcattcatatactacattcacggtatggcactaaacaccagagtccttgacctctcattaccaagyactcagtgggctcactgccctgtgtgcatagaggccaacaccaccgtactggcttttgagaaaagaccagctgttggccctcaaggagactgaggaaaag

SEQ ID NO: 491106 - DNA, 201 bp, Homo sapiens
tcactgccctgtgtgcatagaggccaacaccaccgtactggcttttgagaaaagaccagctgttggccctcaaggagactgaggaaaagctcaaatctatytctctgagctggggactgggttgggttttataagcataaggtaatgaggtgtgctctgattggatcttgcaactaggtgatgctggaaggcatgatctga

SEQ ID NO: 491107 - DNA, 201 bp, Homo sapiens
cgtactggcttttgagaaaagaccagctgttggccctcaaggagactgaggaaaagctcaaatctatttctctgagctggggactgggttgggttttatawgcataaggtaatgaggtgtgctctgattggatcttgcaactaggtgatgctggaaggcatgatctgactggatcttgctatgggatgaagccaaaactca

SEQ ID NO: 491108 - DNA, 201 bp, Homo sapiens
gtcagtatgatggacggctcatgtcagcagacaactgtatgagcaaggactctgagggtcggatctgttgccctagcacccccactaaagcctgttactcygtaagctcctgcaatatagacaatcctagaatgaaggaaagagaagcctttacattggctgagatgatgtgtctgctagggaaggggaattagctcaaag

SEQ ID NO: 491109 - DNA, 201 bp, Homo sapiens
ctcagtaagaactttgcctggtcgaacaggaagaacaggttgaacaggaagaatgcatgctccacatatgcctccagcaggtttgaacatcagccacagtraataaatagggtgatgagggctgggagggtgaagatgggtaaaaggagtccagaaacctgcagggcaaaaccaaaaagactgaaaatagtctaagataaa

SEQ ID NO: 491110 - DNA, 201 bp, Homo sapiens
cttccggtacaccaaggcaacaacccaggatacggaaaaccctctgccctagggacaaggtagagggtcttactgagctggttaatacaagctgcctataracagcaaactaaaagagcatcatgtaacacacacccactggggcttcagctgtaaacattcactcctagacactgctgtaggctcggagccccacagcct

SEQ ID NO: 491111 - DNA, 201 bp, Homo sapiens
attagggtggagaggttaggtagaatatattgacaaatgcaaaaagtgacatctgatgagtgagaatatagacaggaaaaaatttatatatatatatatakatatatatatatgtaaagatcatatgcacatacattaaaaggtaaaatatccaaggctatttagtatttattaataatttgctctctagatgttctgcaa

SEQ ID NO: 491112 - DNA, 201 bp, Homo sapiens
caagacaacttgaaataaaagatcaaggcatacagtgggcatctcacaggtataccataaaccaggcagtgcagaaacatcatattaaaataggaagaagyagaagaaagcaaacatactgatgtggtcagttactgtgaatggtattaatattaccttcaaatgttttcaaaacctgaataagaaaaataatgtgagaaa

SEQ ID NO: 491113 - DNA, 201 bp, Homo sapiens
caacacaataacaaattatttatttctcatcttttttaaaaaactataaacttcatctggaaaaataaagaggcaataatagctaagatttttggaaaagaaagagtaatgagaagtgacatgactttctggatattaaaataaattataagctataaaataattaaaattgggctatataaaacaacacagtataatcaa

SEQ ID NO: 491114 - DNA, 201 bp, Homo sapiens
aacacaataacaaattatttatttctcatcttttttaaaaaactataaacttcatctggaaaaataaagaggcaataatagctaagatttttggaaaagaaagagtaatgagaagtgacatgactttctggatattaaaataaattataagctataaaataattaaaattgggctatataaaacaacacagtataatcaat

SEQ ID NO: 491115 - DNA, 201 bp, Homo sapiens
tacaaaattatttaaaaggttcatagttgttttgttttgttttttctaaaaactagtaccttaccaaatctcttgtcctacaaagatagcgaaggatacaygtcttgctatttctccttggaagagacatcttgctcgaatttgatttgtatatgaatgaaacattcaatgtgctaattttctggttaatattcccctttg

SEQ ID NO: 491116 - DNA, 201 bp, Homo sapiens
attacacaaaatggcagaaaatatcctaaagacaactcaacaaaggacaacacagttaaaaaaagaataggaaaagaatttgaatcaaagatatgcagacrgctgttatggtttaaatgtttctgtcgccctccaattacacatgttgaaaccctaagccgcaaagtgatagtattaggaagtggggacttttgggaggtg

SEQ ID NO: 491117 - DNA, 201 bp, Homo sapiens
aaaagaataggaaaagaatttgaatcaaagatatgcagacggctgttatggtttaaatgtttctgtcgccctccaattacacatgttgaaaccctaagccrcaaagtgatagtattaggaagtggggacttttgggaggtggttagatcatgaggacagagccctcatgaatgggattagtgactataaaaatggttgaag

SEQ ID NO: 491118 - DNA, 201 bp, Homo sapiens
tatggtttaaatgtttctgtcgccctccaattacacatgttgaaaccctaagccgcaaagtgatagtattaggaagtggggacttttgggaggtggttagrtcatgaggacagagccctcatgaatgggattagtgactataaaaatggttgaaggctgggcatggtggctcacacctgtcatcccagcacttttggaggc

SEQ ID NO: 491119 - DNA, 201 bp, Homo sapiens
aaaaggaaggaaaaaagccagttatcattatacacaagcagcctactgtcagtccttgaaaataaaaatttgagatagaagacaatgaatgctatattcakgcgtcagtctattctctttatgtagatttcatattaatctgtttattataaatatgtttcacatgtcacttttcttctatttccactttattttttctct

SEQ ID NO: 491120 - DNA, 201 bp, Homo sapiens
tgcaccagtcctgcatgtctcccatatcaagtttcccttttaaaaccttatgataaactttaaaatttgagatggtctttatgacttgagttcagcatctycacaagccctctggcacttgattcaatccgatttttccttccaccaaatcttgtctctcaagactggcttttgggtagtggactgctggacttaggtcca

SEQ ID NO: 491121 - DNA, 201 bp, Homo sapiens
gtaatcgtggagtcctgataaaataagtaaccaaggaggacgtgcccgaggttggaaagaacaattgctctaagagacagctaatcacaaccacccactcrtacaacaatcctgttcccaaataccttgctccacacataggcccagcagcacaacctcgttctacacacagctcctcagcaccaccctccagcccctgcc

SEQ ID NO: 491122 - DNA, 201 bp, Homo sapiens
gtttgctaatagctcacagatttatgtttgtgaaaaaagaaatactggttgttagaaaaggaagttgttatattgttttctgagatgaaacagttataagrtacatagaaatcttacctttaatgcaaactttatgttttaatccttcataagatttgacggtcagctgccaggtatacatcattaccagcactgtagtaa

SEQ ID NO: 491123 - DNA, 201 bp, Homo sapiens
tcccattcccaccatggggtgaagcccctctattcccttagactcgccccagggttgcattttaaagcagcaaggaggacggggtcccaggtggggaaggrcaattgttctgagagacagctaatcagagacaacccactagcacaatcctattaaaattctaaaatgtaattgtgatggttaatactgagtgtcaacttg

SEQ ID NO: 491124 - DNA, 201 bp, Homo sapiens
ttatatcaatgaaattcaagcatctatacttgaagggaaaaaaatctgcaaattcaaatgtatacacattcagaacatgcattttgttatagtaaatggastttttaatgatccattcagtgaggaaaatttgtttcccagcaggaattccatagatttcaaaactctctgaatgcacaataataaaattactcaagctca

SEQ ID NO: 491125 - DNA, 201 bp, Homo sapiens
cctaaaaatcatttctcaattgcatattatttgatcttcagttttgtcatctgcctgcacttggtacaaattctgtgtcattctagaggtaattttgcaaggcaagccagtcagtattgtgacagcagatgatggaaaaaggaatgctgccttcttttgtccctgcaaagaataagagggaaggggagcgggtgggggcac

SEQ ID NO: 491126 - DNA, 201 bp, Homo sapiens
aggtaagctgatttgttcagacatctgttcgacatatttgacaagtcactgatagggaacacaaaatgaacaggatccctgatctcaagaaggctgcaggcccttacggatcaaaacgaagcaaacgaaaggacactggagtgcaatagatgctagaataaatgcagattttacatatgcaatgaaagaggagaggtaaat

SEQ ID NO: 491127 - DNA, 201 bp, Homo sapiens
gtcaagaggagcacatcagcagaaaaagaagctgctggacatcgtgaagaacacatcggtggaagaagacacaagctatttctcgacaaggctgtcgagarcacgccagcgggagagcacgccaataggcgctgccacgccagcaggccatcaaccggcgggacgaggcagagtttggcggaggcagtcaaaggagagccg

SEQ ID NO: 491128 - DNA, 201 bp, Homo sapiens
cattttgttcatttctttaagattttttaaattgtttttaaaaatatttttaaaacagtgaaaaatatactaacaaagaccacatagataaatgtatatamggccagtttttaaaacatttttaaaagaggcagtgcagtcagttcagcaacatgtcgcctgacatccttaagtacacattgtcaaattgacccatacggt

SEQ ID NO: 491129 - DNA, 201 bp, Homo sapiens
aggggagcgggtgggggcacatgcaaggattctattgctttttcatctttctgttatcattgtctgtgtcagctcctcaatgtagggggaccatttagtctttgcatctacaaaaaacaagccatttttttctttttactaacctaatttttaaaaatcatttaattgggcccagaggctgcgcaatggaaggatacggag

SEQ ID NO: 491130 - DNA, 201 bp, Homo sapiens
gacaagtgctgaggacactgtaacattattattatgactgattaaccgccaacagcatgatttcagaaagaaaaggaaggaaaaaagccagttatcattayacacaagcagcctactgtcagtccttgaaaataaaaatttgagatagaagacaatgaatgctatattcatgcgtcagtctattctctttatgtagatttc

SEQ ID NO: 491131 - DNA, 201 bp, Homo sapiens
ccgccaacagcatgatttcagaaagaaaaggaaggaaaaaagccagttatcattatacacaagcagcctactgtcagtccttgaaaataaaaatttgagayagaagacaatgaatgctatattcatgcgtcagtctattctctttatgtagatttcatattaatctgtttattataaatatgtttcacatgtcacttttct

SEQ ID NO: 491132 - DNA, 201 bp, Homo sapiens
gtcggatcacgaggtcaggagatggagaccatcctggctaacaaggtaaaaccccgtctctactaaaaacacaaaaaaattagctgggcatggtagcaggygcctgtagtcccagctacttgagaggctgaggcaggagaaccgcgtgaacccaggaggcggagcttgcagtgagcccagatggagccactgcactccagc

SEQ ID NO: 491133 - DNA, 201 bp, Homo sapiens
tgggtggctttatgtgcagggacatttgagcatgatagagatcattttagttgagaatgtttttgaggttttaccaggctctcacttcaatcaaagatcawctcttctgtggaatgctgtattagatttagggtaacattgcctcaacattgcacctagagaattcagttaacaccaaaatatgcatgcatgtaattgaac

SEQ ID NO: 491134 - DNA, 201 bp, Homo sapiens
cattataaattatatagattaaaagctatttaaaaggaattagattcttattcatacgttaagccttgttctataaatatatgaagtcttctagaaaagcyggcattgtcttttaaatatgtgaataaaatgtgataaaatttatactgtgactaaacacagaagaaaaatccaaatgtaacatttgatcagaatggttct

SEQ ID NO: 491135 - DNA, 201 bp, Homo sapiens
acattttctataaatttaatgtatcaggatatactataaatgatatagaactgtagtaaaagtcatttgtaatggctctagagaaaagaactagaaatcakattgcaaagttaatttaacttgctttattttaatagatattatttaagccagaagaaaattcactagaaacattagaaaaatcataggttacattcttca

SEQ ID NO: 491136 - DNA, 201 bp, Homo sapiens
aatatattactattatatattatctatatagcagatattattgtcaactatagtaatatattattgttaactgtaggaatcctacagagctatagaatgcyagaacttatttctaagatctactgtatctttagaatgttttaggaaactgccaagcagccaagttttgcaaatagaacgcccctagtcctataagccctg

SEQ ID NO: 491137 - DNA, 201 bp, Homo sapiens
atagagaaacaagtaagtcacagagatggctgagaacagtaacctctgatactcaaatagatagagcataaatattttcacacctgtgtatttccaaaggmacctttatttctactaactgtcatttcgtgagttctacttcatcttcgtaaaatatatagttggcctataatatagatgtatatttttaaaacttgtaag

SEQ ID NO: 491138 - DNA, 201 bp, Homo sapiens
ataaaacagatatttttcaacttttctctctgctagtccttatccccataatgcctaataaaaactggcatttagatacagattgtacattatgcagaagrtaacagatgagcttatcagctgttttacaattacaagggtaaatttattgataaaactgtgcaacatgaactaacctgactcttgtcagtaacatgtgac

SEQ ID NO: 491139 - DNA, 201 bp, Homo sapiens
ccacagtagaatatacttgccttggtcgtatttacccatgttagaggaactaccgcaaaaaagcacaataatttattttaaatttaattccaatcaaaacsatttacacagaaaactgatgtgataacaattcctaaacttcaaaaacttttttaaaactgaaatgtaacagatgttcaatattgtgtccggaattggtgg

SEQ ID NO: 491140 - DNA, 201 bp, Homo sapiens
aataaagatgaatatgtacatatgtctgtacatgtacacacacaacagagaaataaataatttagctctttgttttaaacctgtttaagaatacaagtggwtacaggaatatgtgttagaaggaatgggtctctcaatttcagtgctaaaccatttaattaggctgttaagaattcaattcatcaaaaataaataacttca

SEQ ID NO: 491141 - DNA, 201 bp, Homo sapiens
tccacaaacttacaaaaggcttgttttaaatttagtgttttaacctcaaatatatttttcttacaacttctttagtaatatttgcaccaaaatgtacttaytgtgccatcttcagggcgtttttaggaaacagctccatgaagtaaattagaaattactttccttggtggggttttaaattattactttaaagctatagaa

SEQ ID NO: 491142 - DNA, 201 bp, Homo sapiens
atgcaataattgttctcatttttcacactgtttttaaactgcagcttcagcattacttcaaccacagtagaatatacttgccttggtcgtatttacccatrttagaggaactaccgcaaaaaagcacaataatttattttaaatttaattccaatcaaaaccatttacacagaaaactgatgtgataacaattcctaaact

SEQ ID NO: 491143 - DNA, 201 bp, Homo sapiens
aatcatgggtagaaaaccctatcatgtccttggtactgtcatggtgtattaataaatgaggattttcaagggaacttctcccttgctgtgaggagagcaartatcacattctgaaattaaaatgcaggctatttattgtctctctgggttttgatctccaaatcaaatagcaaaaagatccttgtccattaagaattaacc

SEQ ID NO: 491144 - DNA, 201 bp, Homo sapiens
ggaaaagctgagagacatgaccaacagccactaggagacaaaatgttgttgacagtaaagctaatgtccttggccaccacaggaacaataaaatgcagcartatgtaattttcacagaagacaaaagaattgatgggcccatccaactcctcattgaatattttctctctgtttagaagaattgtgtccgtttcttcaaat

SEQ ID NO: 491145 - DNA, 201 bp, Homo sapiens
attgagctcaaagactacttttgcgactacatataattgtaacacaatgatgaatacatctatttatttatttgacaatcatgggtagaaaaccctatcaygtccttggtactgtcatggtgtattaataaatgaggattttcaagggaacttctcccttgctgtgaggagagcaagtatcacattctgaaattaaaatgc

SEQ ID NO: 491146 - DNA, 201 bp, Homo sapiens
atatttattcttagtgaacctcagatagttattttattattgtggttccagtttccaagggtcattttatactcattctattgctaaaattcacctcttaygaaatgtcacagggaagaagagtttgaatgggtaaaacagatagaagacaaagtaccaggatcagattaaatgcatttaagaaatctgaagaaattcaag

SEQ ID NO: 491147 - DNA, 201 bp, Homo sapiens
acaagtaaaaaattatttctactattatagtgatatataatatccttaaaatcaatgatgaaaattatacataatttttaattacttttgttcaataattkttaaaacatctatactgaaagttggaataattcctggatatggtgactatatatcagaaaatcagacatttaaatatgtagctcaattcttttatcattt

SEQ ID NO: 491148 - DNA, 201 bp, Homo sapiens
ggtaaaacagatagaagacaaagtaccaggatcagattaaatgcatttaagaaatctgaagaaattcaagggaaaaacagaaaaaagtattagcaaaaacrcataacctgccattgtgaggggtgactgtggcaaggcacttgaaattgccaagagaattaccagtcatgtctcagccctgcctcctgtggttgtcaaaat

SEQ ID NO: 491149 - DNA, 201 bp, Homo sapiens
accaaacagcactctgtaaaaacacaccaatcagcactctgtgtctagctaaaggattgtaaatgcaccaatcagcactctgtaaaaacgcaccaatcagygctctgtgtctagctaaaggattgtaaatgtaccaatcagcactctgtaaaaactcaccaatcagcgctgtgtctagctaaagatttgtaaatgcaccaa

SEQ ID NO: 491150 - DNA, 201 bp, Homo sapiens
aggtgtgagccactgcacccagcctaatgatcgacattctaactggctggcgtgagatggtatctcattgtggttttgatttgccaaataggaacagctcyggtctgcagctcccagcgagatcaacgcagaaggtgggtgatttctgcatttccaactgaggtacctggctcctctcattgggactggttagacagtggg

SEQ ID NO: 491151 - DNA, 201 bp, Homo sapiens
ggagcaaagtcacgtcttacatggcagcaggcaagagtgtgttcaggggaactgccctttataaaaccatcaggatcttatgagacttattcactatcacragaacagaacaggaaaaaccaactcccatgattcaattacctcccaccactaggtccctcccacgacatgtgaggattgtgggaactacaattcaaaatg

SEQ ID NO: 491152 - DNA, 201 bp, Homo sapiens
actgagaaaggtaggagggggaaaggggggtgggtaaaggatgagaaattacttaataggcacaacacacattattcaggtaatggttacactgaaagctyagatttccccatggtgcaatatatccatgcaacaaaactctacttgtaccctttaaatttatacacatttttaaaagtgtattctatttgtagtgcacaa

SEQ ID NO: 491153 - DNA, 201 bp, Homo sapiens
aaaacacatataatagattatatagaaagaatatagagagaacatgtaatatatataataaacttgagtttatattctttatgaagtacagaatgctgtayattttactcagaactctatcataggtgttttacttgttagtattttatctaaaacctgtataacatttaaattgactgaataagagttgtcaggttaaaa

SEQ ID NO: 491154 - DNA, 201 bp, Homo sapiens
tttatactcatgcactaggtagaaaagtgacttggacaaagtttgccaagttactgacagaattcagaattaaactcgacactctgaattctaaaacaatrcagtatcaaaaaggataaatactccaagacaaagagactcattcaaaggaaagtggcacaggatttttggcattaaaatacatgtgttatcggatgtatt

SEQ ID NO: 491155 - DNA, 201 bp, Homo sapiens
tatttgtttgttagtttacattattttgagactaagattgagattttcctagttgtgtaattgcaaccttaataaaaataaaagattgatgcctttgatayttttcttcaaaataaatagatacaaaacaacaacaacaacaaaaccaaatacttgtaaccttagtctgggttcagcattctcccagctcttcatgggggt

SEQ ID NO: 491156 - DNA, 201 bp, Homo sapiens
aacagtatttccaactaagattacaactatgcagtagattcagaaatggcatcaacaatgtttaatgtcaaaatgcagtcaaagccaacatttgctataamtgagaaaaccattatataggtgcctttgtttgctgtagatatgaatgacgttaatttactttgaagagattcttagggaggttgcagaactctggagttc

SEQ ID NO: 491157 - DNA, 201 bp, Homo sapiens
agagtacattagaggcaagatgatgggctccagggaaagcaaaggcgagaagggctatgacagcttcagagaaacttaataggcctaattagacagagagyacattttgagaattcgtggtaaataaatacatggagcagagaatcttgtaaaccacatagcagaacttagaactgacacagtagaaaactgggaaacatt

SEQ ID NO: 491158 - DNA, 201 bp, Homo sapiens
cctgtgcacagttctgtatgcaatgctcatggaaggattatgaatgttagtacatattaatgttgctgctgtttgagactgttcaggtgtgttgcactctrtgagaaatgtgaagaaacataacagccccaacctctaggtaattaaaatcttgttggaaagaaaagggaaagatatgtgtaaccgcacaaagcaatgcta

SEQ ID NO: 491159 - DNA, 201 bp, Homo sapiens
gtagagaaacaagtacccattgtaagtacacagacagagaggtgacgccaactggacttcctgggtcgactggggagttggagaacttttctgtctagctrgagaattgtaaatgcaccaaacagcactctgtaaaaacacaccaatcagcactctgtgtctagctaaaggattgtaaatgcaccaatcagcactctgtaa

SEQ ID NO: 491160 - DNA, 201 bp, Homo sapiens
aatcagcgctgtgtctagctaaagatttgtaaatgcaccaattagcactctgtaaaaacgcaccaatcagtgctctgtgtctagctaaaggtttgtaaacrcaccaatcagcactctgtaaaaacgcaccaatgagtgctctgtgtctagctaaaggtttgtaaacgcaccaatcagcactctgtaaaaacgcaccaatga

SEQ ID NO: 491161 - DNA, 201 bp, Homo sapiens
aataaaaagctccaaaattaaaattggatttggaatcaatgaattgggttctagatctgatttgtccatgatccaaagtcacttaacctctatgacctccrttttcttaactgcaaagtagtggtgctatgctattgagctcaaagactacttttgcgactacatataattgtaacacaatgatgaatacatctatttatt

SEQ ID NO: 491162 - DNA, 201 bp, Homo sapiens
gctggacatggtggtgtgtgcttgtaatcccagctcaggaggctgaggcacgagaattgcttgaactgggaggcagagattgcagtgaggcgagattgggycattgaactccagcatgagcaacagggcaagactcagtctcaaaaaaaaaaaattaaaattaaaaataaaataaaaagctccaaaattaaaattggattt

SEQ ID NO: 491163 - DNA, 201 bp, Homo sapiens
cagctactaactcatctacaaaattaacttacttaggtttaaaaaagagagtggggacagggacatttattggatcccatgagagagaatttacaactgcrtcaagatagataaatgatgtcatctgcatcacctctttccttccacgggctctgtttctgtctatgctgactccctcctttcttaatcagttctcatctc

SEQ ID NO: 491164 - DNA, 201 bp, Homo sapiens
tgtaagcaattgaaacacaatggccatatgtgtacttaaacataactaaacatagaaaaggtagagtgtaaatacaagattctaatcttttgggactaccrtcatatatgtggttcattggtgctggaaacacagttatgcagcacgtgacttgactgtgtgtataaagaaataaaatatatgtatatgcatactatatat

SEQ ID NO: 491165 - DNA, 201 bp, Homo sapiens
tgttagccaggatggtctccatctcctgtcctcgtgatccacccaccctggcctcccaaagtgctgggattacaggcgtgagccactgcacccggacagcrtagtttatctagatgtacagtcaaacactgtttaatgatggggatacattctgagtacggcatcattagccattttcctcatagtgtgactatcataggc

SEQ ID NO: 491166 - DNA, 201 bp, Homo sapiens
aggcaagataatgctatagctgttagtaacctaagggagacagcccttagtggggaaagtgtagagaacaatagtgctacagaaacaggagaaatcaaagycctcagacctccccctgcttgcctagagacgtctggtgcactttcaaggagatatcatcccctacaaagctgttcctggtgtttattttaagtagactaa

SEQ ID NO: 491167 - DNA, 201 bp, Homo sapiens; identical to SEQ ID NO: 383062

SEQ ID NO: 491168 - DNA, 201 bp, Homo sapiens
gccatgaagtttagaggaaataagagagcctgcagcggtctgaaactcctccacccacctccaacacacacacatacacaaacacacacacacaaaggctstatttgcaacatcacttaagattccatttgaggctttccccttgttaagacttaagggtgttgtttttaagacatccagaaatctcacagtcctgccatg

SEQ ID NO: 491169 - DNA, 201 bp, Homo sapiens
aaatgctatcaggagggactcaactcttcatccttctgagactgataaattgaaagccatgaagtttagaggaaataagagagcctgcagcggtctgaaastcctccacccacctccaacacacacacatacacaaacacacacacacaaaggctctatttgcaacatcacttaagattccatttgaggctttccccttgt

SEQ ID NO: 491170 - DNA, 201 bp, Homo sapiens
atgcatttacttatattgaccctgtttccaaaatgatttgagatgacttcaaaaggaattaaggatttttttcaagttaatttggaattaagtgcattagygatcaaacacttagaatcatagaagagtagtttcagtggtaactctggtgtgcacaagaataatggactgctgggtccaaggtccttagactcaaacagc

SEQ ID NO: 491171 - DNA, 201 bp, Homo sapiens
catcaaatataatttactgtgaggttgtttgtttcagcatcaaatataatttactgtgactcgtacagattctgaggattaacgagaggagattctgcttyacttttcaaacttatttttctgagcccactttcctctagaaaaagttgagatcgctgacattattttataaacaagtaactgaacatgagggaaaagggt

SEQ ID NO: 491172 - DNA, 201 bp, Homo sapiens
cctgcttggaatgggggcaagatttttccagaataaaataacaaagatcacattgttgagtagtacgatataagcatttgtaaatccaccgtgtaatttcytccagaaaggctgcaccactctatgttcccataagctatggatgacaagcatcaattctccatattcttatcaacacagcttcttttccatttggggact

SEQ ID NO: 491173 - DNA, 201 bp, Homo sapiens
tattgagagactggcttatttataaaaggatgagttcagaccccttctctcactctctcaagtgcctgcgagtgcgtgctctctctctcttcctccttctygcacatgtcgtcccttctgccatgttatgacacagcaagaaggccccacaagatgcctgccccttgatctgggacttaccagcctccagaactgtaagct

SEQ ID NO: 491174 - DNA, 201 bp, Homo sapiens
tttgaaggattttaatgacatgagacaatttttacaatataatatcaagctagaaaatcactcttttctctttttgagacagagtctccctctgtcgcccmggctctgtctccctctgtcgttccctctgtgcagtggcacgatctcctctcactgcaacctctgcctccggattcaagtgattctccttcctcagcctcc

SEQ ID NO: 491175 - DNA, 201 bp, Homo sapiens
caatcttatttgtgttcacccataacacatatattagataacaatattccagataattgacacattgaacaagttccattaaaaacaaatatctagttttratattttctgaataacatgttatgatagtttcttaccaacgttagaagtcagcctgttactaaaaggagttctaagtaatttaagtaaactatagccaga

SEQ ID NO: 491176 - DNA, 201 bp, Homo sapiens
tgactgcctgagtctctggttttgataagtcacttcacatgactctaagatgttggagggttaaaacagtgtggggactgaaggatgaggagagaatacayagagctcaatagaagaccagtgaaaaagttcaggtatcaagtgatgaaatccattcatcagaatagtagcaaccagaatggacacttgaaaccaagacca

SEQ ID NO: 491177 - DNA, 201 bp, Homo sapiens
tagttcagtgatctcatgacatataccaaacactttcttccatgttaaaaaaaaaaaaaaaaagttcatctagcatctgatgcatacatttagaaacaacyccaatattgaccaaggtttttcaaatgccttacctcacaactggaacttctaagcaaaagctaatgaggccatctgggaaagatcaccaggaggccttac

SEQ ID NO: 491178 - DNA, 201 bp, Homo sapiens
caagaaaaagagctatcataaaaagcaggggcttgtttttcaaggtaaaatcagagaatggaactggtcaaaggaatattttagcaaatgccaatagtctraaatgtaagaaagtacagtgcgtaacacacaaaaagttacggacccactcactgcagcaattatctcatcaggggaagaattcaagaatgcctttgtgct

SEQ ID NO: 491179 - DNA, 201 bp, Homo sapiens
agcaaccagaatggacacttgaaaccaagaccacagttcctggggactgataagatgtggaggatgaagaaagagagagaaatcaaagactattccaatgytttggttatcagggaccagaagaatggttatcccattgaataagtggaaatgttataaaatgaagtcagtttgtgaacaaacatcagttttggatatatt

SEQ ID NO: 491180 - DNA, 201 bp, Homo sapiens
agtgtcatttatgcagtagttactttatatatgcattattctacctaattttcacaacattataggttagaaactattttgaccctcatttttttttttttaataaaaagtcaaagtcagctacttagggaatcttaaggaagaaaatatatgttagtagaaggtaaaaatattcttaattttaattatcacactgaatgg

SEQ ID NO: 491181 - DNA, 201 bp, Homo sapiens
aatggacacttgaaaccaagaccacagttcctggggactgataagatgtggaggatgaagaaagagagagaaatcaaagactattccaatgctttggttakcagggaccagaagaatggttatcccattgaataagtggaaatgttataaaatgaagtcagtttgtgaacaaacatcagttttggatatattgggtttaga

SEQ ID NO: 491182 - DNA, 201 bp, Homo sapiens
accactcactcaacacaatttctttcaagagggtggcattcaaatcatgagcttattctaaccgatgtttattccaagcagtgattcctagcctaaattayagaaaggtgggcaaatgattgaagaaattttctgtagaagaaactgttataaaaactggtcttacagagaataatgcatattccaaatatacttaattag

SEQ ID NO: 491183 - DNA, 201 bp, Homo sapiens
acacatctagtccgaaccaaggtagggaccccagagttctaaataccagaaaggtccaacagaccctggaactgcagtctaaggtgatgaatgggtttgtsgggggaagatgatagtcacagggagctatgaaggagtctcacgtgagccaacagtatagattctgaaggcgtttatggcaggagaaacaaaatacgcagg

SEQ ID NO: 491184 - DNA, 201 bp, Homo sapiens; identical to SEQ ID NO: 28510

SEQ ID NO: 491185 - DNA, 201 bp, Homo sapiens
aggtttctccattactttataatatttcttctatttctctgctgtcttcccagccaaacttgcattcagaagcaggcatcttactagcattgctctcatawacaaatccaggatatcagaagtacagagtcaaccataactaacattttaactaaaatttgttatgtcattctacagtttctcaacaaaatactctcacat

SEQ ID NO: 491186 - DNA, 201 bp, Homo sapiens
tgttatgtcattctacagtttctcaacaaaatactctcacatccttcaaacaaataaccactatattacttagaggctgtgaaggtagaagactttctcarttggaaacacgtttgggtctatggtagggttgtgatttcaatttttgcagttagctaaggcaaagagacacactgcaaattttcttcacatgtctggaat

SEQ ID NO: 491187 - DNA, 201 bp, Homo sapiens; identical to SEQ ID NO: 28511

SEQ ID NO: 491188 - DNA, 201 bp, Homo sapiens
tctaggctgagaatgtcagagcagcactgaaccttagacaccatcctgtccattcctctcattttagtcaggctcaaacaagtaaaataattggctcgagrccagagtctgtcccaaaactcaggtcattcaccccaagggaaggagcacttggtgttaccttccctgcagtttagtgagtcatgcccaggtcaacagaga

SEQ ID NO: 491189 - DNA, 201 bp, Homo sapiens
ggatttgtatctcagatcttaaggaatataaaagatactgaactcagaaacattactaaaaaggtgtaatcattccaaatattttttagaaatacaatttkcacaatgaatcctattattttggtgcaaattgtatactgtgtgggtgtgctttttttattaaaaaaactgtatgcataaaaagctagatggtgtgaagtg

SEQ ID NO: 491190 - DNA, 201 bp, Homo sapiens
tccctgcttttgggcacttgttgtctttatggatttccagtcatgactagaagagtaacgatgttactgcctttggctaatagcaatgaacagctgctgaraaggacccacctggttagcattactccttcaacaaacacacaaatgcctgccggggcatgcatagcctgcaccagacacagaggctccaccctcagtgag

SEQ ID NO: 491191 - DNA, 201 bp, Homo sapiens
aacattatgtgagaacaaaaatgttctaaaattgatttatggtgatggcagtacgactcagtaaatttgctaaaaatcagtgagttgtgcacttaatatargtaattttttttttctcactctgtcacccaggctagcatgcaatggcaccatcttggttcactgcaacctctgcctcccaggctcaagtgatccttccac

SEQ ID NO: 491192 - DNA, 201 bp, Homo sapiens
aagaagttcagtggtcttcataagcactactagtgtaaatccgtaacagccatagatgagtaaacttacagtcaccttcagaaaagcacatttactaatasttactgcatgcctaccatgtacatcagaaacaaaaggtttggggcattttgcagggagtaggtggagtgatttcccagcatcagaaattttttaaactac

SEQ ID NO: 491193 - DNA, 201 bp, Homo sapiens
tccatgttaaaaaaaaaaaaaaaaagttcatctagcatctgatgcatacatttagaaacaaccccaatattgaccaaggtttttcaaatgccttacctcayaactggaacttctaagcaaaagctaatgaggccatctgggaaagatcaccaggaggccttactactgccagtatttcacatggaacaatcgatagcatgt

SEQ ID NO: 491194 - DNA, 201 bp, Homo sapiens; identical to SEQ ID NO: 28513

SEQ ID NO: 491195 - DNA, 201 bp, Homo sapiens
cagcaagggaacaaaactggatggagaatgagtttgccaaattgacagaagtaggcttcagaaggctggtaataacaaacttctctgagctaaaggagcaygttctaacccatcacaagaaagctaaaaaccttgaaaaaaggttagacgaatggctaactagaataaacagtgtagagaagaccttaaatgacctgatgg

SEQ ID NO: 491196 - DNA, 201 bp, Homo sapiens
ccatcaatgatagactagattaagaaaatgtggcacatatacaccatggaatactatgtaaccattaaaaaaggatgagttcatgtcctttgcagggacayggatgaagctggaaaccatcacgttgtgcacgtgtacacattttatatatggtgagagatccctatctctcaccatatataaaaattaacccaagatgga

SEQ ID NO: 491197 - DNA, 201 bp, Homo sapiens
tatgtcctgccaccaacttacctcccacctcagaatcatcccagattaaaaacaaatgctttagaaaatatgttgtatttttagaaaaaaaaaatgcaacyattcatgtgaatgatgcagctgcaaagtttaacaggagatcaaagacattttgacatttaggacataaatacttggcccttgggtggccaccatcactgt

SEQ ID NO: 491198 - DNA, 201 bp, Homo sapiens
aatacttgttgaaggctgtttctcatgtataaatatgctgaaaatgtccttcaggctcataatggtttatcaataactgtgacccctgagcaaagaaatgragagagaaaaaagaagtcacaggcagcactctgtatctctgagaaaacactcaattcttcattataatacgaaggcaggaggaactgtacaaatcatgtt

SEQ ID NO: 491199 - DNA, 201 bp, Homo sapiens; identical to SEQ ID NO: 28517

SEQ ID NO: 491200 - DNA, 201 bp, Homo sapiens; identical to SEQ ID NO: 28519

SEQ ID NO: 491201 - DNA, 201 bp, Homo sapiens
aatgtaagaaagtacagtgcgtaacacacaaaaagttacggacccactcactgcagcaattatctcatcaggggaagaattcaagaatgcctttgtgcttrctattctctctccctggaatgctattccccctctggattgtgctaaaatatcacctcgtcaaagacaccctgaccctatctgaactattattcttattat

SEQ ID NO: 491202 - DNA, 201 bp, Homo sapiens
ccttgtttgtgggccattattactcctaaatattttaaatgtctttgtctatcactggggagattcacctgtgatatgagagatgcccaatgtacatttasttaaacaaaaataagaatacactccaatgcactataacagacaaacaaatgaatactgggtatcctgtagcaaggttccaaattcacagcaattgaatct

SEQ ID NO: 491203 - DNA, 201 bp, Homo sapiens
caatgcactataacagacaaacaaatgaatactgggtatcctgtagcaaggttccaaattcacagcaattgaatcttagaaagaacattaaaggtcatccrgtccagcggactgcaaatgtcaggcttcagtgaactttttactgatctatgtcaaaatgaggacaatgtaataagttttcataaggctaagttttttaaa

SEQ ID NO: 491204 - DNA, 201 bp, Homo sapiens
gtggccaaggctggtcttgaacccctcaagcaatccacctgcctcagcctcctaaagtgctggaattacaggtgtgagccattgcatccagccctgaaatragtaaattttatgatatataaaatatgcctcaataaactagtaaaaaaaaagttaggtactcaattcacattttgtatatgtgccagaaattaacatagt

SEQ ID NO: 491205 - DNA, 201 bp, Homo sapiens
tctccaaagccatttgaggggaaagaaaactaaccttgatcttacaggtgtaagttaatcactctatttttgtcactctgtggacaataaaacatttatcaaaaaaaaaaaaagagcctagcttaaagctttccaatcttgtacagaatataaagaaatttaggaagttagagtaaaaaagaatggtgatgatgaccataa

SEQ ID NO: 491206 - DNA, 201 bp, Homo sapiens
gtgggttttaagcactacctctacagaatatttttaaaaatcaaagtttgttcattcattcaacaaagtactgcaagaccatctctgcccttaagaagacragcagaaaaaactggcaatgcaaaaattataggataaagtggaaagcaccgtaataaagatgttatggaaaggctggggtggggggctgcatttaaatca

SEQ ID NO: 491207 - DNA, 201 bp, Homo sapiens
tcactgtattcaacaggcagcataatcagccactttttgcaggccgaaaatactccccccttcctcttccaaaagctcacctgagcaaatcataaaatgtrcttttgttacccacttgcacctgaaaatcatatcacaacaatgaacgtgccatatgtccagctgcatgaactattcttgtggctataggatcagtagctg

SEQ ID NO: 491208 - DNA, 201 bp, Homo sapiens
ccagactatttttcttacttttcttgcagttccacttagtaaccaatgcattttacattctaataactactgtcaaaacaggattaaaatcctgaaacagyaccctcagacttgctggattatcccagttatatattctcccaaagaataagtgaaaacccacattctgaaaatgttgtcaaagcggtactagaaagcaaa

SEQ ID NO: 491209 - DNA, 201 bp, Homo sapiens
aaaatcctgaaacagcaccctcagacttgctggattatcccagttatatattctcccaaagaataagtgaaaacccacattctgaaaatgttgtcaaagcrgtactagaaagcaaattaaatgatccaatattcagtttaactttctcttatctctctccaatccattctccacccagcagccagtgtgttcaaaatataa

SEQ ID NO: 491210 - DNA, 201 bp, Homo sapiens
aaacccacattctgaaaatgttgtcaaagcggtactagaaagcaaattaaatgatccaatattcagtttaactttctcttatctctctccaatccattctycacccagcagccagtgtgttcaaaatataaatctgatcaggtcacattcccgcttaacactctccactggctttctctcaaggcaactcttgattaagac

SEQ ID NO: 491211 - DNA, 201 bp, Homo sapiens
gcctgatcttaagaaagaagttcagtggtcttcataagcactactagtgtaaatccgtaacagccatagatgagtaaacttacagtcaccttcagaaaagyacatttactaatagttactgcatgcctaccatgtacatcagaaacaaaaggtttggggcattttgcagggagtaggtggagtgatttcccagcatcagaa

SEQ ID NO: 491212 - DNA, 201 bp, Homo sapiens
cactttttgcaggccgaaaatactccccccttcctcttccaaaagctcacctgagcaaatcataaaatgtacttttgttacccacttgcacctgaaaatcrtatcacaacaatgaacgtgccatatgtccagctgcatgaactattcttgtggctataggatcagtagctgaggctgtccctgcttttgggcacttgttgt

SEQ ID NO: 491213 - DNA, 201 bp, Homo sapiens
ccatatgtccagctgcatgaactattcttgtggctataggatcagtagctgaggctgtccctgcttttgggcacttgttgtctttatggatttccagtcaygactagaagagtaacgatgttactgcctttggctaatagcaatgaacagctgctgaaaaggacccacctggttagcattactccttcaacaaacacacaa

SEQ ID NO: 491214 - DNA, 201 bp, Homo sapiens
cctggttagcattactccttcaacaaacacacaaatgcctgccggggcatgcatagcctgcaccagacacagaggctccaccctcagtgagaggtcacaaycctcatgccagagacaacgagaaaacaaattacttatgatgcttagagaatgcaaggcataacagggatcacaataataacaaagagttagtcaacaaca

SEQ ID NO: 491215 - DNA, 201 bp, Homo sapiens
acaaccctcatgccagagacaacgagaaaacaaattacttatgatgcttagagaatgcaaggcataacagggatcacaataataacaaagagttagtcaayaacaaagcttgttacagagatcttctagctcagattcagttcctgtttgtcaactgcagcaacttcacgctgaagtcatttccataccagctttattact

SEQ ID NO: 491216 - DNA, 201 bp, Homo sapiens; identical to SEQ ID NO: 28508

SEQ ID NO: 491217 - DNA, 201 bp, Homo sapiens; identical to SEQ ID NO: 28527

SEQ ID NO: 491218 - DNA, 201 bp, Homo sapiens
taaatattttaaatgtctttgtctatcactggggagattcacctgtgatatgagagatgcccaatgtacatttagttaaacaaaaataagaatacactccwatgcactataacagacaaacaaatgaatactgggtatcctgtagcaaggttccaaattcacagcaattgaatcttagaaagaacattaaaggtcatccgg

SEQ ID NO: 491219 - DNA, 201 bp, Homo sapiens
aacgtgccatatgtccagctgcatgaactattcttgtggctataggatcagtagctgaggctgtccctgcttttgggcacttgttgtctttatggatttcyagtcatgactagaagagtaacgatgttactgcctttggctaatagcaatgaacagctgctgaaaaggacccacctggttagcattactccttcaacaaac

SEQ ID NO: 491220 - DNA, 201 bp, Homo sapiens
aggatatcactgattgaagatcaaattaatgaaataaagcaagaagacaagattagagaaaaaagagtgaaaagaaatgaacaaagcctccaagaaatatrtgattatggataaagaccaaatatacgtttgattggtgtaccggagagttatggggagaatggaaccaagttagaaaacactcttcaggatattatccag

SEQ ID NO: 491221 - DNA, 201 bp, Homo sapiens
tgtggaagttccaatgccaatgtagattgatacatcttcttgccactcactgtattcaacaggcagcataatcagccactttttgcaggccgaaaatactscccccttcctcttccaaaagctcacctgagcaaatcataaaatgtacttttgttacccacttgcacctgaaaatcatatcacaacaatgaacgtgccata

SEQ ID NO: 491222 - DNA, 201 bp, Homo sapiens
gaaaatcatatcacaacaatgaacgtgccatatgtccagctgcatgaactattcttgtggctataggatcagtagctgaggctgtccctgcttttgggcayttgttgtctttatggatttccagtcatgactagaagagtaacgatgttactgcctttggctaatagcaatgaacagctgctgaaaaggacccacctggtt

SEQ ID NO: 491223 - DNA, 201 bp, Homo sapiens
tacatgaaaccactcattagactttatgttgtatgcttccacagatgacaaacctataataaagcacaatagtcttcatttccttctctaaaaaatgtcartagttcatatatatggaaaaatacttcaggtatgttatactgggctaaaattaagagaagaaaatggtggaacataaacacagcaattacatgaaaaaca

SEQ ID NO: 491224 - DNA, 201 bp, Homo sapiens
agtaacgatgttactgcctttggctaatagcaatgaacagctgctgaaaaggacccacctggttagcattactccttcaacaaacacacaaatgcctgccsgggcatgcatagcctgcaccagacacagaggctccaccctcagtgagaggtcacaaccctcatgccagagacaacgagaaaacaaattacttatgatgct

SEQ ID NO: 491225 - DNA, 201 bp, Homo sapiens
taaacataattaataaagaaaatatacaataccctcacctctgaccacccaaaaacggcggggggggcaaggttgtaaaaattacagaattgggatgcatrttaagataaaccttgtatttagggttctgttcaaaacttcaaaactgcccaagagacaatagttgaaagagtcttagatgatatatctgatgaagaccaa

SEQ ID NO: 491226 - DNA, 201 bp, Homo sapiens
cacattaaaatgaagatgaaaaggaaaactgtgctattacatacagagaacagtagtaatatttgtcctttactcacccaagagagggaaaatggggtaasgatttgggtctccaggaatcagggataaaggagacaaggagaacgtgcaatggggggacaggaaggcaggaatatttatataaaaccaagagactgtgtc

SEQ ID NO: 491227 - DNA, 201 bp, Homo sapiens
gagctatagacatcttactgcatggactccttatctccccacttcctatttgcttaaaatgtcaagaacaatcagatagtttcactatgaggaacaattgygtattagtctgttttcatgctgctgataaagacatatgcaagactaggcaatttacaaaaggaagaggtttaatggacttatagttccacatggctgggg

SEQ ID NO: 491228 - DNA, 201 bp, Homo sapiens
agtaaaggagaaataaaatcctttacagacaagcaaatgccgagagactctgtcaccaccaggcctgccttacaagagctcctgaaggaagcactaaacayggaaaggaataactggtagcagccactgcaaaaacatgccaaattgtaaagaccgtcgatgctatgaagaaactgcatcaattaacaggcaaaataacca

SEQ ID NO: 491229 - DNA, 201 bp, Homo sapiens; identical to SEQ ID NO: 28534

SEQ ID NO: 491230 - DNA, 201 bp, Homo sapiens
cccaatacaggagcacccagattcataaagcaagtccttagagacctacaaagagaattagactcccacacaataataatgggagactttaacaccccacwgtcaatattagacagatcaacgagacagaaggttaataacaaggatatccaggacttgaactcagctctggaccaagcagacctaatagacatctacaga

SEQ ID NO: 491231 - DNA, 201 bp, Homo sapiens
caatattcaaaatgaccaaagccaataaattaagtatttaagtgctgcctagatgcccactgcatgccatgtactaagaagggtaagaaacattaggaagsctgaattgagatcttcctccatttaccatctaaacaggaaggtacatgggaaaccactaaggaatggcacaagtcagtacataggtgcagtgacaaacac

SEQ ID NO: 491232 - DNA, 201 bp, Homo sapiens
tcagcgagataccaccttgccctaaccagaatagctattattaaaagtgaaaaaacaatagatgttggtgtggatgtggtgaaacgggaacgcttatatgytgctggtgggaatgtaaattcgtacaacctctatggaaaacagtctggagattcctcaaagaaattaaaatccaatccagcaatttcactaccgagtatc

SEQ ID NO: 491233 - DNA, 201 bp, Homo sapiens
aggtgtaatcattccaaatattttttagaaatacaattttcacaatgaatcctattattttggtgcaaattgtatactgtgtgggtgtgctttttttattwaaaaaactgtatgcataaaaagctagatggtgtgaagtgtttactcttacctgtacattttcttctgtaacctgaatttctgcagtgtaaacataatcaa

SEQ ID NO: 491234 - DNA, 201 bp, Homo sapiens; identical to SEQ ID NO: 28516

SEQ ID NO: 491235 - DNA, 201 bp, Homo sapiens
tcaaaatgaccaaagccaataaattaagtatttaagtgctgcctagatgcccactgcatgccatgtactaagaagggtaagaaacattaggaaggctgaaytgagatcttcctccatttaccatctaaacaggaaggtacatgggaaaccactaaggaatggcacaagtcagtacataggtgcagtgacaaacaccatagg

SEQ ID NO: 491236 - DNA, 201 bp, Homo sapiens
ttttgaggaatccagcttataaaatttggggatgcaaatataaaaatgttcactcattgcactgtttttataaaggtgaaaaatcatacatatatatatayagctgattaacatgagttagacccatatacactaatgtgtgaagacccctaagacactgttcagttcaaaaagcaagtttcagaacaagtatagtatttc

SEQ ID NO: 491237 - DNA, 201 bp, Homo sapiens
gcctagatgcccactgcatgccatgtactaagaagggtaagaaacattaggaaggctgaattgagatcttcctccatttaccatctaaacaggaaggtacrtgggaaaccactaaggaatggcacaagtcagtacataggtgcagtgacaaacaccataggaatgcaacgatgagctggaatgagttggagtaaagaggaa

SEQ ID NO: 491238 - DNA, 201 bp, Homo sapiens
aattccattttgaggaatccagcttataaaatttggggatgcaaatataaaaatgttcactcattgcactgtttttataaaggtgaaaaatcatacatatatatatatagctgattaacatgagttagacccatatacactaatgtgtgaagacccctaagacactgttcagttcaaaaagcaagtttcagaacaagtata

SEQ ID NO: 491239 - DNA, 201 bp, Homo sapiens
taggaaggctgaattgagatcttcctccatttaccatctaaacaggaaggtacatgggaaaccactaaggaatggcacaagtcagtacataggtgcagtgrcaaacaccataggaatgcaacgatgagctggaatgagttggagtaaagaggaaagacttggtgaaggagatggggctccaatggggccttggaggaactt

SEQ ID NO: 491240 - DNA, 201 bp, Homo sapiens
catctaaacaggaaggtacatgggaaaccactaaggaatggcacaagtcagtacataggtgcagtgacaaacaccataggaatgcaacgatgagctggaaygagttggagtaaagaggaaagacttggtgaaggagatggggctccaatggggccttggaggaacttcaagttgttgtaacaggggagagaagaagagaag

SEQ ID NO: 491241 - DNA, 201 bp, Homo sapiens
ccttcaacacacattgatccacatgtcttctttcaccattaccttgtttgtgggccattattactcctaaatattttaaatgtctttgtctatcactgggkagattcacctgtgatatgagagatgcccaatgtacatttagttaaacaaaaataagaatacactccaatgcactataacagacaaacaaatgaatactgg

SEQ ID NO: 491242 - DNA, 201 bp, Homo sapiens
atgacatattagttcagtgatctcatgacatataccaaacactttcttccatgttaaaaaaaaaaaaaaaaagttcatctagcatctgatgcatacatttrgaaacaaccccaatattgaccaaggtttttcaaatgccttacctcacaactggaacttctaagcaaaagctaatgaggccatctgggaaagatcaccagg

SEQ ID NO: 491243 - DNA, 201 bp, Homo sapiens
atgcaacgatgagctggaatgagttggagtaaagaggaaagacttggtgaaggagatggggctccaatggggccttggaggaacttcaagttgttgtaacaggggagagaagaagagaagcataggaaaaggctggagaatcctggcttgtggacaagggagagttttaaaagcacatgatgatcttggatatataggata

SEQ ID NO: 491244 - DNA, 201 bp, Homo sapiens
gaagaccagtgaaaaagttcaggtatcaagtgatgaaatccattcatcagaatagtagcaaccagaatggacacttgaaaccaagaccacagttcctgggractgataagatgtggaggatgaagaaagagagagaaatcaaagactattccaatgctttggttatcagggaccagaagaatggttatcccattgaataag

SEQ ID NO: 491245 - DNA, 201 bp, Homo sapiens; identical to SEQ ID NO: 28504

SEQ ID NO: 491246 - DNA, 201 bp, Homo sapiens
agtagcaaccagaatggacacttgaaaccaagaccacagttcctggggactgataagatgtggaggatgaagaaagagagagaaatcaaagactattccartgctttggttatcagggaccagaagaatggttatcccattgaataagtggaaatgttataaaatgaagtcagtttgtgaacaaacatcagttttggatat

SEQ ID NO: 491247 - DNA, 201 bp, Homo sapiens; identical to SEQ ID NO: 28505

SEQ ID NO: 491248 - DNA, 201 bp, Homo sapiens; identical to SEQ ID NO: 28506

SEQ ID NO: 491249 - DNA, 201 bp, Homo sapiens; identical to SEQ ID NO: 28507

SEQ ID NO: 491250 - DNA, 201 bp, Homo sapiens
aggctatactagcattgctacatgaattattctttcaagacttaggacataaaattaaccaaaaaaatcagggtcccatgaggaggggggcaagaattaastgcaaattaatgaacacaagacaactttttgaagcaatggttataaaactttataaatttaataaaaatcattagattgcacaattataatgggtggatt

SEQ ID NO: 491251 - DNA, 201 bp, Homo sapiens
aaatcattagattgcacaattataatgggtggatttatggtatgtaaattatacctcaataaagctattacataaaaaatcagggcaccaattttttaacyaggcttaaaaaatgaagtctaaaaatatcatacttgtatatatatcaaagaacaagcaaacatcattattaattgctgcacttctcttcctttcctgacc

SEQ ID NO: 491252 - DNA, 201 bp, Homo sapiens; identical to SEQ ID NO: 28528

SEQ ID NO: 491253 - DNA, 201 bp, Homo sapiens
cagggcatggtggctcacgcctgtaatctcagcactctgggaggccaaggtgggcggatgacctgaggtcaggagtccaagaccagcctggacaatatggygaaaccccgtctctacaaaaaatacaaaaagtagccaggcatggtggcacacacctgtactcccagctacttgggaggctgaggaggcaggattgcttga

SEQ ID NO: 491254 - DNA, 201 bp, Homo sapiens; identical to SEQ ID NO: 28529

SEQ ID NO: 491255 - DNA, 201 bp, Homo sapiens; identical to SEQ ID NO: 28530

SEQ ID NO: 491256 - DNA, 201 bp, Homo sapiens; identical to SEQ ID NO: 153007

SEQ ID NO: 491257 - DNA, 201 bp, Homo sapiens
atatatatatatacacacacacacacacacacacatacatatacgtatgtagacatatatgtatatacatgtgtgtacatatatacgtgtatatacgtacrtgtgtgtgtgtatatatatatatatatatatgatggaatactactctgccataaaaaaagaaagaaataatgtcttttgcagcaacttggatgaaaccgg

SEQ ID NO: 491258 - DNA, 201 bp, Homo sapiens
ataacaatgtctcctccccaactgcagagatgaggggtctgaagggcctgaagagcagctaaagcaagggctccttgaaaacagcaacaggccctccctcygccacagggaaatgccagcagtagcagtaggccatggaaccagcatgcaaggagtgggctgcttctattggtctacttttctactccaccaaatgtatct

SEQ ID NO: 491259 - DNA, 201 bp, Homo sapiens
atctaataactttttaatttgcatttttatttgagtaactccaagcaattttatattaattataggttattctgtgggattgaaccactatcttcactatraatactatatccaacactacaagtgcttttcaaataagtcaataatagaaaaacatttttccttgtaagtgaattattacagtgttatataaaggaccat

SEQ ID NO: 491260 - DNA, 201 bp, Homo sapiens; identical to SEQ ID NO: 28512

SEQ ID NO: 491261 - DNA, 201 bp, Homo sapiens
aatcccagcactttgggaggcagaggcgggcggatcacaaggtcaggagatcgagaccatcctggctaacacagtgaaaccccgtctctactaaaaatacaaaaaaaaaaaaaaaaaaattagccaggcatggtgatggacacctgtagtcccagttactcaggaggctgaggcaggagaatggcaatgaacctgggaggc

SEQ ID NO: 491262 - DNA, 201 bp, Homo sapiens
agcccagggtccctgtgctgtgtgcagcctaaggacacggtgccctgtgtcccagccactccagccgtggctgaaaggggccaacatagagctcaggccgyggcctccaagggtgcaagcctcaagccttggcagcttccacgtggtgttgagcctgtgagtacacagaagtcaagaattgaggtttggtaacctccacct

SEQ ID NO: 491263 - DNA, 201 bp, Homo sapiens
cccaggcagaagtttgctgcaggggcggggtcctcatggggaacctctgctagggcagtgcagaagagaaatgtggggtcagagtccccacacagaatccytactggggtactgcctagtggagctgtgagaagagggccaccatcctccagaacccagaatggtatcactgatagcctgcaccatgtgcctggaaaagcc

SEQ ID NO: 491264 - DNA, 201 bp, Homo sapiens
tatgctatatacgttaaacacataaactacacacacataatatataatatacatatgaatccttccatatatgtatgtggaatatacattccattccttcyataatgaacatatatgctcattactctctaaagcaattgaacttttctgtttccctctaggaaataaaataagctaatcatgaaatgaaagacagtccct

SEQ ID NO: 491265 - DNA, 201 bp, Homo sapiens
cttcatctgataaataagacacctaccactataaggttgttgacaagactaagtgagattaagtgataaagtatgcaaatcacatttagcaacctaaaaaycagagtaggaaaacaagaaaaagagctatcataaaaagcaggggcttgtttttcaaggtaaaatcagagaatggaactggtcaaaggaatattttagcaa

SEQ ID NO: 491266 - DNA, 201 bp, Homo sapiens
gtttgtagtcccaactacttgggagactaaggtaggaagatcacctgtgcccaggaggtcaaggctacagtgagccatgatcgtgccactatactcctgcytgacagagtgagaccctgtctcaaaaaaaaacaaataaaaaaagagctctaaaatattgagaaataaattcattttaatgaaaagctggcaaacagcata

SEQ ID NO: 491267 - DNA, 201 bp, Homo sapiens; identical to SEQ ID NO: 28514

SEQ ID NO: 491268 - DNA, 201 bp, Homo sapiens; identical to SEQ ID NO: 28537

SEQ ID NO: 491269 - DNA, 201 bp, Homo sapiens
ggaggaacttcaagttgttgtaacaggggagagaagaagagaagcataggaaaaggctggagaatcctggcttgtggacaagggagagttttaaaagcacwtgatgatcttggatatataggataagataaaatgatgaaaggctgtgactgcctgagtctctggttttgataagtcacttcacatgactctaagatgttg

SEQ ID NO: 491270 - DNA, 201 bp, Homo sapiens
aatgcctttgtgcttgctattctctctccctggaatgctattccccctctggattgtgctaaaatatcacctcgtcaaagacaccctgaccctatctgaaytattattcttattattctctacccttttatcctgcttcatttttgtttactgtaatactactaacaatattacatatttgtttgctattagtttcaatca

SEQ ID NO: 491271 - DNA, 201 bp, Homo sapiens; identical to SEQ ID NO: 28518

SEQ ID NO: 491272 - DNA, 201 bp, Homo sapiens; identical to SEQ ID NO: 28520

SEQ ID NO: 491273 - DNA, 201 bp, Homo sapiens
cttccactataattcttcatttcataaaagtaaaatgtcaataacaaaagaaaatgtggtaagaaaagcacagatctgaatacattttttaaaatgcctayaactaaaatatttcatacctgtaaacatggcatgaaaataaggactacaggcggccagcaccactctatgagcagaaatttccatgtcttctgccacaat

SEQ ID NO: 491274 - DNA, 201 bp, Homo sapiens; identical to SEQ ID NO: 28521

SEQ ID NO: 491275 - DNA, 201 bp, Homo sapiens
gaagcataggaaaaggctggagaatcctggcttgtggacaagggagagttttaaaagcacatgatgatcttggatatataggataagataaaatgatgaarggctgtgactgcctgagtctctggttttgataagtcacttcacatgactctaagatgttggagggttaaaacagtgtggggactgaaggatgaggagaga

SEQ ID NO: 491276 - DNA, 201 bp, Homo sapiens
tgctggaagaagccttttctgtgtttggccaggtagagagggctgtagtcattgtggatgatcgaggaaggccctcaggaaaaggcattgttgagttctcmgggaagccagctgctgggaaagctctggacagacgcagtgaaggctccttcctgctaaccacatttcctcgtcctgtgactatggagcccatggaccagt

SEQ ID NO: 491277 - DNA, 201 bp, Homo sapiens
ccatatattaccccttcatgtcctaaagaagacattttctcttagagattttcattttagtatatctttaaaaaaaaatcttgtgttaacttgcctccttytttttcttgggtgaggacacccaggaatgacccttttgtgtctatgatactgctgttcacagcttttcttgataggcctagtacaatcttgggaacaggg

SEQ ID NO: 491278 - DNA, 201 bp, Homo sapiens
tcccatatattaccccttcatgtcctaaagaagacattttctcttagagattttcattttagtatatctttaaaaaaaaatcttgtgttaacttgcctccwtttttttcttgggtgaggacacccaggaatgacccttttgtgtctatgatactgctgttcacagcttttcttgataggcctagtacaatcttgggaacag

SEQ ID NO: 491279 - DNA, 201 bp, Homo sapiens
atacaccacaaaaaccaaacatcccccaatgaccttagccgcattgctccattcactcccaggtgagaattcaggtaaacgtccacaaaggtcacaggcarcgtacatacggttctattatatcccatatattaccccttcatgtcctaaagaagacattttctcttagagattttcattttagtatatctttaaaaaaaa

SEQ ID NO: 491280 - DNA, 201 bp, Homo sapiens
acccttaaaagaaggaccctttttggaccagccagaattctaccctggaaaagtgttagggattccttccaatagttagatctaccctgcctgtactactytagggagtatgctggaggcagaggacaagggaggggtggtattaaacaagtcaattctatgtagtatattatttaatcagttctgtgtggtgcattcctg

SEQ ID NO: 491281 - DNA, 201 bp, Homo sapiens
gtctcaaatgtgattgttgagggcctggggaaaccatggcaaagtagatccagttagagcccattaatcttgatcattctgtttttttggtttgtttgttkttttttttttttttttttttttgtccatcttgtttcatttgcttgccctgcccccgagatggagtcttactctgtcgcccaggctggagtgtagtggcac

SEQ ID NO: 491282 - DNA, 201 bp, Homo sapiens
tatactgtcacactgtgtattccctgcattgaatgcctttctattgacattgtctataaaaattgtgggaagttttctgcaccctgaaatttctgttatgsggattaaatatccactatccgtgtttttccgagtcttacagcagaaagggtaaatgcagccctcacagcagcctgttgttcgtcctgcaattgtgtttcc

SEQ ID NO: 491283 - DNA, 201 bp, Homo sapiens
ctggaggctgagaagtgcaagatcaaggtgccggcagtcttggtgtctggtgaaggcctgctttctcatagaggcttccttcttgctgtgtcttcacatgkggagaggaacaaacaagctcccttgtgcctttaataaggtgctaatcccagtcatgagggcagagtctcatgtaaggcttaacctcctaatacatcacct

SEQ ID NO: 491284 - DNA, 201 bp, Homo sapiens
ttaacttgtaattttaagaaaataaattattttgtaaagataaatctcatgtttaagaagaggaattacaattgaatcatttagggatgcctcagcctaarcataatatggaaaaagccataaccaaaagtcattttagagtactgctaggttactcaacctatcatcacatttaattaaaatgtcagtttgaaccatggc

SEQ ID NO: 491285 - DNA, 201 bp, Homo sapiens
ttgttttctgattccaagccacttgggtcagaggctatagataatcaagggtaagtctgctttttttctatttttaataaaaatatatattacagaagatyatatcacccataattctgccatcataacacattttggtgggactcattctatgttgttttgtttttctttgtgtgtgcatgtgtctctgagggctcttca

SEQ ID NO: 491286 - DNA, 201 bp, Homo sapiens
aaaggtgttaccgaatgcctcttctctgacctcttgtcttgtagctagagggccactgttccagtgtggcacaatgcccttctttagggtcatggtttaakcccttggagtgtgcatcgtttttaaccccccagtcaacagtagatacttactgacttcttgtcagttgaagctggctttttgggtcctgtcttccagggg

SEQ ID NO: 491287 - DNA, 201 bp, Homo sapiens
tttggggggcgccgttattttgctgatcacatattacatatattttaatattctagactagtatgaaaacaatgccacttccattgctttatatatgtatmtatatatatacacattgtctaatgctataattaaaaaaaagttgtagacacaaatatacccatttaaaaaaaaacccattttttgctattttactttata

SEQ ID NO: 491288 - DNA, 201 bp, Homo sapiens
ttgctttacttgatatcaatctcttgttcatttcttgataatatgtttggttatttttgttttcattgcttttagtgtcagagatggctttggattccccrttctgtgtgctgttgtctggctcctgaacccagctgtagaggtgtgtcaatcccaactggtgaagtactgagaggaagctacacaaaaggcagcaaagta

SEQ ID NO: 491289 - DNA, 201 bp, Homo sapiens
atctttggggggcgccgttattttgctgatcacatattacatatattttaatattctagactagtatgaaaacaatgccacttccattgctttatatatgyatatatatatatacacattgtctaatgctataattaaaaaaaagttgtagacacaaatatacccatttaaaaaaaaacccattttttgctattttacttt

SEQ ID NO: 491290 - DNA, 201 bp, Homo sapiens
tcaagttttggtttatttaaggaggaattgagtgcactgcagccacctcagcctcatggccacctgtttatttgattatttttaaaagagaagagcctttwaaaaatatctgttgccctggctggagtgcagtgacgtgatcatggctcactgcagccacaaccttccagctcaggtgatcctcccacctcagtgctcccc

SEQ ID NO: 491291 - DNA, 201 bp, Homo sapiens
cctgagtcacatgcatgatgtaccattttcatgtaaggttctaggaatctgtggacatctttggggggcgccgttattttgctgatcacatattacatatwttttaatattctagactagtatgaaaacaatgccacttccattgctttatatatgtatatatatatatacacattgtctaatgctataattaaaaaaaag

SEQ ID NO: 491292 - DNA, 201 bp, Homo sapiens
ccagaaagggcagtggtggagccctgggaggctttctgctctcctgatcgcaggtttttggtgagaggacctattggccactagggtgtctgtgtgtgtgygtgtgtgtgtgtgtgtgtgtgtgtgtgtgtgatgtgtgtttacttggattgacttctttcagcatgaagcccactgttttgctgaatgtatctcactgtt

SEQ ID NO: 491293 - DNA, 201 bp, Homo sapiens
aatcccagtcatgagggcagagtctcatgtaaggcttaacctcctaatacatcaccttgagggttaggattttaacacatgaacattgacggaacacaacrttcattccatagcaccagggtagtctcctcatgtgaaggtctttacctgagtcacatgcatgatgtaccattttcatgtaaggttctaggaatctgtgga

SEQ ID NO: 491294 - DNA, 201 bp, Homo sapiens
aataaggtgctaatcccagtcatgagggcagagtctcatgtaaggcttaacctcctaatacatcaccttgagggttaggattttaacacatgaacattgayggaacacaacgttcattccatagcaccagggtagtctcctcatgtgaaggtctttacctgagtcacatgcatgatgtaccattttcatgtaaggttctag

SEQ ID NO: 491295 - DNA, 201 bp, Homo sapiens
ggtgtctggtgaaggcctgctttctcatagaggcttccttcttgctgtgtcttcacatggggagaggaacaaacaagctcccttgtgcctttaataaggtrctaatcccagtcatgagggcagagtctcatgtaaggcttaacctcctaatacatcaccttgagggttaggattttaacacatgaacattgacggaacaca

SEQ ID NO: 491296 - DNA, 201 bp, Homo sapiens
gaactttgtttctcacagtcctggaggctgagaagtgcaagatcaaggtgccggcagtcttggtgtctggtgaaggcctgctttctcatagaggcttcctycttgctgtgtcttcacatggggagaggaacaaacaagctcccttgtgcctttaataaggtgctaatcccagtcatgagggcagagtctcatgtaaggctt

SEQ ID NO: 491297 - DNA, 201 bp, Homo sapiens
cacagcagatctagccttctctgagcagtgaagatgggatgttttgtggtccttttccctggtgtgcagagcccaagtggagttcttcagcacaccctagwccatcccctcactaacacccccacctgtccagtcttacctgccttcatatcaaaagcacacagttaacccagagggcttctgccctgccctgcctgactt

SEQ ID NO: 491298 - DNA, 201 bp, Homo sapiens
tagggagcatgtacctaatgcacatatcactgggcatagtctacaggcacctaataactcaggtaccttaacagtcactaatgagtgtctctccaaggtcwaaacaatggaagactgtagaagatgctattcattaagatatctcaagaatgtggaagactattattcgcttctcatgggacaggactttatagggcacct

SEQ ID NO: 491299 - DNA, 201 bp, Homo sapiens
atgactcatcagctgcccccacatggctttctagctcacagcagatctagccttctctgagcagtgaagatgggatgttttgtggtccttttccctggtgygcagagcccaagtggagttcttcagcacaccctagtccatcccctcactaacacccccacctgtccagtcttacctgccttcatatcaaaagcacacagt

SEQ ID NO: 491300 - DNA, 201 bp, Homo sapiens
acaggctgctacaaggaaatgcattagaccaggtagcttataaacaatagaactttgtttctcacagtcctggaggctgagaagtgcaagatcaaggtgcyggcagtcttggtgtctggtgaaggcctgctttctcatagaggcttccttcttgctgtgtcttcacatggggagaggaacaaacaagctcccttgtgcctt

SEQ ID NO: 491301 - DNA, 201 bp, Homo sapiens
ccccaccttctgcctcttgggccatagctcagctctgcacactgagccatcatcctatggtgagcaagaccccattcttgggcttcagtctctttccttgyagcaggcaatcaaggtggtggctggaaagggccaaggagccacatctcacagtgccctgctgcctgaacaaggaccagaggcctgtggaacacatggctc

SEQ ID NO: 491302 - DNA, 201 bp, Homo sapiens
ccactgtcgtaatccatacaggctgctacaaggaaatgcattagaccaggtagcttataaacaatagaactttgtttctcacagtcctggaggctgagaartgcaagatcaaggtgccggcagtcttggtgtctggtgaaggcctgctttctcatagaggcttccttcttgctgtgtcttcacatggggagaggaacaaac

SEQ ID NO: 491303 - DNA, 201 bp, Homo sapiens
atggagacaccgtcatcatccacatagcccactgtcgtaatccatacaggctgctacaaggaaatgcattagaccaggtagcttataaacaatagaacttygtttctcacagtcctggaggctgagaagtgcaagatcaaggtgccggcagtcttggtgtctggtgaaggcctgctttctcatagaggcttccttcttgct

SEQ ID NO: 491304 - DNA, 201 bp, Homo sapiens
tttctttctcttgtctcataaatctaaaccatcaacctgcttatttttgtatactgtcacactgtgtattccctgcattgaatgcctttctattgacattrtctataaaaattgtgggaagttttctgcaccctgaaatttctgttatgcggattaaatatccactatccgtgtttttccgagtcttacagcagaaagggt

SEQ ID NO: 491305 - DNA, 201 bp, Homo sapiens
gctaatatctgctgagattatgtatgcatgaactatagaattaacttgtaattttaagaaaataaattattttgtaaagataaatctcatgtttaagaagrggaattacaattgaatcatttagggatgcctcagcctaaacataatatggaaaaagccataaccaaaagtcattttagagtactgctaggttactcaacc

SEQ ID NO: 491306 - DNA, 201 bp, Homo sapiens
cttcgtggttctaccctactaataagttttttaaaaaattatgtaatgtgtgtatatacaaatacctatatgtttgtgtgtacacatacagctaatatctrctgagattatgtatgcatgaactatagaattaacttgtaattttaagaaaataaattattttgtaaagataaatctcatgtttaagaagaggaattacaa

SEQ ID NO: 491307 - DNA, 201 bp, Homo sapiens
cagtcatgagggcagagtctcatgtaaggcttaacctcctaatacatcaccttgagggttaggattttaacacatgaacattgacggaacacaacgttcaytccatagcaccagggtagtctcctcatgtgaaggtctttacctgagtcacatgcatgatgtaccattttcatgtaaggttctaggaatctgtggacatct

SEQ ID NO: 491308 - DNA, 201 bp, Homo sapiens
caattatactgtctatcaaaagcagaagtagttacttacacctgaaaatttgtactgagaatgtaactgtgaatatgtttaagaaagtatacttaaagcasaaatccaaggaagtatatttaaatcaaagcaagaaatcccatttccaaatggcaataaagcatgtgttacatagaatcagtgcatgaaagtgttttagta

SEQ ID NO: 491309 - DNA, 201 bp, Homo sapiens
caaagcaagaaatcccatttccaaatggcaataaagcatgtgttacatagaatcagtgcatgaaagtgttttagtagcccagattagattgtaccctggcraataagcaagagttctttttcattttcatcttgcaattcaactgggtatttgggttctttttctattcactcatgtcagatagagacatacatgttgtaa

SEQ ID NO: 491310 - DNA, 201 bp, Homo sapiens
accattgcactccagcctgggcaacaacagcaaaactctgtctcaaaaaaaaaaaaaaaaaaaaaaaaaagatttataactgggcagtggaattgaaaatsatttttaaaaatatccaaaatacctaaggaacttgtataaataaataggaaaaaaaaaagagaaaaacgtcaagaagcccacaaaaaagcagatttgtaa

SEQ ID NO: 491311 - DNA, 201 bp, Homo sapiens
ttatgactttgtaaaagaagaaaaccagctggtgatcagttggcattagtatatgaggatgtactcatatttggtaatagccatttttttctaactagagyaagggagttgggaatgggaggcagaaacaaggacacagacatgtaaaaaatcatagaacaaaactgtattgagttctgcgtatgggtctgtgatccatgg

SEQ ID NO: 491312 - DNA, 201 bp, Homo sapiens
gactcatgtgcttacttagtcctgaatggagacaccgtcatcatccacatagcccactgtcgtaatccatacaggctgctacaaggaaatgcattagaccrggtagcttataaacaatagaactttgtttctcacagtcctggaggctgagaagtgcaagatcaaggtgccggcagtcttggtgtctggtgaaggcctgct

SEQ ID NO: 491313 - DNA, 201 bp, Homo sapiens
tctttccttcccccttctcttccactgttaaggactcatgtgcttacttagtcctgaatggagacaccgtcatcatccacatagcccactgtcgtaatccrtacaggctgctacaaggaaatgcattagaccaggtagcttataaacaatagaactttgtttctcacagtcctggaggctgagaagtgcaagatcaaggtg

SEQ ID NO: 491314 - DNA, 201 bp, Homo sapiens
tgtggctctttccttcccccttctcttccactgttaaggactcatgtgcttacttagtcctgaatggagacaccgtcatcatccacatagcccactgtcgkaatccatacaggctgctacaaggaaatgcattagaccaggtagcttataaacaatagaactttgtttctcacagtcctggaggctgagaagtgcaagatc

SEQ ID NO: 491315 - DNA, 201 bp, Homo sapiens
aaaatctaggtggtggaaaggctaccttcatctctagaggttctaggggatcttttttctcgccttttccacattctggagtctgcctgcattttttggcwttgggctcttctccactgtcaccattagcaaccttgcatcccatggacctgtcttctatggccacatgtctctgtggctctttccttcccccttctcttc

SEQ ID NO: 491316 - DNA, 201 bp, Homo sapiens
tatctgcttcaattttgaagggtaggatatatatagttatgtgtgtgtgtgtgtgtgtgtgtgtgtgtggtgggggggtagtgtttgtgtgtgtgtgtatrtatatttatatattcctagtccattgctgctacaacaaactaccactatgtcagggcataaaacaaatttattacactcctgtaggtcagagtatgatgt

SEQ ID NO: 491317 - DNA, 201 bp, Homo sapiens
taagttaatgctaatgtgtagtttatctgcttcaattttgaagggtaggatatatatagttatgtgtgtgtgtgtgtgtgtgtgtgtgtgtggtgggggggtagtgtttgtgtgtgtgtgtatatatatttatatattcctagtccattgctgctacaacaaactaccactatgtcagggcataaaacaaatttattacac

SEQ ID NO: 491318 - DNA, 201 bp, Homo sapiens
ggaccaggatcagacagtgctgtcctgaggctggccgtctgataaggggctccagaaagggcagtggtggagccctgggaggctttctgctctcctgatcrcaggtttttggtgagaggacctattggccactagggtgtctgtgtgtgtgtgtgtgtgtgtgtgtgtgtgtgtgtgtgtgtgatgtgtgtttacttggat

SEQ ID NO: 491319 - DNA, 201 bp, Homo sapiens
acccagctaagttaatgctaatgtgtagtttatctgcttcaattttgaagggtaggatatatatagttatgtgtgtgtgtgtgtgtgtgtgtgtgtgtggtgggggggtagtgtttgtgtgtgtgtgtatatatatttatatattcctagtccattgctgctacaacaaactaccactatgtcagggcataaaacaaattt

SEQ ID NO: 491320 - DNA, 201 bp, Homo sapiens
tacacccagctaagttaatgctaatgtgtagtttatctgcttcaattttgaagggtaggatatatatagttatgtgtgtgtgtgtgtgtgtgtgtgtgtgtggtgggggggtagtgtttgtgtgtgtgtgtatatatatttatatattcctagtccattgctgctacaacaaactaccactatgtcagggcataaaacaaa

SEQ ID NO: 491321 - DNA, 201 bp, Homo sapiens
actacacccagctaagttaatgctaatgtgtagtttatctgcttcaattttgaagggtaggatatatatagttatgtgtgtgtgtgtgtgtgtgtgtgtgtgtggtgggggggtagtgtttgtgtgtgtgtgtatatatatttatatattcctagtccattgctgctacaacaaactaccactatgtcagggcataaaaca

SEQ ID NO: 491322 - DNA, 201 bp, Homo sapiens
ccactacacccagctaagttaatgctaatgtgtagtttatctgcttcaattttgaagggtaggatatatatagttatgtgtgtgtgtgtgtgtgtgtgtgtgtgtggtgggggggtagtgtttgtgtgtgtgtgtatatatatttatatattcctagtccattgctgctacaacaaactaccactatgtcagggcataaaa

SEQ ID NO: 491323 - DNA, 201 bp, Homo sapiens
atgggaaagtgactatctacaattgcttaggtagaaggagacagattggatttttgtgtgtttggtatttgggataagagggatgtgggtgtgtacttgasatgggttgttctctctctctctttttttttttttttttttgagagggagtctcactctgtcacccaggctggagttctgtggcacagtcttggctcactg

SEQ ID NO: 491324 - DNA, 201 bp, Homo sapiens
ctatgggtaggtttccactgatgtgtggcttatgtgaattatttttcagcctttcttgggaatttgtatacctttatgcttagtggatgtttgcaaaacaytggttttgttgtattagtttatgactcccagtaaaatttatctgaaaattttgagataatctagtatgtaatttgttacaatgtgcacaaactacgtact

SEQ ID NO: 491325 - DNA, 201 bp, Homo sapiens
ccccaagtgctggaattacaggccatctaaatcttttatctcagatttgccttgtgacaaatggaggggtactttttctgacatgatgaggcagagaaagrtgaggtgggcgcatcctgtgcatatgattttctcaggtgatgggaatatggtcggctcttgcctaatgggatatattttctctttgaatgatttggcaag

SEQ ID NO: 491326 - DNA, 201 bp, Homo sapiens
tatggatttaaaattcacagtaaagttctcatgaattcatctgtgaataacattttatagacaaaatgtctgcactaggacaagagaaagatgtataattmccttgttctaaggtaccgccattcattgttattattttaaaatacgagtgttgactgatgttaaaacacaaaatggggccgggagtggtggctcccgcct

SEQ ID NO: 491327 - DNA, 201 bp, Homo sapiens
ggtgtgcagagcccaagtggagttcttcagcacaccctagtccatcccctcactaacacccccacctgtccagtcttacctgccttcatatcaaaagcacwcagttaacccagagggcttctgccctgccctgcctgactttctgggaaacccccctctccacccaccctaatcaggacactgtctgaaggttccccctca

SEQ ID NO: 491328 - DNA, 201 bp, Homo sapiens
atgggtctgtgatccatggttcagtttgagaggttcatgtgtcccttatgagaagggacaggaaagccaggaggacaggagtatgtttgggcctgtgcctstgcttccaccacagaagtcagcagctctacctttctcttttctcctctttatctaataattgtctcctcttcaaatttgggaaatgaacttaatcaaaga

SEQ ID NO: 491329 - DNA, 201 bp, Homo sapiens
ctctcacatttacatggaagtatagcttatttcaccaattatactgtctatcaaaagcagaagtagttacttacacctgaaaatttgtactgagaatgtarctgtgaatatgtttaagaaagtatacttaaagcagaaatccaaggaagtatatttaaatcaaagcaagaaatcccatttccaaatggcaataaagcatgt

SEQ ID NO: 491330 - DNA, 201 bp, Homo sapiens
aagaacagttttacagattcattctttccacacacaagatttccccactgcccagttactctcacctttttattttcttgactgttatgttttacttgackctggaatcttaccttgtactctcacatttacatggaagtatagcttatttcaccaattatactgtctatcaaaagcagaagtagttacttacacctgaaa

SEQ ID NO: 491331 - DNA, 201 bp, Homo sapiens
gtatttctaagttgcctttaagctgaataaacatttggtttttatatttaattgcttcgatgtgaaacactgcaatttaaaaaattacacatatgtaatayagtattttacactaaataatagtgactggcagtccattggccgaagaagtattatttttcagatattctgctctgtcatcagctgtagacactgacctgg

SEQ ID NO: 491332 - DNA, 201 bp, Homo sapiens
gtttttatatttaattgcttcgatgtgaaacactgcaatttaaaaaattacacatatgtaatacagtattttacactaaataatagtgactggcagtccaytggccgaagaagtattatttttcagatattctgctctgtcatcagctgtagacactgacctggtatttatctggaaaggcttgctgtcaggggttcacag

SEQ ID NO: 491333 - DNA, 201 bp, Homo sapiens
acgtgatagttatagatttttaaagatatattattattttagagtagttttgagtgcacagcaaaatggagtgcagagtccagagatctcatatggcctcrattcctgtacactctcaggtcactccaccaacaacctcctacaccagagccactttgaaacattagaaaatatatttgagcattcagaaatgtataaact

SEQ ID NO: 491334 - DNA, 201 bp, Homo sapiens
tgccactacacccagctaagttaatgctaatgtgtagtttatctgcttcaattttgaagggtaggatatatatagttatgtgtgtgtgtgtgtgtgtgtgtgtgtgtggtgggggggtagtgtttgtgtgtgtgtgtatatatatttatatattcctagtccattgctgctacaacaaactaccactatgtcagggcataa

SEQ ID NO: 491335 - DNA, 201 bp, Homo sapiens
tgtgccactacacccagctaagttaatgctaatgtgtagtttatctgcttcaattttgaagggtaggatatatatagttatgtgtgtgtgtgtgtgtgtgtgtgtgtgtggtgggggggtagtgtttgtgtgtgtgtgtatatatatttatatattcctagtccattgctgctacaacaaactaccactatgtcagggcat

SEQ ID NO: 491336 - DNA, 201 bp, Homo sapiens
gcaaggcaggaggattccttgaggccaggagttcaagaccagtctgggcaatatagcaagatttcatctctacaaaaaaatgaaaacattggctgggcatrgtggctcattcctatagttcaggctactgaggagcctgatgtaggaggatcatgtgaccccagtagtttgaggctgcagtgagctatgatcctaacactg

SEQ ID NO: 491337 - DNA, 201 bp, Homo sapiens
catgtgccactacacccagctaagttaatgctaatgtgtagtttatctgcttcaattttgaagggtaggatatatatagttatgtgtgtgtgtgtgtgtgtgtgtgtgtgtggtgggggggtagtgtttgtgtgtgtgtgtatatatatttatatattcctagtccattgctgctacaacaaactaccactatgtcagggc

SEQ ID NO: 491338 - DNA, 201 bp, Homo sapiens
acctcatttatattgacttgtaaattagtaatttgtgaactattatttatcaattcattgcctacatgtcaggaaacaaattttcttcttaataaagaatmcggttgctgggcacaatggttcacacctgtaatctcagcacgtttggagggcaaggcaggaggattccttgaggccaggagttcaagaccagtctgggca

SEQ ID NO: 491339 - DNA, 201 bp, Homo sapiens
gcatgtgccactacacccagctaagttaatgctaatgtgtagtttatctgcttcaattttgaagggtaggatatatatagttatgtgtgtgtgtgtgtgtktgtgtgtgtgtggtgggggggtagtgtttgtgtgtgtgtgtatatatatttatatattcctagtccattgctgctacaacaaactaccactatgtcaggg

SEQ ID NO: 491340 - DNA, 201 bp, Homo sapiens
gtgatccatggttcagtttgagaggttcatgtgtcccttatgagaagggacaggaaagccaggaggacaggagtatgtttgggcctgtgcctctgcttccrccacagaagtcagcagctctacctttctcttttctcctctttatctaataattgtctcctcttcaaatttgggaaatgaacttaatcaaagatttgttgt

SEQ ID NO: 491341 - DNA, 201 bp, Homo sapiens
cgtatgggtctgtgatccatggttcagtttgagaggttcatgtgtcccttatgagaagggacaggaaagccaggaggacaggagtatgtttgggcctgtgyctctgcttccaccacagaagtcagcagctctacctttctcttttctcctctttatctaataattgtctcctcttcaaatttgggaaatgaacttaatcaa

SEQ ID NO: 491342 - DNA, 201 bp, Homo sapiens
atagaattaacttgtaattttaagaaaataaattattttgtaaagataaatctcatgtttaagaagaggaattacaattgaatcatttagggatgcctcarcctaaacataatatggaaaaagccataaccaaaagtcattttagagtactgctaggttactcaacctatcatcacatttaattaaaatgtcagtttgaac

SEQ ID NO: 491343 - DNA, 201 bp, Homo sapiens
ctgttgttcgtcctgcaattgtgtttccatcacattacacaaagcctctttgtcttcgtggttctaccctactaataagttttttaaaaaattatgtaatrtgtgtatatacaaatacctatatgtttgtgtgtacacatacagctaatatctgctgagattatgtatgcatgaactatagaattaacttgtaattttaag

SEQ ID NO: 491344 - DNA, 201 bp, Homo sapiens
cagccctcacagcagcctgttgttcgtcctgcaattgtgtttccatcacattacacaaagcctctttgtcttcgtggttctaccctactaataagtttttwaaaaaattatgtaatgtgtgtatatacaaatacctatatgtttgtgtgtacacatacagctaatatctgctgagattatgtatgcatgaactatagaatt

SEQ ID NO: 491345 - DNA, 201 bp, Homo sapiens
cgagtcttacagcagaaagggtaaatgcagccctcacagcagcctgttgttcgtcctgcaattgtgtttccatcacattacacaaagcctctttgtcttcrtggttctaccctactaataagttttttaaaaaattatgtaatgtgtgtatatacaaatacctatatgtttgtgtgtacacatacagctaatatctgctga

SEQ ID NO: 491346 - DNA, 201 bp, Homo sapiens
ctaaaccatcaacctgcttatttttgtatactgtcacactgtgtattccctgcattgaatgcctttctattgacattgtctataaaaattgtgggaagttktctgcaccctgaaatttctgttatgcggattaaatatccactatccgtgtttttccgagtcttacagcagaaagggtaaatgcagccctcacagcagcct

SEQ ID NO: 491347 - DNA, 201 bp, Homo sapiens
tggcatcatctactatttctttctcttgtctcataaatctaaaccatcaacctgcttatttttgtatactgtcacactgtgtattccctgcattgaatgcmtttctattgacattgtctataaaaattgtgggaagttttctgcaccctgaaatttctgttatgcggattaaatatccactatccgtgtttttccgagtct

SEQ ID NO: 491348 - DNA, 201 bp, Homo sapiens
tgaaacttccctaatctttctttagagattgtggcatagcatgttagtttcttttccatatccaattgttttctgtaatgaatacagaaatatgggcactrttttgtaactttaaatagacatcatctcaagtctacaagaattatccaaaacggtatttaatgacatttctaggtcttcagacactattaatgtagattg

SEQ ID NO: 491349 - DNA, 201 bp, Homo sapiens
ttctgttatgcggattaaatatccactatccgtgtttttccgagtcttacagcagaaagggtaaatgcagccctcacagcagcctgttgttcgtcctgcarttgtgtttccatcacattacacaaagcctctttgtcttcgtggttctaccctactaataagttttttaaaaaattatgtaatgtgtgtatatacaaatac

SEQ ID NO: 491350 - DNA, 201 bp, Homo sapiens
tcacactgtgtattccctgcattgaatgcctttctattgacattgtctataaaaattgtgggaagttttctgcaccctgaaatttctgttatgcggattaratatccactatccgtgtttttccgagtcttacagcagaaagggtaaatgcagccctcacagcagcctgttgttcgtcctgcaattgtgtttccatcacat

SEQ ID NO: 491351 - DNA, 201 bp, Homo sapiens
tttctcttgtctcataaatctaaaccatcaacctgcttatttttgtatactgtcacactgtgtattccctgcattgaatgcctttctattgacattgtctrtaaaaattgtgggaagttttctgcaccctgaaatttctgttatgcggattaaatatccactatccgtgtttttccgagtcttacagcagaaagggtaaat

SEQ ID NO: 491352 - DNA, 201 bp, Homo sapiens
gtgacacaccaagttgccctctcttcaaaaaaggaatctagagacatcagtgtgtgcacaagcatggtttgtgaatttggaagtgcgtatgtgcatagttktgctcaagaatgtgttgatgattataccttctcagaatgaaggtaattttttttctttttttttttttgagatggagtcttgctctgttgccaggctgga

SEQ ID NO: 491353 - DNA, 201 bp, Homo sapiens
gcctgggtgacacaccaagttgccctctcttcaaaaaaggaatctagagacatcagtgtgtgcacaagcatggtttgtgaatttggaagtgcgtatgtgcrtagttgtgctcaagaatgtgttgatgattataccttctcagaatgaaggtaattttttttctttttttttttttgagatggagtcttgctctgttgccag

SEQ ID NO: 491354 - DNA, 201 bp, Homo sapiens
ggtggctcattcctatagttcaggctactgaggagcctgatgtaggaggatcatgtgaccccagtagtttgaggctgcagtgagctatgatcctaacactsctctccagcctgggtgacacaccaagttgccctctcttcaaaaaaggaatctagagacatcagtgtgtgcacaagcatggtttgtgaatttggaagtgcg

SEQ ID NO: 491355 - DNA, 201 bp, Homo sapiens
agcacgtttggagggcaaggcaggaggattccttgaggccaggagttcaagaccagtctgggcaatatagcaagatttcatctctacaaaaaaatgaaaayattggctgggcatggtggctcattcctatagttcaggctactgaggagcctgatgtaggaggatcatgtgaccccagtagtttgaggctgcagtgagcta

SEQ ID NO: 491356 - DNA, 201 bp, Homo sapiens
cctgtaatctcagcacgtttggagggcaaggcaggaggattccttgaggccaggagttcaagaccagtctgggcaatatagcaagatttcatctctacaawaaaatgaaaacattggctgggcatggtggctcattcctatagttcaggctactgaggagcctgatgtaggaggatcatgtgaccccagtagtttgaggct

SEQ ID NO: 491357 - DNA, 201 bp, Homo sapiens
tccggttgctgggcacaatggttcacacctgtaatctcagcacgtttggagggcaaggcaggaggattccttgaggccaggagttcaagaccagtctgggsaatatagcaagatttcatctctacaaaaaaatgaaaacattggctgggcatggtggctcattcctatagttcaggctactgaggagcctgatgtaggagg

SEQ ID NO: 491358 - DNA, 201 bp, Homo sapiens
taaagaatccggttgctgggcacaatggttcacacctgtaatctcagcacgtttggagggcaaggcaggaggattccttgaggccaggagttcaagaccartctgggcaatatagcaagatttcatctctacaaaaaaatgaaaacattggctgggcatggtggctcattcctatagttcaggctactgaggagcctgatg

SEQ ID NO: 491359 - DNA, 201 bp, Homo sapiens
ttgagaatagaaatgattgtattttcttttaacttgtgcagtagagtgtggcatacaaatgttgtattctcagtatttcaaaaaattaccttcttactgtrcaagttgtattcagcatataaagtctattccagctttgttgtagatgcagtgtgattattacatgccgataaggtatgaattggagatgggatccaaaat

SEQ ID NO: 491360 - DNA, 201 bp, Homo sapiens
tttaagctgaaacttccctaatctttctttagagattgtggcatagcatgttagtttcttttccatatccaattgttttctgtaatgaatacagaaatatrggcactattttgtaactttaaatagacatcatctcaagtctacaagaattatccaaaacggtatttaatgacatttctaggtcttcagacactattaatg

SEQ ID NO: 491361 - DNA, 201 bp, Homo sapiens
acacccttgaggtgagtaggtattatctgtagtttacataagatgaaatagagcctcccagcagttaagtaacttgtgtgaagatgggacccttgttcctratggttctagaacctttatccttagtgataataagtaagtacatgaattgcctgaagaagtggtcagagtttatcatagaaaatctagatagtactcagt

SEQ ID NO: 491362 - DNA, 201 bp, Homo sapiens
attgtgattattcttgctttaagctgaaacttccctaatctttctttagagattgtggcatagcatgttagtttcttttccatatccaattgttttctgtwatgaatacagaaatatgggcactattttgtaactttaaatagacatcatctcaagtctacaagaattatccaaaacggtatttaatgacatttctaggtc

SEQ ID NO: 491363 - DNA, 201 bp, Homo sapiens
catttttataaagatctctccatgtcttagatttgattcttcctttgaatatttttctcattgacatttgaaagcacctgaccttatataaaatgaacaaytttcataactccataaaaggagaattatggcatcatctactatttctttctcttgtctcataaatctaaaccatcaacctgcttatttttgtatactgtc

SEQ ID NO: 491364 - DNA, 201 bp, Homo sapiens
gcttaagaaaagatcattacaaactttttgtatgtttttcatatatgcttgcaaagggttgtaaaactttattgtgattattcttgctttaagctgaaacwtccctaatctttctttagagattgtggcatagcatgttagtttcttttccatatccaattgttttctgtaatgaatacagaaatatgggcactattttgt

SEQ ID NO: 491365 - DNA, 201 bp, Homo sapiens
ttacagggttggtggtgaatattttacttctgcaaaatgaaaacagcatttcatcagaagttgttttatggtctttcagacattttattgtatatctttgrtgctttttgcccatgaagtatctcttttgtgtgtttgtgtgtatgtgtattgatctgctgtaaatttcacagcactcattgtcagggatcagcagaatca

SEQ ID NO: 491366 - DNA, 201 bp, Homo sapiens
caaattttcttcttaataaagaatccggttgctgggcacaatggttcacacctgtaatctcagcacgtttggagggcaaggcaggaggattccttgaggcyaggagttcaagaccagtctgggcaatatagcaagatttcatctctacaaaaaaatgaaaacattggctgggcatggtggctcattcctatagttcaggct

SEQ ID NO: 491367 - DNA, 201 bp, Homo sapiens
aaagaaacgtgaagtcatgaactgttaatttatgctgttatttttgtgtttactcacctcatttatattgacttgtaaattagtaatttgtgaactattayttatcaattcattgcctacatgtcaggaaacaaattttcttcttaataaagaatccggttgctgggcacaatggttcacacctgtaatctcagcacgttt

SEQ ID NO: 491368 - DNA, 201 bp, Homo sapiens
ttagaatactcttttctgtattttatttcaatacacttgagaatagaaatgattgtattttcttttaacttgtgcagtagagtgtggcatacaaatgttgkattctcagtatttcaaaaaattaccttcttactgtacaagttgtattcagcatataaagtctattccagctttgttgtagatgcagtgtgattattacat

SEQ ID NO: 491369 - DNA, 201 bp, Homo sapiens
cattttaaccacctctgacttttccatggaatggacaagtagtagtctctgtcagagctacattttaaaggagaaaaagaaacgtgaagtcatgaactgtyaatttatgctgttatttttgtgtttactcacctcatttatattgacttgtaaattagtaatttgtgaactattatttatcaattcattgcctacatgtca

SEQ ID NO: 491370 - DNA, 201 bp, Homo sapiens
acattttaaccacctctgacttttccatggaatggacaagtagtagtctctgtcagagctacattttaaaggagaaaaagaaacgtgaagtcatgaactgytaatttatgctgttatttttgtgtttactcacctcatttatattgacttgtaaattagtaatttgtgaactattatttatcaattcattgcctacatgtc

SEQ ID NO: 491371 - DNA, 201 bp, Homo sapiens
gacattttaaccacctctgacttttccatggaatggacaagtagtagtctctgtcagagctacattttaaaggagaaaaagaaacgtgaagtcatgaactyttaatttatgctgttatttttgtgtttactcacctcatttatattgacttgtaaattagtaatttgtgaactattatttatcaattcattgcctacatgt

SEQ ID NO: 491372 - DNA, 201 bp, Homo sapiens
tcagctgcccccacatggctttctagctcacagcagatctagccttctctgagcagtgaagatgggatgttttgtggtccttttccctggtgtgcagagcycaagtggagttcttcagcacaccctagtccatcccctcactaacacccccacctgtccagtcttacctgccttcatatcaaaagcacacagttaacccag

SEQ ID NO: 491373 - DNA, 201 bp, Homo sapiens
attccccgttctgtgtgctgttgtctggctcctgaacccagctgtagaggtgtgtcaatcccaactggtgaagtactgagaggaagctacacaaaaggcakcaaagtattagtaagtgtacctctgacattttaaccacctctgacttttccatggaatggacaagtagtagtctctgtcagagctacattttaaaggaga

SEQ ID NO: 491374 - DNA, 201 bp, Homo sapiens
gatgatccacccgcctcagcctcccaaagtgctgggattacaggcgtgagccaccgcacctggcctgtttattctcttaagagagaaaatgaggggattartggactgtagttctggacaaggtggaaaactcttaaagtggaagtattggggcaagtgctctgacaggctaggatggtgcagtcagtcccttcacccaga

SEQ ID NO: 491375 - DNA, 201 bp, Homo sapiens
ttgttttcattgcttttagtgtcagagatggctttggattccccgttctgtgtgctgttgtctggctcctgaacccagctgtagaggtgtgtcaatcccarctggtgaagtactgagaggaagctacacaaaaggcagcaaagtattagtaagtgtacctctgacattttaaccacctctgacttttccatggaatggaca

SEQ ID NO: 491376 - DNA, 201 bp, Homo sapiens
cacaggttgcactagaagttgcctttgaaattagacctaaactatgtggaactggaacccttgtacacaaagctctctatcatccaaatcctgctgaactstcttaggaaagaacagttttacagattcattctttccacacacaagatttccccactgcccagttactctcacctttttattttcttgactgttatgttt

SEQ ID NO: 491377 - DNA, 201 bp, Homo sapiens
aaggcttgctgtcaggggttcacagtgctgcttgtgggttatctccagaccctttacatacagcactttaggacagcgtgagtcacaggttgcactagaakttgcctttgaaattagacctaaactatgtggaactggaacccttgtacacaaagctctctatcatccaaatcctgctgaactctcttaggaaagaacagt

SEQ ID NO: 491378 - DNA, 201 bp, Homo sapiens
atacagtattttacactaaataatagtgactggcagtccattggccgaagaagtattatttttcagatattctgctctgtcatcagctgtagacactgacmtggtatttatctggaaaggcttgctgtcaggggttcacagtgctgcttgtgggttatctccagaccctttacatacagcactttaggacagcgtgagtca

SEQ ID NO: 491379 - DNA, 201 bp, Homo sapiens
attctagacccagactggggtcccaaggcatgatagcccacagcttcttagcaagtgcatgttcagttggatcccccagctcagcctgggtcatccccacrttctgcctcttgggccatagctcagctctgcacactgagccatcatcctatggtgagcaagaccccattcttgggcttcagtctctttccttgcagcagg

SEQ ID NO: 491380 - DNA, 201 bp, Homo sapiens
taagaagaggaattacaattgaatcatttagggatgcctcagcctaaacataatatggaaaaagccataaccaaaagtcattttagagtactgctaggttrctcaacctatcatcacatttaattaaaatgtcagtttgaaccatggccagtctattttggttaatatgttatttaaatcaacttgtgaagtcttcatttt

SEQ ID NO: 491381 - DNA, 201 bp, Homo sapiens
atcaagggtaagtctgctttttttctatttttaataaaaatatatattacagaagatcatatcacccataattctgccatcataacacattttggtgggaytcattctatgttgttttgtttttctttgtgtgtgcatgtgtctctgagggctcttcacttacctgacattatgagggagtcttttcttgaaataaaatac

SEQ ID NO: 491382 - DNA, 201 bp, Homo sapiens
acagtggctcatgcctgtaatcccagcactttgggaggtagaggtgggtggatcgcttgaggccaggagtttcgagctcagggcaatgtggctaaaccccrtctctactaaagatgcaaaaattagtcatatgtggtggcgcgcacctgtaatcccagctactctggaggctgagacgtgagaattgcttgaagctgggag

SEQ ID NO: 491383 - DNA, 201 bp, Homo sapiens
cttgccccttggcactctgtggcatcagatgtggtgtgaggatattccacttattctttgagctgatccactgttgctggagagctctgcttgctgcctcrgtttccagaggcatctgtgctttcctacaagcccaacttcatatattctgtggtttcgggttttgaatgtttcctagtttaatcaaagatgggcatttct

SEQ ID NO: 491384 - DNA, 201 bp, Homo sapiens
ggactttgtggcatagatggaaatttccaggttgtctaggtggtagacagaggcctcacttcttaacaaactcccccactccacccctgccaatgaggatrttgcttagaggtatttctatcagtgttgagtagaagagatcatttcttgatgttgaacttcaggtaaggatgccagcttctgcatatcagggtggtgatg

SEQ ID NO: 491385 - DNA, 201 bp, Homo sapiens
ggttgattttgtctttctggaagatccaagatctttggtttagagatatattctcttaatgttaactggtattagaatactcttttctgtattttatttcratacacttgagaatagaaatgattgtattttcttttaacttgtgcagtagagtgtggcatacaaatgttgtattctcagtatttcaaaaaattaccttct

SEQ ID NO: 491386 - DNA, 201 bp, Homo sapiens
aaacttccctaatctttctttagagattgtggcatagcatgttagtttcttttccatatccaattgttttctgtaatgaatacagaaatatgggcactatyttgtaactttaaatagacatcatctcaagtctacaagaattatccaaaacggtatttaatgacatttctaggtcttcagacactattaatgtagattgta

SEQ ID NO: 491387 - DNA, 201 bp, Homo sapiens
ttggatgtaacagctccttaagaaaacctcagtttaccttccctattttttaccatttgtaaaactaaggctcagtgatgtaaaatataacacattctgtrctgtggcataactgcagcttaggtttttatattcaagacaagcagaggtatagttgaaaaggtatgaacacttattatgcttcaagatccctttgttggt

SEQ ID NO: 491388 - DNA, 201 bp, Homo sapiens
cattgagcatatgcaaattgagacatgtgcatagcttctccccgttgagcccatcagtggggaggagctatgtaccggggacatttggcaaagattttcaygagtctgttggatgtaacagctccttaagaaaacctcagtttaccttccctattttttaccatttgtaaaactaaggctcagtgatgtaaaatataacac

SEQ ID NO: 491389 - DNA, 201 bp, Homo sapiens
gactcatcagctgcccccacatggctttctagctcacagcagatctagccttctctgagcagtgaagatgggatgttttgtggtccttttccctggtgtgsagagcccaagtggagttcttcagcacaccctagtccatcccctcactaacacccccacctgtccagtcttacctgccttcatatcaaaagcacacagtta

SEQ ID NO: 491390 - DNA, 201 bp, Homo sapiens
ttctgagctttaatcgaactggctccaaccagttggagacttgaaaagggctacgtgatagttatagatttttaaagatatattattattttagagtagtwttgagtgcacagcaaaatggagtgcagagtccagagatctcatatggcctcgattcctgtacactctcaggtcactccaccaacaacctcctacaccaga

SEQ ID NO: 491391 - DNA, 201 bp, Homo sapiens
tgcaacgttctgaagtaacattacagtcttttcagtgtgctgtgtcatttatatcccttactttatcctgggaatcctgtattgccattgagcatatgcarattgagacatgtgcatagcttctccccgttgagcccatcagtggggaggagctatgtaccggggacatttggcaaagattttcatgagtctgttggatgt

SEQ ID NO: 491392 - DNA, 201 bp, Homo sapiens
ggtgtggtcgatcagagggccaagtggctttcagagggagtgggaagtggtgggggttggtttgtttgcccatggatgaaagcaaaagtgagttggcttcycaagaacttttcccagtagcctgttttgctacaattctagacccagactggggtcccaaggcatgatagcccacagcttcttagcaagtgcatgttcagt

SEQ ID NO: 491393 - DNA, 201 bp, Homo sapiens
acaaacaaaaaagaagaatgtaagcagtataagactttaaaacacacaaatgaaaaatatacatgactacatgcttcagtgaactaaaactttcatctgtratctttattttgcaacgttctgaagtaacattacagtcttttcagtgtgctgtgtcatttatatcccttactttatcctgggaatcctgtattgccattg

SEQ ID NO: 491394 - DNA, 201 bp, Homo sapiens
gcatgcatgaaagttttcaggcctccagttgttgggagtggctgaggagattggggagcttctgtctgagctggaagagtggagtctcaacaagaaccagygtattctggacatgtgtgggccctggagtgtgcatggctggatgccttgtctacctgtgccttacagagtgacaccattgtggtgtggtcgatcagaggg

SEQ ID NO: 491395 - DNA, 201 bp, Homo sapiens
tactgtagctctgcctccttctttttaatataatattccattctgtggacgcaccataatttatttagcttagcttatgttgattgctctgctctgggttktcaaagcctcctgagtacagcaaaggcacaaacgatatgtggatttgggtgtgtacgtgtgtgtgtgtgtggattatgggagtaacactggcttagatga

SEQ ID NO: 491396 - DNA, 201 bp, Homo sapiens
gaatttgtatacctttatgcttagtggatgtttgcaaaacattggttttgttgtattagtttatgactcccagtaaaatttatctgaaaattttgagatartctagtatgtaatttgttacaatgtgcacaaactacgtactaaagttcctgacataatgagtgttattagctattttcatttttgcatatccttctggtc

SEQ ID NO: 491397 - DNA, 201 bp, Homo sapiens
ctcccgatccatggctgtggttttttactccgtttatcactgcctgtgtgtagaatgataattgcacaattgatagtgtgaagacctcttgataaatggtraatctgagcatatgtatttggctgacatgtcattgtgaaacctcacagcttcagtcagtgtcagcacagctagggagcatgtacctaatgcacatatcac

SEQ ID NO: 491398 - DNA, 201 bp, Homo sapiens
ttcattgtaccaagcagaagagtcctgtcctccatgcctccttgatccatggccccagcatgggcactgctgccagtgtggcacctgcccggcttatctcygtttctacaaaatcagtgtgctttccagctctcattggtctttttctttttctcattcacaatggtctcctcattctttattttaaagtggatttccagt

SEQ ID NO: 491399 - DNA, 201 bp, Homo sapiens
tatactcactgaggtttggaaaagtttaatggagatggggatccatttcaagctttgttataaggattttcttctctggtttttgaggcattaagaaaggwtctcaggaaatgtgtctaagataattttgagaactgggtgaaaccagtgtctctccaggatctttgtgctttcctcacgtgccctttcttggtggtcttg

SEQ ID NO: 491400 - DNA, 201 bp, Homo sapiens
tgtatactcactgaggtttggaaaagtttaatggagatggggatccatttcaagctttgttataaggattttcttctctggtttttgaggcattaagaaargttctcaggaaatgtgtctaagataattttgagaactgggtgaaaccagtgtctctccaggatctttgtgctttcctcacgtgccctttcttggtggtct

SEQ ID NO: 491401 - DNA, 201 bp, Homo sapiens
ctttcttgggaatttgtatacctttatgcttagtggatgtttgcaaaacattggttttgttgtattagtttatgactcccagtaaaatttatctgaaaatyttgagataatctagtatgtaatttgttacaatgtgcacaaactacgtactaaagttcctgacataatgagtgttattagctattttcatttttgcatatc

SEQ ID NO: 491402 - DNA, 201 bp, Homo sapiens
ccaaaatacctaaggaacttgtataaataaataggaaaaaaaaaagagaaaaacgtcaagaagcccacaaaaaagcagatttgtaaatgggcaatggattygaatagacatttagccaaagaagacatccagttggtgaaaaggcatatggaaaggtgctcagcatcactgattatcaggaaaatgaaaatcaaaaccacc

SEQ ID NO: 491403 - DNA, 201 bp, Homo sapiens
gcttatgtgaattatttttcagcctttcttgggaatttgtatacctttatgcttagtggatgtttgcaaaacattggttttgttgtattagtttatgactyccagtaaaatttatctgaaaattttgagataatctagtatgtaatttgttacaatgtgcacaaactacgtactaaagttcctgacataatgagtgttatt

SEQ ID NO: 491404 - DNA, 201 bp, Homo sapiens
caagagaccccaaatattcctcaaataccacgccatcttccataggttgcttttttgttttttaagagacctgaggccacttggctttcttttggtggccraaacactagagcagaaacagggagtttgtggctgtccagaagccacatgccttgtctctgaaagttttatttagattatgttgtattatctcctatgggt

SEQ ID NO: 491405 - DNA, 201 bp, Homo sapiens
actcctttttcctgaaactgcttcaactctggaattcttttttgctgttagttttattttattgaaatattcatgaacgagcatacacttgtatatggatktaaaattcacagtaaagttctcatgaattcatctgtgaataacattttatagacaaaatgtctgcactaggacaagagaaagatgtataattcccttgtt

SEQ ID NO: 491406 - DNA, 201 bp, Homo sapiens
tgttttctgattccaagccacttgggtcagaggctatagataatcaagggtaagtctgctttttttctatttttaataaaaatatatattacagaagatcrtatcacccataattctgccatcataacacattttggtgggactcattctatgttgttttgtttttctttgtgtgtgcatgtgtctctgagggctcttcac

SEQ ID NO: 491407 - DNA, 201 bp, Homo sapiens
tttttgaggcattaagaaaggttctcaggaaatgtgtctaagataattttgagaactgggtgaaaccagtgtctctccaggatctttgtgctttcctcacrtgccctttcttggtggtcttgacaggacgaggtggggcccacccatgagctggtccagagtctcatctccacccactccaccattgatgccaagatggct

SEQ ID NO: 491408 - DNA, 201 bp, Homo sapiens
gggatccatttcaagctttgttataaggattttcttctctggtttttgaggcattaagaaaggttctcaggaaatgtgtctaagataattttgagaactgrgtgaaaccagtgtctctccaggatctttgtgctttcctcacgtgccctttcttggtggtcttgacaggacgaggtggggcccacccatgagctggtccag

SEQ ID NO: 491409 - DNA, 201 bp, Homo sapiens
taggttatcaggttgtatactcactgaggtttggaaaagtttaatggagatggggatccatttcaagctttgttataaggattttcttctctggtttttgyggcattaagaaaggttctcaggaaatgtgtctaagataattttgagaactgggtgaaaccagtgtctctccaggatctttgtgctttcctcacgtgccct

SEQ ID NO: 491410 - DNA, 201 bp, Homo sapiens
agcccccaccaatagtggtagtggtgatggggcctccaaagttggaaagagcactttgatacaatgcctcattcggaacttcacccggcagaagttgaccragatcagaggccctgtgatgatcgtgtcaggtaggagatgctgccacagacacagagttggcgtggctattgtcatctgagggacatgcatgtgtttgtt

SEQ ID NO: 491411 - DNA, 201 bp, Homo sapiens
tttaaaatgttagaaaagctagcattgttgtaggattggaactgagatttttctagcgaggtgtttaggttatcaggttgtatactcactgaggtttggamaagtttaatggagatggggatccatttcaagctttgttataaggattttcttctctggtttttgaggcattaagaaaggttctcaggaaatgtgtctaag

SEQ ID NO: 491412 - DNA, 201 bp, Homo sapiens
tttttctcattcacaatggtctcctcattctttattttaaagtggatttccagtatttttagttctgaagtggaattttattgggttaaaatcagggttaytttaaaatgttagaaaagctagcattgttgtaggattggaactgagatttttctagcgaggtgtttaggttatcaggttgtatactcactgaggtttgga

SEQ ID NO: 491413 - DNA, 201 bp, Homo sapiens
tagaggcccaaatgcatattgtcaatatgtagaataaaaagaataccattttttcattgtaccaagcagaagagtcctgtcctccatgcctccttgatccrtggccccagcatgggcactgctgccagtgtggcacctgcccggcttatctccgtttctacaaaatcagtgtgctttccagctctcattggtctttttctt

SEQ ID NO: 491414 - DNA, 201 bp, Homo sapiens
aaggttctaggaatctgtggacatctttggggggcgccgttattttgctgatcacatattacatatattttaatattctagactagtatgaaaacaatgcyacttccattgctttatatatgtatatatatatatacacattgtctaatgctataattaaaaaaaagttgtagacacaaatatacccatttaaaaaaaaac

SEQ ID NO: 491415 - DNA, 201 bp, Homo sapiens
tgtggcacctgcccggcttatctccgtttctacaaaatcagtgtgctttccagctctcattggtctttttctttttctcattcacaatggtctcctcattrtttattttaaagtggatttccagtatttttagttctgaagtggaattttattgggttaaaatcagggttattttaaaatgttagaaaagctagcattgtt

SEQ ID NO: 491416 - DNA, 201 bp, Homo sapiens
attaaaaaaagtaatatactcagcttttatttattgaagatttttctctcgtacttataatagaggcccaaatgcatattgtcaatatgtagaataaaaakaataccattttttcattgtaccaagcagaagagtcctgtcctccatgcctccttgatccatggccccagcatgggcactgctgccagtgtggcacctgcc

SEQ ID NO: 491417 - DNA, 201 bp, Homo sapiens
gacgctgtctatgttgaccttggtggcagccacggttttcaggcatcagtgaggcaggagtcattgctctgaactctcattattctttccgaatctatttyttaattaaaaaaagtaatatactcagcttttatttattgaagatttttctctcgtacttataatagaggcccaaatgcatattgtcaatatgtagaataa

SEQ ID NO: 491418 - DNA, 201 bp, Homo sapiens
gattttgccatgagtgacatcagtttcttcccagacccttgtgctcttactgaacaacaaaagaagtgctgtttaaataagaaggagcagctggtttatgygcctgtttttggagttgggggtgtgctgtatgacaaagacgctgtctatgttgaccttggtggcagccacggttttcaggcatcagtgaggcaggagtca

SEQ ID NO: 491419 - DNA, 201 bp, Homo sapiens
tattctcttaagagagaaaatgaggggattaatggactgtagttctggacaaggtggaaaactcttaaagtggaagtattggggcaagtgctctgacaggstaggatggtgcagtcagtcccttcacccagaaatcagtagaatgttaacagttcagactcaaaccttgtgaaaaacaggtggtggaaaggaaatccctca

SEQ ID NO: 491420 - DNA, 201 bp, Homo sapiens
cccccagtcaacagtagatacttactgacttcttgtcagttgaagctggctttttgggtcctgtcttccaggggtagaagattttgccatgagtgacatcrgtttcttcccagacccttgtgctcttactgaacaacaaaagaagtgctgtttaaataagaaggagcagctggtttatgcgcctgtttttggagttggggg

SEQ ID NO: 491421 - DNA, 201 bp, Homo sapiens
gtcatggtttaagcccttggagtgtgcatcgtttttaaccccccagtcaacagtagatacttactgacttcttgtcagttgaagctggctttttgggtccygtcttccaggggtagaagattttgccatgagtgacatcagtttcttcccagacccttgtgctcttactgaacaacaaaagaagtgctgtttaaataagaa

SEQ ID NO: 491422 - DNA, 201 bp, Homo sapiens
aagcccacaaaaaagcagatttgtaaatgggcaatggatttgaatagacatttagccaaagaagacatccagttggtgaaaaggcatatggaaaggtgctyagcatcactgattatcaggaaaatgaaaatcaaaaccaccacaagtgctttagaccatagcggcatgcatgaaagttttcaggcctccagttgttgggag

SEQ ID NO: 491423 - DNA, 201 bp, Homo sapiens
tggccttggtggaggttttaaaagtaagccagctatgtgtaggcctgcaaaggtgttaccgaatgcctcttctctgacctcttgtcttgtagctagagggycactgttccagtgtggcacaatgcccttctttagggtcatggtttaagcccttggagtgtgcatcgtttttaaccccccagtcaacagtagatacttact

SEQ ID NO: 491424 - DNA, 201 bp, Homo sapiens
ttgtataaataaataggaaaaaaaaaagagaaaaacgtcaagaagcccacaaaaaagcagatttgtaaatgggcaatggatttgaatagacatttagccamagaagacatccagttggtgaaaaggcatatggaaaggtgctcagcatcactgattatcaggaaaatgaaaatcaaaaccaccacaagtgctttagaccat

SEQ ID NO: 491425 - DNA, 201 bp, Homo sapiens
gaaaaataaaagccaaattcacatgccaggtattctcttgttgtagaacatactagaatcacacataggattcttgggatggcttcatttctcaggaaaartgaaaaatgaccaaacaagggaagatggccttggtggaggttttaaaagtaagccagctatgtgtaggcctgcaaaggtgttaccgaatgcctcttctct

SEQ ID NO: 491426 - DNA, 201 bp, Homo sapiens
aaaaaaaaaaaaaagatttataactgggcagtggaattgaaaatcatttttaaaaatatccaaaatacctaaggaacttgtataaataaataggaaaaaaraaagagaaaaacgtcaagaagcccacaaaaaagcagatttgtaaatgggcaatggatttgaatagacatttagccaaagaagacatccagttggtgaaaa

SEQ ID NO: 491427 - DNA, 201 bp, Homo sapiens
cttttaattcctggaccatatatttcaaagctaaaaaggctagaaaaagaacagtgacaggatttattttgtgcctatttgaatagtgggggtagaagtgyagtggatggaaaatgtctactgatatcattgctcaaagatgctgtgcctttgggagtaaattaactatgagatgtttaggaaagtgggaggacttggaag

SEQ ID NO: 491428 - DNA, 201 bp, Homo sapiens
taataactcaggtaccttaacagtcactaatgagtgtctctccaaggtcaaaacaatggaagactgtagaagatgctattcattaagatatctcaagaatrtggaagactattattcgcttctcatgggacaggactttatagggcacctgaaaaaactcccatgaaaaatcacttttacaaaatgtcaagttatgatatc

SEQ ID NO: 491429 - DNA, 201 bp, Homo sapiens
tctgcttccaccacagaagtcagcagctctacctttctcttttctcctctttatctaataattgtctcctcttcaaatttgggaaatgaacttaatcaaakatttgttgtgtttttttgtttgtttgttttcgaaatgtggcctcagtgtgtttgcccaggctgatcttaaactcctgggctcacatgatcctccctctca

SEQ ID NO: 491430 - DNA, 201 bp, Homo sapiens
tacacatatgtaatacagtattttacactaaataatagtgactggcagtccattggccgaagaagtattatttttcagatattctgctctgtcatcagctrtagacactgacctggtatttatctggaaaggcttgctgtcaggggttcacagtgctgcttgtgggttatctccagaccctttacatacagcactttagga

SEQ ID NO: 491431 - DNA, 201 bp, Homo sapiens
ttatgtaatgtgtgtatatacaaatacctatatgtttgtgtgtacacatacagctaatatctgctgagattatgtatgcatgaactatagaattaacttgyaattttaagaaaataaattattttgtaaagataaatctcatgtttaagaagaggaattacaattgaatcatttagggatgcctcagcctaaacataatat

SEQ ID NO: 491432 - DNA, 201 bp, Homo sapiens
ccaggcactgccccttcctttccatactgctctggtccatcagccacagaatcgtttctgtgctcagaggcctcacctccctctcctcaccatacttagayggatgcccctgctcggctgcagagcagtctgcctctgtgtggttctaataagtcctgaaagaagccagcaaggctctgcaagcctcaggacagtggcttt

SEQ ID NO: 491433 - DNA, 201 bp, Homo sapiens
gaagaagacaaagaagcgattaaaacacaggttctggacagaagtttacctggtaggaagagaaataattgttagatgctaacagtataatccttttaaamtagactgaagaggctgggcacagtggctcatgcctgtaatcccagcactttgggaggtagaggtgggtggatcgcttgaggccaggagtttcgagctcag

SEQ ID NO: 491434 - DNA, 201 bp, Homo sapiens
cttcttcaaacacaataagcaactgaagaagacaaagaagcgattaaaacacaggttctggacagaagtttacctggtaggaagagaaataattgttagamgctaacagtataatccttttaaaatagactgaagaggctgggcacagtggctcatgcctgtaatcccagcactttgggaggtagaggtgggtggatcgct

SEQ ID NO: 491435 - DNA, 201 bp, Homo sapiens
agggccagatagtagatattttcagctttgtggatcatatcttttgcagctacttagctctgcagttgtagtgcacaggcggccatagacgatatgtaaakgaattaatgtggctatgttccaataaaactttagttacaaacacaggtgatgggctggattgggtcgatgggccagttgccaacccctagtgtaggtggt

SEQ ID NO: 491436 - DNA, 201 bp, Homo sapiens
aacatttcaatttcattcttttagttctgaattatataataaattatagtcaccctattgtgctgttggacactagaatttattctaactgtatttttgtrcctgttaacctttccctctttttccctccctccctgctccccttcccagtctcttaaccatcattgagagagatgcctatgtaaatctttttaagatttt

SEQ ID NO: 491437 - DNA, 201 bp, Homo sapiens
atatttatggggtacatgtagtattttgatagaagcatacaatgtgtgatgatcaaatcaaggtaattcagatgtccgtcacttcaaacatttatcatttrtttgtgttgggaacatttcaatttcattcttttagttctgaattatataataaattatagtcaccctattgtgctgttggacactagaatttattctaac

SEQ ID NO: 491438 - DNA, 201 bp, Homo sapiens
gattgaatagttcatagaagtcatttgtttctcttttatttaagatgtagcaagtttctaattttaaagacatattaagagatgcctttacttttttttakttttagttattatggatacataatagttgtacatatttatggggtacatgtagtattttgatagaagcatacaatgtgtgatgatcaaatcaaggtaatt

SEQ ID NO: 491439 - DNA, 201 bp, Homo sapiens
gtaaggattactaaatcttgtatacttgaaatgattgaatagttcatagaagtcatttgtttctcttttatttaagatgtagcaagtttctaattttaaayacatattaagagatgcctttacttttttttatttttagttattatggatacataatagttgtacatatttatggggtacatgtagtattttgatagaagc

SEQ ID NO: 491440 - DNA, 201 bp, Homo sapiens
tgtaatgtctgtaatgtcagaaaactaaataacattcaaattttgaacatgtaatgctactattagtaaaaataagtgttattaatgtaaagttgtgtaamgattactaaatcttgtatacttgaaatgattgaatagttcatagaagtcatttgtttctcttttatttaagatgtagcaagtttctaattttaaagacat

SEQ ID NO: 491441 - DNA, 201 bp, Homo sapiens
tcccgccattgcactccagcctgggcaacaagagcgaaattccatctcaaaaaaaaaaaaaaaaaaaagcaaaaaataagccatattgattaggaagtgtrggatgacagataccttggttttttcatttttatttagttttttctagagctacagatttcatactttggcccaggaagactcctaaaatataaagtaaaa

SEQ ID NO: 491442 - DNA, 201 bp, Homo sapiens
atatacctacaaatatatcatagtaagtaccatttcttcttggacccttcctggcactgtgctaactgctttctacaaatttagcttacataaacccttgwtacacccttgaggtgagtaggtattatctgtagtttacataagatgaaatagagcctcccagcagttaagtaacttgtgtgaagatgggacccttgttcc

SEQ ID NO: 491443 - DNA, 201 bp, Homo sapiens
ttgtaactttaaatagacatcatctcaagtctacaagaattatccaaaacggtatttaatgacatttctaggtcttcagacactattaatgtagattgtascctctaggtcctgaggatttttactggatactggttactgaaactgagctttcttgaattctttttccttccactgtggtttcccgcatttcaacacatc

SEQ ID NO: 491444 - DNA, 201 bp, Homo sapiens
tttccatatccaattgttttctgtaatgaatacagaaatatgggcactattttgtaactttaaatagacatcatctcaagtctacaagaattatccaaaayggtatttaatgacatttctaggtcttcagacactattaatgtagattgtagcctctaggtcctgaggatttttactggatactggttactgaaactgagc

SEQ ID NO: 491445 - DNA, 201 bp, Homo sapiens
aactttattgtgattattcttgctttaagctgaaacttccctaatctttctttagagattgtggcatagcatgttagtttcttttccatatccaattgttktctgtaatgaatacagaaatatgggcactattttgtaactttaaatagacatcatctcaagtctacaagaattatccaaaacggtatttaatgacatttc

SEQ ID NO: 491446 - DNA, 201 bp, Homo sapiens
ttcatatatgcttgcaaagggttgtaaaactttattgtgattattcttgctttaagctgaaacttccctaatctttctttagagattgtggcatagcatgwtagtttcttttccatatccaattgttttctgtaatgaatacagaaatatgggcactattttgtaactttaaatagacatcatctcaagtctacaagaatt

SEQ ID NO: 491447 - DNA, 201 bp, Homo sapiens
cattttataatttaatttttctcattttttctgttctcttagcttaagaaaagatcattacaaactttttgtatgtttttcatatatgcttgcaaagggtygtaaaactttattgtgattattcttgctttaagctgaaacttccctaatctttctttagagattgtggcatagcatgttagtttcttttccatatccaat

SEQ ID NO: 491448 - DNA, 201 bp, Homo sapiens
gtcattgtgaaacctcacagcttcagtcagtgtcagcacagctagggagcatgtacctaatgcacatatcactgggcatagtctacaggcacctaataacycaggtaccttaacagtcactaatgagtgtctctccaaggtcaaaacaatggaagactgtagaagatgctattcattaagatatctcaagaatgtggaaga

SEQ ID NO: 491449 - DNA, 201 bp, Homo sapiens
tggtcggctcttgcctaatgggatatattttctctttgaatgatttggcaagatatcagatgagagaagttgaataaatgttagaagaacatagaaaaaayaggttatacacgttgggtttctgaagaaatgatgtctttggagaaacaaaacttttattgatttctggaaacatttagggccaattttttatgtaaataa

SEQ ID NO: 491450 - DNA, 201 bp, Homo sapiens
aagatcttgtctaagatgccttcacaaactttgtccatgagaactctaaggacttctccagacctgttggctgctgctgtgatctctgcccaagaggagcytctgaccaacatccaaagggcttctggacccactggactcctctggaggtaccttggtctcccgatccatggctgtggttttttactccgtttatcactg

SEQ ID NO: 491451 - DNA, 201 bp, Homo sapiens
gataatgagaatagacccatctgcagaggatcataaaaccagcaaagacaagatcttgtctaagatgccttcacaaactttgtccatgagaactctaaggwcttctccagacctgttggctgctgctgtgatctctgcccaagaggagcctctgaccaacatccaaagggcttctggacccactggactcctctggaggta

SEQ ID NO: 491452 - DNA, 201 bp, Homo sapiens
ggctgagataatgagaatagacccatctgcagaggatcataaaaccagcaaagacaagatcttgtctaagatgccttcacaaactttgtccatgagaactstaaggacttctccagacctgttggctgctgctgtgatctctgcccaagaggagcctctgaccaacatccaaagggcttctggacccactggactcctctg

SEQ ID NO: 491453 - DNA, 201 bp, Homo sapiens
gtccccccatccccaaagagataaacatatatgaatgaactcacatgataacaactactgctgcctgggatcatgagagacctgaactgaactgataggawgtgaaaggtggctgagataatgagaatagacccatctgcagaggatcataaaaccagcaaagacaagatcttgtctaagatgccttcacaaactttgtcc

SEQ ID NO: 491454 - DNA, 201 bp, Homo sapiens
cggcagtcttggtgtctggtgaaggcctgctttctcatagaggcttccttcttgctgtgtcttcacatggggagaggaacaaacaagctcccttgtgcctktaataaggtgctaatcccagtcatgagggcagagtctcatgtaaggcttaacctcctaatacatcaccttgagggttaggattttaacacatgaacattg

SEQ ID NO: 491455 - DNA, 201 bp, Homo sapiens
cttgataatatgtttggttatttttgttttcattgcttttagtgtcagagatggctttggattccccgttctgtgtgctgttgtctggctcctgaacccasctgtagaggtgtgtcaatcccaactggtgaagtactgagaggaagctacacaaaaggcagcaaagtattagtaagtgtacctctgacattttaaccacct

SEQ ID NO: 491456 - DNA, 201 bp, Homo sapiens
attattttagagtagttttgagtgcacagcaaaatggagtgcagagtccagagatctcatatggcctcgattcctgtacactctcaggtcactccaccaayaacctcctacaccagagccactttgaaacattagaaaatatatttgagcattcagaaatgtataaactaggcagctccagactgcaagcagctcagagtt

SEQ ID NO: 491457 - DNA, 201 bp, Homo sapiens
cttttctttatctttggagcatccatattttcttttttgagacagtcttactctgtggcacaggctggaatgcactggcgtgattacagctcactgtagcstcaaccacccaggctcaagcaatccgcctactttagcctcctgagtagtggatgccaccacgcctggctaatttttcttttttttttcctttcttttttg

SEQ ID NO: 491458 - DNA, 201 bp, Homo sapiens
agagcctctgctcttatccattatgatgcactgccttggtatttaccttttggtttttaaaaaactattcaaatcacccataaaacagtcagatttaaggwgtgttcagttttcaactctatatactattgaagtcgtcttgttacatctttatccaacagcaattatttggatgggggtgagaagttaagttaataattg

SEQ ID NO: 491459 - DNA, 201 bp, Homo sapiens
tatataaagactttctgtttccgctcgtgtgtgtgtctgtgggaagcctctgactcacttctgtgccccagtagcaccctgtgcagccttgcaatgtagcycttattgcatggcacggaagatactagtttggatttcctctgcaagtcagatcatagctatatccatttactggcacagtggctagcacatcatagacag

SEQ ID NO: 491460 - DNA, 201 bp, Homo sapiens
ctagtgcccagctctcctaactcccggccagtgttccttgacatatggtgatatataaagactttctgtttccgctcgtgtgtgtgtctgtgggaagcctytgactcacttctgtgccccagtagcaccctgtgcagccttgcaatgtagcccttattgcatggcacggaagatactagtttggatttcctctgcaagtca

SEQ ID NO: 491461 - DNA, 201 bp, Homo sapiens
aagcgttcctagtgcccagctctcctaactcccggccagtgttccttgacatatggtgatatataaagactttctgtttccgctcgtgtgtgtgtctgtgrgaagcctctgactcacttctgtgccccagtagcaccctgtgcagccttgcaatgtagcccttattgcatggcacggaagatactagtttggatttcctct

SEQ ID NO: 491462 - DNA, 201 bp, Homo sapiens
tagacctgagccgaatctgttgaccccaaattgtgcttttcccaccaagaagaaaagggagagaaacattagtacaagttcggaactaaaatatagtagasaagcaacataacctcggaaatcacacagctgttcggtttcaaagcgttcctagtgcccagctctcctaactcccggccagtgttccttgacatatggtga

SEQ ID NO: 491463 - DNA, 201 bp, Homo sapiens
gcactgggaagatcgcgagtgggaaggtcctcccgcggtcctccgggtcatctttcctcctgaggagcagcatatttcgcatctgccggaggtgtgcccgrggtcgttgggagagtgacgggatgaattgctgcagagagcccggacggggagggaaggtgtcggggagacgtcgtttcctggcgacgtggtcccggccgg

SEQ ID NO: 491464 - DNA, 201 bp, Homo sapiens
ccagttggagacttgaaaagggctacgtgatagttatagatttttaaagatatattattattttagagtagttttgagtgcacagcaaaatggagtgcagrgtccagagatctcatatggcctcgattcctgtacactctcaggtcactccaccaacaacctcctacaccagagccactttgaaacattagaaaatatatt

SEQ ID NO: 491465 - DNA, 201 bp, Homo sapiens
tatatatatatatacacattgtctaatgctataattaaaaaaaagttgtagacacaaatatacccatttaaaaaaaaacccattttttgctattttacttyatactgccaactcctttttcctgaaactgcttcaactctggaattcttttttgctgttagttttattttattgaaatattcatgaacgagcatacacttg

SEQ ID NO: 491466 - DNA, 201 bp, Homo sapiens
tcctattgtcttaaaatggggtcactcatctccagtagaattaagtccacagtgaagttgtccccccatccccaaagagataaacatatatgaatgaactyacatgataacaactactgctgcctgggatcatgagagacctgaactgaactgataggaagtgaaaggtggctgagataatgagaatagacccatctgcag

SEQ ID NO: 491467 - DNA, 201 bp, Homo sapiens
atcaagacagaatgtttgcagaataaatggagttacctgctttcagccccaggttgtagctattgtctgccctgatgatatgtgataataatttgtgatcmtattgtcttaaaatggggtcactcatctccagtagaattaagtccacagtgaagttgtccccccatccccaaagagataaacatatatgaatgaactcac

SEQ ID NO: 491468 - DNA, 201 bp, Homo sapiens
gtggaaaggaaatccctcacagcaactggcaccataatcaagacagaatgtttgcagaataaatggagttacctgctttcagccccaggttgtagctattstctgccctgatgatatgtgataataatttgtgatcctattgtcttaaaatggggtcactcatctccagtagaattaagtccacagtgaagttgtcccccc

SEQ ID NO: 491469 - DNA, 201 bp, Homo sapiens
taacagttcagactcaaaccttgtgaaaaacaggtggtggaaaggaaatccctcacagcaactggcaccataatcaagacagaatgtttgcagaataaatrgagttacctgctttcagccccaggttgtagctattgtctgccctgatgatatgtgataataatttgtgatcctattgtcttaaaatggggtcactcatct

SEQ ID NO: 491470 - DNA, 201 bp, Homo sapiens
atgttaacagttcagactcaaaccttgtgaaaaacaggtggtggaaaggaaatccctcacagcaactggcaccataatcaagacagaatgtttgcagaatwaatggagttacctgctttcagccccaggttgtagctattgtctgccctgatgatatgtgataataatttgtgatcctattgtcttaaaatggggtcactc

SEQ ID NO: 491471 - DNA, 201 bp, Homo sapiens
agaatgttaacagttcagactcaaaccttgtgaaaaacaggtggtggaaaggaaatccctcacagcaactggcaccataatcaagacagaatgtttgcagrataaatggagttacctgctttcagccccaggttgtagctattgtctgccctgatgatatgtgataataatttgtgatcctattgtcttaaaatggggtca

SEQ ID NO: 491472 - DNA, 201 bp, Homo sapiens
cagtagaatgttaacagttcagactcaaaccttgtgaaaaacaggtggtggaaaggaaatccctcacagcaactggcaccataatcaagacagaatgtttrcagaataaatggagttacctgctttcagccccaggttgtagctattgtctgccctgatgatatgtgataataatttgtgatcctattgtcttaaaatggg

SEQ ID NO: 491473 - DNA, 201 bp, Homo sapiens
aaatcagtagaatgttaacagttcagactcaaaccttgtgaaaaacaggtggtggaaaggaaatccctcacagcaactggcaccataatcaagacagaatktttgcagaataaatggagttacctgctttcagccccaggttgtagctattgtctgccctgatgatatgtgataataatttgtgatcctattgtcttaaaa

SEQ ID NO: 491474 - DNA, 201 bp, Homo sapiens
tgaccactttttgatttttttttctggttcaggtgagtggtgtcattgagcaaacacgaagtcgggctcatccaaggatgagattttgccagagaaaggaygagcagcaagtcagggagcttaaggtaattatgggaaagtgactatctacaattgcttaggtagaaggagacagattggatttttgtgtgtttggtattt

SEQ ID NO: 491475 - DNA, 201 bp, Homo sapiens
atttctggaaacatttagggccaattttttatgtaaataatttgaatttatgatgatatctctgaccactttttgatttttttttctggttcaggtgagtrgtgtcattgagcaaacacgaagtcgggctcatccaaggatgagattttgccagagaaaggacgagcagcaagtcagggagcttaaggtaattatgggaaa

SEQ ID NO: 491476 - DNA, 201 bp, Homo sapiens
agcctctgaccaacatccaaagggcttctggacccactggactcctctggaggtaccttggtctcccgatccatggctgtggttttttactccgtttatcrctgcctgtgtgtagaatgataattgcacaattgatagtgtgaagacctcttgataaatggtgaatctgagcatatgtatttggctgacatgtcattgtga

SEQ ID NO: 491477 - DNA, 201 bp, Homo sapiens
caagaggagcctctgaccaacatccaaagggcttctggacccactggactcctctggaggtaccttggtctcccgatccatggctgtggttttttactccstttatcactgcctgtgtgtagaatgataattgcacaattgatagtgtgaagacctcttgataaatggtgaatctgagcatatgtatttggctgacatgtc

SEQ ID NO: 491478 - DNA, 201 bp, Homo sapiens
ttggagaaacaaaacttttattgatttctggaaacatttagggccaattttttatgtaaataatttgaatttatgatgatatctctgaccactttttgatwtttttttctggttcaggtgagtggtgtcattgagcaaacacgaagtcgggctcatccaaggatgagattttgccagagaaaggacgagcagcaagtcagg

SEQ ID NO: 491479 - DNA, 201 bp, Homo sapiens
tgaatgatttggcaagatatcagatgagagaagttgaataaatgttagaagaacatagaaaaaataggttatacacgttgggtttctgaagaaatgatgtstttggagaaacaaaacttttattgatttctggaaacatttagggccaattttttatgtaaataatttgaatttatgatgatatctctgaccactttttga

SEQ ID NO: 491480 - DNA, 201 bp, Homo sapiens
gcctaatgggatatattttctctttgaatgatttggcaagatatcagatgagagaagttgaataaatgttagaagaacatagaaaaaataggttatacacrttgggtttctgaagaaatgatgtctttggagaaacaaaacttttattgatttctggaaacatttagggccaattttttatgtaaataatttgaatttatg

SEQ ID NO: 491481 - DNA, 201 bp, Homo sapiens
tgtgcatatgattttctcaggtgatgggaatatggtcggctcttgcctaatgggatatattttctctttgaatgatttggcaagatatcagatgagagaarttgaataaatgttagaagaacatagaaaaaataggttatacacgttgggtttctgaagaaatgatgtctttggagaaacaaaacttttattgatttctgg

SEQ ID NO: 491482 - DNA, 201 bp, Homo sapiens
gtgacaaatggaggggtactttttctgacatgatgaggcagagaaaggtgaggtgggcgcatcctgtgcatatgattttctcaggtgatgggaatatggtsggctcttgcctaatgggatatattttctctttgaatgatttggcaagatatcagatgagagaagttgaataaatgttagaagaacatagaaaaaataggt

SEQ ID NO: 491483 - DNA, 201 bp, Homo sapiens
aactcttagactcaaataatctgcctgcattggcctccccaagtgctggaattacaggccatctaaatcttttatctcagatttgccttgtgacaaatggwggggtactttttctgacatgatgaggcagagaaaggtgaggtgggcgcatcctgtgcatatgattttctcaggtgatgggaatatggtcggctcttgcct

SEQ ID NO: 491484 - DNA, 201 bp, Homo sapiens
tttaatcgaactggctccaaccagttggagacttgaaaagggctacgtgatagttatagatttttaaagatatattattattttagagtagttttgagtgyacagcaaaatggagtgcagagtccagagatctcatatggcctcgattcctgtacactctcaggtcactccaccaacaacctcctacaccagagccacttt

SEQ ID NO: 491485 - DNA, 201 bp, Homo sapiens
ttcttttgaactcttagactcaaataatctgcctgcattggcctccccaagtgctggaattacaggccatctaaatcttttatctcagatttgccttgtgrcaaatggaggggtactttttctgacatgatgaggcagagaaaggtgaggtgggcgcatcctgtgcatatgattttctcaggtgatgggaatatggtcggc

SEQ ID NO: 491486 - DNA, 201 bp, Homo sapiens
agttgcttaggcttcttttgaactcttagactcaaataatctgcctgcattggcctccccaagtgctggaattacaggccatctaaatcttttatctcagrtttgccttgtgacaaatggaggggtactttttctgacatgatgaggcagagaaaggtgaggtgggcgcatcctgtgcatatgattttctcaggtgatggg

SEQ ID NO: 491487 - DNA, 201 bp, Homo sapiens
taaggaggaattgagtgcactgcagccacctcagcctcatggccacctgtttatttgattatttttaaaagagaagagccttttaaaaatatctgttgccstggctggagtgcagtgacgtgatcatggctcactgcagccacaaccttccagctcaggtgatcctcccacctcagtgctccccaccctgagtagctggga

SEQ ID NO: 491488 - DNA, 201 bp, Homo sapiens
taagtttccttttattatttacactgagtcaagttttggtttatttaaggaggaattgagtgcactgcagccacctcagcctcatggccacctgtttattkgattatttttaaaagagaagagccttttaaaaatatctgttgccctggctggagtgcagtgacgtgatcatggctcactgcagccacaaccttccagctc

SEQ ID NO: 491489 - DNA, 201 bp, Homo sapiens
gctgagattatgtatgcatgaactatagaattaacttgtaattttaagaaaataaattattttgtaaagataaatctcatgtttaagaagaggaattacarttgaatcatttagggatgcctcagcctaaacataatatggaaaaagccataaccaaaagtcattttagagtactgctaggttactcaacctatcatcaca

SEQ ID NO: 491490 - DNA, 201 bp, Homo sapiens
gtgatctctgcccaagaggagcctctgaccaacatccaaagggcttctggacccactggactcctctggaggtaccttggtctcccgatccatggctgtgkttttttactccgtttatcactgcctgtgtgtagaatgataattgcacaattgatagtgtgaagacctcttgataaatggtgaatctgagcatatgtattt

SEQ ID NO: 491491 - DNA, 201 bp, Homo sapiens
cattttagaacagcggacttgggactaaagcatctttctatctgggatcagtatttctaagttgcctttaagctgaataaacatttggtttttatatttarttgcttcgatgtgaaacactgcaatttaaaaaattacacatatgtaatacagtattttacactaaataatagtgactggcagtccattggccgaagaagt

SEQ ID NO: 491492 - DNA, 201 bp, Homo sapiens
tccagacctgttggctgctgctgtgatctctgcccaagaggagcctctgaccaacatccaaagggcttctggacccactggactcctctggaggtaccttrgtctcccgatccatggctgtggttttttactccgtttatcactgcctgtgtgtagaatgataattgcacaattgatagtgtgaagacctcttgataaatg

SEQ ID NO: 491493 - DNA, 201 bp, Homo sapiens
tgagaatagacccatctgcagaggatcataaaaccagcaaagacaagatcttgtctaagatgccttcacaaactttgtccatgagaactctaaggacttcwccagacctgttggctgctgctgtgatctctgcccaagaggagcctctgaccaacatccaaagggcttctggacccactggactcctctggaggtaccttg

SEQ ID NO: 491494 - DNA, 201 bp, Homo sapiens
ataatgagaatagacccatctgcagaggatcataaaaccagcaaagacaagatcttgtctaagatgccttcacaaactttgtccatgagaactctaaggayttctccagacctgttggctgctgctgtgatctctgcccaagaggagcctctgaccaacatccaaagggcttctggacccactggactcctctggaggtac

SEQ ID NO: 491495 - DNA, 201 bp, Homo sapiens
gtcagtgtcagcacagctagggagcatgtacctaatgcacatatcactgggcatagtctacaggcacctaataactcaggtaccttaacagtcactaatgmgtgtctctccaaggtcaaaacaatggaagactgtagaagatgctattcattaagatatctcaagaatgtggaagactattattcgcttctcatgggacag

SEQ ID NO: 491496 - DNA, 201 bp, Homo sapiens
acttgattgggtaaagtggagcagtggcctcatttggaacattacagtggaaagtctctagttagatattagttggtggtttctgactggttaagcttaartttccttttattatttacactgagtcaagttttggtttatttaaggaggaattgagtgcactgcagccacctcagcctcatggccacctgtttatttgat

SEQ ID NO: 491497 - DNA, 201 bp, Homo sapiens
tccagactgcaagcagctcagagttccaacagagaggcttagggagggtgggggaagaattttatatggtgaatgtggaagaaaaaatacttgattgggtraagtggagcagtggcctcatttggaacattacagtggaaagtctctagttagatattagttggtggtttctgactggttaagcttaagtttccttttatt

SEQ ID NO: 491498 - DNA, 201 bp, Homo sapiens
catggttcagtttgagaggttcatgtgtcccttatgagaagggacaggaaagccaggaggacaggagtatgtttgggcctgtgcctctgcttccaccacaraagtcagcagctctacctttctcttttctcctctttatctaataattgtctcctcttcaaatttgggaaatgaacttaatcaaagatttgttgtgttttt

SEQ ID NO: 491499 - DNA, 201 bp, Homo sapiens
gagtccagagatctcatatggcctcgattcctgtacactctcaggtcactccaccaacaacctcctacaccagagccactttgaaacattagaaaatatayttgagcattcagaaatgtataaactaggcagctccagactgcaagcagctcagagttccaacagagaggcttagggagggtgggggaagaattttatatg

SEQ ID NO: 491500 - DNA, 201 bp, Homo sapiens
ttttaaagatatattattattttagagtagttttgagtgcacagcaaaatggagtgcagagtccagagatctcatatggcctcgattcctgtacactctcrggtcactccaccaacaacctcctacaccagagccactttgaaacattagaaaatatatttgagcattcagaaatgtataaactaggcagctccagactgc

SEQ ID NO: 491501 - DNA, 201 bp, Homo sapiens
tatagatttttaaagatatattattattttagagtagttttgagtgcacagcaaaatggagtgcagagtccagagatctcatatggcctcgattcctgtayactctcaggtcactccaccaacaacctcctacaccagagccactttgaaacattagaaaatatatttgagcattcagaaatgtataaactaggcagctcc

SEQ ID NO: 491502 - DNA, 201 bp, Homo sapiens
gggctacgtgatagttatagatttttaaagatatattattattttagagtagttttgagtgcacagcaaaatggagtgcagagtccagagatctcatatgscctcgattcctgtacactctcaggtcactccaccaacaacctcctacaccagagccactttgaaacattagaaaatatatttgagcattcagaaatgtat

SEQ ID NO: 491503 - DNA, 201 bp, Homo sapiens
gcttcttgccagttgggtcagaactagcttattaaccagttttttctgagctttaatcgaactggctccaaccagttggagacttgaaaagggctacgtgmtagttatagatttttaaagatatattattattttagagtagttttgagtgcacagcaaaatggagtgcagagtccagagatctcatatggcctcgattcc

SEQ ID NO: 491504 - DNA, 201 bp, Homo sapiens
tttcagcgggctcaggaccaggctgaagggcctccaagcttcctccagtttcctggtgcatgcatgtgcaatatactcccctggccttggtctttcctaaygcttcttgccagttgggtcagaactagcttattaaccagttttttctgagctttaatcgaactggctccaaccagttggagacttgaaaagggctacgtg

SEQ ID NO: 491505 - DNA, 201 bp, Homo sapiens
ccaggcatctgtgcctgtaactgcagtttcagcgggctcaggaccaggctgaagggcctccaagcttcctccagtttcctggtgcatgcatgtgcaatatrctcccctggccttggtctttcctaacgcttcttgccagttgggtcagaactagcttattaaccagttttttctgagctttaatcgaactggctccaacca

SEQ ID NO: 491506 - DNA, 201 bp, Homo sapiens
gagccaccgcacctggcctgtttattctcttaagagagaaaatgaggggattaatggactgtagttctggacaaggtggaaaactcttaaagtggaagtaytggggcaagtgctctgacaggctaggatggtgcagtcagtcccttcacccagaaatcagtagaatgttaacagttcagactcaaaccttgtgaaaaacag

SEQ ID NO: 491507 - DNA, 201 bp, Homo sapiens
aatcatggcctaacatccttagctactgatcgcagaggagactctgcgcatttgtgttcatgtggccttggatgttggcagattcagattggtgccccagrcatctgtgcctgtaactgcagtttcagcgggctcaggaccaggctgaagggcctccaagcttcctccagtttcctggtgcatgcatgtgcaatatactcc

SEQ ID NO: 491508 - DNA, 201 bp, Homo sapiens
tgataggaagtgaaaggtggctgagataatgagaatagacccatctgcagaggatcataaaaccagcaaagacaagatcttgtctaagatgccttcacaarctttgtccatgagaactctaaggacttctccagacctgttggctgctgctgtgatctctgcccaagaggagcctctgaccaacatccaaagggcttctgg

SEQ ID NO: 491509 - DNA, 201 bp, Homo sapiens
ctgtcatcagctgtagacactgacctggtatttatctggaaaggcttgctgtcaggggttcacagtgctgcttgtgggttatctccagaccctttacatayagcactttaggacagcgtgagtcacaggttgcactagaagttgcctttgaaattagacctaaactatgtggaactggaacccttgtacacaaagctctct

SEQ ID NO: 491510 - DNA, 201 bp, Homo sapiens
ccaaccagttggagacttgaaaagggctacgtgatagttatagatttttaaagatatattattattttagagtagttttgagtgcacagcaaaatggagtrcagagtccagagatctcatatggcctcgattcctgtacactctcaggtcactccaccaacaacctcctacaccagagccactttgaaacattagaaaata

SEQ ID NO: 491511 - DNA, 201 bp, Homo sapiens
gagacaacaaaagcctacagaatctatagttctcagttcatctcccatcctagtccaatcatggcctaacatccttagctactgatcgcagaggagactcygcgcatttgtgttcatgtggccttggatgttggcagattcagattggtgccccaggcatctgtgcctgtaactgcagtttcagcgggctcaggaccaggc

SEQ ID NO: 491512 - DNA, 201 bp, Homo sapiens
ggtgtgtgtgtgggtgtgtgtgtgtgtgtgtgtgtgtgtgtgtgtgttcatcacttgttgcttgggggtgggaagagacaacaaaagcctacagaatctakagttctcagttcatctcccatcctagtccaatcatggcctaacatccttagctactgatcgcagaggagactctgcgcatttgtgttcatgtggccttgg

SEQ ID NO: 491513 - DNA, 201 bp, Homo sapiens
attccctggagggagatcctgttagtcactacagggtgtgtgtgtgggtgtgtgtgtgtgtgtgtgtgtgtgtgtgtgtgttcatcacttgttgcttgggkgtgggaagagacaacaaaagcctacagaatctatagttctcagttcatctcccatcctagtccaatcatggcctaacatccttagctactgatcgcagag

SEQ ID NO: 491514 - DNA, 201 bp, Homo sapiens
tctgaaagggggctcaaggaagtagctgtgaaaggcccctgggatgttttctgctcccctttctgcaaattccctggagggagatcctgttagtcactacrgggtgtgtgtgtgggtgtgtgtgtgtgtgtgtgtgtgtgtgtgtgtgttcatcacttgttgcttgggggtgggaagagacaacaaaagcctacagaatct

SEQ ID NO: 491515 - DNA, 201 bp, Homo sapiens
aggatgttgcttagaggtatttctatcagtgttgagtagaagagatcatttcttgatgttgaacttcaggtaaggatgccagcttctgcatatcagggtgrtgatgcttgggctgagacaggtctagacagcactgtctgaaagggggctcaaggaagtagctgtgaaaggcccctgggatgttttctgctcccctttctg

SEQ ID NO: 491516 - DNA, 201 bp, Homo sapiens
ccctgccaatgaggatgttgcttagaggtatttctatcagtgttgagtagaagagatcatttcttgatgttgaacttcaggtaaggatgccagcttctgcrtatcagggtggtgatgcttgggctgagacaggtctagacagcactgtctgaaagggggctcaaggaagtagctgtgaaaggcccctgggatgttttctgc

SEQ ID NO: 491517 - DNA, 201 bp, Homo sapiens
atttggactttgtggcatagatggaaatttccaggttgtctaggtggtagacagaggcctcacttcttaacaaactcccccactccacccctgccaatgargatgttgcttagaggtatttctatcagtgttgagtagaagagatcatttcttgatgttgaacttcaggtaaggatgccagcttctgcatatcagggtggt

SEQ ID NO: 491518 - DNA, 201 bp, Homo sapiens
aatagaaaagccatttcactcaatggaatagaaacccagatccgatggagagatgttctaatctgccatacactggggcagtggccagtgatttggacttkgtggcatagatggaaatttccaggttgtctaggtggtagacagaggcctcacttcttaacaaactcccccactccacccctgccaatgaggatgttgctt

SEQ ID NO: 491519 - DNA, 201 bp, Homo sapiens
ttattctgttcctgtaatagaaaagccatttcactcaatggaatagaaacccagatccgatggagagatgttctaatctgccatacactggggcagtggcyagtgatttggactttgtggcatagatggaaatttccaggttgtctaggtggtagacagaggcctcacttcttaacaaactcccccactccacccctgcca

SEQ ID NO: 491520 - DNA, 201 bp, Homo sapiens
tggagttcagttgtaagacccttttgatcccttattctgttcctgtaatagaaaagccatttcactcaatggaatagaaacccagatccgatggagagatrttctaatctgccatacactggggcagtggccagtgatttggactttgtggcatagatggaaatttccaggttgtctaggtggtagacagaggcctcactt

SEQ ID NO: 491521 - DNA, 201 bp, Homo sapiens
agccctcacagcagcctgttgttcgtcctgcaattgtgtttccatcacattacacaaagcctctttgtcttcgtggttctaccctactaataagttttttwaaaaattatgtaatgtgtgtatatacaaatacctatatgtttgtgtgtacacatacagctaatatctgctgagattatgtatgcatgaactatagaatta

SEQ ID NO: 491522 - DNA, 201 bp, Homo sapiens
agaaagggtaaatgcagccctcacagcagcctgttgttcgtcctgcaattgtgtttccatcacattacacaaagcctctttgtcttcgtggttctaccctrctaataagttttttaaaaaattatgtaatgtgtgtatatacaaatacctatatgtttgtgtgtacacatacagctaatatctgctgagattatgtatgca

SEQ ID NO: 491523 - DNA, 201 bp, Homo sapiens
aaacaggtggtggaaaggaaatccctcacagcaactggcaccataatcaagacagaatgtttgcagaataaatggagttacctgctttcagccccaggttrtagctattgtctgccctgatgatatgtgataataatttgtgatcctattgtcttaaaatggggtcactcatctccagtagaattaagtccacagtgaagt

SEQ ID NO: 491524 - DNA, 201 bp, Homo sapiens
cagctggcttaagggtcctggggcctcgctgcgtcatatttgcacaagcctagtgtctgtgcagactgtacactggagttcagttgtaagacccttttgawcccttattctgttcctgtaatagaaaagccatttcactcaatggaatagaaacccagatccgatggagagatgttctaatctgccatacactggggcagt

SEQ ID NO: 491525 - DNA, 201 bp, Homo sapiens
gtctgtgtgtgtgtgtgtgtgtgtgtgtgtgtgtgtgtgtgtgtgatgtgtgtttacttggattgacttctttcagcatgaagcccactgttttgctgaaygtatctcactgtttcctgaaactcagtacattcagctggcttaagggtcctggggcctcgctgcgtcatatttgcacaagcctagtgtctgtgcagactg

SEQ ID NO: 491526 - DNA, 201 bp, Homo sapiens
gcaggtttttggtgagaggacctattggccactagggtgtctgtgtgtgtgtgtgtgtgtgtgtgtgtgtgtgtgtgtgtgtgatgtgtgtttacttggartgacttctttcagcatgaagcccactgttttgctgaatgtatctcactgtttcctgaaactcagtacattcagctggcttaagggtcctggggcctcgct

SEQ ID NO: 491527 - DNA, 201 bp, Homo sapiens
ctttctgctctcctgatcgcaggtttttggtgagaggacctattggccactagggtgtctgtgtgtgtgtgtgtgtgtgtgtgtgtgtgtgtgtgtgtgtwatgtgtgtttacttggattgacttctttcagcatgaagcccactgttttgctgaatgtatctcactgtttcctgaaactcagtacattcagctggcttaa

SEQ ID NO: 491528 - DNA, 201 bp, Homo sapiens
gctttctgctctcctgatcgcaggtttttggtgagaggacctattggccactagggtgtctgtgtgtgtgtgtgtgtgtgtgtgtgtgtgtgtgtgtgtgwgatgtgtgtttacttggattgacttctttcagcatgaagcccactgttttgctgaatgtatctcactgtttcctgaaactcagtacattcagctggctta

SEQ ID NO: 491529 - DNA, 201 bp, Homo sapiens
gctccagaaagggcagtggtggagccctgggaggctttctgctctcctgatcgcaggtttttggtgagaggacctattggccactagggtgtctgtgtgtrtgtgtgtgtgtgtgtgtgtgtgtgtgtgtgtgtgatgtgtgtttacttggattgacttctttcagcatgaagcccactgttttgctgaatgtatctcact

SEQ ID NO: 491530 - DNA, 201 bp, Homo sapiens
aaggggctccagaaagggcagtggtggagccctgggaggctttctgctctcctgatcgcaggtttttggtgagaggacctattggccactagggtgtctgkgtgtgtgtgtgtgtgtgtgtgtgtgtgtgtgtgtgtgtgatgtgtgtttacttggattgacttctttcagcatgaagcccactgttttgctgaatgtatc

SEQ ID NO: 491531 - DNA, 201 bp, Homo sapiens
cactgtctgaaggttccccctcatcattttaaaaggaagagaaattttctgccacagaggttctggtgaagtggcctgctcccacatcacagggtgatggyggtttgggctggaccaggatcagacagtgctgtcctgaggctggccgtctgataaggggctccagaaagggcagtggtggagccctgggaggctttctgc

SEQ ID NO: 491532 - DNA, 201 bp, Homo sapiens
ccctctccacccaccctaatcaggacactgtctgaaggttccccctcatcattttaaaaggaagagaaattttctgccacagaggttctggtgaagtggcytgctcccacatcacagggtgatggcggtttgggctggaccaggatcagacagtgctgtcctgaggctggccgtctgataaggggctccagaaagggcagt

SEQ ID NO: 491533 - DNA, 201 bp, Homo sapiens
tcactaacacccccacctgtccagtcttacctgccttcatatcaaaagcacacagttaacccagagggcttctgccctgccctgcctgactttctgggaarcccccctctccacccaccctaatcaggacactgtctgaaggttccccctcatcattttaaaaggaagagaaattttctgccacagaggttctggtgaagt

SEQ ID NO: 491534 - DNA, 201 bp, Homo sapiens
ccatggacctgtcttctatggccacatgtctctgtggctctttccttcccccttctcttccactgttaaggactcatgtgcttacttagtcctgaatggasacaccgtcatcatccacatagcccactgtcgtaatccatacaggctgctacaaggaaatgcattagaccaggtagcttataaacaatagaactttgtttc

SEQ ID NO: 491535 - DNA, 201 bp, Homo sapiens
ttacagcagaaagggtaaatgcagccctcacagcagcctgttgttcgtcctgcaattgtgtttccatcacattacacaaagcctctttgtcttcgtggttstaccctactaataagttttttaaaaaattatgtaatgtgtgtatatacaaatacctatatgtttgtgtgtacacatacagctaatatctgctgagattat

SEQ ID NO: 491536 - DNA, 201 bp, Homo sapiens
tctgttatgcggattaaatatccactatccgtgtttttccgagtcttacagcagaaagggtaaatgcagccctcacagcagcctgttgttcgtcctgcaawtgtgtttccatcacattacacaaagcctctttgtcttcgtggttctaccctactaataagttttttaaaaaattatgtaatgtgtgtatatacaaatacc

SEQ ID NO: 491537 - DNA, 201 bp, Homo sapiens
ttttttttatttttagttattatggatacataatagttgtacatatttatggggtacatgtagtattttgatagaagcatacaatgtgtgatgatcaaatsaaggtaattcagatgtccgtcacttcaaacatttatcatttttttgtgttgggaacatttcaatttcattcttttagttctgaattatataataaattat

SEQ ID NO: 491538 - DNA, 201 bp, Homo sapiens
gaattatataataaattatagtcaccctattgtgctgttggacactagaatttattctaactgtatttttgtacctgttaacctttccctctttttccctscctccctgctccccttcccagtctcttaaccatcattgagagagatgcctatgtaaatctttttaagattttcaaaaggagcacacacatttggtaaagc

SEQ ID NO: 491539 - DNA, 201 bp, Homo sapiens
ccctgaaatttctgttatgcggattaaatatccactatccgtgtttttccgagtcttacagcagaaagggtaaatgcagccctcacagcagcctgttgttygtcctgcaattgtgtttccatcacattacacaaagcctctttgtcttcgtggttctaccctactaataagttttttaaaaaattatgtaatgtgtgtata

SEQ ID NO: 491540 - DNA, 201 bp, Homo sapiens
taaaaattgtgggaagttttctgcaccctgaaatttctgttatgcggattaaatatccactatccgtgtttttccgagtcttacagcagaaagggtaaatrcagccctcacagcagcctgttgttcgtcctgcaattgtgtttccatcacattacacaaagcctctttgtcttcgtggttctaccctactaataagttttt

SEQ ID NO: 491541 - DNA, 201 bp, Homo sapiens
ttttttctgcctttttgtttccctccggagagtcggcgcgacggtgaatttccgtttccggtggtgtccaatccgacctgaggagtcacagttgtgagcargttcggtgccgcgggctggggtaggcggcagtggggtccctggctttggggcactgggaagatcgcgagtgggaaggtcctcccgcggtcctccgggtca

SEQ ID NO: 491542 - DNA, 201 bp, Homo sapiens
tgtattccctgcattgaatgcctttctattgacattgtctataaaaattgtgggaagttttctgcaccctgaaatttctgttatgcggattaaatatccastatccgtgtttttccgagtcttacagcagaaagggtaaatgcagccctcacagcagcctgttgttcgtcctgcaattgtgtttccatcacattacacaaa

SEQ ID NO: 491543 - DNA, 201 bp, Homo sapiens
gggcaagtgctctgacaggctaggatggtgcagtcagtcccttcacccagaaatcagtagaatgttaacagttcagactcaaaccttgtgaaaaacaggtkgtggaaaggaaatccctcacagcaactggcaccataatcaagacagaatgtttgcagaataaatggagttacctgctttcagccccaggttgtagctatt

SEQ ID NO: 491544 - DNA, 201 bp, Homo sapiens
acaaggtggaaaactcttaaagtggaagtattggggcaagtgctctgacaggctaggatggtgcagtcagtcccttcacccagaaatcagtagaatgttarcagttcagactcaaaccttgtgaaaaacaggtggtggaaaggaaatccctcacagcaactggcaccataatcaagacagaatgtttgcagaataaatgga

SEQ ID NO: 491545 - DNA, 201 bp, Homo sapiens
tgaggggattaatggactgtagttctggacaaggtggaaaactcttaaagtggaagtattggggcaagtgctctgacaggctaggatggtgcagtcagtcmcttcacccagaaatcagtagaatgttaacagttcagactcaaaccttgtgaaaaacaggtggtggaaaggaaatccctcacagcaactggcaccataatc

SEQ ID NO: 491546 - DNA, 201 bp, Homo sapiens
gtaccctggcaaataagcaagagttctttttcattttcatcttgcaattcaactgggtatttgggttctttttctattcactcatgtcagatagagacatrcatgttgtaaattattttgtcagaatgaaagcctggcagattaaatgctttcttctcttcttgctttacttgatatcaatctcttgttcatttcttgata

SEQ ID NO: 491547 - DNA, 201 bp, Homo sapiens
tctgagcagtgaagatgggatgttttgtggtccttttccctggtgtgcagagcccaagtggagttcttcagcacaccctagtccatcccctcactaacacscccacctgtccagtcttacctgccttcatatcaaaagcacacagttaacccagagggcttctgccctgccctgcctgactttctgggaaacccccctctc

SEQ ID NO: 491548 - DNA, 201 bp, Homo sapiens
ctagctcacagcagatctagccttctctgagcagtgaagatgggatgttttgtggtccttttccctggtgtgcagagcccaagtggagttcttcagcacaycctagtccatcccctcactaacacccccacctgtccagtcttacctgccttcatatcaaaagcacacagttaacccagagggcttctgccctgccctgcc

SEQ ID NO: 491549 - DNA, 201 bp, Homo sapiens
ctagacccagactggggtcccaaggcatgatagcccacagcttcttagcaagtgcatgttcagttggatcccccagctcagcctgggtcatccccaccttytgcctcttgggccatagctcagctctgcacactgagccatcatcctatggtgagcaagaccccattcttgggcttcagtctctttccttgcagcaggcaa

SEQ ID NO: 491550 - DNA, 201 bp, Homo sapiens
ctgggaggtggaggttgctgtgaaccaagattgcaccattgcactccagcctgggcaacaacagcaaaactctgtctcaaaaaaaaaaaaaaaaaaaaaaraaagatttataactgggcagtggaattgaaaatcatttttaaaaatatccaaaatacctaaggaacttgtataaataaataggaaaaaaaaaagagaaaa

SEQ ID NO: 491551 - DNA, 201 bp, Homo sapiens
atcttttttctcgccttttccacattctggagtctgcctgcattttttggctttgggctcttctccactgtcaccattagcaaccttgcatcccatggacytgtcttctatggccacatgtctctgtggctctttccttcccccttctcttccactgttaaggactcatgtgcttacttagtcctgaatggagacaccgtc

SEQ ID NO: 491552 - DNA, 201 bp, Homo sapiens
ctttaataaggtgctaatcccagtcatgagggcagagtctcatgtaaggcttaacctcctaatacatcaccttgagggttaggattttaacacatgaacaktgacggaacacaacgttcattccatagcaccagggtagtctcctcatgtgaaggtctttacctgagtcacatgcatgatgtaccattttcatgtaaggtt

SEQ ID NO: 491553 - DNA, 201 bp, Homo sapiens
agatcacaccagtgcactccagcctgggtgacagagcgagactctgttcttccccccaccccccaaaaaaaaaaaaaaaacacagaaagggataattggcygggcacagtggctcacgcctgtaatcccagcactttgggaggccaaggtggacagatcacctgagaccgggagttcaagaccagcctgaccaacatggag

SEQ ID NO: 491554 - DNA, 201 bp, Homo sapiens
ggcggaggctgcagtgagccgagatcacaccagtgcactccagcctgggtgacagagcgagactctgttcttccccccaccccccaaaaaaaaaaaaaaaacacagaaagggataattggccgggcacagtggctcacgcctgtaatcccagcactttgggaggccaaggtggacagatcacctgagaccgggagttcaag

SEQ ID NO: 491555 - DNA, 201 bp, Homo sapiens
tctaggaatctgtggacatctttggggggcgccgttattttgctgatcacatattacatatattttaatattctagactagtatgaaaacaatgccacttycattgctttatatatgtatatatatatatacacattgtctaatgctataattaaaaaaaagttgtagacacaaatatacccatttaaaaaaaaacccatt

SEQ ID NO: 491556 - DNA, 201 bp, Homo sapiens
ctggagtgcagtgacgtgatcatggctcactgcagccacaaccttccagctcaggtgatcctcccacctcagtgctccccaccctgagtagctgggactayaagcatgtgccagcacaccaccatgctaggctaatggtttgtatttgtttgagagatgcagtttccctaagttgcttaggcttcttttgaactcttagac

SEQ ID NO: 491557 - DNA, 201 bp, Homo sapiens
aggcggaggctgcagtgagccgagatcacaccagtgcactccagcctgggtgacagagcgagactctgttcttccccccaccccccaaaaaaaaaaaaaaaacacagaaagggataattggccgggcacagtggctcacgcctgtaatcccagcactttgggaggccaaggtggacagatcacctgagaccgggagttcaa

SEQ ID NO: 491558 - DNA, 201 bp, Homo sapiens
ggagaattgctggaacctgggaggcggaggctgcagtgagccgagatcacaccagtgcactccagcctgggtgacagagcgagactctgttcttcccccchccccccaaaaaaaaaaaaaaaacacagaaagggataattggccgggcacagtggctcacgcctgtaatcccagcactttgggaggccaaggtggacagat

SEQ ID NO: 491559 - DNA, 201 bp, Homo sapiens
acacaaaatggggccgggagtggtggctcccgcctgtaatcccaacactttgggagatcgaggtgggtggatcacctgaggtcaggagtttgagaccagcytggccaacatggtgaaaccccgtctctactaaaaatacaaaaattagctgggcatgtgttgcacgcccgtaatcttagctacccgggaaactgagtcagg

SEQ ID NO: 491560 - DNA, 201 bp, Homo sapiens
gcatataattttctcattttttcctcttcctctaaagctgctgttatttcttttaactttttgtgggaaaaattaaacccatctttcactttgttgatatrtataattgaactccttgatttttgcttgaattgcttttcaagttacccacttttagggaagacattatttgggttttgtttagtgtatcaggcttttttt

SEQ ID NO: 491561 - DNA, 201 bp, Homo sapiens
gctttatatatgtatatatatatatacacattgtctaatgctataattaaaaaaaagttgtagacacaaatatacccatttaaaaaaaaacccattttttkctattttactttatactgccaactcctttttcctgaaactgcttcaactctggaattcttttttgctgttagttttattttattgaaatattcatgaacg

SEQ ID NO: 491562 - DNA, 201 bp, Homo sapiens
tgattatttttaaaagagaagagccttttaaaaatatctgttgccctggctggagtgcagtgacgtgatcatggctcactgcagccacaaccttccagctyaggtgatcctcccacctcagtgctccccaccctgagtagctgggactacaagcatgtgccagcacaccaccatgctaggctaatggtttgtatttgtttg

SEQ ID NO: 491563 - DNA, 201 bp, Homo sapiens
ttttgaaatgaccctttgcttcctatgataatgattcttctggtccgttttgtagttatatgttagagtttgtaaatattcacacattttgcaactgcatrtaattttctcattttttcctcttcctctaaagctgctgttatttcttttaactttttgtgggaaaaattaaacccatctttcactttgttgatatttata

SEQ ID NO: 491564 - DNA, 201 bp, Homo sapiens
tacttaaattttttccacagaattaaattaaatatgaatcatccctcctctgatttttgaaatgaccctttgcttcctatgataatgattcttctggtccrttttgtagttatatgttagagtttgtaaatattcacacattttgcaactgcatataattttctcattttttcctcttcctctaaagctgctgttatttct

SEQ ID NO: 491565 - DNA, 201 bp, Homo sapiens
tggttactgaaactgagctttcttgaattctttttccttccactgtggtttcccgcatttcaacacatcacctatttttgtcctcaaacgttacttaaatkttttccacagaattaaattaaatatgaatcatccctcctctgatttttgaaatgaccctttgcttcctatgataatgattcttctggtccgttttgtagt

SEQ ID NO: 491566 - DNA, 201 bp, Homo sapiens
caggcacctaataactcaggtaccttaacagtcactaatgagtgtctctccaaggtcaaaacaatggaagactgtagaagatgctattcattaagatatckcaagaatgtggaagactattattcgcttctcatgggacaggactttatagggcacctgaaaaaactcccatgaaaaatcacttttacaaaatgtcaagtt

SEQ ID NO: 491567 - DNA, 201 bp, Homo sapiens; identical to SEQ ID NO: 275266

SEQ ID NO: 491568 - DNA, 201 bp, Homo sapiens
agctccgcctcccaggttcacgccattctcctgcctcagcctcccgagtagctgggactacaggtgcccgccaccacgcccggctaattttttttttttttgtatttttagtagagacgaggtttctactgaacctgttagccaggatggtcttgatctcctgacctcatgatccgcccgcgtcggcctcccaaagtgctg

SEQ ID NO: 491569 - DNA, 201 bp, Homo sapiens
ttggtcgacttgggttccaggcttaccccggaagatgagggagacggggaccaggttaggggaagcaacaggggtcttgaaagcagagccgaaacatgggygccctcctccgtttccagaaatgcatcattggaacgcgtcctcccggggctcaaggtccctcacgcacgcaagaccgggaccaccatcgcgggcctggtg

SEQ ID NO: 491570 - DNA, 201 bp, Homo sapiens
gcgcaatctcagctcactggaagctccgcctcccaggttcacgccattctcctgcctcagcctcccgagtagctgggactacaggtgcccgccaccacgcscggctaattttttttttttttgtatttttagtagagacgaggtttctactgaacctgttagccaggatggtcttgatctcctgacctcatgatccgcccg

SEQ ID NO: 491571 - DNA, 201 bp, Homo sapiens
tctctgaaagcctggtgcctttgttagccctgggtgactcctgtgatcccagccaccaggttgtcactatagacctaatttaaccatctgtcctcagtacsgagggctcaacatttggaatgggaggtggttctgggagccaattagaggccaggctttgggaggtggcagaggtgagtctcacacctgggctctgtctga

SEQ ID NO: 491572 - DNA, 201 bp, Homo sapiens
gcatcctgcgccagacgctcttcaggtgcgggggcagggctaacaggaccccggcaggggtagttacggggttggggccattggaaggcgggacagaaagmagggcgggaccgcgacgggccaggtgaccggaagaggccggcccaagagaacctgggctacaggaaaaggcgatgtcagtcatcgggcgccagcccacag

SEQ ID NO: 491573 - DNA, 201 bp, Homo sapiens
tcactcctgagccgcctctgcttgctcgtggccttttttcctggctgggggtgggggagggtgtgttggtcgacttgggttccaggcttaccccggaagaygagggagacggggaccaggttaggggaagcaacaggggtcttgaaagcagagccgaaacatgggcgccctcctccgtttccagaaatgcatcattggaac

SEQ ID NO: 491574 - DNA, 201 bp, Homo sapiens
caccacagacctgacagtattttgttatatttgttttatcatctattcatccctctatccattaattcatcgctcctttttttttttttttttttttttttgagacggcgtctcgctctgtcacccaggctctggagtgcaaatattttgttatatttgttttatcatctattcatccctctatccattaattcatcgctc

SEQ ID NO: 491575 - DNA, 201 bp, Homo sapiens
tcaccacagacctgacagtattttgttatatttgttttatcatctattcatccctctatccattaattcatcgctcctttttttttttttttttttttttttgagacggcgtctcgctctgtcacccaggctctggagtgcaaatattttgttatatttgttttatcatctattcatccctctatccattaattcatcgct

SEQ ID NO: 491576 - DNA, 201 bp, Homo sapiens
gtcaccacagacctgacagtattttgttatatttgttttatcatctattcatccctctatccattaattcatcgctcctttttttttttttttttttttttttgagacggcgtctcgctctgtcacccaggctctggagtgcaaatattttgttatatttgttttatcatctattcatccctctatccattaattcatcgc

SEQ ID NO: 491577 - DNA, 201 bp, Homo sapiens
ggtcaccacagacctgacagtattttgttatatttgttttatcatctattcatccctctatccattaattcatcgctcctttttttttttttttttttttttttgagacggcgtctcgctctgtcacccaggctctggagtgcaaatattttgttatatttgttttatcatctattcatccctctatccattaattcatcg

SEQ ID NO: 491578 - DNA, 201 bp, Homo sapiens
ctcagcgagaacggctgaactccgctggagcttcagaaatgtcagggagagtctacccagggcccagggagggtctatgccgggctgcacatccccaggcygctgagtgtgctccctgcaccccaacattctattaatgaacatttgtaaatgtaacagaaaagtagaaagagttgtatattgaatacccttatactgtca

SEQ ID NO: 491579 - DNA, 201 bp, Homo sapiens
gatggtggcgtccaagatggagctacacgcgttatctacgggccgcgagccccgcgtggccacggtcactcgcatcctgcgccagacgctcttcaggtgcrggggcagggctaacaggaccccggcaggggtagttacggggttggggccattggaaggcgggacagaaagaagggcgggaccgcgacgggccaggtgacc

SEQ ID NO: 491580 - DNA, 201 bp, Homo sapiens; identical to SEQ ID NO: 275297

SEQ ID NO: 491581 - DNA, 201 bp, Homo sapiens
aggaccagccctgattcagccctgggagcaactcagctcccagcaacagcccagggaaggagctaggctggctggaagggacgaaggtggacagagtgggyaaaagaaacaggatatgccagggcagtggagcagggaacaggcctgcagggctgggagggggcaagaggtggggtggtctcacaaataggaccagagatt

SEQ ID NO: 491582 - DNA, 201 bp, Homo sapiens
cgggcctttgaggaagggtaaaggcgaaagcgaaagcaggaagtacagacgtgaagcctagcagaggactttttagctgctcactggccccgcttgtctgrccgactcatccgcccgcgacccctaatcccctctgcctgccccaagatgctgaagccagccctggagccccgagggggcttctccttcgagaactgccaa

SEQ ID NO: 491583 - DNA, 201 bp, Homo sapiens
gcaacagcccagggaaggagctaggctggctggaagggacgaaggtggacagagtgggcaaaagaaacaggatatgccagggcagtggagcagggaacagkcctgcagggctgggagggggcaagaggtggggtggtctcacaaataggaccagagattgagccaggccctggagcccgggagggtttaggaagctgagac

SEQ ID NO: 491584 - DNA, 201 bp, Homo sapiens
gttgggctcctggccctggcaggtgtccctgcaggtacaccaccagaggggtgggcagggtcctgggtacgtcatgcctaggggcagcctcagcagcccayccccactctgacctctgagccctgaccacaggacagcagcggcttccacttctgcggtggttctctcatcagccagtcctgggtggtcactgctgcccac

SEQ ID NO: 491585 - DNA, 201 bp, Homo sapiens
tcatggctcactgcagccttgaacttaagggctcaagtgatccctcctgcctcagccttctgagttgctgggactacaggtgtgtaccatcatacccagcwcatttcttaatttaaaaaaattttttttgtagagacagggtttcatgatgttgctcaggctggtctcgaactcctggaatcaagcctcctacgtctgcct

SEQ ID NO: 491586 - DNA, 201 bp, Homo sapiens; identical to SEQ ID NO: 275277

SEQ ID NO: 491587 - DNA, 201 bp, Homo sapiens
accaagagctcacactttgccctcctaaatgccaggcccttcataagtatcatctcattgttaagagcggaggcttcagcgccagacaaatgcgagtttgygtacaactcaaccacgtgctggtgggagagtcaccatctctgagcagacctgtgactcctgttccaaatggacgaggaaccactgcgatgatgtgttagg

SEQ ID NO: 491588 - DNA, 201 bp, Homo sapiens
gaagcggcctctgcacagccctgcccctgtgccgcaggcgcttcctccggctgtgccagtcctctgccagaaaccccgccaggattattaggatcacagcyccgaggcatatccggaccaggttgcccttggtgtagtactggcgggcaggacctggaggaatgaggagaggcaggagcaggtgaaagagcccacctccag

SEQ ID NO: 491589 - DNA, 201 bp, Homo sapiens
tccctcctgtgctctcacagggctctgagacaactcctccccagacacagatgctgcctcgttatctgatgcattgcaaaagagaggacagttataagggstggggaagagatggaatctctctttctctgaccctttttaaaatctcaaccttcccacctgatcttaatgcccaattctgaaccccatacgctgatattc

SEQ ID NO: 491590 - DNA, 201 bp, Homo sapiens
ctgtgctctcacagggctctgagacaactcctccccagacacagatgctgcctcgttatctgatgcattgcaaaagagaggacagttataaggggtggggragagatggaatctctctttctctgaccctttttaaaatctcaaccttcccacctgatcttaatgcccaattctgaaccccatacgctgatattctgcctt

SEQ ID NO: 491591 - DNA, 201 bp, Homo sapiens
tgcagcccagggcttcctgccctcccacttccttcccacctacggccccgcccctgcagcccagggcttcctgccctcccacttccttcccacctacggckccgcccctgcagcccagggcttcctgccctcccacttccttcccacctacggccccgcccctgcagcccagggcttcctgccctcccacttccttcccac

SEQ ID NO: 491592 - DNA, 201 bp, Homo sapiens
accacccgctaggccagtgcctcgtttgcctcaccctaatccctgccctcaatgtcccccgtatttgtgtcctgaacggaggaccacgcagtcccaggctycgatcccccttcctttacccgtggcaacgagctccagctggtcgctgggcagggaccagaggcttccgttctggtaggagcagcggtagcgtccagccag

SEQ ID NO: 491593 - DNA, 201 bp, Homo sapiens
ctcctagaagtctctgggaaccaaacaaaggctaagtgtgaaatgaaaccatattcccgccccctgtcactgtgcctactccgaacacacacacacatggkgaggcacaattccacagcatttaagaaaagcatgggccgggcacggtgcctcatgcctataatcccagcactttgggaggctgaggcaggaggctggctt

SEQ ID NO: 491594 - DNA, 201 bp, Homo sapiens
ttttggttgtaacaaatgtaagatgttaacatgaggggatcctgggtgaaatatttccattaatattatctttggaacttttctgtcagtctaaaaattaytccaaaacaaagttttaaaaagaatcccgagccaagcacggtggcccgtgaccgtagtccctgctactcatgaggctgaggcaggaggattgctcaaggc

SEQ ID NO: 491595 - DNA, 201 bp, Homo sapiens
tggaaaaaactagtttatgctcagctctcggtggcataatgagagtgtgggtattatttggtctttgttatttctcttcgtgtgagatgcattaataaacctttttttttttcaattaaaatttcagttccagaatccatgtgcaggacgtgcaggtttgttacataggtaaacgtgtgccatggtggtttgctgcaccca

SEQ ID NO: 491596 - DNA, 201 bp, Homo sapiens
ggaaaaaactagtttatgctcagctctcggtggcataatgagagtgtgggtattatttggtctttgttatttctcttcgtgtgagatgcattaataaacctttttttttttcaattaaaatttcagttccagaatccatgtgcaggacgtgcaggtttgttacataggtaaacgtgtgccatggtggtttgctgcacccat

SEQ ID NO: 491597 - DNA, 201 bp, Homo sapiens
gtggactcgttcgtgttagacacggtggactcgttcgtgttagacacggtgggttcgttcgtgttagacacggtgggttcgttcgtgttagacgcggtggrctccttcgtgttgtgttagacacggtggactcgttcgtgttgtgttagacacggtggactcgttcgtgttgtgttagacacggtggactcgtttgtgttg

SEQ ID NO: 491598 - DNA, 201 bp, Homo sapiens
gaggcaggagaatcacttaaacccgggaggtggagtttgcagtaagccgagatcacaccactgcactccagccttggtgagagagcgagattccgtctttaaaaaaaaaaaaaaaaagtcttttgcagcaacttggatggagctggaaggcattattctaagtaaagtaatacaggagtggaaaacaaaaatctgtatatt

SEQ ID NO: 491599 - DNA, 201 bp, Homo sapiens
ataatagccctcactctgccctcaaccccgcaaatctcatccttatcaacctcggctctttccagcatgtttctcctgccttggtgcttcactctgagacrcagggaatgttagacacgcccagcctccagcctagcgtatgatattcttaaagtgcaggccgtagtctggtacaccgtattcagctgagatgtttgtgaa

SEQ ID NO: 491600 - DNA, 201 bp, Homo sapiens
agactccccccaaaaaaaaaaaaaaaaaagcagcagcatttgtaaagcacacctggcacattctgggctattaacaaggaaatgcatgcagctcccgtccrcctttttcaacctcagttctatttcttctggattcctgtgtcctacccctcactgtgaccctgggggcaaaacagatttttctaccaaaaactaaatgat

SEQ ID NO: 491601 - DNA, 201 bp, Homo sapiens
taaatgcactgtggggccctggacggggtctgggaacagaaataggatattagtggaaagactggtgaaattcaaatagcctggagtttacttgatataayatagttgtgtctatggttagttttttgtttgttttttgatacagggtctcactctgtcacccaggctggagtgcagtggcgtgatcacagctccctgcag

SEQ ID NO: 491602 - DNA, 201 bp, Homo sapiens
catggtgaaaccccgcccctactaaaaatacaataattagccagacctggtggcagatgcctgtaatcccaactactcgggaggctgaggcaggagaatcmcttggacccgggaggcagagtttgcagtgagctgagatcatgccattgcattccagcctgagcgaccgactgagcgagactccatctcaaaaaacaaaca

SEQ ID NO: 491603 - DNA, 201 bp, Homo sapiens
agcatttgagctgggtgcagtgcctcatgcctgtaatcccagcactttgggaggctgaggagggcagatcacttgaggtcaggagttcaagcccagcctgrccagtatggtgaaaccccgtctccactaaaaatacaaaaattagccaggcgtggtggtgtgcacctgtaatcccagctgctcgggaggctgaggcaggag

SEQ ID NO: 491604 - DNA, 201 bp, Homo sapiens
attaaatcgagaagtctaggcagagaggagagagagaaggggtccgtgtacctcatacgctgtgcaccagaatggaccctgcagaacctacctgctaccgrggaaggtggttctgttggtaaccggctgggggtcacagaggttcctgggaaatcagaaaatgagataaatctgtgctctgtcgctgtgggtcctgaacaa

SEQ ID NO: 491605 - DNA, 201 bp, Homo sapiens
gcccaggctggagtgcaatgcctgacctcagctcactgcaacttctgcctcccagtttcaagcaattctcccacctcagcctcccacgtagctgggattasaagcacccgccatcacgcccggctaatttttgtagagatggggtttcaccatgttgaccaggctggtcttgaactcctgacctcaggtgatccacccacc

SEQ ID NO: 491606 - DNA, 201 bp, Homo sapiens
atgggaacccaaatattaataagacattgtcaggccaggcatgacactggctgaatgcctgtaatcccagcactttgggaggccaaggtgggcggatcacstgaggtcaagagatcgagaccatcctggccaacatggtgaaaccccgtctttactaaaaatacaaaaaatagctgggcatggtggcacacacctgtagtc

SEQ ID NO: 491607 - DNA, 201 bp, Homo sapiens
gtatatccatgttgtagtatgtgtcagaatttccttcttttttaaggctgcataatattccattgcatgtatataaccacattatgaggtatgctgctctyttttgaaagaaaccccctttaagaatggtagtcaagtccgacgcggtggctcacgcctgtaatcccagcactttgggaggccgaggcgggcagatcatga

SEQ ID NO: 491608 - DNA, 201 bp, Homo sapiens
catgggaatgcgtggaaggtatgcagacaaaattggagggatcaacaggggctggatatctaagctcacagaatagcaagctgaggaattggaactgcatsctgagggtgattgggaggttccgaactgaagatagggaaggcttccatcacagaactccctgggatatgccgggcgcggtggctcatgcctccaatccca

SEQ ID NO: 491609 - DNA, 201 bp, Homo sapiens
atgcctccaatcccagcactttgggaggccgagacaggtggatcatgaggtcaggagttcaagaccagccttcccaagatgctgaaaccccgtctctactaaaatacaaaaattagccaggtgtggtggcatgcacctataatcccagctactcgggaggctgaggcaggagaatcgcttgaacccgggcagcagaggtta

SEQ ID NO: 491610 - DNA, 201 bp, Homo sapiens
ccacccgctaggccagtgcctcgtttgcctcaccctaatccctgccctcaatgtcccccgtatttgtgtcctgaacggaggaccacgcagtcccaggctcygatcccccttcctttacccgtggcaacgagctccagctggtcgctgggcagggaccagaggcttccgttctggtaggagcagcggtagcgtccagccaga

SEQ ID NO: 491611 - DNA, 201 bp, Homo sapiens
catgcaaaatgccagctcgctggccccccgtttccccacccaacaaatgaaggggctcttacaggttcctttttgtcctgaaattcatcaccaatgcaaawttcttaaaaatcctttgtctggcagtccatgcctgtccttcagcatttcccagatctgaccctcaggactcaccaagacagaagagggcggtcggggatg

SEQ ID NO: 491612 - DNA, 201 bp, Homo sapiens
ggttcaagcgattctcctccctcagcctcccgagtagctgggattacaggcacctgccatcacgcctggccaacttttttttttgtactttagtagaggcrgggtttcaccatgttggccaggatggtctcgatctcctgacctcgtgatccaccctccttggcctctcaaagtgctgggattacaggctgcgcctggcca

SEQ ID NO: 491613 - DNA, 201 bp, Homo sapiens
aaaggcgggatagttgtcattcccactgtaaacataaggaaactgggcagaggccaagcaaccttgtgtagctcacatagcaagaagtgggtgaacccagmtcatgtcttgactctgagctcagagagtgacaacttgtcaccagcgcccccatagccaccaccctttgtccaccccaggctccctctgcaccccaaccca

SEQ ID NO: 491614 - DNA, 201 bp, Homo sapiens
aagaaagggaccagatgccaggactcgcttttatggacattcctgcctgctgggcgcggtgataagacatttgcatgcatatgctttactctgtcctaatwatttcttcaaaagacacacaggaatgtaatttaagtgagagaaaccggtcagaaaaagccacatagtttatgaggtcatttacatgaaatatccagaata

SEQ ID NO: 491615 - DNA, 201 bp, Homo sapiens
aggctgaggcaggagaatcgcttaaacccaggaggtggaggttgcagtgaactgagatcactccactgcactccagcctgggtgacaaagtgagactcccyccaaaaaaaaaaaaaaaaaagcagcagcatttgtaaagcacacctggcacattctgggctattaacaaggaaatgcatgcagctcccgtccacctttttc

SEQ ID NO: 491616 - DNA, 201 bp, Homo sapiens
gagcctggagggagggcttggggagcggtcctggaagaggagcagggctgggtcagcctccccgcagaccccgcctggaccccgctgctcccgcgctggtrgatcccgcaggagggaaggggtctggggaaggactcaccactctgcgctggcacacgccccagacacagccctgaggaaagaagaaagggaccagatgcc

SEQ ID NO: 491617 - DNA, 201 bp, Homo sapiens
cattgtagacttcctgtgactctagaaccatttcaaaagagaaagttcaaaaattcagtcagaagcacacgcacacatatgcacgcatgcacacacacacatatgcacgcatgcacacacatatgcacgcacacacacatatgcacgcacacacgcacatgcacgcacacacacatatgcacgcacacagtatgtgaccat

SEQ ID NO: 491618 - DNA, 201 bp, Homo sapiens
attgtagacttcctgtgactctagaaccatttcaaaagagaaagttcaaaaattcagtcagaagcacacgcacacatatgcacgcatgcacacacacacatatgcacgcatgcacacacatatgcacgcacacacacatatgcacgcacacacgcacatgcacgcacacacacatatgcacgcacacagtatgtgaccatc

SEQ ID NO: 491619 - DNA, 201 bp, Homo sapiens
acacatatgcacgcatgcacacacacacatatgcacgcatgcacacacatatgcacgcacacacacatatgcacgcacacacgcacatgcacgcacacacrcatatgcacgcacacagtatgtgaccatcttccatgtccctgcccactaggcataatagccctcactctgccctcaaccccgcaaatctcatccttatca

SEQ ID NO: 491620 - DNA, 201 bp, Homo sapiens
catatgcacgcatgcacacacacacatatgcacgcatgcacacacatatgcacgcacacacacatatgcacgcacacacgcacatgcacgcacacacacayatgcacgcacacagtatgtgaccatcttccatgtccctgcccactaggcataatagccctcactctgccctcaaccccgcaaatctcatccttatcaacc

SEQ ID NO: 491621 - DNA, 201 bp, Homo sapiens
ctctgagacacagggaatgttagacacgcccagcctccagcctagcgtatgatattcttaaagtgcaggccgtagtctggtacaccgtattcagctgagaygtttgtgaaagtggaggggataacacgcctcacacaaaacttaccgcagtggttctcaaagcagcattctggagccatagcatcagcatcacctgggaac

SEQ ID NO: 491622 - DNA, 201 bp, Homo sapiens
gggagctgggcagagcctggagggagggcttggggagcggtcctggaagaggagcagggctgggtcagcctccccgcagaccccgcctggaccccgctgcycccgcgctggtggatcccgcaggagggaaggggtctggggaaggactcaccactctgcgctggcacacgccccagacacagccctgaggaaagaagaaag

SEQ ID NO: 491623 - DNA, 201 bp, Homo sapiens
ggagaatcacttgaacctaggaggcagaggttgcagtgatctgagatcgcaccactgcactccagcctgggtgacgcagtaagactccatctgaaaaaaamaggcttagccgggcgtggtggctcacacctgtaatcccagcactttgagaggccgaggcaggcagatcacctgaggtcaagagttcaagaccagcctggc

SEQ ID NO: 491624 - DNA, 201 bp, Homo sapiens
tgaacctaggaggcagaggttgcagtgatctgagatcgcaccactgcactccagcctgggtgacgcagtaagactccatctgaaaaaaacaggcttagccrggcgtggtggctcacacctgtaatcccagcactttgagaggccgaggcaggcagatcacctgaggtcaagagttcaagaccagcctggccaacatggtga

SEQ ID NO: 491625 - DNA, 201 bp, Homo sapiens
aggaggctgaggcaggagaatcgcttaaacccaggaggtggaggttgcagtgaactgagatcactccactgcactccagcctgggtgacaaagtgagactccccccaaaaaaaaaaaaaaaaaagcagcagcatttgtaaagcacacctggcacattctgggctattaacaaggaaatgcatgcagctcccgtccaccttt

SEQ ID NO: 491626 - DNA, 201 bp, Homo sapiens
gcttatactgtgctgtaagcttgtattgccacatacaattgttacgttgtaaatgtggctgacagtgctagcttccgggtgccttccaaacttatgatgtrtatcagttcagtgaatcctcagagacctatggagtcctcactcttaatgtccctattttataaatgaaactaaggcacatggcattaaataatttgtcca

SEQ ID NO: 491627 - DNA, 201 bp, Homo sapiens
ctgggggccgaccacaggtatgggtccctgctggagaagctgtagcatcggtaggttccgctgtgggcggcggtcaccgtgatgatggggaaactagccckgtaccatctctcgggattcttgtagggcgcagggtccccttccttgtacagagcaaattggtcaaagccataccgagtctgacactgtagggttacgtcc

SEQ ID NO: 491628 - DNA, 201 bp, Homo sapiens
  misc_feature (1)...(201): n = A,T,C or G
ccagggggtcgctgggggccgaccacaggtatgggtccctgctggagaagctgtagcatcggtaggttccgctgtgggcggcggtcaccgtgatgatgggnaaactagcccggtaccatctctcgggattcttgtagggcgcagggtccccttccttgtacagagcaaattggtcaaagccataccgagtctgacactgta

SEQ ID NO: 491629 - DNA, 201 bp, Homo sapiens
gtggacagcaatattgcagtacatgtatacaacgtgctatgatcaaatcagggtaattgacatattcatccctgtattttttgagacaaggtcaggcttcrtcacccgagctagagtgcagtggtgtgatctcagctcactgcaacctctgcctcccaggctcaagccattctcccacctcagccccccgagttgctggga

SEQ ID NO: 491630 - DNA, 201 bp, Homo sapiens
gacctactgaagcagaagccctgggggctcagaaatctattctttaagcctccaggtgattcttatgctcatggaagtttgagaaccgctgatcaatgcawtcagtgactcagaaacagagtcccggactctacaggtttgttggttggttggttggttggttggttggttagtttgtttgtttttgtcacccatattcaa

SEQ ID NO: 491631 - DNA, 201 bp, Homo sapiens
ctatggagtcctcactcttaatgtccctattttataaatgaaactaaggcacatggcattaaataatttgtccaactctaggtaacaatactgcagtgtayagctgaaatttgctaagagggtagattataagtattctcacacacaaaaaagttaactgtgtcaggtgatgtatgttaattagcttgctagtagtaactg

SEQ ID NO: 491632 - DNA, 201 bp, Homo sapiens
ggccttcagaaccatgaaccaattaaacctcttttcttatcaatgatccagtctcaggtatttatagcagcacaaaatcggcctaatatagcatgaaataytgctcagcaatcaaaaggaacacatcattgatacatacagcagcttggatgggcctcaggggcattgcactgagtgacaaaaggatatctcaaacggttg

SEQ ID NO: 491633 - DNA, 201 bp, Homo sapiens
taaatgaaactaaggcacatggcattaaataatttgtccaactctaggtaacaatactgcagtgtacagctgaaatttgctaagagggtagattataagtrttctcacacacaaaaaagttaactgtgtcaggtgatgtatgttaattagcttgctagtagtaactgtctcacagtggattcgtatatcaaaacatcaact

SEQ ID NO: 491634 - DNA, 201 bp, Homo sapiens
gaggcctccccaaaagcagaagccagccttctgcttcctatacggccttcagaaccatgaaccaattaaacctcttttcttatcaatgatccagtctcagrtatttatagcagcacaaaatcggcctaatatagcatgaaatactgctcagcaatcaaaaggaacacatcattgatacatacagcagcttggatgggcctc

SEQ ID NO: 491635 - DNA, 201 bp, Homo sapiens
gaaaccatattcccgccccctgtcactgtgcctactccgaacacacacacacatggtgaggcacaattccacagcatttaagaaaagcatgggccgggcayggtgcctcatgcctataatcccagcactttgggaggctgaggcaggaggctggcttgagtccaggagttcaagaccaacctgagcaacatagaaaaaccc

SEQ ID NO: 491636 - DNA, 201 bp, Homo sapiens
cacacacacatggtgaggcacaattccacagcatttaagaaaagcatgggccgggcacggtgcctcatgcctataatcccagcactttgggaggctgaggyaggaggctggcttgagtccaggagttcaagaccaacctgagcaacatagaaaaaccctatctctacaaaaaaatacaaaaattagccaggcgtggtggca

SEQ ID NO: 491637 - DNA, 201 bp, Homo sapiens
tatgaacagccactgcactccggcctgggcagtgtagcaagaccccatcgctaatttttttaagtgcattaaaacacagataaagggttgcctgtttttcrttttggcacagactctggtatgacttgacacaggcactggctgattctgcctttatttgaaattctggtttttttcattgtggatgtttttgcaatttat

SEQ ID NO: 491638 - DNA, 201 bp, Homo sapiens
cccattaaacactaattccttctctctcctctttctggcccttaacaaccaccattgtactttgtgtttctacagtgttgacattagatacctcctttgastagaatcatacagtagttgtccttttgtgactgactgacttagcataatgtcctcaaggtatatccatgttgtagtatgtgtcagaatttccttcttttt

SEQ ID NO: 491639 - DNA, 201 bp, Homo sapiens
ggaggctgaggcaggagaatcgcttaaacccaggaggtggaggttgcagtgaactgagatcactccactgcactccagcctgggtgacaaagtgagactcyccccaaaaaaaaaaaaaaaaaagcagcagcatttgtaaagcacacctggcacattctgggctattaacaaggaaatgcatgcagctcccgtccacctttt

SEQ ID NO: 491640 - DNA, 201 bp, Homo sapiens
ggctgaggcaggagaatcgcttaaacccaggaggtggaggttgcagtgaactgagatcactccactgcactccagcctgggtgacaaagtgagactccccmcaaaaaaaaaaaaaaaaaagcagcagcatttgtaaagcacacctggcacattctgggctattaacaaggaaatgcatgcagctcccgtccacctttttca

SEQ ID NO: 491641 - DNA, 201 bp, Homo sapiens
gctgaggcaggagaatcgcttaaacccaggaggtggaggttgcagtgaactgagatcactccactgcactccagcctgggtgacaaagtgagactcccccmaaaaaaaaaaaaaaaaaagcagcagcatttgtaaagcacacctggcacattctgggctattaacaaggaaatgcatgcagctcccgtccacctttttcaa

SEQ ID NO: 491642 - DNA, 201 bp, Homo sapiens
ctgaggcaggagaatcgcttaaacccaggaggtggaggttgcagtgaactgagatcactccactgcactccagcctgggtgacaaagtgagactccccccaaaaaaaaaaaaaaaaaagcagcagcatttgtaaagcacacctggcacattctgggctattaacaaggaaatgcatgcagctcccgtccacctttttcaac

SEQ ID NO: 491643 - DNA, 201 bp, Homo sapiens
attctcccagcaccatttattaacccacagccaatttcatactaaatgggcatttcccttgaaaaccagcacaagacaaggatgccctctttcaccactcstattcaacatagtattggaagttctggccaggataatcaggcaagagaaagaaataaaggatactcaaataggaagagaggaaatcaaactatctctgtt

SEQ ID NO: 491644 - DNA, 201 bp, Homo sapiens
ctctttctggcccttaacaaccaccattgtactttgtgtttctacagtgttgacattagatacctcctttgactagaatcatacagtagttgtccttttgtgactgactgacttagcataatgtcctcaaggtatatccatgttgtagtatgtgtcagaatttccttcttttttaaggctgcataatattccattgcatgt

SEQ ID NO: 491645 - DNA, 201 bp, Homo sapiens
tctttctggcccttaacaaccaccattgtactttgtgtttctacagtgttgacattagatacctcctttgactagaatcatacagtagttgtccttttgtgactgactgacttagcataatgtcctcaaggtatatccatgttgtagtatgtgtcagaatttccttcttttttaaggctgcataatattccattgcatgta

SEQ ID NO: 491646 - DNA, 201 bp, Homo sapiens
ctttctggcccttaacaaccaccattgtactttgtgtttctacagtgttgacattagatacctcctttgactagaatcatacagtagttgtccttttgtgactgactgacttagcataatgtcctcaaggtatatccatgttgtagtatgtgtcagaatttccttcttttttaaggctgcataatattccattgcatgtat

SEQ ID NO: 491647 - DNA, 201 bp, Homo sapiens
actttaccttgagaagacctaacatttccttcagaaagtaaatatgagaggggtggagacggtgcattatcttatttttatgattttaaaaatgtatacakaattgtacatatttatggggtggacagcaatattgcagtacatgtatacaacgtgctatgatcaaatcagggtaattgacatattcatccctgtattttt

SEQ ID NO: 491648 - DNA, 201 bp, Homo sapiens
tttctggcccttaacaaccaccattgtactttgtgtttctacagtgttgacattagatacctcctttgactagaatcatacagtagttgtccttttgtgactgactgacttagcataatgtcctcaaggtatatccatgttgtagtatgtgtcagaatttccttcttttttaaggctgcataatattccattgcatgtata

SEQ ID NO: 491649 - DNA, 201 bp, Homo sapiens
atatttatggggtggacagcaatattgcagtacatgtatacaacgtgctatgatcaaatcagggtaattgacatattcatccctgtattttttgagacaargtcaggcttcgtcacccgagctagagtgcagtggtgtgatctcagctcactgcaacctctgcctcccaggctcaagccattctcccacctcagccccccg

SEQ ID NO: 491650 - DNA, 201 bp, Homo sapiens
ctacggccccgcccctgcagcccagggcttcctgccctcccacttccttcccacctacggccccgcccctgcagcccagggcttcctgccctcccacttcyttcccacctacggccccgcccctgcagcccagggcttcctgccctcccacttccttcccacctacggccccgcccctgcagcccagggcttcctgccctc

SEQ ID NO: 491651 - DNA, 201 bp, Homo sapiens
aggtcaggcttcgtcacccgagctagagtgcagtggtgtgatctcagctcactgcaacctctgcctcccaggctcaagccattctcccacctcagcccccygagttgctgggagtatagggatgcaccaccacacctggctaatttttgtgtttttttgttttgttggtagagatgaggtttcaccatgttgcacaggctg

SEQ ID NO: 491652 - DNA, 201 bp, Homo sapiens
cccttggaatggccatcaggacctataaaggctgaggaagaaaggtttggtctgcactacccctacctgtgaccacaagctccagggggtcgctgggggcygaccacaggtatgggtccctgctggagaagctgtagcatcggtaggttccgctgtgggcggcggtcaccgtgatgatggggaaactagcccggtaccatc

SEQ ID NO: 491653 - DNA, 201 bp, Homo sapiens
cccctgcagcccagggcttcctgccctcccacttccttcccacctacggccccgcccctgcagcccagggcttcctgccctcccacttccttcccacctayggccccgcccctgcagcccagggcttcctgccctcccacttccttcccacctacggccccgcccctgcagcccagggcttcctgccctcccacttccttc

SEQ ID NO: 491654 - DNA, 201 bp, Homo sapiens
gagacgaaaggagatttgttagaccgcagtgggagatggagtgagggtgagagtttctggggaaaaccagacaagagcacagagggccaaagggaagcacrggaggattttgcacagaggatggaacagagtcaaccctgagagctgggaaccttagagatccgtctggagcccatattagagaggttgaagaaagaggcc

SEQ ID NO: 491655 - DNA, 201 bp, Homo sapiens
ccatgatccctcccttggatacgaccgtgcctggggttcagcggtcatgaacataacccgcggctgtgaacatcctgtcggcctccatcctgacccccgtdtgatttccgggtctgcgggaggggcgggaggggcggaagcggcctctgcacagccctgcccctgtgccgcaggcgcttcctccggctgtgccagtcctct

SEQ ID NO: 491656 - DNA, 201 bp, Homo sapiens
gctctccaccctgggtgacgcagcaagaccctgtgtccaaaaaacaaaatattattcacattgatccataaatgtcgtggcaccaccacccgctaggccaktgcctcgtttgcctcaccctaatccctgccctcaatgtcccccgtatttgtgtcctgaacggaggaccacgcagtcccaggctccgatcccccttccttt

SEQ ID NO: 491657 - DNA, 201 bp, Homo sapiens
ttggatacgaccgtgcctggggttcagcggtcatgaacataacccgcggctgtgaacatcctgtcggcctccatcctgacccccgtgtgatttccgggtcwgcgggaggggcgggaggggcggaagcggcctctgcacagccctgcccctgtgccgcaggcgcttcctccggctgtgccagtcctctgccagaaaccccgc

SEQ ID NO: 491658 - DNA, 201 bp, Homo sapiens
gcctggggttcagcggtcatgaacataacccgcggctgtgaacatcctgtcggcctccatcctgacccccgtgtgatttccgggtctgcgggaggggcggsaggggcggaagcggcctctgcacagccctgcccctgtgccgcaggcgcttcctccggctgtgccagtcctctgccagaaaccccgccaggattattagga

SEQ ID NO: 491659 - DNA, 201 bp, Homo sapiens
agagcctggagggagggcttggggagcggtcctggaagaggagcagggctgggtcagcctccccgcagaccccgcctggaccccgctgctcccgcgctggyggatcccgcaggagggaaggggtctggggaaggactcaccactctgcgctggcacacgccccagacacagccctgaggaaagaagaaagggaccagatgc

SEQ ID NO: 491660 - DNA, 201 bp, Homo sapiens
aaatgctcctccttctgaaccccagagctccactctgcacccatgctctagcctcacaccaaggactttcttggtaagagacggacagttcggtgaagtgrttaaaagcctacaggcttagataatggaagagagagctccgtcctcacactcctttctgctgagcatgaaatgcctggttactcaccagttgtgaagact

SEQ ID NO: 491661 - DNA, 201 bp, Homo sapiens
agctcatgtcttgactctgagctcagagagtgacaacttgtcaccagcgcccccatagccaccaccctttgtccaccccaggctccctctgcaccccaacscaagctccggccgcttctctgtccccctcctcctgccgcatcacagcccacctcagcctctttgtaggtttccatgcgacgctgtaccatggctgggagt

SEQ ID NO: 491662 - DNA, 201 bp, Homo sapiens
attcgacctgccacccatccatcaggagactatttactccactactgtaggggatactgacaaattaaatccatacctagtccagatatcaattccacaattttttttttttttttgagacggagtttcgctcttgttgcccaggccagagtgcaatggtgtgatcttggctcaccgcaacctccacctcccaggttcaag

SEQ ID NO: 491663 - DNA, 201 bp, Homo sapiens
gacaaaggagttggctttggtgaagagacgggtgagaaggaagggggtctggagaggatgacttactcaccagctggagagtctgactcctttggactggyggtgatactcctagaagtctctgggaaccaaacaaaggctaagtgtgaaatgaaaccatattcccgccccctgtcactgtgcctactccgaacacacaca

SEQ ID NO: 491664 - DNA, 201 bp, Homo sapiens
actcgggaggctgaggcaggagaatcacttaaacccgggaggtggagtttgcagtaagccgagatcacaccactgcactccagccttggtgagagagcgarattccgtctttaaaaaaaaaaaaaaaaagtcttttgcagcaacttggatggagctggaaggcattattctaagtaaagtaatacaggagtggaaaacaaa

SEQ ID NO: 491665 - DNA, 201 bp, Homo sapiens
aaccctctcatctccagtaatgcaaccatcttcttcctgcttagccttttggagatgctgtccctttagtggtcaaattctgaagaaatcaggaaataatkcattcgacatgcccagcacaagtgaagatcaggcagcagaaatgcattcgacctgccacccatccatcaggagactatttactccactactgtaggggat

SEQ ID NO: 491666 - DNA, 201 bp, Homo sapiens
tgaccacaagctccagggggtcgctgggggccgaccacaggtatgggtccctgctggagaagctgtagcatcggtaggttccgctgtgggcggcggtcacygtgatgatggggaaactagcccggtaccatctctcgggattcttgtagggcgcagggtccccttccttgtacagagcaaattggtcaaagccataccgag

SEQ ID NO: 491667 - DNA, 201 bp, Homo sapiens
ctatgactgctcctatgaacagccactgcactccggcctgggcagtgtagcaagaccccatcgctaatttttttaagtgcattaaaacacagataaagggktgcctgtttttcgttttggcacagactctggtatgacttgacacaggcactggctgattctgcctttatttgaaattctggtttttttcattgtggatgt

SEQ ID NO: 491668 - DNA, 201 bp, Homo sapiens
taacgcggaatagaccacagtgcagctggccaggaattagggtggcgtgagtgaggcactctcctgggatgtaaaatttaattattcccaaacaattaacrtatttgaaaaaattattgaaaatttgaagagtaggtcgttaaaactcacattattctgtttgaatactttattcccctgaaagatttattagaattttac

SEQ ID NO: 491669 - DNA, 201 bp, Homo sapiens
tccctgctactcatgaggctgaggcaggaggattgctcaaggcaaggagctccaggctgcagtgagctatgactgctcctatgaacagccactgcactccrgcctgggcagtgtagcaagaccccatcgctaatttttttaagtgcattaaaacacagataaagggttgcctgtttttcgttttggcacagactctggtat

SEQ ID NO: 491670 - DNA, 201 bp, Homo sapiens
gagcccagggatttgaggctaaagtgagctatgatcatgcctgtgaatacagcgagtgtactaaagcctgggcaacatagtaagacctcttctcttttttkttttttcccaagacggagtcttgctctgtcgcccaggctggactgcagtggtgcaatctcggctcaccgcctcccaggtttaagcgattctcctgcctca

SEQ ID NO: 491671 - DNA, 201 bp, Homo sapiens
gaggctaaagtgagctatgatcatgcctgtgaatacagcgagtgtactaaagcctgggcaacatagtaagacctcttctctttttttttttttcccaagayggagtcttgctctgtcgcccaggctggactgcagtggtgcaatctcggctcaccgcctcccaggtttaagcgattctcctgcctcagcctccggagtagc

SEQ ID NO: 491672 - DNA, 201 bp, Homo sapiens
gcagcccagggcttcctgccctcccacttccttcccacctacggccccgcccctgcagcccagggcttcctgccctcccacttccttcccacctacggccscgcccctgcagcccagggcttcctgccctcccacttccttcccacctacggccccgcccctgcagcccagggcttcctgccctcccacttccttcccacc

SEQ ID NO: 491673 - DNA, 201 bp, Homo sapiens
gggcttcctgccctcccacttccttcccacctacggccccgcccctgcagcccagggcttcctgccctcccacttccttcccacctacggccccgcccctrcagcccagggcttcctgccctcccacttccttcccacctacggccccgcccctgcagcccagggcttcctgccctcccacttccttcccacctacggccc

SEQ ID NO: 491674 - DNA, 201 bp, Homo sapiens
acacacctgtagtcccagctactcaggagccggagattgcagtgagctgagatcgcagagtgagccgaaatcacagatcacagagtgaggagagtgagackccgtctcaaaaacaacaacaaaaaacaaaaaaaccataagacattgtccatctgcggttcccagactattgcaggagaccaaaaagtaaagcgatttttt

SEQ ID NO: 491675 - DNA, 201 bp, Homo sapiens
ggcatggtggcacacacctgtagtcccagctactcaggagccggagattgcagtgagctgagatcgcagagtgagccgaaatcacagatcacagagtgagsagagtgagactccgtctcaaaaacaacaacaaaaaacaaaaaaaccataagacattgtccatctgcggttcccagactattgcaggagaccaaaaagtaa

SEQ ID NO: 491676 - DNA, 201 bp, Homo sapiens
gtttagtctggaaggaaatggagattttccaggacaggcaaggggaaagagactgaggaaagcgtatctgcagaggcctggagcggttagaagatgtgctrtgtccaggtgcctacagtctgtgtgcgtccgagcatgggctctacctggacacagtgaggagcgagattaaatacctggatcacagccgagtccaaagcc

SEQ ID NO: 491677 - DNA, 201 bp, Homo sapiens
caaagcctaggacttcatcctgggagcagtgcgtagggatggcggtcgtcccgccacagccttggctccgccatctttgaaatggccccatcacccaaaaygctcctccttctgaaccccagagctccactctgcacccatgctctagcctcacaccaaggactttcttggtaagagacggacagttcggtgaagtggtta

SEQ ID NO: 491678 - DNA, 201 bp, Homo sapiens
tttccattaatattatctttggaacttttctgtcagtctaaaaattactccaaaacaaagttttaaaaagaatcccgagccaagcacggtggcccgtgacygtagtccctgctactcatgaggctgaggcaggaggattgctcaaggcaaggagctccaggctgcagtgagctatgactgctcctatgaacagccactgca

SEQ ID NO: 491679 - DNA, 201 bp, Homo sapiens
actcctgaccttaagtgatccacccacctcagcctcccaaagtactgggattacaggcgtgagccgccgcgcccggcccaacctcttctcttaaaaaaaawaaataaataagaaaagaaattagaatatttgcaccaatcaagagtctaaggagacataaatactaaatgcactgtggggccctggacggggtctgggaac

SEQ ID NO: 491680 - DNA, 201 bp, Homo sapiens
taaaagcctacaggcttagataatggaagagagagctccgtcctcacactcctttctgctgagcatgaaatgcctggttactcaccagttgtgaagacttygtttgtgaatgagacggtcagttcagcggtggcttctgagaattctaagaaagcaaaacaatgttaggtcttccccgtggttccctatatcctctagata

SEQ ID NO: 491681 - DNA, 201 bp, Homo sapiens
aaatatttccattaatattatctttggaacttttctgtcagtctaaaaattactccaaaacaaagttttaaaaagaatcccgagccaagcacggtggcccrtgaccgtagtccctgctactcatgaggctgaggcaggaggattgctcaaggcaaggagctccaggctgcagtgagctatgactgctcctatgaacagcca

SEQ ID NO: 491682 - DNA, 201 bp, Homo sapiens
ctgaccttaagtgatccacccacctcagcctcccaaagtactgggattacaggcgtgagccgccgcgcccggcccaacctcttctcttaaaaaaaaaaaawaaataagaaaagaaattagaatatttgcaccaatcaagagtctaaggagacataaatactaaatgcactgtggggccctggacggggtctgggaacagaa

SEQ ID NO: 491683 - DNA, 201 bp, Homo sapiens
gttgtgtctatggttagttttttgtttgttttttgatacagggtctcactctgtcacccaggctggagtgcagtggcgtgatcacagctccctgcagcctyggcctccctggctcaagcgatcctcctgcctcagcctcctgagtagctgggactataggtgtatgccaccatgccccactaatttttaattttgtttaaa

SEQ ID NO: 491684 - DNA, 201 bp, Homo sapiens
ggcacacgccccagacacagccctgaggaaagaagaaagggaccagatgccaggactcgcttttatggacattcctgcctgctgggcgcggtgataagacrtttgcatgcatatgctttactctgtcctaataatttcttcaaaagacacacaggaatgtaatttaagtgagagaaaccggtcagaaaaagccacatagtt

SEQ ID NO: 491685 - DNA, 201 bp, Homo sapiens
actctggtatgacttgacacaggcactggctgattctgcctttatttgaaattctggtttttttcattgtggatgtttttgcaatttattttgattttttwaaaaattgcatgaaaatgttattcacagccagatgcagtggctcacgcctgaaatcccaacactttgggaagccaaggtggaaggatagcttgagcccac

SEQ ID NO: 491686 - DNA, 201 bp, Homo sapiens
tgtaaatttgtttaacttccttgtagattctggatattagacttttgtgaattgatagattgcaaacattttctcccattctgtaggttgtctgttcactscgatgatactttcttttgctgagcagaagctctttagtttagttagatcccatttgtcagtttttgcttttgttacaattgcttttgacgtttttgtcat

SEQ ID NO: 491687 - DNA, 201 bp, Homo sapiens
ctgccttcaggggcctggtggccctggagacaaatctccctctgtatctgagcctcactgccttgttctgttaaaatggggatgactgaatgagacagtayacagtaatttgcagagtgcctgttgcctagcaagcgctggagtaagtaaatagcttaagcttatactgtgctgtaagcttgtattgccacatacaattgt

SEQ ID NO: 491688 - DNA, 201 bp, Homo sapiens
gtaaatttgtttaacttccttgtagattctggatattagacttttgtgaattgatagattgcaaacattttctcccattctgtaggttgtctgttcactgygatgatactttcttttgctgagcagaagctctttagtttagttagatcccatttgtcagtttttgcttttgttacaattgcttttgacgtttttgtcatg

SEQ ID NO: 491689 - DNA, 201 bp, Homo sapiens
tgggctcgttcgtgttagacgcggtgggctcgttcgtgttagacgcggtgggcttgttcgtgttgtgttagacacggctcgttcgtgttgtgttagacacrgtggactcgtttgtgttgtgttagacacggtgggctcgttcgtgttagacattgcccattgacttcctcagtggatgtgaggaatgggacctgagacatt

SEQ ID NO: 491690 - DNA, 201 bp, Homo sapiens
tgctcctccttctgaaccccagagctccactctgcacccatgctctagcctcacaccaaggactttcttggtaagagacggacagttcggtgaagtggttraaagcctacaggcttagataatggaagagagagctccgtcctcacactcctttctgctgagcatgaaatgcctggttactcaccagttgtgaagacttcg

SEQ ID NO: 491691 - DNA, 201 bp, Homo sapiens
agaacatttatgttctcctttgacaaccaactcacctctgggctcctgggagcagtttccactggaatggagagcagagagaatcataattatgtctcagmcctggttcatcgcccagtggggacctgtatttctacatgtgcccttataaatattttagctaaatcagggtctcaaatgtaaaatctagttccctgggga

SEQ ID NO: 491692 - DNA, 201 bp, Homo sapiens
gtttttagaaatctattaagtgaatacaaatatctccacttcttcttagtcttgttttaaaaaatgttattatggtcttttctctcatccagaagtaattrtaatttagataaaattatcaatctttttctttatagtttatgctttgtatgacttgcttaagaaattctttcctaacgtattttctaaagagaatgttct

SEQ ID NO: 491693 - DNA, 201 bp, Homo sapiens
gatgacttggggacattttcaaaggggataggccatcaagaccagtcctcccagtgtgttacctcactcttaagacatttcagcaagttattaagcaattktatttttttacaaggaaaatttcaattttccagtcctggactgttttatagatgttacttggagacataatttttcatttaggcttatgagtgccactac

SEQ ID NO: 491694 - DNA, 201 bp, Homo sapiens
gctaaaagtgaaacactccattttcttaggcacctcctgcctgaggtgaccacttggctcagctctagccagtgatgcaaatggacaacattcctttccayacaaaaagacaaaagctgcctgggaaaaggtctttagccctctcaccttcttccttcctgaaaattggatgtggggtctggaagtgcagaggccatcttg

SEQ ID NO: 491695 - DNA, 201 bp, Homo sapiens
ggctgacaaagacaattccttaatgatgtttgtttcatttttgatataaatggaaagactgaagacaaatgtaaacgaaggaaagtgtttctaataataamaataatatgaatgtatgaggtatcaatctttgcgttactgatcattgatttatttcttggtgagatctttatcacaggatgaccttgttgccaaaaatta

SEQ ID NO: 491696 - DNA, 201 bp, Homo sapiens
acaaggtccagaggaatccacagaggcgcctggtgctctaatggaggtggcagggggcatggcgggagacccgaggaggcatttagaaggagagagctatratccagactccttccctgcccgcaaggagcctccagtctgtgagaagccagactcaggtgctagtcactctgatgaaagggaaacaaagggcactgggag

SEQ ID NO: 491697 - DNA, 201 bp, Homo sapiens
agaaaaacaatgagagatgagtcaaaatacctgcatggtaggtagtgagctctctggcccagaggtaatcaaattgtggtgacatcagactggcaggagcrggatgaggaacaggagtttgggaaaaagggtttttcagttcccctgacgccacctgatcgctgagcttctgttatgtgcatgcaagtggggattcaagaa

SEQ ID NO: 491698 - DNA, 201 bp, Homo sapiens
gacatcagactggcaggagcaggatgaggaacaggagtttgggaaaaagggtttttcagttcccctgacgccacctgatcgctgagcttctgttatgtgcrtgcaagtggggattcaagaattcttaggaaaggtaatcttaggaagaaattgaggacgggaggagacagagaaggatgtggttgggaagcacctggccca

SEQ ID NO: 491699 - DNA, 201 bp, Homo sapiens
gaggagacagagaaggatgtggttgggaagcacctggcccatgggagtgggaggggaagcagataattccctgtctacttcagataccactaatgctattrtaaccattcccatttattgagcaacttctgtgtgctaagccctggcagcatcttaagaatgataataacagttattgaggcttcaaaatacttcacctgc

SEQ ID NO: 491700 - DNA, 201 bp, Homo sapiens
tgggatcttgagggtggagaggctgggaccagatcctgggaacaaggggcgtggggatcagctgtcaagagtgctggagcaggtggtgactgggggttcaraaatgcatctccagaaaggggagaggctgggactctgagtcctctccctaacccaggtactctcctctccttcctttcagaacagcactcctcctccacc

SEQ ID NO: 491701 - DNA, 201 bp, Homo sapiens
gggcatccgccgaccggcctgaccgcgcccgggctgccctcgctcaggaccgtggacgcgctgggtgtgctgaccggggcgcagcttttctcgctgcagarggaggagctgcgggcggtgagccccgaggagggggcacgtgtgtacagccaggtcaccgtgcagcgctcgctgctggaggtgagccggaccgctggtccc

SEQ ID NO: 491702 - DNA, 201 bp, Homo sapiens
tcccctcccgccacttgccagggctgacctcaccgccatcttaaccgggtgtccacctctctctgcctgcctggtgctggccccgcgtccccatcgccgcscccgtctgctcccctcagagggcttgctgacgctgcgggccaagccgccctcggaggccgagtacaccgacgtgctgcagaagatcaagtacgccttcag

SEQ ID NO: 491703 - DNA, 201 bp, Homo sapiens
agcagctaggcccccaagcaggaagcatgtggaaagtcagtttgcccatccataaaatggacctccgttgcctcacctcagtcatggatatgaagccaggrgcctcgggtccacttaatctgccagcctttcctccaggccagctgttgtgctggacagtgggaccacggaggcaaatcaagacacagccctgcatgagga

SEQ ID NO: 491704 - DNA, 201 bp, Homo sapiens
ttgaaagcagctaggcccccaagcaggaagcatgtggaaagtcagtttgcccatccataaaatggacctccgttgcctcacctcagtcatggatatgaagycaggggcctcgggtccacttaatctgccagcctttcctccaggccagctgttgtgctggacagtgggaccacggaggcaaatcaagacacagccctgcat

SEQ ID NO: 491705 - DNA, 201 bp, Homo sapiens
taataacccttccatcgctccccattaccttcgtcatgaagcccttgctgccctgcttggcatttccacaggatctgcccccagtcccacagtctctctcwttcctcttttcttcaccagcccagaagctgccccaaagccaagcgccaagtctatctatggtgagcggggggcaagggagccccaggcccatagaactgg

SEQ ID NO: 491706 - DNA, 201 bp, Homo sapiens
tatctctccaacactttctatgtgctagacccaattctgtgtgctgcagattaagtggaggactgatcacacaaaaatctttgcccttgtgaagcttgcattttttttttttttttttttgagatggagtcttgctctgtcacccaggctggagtgcagtggagcaatcttggctcactgcaatctccacctcccgggttc

SEQ ID NO: 491707 - DNA, 201 bp, Homo sapiens
gagtgcagtggcacgatctggactcactgcaacctccgcctcccaggttcaagtgattctcctgcctcagcctcccacgtagctgggactacaggcgcccrccaccacacccagctaatttttgtatttttagtagagacagggtttcaccatgttggccaagatggtctcaatctcttgactttgtgatccgcccacctc

SEQ ID NO: 491708 - DNA, 201 bp, Homo sapiens
ccacctctgcctcccaaagtgctgggattacaggcgtgagccaccgcgcccagcctacctgtcttcttaaagtccagctctggctctgagctctcctgctctaataataataataataataataataataataataataacccttccatcgctccccattaccttcgtcatgaagcccttgctgccctgcttggcatttcc

SEQ ID NO: 491709 - DNA, 201 bp, Homo sapiens
gggtctggactcctgagtcagagggaagaggtgctgggggtctggactcctgggtcagagggaagaggggctggggggctggactcctaggtttgagggargaggggctgggggcctggactcctgagtcagagggaagaggtgctgggggcctggactcctgggtcagagggaagaggggctggggggctggactcctgg

SEQ ID NO: 491710 - DNA, 201 bp, Homo sapiens
gagtcagagggaagaggtgctgggggtctggactcctgggtcagagggaagaggggctggggggctggactcctaggtttgagggaggaggggctgggggyctggactcctgagtcagagggaagaggtgctgggggcctggactcctgggtcagagggaagaggggctggggggctggactcctgggtcagagggaagag

SEQ ID NO: 491711 - DNA, 201 bp, Homo sapiens
agcgacacagcagggccgaggctgggaagtccgggggcgcggccggtccgcctggccccgcctgacccgactgtcttacttcctacagcaaagcgcccccsaggtcgctgtcaatgggtgagtgtccgccccagggcagggcaagggggtcaaggaggggtgcgtcccgggggctcccgatgctgactccgcccccttttt

SEQ ID NO: 491712 - DNA, 201 bp, Homo sapiens
gggtcagagggaagaggggctggggggctggactcctaggtttgagggaggaggggctgggggcctggactcctgagtcagagggaagaggtgctgggggsctggactcctgggtcagagggaagaggggctggggggctggactcctgggtcagagggaagaggggctggggggctggactcctgggtcagagggaagag

SEQ ID NO: 491713 - DNA, 201 bp, Homo sapiens
cgggcacgacgaacctgtcccgtccccgcacccacgccaaccacctccctccccacgccccaggcccggctgcgcggcaacatcgccgacccctcctctcyggagctgttgcacttccttttcgggcctctgcagatggtgagacccgccccaggccctcgggcccccctgcagcgggaggaatcgggttcgacttgtaga

SEQ ID NO: 491714 - DNA, 201 bp, Homo sapiens
tggcaaggaggcagtagacagagggtttgaatcccggactatgccatggtagagatcacactcccctaccacccagcaccaccgcctgacctgacctgtcttttttttttttttttttttttttgagatggggtctcactctgctgccaggctggagtgcagtggcacgatctggactcactgcaacctccgcctcccagg

SEQ ID NO: 491715 - DNA, 201 bp, Homo sapiens
gaggagttgcagcgcgaccgctcgcccgccgctgagaccccgcccctgcagcgccgcccgtcagtccgcgcagtgatcagcaccgtagagcggggcgcggrccgcggacgaccccaggcgaagcccattcccgaggcagaggaggcgcagaggcctgagccggtggggacctcgagcaacgctgactcggcctccccggac

SEQ ID NO: 491716 - DNA, 201 bp, Homo sapiens
tctgtcccctaggacatcctgaaccacgtgttcgacgacgtagagagctttgtatcgaggctgcagaagtcggcggaggcggccagggtgctggagcaccsggaacgcggccgcaggagccggcgccgggcggctgggggtaaggggcaccctggcgtgggatctgaaccccctcccgatctcttccaaatgtccccgctc

SEQ ID NO: 491717 - DNA, 201 bp, Homo sapiens
ctctgtcccctaggacatcctgaaccacgtgttcgacgacgtagagagctttgtatcgaggctgcagaagtcggcggaggcggccagggtgctggagcacsgggaacgcggccgcaggagccggcgccgggcggctgggggtaaggggcaccctggcgtgggatctgaaccccctcccgatctcttccaaatgtccccgct

SEQ ID NO: 491718 - DNA, 201 bp, Homo sapiens
tgcccgaggctctctgccatcagaccacactatatctctttctctctgttccttcatccccatcaatcgaaggcaaaaatgtgccttctctgatttccagsctcactcagcatagaccgtggaggcaacatatcttgaatgaagcaacaaagcagtaatgcacatgaatgcaccaaatgccaaaagctcgtttactcaaca

SEQ ID NO: 491719 - DNA, 201 bp, Homo sapiens
tacttcagataccactaatgctattgtaaccattcccatttattgagcaacttctgtgtgctaagccctggcagcatcttaagaatgataataacagttaytgaggcttcaaaatacttcacctgcatcatctgactgaatttgcccaacagccctaccagatggttactacgttacagaaagaaaaactgaggcaggaga

SEQ ID NO: 491720 - DNA, 201 bp, Homo sapiens
ggtcctgtgtaattatgacttccaggcccgcaacagcagtgagctgtcggtcaagcagcgggacgtactggaggttagaggagcgggaggctgaggggcasgaattagccagccctagctgcagacaggctctgaaccctctgttctttaccacacccaggtcctggatgacagtcgtaagtggtggaaggttcgggaccc

SEQ ID NO: 491721 - DNA, 201 bp, Homo sapiens
tcacctcagtcatggatatgaagccaggggcctcgggtccacttaatctgccagcctttcctccaggccagctgttgtgctggacagtgggaccacggagrcaaatcaagacacagccctgcatgaggaaggggtagacaaggtccagaggaatccacagaggcgcctggtgctctaatggaggtggcagggggcatggcg

SEQ ID NO: 491722 - DNA, 201 bp, Homo sapiens
gacaggtgtagggcgaggggtgagttcggggcgtggacgtgcgtgggttcacaggtgtgaacggtagccgcacgtgggctgggactgagctgaaaaatcgrccaggggcgaggcccgggtaggaagtgggtgcggcgtggggaggcgtggcctgacggtgtgattggcaggcggagctgatccgagaggacatccaggggg

SEQ ID NO: 491723 - DNA, 201 bp, Homo sapiens
tcccggactatgccatggtagagatcacactcccctaccacccagcaccaccgcctgacctgacctgtcttttttttttttttttttttttttgagatggrgtctcactctgctgccaggctggagtgcagtggcacgatctggactcactgcaacctccgcctcccaggttcaagtgattctcctgcctcagcctcccac

SEQ ID NO: 491724 - DNA, 201 bp, Homo sapiens
gcaaatcaagacacagccctgcatgaggaaggggtagacaaggtccagaggaatccacagaggcgcctggtgctctaatggaggtggcagggggcatggcrggagacccgaggaggcatttagaaggagagagctataatccagactccttccctgcccgcaaggagcctccagtctgtgagaagccagactcaggtgcta

SEQ ID NO: 491725 - DNA, 201 bp, Homo sapiens
tctcgatctcctgacctcgtgatccacccgcctcggcctcccaaagtgctgggattacaggtgtgagccactgcgcccggcctgttttctgttttttgagrtggagcctcgctctcttgcctaggctggagtgcagtggtgcaattatcggctcgccgcaacctctgcctcccgggttcaagtgattttcctgcctcagcc

SEQ ID NO: 491726 - DNA, 201 bp, Homo sapiens
cccagacttctggggctaagggagttgggaatggagacccggattcctgggcctaagggaggaagggggctgggagtgggtaaagtctgagaggttggatycctggatccccaaaaggctggaagaagccagtttgttttcccagggcctgggaagcaccatgcctgggctccctaggaggacagagccctggatattgga

SEQ ID NO: 491727 - DNA, 201 bp, Homo sapiens
agccgcgcctgggaggacccagttgagaaacagctacagcacgagcggaggcgccggcaggtgacccaagcgacacagcagggccgaggctgggaagtccsggggcgcggccggtccgcctggccccgcctgacccgactgtcttacttcctacagcaaagcgccccccaggtcgctgtcaatgggtgagtgtccgcccca

SEQ ID NO: 491728 - DNA, 201 bp, Homo sapiens
cggggctgggaggcagggggcatggtgattggaggagcataaggcgctgggaggtgggtggcatgatgattggaaaataggactaggagagtagggagggrttagaggcgtggcttagttgtgttggggcggggcttaggacagatgccaagattcaattggaggaaaggccaggaattaacgtgaaggaaagatttaaga

SEQ ID NO: 491729 - DNA, 201 bp, Homo sapiens
ctgctgccaggctggagtgcagtggcacgatctggactcactgcaacctccgcctcccaggttcaagtgattctcctgcctcagcctcccacgtagctggsactacaggcgcccgccaccacacccagctaatttttgtatttttagtagagacagggtttcaccatgttggccaagatggtctcaatctcttgactttgt

SEQ ID NO: 491730 - DNA, 201 bp, Homo sapiens
gcggcagcccagactgtttgcggcggcccagactctggcccaagccccgacactcaggaggaagccagagcctctctcctccctgcccagcctggggttasgggcccccactgcagagcagacaggcctgagctccagttcggccctcacactcagtgctgatgtaaccctggtcagaggacatcacctcctggagcctca

SEQ ID NO: 491731 - DNA, 201 bp, Homo sapiens
tgcagcccccatccttcactcaggcagttgcagggcccagaacacccctatcttctaggattgacactggctgtcaaactcatccttcaaggtgattcctrgcctgccctcctcctccaggcagcctgtcctcctcctccaggcagcctgtcctgaccctcagcagcctctcctggccttggcagagcccctcgtgtcctc

SEQ ID NO: 491732 - DNA, 201 bp, Homo sapiens
gggtcagagggaagaggggctgggggcctggactcctgggtcagagggaagaggggctgggggcctggactcctgggtcagagggaagaggggctgggggyctggactcctgggtcagagggaggaggggctggggggctggactcctgggtcagagggaagaggggctgggggcctggactcctgggtttgagggaggag

SEQ ID NO: 491733 - DNA, 201 bp, Homo sapiens
tgcattctagcctgggccacagaactagaccttgtctcaattaagaaaaaaaatggggataataggacccattccataggatgtggtgaggattatgcatmcacacacacacacacacacacacacatttatgatgtactgagaagatataagcacacaataagtatctccaaaattatcaagtggcaaagccaggattca

SEQ ID NO: 491734 - DNA, 201 bp, Homo sapiens
gggcctggactcctgggtcagagggaagaggggctgggggcctggactcctgggtcagagggaagaggggctgggggtctggactcctgggtcagagggargaggggctggggggctggactcctgggtcagagggaagaggggctgggggcctggactcctgggtttgagggaggaggggctgggggcctggactcctgg

SEQ ID NO: 491735 - DNA, 201 bp, Homo sapiens
gggtcagagggaagaggggctgggggcctggactcctgggtcagagggaagaggggctgggggtctggactcctgggtcagagggaggaggggctgggggsctggactcctgggtcagagggaagaggggctgggggcctggactcctgggtttgagggaggaggggctgggggcctggactcctgggtcagagggaagag

SEQ ID NO: 491736 - DNA, 201 bp, Homo sapiens
atgttagccaggatggtctcaatctcctgacctcgtgatccacacgcctcggcctcccaaagtgctgggattacaggcgtgagccaccacacccggccgctttttttttttttaagatggagtctcgctctgtcacccaggctggagtgcagtggcacgatcatctcggttcactgcaacctccacctcccaggttcaagt

SEQ ID NO: 491737 - DNA, 201 bp, Homo sapiens
ggctcactgcaagctccgccttccaggttcacgccattctcctgcctcagcctcccgagtagctgggactacaggtgcccaccaccacgcccggctaattktttgtatttttagtagagacggggtttcaccgtgttagccaggatggtctcgatctcctgacctcgtgatccacccgcctcggcctcccaaagtgctggg

SEQ ID NO: 491738 - DNA, 201 bp, Homo sapiens
tacaggtgcccaccaccacgcccggctaattttttgtatttttagtagagacggggtttcaccgtgttagccaggatggtctcgatctcctgacctcgtgwtccacccgcctcggcctcccaaagtgctgggattacaggtgtgagccactgcgcccggcctgttttctgttttttgagatggagcctcgctctcttgcct

SEQ ID NO: 491739 - DNA, 201 bp, Homo sapiens
aattatcggctcgccgcaacctctgcctcccgggttcaagtgattttcctgcctcagcctcctgagtagctgggattacaggcacccgccaccacacctgkataatttttgtgtttttagtacagatggggtttcaccatgttggctgggctggtctcgaactcctgtcctcaggtgatctgcctgcctcggcctcccaaa

SEQ ID NO: 491740 - DNA, 201 bp, Homo sapiens
ggccccgcgccccggaaccgcagctcagcccgggctcggacgcctccgaggtccgcgcctggctgcaggccaagggctttagctccgggtgagtggggccrgggccctctcggcgcgggttgatacggacgctgggagcggagcgttccgatcggccgggagtcggggggcggcagtcgtggagaccacagggagccggga

SEQ ID NO: 491741 - DNA, 201 bp, Homo sapiens
aaaaaaaaaaaaaaaaaccagacacacaaatcgagtttaatttcgtatcatgctattttcctaaaatatagtttctaaagttattgcaaattagttcctgmtgcttggtaaaataccatatttaaacttaattacaactgccttcctgcaatgaagggccaactttttcaaataatgtgttacagcccagtgactctaggg

SEQ ID NO: 491742 - DNA, 201 bp, Homo sapiens
tggcaggttataaatccagtggatcttatgatcatgtacccaggggtgtactgcttttgctctgagttctttggtctgatgtgatgtcacacaggattccrtaacaatggatcaaacactctgtagcccccagatgctgaggctttgccagcaggaaaggcaaaaccataccctcaaaatgtgtctgttccagtcaagctt

SEQ ID NO: 491743 - DNA, 201 bp, Homo sapiens
gtaataagcaagtcttaaacaattttcccccctaccttttattttctctattgatttttttccatttatttttatttagccactaaaaatcttaaaaaaamacacacagttttattagttctttatggtcaggaaggaagattacttctttaaatataactaaaactctggcactctctagtggtcagagaatctaaaata

SEQ ID NO: 491744 - DNA, 201 bp, Homo sapiens
cacggacccatgcatagccttcatccctctatcatgactgtttattcgtgtgacttagttttgtcccagactgaaactctaacagtctagataagaacctrtctttcataatatgagttggatccctattccatactacccctaggcctgccttgatgcatgtctggactgataaattattttctttattaatttatttat

SEQ ID NO: 491745 - DNA, 201 bp, Homo sapiens
aagagtggatttgagacctttataaatttaaattcaaaaagagaactaaggaatagaccccttgctttgcaactagacagatctgggctcaaatccagctyatgccatttggccaagtattcagctccaagcctcagctcctcatggagcatcaggctggtaataatcaccctccaaagagtcattattgacttgaagtga

SEQ ID NO: 491746 - DNA, 201 bp, Homo sapiens
actctgtctctaaaaaattatatgcaagtgagcgcttttcttccagcgctcatgctcagactgaagaaagtaattgggccaggcctggtggctcacgcccrtaatcccagcattttggggaggcggaggcggaggcggaagcgggtgggtcgcttgagctcaggaattccagactagtttgggcaacatggtggaaccctg

SEQ ID NO: 491747 - DNA, 201 bp, Homo sapiens
acaaagtgttgttaaagtccttatcacttctgtctctgagtatataataacaaacttctaccatgtgcccactgtgggataggcattgtgctaaatacttyggtagacacatgatctccagtcttctcaatttattctgtgaggtagatgtgactattctcattttacagatgaggaaactgaatctcagaaagttacatc

SEQ ID NO: 491748 - DNA, 201 bp, Homo sapiens
gtgtaacagagggagactctgtctctaaaaaattatatgcaagtgagcgcttttcttccagcgctcatgctcagactgaagaaagtaattgggccaggccyggtggctcacgcccataatcccagcattttggggaggcggaggcggaggcggaagcgggtgggtcgcttgagctcaggaattccagactagtttgggcaa

SEQ ID NO: 491749 - DNA, 201 bp, Homo sapiens
ctccagcccgtgtaacagagggagactctgtctctaaaaaattatatgcaagtgagcgcttttcttccagcgctcatgctcagactgaagaaagtaattgkgccaggcctggtggctcacgcccataatcccagcattttggggaggcggaggcggaggcggaagcgggtgggtcgcttgagctcaggaattccagactag

SEQ ID NO: 491750 - DNA, 201 bp, Homo sapiens
gaagttactgaaaatggtgaattccagattgttccccataagtagagaactggttatacattatgaataaaaagtttacactttttttgtgcttacaaaayatgacatattttcccccagtaagctttccacctacctaattcaacttaagctaatttaaacatgagtgtataatttcttttttttcttttttcttgagac

SEQ ID NO: 491751 - DNA, 201 bp, Homo sapiens
ttgtaaagacagggtcttgttctgttgcccaggctggtctcaaactcctgggctcaaacagtcctcccacttcggcctcccaaagtgctgagattacaaaygtgagccatcaggcctggccttatttctttaaatttaatctgcctacaattttaaaaaattatgcattcttgacaaaattgtatttaggcatttttttaa

SEQ ID NO: 491752 - DNA, 201 bp, Homo sapiens
aagactgatttataaaaccaaaatagtatcaatgttcaaaaagaaacagatctgtcccagaaacagaagtataagcacctgcagctccagcccattgcctsaagtccagttcatacaataagaaacaactgtcagggcaaccagtatatttgagaggacatgaataatgcattctcttcccatgagctaacctacactgga

SEQ ID NO: 491753 - DNA, 201 bp, Homo sapiens
aaattttttttcaaagatggataggttcaggccagatgcagtggcttactcctctaatcccagcactttggggaccaaggcaggaggattgcttgaggccrtagactaggcaacatagtgagatcctgtctctacaaaaaattaaaaaattaattggggctgggcgcagtggctcatgcctgtaatcctaacactttggga

SEQ ID NO: 491754 - DNA, 201 bp, Homo sapiens
catttatatttagtgttttatataatgattaatgaaaagaaggaaaacttaaattttttttcaaagatggataggttcaggccagatgcagtggcttactyctctaatcccagcactttggggaccaaggcaggaggattgcttgaggccgtagactaggcaacatagtgagatcctgtctctacaaaaaattaaaaaatt

SEQ ID NO: 491755 - DNA, 201 bp, Homo sapiens
gggatgaagcaggggaacctgactagctgaatgttggatctgttcattttaaggtgcctgaaatatacccaaatggatataaatgtcaactcagttctggrctggagatatagatttggaatgcaccaacaatgcagatggtaatcctggcatgcgagtaggtgagatcatccagggagatggcctataatgagagcctac

SEQ ID NO: 491756 - DNA, 201 bp, Homo sapiens
tttagaaatcggagattgaatatttcatggcatttatatttagtgttttatataatgattaatgaaaagaaggaaaacttaaattttttttcaaagatggrtaggttcaggccagatgcagtggcttactcctctaatcccagcactttggggaccaaggcaggaggattgcttgaggccgtagactaggcaacatagtga

SEQ ID NO: 491757 - DNA, 201 bp, Homo sapiens
ataataaatattcagcaagtattttgcatttaaatataaaatcttgttatttggattttaatactttatattaaatgcctttaagatttattaaaattttrgattaactgaactctgcttttttgtcactggattaataagcaggcttgtatctgacataatagcttaataaggcagtgacaatttaaatttgtcatgagt

SEQ ID NO: 491758 - DNA, 201 bp, Homo sapiens
atgcacactgatacaactctctacatccatctctgtgttagggacaaatgttactttactcttgcacagaacttggacagtcacttttaatatctgtcttwtctttttctattttcattactgataccctctgccccttctttctgactaaaactctcattcaataaaattatagtcaaatcttgcaattggaaaagtatt

SEQ ID NO: 491759 - DNA, 201 bp, Homo sapiens
gggcaacaagagtgaaactccatctcaaaaaaaaaagaatatgacacagaattttatgtatagagttccaggtaccctgctcactacagactgaaattctrtgcagtctaacaaatgaatcagagcctttccatcttgtctgggtagtccctagattccctttttagagggttttgtttttagagtgattataaattcgtc

SEQ ID NO: 491760 - DNA, 201 bp, Homo sapiens
ggagaatgttaacagtccagacctttttcactacatcaaccacggatgattggcatataaaatcctacttaacctttacataactgcaataccaggaaacwaatatgtcaataaaaggaaacatcattcaatttttctgagaatgcattcttccatcattcctgaagtagaggtttttctataatcatgttaagaacataa

SEQ ID NO: 491761 - DNA, 201 bp, Homo sapiens
tgtttgtttttatagatgggtcaatgcccattatcactctagatggataagggagccttaattatatacttatatttttgcactgtcagattggagtgggrtaaaaatgtttcttcttttatgtctaatactcttttttttttttttttttgctgtgccgtagaccattacataactgaagactcccaccttcaggcagga

SEQ ID NO: 491762 - DNA, 201 bp, Homo sapiens
attaatacacttactagtgccaataatatgctaataatttcagcaataaatattttctttcatttggaaagttttgaaataatgaataaagatttattcamcataatttatatttttgaatctttatatagaataacttgacatatcttcccttggtaaattcattttgcttatttgaaaatattgattattgtcctttaa

SEQ ID NO: 491763 - DNA, 201 bp, Homo sapiens
ttcaagtaacatgacaggtttgtataccaactttgccacttatttgacaaagtttaacttcaaagttaaacaaagaagtttaacttctttgaacccatttwcttttcgataaaatggagataatacctatcataaaattgtttttaagacatattccaaaataacgtagctagatagaagaattctcattattgtaagaaa

SEQ ID NO: 491764 - DNA, 201 bp, Homo sapiens
ttactgttataggtggaaccaaagttttaatcaaagaaggtggtgttcagttgctgcttacaatagttgataccccaggatttggagatgcagtggataayagtaattggtaagaaggatttgtcctcacaactttccagtgtatttggggtattggggtggttaaactttctcttcttaacattttaaaactcttcttag

SEQ ID NO: 491765 - DNA, 201 bp, Homo sapiens
gggagggctttttcctttattgctgaaggtcagaattcaacttctataattctggcacctcttaccccagagaagtcgtgtatgaaatgatagaacgtctrtagtatactgataccattcttctacctcccaatcacacatgatataattcacattaaacagtcacatgttgtagaaaaacaatctgtactagaccatata

SEQ ID NO: 491766 - DNA, 201 bp, Homo sapiens
aaagaaaatgtgggagtaggtaaactcaaacatccctaccatcacccctggtaggaaatcactggtgtaatgtatgatattaacatctgcaccaattactsttataggtggaaccaaagttttaatcaaagaaggtggtgttcagttgctgcttacaatagttgataccccaggatttggagatgcagtggataacagtaa

SEQ ID NO: 491767 - DNA, 201 bp, Homo sapiens
tagagtactattttcttccagactcggtcacgaattttagatcagttgagtccccaaagacaatttgtcctttggaagctaattggatttttgtacacttgccaagagaacgattttgatgcacatcagaattttgggtcaaacagatctcctttccttactgagaaaccagaagttaaacatacacacacacacacacac

SEQ ID NO: 491768 - DNA, 201 bp, Homo sapiens
accaattaagtaggcacatgcagttacttctagatgtataacagtagatatctggcagatgtttttgtgttttttctatgtgtttttacttctcctaagartaactacaaccatgaatgtgaattccttacagagggagagagactcatgttacaaggaaatcctgagagtgattccctgactcccctcattcccacacat

SEQ ID NO: 491769 - DNA, 201 bp, Homo sapiens
tgtgttttttctatgtgtttttacttctcctaagagtaactacaaccatgaatgtgaattccttacagagggagagagactcatgttacaaggaaatcctragagtgattccctgactcccctcattcccacacatgcgtcaaagatctcagctaggagttggaaacttatgattgctcaaatgcaggaaagtattttcta

SEQ ID NO: 491770 - DNA, 201 bp, Homo sapiens
acattaaattggcagtatcagaagctaagtctcttctctagcacctccttcagggaccgtgagctccttggggtcactgctctgtctccacagcagagcayggtacctaacatgtggcaggactcaataaaaggtgggtcagtgtatttctgatacaaaacaattaaattgtgccaccttattttgactacagttgttcat

SEQ ID NO: 491771 - DNA, 201 bp, Homo sapiens
tacccactgagttgccatattccaagcggaggatttctgtgtgcctaagattgaatgtgttcaccccaagcatactgcagcttcttacaccattttttcayatctgaatagagtctgtcaggaaggtgatggatgaatcttactgggagactaatcttactgagagacttttaagtaagatctataaactctctttgatat

SEQ ID NO: 491772 - DNA, 201 bp, Homo sapiens
ttagttatgtacttaagagagattgagggaaatgttattatatcccaaacactgattttctctaatttcaactagataagaaatctccatgttacatcaaytgaataatttcaaggcagttagtgaaacatatatagaaaggactgaccctgttggagtcggctggtcctttgtgagaaagagtgttcctcggtcagtccc

SEQ ID NO: 491773 - DNA, 201 bp, Homo sapiens
cttacagacaagaaaactgacactcagagaggtaacttgctgaaggtcatattgttagttagggatggggccaaaattctaacttgagcaatttgactccrcagcctaccatgttaagtaccatgctaattaaattgatataaaacacaagacatccctaagaagggtatttttggcagggtagggcactgggtaggtttt

SEQ ID NO: 491774 - DNA, 201 bp, Homo sapiens
caaacagtcctcccacttcggcctcccaaagtgctgagattacaaatgtgagccatcaggcctggccttatttctttaaatttaatctgcctacaattttwaaaaattatgcattcttgacaaaattgtatttaggcatttttttaaacaaatatttatttctccttcattagcaagataaacactgttaatttatagctt

SEQ ID NO: 491775 - DNA, 201 bp, Homo sapiens
tttttttttttaaataacaaattctttctcagttactcccatgaacaattctaaaatcctcttgagttagtattggttattaccaatttttatagaaattycccatttcaccaaatgttaattcctatttgctacactgtaatatcaagtatcttttaaaatgtctttgatatctgtacttacattccctctctcattact

SEQ ID NO: 491776 - DNA, 201 bp, Homo sapiens
atcttacagacaagaaaactgacactcagagaggtaacttgctgaaggtcatattgttagttagggatggggccaaaattctaacttgagcaatttgactycacagcctaccatgttaagtaccatgctaattaaattgatataaaacacaagacatccctaagaagggtatttttggcagggtagggcactgggtaggtt

SEQ ID NO: 491777 - DNA, 201 bp, Homo sapiens
ttagcaacttgtctatccaatcatatcctttttttaattaaaaaagttctatataataggattttgtaatctgtttttttcactaaatactgtcatctcartagagcttatttttacatgattttgaaatatgcctgcatggtattcttctataggaatgtattgtaatttatttaattagtcctctaagggatgggcatt

SEQ ID NO: 491778 - DNA, 201 bp, Homo sapiens
gttttttctatgtgtttttacttctcctaagagtaactacaaccatgaatgtgaattccttacagagggagagagactcatgttacaaggaaatcctgagwgtgattccctgactcccctcattcccacacatgcgtcaaagatctcagctaggagttggaaacttatgattgctcaaatgcaggaaagtattttctagct

SEQ ID NO: 491779 - DNA, 201 bp, Homo sapiens
ttattttcacctaagaaagagtaacataaactttggttaaattcaggaagaaccagatttgggcctccaataataccataaatgacaatgtattaatcttmgctatattcactcttagttttcatttctgtgaagcctttgagagcagggacaactcatcgctgaaatgtgcccctggcagagtcctgaattaatacaatg

SEQ ID NO: 491780 - DNA, 201 bp, Homo sapiens
acaggtctaatatttatttgctatgctgaaaataaaggcacttcactgctaggcaagaatatatctgtgactgaacagttttctccaagaatccaatattyccagtatattttcatatactttcttatctctaatactcctattaaaggaaactattattcaaaattaagagacagtggtgacaacatcatcatcctgggt

SEQ ID NO: 491781 - DNA, 201 bp, Homo sapiens
ccaagaatccaatatttccagtatattttcatatactttcttatctctaatactcctattaaaggaaactattattcaaaattaagagacagtggtgacarcatcatcatcctgggtttgtaccttgaagcaatatactcaatgagctctaaatctcacattcactagtgatctgcaagtgaagctgaataaatatattct

SEQ ID NO: 491782 - DNA, 201 bp, Homo sapiens
ctcctatttcatttcagattgtttgctctgccctggcatgcaataccctgggttaatgttgcctaggaactctgctctgtaggactggattctatcaccarattgttttgcaaatagcttataaaaagaaagataaaattgtagttgacaaatacaaagtgaggtattctgtaatggttaaataaacccccaatggggaat

SEQ ID NO: 491783 - DNA, 201 bp, Homo sapiens
caggagagaactaccacatgtagactagaacttcaagcttggaattctgctaagtcttcttggagagataattagactcctcagaatgccaaatcttgttygctgttttcttcaacagtgaaaaacccagatttagattccattgcttgttttggaaaacaaaaagttatactccctatgtttaaagaaaactcttgtaac

SEQ ID NO: 491784 - DNA, 201 bp, Homo sapiens
ttcatttttgaccctagtattggcaatagccctttgctatttatataattaaaacttttctttaaatttcaattgacaggaaaaagagtcattttgtactstcttatctataaccatgtctcacttcaagtcaatgctacaattgtcacttttattttgaaaaggaagctcagaaggaaaaaaactcttagagagatcttc

SEQ ID NO: 491785 - DNA, 201 bp, Homo sapiens
gtgagaggtcttaatttcatcattctggccttttgcagttaaatgttctccaaggatatgatctatggggagaggactgatagtggaactaatctttcaargttctgcttaagcaattgtagataacataggagaagaaactctggaaacaattatgattatcctagttctgcccctgtggaaattcaatccgaaaccctt

SEQ ID NO: 491786 - DNA, 201 bp, Homo sapiens
caaccaagccattccaaaccaagacctacaacatacatctacttacatatccatgtgcttttctctcattgtatgctaaataatgcaaagagaattcaggwactgaccttatttgaccccaatttcaaacagcattttataagccatatggtcagaaattaaaatcactctcaattcttgataatacagagtaggtatcag

SEQ ID NO: 491787 - DNA, 201 bp, Homo sapiens
tacttttttgagctgaaaaatctaaataattagaaaaagacaaagttgtaatgagttttctgtttaaacttataggaccctttctaataaaagtgttattktaatcattgaatcgttagttaactgctttgtatggttatgtcttgtctctctttaatccagggactgcaagcaactaggcaaaaaactaacaaaaaaacc

SEQ ID NO: 491788 - DNA, 201 bp, Homo sapiens
agccaagagaaggttagatttataatgggatacaacactcaagcaacagaagtggaaaaaataaagattctgaatttcctatccactaattactttgttayaactggagaaatttttctggacacaggcgtaaatatttagtagatttaattctcttaagaataaatttgttaaaataaaaattaagaaaatatttgatag

SEQ ID NO: 491789 - DNA, 201 bp, Homo sapiens
ctagtgaggttgaacatgtcttttgtactcaataacttcagatttcattaaagtcttttggtaatcttaatattttctgtcattttcttgctgatttatargagcttgaaaaatcacatttgagaagaggattggatcctagccataacataaatataagggtaattacatccatgctgagaaagatttaggaatgatagt

SEQ ID NO: 491790 - DNA, 201 bp, Homo sapiens
tgaggttgaacatgtcttttgtactcaataacttcagatttcattaaagtcttttggtaatcttaatattttctgtcattttcttgctgatttataggagyttgaaaaatcacatttgagaagaggattggatcctagccataacataaatataagggtaattacatccatgctgagaaagatttaggaatgatagtaagt

SEQ ID NO: 491791 - DNA, 201 bp, Homo sapiens
aagatgaggaaaattctggcctaagaaatcctgcctaaatggtcagctaagctataaggactgaactgaaacagcactgcctccgtgacaaaaatgagaarctattttataaaaccaaaccctggtatatattttactgttctaacaagaaaggaaggctgccgggactgacccacagaccctgacagagcaacagatgag

SEQ ID NO: 491792 - DNA, 201 bp, Homo sapiens
cgggcttaggcgggaggatcgctcggctgcagcctcgacctcctggggcaatccatttcagcctcccaaagtgctgagattacaggaatgagccatcgtgmctggctttgcactatattttaatactttttttgaaaatggaaacttttacaggcaatttacttcaaactaatgataaggaagtgatgctgttctgttctg

SEQ ID NO: 491793 - DNA, 201 bp, Homo sapiens
atgctcagactgaagaaagtaattgggccaggcctggtggctcacgcccataatcccagcattttggggaggcggaggcggaggcggaagcgggtgggtcrcttgagctcaggaattccagactagtttgggcaacatggtggaaccctgtctctacaaaaatacaaaaaattagctgggcatggtggcacgcacttgtag

SEQ ID NO: 491794 - DNA, 201 bp, Homo sapiens
aaaaattcattaaggcctactcaaaaaaactctgcaggcatgcaggtctcccaaattttattgatagaaaggaactaaaataaggtgccatttggagcatyggaatgatgtaggtgtttagccagttcaaacaggctaacagaacaagtttgaaagtgtaagagacttagaaaattcattgtggaagtaaaaaacagaaca

SEQ ID NO: 491795 - DNA, 201 bp, Homo sapiens
cgatataacattagaatacttatttatgccttggaattctactgcaacacacagatgagcagcttatctctccatgtattcacctatttaaaggtccaccygagtaatttattaaataaagccaaaataaattaacagagtaagataagatgacgtggtagtgacaatcaatgattcaaaaattcattaaggcctactcaa

SEQ ID NO: 491796 - DNA, 201 bp, Homo sapiens
tgcctcctttttttctgtgtctcatcttatttcaaccttgcctcccttctaattgctttggttagaatttctttgggcaatagttttttttttttttttttaaataacaaattctttctcagttactcccatgaacaattctaaaatcctcttgagttagtattggttattaccaatttttatagaaattccccatttcac

SEQ ID NO: 491797 - DNA, 201 bp, Homo sapiens
aagacatttactataaacggtagattaaatgttcttgcctgatgaattacatttgaactctgaatgactgaatcactcaaactgcttatttgtattattaratgcacatttaagttatgtattacatgtctttagtggtgatcactattttatcagttcctctgtctttctttataccaagtatgactcataaacccagta

SEQ ID NO: 491798 - DNA, 201 bp, Homo sapiens
taagttattttattttgcctcctttttttctgtgtctcatcttatttcaaccttgcctcccttctaattgctttggttagaatttctttgggcaatagttktttttttttttttttaaataacaaattctttctcagttactcccatgaacaattctaaaatcctcttgagttagtattggttattaccaatttttataga

SEQ ID NO: 491799 - DNA, 201 bp, Homo sapiens
ccaaacttgatagagaatagtctaggaagacatttactataaacggtagattaaatgttcttgcctgatgaattacatttgaactctgaatgactgaatcmctcaaactgcttatttgtattattaaatgcacatttaagttatgtattacatgtctttagtggtgatcactattttatcagttcctctgtctttctttat

SEQ ID NO: 491800 - DNA, 201 bp, Homo sapiens
ttaggacccagctttcaattcctaacctatacacgttccattacttagagttaaaaaatcaggcttattaacttaatttccattttcaaaagcaatcatttctaattacaagttgagcatcccaaacctaaaaatctgaaatccaaaatcctctaatgagcatttccttttgagtgtcatgctgctgctcagagaattttg

SEQ ID NO: 491801 - DNA, 201 bp, Homo sapiens
tttaggaatgatagtaagttcatttgagtgagtggtttgggccaaacttgatagagaatagtctaggaagacatttactataaacggtagattaaatgttsttgcctgatgaattacatttgaactctgaatgactgaatcactcaaactgcttatttgtattattaaatgcacatttaagttatgtattacatgtcttta

SEQ ID NO: 491802 - DNA, 201 bp, Homo sapiens
gcaagtcactgggcttctccaggcttcagtgcggccttcataacatagttatgaagtttacatgagaaaacagttgtgcagtttacatgagaagatgtacrtaagggcacaaagagtttagcatgtggcaaactatgatgaggatgacagaaaaagactctcaatgatctgttcacacttttctcattccttacataactg

SEQ ID NO: 491803 - DNA, 201 bp, Homo sapiens
tctgtcattttcttgctgatttataggagcttgaaaaatcacatttgagaagaggattggatcctagccataacataaatataagggtaattacatccatrctgagaaagatttaggaatgatagtaagttcatttgagtgagtggtttgggccaaacttgatagagaatagtctaggaagacatttactataaacggtag

SEQ ID NO: 491804 - DNA, 201 bp, Homo sapiens
tgcattctctcccaattgatgcacccctatgatttcactaccatgggatgttaactcccaaatctccacctctagttctaaacaccaccacctcatcgctygagtcctgccttttctgattgctgaagatgttcacttggttgttcaaccagcacctcaaacttatcttgtcctaaatcaaacctgcagtttcagggaagt

SEQ ID NO: 491805 - DNA, 201 bp, Homo sapiens
tttttttcatcgtcgtataatactccattgtgtgaatgtatcagtatatcctttattatttattgtagataagcctttgggttttcagttttttactaacrggaacattcttgtgcatgtcttagtagacttaggcactcattgctgttgtgtgtgcataaagatataaaggtatttgagtttattttatttgatttctag

SEQ ID NO: 491806 - DNA, 201 bp, Homo sapiens
gagatctcctccctttttgaaactactttattttgccttctgtgccactgcactatcctaaatcttcctccttgtttaactaccacttctctaccttcttrgctgttttcttttcctgttccttccatctaaggctatattcacaggagttctgttctcagtctctctacctctctgcattctctcccaattgatgcaccc

SEQ ID NO: 491807 - DNA, 201 bp, Homo sapiens
atctgttttctttcagtgaagattatgtctgtattatttactcatgttgggtgtagttgtttttttcatcgtcgtataatactccattgtgtgaatgtatmagtatatcctttattatttattgtagataagcctttgggttttcagttttttactaacgggaacattcttgtgcatgtcttagtagacttaggcactcat

SEQ ID NO: 491808 - DNA, 201 bp, Homo sapiens
tcatactgcaagaccccaaaggagtaattttgtgaagtaaatcttatttctcctttttaatgtttctattttaggaattttttttttttttttttttttttagtaaccttcatagggcttgagatttcaaattacctgcaaaattctactctaaaaacttgatcctacatgcttatttattttgtgataaatattggaaat

SEQ ID NO: 491809 - DNA, 201 bp, Homo sapiens
ttacagtgagctgagattgcgccattgcactccagcccgtgtaacagagggagactctgtctctaaaaaattatatgcaagtgagcgcttttcttccagcrctcatgctcagactgaagaaagtaattgggccaggcctggtggctcacgcccataatcccagcattttggggaggcggaggcggaggcggaagcgggtgg

SEQ ID NO: 491810 - DNA, 201 bp, Homo sapiens
catttctaacaagatcccaggtgatgctgatgctgctggatggtagatcacactttataaagcaaggggctagactctagatatgcactttttattaaatrgtacagcagcctgtagccacatgtggctattaatctttgaaatgtgggtagtctgaattgtgatgttctgcaaatataaaatatgccacagatttctaag

SEQ ID NO: 491811 - DNA, 201 bp, Homo sapiens
cgatcaagcactggaggttgaggttacagtgagctgagattgcgccattgcactccagcccgtgtaacagagggagactctgtctctaaaaaattatatgyaagtgagcgcttttcttccagcgctcatgctcagactgaagaaagtaattgggccaggcctggtggctcacgcccataatcccagcattttggggaggcg

SEQ ID NO: 491812 - DNA, 201 bp, Homo sapiens
attaattaaattaaaatgcaatttctcatttgctccagatatatttcaagtgctcaacagccatatgtggcaagtggctgccattttgtgcagcacatatrtgaagattttcatcattgtagaaaattgcattggacagtggagagaaaacatgattcatagaaaaactattgttatttaaatacagtgttctatattagt

SEQ ID NO: 491813 - DNA, 201 bp, Homo sapiens
gcgatcaagcactggaggttgaggttacagtgagctgagattgcgccattgcactccagcccgtgtaacagagggagactctgtctctaaaaaattatatrcaagtgagcgcttttcttccagcgctcatgctcagactgaagaaagtaattgggccaggcctggtggctcacgcccataatcccagcattttggggaggc

SEQ ID NO: 491814 - DNA, 201 bp, Homo sapiens
tttcttccacctattactgcccttacaccctacagtcttatttccttgtgctcattataactaagcataatttacaattctctaactgggaaaaaacctgratactttaagtaatacaagcaatgtataccatggaagacaatgtacaattataaacaaatgaatagtgatattgccaagtgataaaatttaatatgaaaa

SEQ ID NO: 491815 - DNA, 201 bp, Homo sapiens
aattctaaactataatatcttaattctatttttttctagttttcttccacctattactgcccttacaccctacagtcttatttccttgtgctcattataastaagcataatttacaattctctaactgggaaaaaacctggatactttaagtaatacaagcaatgtataccatggaagacaatgtacaattataaacaaat

SEQ ID NO: 491816 - DNA, 201 bp, Homo sapiens
gggaactgcttagtttttgcgtttttctagggaatggtttcatacaatgtacttaaataggcttttatccaggattatattataataaagattcataattyggtgtggcattattatgtaccaattatagtgccataaatatttagccaccagaatgttcatttcagatttcttcctaatagtgaaccacttaaaatgaca

SEQ ID NO: 491817 - DNA, 201 bp, Homo sapiens
tataatatcttaattctatttttttctagttttcttccacctattactgcccttacaccctacagtcttatttccttgtgctcattataactaagcataayttacaattctctaactgggaaaaaacctggatactttaagtaatacaagcaatgtataccatggaagacaatgtacaattataaacaaatgaatagtgat

SEQ ID NO: 491818 - DNA, 201 bp, Homo sapiens
gctcactgcaacctccacctcccaagtttaagctattctcctgcctcagcctccctagtcaggtgtgcagtaccacgcctggctgattttttatttttatyagcgacagggtttcaccatgttggccaggctggtctagaactcctgacctcaagggatctgactgccttggcctcccaaagtgctggcatcacaggcatg

SEQ ID NO: 491819 - DNA, 201 bp, Homo sapiens
acatgtgagggatctcggttgcatgctccttatgagaatctaatgcctgatgatctgaggtgaaacagtttcatcccaaaactattcccatactgactatrtctccattccgcccgccccccaacccaacccctggaaaaattgtcttccacaaaatcagtccctggtgccaaaaaggttgggtaccactgccttactgga

SEQ ID NO: 491820 - DNA, 201 bp, Homo sapiens
tacttcttaatggagagcagtttaattccaggtctttgaataaagccaccttgacagctgccacattacaccttatggaagaccattatctcttttctccrctttccgcatgcccaagaggggtgtttttaaagaagaaaccacacaattagtttataaggcttttagaatttatctttttcgaagagggaagtgaatcca

SEQ ID NO: 491821 - DNA, 201 bp, Homo sapiens
gcgacagggtttcaccatgttggccaggctggtctagaactcctgacctcaagggatctgactgccttggcctcccaaagtgctggcatcacaggcatgarccattgtgtgcatttatttaaagaacacaaagctggctctagaaaggtgaatcagtgggttagcctaggaaggtcagacagcaactaatacaaaaagaaa

SEQ ID NO: 491822 - DNA, 201 bp, Homo sapiens
cttgccacatctcctatgtgaaagttaaagcactgattaggaaggagtggagcaccaagaaatgaaattgagacatatgaaaagatctggataatgacatrtatcttagaccattcactctagaatatgtttctatgtaatttcacaatgttttatactttacagtcccacctctttttcctaattgtaattatacaaatt

SEQ ID NO: 491823 - DNA, 201 bp, Homo sapiens
taccaaatccaaatgcatttactctttatgatgaggtagtttgagtttttaatttatatttattgagtgcctactatggccagattttggggatatctcaraaaacaaagttccttttcctatgattgaaactaatagcaaacaaatatgtaatattgttagtagtattacagtaaacaaaaatgaagcaggataaaaggg

SEQ ID NO: 491824 - DNA, 201 bp, Homo sapiens
gactgaactgaaacagcactgcctccgtgacaaaaatgagaagctattttataaaaccaaaccctggtatatattttactgttctaacaagaaaggaaggytgccgggactgacccacagaccctgacagagcaacagatgagaaaatgcactctgacccagatatccaatgaaagagcaggctaggggaccaggtaaccc

SEQ ID NO: 491825 - DNA, 201 bp, Homo sapiens
acggaaactggaaacaattcctaatagccaactgctaagaaaagaaaaggctctttattcagaaagttatttattaaagtagtgtgaaaagaatggcagtratggaacttggtctttcataaaatgtcaaattcttccaattagcctcagtgttgtataaaggtattttgttatattgctccttggtatttattcaatata

SEQ ID NO: 491826 - DNA, 201 bp, Homo sapiens
ccatctttttgctttctagacaatcaaaggctcagtgaaaaataatgtgctcaaggttgatataaatggtagagctggcattcaagtatatcctcttcaamccatcacactgtcttaggataccaaagtactttaaaggcacacagtatccactcattgacccacttaggggctggactacgaaatgcaattaggtggtta

SEQ ID NO: 491827 - DNA, 201 bp, Homo sapiens
ctcaatggccagcgccagctgcagccccggccgcccactcgcctcacctgagcctgggtacgtgcgccccacaacacctcccccaggcagggcccggggayccccgggagcgtccccggctacctggcgccgctcatcctgggtagggttggccccctctgaggctgcccggcatgagggagctgcacccctgagcttgac

SEQ ID NO: 491828 - DNA, 201 bp, Homo sapiens
gttttccagaatccattcattgattcattcattgattcaatcattagacaaaacacataaaccaagttcatgttaagcaatcactaaatgacagctattaytattatcaccaagaactaacagcctgaagggaaagatagatacataaatgaaatacatattttttaagtggaataacagaaggaagtatgttagtagctt

SEQ ID NO: 491829 - DNA, 201 bp, Homo sapiens
ataaagggataaacatcctgagttgtggtttggttatatgacatttgacaagtttcttaaatattctgagtcttagtttctttcattctttagttgaggayaataaggatctcatcatctaaatcacataattttggtgaggacacaatgacggaacacacacacaccatgagtgattatgagggaaaggtaaaagatgag

SEQ ID NO: 491830 - DNA, 201 bp, Homo sapiens
tccaccttggcctcccaaagtgttgagattacaggtgtgagccaccacgcctggccaaaaaaatgagtgtataattttttgagtgcttattattggaatcrctagtgcaaaaaggcttggaacatcataggaacataaagatttcaatggtattgctactagatattgaaaattgatgttccctcccccacctattgccac

SEQ ID NO: 491831 - DNA, 201 bp, Homo sapiens
cagttagtttagatattagtgtttaattcaaatatggttaagctcttacaggactatggttttaatgtcaaattaaccaaatatggaatgcaaaaaaaaaataaaaaaacaaagctcattgggttaaagattcaatctgacaaacaatttgatggtatatgtattcttctgagttcttcaattgtatctgccactcaaact

SEQ ID NO: 491832 - DNA, 201 bp, Homo sapiens
ccttaattatatacttatatttttgcactgtcagattggagtggggtaaaaatgtttcttcttttatgtctaatactcttttttttttttttttttgctgkgccgtagaccattacataactgaagactcccaccttcaggcaggattgggtagtacgtgtttgtaactacctggcattgccttttgttgaggtaatttca

SEQ ID NO: 491833 - DNA, 201 bp, Homo sapiens
tgggaaagttgacattaatcaactcattattcctcccagatttgtattctccagagtatccgggtccttctcagagaattaaaaagcctgtacaggtctasatattggtatttttaattgatgataagctggaataatattaatacacacaaagcacgtgttgtaacttttattatgcttccttagaggtaagatgcaaat

SEQ ID NO: 491834 - DNA, 201 bp, Homo sapiens
caagagaattcaactttctgtttaacttagaaaggcttgggataaaggtgattttaagtaaaacataattacctattatttttacttatcacattgtaggataaaatattgtacattttactaatagcaggaaataaatttactaagcagggaataaagtatgtggtatttctggcataggatgtatatacagttccagat

SEQ ID NO: 491835 - DNA, 201 bp, Homo sapiens
attgtattttctgcaatgggcacttaatatgttttgattatatatttcaaaaacctcataaaatctattttatcatgtatattatttgcttacctaagagwgtactggacagaatttaaatttttcttgagggcttagggcagtgcagttcttagggtgtgtgatgtctctgtctatatagatgatttgatttaaaaatgt

SEQ ID NO: 491836 - DNA, 201 bp, Homo sapiens
tgaaaaatattgttggtgagctctgcttaggtaatatataggacacgagcagagaggaggcacgtgaacagttctggctggagtaggcttcattgaggccrtgatgcttttagctggatttgaagaagtggtagtgatcatcccagtgcacaggataggaggacagtctatatattctgagcagtaactcatatatatcat

SEQ ID NO: 491837 - DNA, 201 bp, Homo sapiens
tttaatactttttttgaaaatggaaacttttacaggcaatttacttcaaactaatgataaggaagtgatgctgttctgttctgttttgttgtttttgtgtktttttttttttcttttttgagatggggtcttgcccaggttggagtgaggtggtgcaaacaaggctcactgcagccttgaccttctggctcaaggaatcct

SEQ ID NO: 491838 - DNA, 201 bp, Homo sapiens
acaagagaattcaactttctgtttaacttagaaaggcttgggataaaggtgattttaagtaaaacataattacctattatttttacttatcacattgtaggataaaatattgtacattttactaatagcaggaaataaatttactaagcagggaataaagtatgtggtatttctggcataggatgtatatacagttccaga

SEQ ID NO: 491839 - DNA, 201 bp, Homo sapiens
attttaatactttttttgaaaatggaaacttttacaggcaatttacttcaaactaatgataaggaagtgatgctgttctgttctgttttgttgtttttgtktttttttttttttcttttttgagatggggtcttgcccaggttggagtgaggtggtgcaaacaaggctcactgcagccttgaccttctggctcaaggaatc

SEQ ID NO: 491840 - DNA, 201 bp, Homo sapiens
ccaaaactgaccagaaaatatgcattctgttaagtcaattccataggctaatgtgtgggccgaaataggggaagaaagaaggatttaaaatgtttagataaagggcttagttgtttattccagcctccaacatcagagatggagcggtaactcaagtttgggaagtgtggaggtggggaaaagcccaccttttaactcaaa

SEQ ID NO: 491841 - DNA, 201 bp, Homo sapiens
cgcttttcttccagcgctcatgctcagactgaagaaagtaattgggccaggcctggtggctcacgcccataatcccagcattttggggaggcggaggcggwggcggaagcgggtgggtcgcttgagctcaggaattccagactagtttgggcaacatggtggaaccctgtctctacaaaaatacaaaaaattagctgggca

SEQ ID NO: 491842 - DNA, 201 bp, Homo sapiens
accaaaactgaccagaaaatatgcattctgttaagtcaattccataggctaatgtgtgggccgaaataggggaagaaagaaggatttaaaatgtttagataaagggcttagttgtttattccagcctccaacatcagagatggagcggtaactcaagtttgggaagtgtggaggtggggaaaagcccaccttttaactcaa

SEQ ID NO: 491843 - DNA, 201 bp, Homo sapiens
gaccaaaactgaccagaaaatatgcattctgttaagtcaattccataggctaatgtgtgggccgaaataggggaagaaagaaggatttaaaatgtttagataaagggcttagttgtttattccagcctccaacatcagagatggagcggtaactcaagtttgggaagtgtggaggtggggaaaagcccaccttttaactca

SEQ ID NO: 491844 - DNA, 201 bp, Homo sapiens
attttagacttttgactatctgaactttaagttaataaagtgctgttgttttaagccaataaattggtggttatttgttacatcagcaataggaaactggkataatgatttttcaatgaaaatttagacaagattagaaaaaaaagaataaaaaggaacaaacaaagcctccgagaactatgggactgtgtaaatagacca

SEQ ID NO: 491845 - DNA, 201 bp, Homo sapiens
cttctcctgccaaaatcaaataaaaagaaacaagagttacttgcttggcagtaactccttttcctgcccaactaagcttgaatgacggtataaaggagtcrtgaaatggtcagaagttgtggggagcaagggaaaggaggaaaagcaaatgatctatataatctttggacaacatggcttggaatgactgaccttgagatg

SEQ ID NO: 491846 - DNA, 201 bp, Homo sapiens
ttatttaaagaacacaaagctggctctagaaaggtgaatcagtgggttagcctaggaaggtcagacagcaactaatacaaaaagaaaaaaagaggaaaacycttatgttttatttcaaggaaactcattccaaaaaacagaagtgggctgagaggaatctttacttgtatctgagatccatactctatgtaaaaaggcagt

SEQ ID NO: 491847 - DNA, 201 bp, Homo sapiens
tttatcacagtgctgtttgtaatagtgaacactgcaaatattacaccaagggacgtaggtaaattatggttacatcgatttcatgtaatcatgataatacrtaagaatatttgttaaaatgaaaagtggtttctaatacttaagcggaaaaaaacaaattacaaagaacactgatacaatatgatgaacccaagagtcttt

SEQ ID NO: 491848 - DNA, 201 bp, Homo sapiens
gcagttgaaccctgttgatgctctattttgcaacgaaagcatgtgtaggcaacagactctcaaaagtttgaatatttgacctgatgagtttgaaggcagargggatccgtttccattagagcagcagttctcaaagttaagttcctggaccagcagcatcagcatctgggaacttgttaaaaatgcaaattcttgggtccc

SEQ ID NO: 491849 - DNA, 201 bp, Homo sapiens
aaaaatctgaagtccaaaacacttcttgtcccatttcggataagggatactcaacctacacgtgtttgctaaggtaggaaaatactactattgtatttaawtgcacctcacttctttaataacaatcacttcttttagatttagccagttaaaatgtgcaccctatgaaagtagagacagagaataacattttaagaattt

SEQ ID NO: 491850 - DNA, 201 bp, Homo sapiens
tttgttctaggacttattcctgggatgacttacctaccctttccaatgatttgaaagtacttagttaaattcttttctgcttaaaatagctacagtagttsctactacctgcagttgaaccctgttgatgctctattttgcaacgaaagcatgtgtaggcaacagactctcaaaagtttgaatatttgacctgatgagttt

SEQ ID NO: 491851 - DNA, 201 bp, Homo sapiens
aatgtgaattttgaacagatctgaaaagttattaagttcaactccacagaggtgagtaatgtgcccataagtgtggctgaagatgagtggcgctaacacartgctgtgagtccgacccccagtccagcactctttccatgtcgtctaactcgctctcatttaccttcacataaagtgacaaaggggcctgatgcgtaactt

SEQ ID NO: 491852 - DNA, 201 bp, Homo sapiens
tatgtgaaataatcataataaactttaaataattgtttttttcctcttttaattccctgcagattctgttcactctctgctatcagttgctgtgtccttarggaatgcagacaatgttaattcaagcaaaacaatagaaagaaaatgatttgaaatgaaaacttggctttaaaaagttacataatatactctcaagctaaa

SEQ ID NO: 491853 - DNA, 201 bp, Homo sapiens
tgcaaatattacaccaagggacgtaggtaaattatggttacatcgatttcatgtaatcatgataatacataagaatatttgttaaaatgaaaagtggtttstaatacttaagcggaaaaaaacaaattacaaagaacactgatacaatatgatgaacccaagagtctttattatgccttttattggttttgctttctgtaa

SEQ ID NO: 491854 - DNA, 201 bp, Homo sapiens
ggggaagtgtctatgtatttgtcatctgtttttaaggttaattaataatctctctcacaagagagaaaaagaaggctctcttccaggcctctttgtttctyctctgcctagaatgcatattcccatgttttcacgtagctaattctttaactttttttatgtctcagctgcatcagggaaacattcactagtccttgtgat

SEQ ID NO: 491855 - DNA, 201 bp, Homo sapiens
gaacagatctgaaaagttattaagttcaactccacagaggtgagtaatgtgcccataagtgtggctgaagatgagtggcgctaacacaatgctgtgagtcygacccccagtccagcactctttccatgtcgtctaactcgctctcatttaccttcacataaagtgacaaaggggcctgatgcgtaacttcctccagccact

SEQ ID NO: 491856 - DNA, 201 bp, Homo sapiens
gtagtcatctgtgtcaatggattattaaagtcaatattgctttctgcagaaaaagcaaaggcataaagggataaacatcctgagttgtggtttggttataygacatttgacaagtttcttaaatattctgagtcttagtttctttcattctttagttgaggacaataaggatctcatcatctaaatcacataattttggtg

SEQ ID NO: 491857 - DNA, 201 bp, Homo sapiens
aaaaataaaatgagaaattgtggtcctaaggaaagatcccatagagccataaaaaggagtctacaattaaaaaaaaaacaatttgaataattcctaccaayaaggtttcatacttacagtgggttctatgttgagttcttttctctctctgtctccttgatcaaaaaattcagttgctacaagttctgctatctgaaataa

SEQ ID NO: 491858 - DNA, 201 bp, Homo sapiens
aagaccaaaactgaccagaaaatatgcattctgttaagtcaattccataggctaatgtgtgggccgaaataggggaagaaagaaggatttaaaatgtttagataaagggcttagttgtttattccagcctccaacatcagagatggagcggtaactcaagtttgggaagtgtggaggtggggaaaagcccaccttttaact

SEQ ID NO: 491859 - DNA, 201 bp, Homo sapiens
agaatgaagaatctgtttcagagatcagcaagaggcaatggttacagtcattataggagaataactaaagatttagaagccatgcagagaacatgaagatbtttcaatatgaaatattcttagtcacaacagcttcatgatgttaacatcctctctagcattaacatttttatttcatcatcctaaaattatactgacaat

SEQ ID NO: 491860 - DNA, 201 bp, Homo sapiens
aatatgccatatatatcatatatggaagaaaattagcaacgaagtagttttgccagattagtcctctttaattaacgaaatataacttattatgtaagtggcagcaaatattattttaaatcattgtgcaccttaaagtgaaattgaaagaatatgctataaattttactactaagcaacaaaatgtattagatatatgaa

SEQ ID NO: 491861 - DNA, 201 bp, Homo sapiens
agctgaaatgcctcaataaattaataatctgtccacctatagtaagtattgctaattcttaattattatgtgaaataatcataataaactttaaataattgtttttttcctcttttaattccctgcagattctgttcactctctgctatcagttgctgtgtccttaaggaatgcagacaatgttaattcaagcaaaacaat

SEQ ID NO: 491862 - DNA, 201 bp, Homo sapiens
agaaaaatccctggaaaattcttggtttcctctactgaaaccacagggatgtaggaagaaataaaaatctttgaaactgctttaactttttttttttttttaaagttgaagtctgctttgtggtgtgtgtgtgaaagcaagattctgcagtcaatgactttttcccaggatgttttctttttctttttctttctttttttt

SEQ ID NO: 491863 - DNA, 201 bp, Homo sapiens
caacctctttgtaaccttcaatcccatttagttctttacttcatcatttctcttcaaatcatcactattgctttcttctcccaatcaaccttttttttttttgccttctcattgtctataatcatattcaatgacataaatattcataatgatgattcatttcaccttttgacctcagaattctctgacctccttgacact

SEQ ID NO: 491864 - DNA, 201 bp, Homo sapiens
agcagcccaaaggaagagaagcagacatctgagagctgtttaagagtagatcagataggaactggtaatgactcctgactaggagtgggatgagggagatraggggatgagggagataaagggaaaaagtatgaatgttaaactttctgccttgggatgctgacctcatttactgacacaggaaaagggagaagatgatta

SEQ ID NO: 491865 - DNA, 201 bp, Homo sapiens
gaacctaaagtaactagagggcttttacttataaaatagtgaccagaaaagtgatgggaatccctgaatttttttccagggctcaggaaagaattagcccmactgagtaaacttagcaatattgtaaaattgctttaagattatatgtcatgcattgtgtatgttcaatgtaatagttaaaactttcattttttcttatta

SEQ ID NO: 491866 - DNA, 201 bp, Homo sapiens
ttaagaatgttttgatgtttcttacctattctcccttcccattctccaagtatgaagaggtaagaaaccacatggaggttggggagagaggaaggagttagaagaaacacaaggtagggaatgggagaagcctaccagtgcagtaacagaaaacctgaaactttaaatcatgttcaaaatttggactgctacccaggagta

SEQ ID NO: 491867 - DNA, 201 bp, Homo sapiens
aaaattaatagtttagactgatcaatgagacagaaaattaacaaagatattcagggcttgaactcagctctagaacaagtggacctgataggtatctacasaactctccacctaaaggcaacagaatatacattttttttgacgtcacatggcacttactctaaaattaatcacataattggaagtaaagcactcctcagc

SEQ ID NO: 491868 - DNA, 201 bp, Homo sapiens
aaattaatagtttagactgatcaatgagacagaaaattaacaaagatattcagggcttgaactcagctctagaacaagtggacctgataggtatctacagwactctccacctaaaggcaacagaatatacattttttttgacgtcacatggcacttactctaaaattaatcacataattggaagtaaagcactcctcagca

SEQ ID NO: 491869 - DNA, 201 bp, Homo sapiens
gtagttagtaaagaagaagctcaagaacagtgccctcatattttggagctaagcttatcactggaagtaacccactagtaaaatcaaatcaaaacagacargattagcttgtcacatgaaggcagaaagaatcaaacagaaaatctagtaggtcttgccaatgtgaaaaacatgtagcccagttaatgttacatacatcta

SEQ ID NO: 491870 - DNA, 201 bp, Homo sapiens
atattttaatactttttttgaaaatggaaacttttacaggcaatttacttcaaactaatgataaggaagtgatgctgttctgttctgttttgttgtttttktgtttttttttttttcttttttgagatggggtcttgcccaggttggagtgaggtggtgcaaacaaggctcactgcagccttgaccttctggctcaaggaa

SEQ ID NO: 491871 - DNA, 201 bp, Homo sapiens
ctatattttaatactttttttgaaaatggaaacttttacaggcaatttacttcaaactaatgataaggaagtgatgctgttctgttctgttttgttgtttktgtgtttttttttttttcttttttgagatggggtcttgcccaggttggagtgaggtggtgcaaacaaggctcactgcagccttgaccttctggctcaagg

SEQ ID NO: 491872 - DNA, 201 bp, Homo sapiens
cggccggcacctgtcgcagaaggtgcaaccgatcgcactgtcgcgccgaagctcctcaatggccagcgccagctgcagccccggccgcccactcgcctcayctgagcctgggtacgtgcgccccacaacacctcccccaggcagggcccggggacccccgggagcgtccccggctacctggcgccgctcatcctgggtagg

SEQ ID NO: 491873 - DNA, 201 bp, Homo sapiens
cacaacacctcccccaggcagggcccggggacccccgggagcgtccccggctacctggcgccgctcatcctgggtagggttggccccctctgaggctgccyggcatgagggagctgcacccctgagcttgacctctgacggccctttgtaatagcattaagtctttgaaactttgtagcggggtagaaggggctaggaaac

SEQ ID NO: 491874 - DNA, 201 bp, Homo sapiens
attattatgtgaaataatcataataaactttaaataattgtttttttcctcttttaattccctgcagattctgttcactctctgctatcagttgctgtgtmcttaaggaatgcagacaatgttaattcaagcaaaacaatagaaagaaaatgatttgaaatgaaaacttggctttaaaaagttacataatatactctcaag

SEQ ID NO: 491875 - DNA, 201 bp, Homo sapiens
aattattatgtgaaataatcataataaactttaaataattgtttttttcctcttttaattccctgcagattctgttcactctctgctatcagttgctgtgwccttaaggaatgcagacaatgttaattcaagcaaaacaatagaaagaaaatgatttgaaatgaaaacttggctttaaaaagttacataatatactctcaa

SEQ ID NO: 491876 - DNA, 201 bp, Homo sapiens
ataatgcattccttctggaatttaatttcacattttcaaaggccaaagacagcttgtagtaaatctttatacttataaaaaagcattttaaacagcataayatttataatatagttttccccttgacctccctaagaaataaaattttataacatttacttggtatcatattgtaaggcacccttggcagttttcttttat

SEQ ID NO: 491877 - DNA, 201 bp, Homo sapiens
tgagaaattgtggtcctaaggaaagatcccatagagccataaaaaggagtctacaattaaaaaaaaaacaatttgaataattcctaccaacaaggtttcayacttacagtgggttctatgttgagttcttttctctctctgtctccttgatcaaaaaattcagttgctacaagttctgctatctgaaataaataacagact

SEQ ID NO: 491878 - DNA, 201 bp, Homo sapiens
ttgacaatgaaaagcatatcattctttaaaacagagaccgtgaatgaaggccctgttaggagctgtatatctccattttatagcaaataagcagcagcttsatacccgaagacaagtagtccatgtccaaagcgtgctctcttaactattacattatactctttttcacttaggtacatctctctgtctttggtagcttcc

SEQ ID NO: 491879 - DNA, 201 bp, Homo sapiens
gaaagagacagataattggcagtagtcatctgtgtcaatggattattaaagtcaatattgctttctgcagaaaaagcaaaggcataaagggataaacatcytgagttgtggtttggttatatgacatttgacaagtttcttaaatattctgagtcttagtttctttcattctttagttgaggacaataaggatctcatcat

SEQ ID NO: 491880 - DNA, 201 bp, Homo sapiens
aaaactacatccttctaggaagaatagacaaatgggccaattaagcctgaggtgaataatactttaaacctgtaaagctttgtaaataattgaaaaactgytcatcacttcaaatactgtcatcaacatacaaaataaatatagacaattccatatgaggttaactcaaaaaggaccttaacctttcaggtgcaattagta

SEQ ID NO: 491881 - DNA, 201 bp, Homo sapiens
gttgtatttttcatgctcgattccatacacatcactttggtcctgcttcctcacaggtaggaggagggatatttcacagctcctggcttaaatggaggacmctagcctctactgggttaaagtagtggagggttagactcaatatgtggtagcctctcttcttattgcaataatgttctaaattttaaaaactgacttttc

SEQ ID NO: 491882 - DNA, 201 bp, Homo sapiens
gttaagaatgttttgatgtttcttacctattctcccttcccattctccaagtatgaagaggtaagaaaccacatggaggttggggagagaggaaggagttagaagaaacacaaggtagggaatgggagaagcctaccagtgcagtaacagaaaacctgaaactttaaatcatgttcaaaatttggactgctacccaggagt

SEQ ID NO: 491883 - DNA, 201 bp, Homo sapiens
tgttaagaatgttttgatgtttcttacctattctcccttcccattctccaagtatgaagaggtaagaaaccacatggaggttggggagagaggaaggagttagaagaaacacaaggtagggaatgggagaagcctaccagtgcagtaacagaaaacctgaaactttaaatcatgttcaaaatttggactgctacccaggag

SEQ ID NO: 491884 - DNA, 201 bp, Homo sapiens
ctgttaagaatgttttgatgtttcttacctattctcccttcccattctccaagtatgaagaggtaagaaaccacatggaggttggggagagaggaaggagttagaagaaacacaaggtagggaatgggagaagcctaccagtgcagtaacagaaaacctgaaactttaaatcatgttcaaaatttggactgctacccagga

SEQ ID NO: 491885 - DNA, 201 bp, Homo sapiens
ttattttgtcttaacctcaaaatgctctaaaaaccaattaagtaggcacatgcagttacttctagatgtataacagtagatatctggcagatgtttttgtrttttttctatgtgtttttacttctcctaagagtaactacaaccatgaatgtgaattccttacagagggagagagactcatgttacaaggaaatcctgaga

SEQ ID NO: 491886 - DNA, 201 bp, Homo sapiens
tatgtccaattatctgtttttaatactacttaaaaattccaaaaaaaattccatacttacttcagaagctacctttaagagtaaaaacttacttaaaaaaattttttttattttagatttagggggtatatgtgcatgtctggtatatatgtatattgtgtattggtggggactgggcttctagtatacccattacccaaa

SEQ ID NO: 491887 - DNA, 201 bp, Homo sapiens
gagcctgggtacgtgcgccccacaacacctcccccaggcagggcccggggacccccgggagcgtccccggctacctggcgccgctcatcctgggtagggtyggccccctctgaggctgcccggcatgagggagctgcacccctgagcttgacctctgacggccctttgtaatagcattaagtctttgaaactttgtagcgg

SEQ ID NO: 491888 - DNA, 201 bp, Homo sapiens
caagagtctttattatgccttttattggttttgctttctgtaatgaacatgtataattcttccaatgagaaaaaagttttaaaaaataaaatgagaaattktggtcctaaggaaagatcccatagagccataaaaaggagtctacaattaaaaaaaaaacaatttgaataattcctaccaacaaggtttcatacttacagt

SEQ ID NO: 491889 - DNA, 201 bp, Homo sapiens
ccggaacttaaaagaaaatgtagaaaaacgggtagagaagagtgatttacatacttcattttccaattagtgcatgtgaaaataattcatcttggtagtaktgtccagatactatctcttcctgtttaggtccaggaacagtctgcttgtgttttttattgtcaaatgagttgttctctaatttcatctctcactgggaga

SEQ ID NO: 491890 - DNA, 201 bp, Homo sapiens
tcagtagagcaactttagtagctatttctgtaggcttttctggagagagagagagaaagagagacagatagagagcagttgtagctgaggtagagttgttgatgaccacgtttcatggcagatcagtgagaccagagaattcctgactttcagagctgggtggtaaagggggaagtttgcttcttacagttacatgctgat

SEQ ID NO: 491891 - DNA, 201 bp, Homo sapiens
actcaaaatgctgtggctgtttagaatctgtttatatgaaaataatatagatcttgcctctgcagttccctaataccattcattgatgttgtttgtattaytcgtgatgctgtttcatccattgtgttgcctgtgaatattggtttccaatgactaaaggtttgttagtgtgctttgttgatggtcatcacaaatgcaagt

SEQ ID NO: 491892 - DNA, 201 bp, Homo sapiens
ctcagtagagcaactttagtagctatttctgtaggcttttctggagagagagagagaaagagagacagatagagagcagttgtagctgaggtagagttgttgatgaccacgtttcatggcagatcagtgagaccagagaattcctgactttcagagctgggtggtaaagggggaagtttgcttcttacagttacatgctga

SEQ ID NO: 491893 - DNA, 201 bp, Homo sapiens
ttatatcataagtctttttatgatccttttctaataccatggccctcttttcaccattcttgcaaaaattaaaaattaaaaaaaattcaactctggacatraaaagtcactaagagtggaacgagagttaatctttgagtgcaggaatgtcttgagttaaagcagtagtgagagttataaaaatattttaattttgcagtg

SEQ ID NO: 491894 - DNA, 201 bp, Homo sapiens
tgcactatattttaatactttttttgaaaatggaaacttttacaggcaatttacttcaaactaatgataaggaagtgatgctgttctgttctgttttgttktttttgtgtttttttttttttcttttttgagatggggtcttgcccaggttggagtgaggtggtgcaaacaaggctcactgcagccttgaccttctggctc

SEQ ID NO: 491895 - DNA, 201 bp, Homo sapiens
agcctcccaaagtgctgagattacaggaatgagccatcgtgcctggctttgcactatattttaatactttttttgaaaatggaaacttttacaggcaattyacttcaaactaatgataaggaagtgatgctgttctgttctgttttgttgtttttgtgtttttttttttttcttttttgagatggggtcttgcccaggttg

SEQ ID NO: 491896 - DNA, 201 bp, Homo sapiens
ggggcaatccatttcagcctcccaaagtgctgagattacaggaatgagccatcgtgcctggctttgcactatattttaatactttttttgaaaatggaaamttttacaggcaatttacttcaaactaatgataaggaagtgatgctgttctgttctgttttgttgtttttgtgtttttttttttttcttttttgagatggg

SEQ ID NO: 491897 - DNA, 201 bp, Homo sapiens
ctgattgtattgcatctctaaccttgaaaaaaacacattcgttcgatcattttaccacttctaactaccaccctatttattatcttctactggacttattrccaaaactcccataacttccattcttgccaaccctctctctcagtgcacacatatacatatttcccagctctttcattttcatcaatggcaccatcactg

SEQ ID NO: 491898 - DNA, 201 bp, Homo sapiens
caaagaacattctaaaagctacaggatggaagccagcatagcttgtgcctctttccattatctactgtaattcctaatctctctctctactaagagaaaakaatcttttcttttgattgtttggtcacaccacactacaactcaaacattctgagctgacccagtggggacatgcaaacattttccataagagccttgtgg

SEQ ID NO: 491899 - DNA, 201 bp, Homo sapiens
gataaaaaggaatgtcggctattgggggtgctagtccagatgttccactgactttgtcaccctgaacaagatgttcaatctctctgcctgcttttttgaaygtgtaaaagaaggaagttggagtagactatctctaaggtttaacattctctgatatattaatacatttatctctgtatccacagggctcaagcacctctt

SEQ ID NO: 491900 - DNA, 201 bp, Homo sapiens
tttcttaaatattctgagtcttagtttctttcattctttagttgaggacaataaggatctcatcatctaaatcacataattttggtgaggacacaatgacrgaacacacacacaccatgagtgattatgagggaaaggtaaaagatgagggtttggctgtacagtgtgagaggtccctaaacttcacccacctccaatgtg

SEQ ID NO: 491901 - DNA, 201 bp, Homo sapiens
  misc_feature (1)...(201): n = A,T,C or G
actgcatggtggtataaggactaaatgaactaatatataaaaagtgcaaaaacgtttcaaatggcataaggcctatataaagttttagcttctattattantatttactactgacataggactaattgaattgaactttcactttattcatagtcagatctccaggctctcaagatctccaacctgaccagagatcatctc

SEQ ID NO: 491902 - DNA, 201 bp, Homo sapiens
gtatcatggtaaattttatttctctctctctttctagactgtcagtatcttgggcttagagttttatttatttttttcagctccacttcagctggcaaaaygcctagcatatagtaggaactaaaaaaatgttttccgaattaatgaaagaatgtagaattgcagctctgactgtaactagtttcccatgaagactataat

SEQ ID NO: 491903 - DNA, 201 bp, Homo sapiens
attattccattatacaaagaaggaaacagggacatagagaagtttaatgacttgcacaaggtcacagagtaagaggagagagaagccaagatttgaagctrggcatctggctcaagttggctcttaactaccataaccatcacagccactgcatggtggtataaggactaaatgaactaatatataaaaagtgcaaaaacg

SEQ ID NO: 491904 - DNA, 201 bp, Homo sapiens
gctcagtagagcaactttagtagctatttctgtaggcttttctggagagagagagagaaagagagacagatagagagcagttgtagctgaggtagagttgttgatgaccacgtttcatggcagatcagtgagaccagagaattcctgactttcagagctgggtggtaaagggggaagtttgcttcttacagttacatgctg

SEQ ID NO: 491905 - DNA, 201 bp, Homo sapiens
acttaaatgtaaaacccaaaactataagaaccctagaagaaaatctaggcaatactattcagaacataggcatgggcaaagactttataatgaaattgccraaagcaattaaaacaaaagcagaaattgacaaatggaatttaattaaactaaagagcttctgcacagcaaattaaactattatcagaccagacagacagc

SEQ ID NO: 491906 - DNA, 201 bp, Homo sapiens
ttcacattgccaagacaatcctaagcaaaaagaagaaagctggaggtatcacactatccaacttcaaactatactacaagtccacagtaaaaaaaaaaaaataaaaccagcatggtactggtacaaaaacaggcacatagaccaaaggaacagcatgcagagctcagaaataaaactgcacatctacaaccatctgctctt

SEQ ID NO: 491907 - DNA, 201 bp, Homo sapiens
ttaaagggttcaattcaacaagaagaggtaactatcctaaatatatatgcacccaatacagaagcacccagatttataaaacaagttcttagagacctacraagagacttagacccccacataataatagtgggagactttaataccccactgtcaatattagatgggtcaatgagacagaaaattaatagtttagactga

SEQ ID NO: 491908 - DNA, 201 bp, Homo sapiens
gttgttttaagccaataaattggtggttatttgttacatcagcaataggaaactggtataatgatttttcaatgaaaatttagacaagattagaaaaaaaagaataaaaaggaacaaacaaagcctccgagaactatgggactgtgtaaatagaccaaacctatgactaattggagtacctgaaagagatagggagaatgg

SEQ ID NO: 491909 - DNA, 201 bp, Homo sapiens
attttagatttagggggtatatgtgcatgtctggtatatatgtatattgtgtattggtggggactgggcttctagtatacccattacccaaacagtgaacrttgtacccagtaggttgttcttcaccccttgttcttttcccacctttcccccttttggagtccccagtgtctattatttccatctttatgtccgtgtgta

SEQ ID NO: 491910 - DNA, 201 bp, Homo sapiens
gatcttgcctctgcagttccctaataccattcattgatgttgtttgtattactcgtgatgctgtttcatccattgtgttgcctgtgaatattggtttccartgactaaaggtttgttagtgtgctttgttgatggtcatcacaaatgcaagtgttccatggagtaggaagaaaaaaataggaatgataatttctggtcatg

SEQ ID NO: 491911 - DNA, 201 bp, Homo sapiens
tgttgttttaagccaataaattggtggttatttgttacatcagcaataggaaactggtataatgatttttcaatgaaaatttagacaagattagaaaaaaaagaataaaaaggaacaaacaaagcctccgagaactatgggactgtgtaaatagaccaaacctatgactaattggagtacctgaaagagatagggagaatg

SEQ ID NO: 491912 - DNA, 201 bp, Homo sapiens
ttagggggtatatgtgcatgtctggtatatatgtatattgtgtattggtggggactgggcttctagtatacccattacccaaacagtgaacattgtacccrgtaggttgttcttcaccccttgttcttttcccacctttcccccttttggagtccccagtgtctattatttccatctttatgtccgtgtgtacctactgtt

SEQ ID NO: 491913 - DNA, 201 bp, Homo sapiens
gggtggaaaggtaaggaaaagaaacacatccgcaacattttactgcttttttttagatcaacctcacccatttaaggagtgtggactgacggctatcacaytacaaacagactgggttgaattagaggtggagaaagaggctgagaatgtcactttaggggtgctcctccatatggagacacaggagtgaggaatcaatga

SEQ ID NO: 491914 - DNA, 201 bp, Homo sapiens
caagggtcctttaaagatggaggcagactgtcagaggaattggcacaaaagcagaggtcacacacacacacggggggatagagagagagagagagagagaggaagatgttacactgctggctttaaagatggaggaagtggctattaagtcaagcaaggcatgcaacctcaaaagctccaaaaaacaaggaaatgaccttc

SEQ ID NO: 491915 - DNA, 201 bp, Homo sapiens
tcatagcccatggtatatgaactctgaaaccccaaataccaaaatcctactatataaaaatgatccacatactaaaaaaaaaaaaaaaaaaccagacacayaaatcgagtttaatttcgtatcatgctattttcctaaaatatagtttctaaagttattgcaaattagttcctgctgcttggtaaaataccatatttaaac

SEQ ID NO: 491916 - DNA, 201 bp, Homo sapiens
gatgtagctcttcagaggtttcagccttactgggagggccattccttaaaggcttcctggggtctcaagaccatgtttcctgtgtgaaagttgtctatacmaaaatggagtcacttctgtcaaaccgtaaggaaagagagcttggagaccatgaagggaggaccttcttacatgtttgcatgataacagaaactatcacaa

SEQ ID NO: 491917 - DNA, 201 bp, Homo sapiens
acaagggtcctttaaagatggaggcagactgtcagaggaattggcacaaaagcagaggtcacacacacacacggggggatagagagagagagagagagagaggaagatgttacactgctggctttaaagatggaggaagtggctattaagtcaagcaaggcatgcaacctcaaaagctccaaaaaacaaggaaatgacctt

SEQ ID NO: 491918 - DNA, 201 bp, Homo sapiens
gttacagcccagtgactctagggagtctatggtcccattgctgcaaatgagcagatcggtgaaaacaaaaacatattaagaagtccacatttctaacaaayaccttgcaaagaataaaatggtaatttaaggaatatgtccacttaatatacatttcatgtatataggacacataatacaataaataccctttttactacc

SEQ ID NO: 491919 - DNA, 201 bp, Homo sapiens
gatgatttgatttaaaaatgtgttatatgtgatacatttataacggaatattttttgctaaaaagaaatgagctaccaagctataaaaagatatagaggamccttggatgcatttttctaagttaaagaagccaatctgaaaaggctataaaactgtatgatttccaccatatgacactctggaaaaggcaaaactatgga

SEQ ID NO: 491920 - DNA, 201 bp, Homo sapiens
caaaattctctcaattaccataatcttacatatctatgttgtgggtattagaacttaatatcagtcaccatccttgaaatttaggctctctggtccaacayttcactttgaaatgtattttgtatattgttgtatcagtcaaaatttccaatttaaattatagttatccatccatccatccatccatccatccatctgtcc

SEQ ID NO: 491921 - DNA, 201 bp, Homo sapiens
ggaacctccactcctctgaccttggaccatttaccctgtcagcactttgttaactgttttagctagatcaggctattaactggaccaacggaggcctttaygtggtttgaagtagagggaagaaaaattaaatttcagccaggttctcaaaccccttaagtttcctatgagtatctgagatagcactactttgcttttggg

SEQ ID NO: 491922 - DNA, 201 bp, Homo sapiens
gcgggaggatcgctcggctgcagcctcgacctcctggggcaatccatttcagcctcccaaagtgctgagattacaggaatgagccatcgtgcctggctttrcactatattttaatactttttttgaaaatggaaacttttacaggcaatttacttcaaactaatgataaggaagtgatgctgttctgttctgttttgttgt

SEQ ID NO: 491923 - DNA, 201 bp, Homo sapiens
tcctgtctgagaattcagttatcatcaatagtgtattcttaggcagagtcagaaagtcacctcatctgagaagccacctgtgtccacagctgggaatttgyagaagtcagtcactgaaggaaggctttaggatatttatgataaaacatagcagtacactgggatccaaaccctgggaaacctcaactattttagagtatg

SEQ ID NO: 491924 - DNA, 201 bp, Homo sapiens
ttgccatgttggccaggctggtcttgaacttgcaacctcaggtgatctgcccacttcggcctcccaaagtgctgggatcacaggtgtgagccactgtgccyggccaagataaacataccttaagaaaatttttaaaaataattattaatataaaaaaccatgatgaacaagataccaaaaatttaaatacaagattgtgca

SEQ ID NO: 491925 - DNA, 201 bp, Homo sapiens
ccacaacaataaattaggtacttactggactattaagaatcatcaggcactggtcaaaatgatggtgttccatgattgaatggcagtaaagctgggcaagkggatgttcacttctgaaagtattttgttgaagaaaggaaaaaagatcagtttccttaatatgccatttatcagtacatttttattactgtttaactacaa

SEQ ID NO: 491926 - DNA, 201 bp, Homo sapiens
agattcaattgctatgaatttggaaccttgctacaggatacccagtattcatttgtttgtctgttatagtgcattggagtgtattcttatttttgtttaastaaatgtacattgggcatctctcatatcacaggtgaatctccccagtgatagacaaagacatttaaaatatttaggagtaataatggcccacaaacgagg

SEQ ID NO: 491927 - DNA, 201 bp, Homo sapiens
gccagcagatacgtggaaatgggaacctgcaatattctacctccttccttttaatctcagaagaatttttataactagagtaaagccacattatgacaatragaaaaagttggattacttttctttatttaggctaaaatttagacttaaaaaaagaatatgctaacgcatagtatatacagtattgctccttgagggtaa

SEQ ID NO: 491928 - DNA, 201 bp, Homo sapiens
tgcctttgtcttgccagtcaacagttctgggtcttatttcataagactcctcaaaagtgcctgggaagactaagcaccagtatgggtggacatctggatarctcatccctctactgcctttcctttcttccctgcttccttcccagttctgcattcctgctccctggggtcatattcacaaatagcctatatgcacactga

SEQ ID NO: 491929 - DNA, 201 bp, Homo sapiens
ttgtcccagcctatctttaatacctctcacttctgccttagagctttctgaccccacaactggtgcccagaggaatgttctctgcactcatacttgttcawcctgaaagtgtcaaagagtgaaggcctgtggaccaccttggaccaggggggtacaaagacctagggacaactgcctttgtcttgccagtcaacagttctg

SEQ ID NO: 491930 - DNA, 201 bp, Homo sapiens
tacagacagtgtgtaagaaactaggcatattgcagaacacaccatctctgtaaacttcaactctgcatgaaataggccactcagttccgcttggcctggcygctttccccattaatcagcatcttctcctgctgttctgcaagggcctgccatttctgcctgttctttctgcagccatctagcaaagggaaacagtcctct

SEQ ID NO: 491931 - DNA, 201 bp, Homo sapiens
tcagtacatttttattactgtttaactacaaaagaggctacttcacaaaattaatcaactaacaattttctctccttttactgagaaaagtgtgagataayctctgggaaacaaatacaaagagtcaaattgttttcaaataccaatgtgaccattgccagagtaaagtatgaacaatttcattggttttaatactgatta

SEQ ID NO: 491932 - DNA, 201 bp, Homo sapiens
acaaaattctctcaattaccataatcttacatatctatgttgtgggtattagaacttaatatcagtcaccatccttgaaatttaggctctctggtccaacrcttcactttgaaatgtattttgtatattgttgtatcagtcaaaatttccaatttaaattatagttatccatccatccatccatccatccatccatctgtc

SEQ ID NO: 491933 - DNA, 201 bp, Homo sapiens
gtaacttaaattgactttttaatatctacgtttattcattcatccatccttttctacccataagtcgaacaggcacaatttatggagtttaaatgaaatawaaattgtttttcatctttatctttcactaggagaagttttattcctgggcctgcattaaaaacctaggcagccctatgatttttctggtcattcaagtaa

SEQ ID NO: 491934 - DNA, 201 bp, Homo sapiens
ttgcatttttttttttctaaaaatgcaacatattttctaaagcatttgtttttaatctgggatgattctgaggtgggaggtaagttggtggcaggacataytacatgatttttgttattgttattatttttaaaaatcacgcattgctggctttcccctatactcctggagatgccatcatgtatgtatagctaattctaa

SEQ ID NO: 491935 - DNA, 201 bp, Homo sapiens
atagttgcatttttttttttctaaaaatgcaacatattttctaaagcatttgtttttaatctgggatgattctgaggtgggaggtaagttggtggcaggayatactacatgatttttgttattgttattatttttaaaaatcacgcattgctggctttcccctatactcctggagatgccatcatgtatgtatagctaatt

SEQ ID NO: 491936 - DNA, 201 bp, Homo sapiens
tgactctgtacttctgatatcctggatttgtatatgagagcaatgctagtaagatgcctgcttctgaatgcaagtttggctgggaagacagcagagaaatrgaagaaatattataaagtaatggagaaacctcaaaacagtacagcatggatgttgactttgaaaacaacagctgctgacgtgaacttggcagaaatttgt

SEQ ID NO: 491937 - DNA, 201 bp, Homo sapiens
cagaaataataggtattcttaattttcagcagtataagccaaaggagtagacttttctggctaccctttcagaaactgctccgtattctgataagcagttytgccaggacatttctgctttgaaatttctcaatatggatgtcaaaagtttgaaacaatgaaaagacttcaaatacctatttctcaggttatttcttaaaa

SEQ ID NO: 491938 - DNA, 201 bp, Homo sapiens
tcagtaaatcttgcagacagtaaagaaatgaatcaggcacagtgggactggactagtatattttctttaataacagcatcaacatgttatatgatttttcytttttttctaacattatataagtgaatccctttaaatctcaataagaaagaggcaccgactatagaaagttttataatgtgcttatagtttttcaaaatc

SEQ ID NO: 491939 - DNA, 201 bp, Homo sapiens
gatgcaagatcagaagttttttttctttcttggagaagtaataaaaagaaaaaagagatcgaagtttttatctcacaagatacctcatattcagttctacrtactgaagacctaatccaagttcttacatgtctatagggcaaatgttaacatttttaaaaagctatatttatttggtaatatgaacatatgtttgtagat

SEQ ID NO: 491940 - DNA, 201 bp, Homo sapiens
agaggccactgagaatctgattgccctttataaaaaaagaaaaccagtattaacatcctggagaagctgctgacaagaacaaaatctagaaatatattcayatatcttaaacacatgcccagtattctaatgaatgtggaggacacacttaaataccatgaaataaagtttcccctctatgttcccacccaacccctctgt

SEQ ID NO: 491941 - DNA, 201 bp, Homo sapiens
aaaagtgcctgattgtgttctgtttgtcatgtaggtgggagggaaagagggagagaaagctgagttgaactgaagcagagctttttacagctctattgttytactgtcagagagcaattatactccaacttccatccacctcagacatcccaacctcctcctcctgccaatgcttccccacacacttaacatacagccaca

SEQ ID NO: 491942 - DNA, 201 bp, Homo sapiens
agaaaagtcagaaatataagtgataaaataaatggaaatgtttgaaatggatcatcgacctccttttacctattttagcacctcacaaatatcccactctracagtgctttgttagttatttataaaatattccttaggagattggtcttgcataagacatgcttttaccgtggtccttttcccggtaatagtcactgtca

SEQ ID NO: 491943 - DNA, 201 bp, Homo sapiens
ttctcatctagtaccttttcatttgagtgctggaaaatgtatcccagtcaactgaattgtggagtcatattgcctcccccttaccaaccaagtgatggcartactaggaagaggggcaaaagaaaagtcagaaatataagtgataaaataaatggaaatgtttgaaatggatcatcgacctccttttacctattttagcac

SEQ ID NO: 491944 - DNA, 201 bp, Homo sapiens
ctcatgctcagactgaagaaagtaattgggccaggcctggtggctcacgcccataatcccagcattttggggaggcggaggcggaggcggaagcgggtggrtcgcttgagctcaggaattccagactagtttgggcaacatggtggaaccctgtctctacaaaaatacaaaaaattagctgggcatggtggcacgcacttg

SEQ ID NO: 491945 - DNA, 201 bp, Homo sapiens
cttattcaatgggataaccattcttctggtccctgctaaccaaaacactggaatagtctttgatttctctctctttcttcatcctccacatcttatcagtycccaggaactgtggtcttggtttcaagtgtccattctggttgctactattctgatgaatggatttcatcacttgatacctgaactttttcactggtcttc

SEQ ID NO: 491946 - DNA, 201 bp, Homo sapiens
cactggaggttgaggttacagtgagctgagattgcgccattgcactccagcccgtgtaacagagggagactctgtctctaaaaaattatatgcaagtgagmgcttttcttccagcgctcatgctcagactgaagaaagtaattgggccaggcctggtggctcacgcccataatcccagcattttggggaggcggaggcgga

SEQ ID NO: 491947 - DNA, 201 bp, Homo sapiens
agaaggcataagacaaaaatttttcttttcgcagtgtttaatatctacctggagacacaagactcaagaaaaacttacgtaataaaactgatagtatatgrttataaaaaatgaaaagtatgtttcataagggttcaaaggagagacccatgtggcctgtaaagcttagaaaggcattgtggttacaggtatttttcaaat

SEQ ID NO: 491948 - DNA, 201 bp, Homo sapiens
acacaggaaaagggagaagatgattaaagatgggggatgaagcaggggaacctgactagctgaatgttggatctgttcattttaaggtgcctgaaatatayccaaatggatataaatgtcaactcagttctgggctggagatatagatttggaatgcaccaacaatgcagatggtaatcctggcatgcgagtaggtgagat

SEQ ID NO: 491949 - DNA, 201 bp, Homo sapiens
tcataaaatttataggaaaggggtttgtgaattgtaaagctccatatacaagtgttggataatacaactgatttgttatttcttcctattactatctgaaygattattttactttgcatttaatttgttgaagatagagaagctacctaagactgaagaaatgtaatgtgggggaaaaaatgggtaaagtgagagaaatct

SEQ ID NO: 491950 - DNA, 201 bp, Homo sapiens
tggtatatatgtatattgtgtattggtggggactgggcttctagtatacccattacccaaacagtgaacattgtacccagtaggttgttcttcaccccttrttcttttcccacctttcccccttttggagtccccagtgtctattatttccatctttatgtccgtgtgtacctactgtttggctcccacttatgagtgaga

SEQ ID NO: 491951 - DNA, 201 bp, Homo sapiens
gagaggggtgtggagttcctgtgtatgtctcctatcatttagtgggtggaggtggggctagagtagacttgtgtctgactcttgtctggaaagtctaaaagcaaggcactcatatcagtaccagtctgttaagaatgttttgatgtttcttacctattctcccttcccattctccaagtatgaagaggtaagaaaccacat

SEQ ID NO: 491952 - DNA, 201 bp, Homo sapiens
actaagtaacatacccgttgttgaataggccagggttttgtaattgcagaaagatcacaagctgtcatcagcattgccctgttatggaaaaaagaaacccmaaactcctatttacttttgtgttattatataccctcagtaaatagttactaataaaaaaaagttaaaaccctctaaacaatggaaatggcagtttataaa

SEQ ID NO: 491953 - DNA, 201 bp, Homo sapiens
atcccctgctattaccagataaactctgatctggaagccagtctctctgctgtttattttaggttgacaccagctggggtgggcattaaaccctttatgayagaggtctgcaaattgtcccaggtctgttatagcatcgcttacatgctttctacttggatatttaattgtctttgttttggcctctgggaatttccctta

SEQ ID NO: 491954 - DNA, 201 bp, Homo sapiens
tctatatttttatttaatgcttgtatgatttaattctctacattgaactctatgcttcagttggaatttaagtctgtagagtagatccaattttgtctttytccatttggttatccacttatctctctctttcctccagtcactggaaatgttatctttattatacactatatgtcttatgcagttctagattttcagctg

SEQ ID NO: 491955 - DNA, 201 bp, Homo sapiens
atttttacaaagcatggcaaaatgaggaaaccactgacaggtgaagaatttgcacaatggaaaaccaccttgaccatctcatgactttatacaggaatcgraggtaagtgttcctttaaagtgattttgtcatgaaagagtcatctgaaatgactctcgtgatggaggaaaggaaagtaatgaaatcaacattcatggtta

SEQ ID NO: 491956 - DNA, 201 bp, Homo sapiens
atgtttgcttattattattttttttaatcctgcctcttggcttgaagttgtttgtttccatagatttttagccttccgcctttatgaattttcgttggtgyctagcaataaaagctcccactgggagtaacttcacactggttgtcaatttattaatgaaagcctggcaactaacatgtttttcacagtagaaacagaaat

SEQ ID NO: 491957 - DNA, 201 bp, Homo sapiens
cttcactctctgtagtagagcagaaggggtccaaaaccatgcacaatttaacagtccagaagaactgtgtaatctttacctggctagcacatggaaaaaawaaactatatacaagaatacaaaactcctaaagtgttcttcaactatcagcaggttaagtgattcatacttgcaaaaagacaggatgtttgtttactggta

SEQ ID NO: 491958 - DNA, 201 bp, Homo sapiens
aaagttacagtcctctcctcatcttccaaggagtgttactgatttactgattcttttctataggttttatttttaattgacacctagcaattgacacctascaattgcacacatttatgggatacagtgtgatatttccatatatatattatatatatatatatatagcataatgatcaaatcagggtaattgtctaatcc

SEQ ID NO: 491959 - DNA, 201 bp, Homo sapiens
ctctagactaatatcccatttctgacagtggtctccatggcccattggggcttataaagtagctgccttctgtgacattctgcttgaagacaaaggctttkcccaaacataactccttttaaaaaagcacaacttgtttaggcacacagaggttaagtgacttacacaaatccacccaggattgtgattggcacggtctaa

SEQ ID NO: 491960 - DNA, 201 bp, Homo sapiens
taaagcaagttcaattacagcatctgttgaatatttaaggttgggtaaagtgggtgagtttaacagatattttcccttatttcttttaggcgaatctggaytgggaaagttgacattaatcaactcattattcctcccagatttgtattctccagagtatccgggtccttctcagagaattaaaaagcctgtacaggtcta

SEQ ID NO: 491961 - DNA, 201 bp, Homo sapiens
gccctggctccctcagactgagcagagcgcacaggctcctctcctagatgttttgctgggccctgtgggatgggaatttaaaggaacctccactcctctgmccttggaccatttaccctgtcagcactttgttaactgttttagctagatcaggctattaactggaccaacggaggcctttacgtggtttgaagtagaggg

SEQ ID NO: 491962 - DNA, 201 bp, Homo sapiens
ggaacttggaaaaatatcctcttcaggtattttaagggaggcagttctcagaatgagaagcttttctggaaaaggttagcactttgcttcagaagagaagyagggcaaaggtgtaattcttcatttaatgtagtacaacctaaagggtaaaccttaacctctcacttacacacatacccgcacacttacattcttttgatc

SEQ ID NO: 491963 - DNA, 201 bp, Homo sapiens
ggcttttttttcctttttaatgaaagacactagaaacctttttgtacagtggcaactccactctctgcatttttaaaactgagccacataagggtaattartatggttcaaagtaggctaagtggagaaaagggagttgtcacccttagactgtacctggaacagtgagcaacactaagaactcctctagtgatctggctc

SEQ ID NO: 491964 - DNA, 201 bp, Homo sapiens
cactttgcttcagaagagaagcagggcaaaggtgtaattcttcatttaatgtagtacaacctaaagggtaaaccttaacctctcacttacacacatacccrcacacttacattcttttgatcagatttgtattttagaaggcttcatttgtcgccaaatgtgggtgatacttgagggaccccttggaggagaaggctaatt

SEQ ID NO: 491965 - DNA, 201 bp, Homo sapiens
gaaatacagataaagtcccctaatggcatcctgtccatcagagattgaaatttgcttcagtaaatgtgtctatccttttcaataggaatttgcctcttaartcatctcacatttgtttaagtaggatcactctctttagtaacttaaattgactttttaatatctacgtttattcattcatccatccttttctacccataa

SEQ ID NO: 491966 - DNA, 201 bp, Homo sapiens
tctccgctacttgccgggcttaggcgggaggatcgctcggctgcagcctcgacctcctggggcaatccatttcagcctcccaaagtgctgagattacaggmatgagccatcgtgcctggctttgcactatattttaatactttttttgaaaatggaaacttttacaggcaatttacttcaaactaatgataaggaagtgat

SEQ ID NO: 491967 - DNA, 201 bp, Homo sapiens
cctagcatatagtaggaactaaaaaaatgttttccgaattaatgaaagaatgtagaattgcagctctgactgtaactagtttcccatgaagactataatastctattatcctttatttttcctggagcacaaaaggatttcatagagtctggaagacggttgcacattaagcccctttaccaccatcaatgttcactttct

SEQ ID NO: 491968 - DNA, 201 bp, Homo sapiens
attttccttattcattcatcctttgatggacaattagggtgattccgtatcttggctattgttaatagctgcaataaacatgggaatgcaggtatctctcwgacattattttatttcttttggataaatacccagtagtgggatcgctggatctacttatttgtcctttatttaaaattattttattttttagcgataaac

SEQ ID NO: 491969 - DNA, 201 bp, Homo sapiens
ccagcgctcatgctcagactgaagaaagtaattgggccaggcctggtggctcacgcccataatcccagcattttggggaggcggaggcggaggcggaagcrggtgggtcgcttgagctcaggaattccagactagtttgggcaacatggtggaaccctgtctctacaaaaatacaaaaaattagctgggcatggtggcacg

SEQ ID NO: 491970 - DNA, 201 bp, Homo sapiens
tccacaggtctgcactgctccccattgccttccctcccgcctcaccagttgatccctatacctccttcccaatgacctccaggaggcctctaacttacagrtgaggcaggcatttttctattcccttaacatgaccagttggtgtatcatggtaaattttatttctctctctctttctagactgtcagtatcttgggctta

SEQ ID NO: 491971 - DNA, 201 bp, Homo sapiens
aggaagaatatgccataaaccttcatgcttaacccctctaggattggagggtagggtaaagagcagagagttaggggccctgcaaccacccaggctctcartctaactctccaagtgtggcagtgcctcagtttcagttggccactctctgtgcccttcaatttctgtcttgcaagagtatatcccaaagccatttatttc

SEQ ID NO: 491972 - DNA, 201 bp, Homo sapiens
caagtgagcgcttttcttccagcgctcatgctcagactgaagaaagtaattgggccaggcctggtggctcacgcccataatcccagcattttggggaggcrgaggcggaggcggaagcgggtgggtcgcttgagctcaggaattccagactagtttgggcaacatggtggaaccctgtctctacaaaaatacaaaaaatta

SEQ ID NO: 491973 - DNA, 201 bp, Homo sapiens
cctaggctgatatttctacctcttgttcttcatctagtccctagaattcacatacttttgacccactattaaaacagcatacactaccttcctggtctccyacctctatcctgctgtcgtaggctgctttatcaggctctgataagggtcaggcattaccttgtatgcccccagtcagggctgtgactagagtggaattag

SEQ ID NO: 491974 - DNA, 201 bp, Homo sapiens
acctcttgttcttcatctagtccctagaattcacatacttttgacccactattaaaacagcatacactaccttcctggtctcctacctctatcctgctgtygtaggctgctttatcaggctctgataagggtcaggcattaccttgtatgcccccagtcagggctgtgactagagtggaattagtaatacatgtcttttga

SEQ ID NO: 491975 - DNA, 201 bp, Homo sapiens
acatccaaaactgatgtttgttcacaaactgacttcattttataacatttccacttattcaatgggataaccattcttctggtccctgctaaccaaaacaytggaatagtctttgatttctctctctttcttcatcctccacatcttatcagttcccaggaactgtggtcttggtttcaagtgtccattctggttgctact

SEQ ID NO: 491976 - DNA, 201 bp, Homo sapiens
tctaaacccaatacatccaaaactgatgtttgttcacaaactgacttcattttataacatttccacttattcaatgggataaccattcttctggtccctgmtaaccaaaacactggaatagtctttgatttctctctctttcttcatcctccacatcttatcagttcccaggaactgtggtcttggtttcaagtgtccatt

SEQ ID NO: 491977 - DNA, 201 bp, Homo sapiens
catctctactcttagctcatgcctctaaacccaatacatccaaaactgatgtttgttcacaaactgacttcattttataacatttccacttattcaatggrataaccattcttctggtccctgctaaccaaaacactggaatagtctttgatttctctctctttcttcatcctccacatcttatcagttcccaggaactgt

SEQ ID NO: 491978 - DNA, 201 bp, Homo sapiens
ataataagaataataattcagatagggtcagggtgtctttgacgaggtgatattttagcacaatccagagggggaatagcattccagctagagagaatagyaagcacaaaggcattcttgaattcttcccctgatgagataattgctgcagtgagtgggtccgtaactttttgtgtgttacgcactgtactttcttacatt

SEQ ID NO: 491979 - DNA, 201 bp, Homo sapiens
atacacacaaagcacgtgttgtaacttttattatgcttccttagaggtaagatgcaaatttgccctcagccagtgtaagatggtaaatatgacttcataamattaaaaaaacagaagaagtacagttaatcgaattatcttgactagaactttccaaatttgtcctaaggattctcctagagatgacactgtgacatagta

SEQ ID NO: 491980 - DNA, 201 bp, Homo sapiens
ccacctctagttctaaacaccaccacctcatcgcttgagtcctgccttttctgattgctgaagatgttcacttggttgttcaaccagcacctcaaacttaycttgtcctaaatcaaacctgcagtttcagggaagtgaaactgcaaaaggtaaaagtaaatggtggaagaaatgaatatagactattcaaaaattataatg

SEQ ID NO: 491981 - DNA, 201 bp, Homo sapiens
tgtacattgggcatctctcatatcacaggtgaatctccccagtgatagacaaagacatttaaaatatttaggagtaataatggcccacaaacgaggtaatkgtgaaagaagacatgtggatcaatgtgtgttgaaggaagtgttacatatagggacaactttgaggtacatttggggacttaagaagtgaattctggaaat

SEQ ID NO: 491982 - DNA, 201 bp, Homo sapiens
ttaatattcctaagatagaatggaaagggctgtatatgcacgagccaaagggagggctttttcctttattgctgaaggtcagaattcaacttctataattstggcacctcttaccccagagaagtcgtgtatgaaatgatagaacgtctatagtatactgataccattcttctacctcccaatcacacatgatataattca

SEQ ID NO: 491983 - DNA, 201 bp, Homo sapiens
aactgaaaaaattagattaaaaattatatttatatattttataataaacacatatatagatatatgtatatatgtgtatctgtatatttaaagctatttgwacacatatgtacatgtgtatatgcacctaattgaaactatatttgaaatatatatttgtgtgtatatgtgtacatatatatttgaaacagatttccactg

SEQ ID NO: 491984 - DNA, 201 bp, Homo sapiens
ctttaaatttaaaaaacttagccttatgaaaacttattacattgtcctcattttgacatagatcagtaaaaagttcattgaagcctgacatttgcagtccrctggaccagatgacctttaatgttctttctaagattcaattgctatgaatttggaaccttgctacaggatacccagtattcatttgtttgtctgttatag

SEQ ID NO: 491985 - DNA, 201 bp, Homo sapiens
ttctcctccatcttattaacaagttggcaaacccctataacaatccgagaaattgagcaaatgttattgttgattatcatagtttttgtggactttaacamacacacccaaagattgtcttacacttttctcttaggaatgcttagtatgtcgaaataagcaaattaacccccacaaatataagctagagaagtaaacaga

SEQ ID NO: 491986 - DNA, 201 bp, Homo sapiens
caaaaaaaaaaaattagttgggcatgggggtgcactcctgtagtcctagctactcaggagtcgaagtggaagaattggaggctatggtgagctatgactamgccacttcctcaaatataaggaagaatataatctgactaaaggattgtctttaaatttaaaaaacttagccttatgaaaacttattacattgtcctcatt

SEQ ID NO: 491987 - DNA, 201 bp, Homo sapiens
aaacttaagcgatataacattagaatacttatttatgccttggaattctactgcaacacacagatgagcagcttatctctccatgtattcacctatttaawggtccacccgagtaatttattaaataaagccaaaataaattaacagagtaagataagatgacgtggtagtgacaatcaatgattcaaaaattcattaagg

SEQ ID NO: 491988 - DNA, 201 bp, Homo sapiens
aggagaatcacttgaacccgggaggcggaggttgcagtgagccaagattgtgccactgaactgcagactgggcaataagagcgaaactcaaaaaaaaaaaattagttgggcatgggggtgcactcctgtagtcctagctactcaggagtcgaagtggaagaattggaggctatggtgagctatgactaagccacttcctca

SEQ ID NO: 491989 - DNA, 201 bp, Homo sapiens
aaggcaggaggattgcttgaggccgtagactaggcaacatagtgagatcctgtctctacaaaaaattaaaaaattaattggggctgggcgcagtggctcaygcctgtaatcctaacactttgggaggctgaggcaggtggatcacctgaagtcaggagttcaagaccagcctggccaacatggtaaaacctcgtctgcact

SEQ ID NO: 491990 - DNA, 201 bp, Homo sapiens
ctaatcccagcactttggggaccaaggcaggaggattgcttgaggccgtagactaggcaacatagtgagatcctgtctctacaaaaaattaaaaaattaaytggggctgggcgcagtggctcatgcctgtaatcctaacactttgggaggctgaggcaggtggatcacctgaagtcaggagttcaagaccagcctggccaa

SEQ ID NO: 491991 - DNA, 201 bp, Homo sapiens
ctagaacaaaggaacagttcattcacttggatttgcaaatgcatttcttttcaagtaaatattcaaatttactctttgtacaaccctctggagaaatctgrccgcttttaagatcatcatattgtaacaaataattgcaataaaaactaacagtgaggaaaaaatagtgagaaaattaactgggtaaaaaacttcagcttt

SEQ ID NO: 491992 - DNA, 201 bp, Homo sapiens
atttgatgctgagaatgatttcaggtattttaagtgcatggcataataagatctataggtttcagtttatcatttatttcatggtaggggataaaaatatmtaaagttgtgaagtgcttctgaagtaaacaaagactaggtaaagtttaaaataaaataatatttgttattattcagtgaatataataatatttggtgtac

SEQ ID NO: 491993 - DNA, 201 bp, Homo sapiens
gaaaagtatgtttcataagggttcaaaggagagacccatgtggcctgtaaagcttagaaaggcattgtggttacaggtatttttcaaattcttggtaattygataatccttattctgcaattatttttaataaactgaagtttactattaatatatattattttgtcttaacctcaaaatgctctaaaaaccaattaagta

SEQ ID NO: 491994 - DNA, 201 bp, Homo sapiens
atctctctgacattattttatttcttttggataaatacccagtagtgggatcgctggatctacttatttgtcctttatttaaaattattttattttttagygataaacgtcccactctatcacctaggctagactgcagtggcttgatcttagctcactgtaaccttcaacccctgggctcaagcaacccttctgcctcag

SEQ ID NO: 491995 - DNA, 201 bp, Homo sapiens
gacactgtgctttctaagtgtccctttctcctctttggctggttcttttcagtctccttcaggggctgtacttcctttacctgatccctctcaattcttcytcagagttccaaatcctggctccccgttactctcagtaaataccatccctctggttgaacttaacctacgtattcgttctgtttttgttacacaaatatt

SEQ ID NO: 491996 - DNA, 201 bp, Homo sapiens
tcctctgcagccggttcccgcagggcgcacagctgcggggcgcgctgcggacgctgagcctcctggccgcgcagggcctgtgggcgcagacgtccgtgctycaccgagaggatctggaaaggctcggggtgcaggagtccgacctccgtctgttcctggacggagacatcctccgccaggacagagtctccaaaggctgct

SEQ ID NO: 491997 - DNA, 201 bp, Homo sapiens
ggttcccgcagggcgcacagctgcggggcgcgctgcggacgctgagcctcctggccgcgcagggcctgtgggcgcagacgtccgtgcttcaccgagaggayctggaaaggctcggggtgcaggagtccgacctccgtctgttcctggacggagacatcctccgccaggacagagtctccaaaggctgctactccttcatcc

SEQ ID NO: 491998 - DNA, 201 bp, Homo sapiens
aattatccaggcgtggtggcaggcacctgtaatatcagctacttgggaggctgaggcaggagaattacttgaacccaggaggcggaggttgcagtgaaccragatcctgccactggactccagtctgagtgacagagcgagactgcgtctcaaaaaaaaaaaaaaaaaaaaagaaaaagaaaaaaagggccgggcacaatg

SEQ ID NO: 491999 - DNA, 201 bp, Homo sapiens
acttgggaggctgaggcaggagaattacttgaacccaggaggcggaggttgcagtgaaccaagatcctgccactggactccagtctgagtgacagagcgaractgcgtctcaaaaaaaaaaaaaaaaaaaaagaaaaagaaaaaaagggccgggcacaatggctcacgcctgtagtcccagcactttgggggcccaaggtg

SEQ ID NO: 492000 - DNA, 201 bp, Homo sapiens
agcctcccaagtagctgggattacaggcgcctaccaccacgtctggctaatttttgtatttttagtagagacagggtttcaccatgttggccaggctggtytcaaactgctgacctcaaatgaactgtctgcctcagcctcacaaagtactgggattacaggcatgagccacctcacctggtggtgaagactctaaaggct

SEQ ID NO: 492001 - DNA, 201 bp, Homo sapiens
caaatctccttgatgcacaaagtaaccttttcttcccccattgtaccccaggttgaaaatcgatgactttaatgatgaactcaataagctgctggaagaartagaagaaaaaaacccacaactgattattgatactgagaaacatcatccctgggcagaaaggccttcttctcatgacttcatgatctgaatccccccgag

SEQ ID NO: 492002 - DNA, 201 bp, Homo sapiens
tgagaccagcctgaccaacatggtgatgaaacagcatctctactaaaaatacaaaaatttgctggacgtggtggcagacacctgtaatcccagctactccrggaggctgaggcaggagaatcacttaaatctaggaggcgggggttgctatgagccgagatcacgccattgcaccccagcctgggcaacaagagcaaaatt

SEQ ID NO: 492003 - DNA, 201 bp, Homo sapiens
gtgccactccagcctgggcaacagagtgacactctgtctcaaaaaaaaaagatgcaagcattttgaactggaaggagataagagaaaggaacaagtgatcsagttctaagtgtcatcttttcttttatgaaggcaataaaatcttgagcttatggtaaaatgcaaaattttccccccttctcctttttcagaagcagcttt

SEQ ID NO: 492004 - DNA, 201 bp, Homo sapiens
tcagaagcagctttgaaatcctttaataaaaggaagcctctatcattaggtaagttacctcatttataacttttattcttcatgtgagatctggggactcsggcctttgttttaaggagaatgtgctgagcactaagaatgcaaagaaatgccggacttagcatccctgctcccagggcggagctggtctcgcaggtgcgt

SEQ ID NO: 492005 - DNA, 201 bp, Homo sapiens
tttgctgaacagggtgatgttacccaaggccgccctgctggtcaccacgcggcccagggccctgagggacctccggatcctggcggaggagccgatctacrtaagggtggagggcttcctggaggaggacaggagggcctatttcctgagacactttggagacgaggaccaagccatgcgtgcctttgagctaatgaggag

SEQ ID NO: 492006 - DNA, 201 bp, Homo sapiens
gccctgctggtcaccacgcggcccagggccctgagggacctccggatcctggcggaggagccgatctacataagggtggagggcttcctggaggaggacargagggcctatttcctgagacactttggagacgaggaccaagccatgcgtgcctttgagctaatgaggagcaacgcggccctgttccagctgggctcggcc

SEQ ID NO: 492007 - DNA, 201 bp, Homo sapiens
tgaggagcaacgcggccctgttccagctgggctcggcccccgcggtgtgctggatcgtgtgcacgactctgaagctgcagatggagaagggggaggacccrgtccccacctgcctcacccgcacggggctgttcctgcgtttcctctgcagccggttcccgcagggcgcacagctgcggggcgcgctgcggacgctgagcc

SEQ ID NO: 492008 - DNA, 201 bp, Homo sapiens
catgttggtcaggctggtctcaaactcctgacctcaggtgatccgcccgcctcggcctcccaaagtgctgggattacaggcgtgagcaaccgcacccggcyaccttttttttttttttcctttgaggcaagaactcactatgttccccaggctggagtccagcagcacaatgatggctcgctgcaggctcgctccagctcc

SEQ ID NO: 492009 - DNA, 201 bp, Homo sapiens
agatacaagatgctgatcccattcagcaaccccagggtgcttcccgggcccttctcatacacggtggtgctgtatggtcctgcaggccttgggaaaaccaygctggcccagaaactaatgctagactgggcagaggacaacctcatccacaaattcaaatatgcgttctacctcagctgcagggagctcagccgcctgggc

SEQ ID NO: 492010 - DNA, 201 bp, Homo sapiens
gctagactgggcagaggacaacctcatccacaaattcaaatatgcgttctacctcagctgcagggagctcagccgcctgggcccgtgcagttttgcagagytggtcttcagggactggcctgaattgcaggatgacattccacacatcctagcccaagcacggaaaatcttgttcgtgattgacggctttgatgagctggg

SEQ ID NO: 492011 - DNA, 201 bp, Homo sapiens
ccgccaccacgcccggctaattttttgtatttttttagtagagacagggtttcaccgtgttagccaggatggtcttgatctcctgacctcgtgatccaccygcctcagcctcctaaagtgctgggaattacaggcatgagccatcacgccccacctgagactgtcttttaaaaaaaaaaaaaaaaaatcaatgtggaacac

SEQ ID NO: 492012 - DNA, 201 bp, Homo sapiens
tgcctccttaacagactttcaggtacttgggaatttgaaacaaatctccttgatgcacaaagtaaccttttcttcccccattgtaccccaggttgaaaatmgatgactttaatgatgaactcaataagctgctggaagaaatagaagaaaaaaacccacaactgattattgatactgagaaacatcatccctgggcagaaa

SEQ ID NO: 492013 - DNA, 201 bp, Homo sapiens
ctacccacttaaatttaatgacatattcagttcatggctggagacgatgagtagaaggaaaggattcttcccacacccactatatctaggccctgaaacaytaaaaaagaagtcccacaagcagtgagatgtcaccgactcactaactgtatcttcaaatgaatgtctagtttttttggttgtgtgtgtgtgtggtgtgtg

SEQ ID NO: 492014 - DNA, 201 bp, Homo sapiens
ctcatgacttcatgatctgaatccccccgagtcattcattctccatgaagtcatcgattttccaggtgttggtgaactgcctgtgactcctctcctccccsgcccctacccctcagggataatgagttcattgctgggctagatgttttagccatgattctgcctctgttttatacctgcacacatccttatctttgttac

SEQ ID NO: 492015 - DNA, 201 bp, Homo sapiens
gactcctctcctccccggcccctacccctcagggataatgagttcattgctgggctagatgttttagccatgattctgcctctgttttatacctgcacacrtccttatctttgttacatatgaaatatctgtatcacgggtatattgagagaaataaaggtgagagcattcacaaatgaagctgttacttaataatgggct

SEQ ID NO: 492016 - DNA, 201 bp, Homo sapiens
cctcccaaagtgctagaattacaggcatgagccatgtcaccccatgctgtgttttctcttaatctgtgttcttagaactataactgtaacataaattgcaygcaattggttgtaaatggaatcatttacttattttttaatgaatgatttgcaaatcaggtagtcttctgggccagtgtacgctcagactcccaatggaag

SEQ ID NO: 492017 - DNA, 201 bp, Homo sapiens
tgagggacctccggatcctggcggaggagccgatctacataagggtggagggcttcctggaggaggacaggagggcctatttcctgagacactttggagaygaggaccaagccatgcgtgcctttgagctaatgaggagcaacgcggccctgttccagctgggctcggcccccgcggtgtgctggatcgtgtgcacgactc

SEQ ID NO: 492018 - DNA, 201 bp, Homo sapiens
tcataggatcaccagtgcatgatagaaggtggggagttcacaagaaggggcttttggatgctggcacttgtggagctagccgggaaggttgaagttggacmtgtcaaccgtgttgccatttgtgattcttttgtaggttggaaaactgtcaccttacagaagccaattgcaaggaccttgctgctgtgttggttgtcagcc

SEQ ID NO: 492019 - DNA, 201 bp, Homo sapiens
ccgacaatgagcttctggatgagggtgctaagttgctgtacacaactttgagacaccccaagtgctttctgcagaggttgtcgtaagtctctcctctcttmcagagcagctgtgctttcgatctggggccacagacgagcaatggtcatgcctgacttggctgtatggaacctctcgctgatgtgaacacctgttcccatg

SEQ ID NO: 492020 - DNA, 201 bp, Homo sapiens
ctgctgctccagataattcaagtcggggtataacacaaccagtgagatgtaaaccaaagacgattccacggttagattctcaagaatgacttgttctgccrggcgcggtggctcacgcctgtcatcccagcactctgggaggccgaggtgggcagatcacctgagattgggagtttgagaccagcctgaccaacatggaga

SEQ ID NO: 492021 - DNA, 201 bp, Homo sapiens
gtggtgcatggtgcatgcctgcagtcccagctactcgggaggctgaggcaggagaatcacttgaacccaggaggcggaggttgctgtgagccgagattgcrccacctgggcaacaagagtgagactcagtctcaaaaaaaaaaaaaaaaatgacgtggtcctatttctcccacaggttggtgtcttgttccgctaccactc

SEQ ID NO: 492022 - DNA, 201 bp, Homo sapiens
ggagttcacaagaaggggcttttggatgctggcacttgtggagctagccgggaaggttgaagttggacatgtcaaccgtgttgccatttgtgattcttttstaggttggaaaactgtcaccttacagaagccaattgcaaggaccttgctgctgtgttggttgtcagccgggagctgacacacctgtgcttggccaagaac

SEQ ID NO: 492023 - DNA, 201 bp, Homo sapiens
tggtaagacctgggtagatgatggtaggaaaaaagtataagtagtagtagagtagtagtaatattctatagggatttggggaatgtagctggttttcgggtttttttttttcctctttatgtatgtatgtattttagagatgggatctcgccgtgttgcctaggctggtctcaaactcctgagctcaagagatctgcctgc

SEQ ID NO: 492024 - DNA, 201 bp, Homo sapiens
ttgtctctctactaaaaatacaaaaattagtcacgcatggtgggacatgcctgtaatcccagttactcaggaggctaaggcaggagaatcacttgaacttsggaggtggaggttgcagtgagctgagatggcaccactgaagtccagtctggccaatagagcaagactctctcaaaaaaaaaaaattataggacaaatctt

SEQ ID NO: 492025 - DNA, 201 bp, Homo sapiens
aaggcaggagaatcacttgaacttgggaggtggaggttgcagtgagctgagatggcaccactgaagtccagtctggccaatagagcaagactctctcaaamaaaaaaaattataggacaaatctttagaaaggaattggggcctggcatggtggctcatgcctgtaatctcagcactttaggaggcgggcagaacacctga

SEQ ID NO: 492026 - DNA, 201 bp, Homo sapiens
cacggaaaatcttgttcgtgattgacggctttgatgagctgggagccgcacctggggcgctgatcgaggacatctgcggggactgggagaagaagaagccrgtgcccgtcctcctggggagtttgctgaacagggtgatgttacccaaggccgccctgctggtcaccacgcggcccagggccctgagggacctccggatcc

SEQ ID NO: 492027 - DNA, 201 bp, Homo sapiens
atatattgaagacgaagttccgggagatgtggaagagctggcctggagatagcaaagaggtccaggttatggctgagagatacaagatgctgatcccattyagcaaccccagggtgcttcccgggcccttctcatacacggtggtgctgtatggtcctgcaggccttgggaaaaccacgctggcccagaaactaatgctag

SEQ ID NO: 492028 - DNA, 201 bp, Homo sapiens
gcctgtgggcgcagacgtccgtgcttcaccgagaggatctggaaaggctcggggtgcaggagtccgacctccgtctgttcctggacggagacatcctccgmcaggacagagtctccaaaggctgctactccttcatccacctcagcttccagcagtttctcactgccctgttctacaccctggagaaggaggaggaagagg

SEQ ID NO: 492029 - DNA, 201 bp, Homo sapiens
gttcctggacggagacatcctccgccaggacagagtctccaaaggctgctactccttcatccacctcagcttccagcagtttctcactgccctgttctacrccctggagaaggaggaggaagaggatagggacggccacacctgggacattggggacgtacagaagctgctttccggagtagaaagactcaggaaccccga

SEQ ID NO: 492030 - DNA, 201 bp, Homo sapiens
ctccgccaggacagagtctccaaaggctgctactccttcatccacctcagcttccagcagtttctcactgccctgttctacaccctggagaaggaggaggragaggatagggacggccacacctgggacattggggacgtacagaagctgctttccggagtagaaagactcaggaaccccgacctgatccaagcaggctac

SEQ ID NO: 492031 - DNA, 201 bp, Homo sapiens
tccgccaggacagagtctccaaaggctgctactccttcatccacctcagcttccagcagtttctcactgccctgttctacaccctggagaaggaggaggargaggatagggacggccacacctgggacattggggacgtacagaagctgctttccggagtagaaagactcaggaaccccgacctgatccaagcaggctact

SEQ ID NO: 492032 - DNA, 201 bp, Homo sapiens
aggacagagtctccaaaggctgctactccttcatccacctcagcttccagcagtttctcactgccctgttctacaccctggagaaggaggaggaagaggayagggacggccacacctgggacattggggacgtacagaagctgctttccggagtagaaagactcaggaaccccgacctgatccaagcaggctactactcct

SEQ ID NO: 492033 - DNA, 201 bp, Homo sapiens
gccacacctgggacattggggacgtacagaagctgctttccggagtagaaagactcaggaaccccgacctgatccaagcaggctactactcctttggcctygctaacgagaagagagccaaggagttggaggccacttttggctgccggatgtcaccggacatcaaacaggaattgctgcgatgcgacataagttgtaagg

SEQ ID NO: 492034 - DNA, 201 bp, Homo sapiens
ccacacctgggacattggggacgtacagaagctgctttccggagtagaaagactcaggaaccccgacctgatccaagcaggctactactcctttggcctcrctaacgagaagagagccaaggagttggaggccacttttggctgccggatgtcaccggacatcaaacaggaattgctgcgatgcgacataagttgtaaggg

SEQ ID NO: 492035 - DNA, 201 bp, Homo sapiens
aacacaaccagtgagatgtaaaccaaagacgattccacggttagattctcaagaatgacttgttctgccgggcgcggtggctcacgcctgtcatcccagcmctctgggaggccgaggtgggcagatcacctgagattgggagtttgagaccagcctgaccaacatggagagacccccacctctactgaaaatacaaaatta

SEQ ID NO: 492036 - DNA, 201 bp, Homo sapiens
tgggattacagctgtgaaccaccgcacctagcctgtgatcagtttcagatcagccttgcttactccacattccctcttatcttcctggtagcatttttgtyttttcttgagaaagagttttgcccttgtcgcccaggctagagtgcaatggtgtgatctcggctcgccacaacctccacctcccaggttcaagtgattctg

SEQ ID NO: 492037 - DNA, 201 bp, Homo sapiens
cctgagattgggagtttgagaccagcctgaccaacatggagagacccccacctctactgaaaatacaaaattagctgggcatggtggtgcatggtgcatgmctgcagtcccagctactcgggaggctgaggcaggagaatcacttgaacccaggaggcggaggttgctgtgagccgagattgcaccacctgggcaacaaga
